United States Patent Application Publication US 2020/0095579 A1 - sequence listing, part 5

SEQ ID NO: 48334 - DNA, 20 bp, Artificial Sequence
  Description of Artificial Sequence: Synthetic oligonucleotide
  Target: LAMA2; (+) strand; PAM type: NNNNGHTT; PAM sequence: AATTGTTT
tcatgttttaacaacctagc

SEQ ID NO: 48335 - DNA, 20 bp, Artificial Sequence
  Description of Artificial Sequence: Synthetic oligonucleotide
  Target: LAMA2; (+) strand; PAM type: NNNNGHTT; PAM sequence: ATCAGATT
ataccttctcaaacttgagt

SEQ ID NO: 48336 - DNA, 20 bp, Artificial Sequence
  Description of Artificial Sequence: Synthetic oligonucleotide
  Target: LAMA2; (+) strand; PAM type: NNNNGHTT; PAM sequence: TCTTGCTT
cacattgacttttgtgcagt

SEQ ID NO: 48337 - DNA, 20 bp, Artificial Sequence
  Description of Artificial Sequence: Synthetic oligonucleotide
  Target: LAMA2; (+) strand; PAM type: NNNNGHTT; PAM sequence: TAAGGTTT
aagtggaatatagcatgttc

SEQ ID NO: 48338 - DNA, 20 bp, Artificial Sequence
  Description of Artificial Sequence: Synthetic oligonucleotide
  Target: LAMA2; (+) strand; PAM type: NNNNGHTT; PAM sequence: AAATGTTT
agtattgctgtgtgtccttc

SEQ ID NO: 48339 - DNA, 20 bp, Artificial Sequence
  Description of Artificial Sequence: Synthetic oligonucleotide
  Target: LAMA2; (+) strand; PAM type: NNNNGHTT; PAM sequence: CACAGTTT
caccctggggcacctctaca

SEQ ID NO: 48340 - DNA, 20 bp, Artificial Sequence
  Description of Artificial Sequence: Synthetic oligonucleotide
  Target: LAMA2; (+) strand; PAM type: NNNNGHTT; PAM sequence: AGATGCTT
gaagtcagagagatgaattc

SEQ ID NO: 48341 - DNA, 20 bp, Artificial Sequence
  Description of Artificial Sequence: Synthetic oligonucleotide
  Target: LAMA2; (+) strand; PAM type: NNNNGHTT; PAM sequence: AATGGATT
ttgatgagaacctacttggt

SEQ ID NO: 48342 - DNA, 20 bp, Artificial Sequence
  Description of Artificial Sequence: Synthetic oligonucleotide
  Target: LAMA2; (+) strand; PAM type: NNNNGHTT; PAM sequence: AAGGGATT
gagtaaacgttaggatactg

SEQ ID NO: 48343 - DNA, 20 bp, Artificial Sequence
  Description of Artificial Sequence: Synthetic oligonucleotide
  Target: LAMA2; (+) strand; PAM type: NNNNGHTT; PAM sequence: CAAAGCTT
acgtatactcagaatattct

SEQ ID NO: 48344 - DNA, 20 bp, Artificial Sequence
  Description of Artificial Sequence: Synthetic oligonucleotide
  Target: LAMA2; (+) strand; PAM type: NNNNGHTT; PAM sequence: AAAAGCTT
caactggaaacaacaccagg

SEQ ID NO: 48345 - DNA, 20 bp, Artificial Sequence
  Description of Artificial Sequence: Synthetic oligonucleotide
  Target: LAMA2; (+) strand; PAM type: NNNNGHTT; PAM sequence: GCTTGATT
tggaaacaacaccaggaaaa

SEQ ID NO: 48346 - DNA, 20 bp, Artificial Sequence
  Description of Artificial Sequence: Synthetic oligonucleotide
  Target: LAMA2; (+) strand; PAM type: NNNNGHTT; PAM sequence: TACAGCTT
caccaggaaaagcttgattt

SEQ ID NO: 48347 - DNA, 20 bp, Artificial Sequence
  Description of Artificial Sequence: Synthetic oligonucleotide
  Target: LAMA2; (+) strand; PAM type: NNNNGHTT; PAM sequence: GAAAGATT
gcttgattttacagcttatg

SEQ ID NO: 48348 - DNA, 20 bp, Artificial Sequence
  Description of Artificial Sequence: Synthetic oligonucleotide
  Target: LAMA2; (+) strand; PAM type: NNNNGHTT; PAM sequence: AGTAGATT
cactttgggagacggaggtg

SEQ ID NO: 48349 - DNA, 20 bp, Artificial Sequence
  Description of Artificial Sequence: Synthetic oligonucleotide
  Target: LAMA2; (+) strand; PAM type: NNNNGHTT; PAM sequence: GATTGCTT
ttgggagacggaggtgagta

SEQ ID NO: 48350 - DNA, 20 bp, Artificial Sequence
  Description of Artificial Sequence: Synthetic oligonucleotide
  Target: LAMA2; (+) strand; PAM type: NNNNGHTT; PAM sequence: AACTGCTT
tcgggaggctgaggcacaag

SEQ ID NO: 48351 - DNA, 20 bp, Artificial Sequence
  Description of Artificial Sequence: Synthetic oligonucleotide
  Target: LAMA2; (+) strand; PAM type: NNNNGHTT; PAM sequence: CATTGATT
tttagggtaaatgaaaaaga

SEQ ID NO: 48352 - DNA, 20 bp, Artificial Sequence
  Description of Artificial Sequence: Synthetic oligonucleotide
  Target: LAMA2; (+) strand; PAM type: NNNNGHTT; PAM sequence: TGTGGCTT
atattgtgtaaatgggtaac

SEQ ID NO: 48353 - DNA, 20 bp, Artificial Sequence
  Description of Artificial Sequence: Synthetic oligonucleotide
  Target: LAMA2; (+) strand; PAM type: NNNNGHTT; PAM sequence: AATTGTTT
tctagtaacagtatcctgaa

SEQ ID NO: 48354 - DNA, 20 bp, Artificial Sequence
  Description of Artificial Sequence: Synthetic oligonucleotide
  Target: LAMA2; (+) strand; PAM type: NNNNGHTT; PAM sequence: CCGTGTTT
ctgaaaattgtttaaatggt

SEQ ID NO: 48355 - DNA, 20 bp, Artificial Sequence
  Description of Artificial Sequence: Synthetic oligonucleotide
  Target: LAMA2; (+) strand; PAM type: NNNNGHTT; PAM sequence: AACAGCTT
cacaacttaaatggaagtaa

SEQ ID NO: 48356 - DNA, 20 bp, Artificial Sequence
  Description of Artificial Sequence: Synthetic oligonucleotide
  Target: LAMA2; (+) strand; PAM type: NNNNGHTT; PAM sequence: AAGAGTTT
tgagtatcagagatacacaa

SEQ ID NO: 48357 - DNA, 20 bp, Artificial Sequence
  Description of Artificial Sequence: Synthetic oligonucleotide
  Target: LAMA2; (+) strand; PAM type: NNNNGHTT; PAM sequence: CAATGTTT
ttatgaaatatgagctaaaa

SEQ ID NO: 48358 - DNA, 20 bp, Artificial Sequence
  Description of Artificial Sequence: Synthetic oligonucleotide
  Target: LAMA2; (+) strand; PAM type: NNNNGHTT; PAM sequence: TCATGTTT
aattatttctattccttagt

SEQ ID NO: 48359 - DNA, 20 bp, Artificial Sequence
  Description of Artificial Sequence: Synthetic oligonucleotide
  Target: LAMA2; (+) strand; PAM type: NNNNGHTT; PAM sequence: TTTAGTTT
taattcctctctcatagtat

SEQ ID NO: 48360 - DNA, 20 bp, Artificial Sequence
  Description of Artificial Sequence: Synthetic oligonucleotide
  Target: LAMA2; (+) strand; PAM type: NNNNGHTT; PAM sequence: ATTAGATT
cctgtcagatcagcggtggt

SEQ ID NO: 48361 - DNA, 20 bp, Artificial Sequence
  Description of Artificial Sequence: Synthetic oligonucleotide
  Target: LAMA2; (+) strand; PAM type: NNNNGHTT; PAM sequence: AACAGTTT
tgcccgatgatctgatgtgg

SEQ ID NO: 48362 - DNA, 20 bp, Artificial Sequence
  Description of Artificial Sequence: Synthetic oligonucleotide
  Target: LAMA2; (+) strand; PAM type: NNNNGHTT; PAM sequence: GCAAGTTT
ccaaaaaggtggggagtgct

SEQ ID NO: 48363 - DNA, 20 bp, Artificial Sequence
  Description of Artificial Sequence: Synthetic oligonucleotide
  Target: LAMA2; (+) strand; PAM type: NNNNGHTT; PAM sequence: AACAGCTT
tctacttcatctatagtcgt

SEQ ID NO: 48364 - DNA, 20 bp, Artificial Sequence
  Description of Artificial Sequence: Synthetic oligonucleotide
  Target: LAMA2; (+) strand; PAM type: NNNNGHTT; PAM sequence: TGGTGATT
gtattttatttgagcatatg

SEQ ID NO: 48365 - DNA, 20 bp, Artificial Sequence
  Description of Artificial Sequence: Synthetic oligonucleotide
  Target: LAMA2; (+) strand; PAM type: NNNNGHTT; PAM sequence: AATAGATT
ttcaaattttaaataatcaa

SEQ ID NO: 48366 - DNA, 20 bp, Artificial Sequence
  Description of Artificial Sequence: Synthetic oligonucleotide
  Target: LAMA2; (+) strand; PAM type: NNNNGHTT; PAM sequence: CCTTGTTT
aaaattctaaatagttcagt

SEQ ID NO: 48367 - DNA, 20 bp, Artificial Sequence
  Description of Artificial Sequence: Synthetic oligonucleotide
  Target: LAMA2; (+) strand; PAM type: NNNNGHTT; PAM sequence: GAATGTTT
agcatgctgtgtgaaatttt

SEQ ID NO: 48368 - DNA, 20 bp, Artificial Sequence
  Description of Artificial Sequence: Synthetic oligonucleotide
  Target: LAMA2; (+) strand; PAM type: NNNNGHTT; PAM sequence: AGTGGATT
ttcgaataaggccatttctc

SEQ ID NO: 48369 - DNA, 20 bp, Artificial Sequence
  Description of Artificial Sequence: Synthetic oligonucleotide
  Target: LAMA2; (+) strand; PAM type: NNNNGHTT; PAM sequence: CAGAGTTT
tctcagtggattaggggaat

SEQ ID NO: 48370 - DNA, 20 bp, Artificial Sequence
  Description of Artificial Sequence: Synthetic oligonucleotide
  Target: LAMA2; (+) strand; PAM type: NNNNGHTT; PAM sequence: TCCTGTTT
tgcagagctgcaatttaaaa

SEQ ID NO: 48371 - DNA, 20 bp, Artificial Sequence
  Description of Artificial Sequence: Synthetic oligonucleotide
  Target: LAMA2; (+) strand; PAM type: NNNNGHTT; PAM sequence: ATCAGCTT
caagcagcagaatacagatc

SEQ ID NO: 48372 - DNA, 20 bp, Artificial Sequence
  Description of Artificial Sequence: Synthetic oligonucleotide
  Target: LAMA2; (+) strand; PAM type: NNNNGHTT; PAM sequence: CTTTGTTT
agcagaatacagatcatcag

SEQ ID NO: 48373 - DNA, 20 bp, Artificial Sequence
  Description of Artificial Sequence: Synthetic oligonucleotide
  Target: LAMA2; (+) strand; PAM type: NNNNGHTT; PAM sequence: AAAGGATT
gctggagtggaattttaaaa

SEQ ID NO: 48374 - DNA, 20 bp, Artificial Sequence
  Description of Artificial Sequence: Synthetic oligonucleotide
  Target: LAMA2; (+) strand; PAM type: NNNNGHTT; PAM sequence: CACAGCTT
tttgcattgaatctgtcact

SEQ ID NO: 48375 - DNA, 20 bp, Artificial Sequence
  Description of Artificial Sequence: Synthetic oligonucleotide
  Target: LAMA2; (+) strand; PAM type: NNNNGHTT; PAM sequence: TTTTGATT
tctgtcactcacagcttcaa

SEQ ID NO: 48376 - DNA, 20 bp, Artificial Sequence
  Description of Artificial Sequence: Synthetic oligonucleotide
  Target: LAMA2; (+) strand; PAM type: NNNNGHTT; PAM sequence: TCTTGCTT
gattcctgtcctataaatga

SEQ ID NO: 48377 - DNA, 20 bp, Artificial Sequence
  Description of Artificial Sequence: Synthetic oligonucleotide
  Target: LAMA2; (+) strand; PAM type: NNNNGHTT; PAM sequence: TGGGGCTT
aacctcaagtgtacattgca

SEQ ID NO: 48378 - DNA, 20 bp, Artificial Sequence
  Description of Artificial Sequence: Synthetic oligonucleotide
  Target: LAMA2; (+) strand; PAM type: NNNNGHTT; PAM sequence: AGAAGTTT
ggcatgtatattagaaagaa

SEQ ID NO: 48379 - DNA, 20 bp, Artificial Sequence
  Description of Artificial Sequence: Synthetic oligonucleotide
  Target: LAMA2; (+) strand; PAM type: NNNNGHTT; PAM sequence: GTTTGCTT
tgtatattagaaagaaagaa

SEQ ID NO: 48380 - DNA, 20 bp, Artificial Sequence
  Description of Artificial Sequence: Synthetic oligonucleotide
  Target: LAMA2; (+) strand; PAM type: NNNNGHTT; PAM sequence: GCCTGTTT
gaggaaagtataccttcttt

SEQ ID NO: 48381 - DNA, 20 bp, Artificial Sequence
  Description of Artificial Sequence: Synthetic oligonucleotide
  Target: LAMA2; (+) strand; PAM type: NNNNGHTT; PAM sequence: TTTTGTTT
aagtataccttctttgcctg

SEQ ID NO: 48382 - DNA, 20 bp, Artificial Sequence
  Description of Artificial Sequence: Synthetic oligonucleotide
  Target: LAMA2; (+) strand; PAM type: NNNNGHTT; PAM sequence: TTTTGTTT
aataaaatttgctgctaacc

SEQ ID NO: 48383 - DNA, 20 bp, Artificial Sequence
  Description of Artificial Sequence: Synthetic oligonucleotide
  Target: LAMA2; (+) strand; PAM type: NNNNGHTT; PAM sequence: CTCAGCTT
ttctttgaccaataacattt

SEQ ID NO: 48384 - DNA, 20 bp, Artificial Sequence
  Description of Artificial Sequence: Synthetic oligonucleotide
  Target: LAMA2; (+) strand; PAM type: NNNNGHTT; PAM sequence: CTCTGTTT
caattttgacaaagatcgtt

SEQ ID NO: 48385 - DNA, 20 bp, Artificial Sequence
  Description of Artificial Sequence: Synthetic oligonucleotide
  Target: LAMA2; (+) strand; PAM type: NNNNGHTT; PAM sequence: TTGGGATT
tgacaaagatcgttctctgt

SEQ ID NO: 48386 - DNA, 20 bp, Artificial Sequence
  Description of Artificial Sequence: Synthetic oligonucleotide
  Target: LAMA2; (+) strand; PAM type: NNNNGHTT; PAM sequence: TGCTGTTT
aagatgatgacaggaggatc

SEQ ID NO: 48387 - DNA, 20 bp, Artificial Sequence
  Description of Artificial Sequence: Synthetic oligonucleotide
  Target: LAMA2; (+) strand; PAM type: NNNNGHTT; PAM sequence: TTTGGCTT
gatgacaggaggatctgctg

SEQ ID NO: 48388 - DNA, 20 bp, Artificial Sequence
  Description of Artificial Sequence: Synthetic oligonucleotide
  Target: LAMA2; (+) strand; PAM type: NNNNGHTT; PAM sequence: TTATGTTT
ggggaaaataatacatatat

SEQ ID NO: 48389 - DNA, 20 bp, Artificial Sequence
  Description of Artificial Sequence: Synthetic oligonucleotide
  Target: LAMA2; (+) strand; PAM type: NNNNGHTT; PAM sequence: TCAGGCTT
tacatatatttatgtttatg

SEQ ID NO: 48390 - DNA, 20 bp, Artificial Sequence
  Description of Artificial Sequence: Synthetic oligonucleotide
  Target: LAMA2; (+) strand; PAM type: NNNNGHTT; PAM sequence: CAGTGATT
atcattcccactccgtactc

SEQ ID NO: 48391 - DNA, 20 bp, Artificial Sequence
  Description of Artificial Sequence: Synthetic oligonucleotide
  Target: LAMA2; (+) strand; PAM type: NNNNGHTT; PAM sequence: ATATGATT
cgtatacaacagtaagtaaa

SEQ ID NO: 48392 - DNA, 20 bp, Artificial Sequence
  Description of Artificial Sequence: Synthetic oligonucleotide
  Target: LAMA2; (+) strand; PAM type: NNNNGHTT; PAM sequence: TAATGATT
atagcccatctcctatcccg

SEQ ID NO: 48393 - DNA, 20 bp, Artificial Sequence
  Description of Artificial Sequence: Synthetic oligonucleotide
  Target: LAMA2; (+) strand; PAM type: NNNNGHTT; PAM sequence: TCCAGCTT
agaagatacagaacgtgttc

SEQ ID NO: 48394 - DNA, 20 bp, Artificial Sequence
  Description of Artificial Sequence: Synthetic oligonucleotide
  Target: LAMA2; (+) strand; PAM type: NNNNGHTT; PAM sequence: TTATGATT
tacagaacgtgttctccagc

SEQ ID NO: 48395 - DNA, 20 bp, Artificial Sequence
  Description of Artificial Sequence: Synthetic oligonucleotide
  Target: LAMA2; (+) strand; PAM type: NNNNGHTT; PAM sequence: CCTGGTTT
agtactgtattttttacctg

SEQ ID NO: 48396 - DNA, 20 bp, Artificial Sequence
  Description of Artificial Sequence: Synthetic oligonucleotide
  Target: LAMA2; (+) strand; PAM type: NNNNGHTT; PAM sequence: AGGAGATT
actaaaaaaaaatatacctt

SEQ ID NO: 48397 - DNA, 20 bp, Artificial Sequence
  Description of Artificial Sequence: Synthetic oligonucleotide
  Target: LAMA2; (+) strand; PAM type: NNNNGHTT; PAM sequence: TTTTGTTT
aggagatttttgtgccactc

SEQ ID NO: 48398 - DNA, 20 bp, Artificial Sequence
  Description of Artificial Sequence: Synthetic oligonucleotide
  Target: LAMA2; (+) strand; PAM type: NNNNGHTT; PAM sequence: AGAAGATT
tttcactctgagacatatct

SEQ ID NO: 48399 - DNA, 20 bp, Artificial Sequence
  Description of Artificial Sequence: Synthetic oligonucleotide
  Target: LAMA2; (+) strand; PAM type: NNNNGHTT; PAM sequence: TTGGGTTT
tagaagattgagtatatttg

SEQ ID NO: 48400 - DNA, 20 bp, Artificial Sequence
  Description of Artificial Sequence: Synthetic oligonucleotide
  Target: LAMA2; (+) strand; PAM type: NNNNGHTT; PAM sequence: AAGTGTTT
ccaaaatttaaatattatga

SEQ ID NO: 48401 - DNA, 20 bp, Artificial Sequence
  Description of Artificial Sequence: Synthetic oligonucleotide
  Target: LAMA2; (+) strand; PAM type: NNNNGHTT; PAM sequence: TTGTGTTT
gtacatgctaatttacatgg

SEQ ID NO: 48402 - DNA, 20 bp, Artificial Sequence
  Description of Artificial Sequence: Synthetic oligonucleotide
  Target: LAMA2; (+) strand; PAM type: NNNNGHTT; PAM sequence: TCCTGTTT
aatttacatggttgtgtttt

SEQ ID NO: 48403 - DNA, 20 bp, Artificial Sequence
  Description of Artificial Sequence: Synthetic oligonucleotide
  Target: LAMA2; (+) strand; PAM type: NNNNGHTT; PAM sequence: TCTTGCTT
gttgtgtttttcctgttttc

SEQ ID NO: 48404 - DNA, 20 bp, Artificial Sequence
  Description of Artificial Sequence: Synthetic oligonucleotide
  Target: LAMA2; (+) strand; PAM type: NNNNGHTT; PAM sequence: GATAGATT
cctgttttctcttgcttcca

SEQ ID NO: 48405 - DNA, 20 bp, Artificial Sequence
  Description of Artificial Sequence: Synthetic oligonucleotide
  Target: LAMA2; (+) strand; PAM type: NNNNGHTT; PAM sequence: CCTTGTTT
atagattttattgtctactc

SEQ ID NO: 48406 - DNA, 20 bp, Artificial Sequence
  Description of Artificial Sequence: Synthetic oligonucleotide
  Target: LAMA2; (+) strand; PAM type: NNNNGHTT; PAM sequence: ACTTGTTT
aaaataaaatgaaacaggaa

SEQ ID NO: 48407 - DNA, 20 bp, Artificial Sequence
  Description of Artificial Sequence: Synthetic oligonucleotide
  Target: LAMA2; (+) strand; PAM type: NNNNGHTT; PAM sequence: TCCTGTTT
gttaaatcttgacttcagaa

SEQ ID NO: 48408 - DNA, 20 bp, Artificial Sequence
  Description of Artificial Sequence: Synthetic oligonucleotide
  Target: LAMA2; (+) strand; PAM type: NNNNGHTT; PAM sequence: AACTGCTT
ggtaagaaaggtacaggaga

SEQ ID NO: 48409 - DNA, 20 bp, Artificial Sequence
  Description of Artificial Sequence: Synthetic oligonucleotide
  Target: LAMA2; (+) strand; PAM type: NNNNGHTT; PAM sequence: TCAAGATT
aggtacaggagaaactgctt

SEQ ID NO: 48410 - DNA, 20 bp, Artificial Sequence
  Description of Artificial Sequence: Synthetic oligonucleotide
  Target: LAMA2; (+) strand; PAM type: NNNNGHTT; PAM sequence: TGAAGTTT
acttcaaaatgctcaaagcc

SEQ ID NO: 48411 - DNA, 20 bp, Artificial Sequence
  Description of Artificial Sequence: Synthetic oligonucleotide
  Target: LAMA2; (+) strand; PAM type: NNNNGHTT; PAM sequence: TGTTGTTT
gttaatttagcaccaggctc

SEQ ID NO: 48412 - DNA, 20 bp, Artificial Sequence
  Description of Artificial Sequence: Synthetic oligonucleotide
  Target: LAMA2; (+) strand; PAM type: NNNNGHTT; PAM sequence: GAAGGATT
atgtgaatgaactaagacaa

SEQ ID NO: 48413 - DNA, 20 bp, Artificial Sequence
  Description of Artificial Sequence: Synthetic oligonucleotide
  Target: LAMA2; (+) strand; PAM type: NNNNGHTT; PAM sequence: TGTTGTTT
aattagactgcagtcttttt

SEQ ID NO: 48414 - DNA, 20 bp, Artificial Sequence
  Description of Artificial Sequence: Synthetic oligonucleotide
  Target: LAMA2; (+) strand; PAM type: NNNNGHTT; PAM sequence: GTTTGTTT
agactgcagtcttttttgtt

SEQ ID NO: 48415 - DNA, 20 bp, Artificial Sequence
  Description of Artificial Sequence: Synthetic oligonucleotide
  Target: LAMA2; (+) strand; PAM type: NNNNGHTT; PAM sequence: AATAGCTT
gtagtaagttcctttaaaat

SEQ ID NO: 48416 - DNA, 20 bp, Artificial Sequence
  Description of Artificial Sequence: Synthetic oligonucleotide
  Target: LAMA2; (+) strand; PAM type: NNNNGHTT; PAM sequence: TTCAGTTT
cctttaaaataatagcttaa

SEQ ID NO: 48417 - DNA, 20 bp, Artificial Sequence
  Description of Artificial Sequence: Synthetic oligonucleotide
  Target: LAMA2; (+) strand; PAM type: NNNNGHTT; PAM sequence: TTAAGTTT
aataatagcttaattcagtt

SEQ ID NO: 48418 - DNA, 20 bp, Artificial Sequence
  Description of Artificial Sequence: Synthetic oligonucleotide
  Target: LAMA2; (+) strand; PAM type: NNNNGHTT; PAM sequence: TACAGTTT
ctacacaacccacatccatc

SEQ ID NO: 48419 - DNA, 20 bp, Artificial Sequence
  Description of Artificial Sequence: Synthetic oligonucleotide
  Target: LAMA2; (+) strand; PAM type: NNNNGHTT; PAM sequence: AGGTGTTT
cgtgcacttttttcaattca

SEQ ID NO: 48420 - DNA, 20 bp, Artificial Sequence
  Description of Artificial Sequence: Synthetic oligonucleotide
  Target: LAMA2; (+) strand; PAM type: NNNNGHTT; PAM sequence: ATATGTTT
caaggtgtttgtaatcacat

SEQ ID NO: 48421 - DNA, 20 bp, Artificial Sequence
  Description of Artificial Sequence: Synthetic oligonucleotide
  Target: LAMA2; (+) strand; PAM type: NNNNGHTT; PAM sequence: ATATGCTT
gtcatgccaaaccaagaagc

SEQ ID NO: 48422 - DNA, 20 bp, Artificial Sequence
  Description of Artificial Sequence: Synthetic oligonucleotide
  Target: LAMA2; (+) strand; PAM type: NNNNGHTT; PAM sequence: AGGAGTTT
caggtggatcacctgatgtc

SEQ ID NO: 48423 - DNA, 20 bp, Artificial Sequence
  Description of Artificial Sequence: Synthetic oligonucleotide
  Target: LAMA2; (+) strand; PAM type: NNNNGHTT; PAM sequence: CCAGGCTT
ctacaaatgcaaaaaattag

SEQ ID NO: 48424 - DNA, 20 bp, Artificial Sequence
  Description of Artificial Sequence: Synthetic oligonucleotide
  Target: LAMA2; (+) strand; PAM type: NNNNGHTT; PAM sequence: AATCGCTT
tatggaggctgaggcatgag

SEQ ID NO: 48425 - DNA, 20 bp, Artificial Sequence
  Description of Artificial Sequence: Synthetic oligonucleotide
  Target: LAMA2; (+) strand; PAM type: NNNNGHTT; PAM sequence: ATATGTTT
ggtggaggatacaaatatag

SEQ ID NO: 48426 - DNA, 20 bp, Artificial Sequence
  Description of Artificial Sequence: Synthetic oligonucleotide
  Target: LAMA2; (+) strand; PAM type: NNNNGHTT; PAM sequence: TTCAGTTT
tgacacttttgtaccctctt

SEQ ID NO: 48427 - DNA, 20 bp, Artificial Sequence
  Description of Artificial Sequence: Synthetic oligonucleotide
  Target: LAMA2; (+) strand; PAM type: NNNNGHTT; PAM sequence: CAGTGCTT
ccgtagaaaggaatttatga

SEQ ID NO: 48428 - DNA, 20 bp, Artificial Sequence
  Description of Artificial Sequence: Synthetic oligonucleotide
  Target: LAMA2; (+) strand; PAM type: NNNNGHTT; PAM sequence: TACAGCTT
gagtcctcctacaaatcaca

SEQ ID NO: 48429 - DNA, 20 bp, Artificial Sequence
  Description of Artificial Sequence: Synthetic oligonucleotide
  Target: LAMA2; (+) strand; PAM type: NNNNGHTT; PAM sequence: CTAGGATT
gagtgaattttttaaggcac

SEQ ID NO: 48430 - DNA, 20 bp, Artificial Sequence
  Description of Artificial Sequence: Synthetic oligonucleotide
  Target: LAMA2; (+) strand; PAM type: NNNNGHTT; PAM sequence: CCTAGTTT
agagcagataagaacggagc

SEQ ID NO: 48431 - DNA, 20 bp, Artificial Sequence
  Description of Artificial Sequence: Synthetic oligonucleotide
  Target: LAMA2; (+) strand; PAM type: NNNNGHTT; PAM sequence: GAAAGATT
gaacggagccctagttttct

SEQ ID NO: 48432 - DNA, 20 bp, Artificial Sequence
  Description of Artificial Sequence: Synthetic oligonucleotide
  Target: LAMA2; (+) strand; PAM type: NNNNGHTT; PAM sequence: TACAGTTT
agatttttctcttaaacctt

SEQ ID NO: 48433 - DNA, 20 bp, Artificial Sequence
  Description of Artificial Sequence: Synthetic oligonucleotide
  Target: LAMA2; (+) strand; PAM type: NNNNGHTT; PAM sequence: CTCGGTTT
aatatgcagaataaatttgt

SEQ ID NO: 48434 - DNA, 20 bp, Artificial Sequence
  Description of Artificial Sequence: Synthetic oligonucleotide
  Target: LAMA2; (+) strand; PAM type: NNNNGHTT; PAM sequence: TGATGATT
gtctcggtttttattattat

SEQ ID NO: 48435 - DNA, 20 bp, Artificial Sequence
  Description of Artificial Sequence: Synthetic oligonucleotide
  Target: LAMA2; (+) strand; PAM type: NNNNGHTT; PAM sequence: TAACGATT
ttgtcagaacatgtgatcaa

SEQ ID NO: 48436 - DNA, 20 bp, Artificial Sequence
  Description of Artificial Sequence: Synthetic oligonucleotide
  Target: LAMA2; (+) strand; PAM type: NNNNGHTT; PAM sequence: AGTGGTTT
cagggcacccctatttggaa

SEQ ID NO: 48437 - DNA, 20 bp, Artificial Sequence
  Description of Artificial Sequence: Synthetic oligonucleotide
  Target: LAMA2; (+) strand; PAM type: NNNNGHTT; PAM sequence: ACTAGTTT
tttccttccagtagttgtta

SEQ ID NO: 48438 - DNA, 20 bp, Artificial Sequence
  Description of Artificial Sequence: Synthetic oligonucleotide
  Target: LAMA2; (+) strand; PAM type: NNNNGHTT; PAM sequence: TCTGGCTT
ccagtagttgttaactagtt

SEQ ID NO: 48439 - DNA, 20 bp, Artificial Sequence
  Description of Artificial Sequence: Synthetic oligonucleotide
  Target: LAMA2; (+) strand; PAM type: NNNNGHTT; PAM sequence: TATAGATT
tagtttctggcttaatagta

SEQ ID NO: 48440 - DNA, 20 bp, Artificial Sequence
  Description of Artificial Sequence: Synthetic oligonucleotide
  Target: LAMA2; (+) strand; PAM type: NNNNGHTT; PAM sequence: ATAAGCTT
ccaaactgaatagaaattca

SEQ ID NO: 48441 - DNA, 20 bp, Artificial Sequence
  Description of Artificial Sequence: Synthetic oligonucleotide
  Target: LAMA2; (+) strand; PAM type: NNNNGHTT; PAM sequence: TATTGCTT
aatagaaattcaataagctt

SEQ ID NO: 48442 - DNA, 20 bp, Artificial Sequence
  Description of Artificial Sequence: Synthetic oligonucleotide
  Target: LAMA2; (+) strand; PAM type: NNNNGHTT; PAM sequence: AAGTGATT
ttttatgtgtgacctttggc

SEQ ID NO: 48443 - DNA, 20 bp, Artificial Sequence
  Description of Artificial Sequence: Synthetic oligonucleotide
  Target: LAMA2; (+) strand; PAM type: NNNNGHTT; PAM sequence: GAACGTTT
gcaagtgattaagccttgag

SEQ ID NO: 48444 - DNA, 20 bp, Artificial Sequence
  Description of Artificial Sequence: Synthetic oligonucleotide
  Target: LAMA2; (+) strand; PAM type: NNNNGHTT; PAM sequence: TTCAGTTT
tactcatcacctagaacact

SEQ ID NO: 48445 - DNA, 20 bp, Artificial Sequence
  Description of Artificial Sequence: Synthetic oligonucleotide
  Target: LAMA2; (+) strand; PAM type: NNNNGHTT; PAM sequence: GTCTGATT
cttgaaccaaatatgctcgg

SEQ ID NO: 48446 - DNA, 20 bp, Artificial Sequence
  Description of Artificial Sequence: Synthetic oligonucleotide
  Target: LAMA2; (+) strand; PAM type: NNNNGHTT; PAM sequence: GGCGGCTT
ggtctgattaactgctgtaa

SEQ ID NO: 48447 - DNA, 20 bp, Artificial Sequence
  Description of Artificial Sequence: Synthetic oligonucleotide
  Target: LAMA2; (+) strand; PAM type: NNNNGHTT; PAM sequence: CTTTGTTT
gattaactgctgtaaggcgg

SEQ ID NO: 48448 - DNA, 20 bp, Artificial Sequence
  Description of Artificial Sequence: Synthetic oligonucleotide
  Target: LAMA2; (+) strand; PAM type: NNNNGHTT; PAM sequence: TTACGCTT
actgtgtctgaatgagctct

SEQ ID NO: 48449 - DNA, 20 bp, Artificial Sequence
  Description of Artificial Sequence: Synthetic oligonucleotide
  Target: LAMA2; (+) strand; PAM type: NNNNGHTT; PAM sequence: TCTCGTTT
ctgaatgagctctttacgct

SEQ ID NO: 48450 - DNA, 20 bp, Artificial Sequence
  Description of Artificial Sequence: Synthetic oligonucleotide
  Target: LAMA2; (+) strand; PAM type: NNNNGHTT; PAM sequence: TGGAGTTT
gaaagcaatgtctccaatat

SEQ ID NO: 48451 - DNA, 20 bp, Artificial Sequence
  Description of Artificial Sequence: Synthetic oligonucleotide
  Target: LAMA2; (+) strand; PAM type: NNNNGHTT; PAM sequence: CCTAGTTT
ctcatcatttccctgtgctg

SEQ ID NO: 48452 - DNA, 20 bp, Artificial Sequence
  Description of Artificial Sequence: Synthetic oligonucleotide
  Target: LAMA2; (+) strand; PAM type: NNNNGHTT; PAM sequence: TTATGTTT
aagcagcacttaggaattaa

SEQ ID NO: 48453 - DNA, 20 bp, Artificial Sequence
  Description of Artificial Sequence: Synthetic oligonucleotide
  Target: LAMA2; (+) strand; PAM type: NNNNGHTT; PAM sequence: TGATGTTT
ttagcaaatagaggttgtca

SEQ ID NO: 48454 - DNA, 20 bp, Artificial Sequence
  Description of Artificial Sequence: Synthetic oligonucleotide
  Target: LAMA2; (+) strand; PAM type: NNNNGHTT; PAM sequence: TCCAGCTT
cagtacaaagaaatgagtcc

SEQ ID NO: 48455 - DNA, 20 bp, Artificial Sequence
  Description of Artificial Sequence: Synthetic oligonucleotide
  Target: LAMA2; (+) strand; PAM type: NNNNGHTT; PAM sequence: GGGGGCTT
attgacaaaaaaagtgtctg

SEQ ID NO: 48456 - DNA, 20 bp, Artificial Sequence
  Description of Artificial Sequence: Synthetic oligonucleotide
  Target: LAMA2; (+) strand; PAM type: NNNNGHTT; PAM sequence: CATTGCTT
ggcttatatatttttgtcag

SEQ ID NO: 48457 - DNA, 20 bp, Artificial Sequence
  Description of Artificial Sequence: Synthetic oligonucleotide
  Target: LAMA2; (+) strand; PAM type: NNNNGHTT; PAM sequence: CCCTGATT
gttaatacaaagacatttcc

SEQ ID NO: 48458 - DNA, 20 bp, Artificial Sequence
  Description of Artificial Sequence: Synthetic oligonucleotide
  Target: LAMA2; (+) strand; PAM type: NNNNGHTT; PAM sequence: GACAGTTT
tttccccctgatttatgttg

SEQ ID NO: 48459 - DNA, 20 bp, Artificial Sequence
  Description of Artificial Sequence: Synthetic oligonucleotide
  Target: LAMA2; (+) strand; PAM type: NNNNGHTT; PAM sequence: ACTGGTTT
tgtctacccgtcttaaaatc

SEQ ID NO: 48460 - DNA, 20 bp, Artificial Sequence
  Description of Artificial Sequence: Synthetic oligonucleotide
  Target: LAMA2; (+) strand; PAM type: NNNNGHTT; PAM sequence: TGAGGTTT
tggtttcatttgcagtcttc

SEQ ID NO: 48461 - DNA, 20 bp, Artificial Sequence
  Description of Artificial Sequence: Synthetic oligonucleotide
  Target: LAMA2; (+) strand; PAM type: NNNNGHTT; PAM sequence: GTAAGCTT
catgaatctggagtcagtca

SEQ ID NO: 48462 - DNA, 20 bp, Artificial Sequence
  Description of Artificial Sequence: Synthetic oligonucleotide
  Target: LAMA2; (+) strand; PAM type: NNNNGHTT; PAM sequence: AGTAGATT
tattttatctttgatctact

SEQ ID NO: 48463 - DNA, 20 bp, Artificial Sequence
  Description of Artificial Sequence: Synthetic oligonucleotide
  Target: LAMA2; (+) strand; PAM type: NNNNGHTT; PAM sequence: AATTGATT
tatttgtaaaacatcacttg

SEQ ID NO: 48464 - DNA, 20 bp, Artificial Sequence
  Description of Artificial Sequence: Synthetic oligonucleotide
  Target: LAMA2; (+) strand; PAM type: NNNNGHTT; PAM sequence: GTAGGCTT
atttcaacttgtcttgcaca

SEQ ID NO: 48465 - DNA, 20 bp, Artificial Sequence
  Description of Artificial Sequence: Synthetic oligonucleotide
  Target: LAMA2; (+) strand; PAM type: NNNNGHTT; PAM sequence: TACTGTTT
agtaggctttcgacttggta

SEQ ID NO: 48466 - DNA, 20 bp, Artificial Sequence
  Description of Artificial Sequence: Synthetic oligonucleotide
  Target: LAMA2; (+) strand; PAM type: NNNNGHTT; PAM sequence: AGTGGATT
tcatattcagacttatttac

SEQ ID NO: 48467 - DNA, 20 bp, Artificial Sequence
  Description of Artificial Sequence: Synthetic oligonucleotide
  Target: LAMA2; (+) strand; PAM type: NNNNGHTT; PAM sequence: ATGGGCTT
catggcagttctttcagcaa

SEQ ID NO: 48468 - DNA, 20 bp, Artificial Sequence
  Description of Artificial Sequence: Synthetic oligonucleotide
  Target: LAMA2; (+) strand; PAM type: NNNNGHTT; PAM sequence: ATATGATT
ttaggttcctccagttagtt

SEQ ID NO: 48469 - DNA, 20 bp, Artificial Sequence
  Description of Artificial Sequence: Synthetic oligonucleotide
  Target: LAMA2; (+) strand; PAM type: NNNNGHTT; PAM sequence: TTTTGTTT
tgcgggtcaagaattttgac

SEQ ID NO: 48470 - DNA, 20 bp, Artificial Sequence
  Description of Artificial Sequence: Synthetic oligonucleotide
  Target: LAMA2; (+) strand; PAM type: NNNNGHTT; PAM sequence: TATGGCTT
ttaatagttgtaaacataag

SEQ ID NO: 48471 - DNA, 20 bp, Artificial Sequence
  Description of Artificial Sequence: Synthetic oligonucleotide
  Target: LAMA2; (+) strand; PAM type: NNNNGHTT; PAM sequence: GCCAGCTT
aggaggaggacaattgctct

SEQ ID NO: 48472 - DNA, 20 bp, Artificial Sequence
  Description of Artificial Sequence: Synthetic oligonucleotide
  Target: LAMA2; (+) strand; PAM type: NNNNGHTT; PAM sequence: CTTGGATT
cacctttaaattatccaaga

SEQ ID NO: 48473 - DNA, 20 bp, Artificial Sequence
  Description of Artificial Sequence: Synthetic oligonucleotide
  Target: LAMA2; (+) strand; PAM type: NNNNGHTT; PAM sequence: AAAGGCTT
tccttggtctttaaatcaag

SEQ ID NO: 48474 - DNA, 20 bp, Artificial Sequence
  Description of Artificial Sequence: Synthetic oligonucleotide
  Target: LAMA2; (+) strand; PAM type: NNNNGHTT; PAM sequence: CTTGGTTT
agggtagatgtgtcacatga

SEQ ID NO: 48475 - DNA, 20 bp, Artificial Sequence
  Description of Artificial Sequence: Synthetic oligonucleotide
  Target: LAMA2; (+) strand; PAM type: NNNNGHTT; PAM sequence: TGCAGCTT
atttccaatgtgagactctc

SEQ ID NO: 48476 - DNA, 20 bp, Artificial Sequence
  Description of Artificial Sequence: Synthetic oligonucleotide
  Target: LAMA2; (+) strand; PAM type: NNNNGHTT; PAM sequence: AGAAGATT
ctgcagcttactcagcaatc

SEQ ID NO: 48477 - DNA, 20 bp, Artificial Sequence
  Description of Artificial Sequence: Synthetic oligonucleotide
  Target: LAMA2; (+) strand; PAM type: NNNNGHTT; PAM sequence: TACTGATT
aaaaaaaaaaaagcctggaa

SEQ ID NO: 48478 - DNA, 20 bp, Artificial Sequence
  Description of Artificial Sequence: Synthetic oligonucleotide
  Target: LAMA2; (+) strand; PAM type: NNNNGHTT; PAM sequence: AGAGGATT
taacagtcacccaggcctgt

SEQ ID NO: 48479 - DNA, 20 bp, Artificial Sequence
  Description of Artificial Sequence: Synthetic oligonucleotide
  Target: LAMA2; (+) strand; PAM type: NNNNGHTT; PAM sequence: CTTTGTTT
aggattttacatgagtaagc

SEQ ID NO: 48480 - DNA, 20 bp, Artificial Sequence
  Description of Artificial Sequence: Synthetic oligonucleotide
  Target: LAMA2; (+) strand; PAM type: NNNNGHTT; PAM sequence: TTGAGATT
ctttgttttctgttaagcca

SEQ ID NO: 48481 - DNA, 20 bp, Artificial Sequence
  Description of Artificial Sequence: Synthetic oligonucleotide
  Target: LAMA2; (+) strand; PAM type: NNNNGHTT; PAM sequence: TATTGCTT
atcacgatataactcatgag

SEQ ID NO: 48482 - DNA, 20 bp, Artificial Sequence
  Description of Artificial Sequence: Synthetic oligonucleotide
  Target: LAMA2; (+) strand; PAM type: NNNNGHTT; PAM sequence: TGCGGTTT
acaacttttagtgtaaattt

SEQ ID NO: 48483 - DNA, 20 bp, Artificial Sequence
  Description of Artificial Sequence: Synthetic oligonucleotide
  Target: LAMA2; (+) strand; PAM type: NNNNGHTT; PAM sequence: AAAAGATT
attttgcggtttgggatcaa

SEQ ID NO: 48484 - DNA, 20 bp, Artificial Sequence
  Description of Artificial Sequence: Synthetic oligonucleotide
  Target: LAMA2; (+) strand; PAM type: NNNNGHTT; PAM sequence: TAATGATT
atacctctgccttctgaagt

SEQ ID NO: 48485 - DNA, 20 bp, Artificial Sequence
  Description of Artificial Sequence: Synthetic oligonucleotide
  Target: LAMA2; (+) strand; PAM type: NNNNGHTT; PAM sequence: AAAAGATT
actgataacactaggactta

SEQ ID NO: 48486 - DNA, 20 bp, Artificial Sequence
  Description of Artificial Sequence: Synthetic oligonucleotide
  Target: LAMA2; (+) strand; PAM type: NNNNGHTT; PAM sequence: CTACGTTT
ggtgcagccaacattttacc

SEQ ID NO: 48487 - DNA, 20 bp, Artificial Sequence
  Description of Artificial Sequence: Synthetic oligonucleotide
  Target: LAMA2; (+) strand; PAM type: NNNNGHTT; PAM sequence: GTTGGATT
cccaatgctattccataagt

SEQ ID NO: 48488 - DNA, 20 bp, Artificial Sequence
  Description of Artificial Sequence: Synthetic oligonucleotide
  Target: LAMA2; (+) strand; PAM type: NNNNGHTT; PAM sequence: CCATGATT
aaatatttactgagcacctt

SEQ ID NO: 48489 - DNA, 20 bp, Artificial Sequence
  Description of Artificial Sequence: Synthetic oligonucleotide
  Target: LAMA2; (+) strand; PAM type: NNNNGHTT; PAM sequence: TTTGGTTT
tgcagggtaacaaggagatc

SEQ ID NO: 48490 - DNA, 20 bp, Artificial Sequence
  Description of Artificial Sequence: Synthetic oligonucleotide
  Target: LAMA2; (+) strand; PAM type: NNNNGHTT; PAM sequence: TCATGCTT
ggagatctttggttttggag

SEQ ID NO: 48491 - DNA, 20 bp, Artificial Sequence
  Description of Artificial Sequence: Synthetic oligonucleotide
  Target: LAMA2; (+) strand; PAM type: NNNNGHTT; PAM sequence: TTGGGTTT
ctttggttttggagtcatgc

SEQ ID NO: 48492 - DNA, 20 bp, Artificial Sequence
  Description of Artificial Sequence: Synthetic oligonucleotide
  Target: LAMA2; (+) strand; PAM type: NNNNGHTT; PAM sequence: CTCAGATT
ggctctttactcctctgagc

SEQ ID NO: 48493 - DNA, 20 bp, Artificial Sequence
  Description of Artificial Sequence: Synthetic oligonucleotide
  Target: LAMA2; (+) strand; PAM type: NNNNGHTT; PAM sequence: CATTGTTT
tgaatagacatgggttgtta

SEQ ID NO: 48494 - DNA, 20 bp, Artificial Sequence
  Description of Artificial Sequence: Synthetic oligonucleotide
  Target: LAMA2; (+) strand; PAM type: NNNNGHTT; PAM sequence: ATCAGTTT
taataaatagctgcaaaagt

SEQ ID NO: 48495 - DNA, 20 bp, Artificial Sequence
  Description of Artificial Sequence: Synthetic oligonucleotide
  Target: LAMA2; (+) strand; PAM type: NNNNGHTT; PAM sequence: GTGGGATT
agttactgctcttactcgat

SEQ ID NO: 48496 - DNA, 20 bp, Artificial Sequence
  Description of Artificial Sequence: Synthetic oligonucleotide
  Target: LAMA2; (+) strand; PAM type: NNNNGHTT; PAM sequence: AAATGTTT
cttactcgatgtgggattga

SEQ ID NO: 48497 - DNA, 20 bp, Artificial Sequence
  Description of Artificial Sequence: Synthetic oligonucleotide
  Target: LAMA2; (+) strand; PAM type: NNNNGHTT; PAM sequence: TGTTGTTT
tgtaacatcaagggtatttt

SEQ ID NO: 48498 - DNA, 20 bp, Artificial Sequence
  Description of Artificial Sequence: Synthetic oligonucleotide
  Target: LAMA2; (+) strand; PAM type: NNNNGHTT; PAM sequence: TCATGTTT
atttttgttgttttaaagtg

SEQ ID NO: 48499 - DNA, 20 bp, Artificial Sequence
  Description of Artificial Sequence: Synthetic oligonucleotide
  Target: LAMA2; (+) strand; PAM type: NNNNGHTT; PAM sequence: GGTTGTTT
aaagtgtcatgttttgtgct

SEQ ID NO: 48500 - DNA, 20 bp, Artificial Sequence
  Description of Artificial Sequence: Synthetic oligonucleotide
  Target: LAMA2; (+) strand; PAM type: NNNNGHTT; PAM sequence: CAACGTTT
tctttaaggcagcaccaaga

SEQ ID NO: 48501 - DNA, 20 bp, Artificial Sequence
  Description of Artificial Sequence: Synthetic oligonucleotide
  Target: LAMA2; (+) strand; PAM type: NNNNGHTT; PAM sequence: AGTGGCTT
atagttccaatattattcat

SEQ ID NO: 48502 - DNA, 20 bp, Artificial Sequence
  Description of Artificial Sequence: Synthetic oligonucleotide
  Target: LAMA2; (+) strand; PAM type: NNNNGHTT; PAM sequence: TGCAGCTT
acattatgtatttaaatgaa

SEQ ID NO: 48503 - DNA, 20 bp, Artificial Sequence
  Description of Artificial Sequence: Synthetic oligonucleotide
  Target: LAMA2; (+) strand; PAM type: NNNNGHTT; PAM sequence: TTGGGATT
atagcagaacctaatgaaca

SEQ ID NO: 48504 - DNA, 20 bp, Artificial Sequence
  Description of Artificial Sequence: Synthetic oligonucleotide
  Target: LAMA2; (+) strand; PAM type: NNNNGHTT; PAM sequence: AGATGTTT
atgtggaatattactgggaa

SEQ ID NO: 48505 - DNA, 20 bp, Artificial Sequence
  Description of Artificial Sequence: Synthetic oligonucleotide
  Target: LAMA2; (+) strand; PAM type: NNNNGHTT; PAM sequence: TGAAGTTT
tgggaaagatgtttgagtgt

SEQ ID NO: 48506 - DNA, 20 bp, Artificial Sequence
  Description of Artificial Sequence: Synthetic oligonucleotide
  Target: LAMA2; (+) strand; PAM type: NNNNGHTT; PAM sequence: CACAGATT
ctcatagctcagaatggtta

SEQ ID NO: 48507 - DNA, 20 bp, Artificial Sequence
  Description of Artificial Sequence: Synthetic oligonucleotide
  Target: LAMA2; (+) strand; PAM type: NNNNGHTT; PAM sequence: TTTTGTTT
tgtcagttcactgaaaatat

SEQ ID NO: 48508 - DNA, 20 bp, Artificial Sequence
  Description of Artificial Sequence: Synthetic oligonucleotide
  Target: LAMA2; (+) strand; PAM type: NNNNGHTT; PAM sequence: AACTGTTT
tgtttttgtatcttttttaa

SEQ ID NO: 48509 - DNA, 20 bp, Artificial Sequence
  Description of Artificial Sequence: Synthetic oligonucleotide
  Target: LAMA2; (+) strand; PAM type: NNNNGHTT; PAM sequence: CTTTGTTT
attttgaaatttccagaact

SEQ ID NO: 48510 - DNA, 20 bp, Artificial Sequence
  Description of Artificial Sequence: Synthetic oligonucleotide
  Target: LAMA2; (+) strand; PAM type: NNNNGHTT; PAM sequence: TTAAGTTT
aaatttccagaactctttgt

SEQ ID NO: 48511 - DNA, 20 bp, Artificial Sequence
  Description of Artificial Sequence: Synthetic oligonucleotide
  Target: LAMA2; (+) strand; PAM type: NNNNGHTT; PAM sequence: TGCTGTTT
ctagatacagttaatcaatc

SEQ ID NO: 48512 - DNA, 20 bp, Artificial Sequence
  Description of Artificial Sequence: Synthetic oligonucleotide
  Target: LAMA2; (+) strand; PAM type: NNNNGHTT; PAM sequence: ATAGGTTT
aaattaaaaggatcagaatt

SEQ ID NO: 48513 - DNA, 20 bp, Artificial Sequence
  Description of Artificial Sequence: Synthetic oligonucleotide
  Target: LAMA2; (+) strand; PAM type: NNNNGHTT; PAM sequence: GTTAGATT
cagtccattaattccaggca

SEQ ID NO: 48514 - DNA, 20 bp, Artificial Sequence
  Description of Artificial Sequence: Synthetic oligonucleotide
  Target: LAMA2; (+) strand; PAM type: NNNNGHTT; PAM sequence: AACAGTTT
tggcctcaagttctaatgat

SEQ ID NO: 48515 - DNA, 20 bp, Artificial Sequence
  Description of Artificial Sequence: Synthetic oligonucleotide
  Target: LAMA2; (+) strand; PAM type: NNNNGHTT; PAM sequence: TTCTGATT
aagtaatttgtcttttactt

SEQ ID NO: 48516 - DNA, 20 bp, Artificial Sequence
  Description of Artificial Sequence: Synthetic oligonucleotide
  Target: LAMA2; (+) strand; PAM type: NNNNGHTT; PAM sequence: TGGAGTTT
ctttattgtatcctttgcca

SEQ ID NO: 48517 - DNA, 20 bp, Artificial Sequence
  Description of Artificial Sequence: Synthetic oligonucleotide
  Target: LAMA2; (+) strand; PAM type: NNNNGHTT; PAM sequence: CATTGTTT
ttgccatggagtttgttagt

SEQ ID NO: 48518 - DNA, 20 bp, Artificial Sequence
  Description of Artificial Sequence: Synthetic oligonucleotide
  Target: LAMA2; (+) strand; PAM type: NNNNGHTT; PAM sequence: AACTGTTT
ttagtcattgtttgtaatag

SEQ ID NO: 48519 - DNA, 20 bp, Artificial Sequence
  Description of Artificial Sequence: Synthetic oligonucleotide
  Target: LAMA2; (+) strand; PAM type: NNNNGHTT; PAM sequence: ATAGGTTT
ctgcatatatagatggcaag

SEQ ID NO: 48520 - DNA, 20 bp, Artificial Sequence
  Description of Artificial Sequence: Synthetic oligonucleotide
  Target: LAMA2; (+) strand; PAM type: NNNNGHTT; PAM sequence: ACTGGCTT
aagctcatgccaacataagt

SEQ ID NO: 48521 - DNA, 20 bp, Artificial Sequence
  Description of Artificial Sequence: Synthetic oligonucleotide
  Target: LAMA2; (+) strand; PAM type: NNNNGHTT; PAM sequence: TTCTGTTT
agacttatcaggcccagaaa

SEQ ID NO: 48522 - DNA, 20 bp, Artificial Sequence
  Description of Artificial Sequence: Synthetic oligonucleotide
  Target: LAMA2; (+) strand; PAM type: NNNNGHTT; PAM sequence: AGCAGATT
ggtaacttcatagcaacaaa

SEQ ID NO: 48523 - DNA, 20 bp, Artificial Sequence
  Description of Artificial Sequence: Synthetic oligonucleotide
  Target: LAMA2; (+) strand; PAM type: NNNNGHTT; PAM sequence: GTTAGTTT
catagcaacaaaagcagatt

SEQ ID NO: 48524 - DNA, 20 bp, Artificial Sequence
  Description of Artificial Sequence: Synthetic oligonucleotide
  Target: LAMA2; (+) strand; PAM type: NNNNGHTT; PAM sequence: AATGGATT
ggaaaagagaatgactgcct

SEQ ID NO: 48525 - DNA, 20 bp, Artificial Sequence
  Description of Artificial Sequence: Synthetic oligonucleotide
  Target: LAMA2; (+) strand; PAM type: NNNNGHTT; PAM sequence: CTGGGTTT
gaatgactgcctaatggatt

SEQ ID NO: 48526 - DNA, 20 bp, Artificial Sequence
  Description of Artificial Sequence: Synthetic oligonucleotide
  Target: LAMA2; (+) strand; PAM type: NNNNGHTT; PAM sequence: ATAGGTTT
atttattttttaaattttaa

SEQ ID NO: 48527 - DNA, 20 bp, Artificial Sequence
  Description of Artificial Sequence: Synthetic oligonucleotide
  Target: LAMA2; (+) strand; PAM type: NNNNGHTT; PAM sequence: AAATGCTT
tcctctctatgtacaacttg

SEQ ID NO: 48528 - DNA, 20 bp, Artificial Sequence
  Description of Artificial Sequence: Synthetic oligonucleotide
  Target: LAMA2; (+) strand; PAM type: NNNNGHTT; PAM sequence: TAATGATT
tgaggggggaaaaaagcatt

SEQ ID NO: 48529 - DNA, 20 bp, Artificial Sequence
  Description of Artificial Sequence: Synthetic oligonucleotide
  Target: LAMA2; (+) strand; PAM type: NNNNGHTT; PAM sequence: ATGAGTTT
cactcaattaatagtgttgg

SEQ ID NO: 48530 - DNA, 20 bp, Artificial Sequence
  Description of Artificial Sequence: Synthetic oligonucleotide
  Target: LAMA2; (+) strand; PAM type: NNNNGHTT; PAM sequence: TTGTGTTT
tacaggtaaagataattgcc

SEQ ID NO: 48531 - DNA, 20 bp, Artificial Sequence
  Description of Artificial Sequence: Synthetic oligonucleotide
  Target: LAMA2; (+) strand; PAM type: NNNNGHTT; PAM sequence: GGATGATT
catctggcactcagcagcca

SEQ ID NO: 48532 - DNA, 20 bp, Artificial Sequence
  Description of Artificial Sequence: Synthetic oligonucleotide
  Target: LAMA2; (+) strand; PAM type: NNNNGHTT; PAM sequence: TGGTGATT
tccatccaactgcctatatc

SEQ ID NO: 48533 - DNA, 20 bp, Artificial Sequence
  Description of Artificial Sequence: Synthetic oligonucleotide
  Target: LAMA2; (+) strand; PAM type: NNNNGHTT; PAM sequence: TTCTGCTT
atttcagggttaatttcctt

SEQ ID NO: 48534 - DNA, 20 bp, Artificial Sequence
  Description of Artificial Sequence: Synthetic oligonucleotide
  Target: LAMA2; (+) strand; PAM type: NNNNGHTT; PAM sequence: CTAGGATT
tcaaaagtactgtcaagtgt

SEQ ID NO: 48535 - DNA, 20 bp, Artificial Sequence
  Description of Artificial Sequence: Synthetic oligonucleotide
  Target: LAMA2; (+) strand; PAM type: NNNNGHTT; PAM sequence: AAAAGCTT
attttagaaatctattgctg

SEQ ID NO: 48536 - DNA, 20 bp, Artificial Sequence
  Description of Artificial Sequence: Synthetic oligonucleotide
  Target: LAMA2; (+) strand; PAM type: NNNNGHTT; PAM sequence: ATATGTTT
aaagatcatcacttttgaag

SEQ ID NO: 48537 - DNA, 20 bp, Artificial Sequence
  Description of Artificial Sequence: Synthetic oligonucleotide
  Target: LAMA2; (+) strand; PAM type: NNNNGHTT; PAM sequence: TTTAGCTT
ttacaccttgtaatgagcct

SEQ ID NO: 48538 - DNA, 20 bp, Artificial Sequence
  Description of Artificial Sequence: Synthetic oligonucleotide
  Target: LAMA2; (+) strand; PAM type: NNNNGHTT; PAM sequence: TCTGGCTT
tgagccttttagctttgctc

SEQ ID NO: 48539 - DNA, 20 bp, Artificial Sequence
  Description of Artificial Sequence: Synthetic oligonucleotide
  Target: LAMA2; (+) strand; PAM type: NNNNGHTT; PAM sequence: GCTTGATT
ccttttagctttgctctctg

SEQ ID NO: 48540 - DNA, 20 bp, Artificial Sequence
  Description of Artificial Sequence: Synthetic oligonucleotide
  Target: LAMA2; (+) strand; PAM type: NNNNGHTT; PAM sequence: CATTGATT
cttgattcccaaattcccag

SEQ ID NO: 48541 - DNA, 20 bp, Artificial Sequence
  Description of Artificial Sequence: Synthetic oligonucleotide
  Target: LAMA2; (+) strand; PAM type: NNNNGHTT; PAM sequence: AGTTGCTT
tgcaggccatagcgagaatc

SEQ ID NO: 48542 - DNA, 20 bp, Artificial Sequence
  Description of Artificial Sequence: Synthetic oligonucleotide
  Target: LAMA2; (+) strand; PAM type: NNNNGHTT; PAM sequence: CTGTGATT
tctatcggtaatttttaaaa

SEQ ID NO: 48543 - DNA, 20 bp, Artificial Sequence
  Description of Artificial Sequence: Synthetic oligonucleotide
  Target: LAMA2; (+) strand; PAM type: NNNNGHTT; PAM sequence: TAGAGTTT
gtcatttaattatgtgctct

SEQ ID NO: 48544 - DNA, 20 bp, Artificial Sequence
  Description of Artificial Sequence: Synthetic oligonucleotide
  Target: LAMA2; (+) strand; PAM type: NNNNGHTT; PAM sequence: AAATGATT
aaatttattttcatgcacta

SEQ ID NO: 48545 - DNA, 20 bp, Artificial Sequence
  Description of Artificial Sequence: Synthetic oligonucleotide
  Target: LAMA2; (+) strand; PAM type: NNNNGHTT; PAM sequence: TAATGTTT
agtgaaaagtatatttcttg

SEQ ID NO: 48546 - DNA, 20 bp, Artificial Sequence
  Description of Artificial Sequence: Synthetic oligonucleotide
  Target: LAMA2; (+) strand; PAM type: NNNNGHTT; PAM sequence: TTTGGTTT
atgttttgtagtaattttta

SEQ ID NO: 48547 - DNA, 20 bp, Artificial Sequence
  Description of Artificial Sequence: Synthetic oligonucleotide
  Target: LAMA2; (+) strand; PAM type: NNNNGHTT; PAM sequence: AGAAGTTT
gtgtgttacatattatacca

SEQ ID NO: 48548 - DNA, 20 bp, Artificial Sequence
  Description of Artificial Sequence: Synthetic oligonucleotide
  Target: LAMA2; (+) strand; PAM type: NNNNGHTT; PAM sequence: TTAAGCTT
caaaactgtattcttaataa

SEQ ID NO: 48549 - DNA, 20 bp, Artificial Sequence
  Description of Artificial Sequence: Synthetic oligonucleotide
  Target: LAMA2; (+) strand; PAM type: NNNNGHTT; PAM sequence: ACCAGCTT
ccaattttccatttggccaa

SEQ ID NO: 48550 - DNA, 20 bp, Artificial Sequence
  Description of Artificial Sequence: Synthetic oligonucleotide
  Target: LAMA2; (+) strand; PAM type: NNNNGHTT; PAM sequence: ACCAGATT
caaatcactctgctaaaatc

SEQ ID NO: 48551 - DNA, 20 bp, Artificial Sequence
  Description of Artificial Sequence: Synthetic oligonucleotide
  Target: LAMA2; (+) strand; PAM type: NNNNGHTT; PAM sequence: AATGGATT
aggccatagatacagagaac

SEQ ID NO: 48552 - DNA, 20 bp, Artificial Sequence
  Description of Artificial Sequence: Synthetic oligonucleotide
  Target: LAMA2; (+) strand; PAM type: NNNNGHTT; PAM sequence: GAAAGTTT
cagtcaactgagcactttga

SEQ ID NO: 48553 - DNA, 20 bp, Artificial Sequence
  Description of Artificial Sequence: Synthetic oligonucleotide
  Target: LAMA2; (+) strand; PAM type: NNNNGHTT; PAM sequence: TTTAGCTT
aactgagcactttgagaaag

SEQ ID NO: 48554 - DNA, 20 bp, Artificial Sequence
  Description of Artificial Sequence: Synthetic oligonucleotide
  Target: LAMA2; (+) strand; PAM type: NNNNGHTT; PAM sequence: AGCAGATT
gcttataccaactacaaaca

SEQ ID NO: 48555 - DNA, 20 bp, Artificial Sequence
  Description of Artificial Sequence: Synthetic oligonucleotide
  Target: LAMA2; (+) strand; PAM type: NNNNGHTT; PAM sequence: AATTGTTT
ctctaagaaaaagaaaacaa

SEQ ID NO: 48556 - DNA, 20 bp, Artificial Sequence
  Description of Artificial Sequence: Synthetic oligonucleotide
  Target: LAMA2; (+) strand; PAM type: NNNNGHTT; PAM sequence: TTCTGCTT
ggaatattaatattgcctac

SEQ ID NO: 48557 - DNA, 20 bp, Artificial Sequence
  Description of Artificial Sequence: Synthetic oligonucleotide
  Target: LAMA2; (+) strand; PAM type: NNNNGHTT; PAM sequence: CCTTGTTT
atattgcctacttctgcttt

SEQ ID NO: 48558 - DNA, 20 bp, Artificial Sequence
  Description of Artificial Sequence: Synthetic oligonucleotide
  Target: LAMA2; (+) strand; PAM type: NNNNGHTT; PAM sequence: GAATGTTT
aagaaatcaagcagtcattg

SEQ ID NO: 48559 - DNA, 20 bp, Artificial Sequence
  Description of Artificial Sequence: Synthetic oligonucleotide
  Target: LAMA2; (+) strand; PAM type: NNNNGHTT; PAM sequence: ATATGATT
ttttaaaagaccctttaact

SEQ ID NO: 48560 - DNA, 20 bp, Artificial Sequence
  Description of Artificial Sequence: Synthetic oligonucleotide
  Target: LAMA2; (+) strand; PAM type: NNNNGHTT; PAM sequence: TGGTGATT
ttttcagcatttggaggtgg

SEQ ID NO: 48561 - DNA, 20 bp, Artificial Sequence
  Description of Artificial Sequence: Synthetic oligonucleotide
  Target: LAMA2; (+) strand; PAM type: NNNNGHTT; PAM sequence: CAGAGCTT
gacctaatatgacaaaggac

SEQ ID NO: 48562 - DNA, 20 bp, Artificial Sequence
  Description of Artificial Sequence: Synthetic oligonucleotide
  Target: LAMA2; (+) strand; PAM type: NNNNGHTT; PAM sequence: ATCAGCTT
agcttttggttatggtattc

SEQ ID NO: 48563 - DNA, 20 bp, Artificial Sequence
  Description of Artificial Sequence: Synthetic oligonucleotide
  Target: LAMA2; (+) strand; PAM type: NNNNGHTT; PAM sequence: ATTGGCTT
ttcctttctcagcatgcata

SEQ ID NO: 48564 - DNA, 20 bp, Artificial Sequence
  Description of Artificial Sequence: Synthetic oligonucleotide
  Target: LAMA2; (+) strand; PAM type: NNNNGHTT; PAM sequence: GTACGATT
atatttatgtcattgttgct

SEQ ID NO: 48565 - DNA, 20 bp, Artificial Sequence
  Description of Artificial Sequence: Synthetic oligonucleotide
  Target: LAMA2; (+) strand; PAM type: NNNNGHTT; PAM sequence: GTAAGCTT
atactggctcctcttgtgaa

SEQ ID NO: 48566 - DNA, 20 bp, Artificial Sequence
  Description of Artificial Sequence: Synthetic oligonucleotide
  Target: LAMA2; (+) strand; PAM type: NNNNGHTT; PAM sequence: TAGTGCTT
agcttgcaagaatgtatcct

SEQ ID NO: 48567 - DNA, 20 bp, Artificial Sequence
  Description of Artificial Sequence: Synthetic oligonucleotide
  Target: LAMA2; (+) strand; PAM type: NNNNGHTT; PAM sequence: CATTGCTT
tgctttcaaagttccctcaa

SEQ ID NO: 48568 - DNA, 20 bp, Artificial Sequence
  Description of Artificial Sequence: Synthetic oligonucleotide
  Target: LAMA2; (+) strand; PAM type: NNNNGHTT; PAM sequence: AGCTGTTT
caataacctattctaataag

SEQ ID NO: 48569 - DNA, 20 bp, Artificial Sequence
  Description of Artificial Sequence: Synthetic oligonucleotide
  Target: LAMA2; (+) strand; PAM type: NNNNGHTT; PAM sequence: TGTGGCTT
cttgaatatctaccaaaagc

SEQ ID NO: 48570 - DNA, 20 bp, Artificial Sequence
  Description of Artificial Sequence: Synthetic oligonucleotide
  Target: LAMA2; (+) strand; PAM type: NNNNGHTT; PAM sequence: TGATGTTT
tttgcctataactgaaaatc

SEQ ID NO: 48571 - DNA, 20 bp, Artificial Sequence
  Description of Artificial Sequence: Synthetic oligonucleotide
  Target: LAMA2; (+) strand; PAM type: NNNNGHTT; PAM sequence: CTTTGATT
atagaaaactgcctacaggt

SEQ ID NO: 48572 - DNA, 20 bp, Artificial Sequence
  Description of Artificial Sequence: Synthetic oligonucleotide
  Target: LAMA2; (+) strand; PAM type: NNNNGHTT; PAM sequence: ATTTGTTT
aaactgcctacaggtctttg

SEQ ID NO: 48573 - DNA, 20 bp, Artificial Sequence
  Description of Artificial Sequence: Synthetic oligonucleotide
  Target: LAMA2; (+) strand; PAM type: NNNNGHTT; PAM sequence: TAATGTTT
tctttgatttgtttagcacc

SEQ ID NO: 48574 - DNA, 20 bp, Artificial Sequence
  Description of Artificial Sequence: Synthetic oligonucleotide
  Target: LAMA2; (+) strand; PAM type: NNNNGHTT; PAM sequence: CCTAGATT
atttattgttgtctcaatat

SEQ ID NO: 48575 - DNA, 20 bp, Artificial Sequence
  Description of Artificial Sequence: Synthetic oligonucleotide
  Target: LAMA2; (+) strand; PAM type: NNNNGHTT; PAM sequence: ATAAGATT
ctcaatatcctagatttata

SEQ ID NO: 48576 - DNA, 20 bp, Artificial Sequence
  Description of Artificial Sequence: Synthetic oligonucleotide
  Target: LAMA2; (+) strand; PAM type: NNNNGHTT; PAM sequence: ATTTGCTT
atcctaaggtaacaattttt

SEQ ID NO: 48577 - DNA, 20 bp, Artificial Sequence
  Description of Artificial Sequence: Synthetic oligonucleotide
  Target: LAMA2; (+) strand; PAM type: NNNNGHTT; PAM sequence: ACTGGTTT
acacagaaaactggtgtgaa

SEQ ID NO: 48578 - DNA, 20 bp, Artificial Sequence
  Description of Artificial Sequence: Synthetic oligonucleotide
  Target: LAMA2; (+) strand; PAM type: NNNNGHTT; PAM sequence: AGGAGCTT
cgcatggctagcagataaat

SEQ ID NO: 48579 - DNA, 20 bp, Artificial Sequence
  Description of Artificial Sequence: Synthetic oligonucleotide
  Target: LAMA2; (+) strand; PAM type: NNNNGHTT; PAM sequence: CTTAGTTT
ggctagcagataaataggag

SEQ ID NO: 48580 - DNA, 20 bp, Artificial Sequence
  Description of Artificial Sequence: Synthetic oligonucleotide
  Target: LAMA2; (+) strand; PAM type: NNNNGHTT; PAM sequence: CATTGCTT
atttatagaaatactctagg

SEQ ID NO: 48581 - DNA, 20 bp, Artificial Sequence
  Description of Artificial Sequence: Synthetic oligonucleotide
  Target: LAMA2; (+) strand; PAM type: NNNNGHTT; PAM sequence: CTGTGTTT
tatagtcatattcatgacag

SEQ ID NO: 48582 - DNA, 20 bp, Artificial Sequence
  Description of Artificial Sequence: Synthetic oligonucleotide
  Target: LAMA2; (+) strand; PAM type: NNNNGHTT; PAM sequence: CTCAGATT
ctgtgtttcctttaactgag

SEQ ID NO: 48583 - DNA, 20 bp, Artificial Sequence
  Description of Artificial Sequence: Synthetic oligonucleotide
  Target: LAMA2; (+) strand; PAM type: NNNNGHTT; PAM sequence: ACTTGCTT
tagatataacttatagaagt

SEQ ID NO: 48584 - DNA, 20 bp, Artificial Sequence
  Description of Artificial Sequence: Synthetic oligonucleotide
  Target: LAMA2; (+) strand; PAM type: NNNNGHTT; PAM sequence: ATTTGATT
aattagctatgtcaacccaa

SEQ ID NO: 48585 - DNA, 20 bp, Artificial Sequence
  Description of Artificial Sequence: Synthetic oligonucleotide
  Target: LAMA2; (+) strand; PAM type: NNNNGHTT; PAM sequence: TCTTGATT
atgaaacaagagccttttgc

SEQ ID NO: 48586 - DNA, 20 bp, Artificial Sequence
  Description of Artificial Sequence: Synthetic oligonucleotide
  Target: LAMA2; (+) strand; PAM type: NNNNGHTT; PAM sequence: TCTTGTTT
aataaataacttaattctac

SEQ ID NO: 48587 - DNA, 20 bp, Artificial Sequence
  Description of Artificial Sequence: Synthetic oligonucleotide
  Target: LAMA2; (+) strand; PAM type: NNNNGHTT; PAM sequence: TAAGGCTT
acttaattctactcttgttt

SEQ ID NO: 48588 - DNA, 20 bp, Artificial Sequence
  Description of Artificial Sequence: Synthetic oligonucleotide
  Target: LAMA2; (+) strand; PAM type: NNNNGHTT; PAM sequence: GCTTGTTT
aattctactcttgttttaag

SEQ ID NO: 48589 - DNA, 20 bp, Artificial Sequence
  Description of Artificial Sequence: Synthetic oligonucleotide
  Target: LAMA2; (+) strand; PAM type: NNNNGHTT; PAM sequence: AATTGCTT
taaaattacttgaatattac

SEQ ID NO: 48590 - DNA, 20 bp, Artificial Sequence
  Description of Artificial Sequence: Synthetic oligonucleotide
  Target: LAMA2; (+) strand; PAM type: NNNNGHTT; PAM sequence: CTATGCTT
tattacaattgcttaattgg

SEQ ID NO: 48591 - DNA, 20 bp, Artificial Sequence
  Description of Artificial Sequence: Synthetic oligonucleotide
  Target: LAMA2; (+) strand; PAM type: NNNNGHTT; PAM sequence: ATATGTTT
atattttcaatacattctag

SEQ ID NO: 48592 - DNA, 20 bp, Artificial Sequence
  Description of Artificial Sequence: Synthetic oligonucleotide
  Target: LAMA2; (+) strand; PAM type: NNNNGHTT; PAM sequence: ATCTGTTT
tacaacataatccctgtcct

SEQ ID NO: 48593 - DNA, 20 bp, Artificial Sequence
  Description of Artificial Sequence: Synthetic oligonucleotide
  Target: LAMA2; (+) strand; PAM type: NNNNGHTT; PAM sequence: AAAAGCTT
aaaaaaaaaggagagataat

SEQ ID NO: 48594 - DNA, 20 bp, Artificial Sequence
  Description of Artificial Sequence: Synthetic oligonucleotide
  Target: LAMA2; (+) strand; PAM type: NNNNGHTT; PAM sequence: AATTGTTT
tcctgtatctgtcacacaat

SEQ ID NO: 48595 - DNA, 20 bp, Artificial Sequence
  Description of Artificial Sequence: Synthetic oligonucleotide
  Target: LAMA2; (+) strand; PAM type: NNNNGHTT; PAM sequence: TTTGGATT
gagacaatgaattttggaac

SEQ ID NO: 48596 - DNA, 20 bp, Artificial Sequence
  Description of Artificial Sequence: Synthetic oligonucleotide
  Target: LAMA2; (+) strand; PAM type: NNNNGHTT; PAM sequence: ATTTGCTT
tcctatcctttcattatttc

SEQ ID NO: 48597 - DNA, 20 bp, Artificial Sequence
  Description of Artificial Sequence: Synthetic oligonucleotide
  Target: LAMA2; (+) strand; PAM type: NNNNGHTT; PAM sequence: TGTAGTTT
tcatttgcttttcaattaag

SEQ ID NO: 48598 - DNA, 20 bp, Artificial Sequence
  Description of Artificial Sequence: Synthetic oligonucleotide
  Target: LAMA2; (+) strand; PAM type: NNNNGHTT; PAM sequence: TCCAGCTT
aagaccattaatgtcttaat

SEQ ID NO: 48599 - DNA, 20 bp, Artificial Sequence
  Description of Artificial Sequence: Synthetic oligonucleotide
  Target: LAMA2; (+) strand; PAM type: NNNNGHTT; PAM sequence: TGTTGATT
tacttcatttggggccatag

SEQ ID NO: 48600 - DNA, 20 bp, Artificial Sequence
  Description of Artificial Sequence: Synthetic oligonucleotide
  Target: LAMA2; (+) strand; PAM type: NNNNGHTT; PAM sequence: CATAGATT
tactttcatagtgctgtcat

SEQ ID NO: 48601 - DNA, 20 bp, Artificial Sequence
  Description of Artificial Sequence: Synthetic oligonucleotide
  Target: LAMA2; (+) strand; PAM type: NNNNGHTT; PAM sequence: CTCAGTTT
taaaaagagtgttatgcaat

SEQ ID NO: 48602 - DNA, 20 bp, Artificial Sequence
  Description of Artificial Sequence: Synthetic oligonucleotide
  Target: LAMA2; (+) strand; PAM type: NNNNGHTT; PAM sequence: AATTGTTT
taatattaaccacctcatag

SEQ ID NO: 48603 - DNA, 20 bp, Artificial Sequence
  Description of Artificial Sequence: Synthetic oligonucleotide
  Target: LAMA2; (+) strand; PAM type: NNNNGHTT; PAM sequence: GTTTGTTT
attaaccacctcatagaatt

SEQ ID NO: 48604 - DNA, 20 bp, Artificial Sequence
  Description of Artificial Sequence: Synthetic oligonucleotide
  Target: LAMA2; (+) strand; PAM type: NNNNGHTT; PAM sequence: AAAAGTTT
ggttagaaagtctactttgt

SEQ ID NO: 48605 - DNA, 20 bp, Artificial Sequence
  Description of Artificial Sequence: Synthetic oligonucleotide
  Target: LAMA2; (+) strand; PAM type: NNNNGHTT; PAM sequence: AAAGGCTT
ctttgtaaaagtttgtcagg

SEQ ID NO: 48606 - DNA, 20 bp, Artificial Sequence
  Description of Artificial Sequence: Synthetic oligonucleotide
  Target: LAMA2; (+) strand; PAM type: NNNNGHTT; PAM sequence: AAGTGATT
aaggggaaaagtgggacaag

SEQ ID NO: 48607 - DNA, 20 bp, Artificial Sequence
  Description of Artificial Sequence: Synthetic oligonucleotide
  Target: LAMA2; (+) strand; PAM type: NNNNGHTT; PAM sequence: AGGAGATT
attggaaaagcaaggccatg

SEQ ID NO: 48608 - DNA, 20 bp, Artificial Sequence
  Description of Artificial Sequence: Synthetic oligonucleotide
  Target: LAMA2; (+) strand; PAM type: NNNNGHTT; PAM sequence: ATCTGATT
cagagtagtggagtagtgta

SEQ ID NO: 48609 - DNA, 20 bp, Artificial Sequence
  Description of Artificial Sequence: Synthetic oligonucleotide
  Target: LAMA2; (+) strand; PAM type: NNNNGHTT; PAM sequence: TTGGGTTT
gtgtaatctgatttacattt

SEQ ID NO: 48610 - DNA, 20 bp, Artificial Sequence
  Description of Artificial Sequence: Synthetic oligonucleotide
  Target: LAMA2; (+) strand; PAM type: NNNNGHTT; PAM sequence: GGGTGTTT
atttacatttttgggttttg

SEQ ID NO: 48611 - DNA, 20 bp, Artificial Sequence
  Description of Artificial Sequence: Synthetic oligonucleotide
  Target: LAMA2; (+) strand; PAM type: NNNNGHTT; PAM sequence: TGTTGTTT
ttgggttttggggtgttttt

SEQ ID NO: 48612 - DNA, 20 bp, Artificial Sequence
  Description of Artificial Sequence: Synthetic oligonucleotide
  Target: LAMA2; (+) strand; PAM type: NNNNGHTT; PAM sequence: CATAGCTT
ctggagtgcagtgatgctgt

SEQ ID NO: 48613 - DNA, 20 bp, Artificial Sequence
  Description of Artificial Sequence: Synthetic oligonucleotide
  Target: LAMA2; (+) strand; PAM type: NNNNGHTT; PAM sequence: TTTTGTTT
caccatgcccagctattttt

SEQ ID NO: 48614 - DNA, 20 bp, Artificial Sequence
  Description of Artificial Sequence: Synthetic oligonucleotide
  Target: LAMA2; (+) strand; PAM type: NNNNGHTT; PAM sequence: GTTTGTTT
atgcccagctattttttttt

SEQ ID NO: 48615 - DNA, 20 bp, Artificial Sequence
  Description of Artificial Sequence: Synthetic oligonucleotide
  Target: LAMA2; (+) strand; PAM type: NNNNGHTT; PAM sequence: TACTGATT
atagtagaacaaataggact

SEQ ID NO: 48616 - DNA, 20 bp, Artificial Sequence
  Description of Artificial Sequence: Synthetic oligonucleotide
  Target: LAMA2; (+) strand; PAM type: NNNNGHTT; PAM sequence: GAGAGATT
ttcgagactgtatgtcaggg

SEQ ID NO: 48617 - DNA, 20 bp, Artificial Sequence
  Description of Artificial Sequence: Synthetic oligonucleotide
  Target: LAMA2; (+) strand; PAM type: NNNNGHTT; PAM sequence: AAGAGTTT
ggggagagattaaagaaata

SEQ ID NO: 48618 - DNA, 20 bp, Artificial Sequence
  Description of Artificial Sequence: Synthetic oligonucleotide
  Target: LAMA2; (+) strand; PAM type: NNNNGHTT; PAM sequence: ACCAGTTT
ttaagaatgagtcatagatg

SEQ ID NO: 48619 - DNA, 20 bp, Artificial Sequence
  Description of Artificial Sequence: Synthetic oligonucleotide
  Target: LAMA2; (+) strand; PAM type: NNNNGHTT; PAM sequence: GAATGATT
gagtcatagatgaccagttt

SEQ ID NO: 48620 - DNA, 20 bp, Artificial Sequence
  Description of Artificial Sequence: Synthetic oligonucleotide
  Target: LAMA2; (+) strand; PAM type: NNNNGHTT; PAM sequence: TCCAGTTT
tgggggcatggaatccatag

SEQ ID NO: 48621 - DNA, 20 bp, Artificial Sequence
  Description of Artificial Sequence: Synthetic oligonucleotide
  Target: LAMA2; (+) strand; PAM type: NNNNGHTT; PAM sequence: TTTCGATT
ccatagtccagtttagaaat

SEQ ID NO: 48622 - DNA, 20 bp, Artificial Sequence
  Description of Artificial Sequence: Synthetic oligonucleotide
  Target: LAMA2; (+) strand; PAM type: NNNNGHTT; PAM sequence: ATATGTTT
catgtctgtctggtctagag

SEQ ID NO: 48623 - DNA, 20 bp, Artificial Sequence
  Description of Artificial Sequence: Synthetic oligonucleotide
  Target: LAMA2; (+) strand; PAM type: NNNNGHTT; PAM sequence: AATTGATT
aattacccaggagaaagtgc

SEQ ID NO: 48624 - DNA, 20 bp, Artificial Sequence
  Description of Artificial Sequence: Synthetic oligonucleotide
  Target: LAMA2; (+) strand; PAM type: NNNNGHTT; PAM sequence: AGCAGTTT
aatttggtgacaaggacaag

SEQ ID NO: 48625 - DNA, 20 bp, Artificial Sequence
  Description of Artificial Sequence: Synthetic oligonucleotide
  Target: LAMA2; (+) strand; PAM type: NNNNGHTT; PAM sequence: AACAGATT
attgagaggtggtgacacaa

SEQ ID NO: 48626 - DNA, 20 bp, Artificial Sequence
  Description of Artificial Sequence: Synthetic oligonucleotide
  Target: LAMA2; (+) strand; PAM type: NNNNGHTT; PAM sequence: GACAGTTT
aagttatatgaggctaagag

SEQ ID NO: 48627 - DNA, 20 bp, Artificial Sequence
  Description of Artificial Sequence: Synthetic oligonucleotide
  Target: LAMA2; (+) strand; PAM type: NNNNGHTT; PAM sequence: TTGTGTTT
taagaggacagttttgtcat

SEQ ID NO: 48628 - DNA, 20 bp, Artificial Sequence
  Description of Artificial Sequence: Synthetic oligonucleotide
  Target: LAMA2; (+) strand; PAM type: NNNNGHTT; PAM sequence: TTTTGTTT
ggacagttttgtcatttgtg

SEQ ID NO: 48629 - DNA, 20 bp, Artificial Sequence
  Description of Artificial Sequence: Synthetic oligonucleotide
  Target: LAMA2; (+) strand; PAM type: NNNNGHTT; PAM sequence: ACTTGTTT
gaccccacattccccacatc

SEQ ID NO: 48630 - DNA, 20 bp, Artificial Sequence
  Description of Artificial Sequence: Synthetic oligonucleotide
  Target: LAMA2; (+) strand; PAM type: NNNNGHTT; PAM sequence: CAAGGTTT
ttggaatgggaatatggcaa

SEQ ID NO: 48631 - DNA, 20 bp, Artificial Sequence
  Description of Artificial Sequence: Synthetic oligonucleotide
  Target: LAMA2; (+) strand; PAM type: NNNNGHTT; PAM sequence: ATATGCTT
tggcaacaaggtttggagat

SEQ ID NO: 48632 - DNA, 20 bp, Artificial Sequence
  Description of Artificial Sequence: Synthetic oligonucleotide
  Target: LAMA2; (+) strand; PAM type: NNNNGHTT; PAM sequence: GGCAGCTT
tctggacttgttagtgcaaa

SEQ ID NO: 48633 - DNA, 20 bp, Artificial Sequence
  Description of Artificial Sequence: Synthetic oligonucleotide
  Target: LAMA2; (+) strand; PAM type: NNNNGHTT; PAM sequence: GGAAGTTT
aagagaggtgtaaggagttg

SEQ ID NO: 48634 - DNA, 20 bp, Artificial Sequence
  Description of Artificial Sequence: Synthetic oligonucleotide
  Target: LAMA2; (+) strand; PAM type: NNNNGHTT; PAM sequence: AGTAGATT
atgaatatctgtctgaaaac

SEQ ID NO: 48635 - DNA, 20 bp, Artificial Sequence
  Description of Artificial Sequence: Synthetic oligonucleotide
  Target: LAMA2; (+) strand; PAM type: NNNNGHTT; PAM sequence: TGTAGCTT
tttctacccccttatgaata

SEQ ID NO: 48636 - DNA, 20 bp, Artificial Sequence
  Description of Artificial Sequence: Synthetic oligonucleotide
  Target: LAMA2; (+) strand; PAM type: NNNNGHTT; PAM sequence: ACCAGCTT
ccttatgaatatgtagcttc

SEQ ID NO: 48637 - DNA, 20 bp, Artificial Sequence
  Description of Artificial Sequence: Synthetic oligonucleotide
  Target: LAMA2; (+) strand; PAM type: NNNNGHTT; PAM sequence: AAGGGATT
atgtaatggggagaaatggg

SEQ ID NO: 48638 - DNA, 20 bp, Artificial Sequence
  Description of Artificial Sequence: Synthetic oligonucleotide
  Target: LAMA2; (+) strand; PAM type: NNNNGHTT; PAM sequence: AGTGGTTT
tctatatcctttattacttc

SEQ ID NO: 48639 - DNA, 20 bp, Artificial Sequence
  Description of Artificial Sequence: Synthetic oligonucleotide
  Target: LAMA2; (+) strand; PAM type: NNNNGHTT; PAM sequence: TTCTGTTT
tattacttcagtggtttctc

SEQ ID NO: 48640 - DNA, 20 bp, Artificial Sequence
  Description of Artificial Sequence: Synthetic oligonucleotide
  Target: LAMA2; (+) strand; PAM type: NNNNGHTT; PAM sequence: AAGGGCTT
ttctttttcaactggaaaag

SEQ ID NO: 48641 - DNA, 20 bp, Artificial Sequence
  Description of Artificial Sequence: Synthetic oligonucleotide
  Target: LAMA2; (+) strand; PAM type: NNNNGHTT; PAM sequence: TCATGCTT
agagggcagcagtatttgcc

SEQ ID NO: 48642 - DNA, 20 bp, Artificial Sequence
  Description of Artificial Sequence: Synthetic oligonucleotide
  Target: LAMA2; (+) strand; PAM type: NNNNGHTT; PAM sequence: CCCTGTTT
gggaatctaagactaaaata

SEQ ID NO: 48643 - DNA, 20 bp, Artificial Sequence
  Description of Artificial Sequence: Synthetic oligonucleotide
  Target: LAMA2; (+) strand; PAM type: NNNNGHTT; PAM sequence: TTCAGTTT
ataccctgttttaatcagaa

SEQ ID NO: 48644 - DNA, 20 bp, Artificial Sequence
  Description of Artificial Sequence: Synthetic oligonucleotide
  Target: LAMA2; (+) strand; PAM type: NNNNGHTT; PAM sequence: AAGTGTTT
aattcagtttttatataata

SEQ ID NO: 48645 - DNA, 20 bp, Artificial Sequence
  Description of Artificial Sequence: Synthetic oligonucleotide
  Target: LAMA2; (+) strand; PAM type: NNNNGHTT; PAM sequence: CAAAGATT
gcctttcttccaaatcatgt

SEQ ID NO: 48646 - DNA, 20 bp, Artificial Sequence
  Description of Artificial Sequence: Synthetic oligonucleotide
  Target: LAMA2; (+) strand; PAM type: NNNNGHTT; PAM sequence: AATTGCTT
aacacattccagagaatcaa

SEQ ID NO: 48647 - DNA, 20 bp, Artificial Sequence
  Description of Artificial Sequence: Synthetic oligonucleotide
  Target: LAMA2; (+) strand; PAM type: NNNNGHTT; PAM sequence: CTGTGCTT
tttttcttctactttcctgt

SEQ ID NO: 48648 - DNA, 20 bp, Artificial Sequence
  Description of Artificial Sequence: Synthetic oligonucleotide
  Target: LAMA2; (+) strand; PAM type: NNNNGHTT; PAM sequence: CTCTGCTT
cacatttcaattctttatat

SEQ ID NO: 48649 - DNA, 20 bp, Artificial Sequence
  Description of Artificial Sequence: Synthetic oligonucleotide
  Target: LAMA2; (+) strand; PAM type: NNNNGHTT; PAM sequence: TAATGCTT
tttcagaagaaacaccaagc

SEQ ID NO: 48650 - DNA, 20 bp, Artificial Sequence
  Description of Artificial Sequence: Synthetic oligonucleotide
  Target: LAMA2; (+) strand; PAM type: NNNNGHTT; PAM sequence: CAATGTTT
caggaggaatagctctgttg

SEQ ID NO: 48651 - DNA, 20 bp, Artificial Sequence
  Description of Artificial Sequence: Synthetic oligonucleotide
  Target: LAMA2; (+) strand; PAM type: NNNNGHTT; PAM sequence: CAATGCTT
ttgcaatgtttcaataatgg

SEQ ID NO: 48652 - DNA, 20 bp, Artificial Sequence
  Description of Artificial Sequence: Synthetic oligonucleotide
  Target: LAMA2; (+) strand; PAM type: NNNNGHTT; PAM sequence: ATGAGTTT
tgctttgacaagcacatttg

SEQ ID NO: 48653 - DNA, 20 bp, Artificial Sequence
  Description of Artificial Sequence: Synthetic oligonucleotide
  Target: LAMA2; (+) strand; PAM type: NNNNGHTT; PAM sequence: TTTTGTTT
acaaacaaacaaaaacacct

SEQ ID NO: 48654 - DNA, 20 bp, Artificial Sequence
  Description of Artificial Sequence: Synthetic oligonucleotide
  Target: LAMA2; (+) strand; PAM type: NNNNGHTT; PAM sequence: CAGTGCTT
gtggcatctgtgagccatgt

SEQ ID NO: 48655 - DNA, 20 bp, Artificial Sequence
  Description of Artificial Sequence: Synthetic oligonucleotide
  Target: LAMA2; (+) strand; PAM type: NNNNGHTT; PAM sequence: TGCTGATT
agtgctctcttctttgggga

SEQ ID NO: 48656 - DNA, 20 bp, Artificial Sequence
  Description of Artificial Sequence: Synthetic oligonucleotide
  Target: LAMA2; (+) strand; PAM type: NNNNGHTT; PAM sequence: AAGTGCTT
ccttaaacacttgagtcaag

SEQ ID NO: 48657 - DNA, 20 bp, Artificial Sequence
  Description of Artificial Sequence: Synthetic oligonucleotide
  Target: LAMA2; (+) strand; PAM type: NNNNGHTT; PAM sequence: AAGTGTTT
tctccctaatgaatatgagg

SEQ ID NO: 48658 - DNA, 20 bp, Artificial Sequence
  Description of Artificial Sequence: Synthetic oligonucleotide
  Target: LAMA2; (+) strand; PAM type: NNNNGHTT; PAM sequence: TTCTGATT
atatttttataaggcataac

SEQ ID NO: 48659 - DNA, 20 bp, Artificial Sequence
  Description of Artificial Sequence: Synthetic oligonucleotide
  Target: LAMA2; (+) strand; PAM type: NNNNGHTT; PAM sequence: TATGGTTT
gtataactaccatgaatata

SEQ ID NO: 48660 - DNA, 20 bp, Artificial Sequence
  Description of Artificial Sequence: Synthetic oligonucleotide
  Target: LAMA2; (+) strand; PAM type: NNNNGHTT; PAM sequence: TTAAGTTT
aacctttatagtaaacataa

SEQ ID NO: 48661 - DNA, 20 bp, Artificial Sequence
  Description of Artificial Sequence: Synthetic oligonucleotide
  Target: LAMA2; (+) strand; PAM type: NNNNGHTT; PAM sequence: TGTAGATT
actaaatgcatagtgtcatt

SEQ ID NO: 48662 - DNA, 20 bp, Artificial Sequence
  Description of Artificial Sequence: Synthetic oligonucleotide
  Target: LAMA2; (+) strand; PAM type: NNNNGHTT; PAM sequence: AGCTGCTT
atgtaatacatattcaccag

SEQ ID NO: 48663 - DNA, 20 bp, Artificial Sequence
  Description of Artificial Sequence: Synthetic oligonucleotide
  Target: LAMA2; (+) strand; PAM type: NNNNGHTT; PAM sequence: CTAAGCTT
cttctcctttgcaattaagt

SEQ ID NO: 48664 - DNA, 20 bp, Artificial Sequence
  Description of Artificial Sequence: Synthetic oligonucleotide
  Target: LAMA2; (+) strand; PAM type: NNNNGHTT; PAM sequence: ATAGGCTT
gtctaagctttaaccagaaa

SEQ ID NO: 48665 - DNA, 20 bp, Artificial Sequence
  Description of Artificial Sequence: Synthetic oligonucleotide
  Target: LAMA2; (+) strand; PAM type: NNNNGHTT; PAM sequence: TTAGGATT
ttccatcctgctaagaaacc

SEQ ID NO: 48666 - DNA, 20 bp, Artificial Sequence
  Description of Artificial Sequence: Synthetic oligonucleotide
  Target: LAMA2; (+) strand; PAM type: NNNNGHTT; PAM sequence: TTCTGATT
gaattacactgaatagacca

SEQ ID NO: 48667 - DNA, 20 bp, Artificial Sequence
  Description of Artificial Sequence: Synthetic oligonucleotide
  Target: LAMA2; (+) strand; PAM type: NNNNGHTT; PAM sequence: ATTAGTTT
tctgattaactcaagggcac

SEQ ID NO: 48668 - DNA, 20 bp, Artificial Sequence
  Description of Artificial Sequence: Synthetic oligonucleotide
  Target: LAMA2; (+) strand; PAM type: NNNNGHTT; PAM sequence: TGAAGCTT
ttatattgtctgacatggca

SEQ ID NO: 48669 - DNA, 20 bp, Artificial Sequence
  Description of Artificial Sequence: Synthetic oligonucleotide
  Target: LAMA2; (+) strand; PAM type: NNNNGHTT; PAM sequence: GGCGGATT
catttccctgaagaatttaa

SEQ ID NO: 48670 - DNA, 20 bp, Artificial Sequence
  Description of Artificial Sequence: Synthetic oligonucleotide
  Target: LAMA2; (+) strand; PAM type: NNNNGHTT; PAM sequence: AAAAGCTT
cccccatttctcttctactt

SEQ ID NO: 48671 - DNA, 20 bp, Artificial Sequence
  Description of Artificial Sequence: Synthetic oligonucleotide
  Target: LAMA2; (+) strand; PAM type: NNNNGHTT; PAM sequence: CAGGGCTT
aaaaatccaaaatgaaaatt

SEQ ID NO: 48672 - DNA, 20 bp, Artificial Sequence
  Description of Artificial Sequence: Synthetic oligonucleotide
  Target: LAMA2; (+) strand; PAM type: NNNNGHTT; PAM sequence: TTTTGTTT
ccaaaatgaaaattcagggc

SEQ ID NO: 48673 - DNA, 20 bp, Artificial Sequence
  Description of Artificial Sequence: Synthetic oligonucleotide
  Target: LAMA2; (+) strand; PAM type: NNNNGHTT; PAM sequence: TTAGGTTT
gtttcagtgtaatttggcat

SEQ ID NO: 48674 - DNA, 20 bp, Artificial Sequence
  Description of Artificial Sequence: Synthetic oligonucleotide
  Target: LAMA2; (+) strand; PAM type: NNNNGHTT; PAM sequence: ATAAGATT
gctctttcccttttctctat

SEQ ID NO: 48675 - DNA, 20 bp, Artificial Sequence
  Description of Artificial Sequence: Synthetic oligonucleotide
  Target: LAMA2; (+) strand; PAM type: NNNNGHTT; PAM sequence: TTTTGTTT
tcccttttctctatataaga

SEQ ID NO: 48676 - DNA, 20 bp, Artificial Sequence
  Description of Artificial Sequence: Synthetic oligonucleotide
  Target: LAMA2; (+) strand; PAM type: NNNNGHTT; PAM sequence: AGTGGATT
agagccttaatttgtggatc

SEQ ID NO: 48677 - DNA, 20 bp, Artificial Sequence
  Description of Artificial Sequence: Synthetic oligonucleotide
  Target: LAMA2; (+) strand; PAM type: NNNNGHTT; PAM sequence: AAGTGATT
tttttatgaatagaaagact

SEQ ID NO: 48678 - DNA, 20 bp, Artificial Sequence
  Description of Artificial Sequence: Synthetic oligonucleotide
  Target: LAMA2; (+) strand; PAM type: NNNNGHTT; PAM sequence: AATTGTTT
tcagcccaaaactgacatgg

SEQ ID NO: 48679 - DNA, 20 bp, Artificial Sequence
  Description of Artificial Sequence: Synthetic oligonucleotide
  Target: LAMA2; (+) strand; PAM type: NNNNGHTT; PAM sequence: CCTAGTTT
aacagaccctactaatgatg

SEQ ID NO: 48680 - DNA, 20 bp, Artificial Sequence
  Description of Artificial Sequence: Synthetic oligonucleotide
  Target: LAMA2; (+) strand; PAM type: NNNNGHTT; PAM sequence: TACTGATT
cctactaatgatgcctagtt

SEQ ID NO: 48681 - DNA, 20 bp, Artificial Sequence
  Description of Artificial Sequence: Synthetic oligonucleotide
  Target: LAMA2; (+) strand; PAM type: NNNNGHTT; PAM sequence: TTTTGTTT
aatgatgcctagtttactga

SEQ ID NO: 48682 - DNA, 20 bp, Artificial Sequence
  Description of Artificial Sequence: Synthetic oligonucleotide
  Target: LAMA2; (+) strand; PAM type: NNNNGHTT; PAM sequence: TGGTGTTT
ttgatgataaagacagaatc

SEQ ID NO: 48683 - DNA, 20 bp, Artificial Sequence
  Description of Artificial Sequence: Synthetic oligonucleotide
  Target: LAMA2; (+) strand; PAM type: NNNNGHTT; PAM sequence: TTTAGCTT
ctgttcagctgaccctgcat

SEQ ID NO: 48684 - DNA, 20 bp, Artificial Sequence
  Description of Artificial Sequence: Synthetic oligonucleotide
  Target: LAMA2; (+) strand; PAM type: NNNNGHTT; PAM sequence: TCTTGTTT
gctgaccctgcattttagct

SEQ ID NO: 48685 - DNA, 20 bp, Artificial Sequence
  Description of Artificial Sequence: Synthetic oligonucleotide
  Target: LAMA2; (+) strand; PAM type: NNNNGHTT; PAM sequence: CATGGTTT
ttagcttcttgtttattttt

SEQ ID NO: 48686 - DNA, 20 bp, Artificial Sequence
  Description of Artificial Sequence: Synthetic oligonucleotide
  Target: LAMA2; (+) strand; PAM type: NNNNGHTT; PAM sequence: CATGGTTT
tttaacccagcattaagtag

SEQ ID NO: 48687 - DNA, 20 bp, Artificial Sequence
  Description of Artificial Sequence: Synthetic oligonucleotide
  Target: LAMA2; (+) strand; PAM type: NNNNGHTT; PAM sequence: TAAAGCTT
aaaataaatttataaattta

SEQ ID NO: 48688 - DNA, 20 bp, Artificial Sequence
  Description of Artificial Sequence: Synthetic oligonucleotide
  Target: LAMA2; (+) strand; PAM type: NNNNGHTT; PAM sequence: ACTTGCTT
ttataaatttataaagctta

SEQ ID NO: 48689 - DNA, 20 bp, Artificial Sequence
  Description of Artificial Sequence: Synthetic oligonucleotide
  Target: LAMA2; (+) strand; PAM type: NNNNGHTT; PAM sequence: ATTTGATT
aaagcttaacttgctttaaa

SEQ ID NO: 48690 - DNA, 20 bp, Artificial Sequence
  Description of Artificial Sequence: Synthetic oligonucleotide
  Target: LAMA2; (+) strand; PAM type: NNNNGHTT; PAM sequence: GGAAGATT
gaagtattcaatgtcacatg

SEQ ID NO: 48691 - DNA, 20 bp, Artificial Sequence
  Description of Artificial Sequence: Synthetic oligonucleotide
  Target: LAMA2; (+) strand; PAM type: NNNNGHTT; PAM sequence: TCATGCTT
caatgtcacatgggaagatt

SEQ ID NO: 48692 - DNA, 20 bp, Artificial Sequence
  Description of Artificial Sequence: Synthetic oligonucleotide
  Target: LAMA2; (+) strand; PAM type: NNNNGHTT; PAM sequence: GCTTGCTT
gtcacatgggaagatttcat

SEQ ID NO: 48693 - DNA, 20 bp, Artificial Sequence
  Description of Artificial Sequence: Synthetic oligonucleotide
  Target: LAMA2; (+) strand; PAM type: NNNNGHTT; PAM sequence: TGAAGCTT
aaataaccaatccatcagag

SEQ ID NO: 48694 - DNA, 20 bp, Artificial Sequence
  Description of Artificial Sequence: Synthetic oligonucleotide
  Target: LAMA2; (+) strand; PAM type: NNNNGHTT; PAM sequence: TGCAGTTT
ccattatataggttgtctga

SEQ ID NO: 48695 - DNA, 20 bp, Artificial Sequence
  Description of Artificial Sequence: Synthetic oligonucleotide
  Target: LAMA2; (+) strand; PAM type: NNNNGHTT; PAM sequence: TCTGGTTT
taggttgtctgatgcagttt

SEQ ID NO: 48696 - DNA, 20 bp, Artificial Sequence
  Description of Artificial Sequence: Synthetic oligonucleotide
  Target: LAMA2; (+) strand; PAM type: NNNNGHTT; PAM sequence: TTGAGTTT
ggtttccactacaaaaatac

SEQ ID NO: 48697 - DNA, 20 bp, Artificial Sequence
  Description of Artificial Sequence: Synthetic oligonucleotide
  Target: LAMA2; (+) strand; PAM type: NNNNGHTT; PAM sequence: AGATGATT
acaaaaatacttgagtttta

SEQ ID NO: 48698 - DNA, 20 bp, Artificial Sequence
  Description of Artificial Sequence: Synthetic oligonucleotide
  Target: LAMA2; (+) strand; PAM type: NNNNGHTT; PAM sequence: GCAAGATT
taaaaaaccctctcaattat

SEQ ID NO: 48699 - DNA, 20 bp, Artificial Sequence
  Description of Artificial Sequence: Synthetic oligonucleotide
  Target: LAMA2; (+) strand; PAM type: NNNNGHTT; PAM sequence: ACATGTTT
tgttagaaataccattttca

SEQ ID NO: 48700 - DNA, 20 bp, Artificial Sequence
  Description of Artificial Sequence: Synthetic oligonucleotide
  Target: LAMA2; (+) strand; PAM type: NNNNGHTT; PAM sequence: TTTTGATT
atgtttaaggcaaaattaat

SEQ ID NO: 48701 - DNA, 20 bp, Artificial Sequence
  Description of Artificial Sequence: Synthetic oligonucleotide
  Target: LAMA2; (+) strand; PAM type: NNNNGHTT; PAM sequence: AATAGCTT
aaaacaagcaattcttcagt

SEQ ID NO: 48702 - DNA, 20 bp, Artificial Sequence
  Description of Artificial Sequence: Synthetic oligonucleotide
  Target: LAMA2; (+) strand; PAM type: NNNNGHTT; PAM sequence: CTTAGTTT
aagcaattcttcagtaatag

SEQ ID NO: 48703 - DNA, 20 bp, Artificial Sequence
  Description of Artificial Sequence: Synthetic oligonucleotide
  Target: LAMA2; (+) strand; PAM type: NNNNGHTT; PAM sequence: CCATGTTT
aaatctttcttcaaatggat

SEQ ID NO: 48704 - DNA, 20 bp, Artificial Sequence
  Description of Artificial Sequence: Synthetic oligonucleotide
  Target: LAMA2; (+) strand; PAM type: NNNNGHTT; PAM sequence: AAAAGTTT
gaccttaatgctatctttta

SEQ ID NO: 48705 - DNA, 20 bp, Artificial Sequence
  Description of Artificial Sequence: Synthetic oligonucleotide
  Target: LAMA2; (+) strand; PAM type: NNNNGHTT; PAM sequence: GCCTGTTT
tttaaataacttagagaaaa

SEQ ID NO: 48706 - DNA, 20 bp, Artificial Sequence
  Description of Artificial Sequence: Synthetic oligonucleotide
  Target: LAMA2; (+) strand; PAM type: NNNNGHTT; PAM sequence: TGATGTTT
tagttgatgaaattggcacg

SEQ ID NO: 48707 - DNA, 20 bp, Artificial Sequence
  Description of Artificial Sequence: Synthetic oligonucleotide
  Target: LAMA2; (+) strand; PAM type: NNNNGHTT; PAM sequence: CCATGTTT
ttaaaatttttcaattttct

SEQ ID NO: 48708 - DNA, 20 bp, Artificial Sequence
  Description of Artificial Sequence: Synthetic oligonucleotide
  Target: LAMA2; (+) strand; PAM type: NNNNGHTT; PAM sequence: GCAAGCTT
catgtttaattatgagtcaa

SEQ ID NO: 48709 - DNA, 20 bp, Artificial Sequence
  Description of Artificial Sequence: Synthetic oligonucleotide
  Target: LAMA2; (+) strand; PAM type: NNNNGHTT; PAM sequence: GGAGGATT
agctaagaggccatagcccc

SEQ ID NO: 48710 - DNA, 20 bp, Artificial Sequence
  Description of Artificial Sequence: Synthetic oligonucleotide
  Target: LAMA2; (+) strand; PAM type: NNNNGHTT; PAM sequence: CTATGATT
gccatagccccggaggattt

SEQ ID NO: 48711 - DNA, 20 bp, Artificial Sequence
  Description of Artificial Sequence: Synthetic oligonucleotide
  Target: LAMA2; (+) strand; PAM type: NNNNGHTT; PAM sequence: AATTGATT
tcagcaatttcaagctgaac

SEQ ID NO: 48712 - DNA, 20 bp, Artificial Sequence
  Description of Artificial Sequence: Synthetic oligonucleotide
  Target: LAMA2; (+) strand; PAM type: NNNNGHTT; PAM sequence: GTAAGATT
gaaaataaagaaaaaatgaa

SEQ ID NO: 48713 - DNA, 20 bp, Artificial Sequence
  Description of Artificial Sequence: Synthetic oligonucleotide
  Target: LAMA2; (+) strand; PAM type: NNNNGHTT; PAM sequence: TGTTGTTT
tgcatatgctgaaactactg

SEQ ID NO: 48714 - DNA, 20 bp, Artificial Sequence
  Description of Artificial Sequence: Synthetic oligonucleotide
  Target: LAMA2; (+) strand; PAM type: NNNNGHTT; PAM sequence: CCTGGTTT
catattgtgataaatgtctt

SEQ ID NO: 48715 - DNA, 20 bp, Artificial Sequence
  Description of Artificial Sequence: Synthetic oligonucleotide
  Target: LAMA2; (+) strand; PAM type: NNNNGHTT; PAM sequence: TGAGGATT
acctaagatatttaaaacta

SEQ ID NO: 48716 - DNA, 20 bp, Artificial Sequence
  Description of Artificial Sequence: Synthetic oligonucleotide
  Target: LAMA2; (+) strand; PAM type: NNNNGHTT; PAM sequence: TCTAGTTT
gaatttgtaatttttttagc

SEQ ID NO: 48717 - DNA, 20 bp, Artificial Sequence
  Description of Artificial Sequence: Synthetic oligonucleotide
  Target: LAMA2; (+) strand; PAM type: NNNNGHTT; PAM sequence: TGGTGATT
aatttttttagctctagttt

SEQ ID NO: 48718 - DNA, 20 bp, Artificial Sequence
  Description of Artificial Sequence: Synthetic oligonucleotide
  Target: LAMA2; (+) strand; PAM type: NNNNGHTT; PAM sequence: GACTGATT
ctcaaaaagtaaaatgaagg

SEQ ID NO: 48719 - DNA, 20 bp, Artificial Sequence
  Description of Artificial Sequence: Synthetic oligonucleotide
  Target: LAMA2; (+) strand; PAM type: NNNNGHTT; PAM sequence: AGCAGATT
ctagaacaaccacctcttag

SEQ ID NO: 48720 - DNA, 20 bp, Artificial Sequence
  Description of Artificial Sequence: Synthetic oligonucleotide
  Target: LAMA2; (+) strand; PAM type: NNNNGHTT; PAM sequence: AGCTGCTT
tttagaggaatgctatatcc

SEQ ID NO: 48721 - DNA, 20 bp, Artificial Sequence
  Description of Artificial Sequence: Synthetic oligonucleotide
  Target: LAMA2; (+) strand; PAM type: NNNNGHTT; PAM sequence: TGTTGTTT
aagcacaccccaaccaaaaa

SEQ ID NO: 48722 - DNA, 20 bp, Artificial Sequence
  Description of Artificial Sequence: Synthetic oligonucleotide
  Target: LAMA2; (+) strand; PAM type: NNNNGHTT; PAM sequence: TTTTGTTT
caccccaaccaaaaatgttg

SEQ ID NO: 48723 - DNA, 20 bp, Artificial Sequence
  Description of Artificial Sequence: Synthetic oligonucleotide
  Target: LAMA2; (+) strand; PAM type: NNNNGHTT; PAM sequence: AAGTGATT
aatcaacaatttttactcaa

SEQ ID NO: 48724 - DNA, 20 bp, Artificial Sequence
  Description of Artificial Sequence: Synthetic oligonucleotide
  Target: LAMA2; (+) strand; PAM type: NNNNGHTT; PAM sequence: GTGAGCTT
tctgaagaactctcttaaag

SEQ ID NO: 48725 - DNA, 20 bp, Artificial Sequence
  Description of Artificial Sequence: Synthetic oligonucleotide
  Target: LAMA2; (+) strand; PAM type: NNNNGHTT; PAM sequence: TAGTGCTT
aactctcttaaaggtgagct

SEQ ID NO: 48726 - DNA, 20 bp, Artificial Sequence
  Description of Artificial Sequence: Synthetic oligonucleotide
  Target: LAMA2; (+) strand; PAM type: NNNNGHTT; PAM sequence: GTTAGATT
cctaattaaaatggtctttt

SEQ ID NO: 48727 - DNA, 20 bp, Artificial Sequence
  Description of Artificial Sequence: Synthetic oligonucleotide
  Target: LAMA2; (+) strand; PAM type: NNNNGHTT; PAM sequence: TTAAGTTT
actttgagataattctaaca

SEQ ID NO: 48728 - DNA, 20 bp, Artificial Sequence
  Description of Artificial Sequence: Synthetic oligonucleotide
  Target: LAMA2; (+) strand; PAM type: NNNNGHTT; PAM sequence: CTGTGCTT
tttaaatgttctccttgaaa

SEQ ID NO: 48729 - DNA, 20 bp, Artificial Sequence
  Description of Artificial Sequence: Synthetic oligonucleotide
  Target: LAMA2; (+) strand; PAM type: NNNNGHTT; PAM sequence: AAATGCTT
tcctactgttaatccacatg

SEQ ID NO: 48730 - DNA, 20 bp, Artificial Sequence
  Description of Artificial Sequence: Synthetic oligonucleotide
  Target: LAMA2; (+) strand; PAM type: NNNNGHTT; PAM sequence: CATTGTTT
tcagaattttttaccttact

SEQ ID NO: 48731 - DNA, 20 bp, Artificial Sequence
  Description of Artificial Sequence: Synthetic oligonucleotide
  Target: LAMA2; (+) strand; PAM type: NNNNGHTT; PAM sequence: TATAGATT
agatattattatcctcattg

SEQ ID NO: 48732 - DNA, 20 bp, Artificial Sequence
  Description of Artificial Sequence: Synthetic oligonucleotide
  Target: LAMA2; (+) strand; PAM type: NNNNGHTT; PAM sequence: TTTGGTTT
ccaattctggagccagactc

SEQ ID NO: 48733 - DNA, 20 bp, Artificial Sequence
  Description of Artificial Sequence: Synthetic oligonucleotide
  Target: LAMA2; (+) strand; PAM type: NNNNGHTT; PAM sequence: AGCTGATT
tatgatgaacccaatctaag

SEQ ID NO: 48734 - DNA, 20 bp, Artificial Sequence
  Description of Artificial Sequence: Synthetic oligonucleotide
  Target: LAMA2; (+) strand; PAM type: NNNNGHTT; PAM sequence: TTTAGTTT
taaagtatcagagttggaat

SEQ ID NO: 48735 - DNA, 20 bp, Artificial Sequence
  Description of Artificial Sequence: Synthetic oligonucleotide
  Target: LAMA2; (+) strand; PAM type: NNNNGHTT; PAM sequence: ATGTGCTT
gaattttagttttaaaatcc

SEQ ID NO: 48736 - DNA, 20 bp, Artificial Sequence
  Description of Artificial Sequence: Synthetic oligonucleotide
  Target: LAMA2; (+) strand; PAM type: NNNNGHTT; PAM sequence: CAAGGTTT
ggataagtcaatttatctag

SEQ ID NO: 48737 - DNA, 20 bp, Artificial Sequence
  Description of Artificial Sequence: Synthetic oligonucleotide
  Target: LAMA2; (+) strand; PAM type: NNNNGHTT; PAM sequence: ATTGGTTT
aggttttgagaaaataagac

SEQ ID NO: 48738 - DNA, 20 bp, Artificial Sequence
  Description of Artificial Sequence: Synthetic oligonucleotide
  Target: LAMA2; (+) strand; PAM type: NNNNGHTT; PAM sequence: ATTAGATT
tcctaacagatcaggcaggc

SEQ ID NO: 48739 - DNA, 20 bp, Artificial Sequence
  Description of Artificial Sequence: Synthetic oligonucleotide
  Target: LAMA2; (+) strand; PAM type: NNNNGHTT; PAM sequence: TCTAGCTT
cgaactgcacctgcgaggga

SEQ ID NO: 48740 - DNA, 20 bp, Artificial Sequence
  Description of Artificial Sequence: Synthetic oligonucleotide
  Target: LAMA2; (+) strand; PAM type: NNNNGHTT; PAM sequence: AACAGTTT
tgcctgatgatctgacgtgg

SEQ ID NO: 48741 - DNA, 20 bp, Artificial Sequence
  Description of Artificial Sequence: Synthetic oligonucleotide
  Target: LAMA2; (+) strand; PAM type: NNNNGHTT; PAM sequence: TGAAGATT
agcctgaatgggctcaaaac

SEQ ID NO: 48742 - DNA, 20 bp, Artificial Sequence
  Description of Artificial Sequence: Synthetic oligonucleotide
  Target: LAMA2; (+) strand; PAM type: NNNNGHTT; PAM sequence: ACTTGTTT
gatcacccaatggaagacct

SEQ ID NO: 48743 - DNA, 20 bp, Artificial Sequence
  Description of Artificial Sequence: Synthetic oligonucleotide
  Target: LAMA2; (+) strand; PAM type: NNNNGHTT; PAM sequence: AATTGATT
aatacatattagaattatat

SEQ ID NO: 48744 - DNA, 20 bp, Artificial Sequence
  Description of Artificial Sequence: Synthetic oligonucleotide
  Target: LAMA2; (+) strand; PAM type: NNNNGHTT; PAM sequence: TATGGATT
ttgattgagtatgcaaaccc

SEQ ID NO: 48745 - DNA, 20 bp, Artificial Sequence
  Description of Artificial Sequence: Synthetic oligonucleotide
  Target: LAMA2; (+) strand; PAM type: NNNNGHTT; PAM sequence: TTTTGCTT
aggaaacattagggagataa

SEQ ID NO: 48746 - DNA, 20 bp, Artificial Sequence
  Description of Artificial Sequence: Synthetic oligonucleotide
  Target: LAMA2; (+) strand; PAM type: NNNNGHTT; PAM sequence: AAGGGATT
aacacaatccatcagtgcca

SEQ ID NO: 48747 - DNA, 20 bp, Artificial Sequence
  Description of Artificial Sequence: Synthetic oligonucleotide
  Target: LAMA2; (+) strand; PAM type: NNNNGHTT; PAM sequence: TTGGGTTT
atccatcagtgccaaaggga

SEQ ID NO: 48748 - DNA, 20 bp, Artificial Sequence
  Description of Artificial Sequence: Synthetic oligonucleotide
  Target: LAMA2; (+) strand; PAM type: NNNNGHTT; PAM sequence: TCCTGATT
atttggtataattacgttga

SEQ ID NO: 48749 - DNA, 20 bp, Artificial Sequence
  Description of Artificial Sequence: Synthetic oligonucleotide
  Target: LAMA2; (+) strand; PAM type: NNNNGHTT; PAM sequence: TAATGATT
taccagtaacaccaagtatt

SEQ ID NO: 48750 - DNA, 20 bp, Artificial Sequence
  Description of Artificial Sequence: Synthetic oligonucleotide
  Target: LAMA2; (+) strand; PAM type: NNNNGHTT; PAM sequence: AAATGTTT
taatgattctttcattttca

SEQ ID NO: 48751 - DNA, 20 bp, Artificial Sequence
  Description of Artificial Sequence: Synthetic oligonucleotide
  Target: LAMA2; (+) strand; PAM type: NNNNGHTT; PAM sequence: TCCAGCTT
aatagcaatttattttaaat

SEQ ID NO: 48752 - DNA, 20 bp, Artificial Sequence
  Description of Artificial Sequence: Synthetic oligonucleotide
  Target: LAMA2; (+) strand; PAM type: NNNNGHTT; PAM sequence: CTTAGTTT
gagagggcagtgataattca

SEQ ID NO: 48753 - DNA, 20 bp, Artificial Sequence
  Description of Artificial Sequence: Synthetic oligonucleotide
  Target: LAMA2; (+) strand; PAM type: NNNNGHTT; PAM sequence: AGAAGTTT
tcacttagtttataaatcct

SEQ ID NO: 48754 - DNA, 20 bp, Artificial Sequence
  Description of Artificial Sequence: Synthetic oligonucleotide
  Target: LAMA2; (+) strand; PAM type: NNNNGHTT; PAM sequence: CATGGTTT
taaaacaactagaaaattat

SEQ ID NO: 48755 - DNA, 20 bp, Artificial Sequence
  Description of Artificial Sequence: Synthetic oligonucleotide
  Target: LAMA2; (+) strand; PAM type: NNNNGHTT; PAM sequence: AAATGTTT
cattttcatctaacaacctg

SEQ ID NO: 48756 - DNA, 20 bp, Artificial Sequence
  Description of Artificial Sequence: Synthetic oligonucleotide
  Target: LAMA2; (+) strand; PAM type: NNNNGHTT; PAM sequence: ACGAGATT
atttgcatacaatcctgaag

SEQ ID NO: 48757 - DNA, 20 bp, Artificial Sequence
  Description of Artificial Sequence: Synthetic oligonucleotide
  Target: LAMA2; (+) strand; PAM type: NNNNGHTT; PAM sequence: TAAAGCTT
cgcaaccttcatgggaagtc

SEQ ID NO: 48758 - DNA, 20 bp, Artificial Sequence
  Description of Artificial Sequence: Synthetic oligonucleotide
  Target: LAMA2; (+) strand; PAM type: NNNNGHTT; PAM sequence: GATAGTTT
tgggaagtctaaagcttagt

SEQ ID NO: 48759 - DNA, 20 bp, Artificial Sequence
  Description of Artificial Sequence: Synthetic oligonucleotide
  Target: LAMA2; (+) strand; PAM type: NNNNGHTT; PAM sequence: TGGTGATT
gcttagtgatagttttacct

SEQ ID NO: 48760 - DNA, 20 bp, Artificial Sequence
  Description of Artificial Sequence: Synthetic oligonucleotide
  Target: LAMA2; (+) strand; PAM type: NNNNGHTT; PAM sequence: GATAGATT
caaatatgtaagaagataga

SEQ ID NO: 48761 - DNA, 20 bp, Artificial Sequence
  Description of Artificial Sequence: Synthetic oligonucleotide
  Target: LAMA2; (+) strand; PAM type: NNNNGHTT; PAM sequence: CTATGCTT
tcaactatttatggtgatca

SEQ ID NO: 48762 - DNA, 20 bp, Artificial Sequence
  Description of Artificial Sequence: Synthetic oligonucleotide
  Target: LAMA2; (+) strand; PAM type: NNNNGHTT; PAM sequence: GAATGTTT
aataacaatgtaactatttc

SEQ ID NO: 48763 - DNA, 20 bp, Artificial Sequence
  Description of Artificial Sequence: Synthetic oligonucleotide
  Target: LAMA2; (+) strand; PAM type: NNNNGHTT; PAM sequence: CATAGCTT
ttctttaatttctggcatca

SEQ ID NO: 48764 - DNA, 20 bp, Artificial Sequence
  Description of Artificial Sequence: Synthetic oligonucleotide
  Target: LAMA2; (+) strand; PAM type: NNNNGHTT; PAM sequence: ATGTGTTT
tctgcctttgaatacttagg

SEQ ID NO: 48765 - DNA, 20 bp, Artificial Sequence
  Description of Artificial Sequence: Synthetic oligonucleotide
  Target: LAMA2; (+) strand; PAM type: NNNNGHTT; PAM sequence: TATAGATT
tataatattattgaagttgt

SEQ ID NO: 48766 - DNA, 20 bp, Artificial Sequence
  Description of Artificial Sequence: Synthetic oligonucleotide
  Target: LAMA2; (+) strand; PAM type: NNNNGHTT; PAM sequence: ACTGGTTT
ctaatatcactgtaaatact

SEQ ID NO: 48767 - DNA, 20 bp, Artificial Sequence
  Description of Artificial Sequence: Synthetic oligonucleotide
  Target: LAMA2; (+) strand; PAM type: NNNNGHTT; PAM sequence: TTAAGTTT
tgggtcaggaatgctgaaat

SEQ ID NO: 48768 - DNA, 20 bp, Artificial Sequence
  Description of Artificial Sequence: Synthetic oligonucleotide
  Target: LAMA2; (+) strand; PAM type: NNNNGHTT; PAM sequence: AGATGTTT
tagaaaattgagaatgctct

SEQ ID NO: 48769 - DNA, 20 bp, Artificial Sequence
  Description of Artificial Sequence: Synthetic oligonucleotide
  Target: LAMA2; (+) strand; PAM type: NNNNGHTT; PAM sequence: CATTGTTT
ttttagtgctctttcctaca

SEQ ID NO: 48770 - DNA, 20 bp, Artificial Sequence
  Description of Artificial Sequence: Synthetic oligonucleotide
  Target: LAMA2; (+) strand; PAM type: NNNNGHTT; PAM sequence: GGGAGATT
acattgttttatgtgcacat

SEQ ID NO: 48771 - DNA, 20 bp, Artificial Sequence
  Description of Artificial Sequence: Synthetic oligonucleotide
  Target: LAMA2; (+) strand; PAM type: NNNNGHTT; PAM sequence: TAGTGATT
agagaaattaagtgccttga

SEQ ID NO: 48772 - DNA, 20 bp, Artificial Sequence
  Description of Artificial Sequence: Synthetic oligonucleotide
  Target: LAMA2; (+) strand; PAM type: NNNNGHTT; PAM sequence: TACAGCTT
aagtgccttgatagtgatta

SEQ ID NO: 48773 - DNA, 20 bp, Artificial Sequence
  Description of Artificial Sequence: Synthetic oligonucleotide
  Target: LAMA2; (+) strand; PAM type: NNNNGHTT; PAM sequence: GCTTGCTT
gccttgatagtgattataca

SEQ ID NO: 48774 - DNA, 20 bp, Artificial Sequence
  Description of Artificial Sequence: Synthetic oligonucleotide
  Target: LAMA2; (+) strand; PAM type: NNNNGHTT; PAM sequence: CTGTGCTT
atatattttgactcacctct

SEQ ID NO: 48775 - DNA, 20 bp, Artificial Sequence
  Description of Artificial Sequence: Synthetic oligonucleotide
  Target: LAMA2; (+) strand; PAM type: NNNNGHTT; PAM sequence: CACTGTTT
tgtaaaaatcagtaaatctt

SEQ ID NO: 48776 - DNA, 20 bp, Artificial Sequence
  Description of Artificial Sequence: Synthetic oligonucleotide
  Target: LAMA2; (+) strand; PAM type: NNNNGHTT; PAM sequence: TGCAGATT
ctagagcaggatgagaaaac

SEQ ID NO: 48777 - DNA, 20 bp, Artificial Sequence
  Description of Artificial Sequence: Synthetic oligonucleotide
  Target: LAMA2; (+) strand; PAM type: NNNNGHTT; PAM sequence: TTTTGTTT
cgttaaatcaacatatctta

SEQ ID NO: 48778 - DNA, 20 bp, Artificial Sequence
  Description of Artificial Sequence: Synthetic oligonucleotide
  Target: LAMA2; (+) strand; PAM type: NNNNGHTT; PAM sequence: CAAAGTTT
tgtaaaaaaaaaaaaaaagg

SEQ ID NO: 48779 - DNA, 20 bp, Artificial Sequence
  Description of Artificial Sequence: Synthetic oligonucleotide
  Target: LAMA2; (+) strand; PAM type: NNNNGHTT; PAM sequence: ATATGCTT
atctataatttattatggca

SEQ ID NO: 48780 - DNA, 20 bp, Artificial Sequence
  Description of Artificial Sequence: Synthetic oligonucleotide
  Target: LAMA2; (+) strand; PAM type: NNNNGHTT; PAM sequence: AAGGGTTT
ttcatactttttcagtataa

SEQ ID NO: 48781 - DNA, 20 bp, Artificial Sequence
  Description of Artificial Sequence: Synthetic oligonucleotide
  Target: LAMA2; (+) strand; PAM type: NNNNGHTT; PAM sequence: ACAGGTTT
tccattttgcagaatgggaa

SEQ ID NO: 48782 - DNA, 20 bp, Artificial Sequence
  Description of Artificial Sequence: Synthetic oligonucleotide
  Target: LAMA2; (+) strand; PAM type: NNNNGHTT; PAM sequence: TGGAGATT
ctaattaagaaatgcaattg

SEQ ID NO: 48783 - DNA, 20 bp, Artificial Sequence
  Description of Artificial Sequence: Synthetic oligonucleotide
  Target: LAMA2; (+) strand; PAM type: NNNNGHTT; PAM sequence: ATCAGATT
aatgcaattgtggagattaa

SEQ ID NO: 48784 - DNA, 20 bp, Artificial Sequence
  Description of Artificial Sequence: Synthetic oligonucleotide
  Target: LAMA2; (+) strand; PAM type: NNNNGHTT; PAM sequence: AAGTGTTT
ttaaaggtaattaaagaaat

SEQ ID NO: 48785 - DNA, 20 bp, Artificial Sequence
  Description of Artificial Sequence: Synthetic oligonucleotide
  Target: LAMA2; (+) strand; PAM type: NNNNGHTT; PAM sequence: GTTTGCTT
aggtaattaaagaaataagt

SEQ ID NO: 48786 - DNA, 20 bp, Artificial Sequence
  Description of Artificial Sequence: Synthetic oligonucleotide
  Target: LAMA2; (+) strand; PAM type: NNNNGHTT; PAM sequence: TAATGATT
taaagaaataagtgtttgct

SEQ ID NO: 48787 - DNA, 20 bp, Artificial Sequence
  Description of Artificial Sequence: Synthetic oligonucleotide
  Target: LAMA2; (+) strand; PAM type: NNNNGHTT; PAM sequence: TCCAGCTT
atattctcattaccctcatc

SEQ ID NO: 48788 - DNA, 20 bp, Artificial Sequence
  Description of Artificial Sequence: Synthetic oligonucleotide
  Target: LAMA2; (+) strand; PAM type: NNNNGHTT; PAM sequence: AATGGTTT
gacattgtgtagccactcaa

SEQ ID NO: 48789 - DNA, 20 bp, Artificial Sequence
  Description of Artificial Sequence: Synthetic oligonucleotide
  Target: LAMA2; (+) strand; PAM type: NNNNGHTT; PAM sequence: CCCTGATT
gtatgcaaatacagaacatg

SEQ ID NO: 48790 - DNA, 20 bp, Artificial Sequence
  Description of Artificial Sequence: Synthetic oligonucleotide
  Target: LAMA2; (+) strand; PAM type: NNNNGHTT; PAM sequence: GGAAGTTT
gattttctaaccctaatgat

SEQ ID NO: 48791 - DNA, 20 bp, Artificial Sequence
  Description of Artificial Sequence: Synthetic oligonucleotide
  Target: LAMA2; (+) strand; PAM type: NNNNGHTT; PAM sequence: CCATGATT
tggaagttttaattttatac

SEQ ID NO: 48792 - DNA, 20 bp, Artificial Sequence
  Description of Artificial Sequence: Synthetic oligonucleotide
  Target: LAMA2; (+) strand; PAM type: NNNNGHTT; PAM sequence: GAGTGCTT
ttttatacccatgattaaag

SEQ ID NO: 48793 - DNA, 20 bp, Artificial Sequence
  Description of Artificial Sequence: Synthetic oligonucleotide
  Target: LAMA2; (+) strand; PAM type: NNNNGHTT; PAM sequence: GCTTGTTT
atacccatgattaaaggagt

SEQ ID NO: 48794 - DNA, 20 bp, Artificial Sequence
  Description of Artificial Sequence: Synthetic oligonucleotide
  Target: LAMA2; (+) strand; PAM type: NNNNGHTT; PAM sequence: ATGTGTTT
ttctcacacattgacttaat

SEQ ID NO: 48795 - DNA, 20 bp, Artificial Sequence
  Description of Artificial Sequence: Synthetic oligonucleotide
  Target: LAMA2; (+) strand; PAM type: NNNNGHTT; PAM sequence: ATTGGATT
gtttaattttattttagagt

SEQ ID NO: 48796 - DNA, 20 bp, Artificial Sequence
  Description of Artificial Sequence: Synthetic oligonucleotide
  Target: LAMA2; (+) strand; PAM type: NNNNGHTT; PAM sequence: AGAAGTTT
cccacagaaggacccacaga

SEQ ID NO: 48797 - DNA, 20 bp, Artificial Sequence
  Description of Artificial Sequence: Synthetic oligonucleotide
  Target: LAMA2; (+) strand; PAM type: NNNNGHTT; PAM sequence: TTGAGCTT
tgtctgataatcaggaattg

SEQ ID NO: 48798 - DNA, 20 bp, Artificial Sequence
  Description of Artificial Sequence: Synthetic oligonucleotide
  Target: LAMA2; (+) strand; PAM type: NNNNGHTT; PAM sequence: AATTGTTT
ttgttgagcttctattgagc

SEQ ID NO: 48799 - DNA, 20 bp, Artificial Sequence
  Description of Artificial Sequence: Synthetic oligonucleotide
  Target: LAMA2; (+) strand; PAM type: NNNNGHTT; PAM sequence: TTTTGCTT
gagcttctattgagcaattg

SEQ ID NO: 48800 - DNA, 20 bp, Artificial Sequence
  Description of Artificial Sequence: Synthetic oligonucleotide
  Target: LAMA2; (+) strand; PAM type: NNNNGHTT; PAM sequence: TTTGGCTT
tattgagcaattgttttgct

SEQ ID NO: 48801 - DNA, 20 bp, Artificial Sequence
  Description of Artificial Sequence: Synthetic oligonucleotide
  Target: LAMA2; (+) strand; PAM type: NNNNGHTT; PAM sequence: TGTTGATT
gctgctctgaatcatttacc

SEQ ID NO: 48802 - DNA, 20 bp, Artificial Sequence
  Description of Artificial Sequence: Synthetic oligonucleotide
  Target: LAMA2; (+) strand; PAM type: NNNNGHTT; PAM sequence: TTAAGTTT
tttgaattctaaatacaccc

SEQ ID NO: 48803 - DNA, 20 bp, Artificial Sequence
  Description of Artificial Sequence: Synthetic oligonucleotide
  Target: LAMA2; (+) strand; PAM type: NNNNGHTT; PAM sequence: CCTTGCTT
tagtatttttttctctttaa

SEQ ID NO: 48804 - DNA, 20 bp, Artificial Sequence
  Description of Artificial Sequence: Synthetic oligonucleotide
  Target: LAMA2; (+) strand; PAM type: NNNNGHTT; PAM sequence: AATTGTTT
attctttttagaacaaggtt

SEQ ID NO: 48805 - DNA, 20 bp, Artificial Sequence
  Description of Artificial Sequence: Synthetic oligonucleotide
  Target: LAMA2; (+) strand; PAM type: NNNNGHTT; PAM sequence: TATAGATT
cattcacatacataaacata

SEQ ID NO: 48806 - DNA, 20 bp, Artificial Sequence
  Description of Artificial Sequence: Synthetic oligonucleotide
  Target: LAMA2; (+) strand; PAM type: NNNNGHTT; PAM sequence: ACATGCTT
atatatatgcatacatatat

SEQ ID NO: 48807 - DNA, 20 bp, Artificial Sequence
  Description of Artificial Sequence: Synthetic oligonucleotide
  Target: LAMA2; (+) strand; PAM type: NNNNGHTT; PAM sequence: AGTAGATT
tacatatatacatgcttata

SEQ ID NO: 48808 - DNA, 20 bp, Artificial Sequence
  Description of Artificial Sequence: Synthetic oligonucleotide
  Target: LAMA2; (+) strand; PAM type: NNNNGHTT; PAM sequence: GAGGGATT
agtatatattcagccattaa

SEQ ID NO: 48809 - DNA, 20 bp, Artificial Sequence
  Description of Artificial Sequence: Synthetic oligonucleotide
  Target: LAMA2; (+) strand; PAM type: NNNNGHTT; PAM sequence: TCCAGCTT
taagagggattattttcatg

SEQ ID NO: 48810 - DNA, 20 bp, Artificial Sequence
  Description of Artificial Sequence: Synthetic oligonucleotide
  Target: LAMA2; (+) strand; PAM type: NNNNGHTT; PAM sequence: AACAGCTT
tttttattggttatcccaat

SEQ ID NO: 48811 - DNA, 20 bp, Artificial Sequence
  Description of Artificial Sequence: Synthetic oligonucleotide
  Target: LAMA2; (+) strand; PAM type: NNNNGHTT; PAM sequence: CTTGGCTT
tgtggaaaatgcccgctgct

SEQ ID NO: 48812 - DNA, 20 bp, Artificial Sequence
  Description of Artificial Sequence: Synthetic oligonucleotide
  Target: LAMA2; (+) strand; PAM type: NNNNGHTT; PAM sequence: TTGTGTTT
gcccgctgctcttggctttc

SEQ ID NO: 48813 - DNA, 20 bp, Artificial Sequence
  Description of Artificial Sequence: Synthetic oligonucleotide
  Target: LAMA2; (+) strand; PAM type: NNNNGHTT; PAM sequence: CGTGGTTT
ctttcttgtgtttcctgtgg

SEQ ID NO: 48814 - DNA, 20 bp, Artificial Sequence
  Description of Artificial Sequence: Synthetic oligonucleotide
  Target: LAMA2; (+) strand; PAM type: NNNNGHTT; PAM sequence: ATTAGCTT
cctctttgtgtcacggaaca

SEQ ID NO: 48815 - DNA, 20 bp, Artificial Sequence
  Description of Artificial Sequence: Synthetic oligonucleotide
  Target: LAMA2; (+) strand; PAM type: NNNNGHTT; PAM sequence: AGATGTTT
tttgccaaggcaaattctgt

SEQ ID NO: 48816 - DNA, 20 bp, Artificial Sequence
  Description of Artificial Sequence: Synthetic oligonucleotide
  Target: LAMA2; (+) strand; PAM type: NNNNGHTT; PAM sequence: GCATGTTT
ctgtagatgttttttattgt

SEQ ID NO: 48817 - DNA, 20 bp, Artificial Sequence
  Description of Artificial Sequence: Synthetic oligonucleotide
  Target: LAMA2; (+) strand; PAM type: NNNNGHTT; PAM sequence: TTCAGTTT
cagcaataagagagtgaatc

SEQ ID NO: 48818 - DNA, 20 bp, Artificial Sequence
  Description of Artificial Sequence: Synthetic oligonucleotide
  Target: LAMA2; (+) strand; PAM type: NNNNGHTT; PAM sequence: GAAAGTTT
aatacagatatattttatga

SEQ ID NO: 48819 - DNA, 20 bp, Artificial Sequence
  Description of Artificial Sequence: Synthetic oligonucleotide
  Target: LAMA2; (+) strand; PAM type: NNNNGHTT; PAM sequence: GTAGGTTT
aacttacttaattcttacca

SEQ ID NO: 48820 - DNA, 20 bp, Artificial Sequence
  Description of Artificial Sequence: Synthetic oligonucleotide
  Target: LAMA2; (+) strand; PAM type: NNNNGHTT; PAM sequence: ATAGGATT
gtgcctgccctaaccagctc

SEQ ID NO: 48821 - DNA, 20 bp, Artificial Sequence
  Description of Artificial Sequence: Synthetic oligonucleotide
  Target: LAMA2; (+) strand; PAM type: NNNNGHTT; PAM sequence: TGTTGATT
taatttttttctcgaaaaag

SEQ ID NO: 48822 - DNA, 20 bp, Artificial Sequence
  Description of Artificial Sequence: Synthetic oligonucleotide
  Target: LAMA2; (+) strand; PAM type: NNNNGHTT; PAM sequence: GTTGGTTT
agtgagcaccttttacttat

SEQ ID NO: 48823 - DNA, 20 bp, Artificial Sequence
  Description of Artificial Sequence: Synthetic oligonucleotide
  Target: LAMA2; (+) strand; PAM type: NNNNGHTT; PAM sequence: AATAGCTT
aatctgaaatctattttatg

SEQ ID NO: 48824 - DNA, 20 bp, Artificial Sequence
  Description of Artificial Sequence: Synthetic oligonucleotide
  Target: LAMA2; (+) strand; PAM type: NNNNGHTT; PAM sequence: AATCGCTT
tcaggaggctgagacactag

SEQ ID NO: 48825 - DNA, 20 bp, Artificial Sequence
  Description of Artificial Sequence: Synthetic oligonucleotide
  Target: LAMA2; (+) strand; PAM type: NNNNGHTT; PAM sequence: AGGGGTTT
atcgcttgaacccagtaggc

SEQ ID NO: 48826 - DNA, 20 bp, Artificial Sequence
  Description of Artificial Sequence: Synthetic oligonucleotide
  Target: LAMA2; (+) strand; PAM type: NNNNGHTT; PAM sequence: CCAAGATT
taggcaggggtttcagtgag

SEQ ID NO: 48827 - DNA, 20 bp, Artificial Sequence
  Description of Artificial Sequence: Synthetic oligonucleotide
  Target: LAMA2; (+) strand; PAM type: NNNNGHTT; PAM sequence: AACTGATT
cattgacaagagttatgata

SEQ ID NO: 48828 - DNA, 20 bp, Artificial Sequence
  Description of Artificial Sequence: Synthetic oligonucleotide
  Target: LAMA2; (+) strand; PAM type: NNNNGHTT; PAM sequence: TTAGGATT
aagagttatgataaactgat

SEQ ID NO: 48829 - DNA, 20 bp, Artificial Sequence
  Description of Artificial Sequence: Synthetic oligonucleotide
  Target: LAMA2; (+) strand; PAM type: NNNNGHTT; PAM sequence: TATGGTTT
ggattataaaaaacaattgg

SEQ ID NO: 48830 - DNA, 20 bp, Artificial Sequence
  Description of Artificial Sequence: Synthetic oligonucleotide
  Target: LAMA2; (+) strand; PAM type: NNNNGHTT; PAM sequence: CAGTGCTT
tcccacagaggtgggaaacc

SEQ ID NO: 48831 - DNA, 20 bp, Artificial Sequence
  Description of Artificial Sequence: Synthetic oligonucleotide
  Target: LAMA2; (+) strand; PAM type: NNNNGHTT; PAM sequence: GTCAGTTT
acccagtgcttctggttgga

SEQ ID NO: 48832 - DNA, 20 bp, Artificial Sequence
  Description of Artificial Sequence: Synthetic oligonucleotide
  Target: LAMA2; (+) strand; PAM type: NNNNGHTT; PAM sequence: GGATGCTT
gtcatgcgtagcaaagtaca

SEQ ID NO: 48833 - DNA, 20 bp, Artificial Sequence
  Description of Artificial Sequence: Synthetic oligonucleotide
  Target: LAMA2; (+) strand; PAM type: NNNNGHTT; PAM sequence: AGGAGATT
agtacaggatgctttataaa

SEQ ID NO: 48834 - DNA, 20 bp, Artificial Sequence
  Description of Artificial Sequence: Synthetic oligonucleotide
  Target: LAMA2; (+) strand; PAM type: NNNNGHTT; PAM sequence: AGCAGATT
agcctttatctccttgaccc

SEQ ID NO: 48835 - DNA, 20 bp, Artificial Sequence
  Description of Artificial Sequence: Synthetic oligonucleotide
  Target: LAMA2; (+) strand; PAM type: NNNNGHTT; PAM sequence: AAATGTTT
ttagactttccactgagttg

SEQ ID NO: 48836 - DNA, 20 bp, Artificial Sequence
  Description of Artificial Sequence: Synthetic oligonucleotide
  Target: LAMA2; (+) strand; PAM type: NNNNGHTT; PAM sequence: GAATGTTT
caggatcaaatcaggacttg

SEQ ID NO: 48837 - DNA, 20 bp, Artificial Sequence
  Description of Artificial Sequence: Synthetic oligonucleotide
  Target: LAMA2; (+) strand; PAM type: NNNNGHTT; PAM sequence: GAAAGATT
ttagggaaaacataataaga

SEQ ID NO: 48838 - DNA, 20 bp, Artificial Sequence
  Description of Artificial Sequence: Synthetic oligonucleotide
  Target: LAMA2; (+) strand; PAM type: NNNNGHTT; PAM sequence: TATTGCTT
cttcatctggtgttcagctc

SEQ ID NO: 48839 - DNA, 20 bp, Artificial Sequence
  Description of Artificial Sequence: Synthetic oligonucleotide
  Target: LAMA2; (+) strand; PAM type: NNNNGHTT; PAM sequence: GGTTGCTT
cagagggtatgagatggcaa

SEQ ID NO: 48840 - DNA, 20 bp, Artificial Sequence
  Description of Artificial Sequence: Synthetic oligonucleotide
  Target: LAMA2; (+) strand; PAM type: NNNNGHTT; PAM sequence: TTTTGTTT
gtatgagatggcaaggttgc

SEQ ID NO: 48841 - DNA, 20 bp, Artificial Sequence
  Description of Artificial Sequence: Synthetic oligonucleotide
  Target: LAMA2; (+) strand; PAM type: NNNNGHTT; PAM sequence: TTAGGTTT
gcaaggttgcttttgtttgg

SEQ ID NO: 48842 - DNA, 20 bp, Artificial Sequence
  Description of Artificial Sequence: Synthetic oligonucleotide
  Target: LAMA2; (+) strand; PAM type: NNNNGHTT; PAM sequence: ATAAGTTT
tttgtttggttaggtttatg

SEQ ID NO: 48843 - DNA, 20 bp, Artificial Sequence
  Description of Artificial Sequence: Synthetic oligonucleotide
  Target: LAMA2; (+) strand; PAM type: NNNNGHTT; PAM sequence: GAAAGCTT
atgcacacttgatctcttct

SEQ ID NO: 48844 - DNA, 20 bp, Artificial Sequence
  Description of Artificial Sequence: Synthetic oligonucleotide
  Target: LAMA2; (+) strand; PAM type: NNNNGHTT; PAM sequence: TGAGGATT
atctcttctgaaagctttcc

SEQ ID NO: 48845 - DNA, 20 bp, Artificial Sequence
  Description of Artificial Sequence: Synthetic oligonucleotide
  Target: LAMA2; (+) strand; PAM type: NNNNGHTT; PAM sequence: CTGAGATT
gccaccaccactaccacata

SEQ ID NO: 48846 - DNA, 20 bp, Artificial Sequence
  Description of Artificial Sequence: Synthetic oligonucleotide
  Target: LAMA2; (+) strand; PAM type: NNNNGHTT; PAM sequence: GGCTGCTT
atcactaacaaatttctcca

SEQ ID NO: 48847 - DNA, 20 bp, Artificial Sequence
  Description of Artificial Sequence: Synthetic oligonucleotide
  Target: LAMA2; (+) strand; PAM type: NNNNGHTT; PAM sequence: GAGGGATT
tccaggctgcttcaaattca

SEQ ID NO: 48848 - DNA, 20 bp, Artificial Sequence
  Description of Artificial Sequence: Synthetic oligonucleotide
  Target: LAMA2; (+) strand; PAM type: NNNNGHTT; PAM sequence: CCCTGTTT
tgtatgtccttcttccttgt

SEQ ID NO: 48849 - DNA, 20 bp, Artificial Sequence
  Description of Artificial Sequence: Synthetic oligonucleotide
  Target: LAMA2; (+) strand; PAM type: NNNNGHTT; PAM sequence: CATAGCTT
gttttccgcaacaacatcaa

SEQ ID NO: 48850 - DNA, 20 bp, Artificial Sequence
  Description of Artificial Sequence: Synthetic oligonucleotide
  Target: LAMA2; (+) strand; PAM type: NNNNGHTT; PAM sequence: CTTGGATT
cgtgccatttagaccggagt

SEQ ID NO: 48851 - DNA, 20 bp, Artificial Sequence
  Description of Artificial Sequence: Synthetic oligonucleotide
  Target: LAMA2; (+) strand; PAM type: NNNNGHTT; PAM sequence: AAATGATT
gtatactacactgtcttgca

SEQ ID NO: 48852 - DNA, 20 bp, Artificial Sequence
  Description of Artificial Sequence: Synthetic oligonucleotide
  Target: LAMA2; (+) strand; PAM type: NNNNGHTT; PAM sequence: TAAAGTTT
ccacactcaatgaggtgaaa

SEQ ID NO: 48853 - DNA, 20 bp, Artificial Sequence
  Description of Artificial Sequence: Synthetic oligonucleotide
  Target: LAMA2; (+) strand; PAM type: NNNNGHTT; PAM sequence: AATTGCTT
taatttatttatttttcaga

SEQ ID NO: 48854 - DNA, 20 bp, Artificial Sequence
  Description of Artificial Sequence: Synthetic oligonucleotide
  Target: LAMA2; (+) strand; PAM type: NNNNGHTT; PAM sequence: ATCTGATT
tcttcattcactcagagaat

SEQ ID NO: 48855 - DNA, 20 bp, Artificial Sequence
  Description of Artificial Sequence: Synthetic oligonucleotide
  Target: LAMA2; (+) strand; PAM type: NNNNGHTT; PAM sequence: TAATGTTT
tcactcagagaatatctgat

SEQ ID NO: 48856 - DNA, 20 bp, Artificial Sequence
  Description of Artificial Sequence: Synthetic oligonucleotide
  Target: LAMA2; (+) strand; PAM type: NNNNGHTT; PAM sequence: TTAAGATT
caagtggaaagtcatgcact

SEQ ID NO: 48857 - DNA, 20 bp, Artificial Sequence
  Description of Artificial Sequence: Synthetic oligonucleotide
  Target: LAMA2; (+) strand; PAM type: NNNNGHTT; PAM sequence: ATTAGCTT
ggcaccatttatttttcata

SEQ ID NO: 48858 - DNA, 20 bp, Artificial Sequence
  Description of Artificial Sequence: Synthetic oligonucleotide
  Target: LAMA2; (+) strand; PAM type: NNNNGHTT; PAM sequence: TGTAGCTT
ttagctttttgtccttaaaa

SEQ ID NO: 48859 - DNA, 20 bp, Artificial Sequence
  Description of Artificial Sequence: Synthetic oligonucleotide
  Target: LAMA2; (+) strand; PAM type: NNNNGHTT; PAM sequence: TCATGATT
aaacaaaatgtaatttatta

SEQ ID NO: 48860 - DNA, 20 bp, Artificial Sequence
  Description of Artificial Sequence: Synthetic oligonucleotide
  Target: LAMA2; (+) strand; PAM type: NNNNGHTT; PAM sequence: TGTTGATT
taaaccagtattttaattcc

SEQ ID NO: 48861 - DNA, 20 bp, Artificial Sequence
  Description of Artificial Sequence: Synthetic oligonucleotide
  Target: LAMA2; (+) strand; PAM type: NNNNGHTT; PAM sequence: GGTTGCTT
aattcctgttgattttactg

SEQ ID NO: 48862 - DNA, 20 bp, Artificial Sequence
  Description of Artificial Sequence: Synthetic oligonucleotide
  Target: LAMA2; (+) strand; PAM type: NNNNGHTT; PAM sequence: GTGTGATT
agtattattttatgtaattt

SEQ ID NO: 48863 - DNA, 20 bp, Artificial Sequence
  Description of Artificial Sequence: Synthetic oligonucleotide
  Target: LAMA2; (+) strand; PAM type: NNNNGHTT; PAM sequence: AAATGTTT
tgtgattatatttccttctg

SEQ ID NO: 48864 - DNA, 20 bp, Artificial Sequence
  Description of Artificial Sequence: Synthetic oligonucleotide
  Target: LAMA2; (+) strand; PAM type: NNNNGHTT; PAM sequence: TCTGGTTT
gccaaaaacaaaaacctccc

SEQ ID NO: 48865 - DNA, 20 bp, Artificial Sequence
  Description of Artificial Sequence: Synthetic oligonucleotide
  Target: LAMA2; (+) strand; PAM type: NNNNGHTT; PAM sequence: GGCTGTTT
ctgaggctaaccctgaagag

SEQ ID NO: 48866 - DNA, 20 bp, Artificial Sequence
  Description of Artificial Sequence: Synthetic oligonucleotide
  Target: LAMA2; (+) strand; PAM type: NNNNGHTT; PAM sequence: CCCTGTTT
gtcatcttggcagctatcac

SEQ ID NO: 48867 - DNA, 20 bp, Artificial Sequence
  Description of Artificial Sequence: Synthetic oligonucleotide
  Target: LAMA2; (+) strand; PAM type: NNNNGHTT; PAM sequence: GTGTGTTT
ttgtgtgtgtgtgtctgtgt

SEQ ID NO: 48868 - DNA, 20 bp, Artificial Sequence
  Description of Artificial Sequence: Synthetic oligonucleotide
  Target: LAMA2; (+) strand; PAM type: NNNNGHTT; PAM sequence: GACAGATT
ggagaacatatcattgccaa

SEQ ID NO: 48869 - DNA, 20 bp, Artificial Sequence
  Description of Artificial Sequence: Synthetic oligonucleotide
  Target: LAMA2; (+) strand; PAM type: NNNNGHTT; PAM sequence: TATTGCTT
cataatctctgatgtactta

SEQ ID NO: 48870 - DNA, 20 bp, Artificial Sequence
  Description of Artificial Sequence: Synthetic oligonucleotide
  Target: LAMA2; (+) strand; PAM type: NNNNGHTT; PAM sequence: CTTTGCTT
tctctgatgtacttatattg

SEQ ID NO: 48871 - DNA, 20 bp, Artificial Sequence
  Description of Artificial Sequence: Synthetic oligonucleotide
  Target: LAMA2; (+) strand; PAM type: NNNNGHTT; PAM sequence: AATAGTTT
actccctatacatgttagac

SEQ ID NO: 48872 - DNA, 20 bp, Artificial Sequence
  Description of Artificial Sequence: Synthetic oligonucleotide
  Target: LAMA2; (+) strand; PAM type: NNNNGHTT; PAM sequence: ATCTGTTT
ctacattttatttaacaaac

SEQ ID NO: 48873 - DNA, 20 bp, Artificial Sequence
  Description of Artificial Sequence: Synthetic oligonucleotide
  Target: LAMA2; (+) strand; PAM type: NNNNGHTT; PAM sequence: GGTTGCTT
tctttaatgcaagtgaggat

SEQ ID NO: 48874 - DNA, 20 bp, Artificial Sequence
  Description of Artificial Sequence: Synthetic oligonucleotide
  Target: LAMA2; (+) strand; PAM type: NNNNGHTT; PAM sequence: GTATGATT
agagaaatacctgacagaaa

SEQ ID NO: 48875 - DNA, 20 bp, Artificial Sequence
  Description of Artificial Sequence: Synthetic oligonucleotide
  Target: LAMA2; (+) strand; PAM type: NNNNGHTT; PAM sequence: ATCTGATT
cctgtctaaaatctgtatta

SEQ ID NO: 48876 - DNA, 20 bp, Artificial Sequence
  Description of Artificial Sequence: Synthetic oligonucleotide
  Target: LAMA2; (+) strand; PAM type: NNNNGHTT; PAM sequence: TCAAGTTT
tggcatattttatctccagc

SEQ ID NO: 48877 - DNA, 20 bp, Artificial Sequence
  Description of Artificial Sequence: Synthetic oligonucleotide
  Target: LAMA2; (+) strand; PAM type: NNNNGHTT; PAM sequence: TTTAGATT
ccatatttttctagccagaa

SEQ ID NO: 48878 - DNA, 20 bp, Artificial Sequence
  Description of Artificial Sequence: Synthetic oligonucleotide
  Target: LAMA2; (+) strand; PAM type: NNNNGHTT; PAM sequence: TAGGGTTT
tttctagccagaatttagat

SEQ ID NO: 48879 - DNA, 20 bp, Artificial Sequence
  Description of Artificial Sequence: Synthetic oligonucleotide
  Target: LAMA2; (+) strand; PAM type: NNNNGHTT; PAM sequence: TTAAGATT
ttagggttttccaggaatat

SEQ ID NO: 48880 - DNA, 20 bp, Artificial Sequence
  Description of Artificial Sequence: Synthetic oligonucleotide
  Target: LAMA2; (+) strand; PAM type: NNNNGHTT; PAM sequence: TTTTGTTT
taaaatatgagggaaacatt

SEQ ID NO: 48881 - DNA, 20 bp, Artificial Sequence
  Description of Artificial Sequence: Synthetic oligonucleotide
  Target: LAMA2; (+) strand; PAM type: NNNNGHTT; PAM sequence: AAGTGATT
tgtaatcaaaaccattctgt

SEQ ID NO: 48882 - DNA, 20 bp, Artificial Sequence
  Description of Artificial Sequence: Synthetic oligonucleotide
  Target: LAMA2; (+) strand; PAM type: NNNNGHTT; PAM sequence: ATCAGCTT
ttctgtaagtgatttgtgtg

SEQ ID NO: 48883 - DNA, 20 bp, Artificial Sequence
  Description of Artificial Sequence: Synthetic oligonucleotide
  Target: LAMA2; (+) strand; PAM type: NNNNGHTT; PAM sequence: ATGAGTTT
ataaagaattctgtgatcac

SEQ ID NO: 48884 - DNA, 20 bp, Artificial Sequence
  Description of Artificial Sequence: Synthetic oligonucleotide
  Target: LAMA2; (+) strand; PAM type: NNNNGHTT; PAM sequence: ATTTGTTT
gtaattaagaaatctgttca

SEQ ID NO: 48885 - DNA, 20 bp, Artificial Sequence
  Description of Artificial Sequence: Synthetic oligonucleotide
  Target: LAMA2; (+) strand; PAM type: NNNNGHTT; PAM sequence: CTCTGCTT
aacttatgtggccataaacc

SEQ ID NO: 48886 - DNA, 20 bp, Artificial Sequence
  Description of Artificial Sequence: Synthetic oligonucleotide
  Target: LAMA2; (+) strand; PAM type: NNNNGHTT; PAM sequence: AGTTGTTT
cataatctgagcccatttca

SEQ ID NO: 48887 - DNA, 20 bp, Artificial Sequence
  Description of Artificial Sequence: Synthetic oligonucleotide
  Target: LAMA2; (+) strand; PAM type: NNNNGHTT; PAM sequence: TTAAGCTT
cagctagaatcaaagttcta

SEQ ID NO: 48888 - DNA, 20 bp, Artificial Sequence
  Description of Artificial Sequence: Synthetic oligonucleotide
  Target: LAMA2; (+) strand; PAM type: NNNNGHTT; PAM sequence: GCATGTTT
gtactgagtatttcacccaa

SEQ ID NO: 48889 - DNA, 20 bp, Artificial Sequence
  Description of Artificial Sequence: Synthetic oligonucleotide
  Target: LAMA2; (+) strand; PAM type: NNNNGHTT; PAM sequence: TTCAGCTT
tcttagaggcacaggaatca

SEQ ID NO: 48890 - DNA, 20 bp, Artificial Sequence
  Description of Artificial Sequence: Synthetic oligonucleotide
  Target: LAMA2; (+) strand; PAM type: NNNNGHTT; PAM sequence: GGTGGCTT
tgagctacatttgtggaact

SEQ ID NO: 48891 - DNA, 20 bp, Artificial Sequence
  Description of Artificial Sequence: Synthetic oligonucleotide
  Target: LAMA2; (+) strand; PAM type: NNNNGHTT; PAM sequence: GGCAGATT
gctttcagagctcggggtct

SEQ ID NO: 48892 - DNA, 20 bp, Artificial Sequence
  Description of Artificial Sequence: Synthetic oligonucleotide
  Target: LAMA2; (+) strand; PAM type: NNNNGHTT; PAM sequence: CCTTGCTT
aaacatgtagcacaagatgg

SEQ ID NO: 48893 - DNA, 20 bp, Artificial Sequence
  Description of Artificial Sequence: Synthetic oligonucleotide
  Target: LAMA2; (+) strand; PAM type: NNNNGHTT; PAM sequence: CATGGATT
ccaaacaagatacaacaaaa

SEQ ID NO: 48894 - DNA, 20 bp, Artificial Sequence
  Description of Artificial Sequence: Synthetic oligonucleotide
  Target: LAMA2; (+) strand; PAM type: NNNNGHTT; PAM sequence: TACAGCTT
gtcacaagttgaacactagt

SEQ ID NO: 48895 - DNA, 20 bp, Artificial Sequence
  Description of Artificial Sequence: Synthetic oligonucleotide
  Target: LAMA2; (+) strand; PAM type: NNNNGHTT; PAM sequence: CACTGCTT
caccactatttttgaggtat

SEQ ID NO: 48896 - DNA, 20 bp, Artificial Sequence
  Description of Artificial Sequence: Synthetic oligonucleotide
  Target: LAMA2; (+) strand; PAM type: NNNNGHTT; PAM sequence: GAATGATT
ggtatcactgctttgctggg

SEQ ID NO: 48897 - DNA, 20 bp, Artificial Sequence
  Description of Artificial Sequence: Synthetic oligonucleotide
  Target: LAMA2; (+) strand; PAM type: NNNNGHTT; PAM sequence: CTAAGATT
tattcatgatgatacctttg

SEQ ID NO: 48898 - DNA, 20 bp, Artificial Sequence
  Description of Artificial Sequence: Synthetic oligonucleotide
  Target: LAMA2; (+) strand; PAM type: NNNNGHTT; PAM sequence: AAGAGATT
acagaatcttgaagggctaa

SEQ ID NO: 48899 - DNA, 20 bp, Artificial Sequence
  Description of Artificial Sequence: Synthetic oligonucleotide
  Target: LAMA2; (+) strand; PAM type: NNNNGHTT; PAM sequence: ATAAGTTT
gacactaagttactttcaga

SEQ ID NO: 48900 - DNA, 20 bp, Artificial Sequence
  Description of Artificial Sequence: Synthetic oligonucleotide
  Target: LAMA2; (+) strand; PAM type: NNNNGHTT; PAM sequence: GGTGGATT
aaaggcaggcaagttcatct

SEQ ID NO: 48901 - DNA, 20 bp, Artificial Sequence
  Description of Artificial Sequence: Synthetic oligonucleotide
  Target: LAMA2; (+) strand; PAM type: NNNNGHTT; PAM sequence: AGGTGTTT
attgccactgaaaatgtgga

SEQ ID NO: 48902 - DNA, 20 bp, Artificial Sequence
  Description of Artificial Sequence: Synthetic oligonucleotide
  Target: LAMA2; (+) strand; PAM type: NNNNGHTT; PAM sequence: AATTGCTT
tgtggaaggtgtttgaatct

SEQ ID NO: 48903 - DNA, 20 bp, Artificial Sequence
  Description of Artificial Sequence: Synthetic oligonucleotide
  Target: LAMA2; (+) strand; PAM type: NNNNGHTT; PAM sequence: TACAGTTT
taatattttgaaaattcatc

SEQ ID NO: 48904 - DNA, 20 bp, Artificial Sequence
  Description of Artificial Sequence: Synthetic oligonucleotide
  Target: LAMA2; (+) strand; PAM type: NNNNGHTT; PAM sequence: TCAAGATT
attcatctacagttttatcc

SEQ ID NO: 48905 - DNA, 20 bp, Artificial Sequence
  Description of Artificial Sequence: Synthetic oligonucleotide
  Target: LAMA2; (+) strand; PAM type: NNNNGHTT; PAM sequence: TTTAGATT
atttcagttccaaaatccca

SEQ ID NO: 48906 - DNA, 20 bp, Artificial Sequence
  Description of Artificial Sequence: Synthetic oligonucleotide
  Target: LAMA2; (+) strand; PAM type: NNNNGHTT; PAM sequence: GTCTGCTT
caaaatcccatttagatttt

SEQ ID NO: 48907 - DNA, 20 bp, Artificial Sequence
  Description of Artificial Sequence: Synthetic oligonucleotide
  Target: LAMA2; (+) strand; PAM type: NNNNGHTT; PAM sequence: CTCTGCTT
cgaatcaagtctaatcaccc

SEQ ID NO: 48908 - DNA, 20 bp, Artificial Sequence
  Description of Artificial Sequence: Synthetic oligonucleotide
  Target: LAMA2; (+) strand; PAM type: NNNNGHTT; PAM sequence: TGCAGTTT
aggccactcatatgtggttg

SEQ ID NO: 48909 - DNA, 20 bp, Artificial Sequence
  Description of Artificial Sequence: Synthetic oligonucleotide
  Target: LAMA2; (+) strand; PAM type: NNNNGHTT; PAM sequence: GGAAGATT
acaaaggcactcagggaagg

SEQ ID NO: 48910 - DNA, 20 bp, Artificial Sequence
  Description of Artificial Sequence: Synthetic oligonucleotide
  Target: LAMA2; (+) strand; PAM type: NNNNGHTT; PAM sequence: GAGGGCTT
actcagggaaggggaagatt

SEQ ID NO: 48911 - DNA, 20 bp, Artificial Sequence
  Description of Artificial Sequence: Synthetic oligonucleotide
  Target: LAMA2; (+) strand; PAM type: NNNNGHTT; PAM sequence: TCCAGTTT
gggaagattgagggcttgaa

SEQ ID NO: 48912 - DNA, 20 bp, Artificial Sequence
  Description of Artificial Sequence: Synthetic oligonucleotide
  Target: LAMA2; (+) strand; PAM type: NNNNGHTT; PAM sequence: GTCTGTTT
atgaagtccctgggtgtcta

SEQ ID NO: 48913 - DNA, 20 bp, Artificial Sequence
  Description of Artificial Sequence: Synthetic oligonucleotide
  Target: LAMA2; (+) strand; PAM type: NNNNGHTT; PAM sequence: TGCTGATT
gggaaacaccctcagtcttt

SEQ ID NO: 48914 - DNA, 20 bp, Artificial Sequence
  Description of Artificial Sequence: Synthetic oligonucleotide
  Target: LAMA2; (+) strand; PAM type: NNNNGHTT; PAM sequence: GGAAGATT
caatactgttccctctgcct

SEQ ID NO: 48915 - DNA, 20 bp, Artificial Sequence
  Description of Artificial Sequence: Synthetic oligonucleotide
  Target: LAMA2; (+) strand; PAM type: NNNNGHTT; PAM sequence: CCTTGATT
cactatcatcctgaaaatgt

SEQ ID NO: 48916 - DNA, 20 bp, Artificial Sequence
  Description of Artificial Sequence: Synthetic oligonucleotide
  Target: LAMA2; (+) strand; PAM type: NNNNGHTT; PAM sequence: CTACGTTT
tatctccagttgttctactg

SEQ ID NO: 48917 - DNA, 20 bp, Artificial Sequence
  Description of Artificial Sequence: Synthetic oligonucleotide
  Target: LAMA2; (+) strand; PAM type: NNNNGHTT; PAM sequence: AGCTGATT
agtaccgtgtaaaagtgctc

SEQ ID NO: 48918 - DNA, 20 bp, Artificial Sequence
  Description of Artificial Sequence: Synthetic oligonucleotide
  Target: LAMA2; (+) strand; PAM type: NNNNGHTT; PAM sequence: CAGAGCTT
tttaatgggttgggagaaac

SEQ ID NO: 48919 - DNA, 20 bp, Artificial Sequence
  Description of Artificial Sequence: Synthetic oligonucleotide
  Target: LAMA2; (+) strand; PAM type: NNNNGHTT; PAM sequence: ATTTGCTT
gagaaaccagagcttttcta

SEQ ID NO: 48920 - DNA, 20 bp, Artificial Sequence
  Description of Artificial Sequence: Synthetic oligonucleotide
  Target: LAMA2; (+) strand; PAM type: NNNNGHTT; PAM sequence: GCTAGATT
gagcttttctaatttgcttg

SEQ ID NO: 48921 - DNA, 20 bp, Artificial Sequence
  Description of Artificial Sequence: Synthetic oligonucleotide
  Target: LAMA2; (+) strand; PAM type: NNNNGHTT; PAM sequence: TATTGTTT
gctagattaagccagcatta

SEQ ID NO: 48922 - DNA, 20 bp, Artificial Sequence
  Description of Artificial Sequence: Synthetic oligonucleotide
  Target: LAMA2; (+) strand; PAM type: NNNNGHTT; PAM sequence: CATTGTTT
aagccagcattatattgttt

SEQ ID NO: 48923 - DNA, 20 bp, Artificial Sequence
  Description of Artificial Sequence: Synthetic oligonucleotide
  Target: LAMA2; (+) strand; PAM type: NNNNGHTT; PAM sequence: CCGTGATT
atagataatagaaatgtagg

SEQ ID NO: 48924 - DNA, 20 bp, Artificial Sequence
  Description of Artificial Sequence: Synthetic oligonucleotide
  Target: LAMA2; (+) strand; PAM type: NNNNGHTT; PAM sequence: GGTTGCTT
gacaaaagtctcatcagtgt

SEQ ID NO: 48925 - DNA, 20 bp, Artificial Sequence
  Description of Artificial Sequence: Synthetic oligonucleotide
  Target: LAMA2; (+) strand; PAM type: NNNNGHTT; PAM sequence: TGTTGCTT
tgtggttgctttcttctcat

SEQ ID NO: 48926 - DNA, 20 bp, Artificial Sequence
  Description of Artificial Sequence: Synthetic oligonucleotide
  Target: LAMA2; (+) strand; PAM type: NNNNGHTT; PAM sequence: ATTTGATT
ccctttttcaaaatattgca

SEQ ID NO: 48927 - DNA, 20 bp, Artificial Sequence
  Description of Artificial Sequence: Synthetic oligonucleotide
  Target: LAMA2; (+) strand; PAM type: NNNNGHTT; PAM sequence: ATCCGTTT
tgcctttgttatgtcaagat

SEQ ID NO: 48928 - DNA, 20 bp, Artificial Sequence
  Description of Artificial Sequence: Synthetic oligonucleotide
  Target: LAMA2; (+) strand; PAM type: NNNNGHTT; PAM sequence: GAGGGCTT
tgccttgcatatgaaaatga

SEQ ID NO: 48929 - DNA, 20 bp, Artificial Sequence
  Description of Artificial Sequence: Synthetic oligonucleotide
  Target: LAMA2; (+) strand; PAM type: NNNNGHTT; PAM sequence: CTGTGATT
tggagtgaaaaaccaaagga

SEQ ID NO: 48930 - DNA, 20 bp, Artificial Sequence
  Description of Artificial Sequence: Synthetic oligonucleotide
  Target: LAMA2; (+) strand; PAM type: NNNNGHTT; PAM sequence: ATATGATT
tatttttattaataaaagtt

SEQ ID NO: 48931 - DNA, 20 bp, Artificial Sequence
  Description of Artificial Sequence: Synthetic oligonucleotide
  Target: LAMA2; (+) strand; PAM type: NNNNGHTT; PAM sequence: AGATGCTT
agaaaaaataaataaaagac

SEQ ID NO: 48932 - DNA, 20 bp, Artificial Sequence
  Description of Artificial Sequence: Synthetic oligonucleotide
  Target: LAMA2; (+) strand; PAM type: NNNNGHTT; PAM sequence: ATGAGTTT
atagttattttcctcctgaa

SEQ ID NO: 48933 - DNA, 20 bp, Artificial Sequence
  Description of Artificial Sequence: Synthetic oligonucleotide
  Target: LAMA2; (+) strand; PAM type: NNNNGHTT; PAM sequence: ATAGGTTT
aggaaagtgagctgaaaata

SEQ ID NO: 48934 - DNA, 20 bp, Artificial Sequence
  Description of Artificial Sequence: Synthetic oligonucleotide
  Target: LAMA2; (+) strand; PAM type: NNNNGHTT; PAM sequence: TTTCGTTT
gtgagctgaaaataataggt

SEQ ID NO: 48935 - DNA, 20 bp, Artificial Sequence
  Description of Artificial Sequence: Synthetic oligonucleotide
  Target: LAMA2; (+) strand; PAM type: NNNNGHTT; PAM sequence: AAGGGATT
tttatcaaatgcctctcttg

SEQ ID NO: 48936 - DNA, 20 bp, Artificial Sequence
  Description of Artificial Sequence: Synthetic oligonucleotide
  Target: LAMA2; (+) strand; PAM type: NNNNGHTT; PAM sequence: TTGGGATT
ttaatggctctgccccagaa

SEQ ID NO: 48937 - DNA, 20 bp, Artificial Sequence
  Description of Artificial Sequence: Synthetic oligonucleotide
  Target: LAMA2; (+) strand; PAM type: NNNNGHTT; PAM sequence: ACTGGATT
aagtactctcaatataatgt

SEQ ID NO: 48938 - DNA, 20 bp, Artificial Sequence
  Description of Artificial Sequence: Synthetic oligonucleotide
  Target: LAMA2; (+) strand; PAM type: NNNNGHTT; PAM sequence: CATTGTTT
gaggaaattatattctccca

SEQ ID NO: 48939 - DNA, 20 bp, Artificial Sequence
  Description of Artificial Sequence: Synthetic oligonucleotide
  Target: LAMA2; (+) strand; PAM type: NNNNGHTT; PAM sequence: ATAAGATT
ataacagagctagcctgacc

SEQ ID NO: 48940 - DNA, 20 bp, Artificial Sequence
  Description of Artificial Sequence: Synthetic oligonucleotide
  Target: LAMA2; (+) strand; PAM type: NNNNGHTT; PAM sequence: TTCTGTTT
cataagattcagatgccctg

SEQ ID NO: 48941 - DNA, 20 bp, Artificial Sequence
  Description of Artificial Sequence: Synthetic oligonucleotide
  Target: LAMA2; (+) strand; PAM type: NNNNGHTT; PAM sequence: TGTGGCTT
tctgtttctcctttggcaaa

SEQ ID NO: 48942 - DNA, 20 bp, Artificial Sequence
  Description of Artificial Sequence: Synthetic oligonucleotide
  Target: LAMA2; (+) strand; PAM type: NNNNGHTT; PAM sequence: GGACGTTT
taaataggcgctgcctataa

SEQ ID NO: 48943 - DNA, 20 bp, Artificial Sequence
  Description of Artificial Sequence: Synthetic oligonucleotide
  Target: LAMA2; (+) strand; PAM type: NNNNGHTT; PAM sequence: TATCGTTT
ggtcagagaaaatttgctgc

SEQ ID NO: 48944 - DNA, 20 bp, Artificial Sequence
  Description of Artificial Sequence: Synthetic oligonucleotide
  Target: LAMA2; (+) strand; PAM type: NNNNGHTT; PAM sequence: TTTTGTTT
gccatgccctataaacaaac

SEQ ID NO: 48945 - DNA, 20 bp, Artificial Sequence
  Description of Artificial Sequence: Synthetic oligonucleotide
  Target: LAMA2; (+) strand; PAM type: NNNNGHTT; PAM sequence: AATAGTTT
ataatataatatattatata

SEQ ID NO: 48946 - DNA, 20 bp, Artificial Sequence
  Description of Artificial Sequence: Synthetic oligonucleotide
  Target: LAMA2; (+) strand; PAM type: NNNNGHTT; PAM sequence: AATAGTTT
attatataatatataatata

SEQ ID NO: 48947 - DNA, 20 bp, Artificial Sequence
  Description of Artificial Sequence: Synthetic oligonucleotide
  Target: LAMA2; (+) strand; PAM type: NNNNGHTT; PAM sequence: TGGAGTTT
ggaagaaagggagaaagacc

SEQ ID NO: 48948 - DNA, 20 bp, Artificial Sequence
  Description of Artificial Sequence: Synthetic oligonucleotide
  Target: LAMA2; (+) strand; PAM type: NNNNGHTT; PAM sequence: GCATGCTT
catattcctataatatgcag

SEQ ID NO: 48949 - DNA, 20 bp, Artificial Sequence
  Description of Artificial Sequence: Synthetic oligonucleotide
  Target: LAMA2; (+) strand; PAM type: NNNNGHTT; PAM sequence: AATAGATT
ttcatatgcaaatacataca

SEQ ID NO: 48950 - DNA, 20 bp, Artificial Sequence
  Description of Artificial Sequence: Synthetic oligonucleotide
  Target: LAMA2; (+) strand; PAM type: NNNNGHTT; PAM sequence: CACAGTTT
ttaataagaatcttctgagt

SEQ ID NO: 48951 - DNA, 20 bp, Artificial Sequence
  Description of Artificial Sequence: Synthetic oligonucleotide
  Target: LAMA2; (+) strand; PAM type: NNNNGHTT; PAM sequence: GCCTGTTT
attactgaatttccttgcga

SEQ ID NO: 48952 - DNA, 20 bp, Artificial Sequence
  Description of Artificial Sequence: Synthetic oligonucleotide
  Target: LAMA2; (+) strand; PAM type: NNNNGHTT; PAM sequence: AAAGGCTT
catatgatgtgttgtactac

SEQ ID NO: 48953 - DNA, 20 bp, Artificial Sequence
  Description of Artificial Sequence: Synthetic oligonucleotide
  Target: LAMA2; (+) strand; PAM type: NNNNGHTT; PAM sequence: CCTGGATT
caaaggctttccaacatgga

SEQ ID NO: 48954 - DNA, 20 bp, Artificial Sequence
  Description of Artificial Sequence: Synthetic oligonucleotide
  Target: LAMA2; (+) strand; PAM type: NNNNGHTT; PAM sequence: AGCAGATT
gattcctccagagtgccagc

SEQ ID NO: 48955 - DNA, 20 bp, Artificial Sequence
  Description of Artificial Sequence: Synthetic oligonucleotide
  Target: LAMA2; (+) strand; PAM type: NNNNGHTT; PAM sequence: TTATGCTT
gtgccagcagcagattctta

SEQ ID NO: 48956 - DNA, 20 bp, Artificial Sequence
  Description of Artificial Sequence: Synthetic oligonucleotide
  Target: LAMA2; (+) strand; PAM type: NNNNGHTT; PAM sequence: ACAAGATT
tctcattttcagtgccagtg

SEQ ID NO: 48957 - DNA, 20 bp, Artificial Sequence
  Description of Artificial Sequence: Synthetic oligonucleotide
  Target: LAMA2; (+) strand; PAM type: NNNNGHTT; PAM sequence: TTGCGTTT
aaaacatttttttaatcacg

SEQ ID NO: 48958 - DNA, 20 bp, Artificial Sequence
  Description of Artificial Sequence: Synthetic oligonucleotide
  Target: LAMA2; (+) strand; PAM type: NNNNGHTT; PAM sequence: GACAGCTT
tctccatccctggcagctgt

SEQ ID NO: 48959 - DNA, 20 bp, Artificial Sequence
  Description of Artificial Sequence: Synthetic oligonucleotide
  Target: LAMA2; (+) strand; PAM type: NNNNGHTT; PAM sequence: TGTGGATT
gtagctgatgagttcttgag

SEQ ID NO: 48960 - DNA, 20 bp, Artificial Sequence
  Description of Artificial Sequence: Synthetic oligonucleotide
  Target: LAMA2; (+) strand; PAM type: NNNNGHTT; PAM sequence: CACTGTTT
ttgctgtggtattgaagcat

SEQ ID NO: 48961 - DNA, 20 bp, Artificial Sequence
  Description of Artificial Sequence: Synthetic oligonucleotide
  Target: LAMA2; (+) strand; PAM type: NNNNGHTT; PAM sequence: ACATGTTT
cactgttttccaaatgataa

SEQ ID NO: 48962 - DNA, 20 bp, Artificial Sequence
  Description of Artificial Sequence: Synthetic oligonucleotide
  Target: LAMA2; (+) strand; PAM type: NNNNGHTT; PAM sequence: GGAAGATT
gtttttatttacatgcggaa

SEQ ID NO: 48963 - DNA, 20 bp, Artificial Sequence
  Description of Artificial Sequence: Synthetic oligonucleotide
  Target: LAMA2; (+) strand; PAM type: NNNNGHTT; PAM sequence: ACTTGCTT
tttttatctcaattctaatc

SEQ ID NO: 48964 - DNA, 20 bp, Artificial Sequence
  Description of Artificial Sequence: Synthetic oligonucleotide
  Target: LAMA2; (+) strand; PAM type: NNNNGHTT; PAM sequence: TTATGCTT
catcagaaggtgttaatcag

SEQ ID NO: 48965 - DNA, 20 bp, Artificial Sequence
  Description of Artificial Sequence: Synthetic oligonucleotide
  Target: LAMA2; (+) strand; PAM type: NNNNGHTT; PAM sequence: GAATGATT
cacaggcatttgtcattgtt

SEQ ID NO: 48966 - DNA, 20 bp, Artificial Sequence
  Description of Artificial Sequence: Synthetic oligonucleotide
  Target: LAMA2; (+) strand; PAM type: NNNNGHTT; PAM sequence: TTTAGTTT
tgttgaatgattaacctcat

SEQ ID NO: 48967 - DNA, 20 bp, Artificial Sequence
  Description of Artificial Sequence: Synthetic oligonucleotide
  Target: LAMA2; (+) strand; PAM type: NNNNGHTT; PAM sequence: CAGTGTTT
ctatttctagaatgctcttt

SEQ ID NO: 48968 - DNA, 20 bp, Artificial Sequence
  Description of Artificial Sequence: Synthetic oligonucleotide
  Target: LAMA2; (+) strand; PAM type: NNNNGHTT; PAM sequence: TAGGGCTT
ttccacaaaattagctactc

SEQ ID NO: 48969 - DNA, 20 bp, Artificial Sequence
  Description of Artificial Sequence: Synthetic oligonucleotide
  Target: LAMA2; (+) strand; PAM type: NNNNGHTT; PAM sequence: GTGGGATT
tttccaaatccttaatgtca

SEQ ID NO: 48970 - DNA, 20 bp, Artificial Sequence
  Description of Artificial Sequence: Synthetic oligonucleotide
  Target: LAMA2; (+) strand; PAM type: NNNNGHTT; PAM sequence: ATCAGCTT
aatgttagcatttggccatc

SEQ ID NO: 48971 - DNA, 20 bp, Artificial Sequence
  Description of Artificial Sequence: Synthetic oligonucleotide
  Target: LAMA2; (+) strand; PAM type: NNNNGHTT; PAM sequence: TAATGTTT
atcagcttcatttactatca

SEQ ID NO: 48972 - DNA, 20 bp, Artificial Sequence
  Description of Artificial Sequence: Synthetic oligonucleotide
  Target: LAMA2; (+) strand; PAM type: NNNNGHTT; PAM sequence: ACAGGTTT
agaaatgtgtctctctcatc

SEQ ID NO: 48973 - DNA, 20 bp, Artificial Sequence
  Description of Artificial Sequence: Synthetic oligonucleotide
  Target: LAMA2; (+) strand; PAM type: NNNNGHTT; PAM sequence: TCTAGCTT
cacaggtttagaagatgagt

SEQ ID NO: 48974 - DNA, 20 bp, Artificial Sequence
  Description of Artificial Sequence: Synthetic oligonucleotide
  Target: LAMA2; (+) strand; PAM type: NNNNGHTT; PAM sequence: ACTGGATT
acagctcagtgcctttaaac

SEQ ID NO: 48975 - DNA, 20 bp, Artificial Sequence
  Description of Artificial Sequence: Synthetic oligonucleotide
  Target: LAMA2; (+) strand; PAM type: NNNNGHTT; PAM sequence: CACAGTTT
gatatttgacctccttgaga

SEQ ID NO: 48976 - DNA, 20 bp, Artificial Sequence
  Description of Artificial Sequence: Synthetic oligonucleotide
  Target: LAMA2; (+) strand; PAM type: NNNNGHTT; PAM sequence: AAAGGATT
atgaattttctgtggggact

SEQ ID NO: 48977 - DNA, 20 bp, Artificial Sequence
  Description of Artificial Sequence: Synthetic oligonucleotide
  Target: LAMA2; (+) strand; PAM type: NNNNGHTT; PAM sequence: GTGGGATT
ttttattatggtaatttatt

SEQ ID NO: 48978 - DNA, 20 bp, Artificial Sequence
  Description of Artificial Sequence: Synthetic oligonucleotide
  Target: LAMA2; (+) strand; PAM type: NNNNGHTT; PAM sequence: ATGGGATT
aattattgtagaaaattatt

SEQ ID NO: 48979 - DNA, 20 bp, Artificial Sequence
  Description of Artificial Sequence: Synthetic oligonucleotide
  Target: LAMA2; (+) strand; PAM type: NNNNGHTT; PAM sequence: ACCAGTTT
ataaaaacattttgaccatt

SEQ ID NO: 48980 - DNA, 20 bp, Artificial Sequence
  Description of Artificial Sequence: Synthetic oligonucleotide
  Target: LAMA2; (+) strand; PAM type: NNNNGHTT; PAM sequence: ATGTGATT
actacttgccgtgagtatag

SEQ ID NO: 48981 - DNA, 20 bp, Artificial Sequence
  Description of Artificial Sequence: Synthetic oligonucleotide
  Target: LAMA2; (+) strand; PAM type: NNNNGHTT; PAM sequence: TATAGATT
aatacattattttggttacc

SEQ ID NO: 48982 - DNA, 20 bp, Artificial Sequence
  Description of Artificial Sequence: Synthetic oligonucleotide
  Target: LAMA2; (+) strand; PAM type: NNNNGHTT; PAM sequence: TACTGCTT
gacactttagcaaaacttta

SEQ ID NO: 48983 - DNA, 20 bp, Artificial Sequence
  Description of Artificial Sequence: Synthetic oligonucleotide
  Target: LAMA2; (+) strand; PAM type: NNNNGHTT; PAM sequence: TGTTGTTT
agcaaaactttatactgctt

SEQ ID NO: 48984 - DNA, 20 bp, Artificial Sequence
  Description of Artificial Sequence: Synthetic oligonucleotide
  Target: LAMA2; (+) strand; PAM type: NNNNGHTT; PAM sequence: TGTAGTTT
atttatggtaaatttaattt

SEQ ID NO: 48985 - DNA, 20 bp, Artificial Sequence
  Description of Artificial Sequence: Synthetic oligonucleotide
  Target: LAMA2; (+) strand; PAM type: NNNNGHTT; PAM sequence: TTCAGTTT
atagactatccgtaggctct

SEQ ID NO: 48986 - DNA, 20 bp, Artificial Sequence
  Description of Artificial Sequence: Synthetic oligonucleotide
  Target: LAMA2; (+) strand; PAM type: NNNNGHTT; PAM sequence: AGCAGTTT
ctttgctggaagataaatta

SEQ ID NO: 48987 - DNA, 20 bp, Artificial Sequence
  Description of Artificial Sequence: Synthetic oligonucleotide
  Target: LAMA2; (+) strand; PAM type: NNNNGHTT; PAM sequence: TTTTGTTT
agtttttagaaaagcagttc

SEQ ID NO: 48988 - DNA, 20 bp, Artificial Sequence
  Description of Artificial Sequence: Synthetic oligonucleotide
  Target: LAMA2; (+) strand; PAM type: NNNNGHTT; PAM sequence: GTTTGTTT
tttagaaaagcagttctttt

SEQ ID NO: 48989 - DNA, 20 bp, Artificial Sequence
  Description of Artificial Sequence: Synthetic oligonucleotide
  Target: LAMA2; (+) strand; PAM type: NNNNGHTT; PAM sequence: ATTTGTTT
agcagttcttttgtttgttt

SEQ ID NO: 48990 - DNA, 20 bp, Artificial Sequence
  Description of Artificial Sequence: Synthetic oligonucleotide
  Target: LAMA2; (+) strand; PAM type: NNNNGHTT; PAM sequence: GTTTGTTT
gttcttttgtttgtttattt

SEQ ID NO: 48991 - DNA, 20 bp, Artificial Sequence
  Description of Artificial Sequence: Synthetic oligonucleotide
  Target: LAMA2; (+) strand; PAM type: NNNNGHTT; PAM sequence: ACCTGTTT
ttagcataggctgatagagt

SEQ ID NO: 48992 - DNA, 20 bp, Artificial Sequence
  Description of Artificial Sequence: Synthetic oligonucleotide
  Target: LAMA2; (+) strand; PAM type: NNNNGHTT; PAM sequence: TATAGCTT
aggctgatagagtacctgtt

SEQ ID NO: 48993 - DNA, 20 bp, Artificial Sequence
  Description of Artificial Sequence: Synthetic oligonucleotide
  Target: LAMA2; (+) strand; PAM type: NNNNGHTT; PAM sequence: TTAAGCTT
tctatttgtgaaaaggtcac

SEQ ID NO: 48994 - DNA, 20 bp, Artificial Sequence
  Description of Artificial Sequence: Synthetic oligonucleotide
  Target: LAMA2; (+) strand; PAM type: NNNNGHTT; PAM sequence: GACTGATT
aaaaggtcacttaagcttta

SEQ ID NO: 48995 - DNA, 20 bp, Artificial Sequence
  Description of Artificial Sequence: Synthetic oligonucleotide
  Target: LAMA2; (+) strand; PAM type: NNNNGHTT; PAM sequence: CTACGTTT
aagctttagactgatttact

SEQ ID NO: 48996 - DNA, 20 bp, Artificial Sequence
  Description of Artificial Sequence: Synthetic oligonucleotide
  Target: LAMA2; (+) strand; PAM type: NNNNGHTT; PAM sequence: GACAGCTT
tacgttttagaataacctca

SEQ ID NO: 48997 - DNA, 20 bp, Artificial Sequence
  Description of Artificial Sequence: Synthetic oligonucleotide
  Target: LAMA2; (+) strand; PAM type: NNNNGHTT; PAM sequence: AAAAGATT
tataacaaagcaaaaaagac

SEQ ID NO: 48998 - DNA, 20 bp, Artificial Sequence
  Description of Artificial Sequence: Synthetic oligonucleotide
  Target: LAMA2; (+) strand; PAM type: NNNNGHTT; PAM sequence: ATATGTTT
caaaagattacttaaatgaa

SEQ ID NO: 48999 - DNA, 20 bp, Artificial Sequence
  Description of Artificial Sequence: Synthetic oligonucleotide
  Target: LAMA2; (+) strand; PAM type: NNNNGHTT; PAM sequence: GTATGTTT
acttaaatgaaatatgtttt

SEQ ID NO: 49000 - DNA, 20 bp, Artificial Sequence
  Description of Artificial Sequence: Synthetic oligonucleotide
  Target: LAMA2; (+) strand; PAM type: NNNNGHTT; PAM sequence: AAGTGATT
gcatataaactgtaaaataa

SEQ ID NO: 49001 - DNA, 20 bp, Artificial Sequence
  Description of Artificial Sequence: Synthetic oligonucleotide
  Target: LAMA2; (+) strand; PAM type: NNNNGHTT; PAM sequence: TGATGTTT
tagtcttaagatacttgaaa

SEQ ID NO: 49002 - DNA, 20 bp, Artificial Sequence
  Description of Artificial Sequence: Synthetic oligonucleotide
  Target: LAMA2; (+) strand; PAM type: NNNNGHTT; PAM sequence: TCTAGATT
aaaaaaactaactaaatttt

SEQ ID NO: 49003 - DNA, 20 bp, Artificial Sequence
  Description of Artificial Sequence: Synthetic oligonucleotide
  Target: LAMA2; (+) strand; PAM type: NNNNGHTT; PAM sequence: TATGGCTT
gcatgtggacttgtataagc

SEQ ID NO: 49004 - DNA, 20 bp, Artificial Sequence
  Description of Artificial Sequence: Synthetic oligonucleotide
  Target: LAMA2; (+) strand; PAM type: NNNNGHTT; PAM sequence: TACAGCTT
gcctttatgtgaattatccc

SEQ ID NO: 49005 - DNA, 20 bp, Artificial Sequence
  Description of Artificial Sequence: Synthetic oligonucleotide
  Target: LAMA2; (+) strand; PAM type: NNNNGHTT; PAM sequence: TAGGGATT
tacagcttgtagagttgtta

SEQ ID NO: 49006 - DNA, 20 bp, Artificial Sequence
  Description of Artificial Sequence: Synthetic oligonucleotide
  Target: LAMA2; (+) strand; PAM type: NNNNGHTT; PAM sequence: GAAAGTTT
caagcctattaagactatta

SEQ ID NO: 49007 - DNA, 20 bp, Artificial Sequence
  Description of Artificial Sequence: Synthetic oligonucleotide
  Target: LAMA2; (+) strand; PAM type: NNNNGHTT; PAM sequence: TGAGGTTT
aatgccggtggctctttctc

SEQ ID NO: 49008 - DNA, 20 bp, Artificial Sequence
  Description of Artificial Sequence: Synthetic oligonucleotide
  Target: LAMA2; (+) strand; PAM type: NNNNGHTT; PAM sequence: TACAGATT
cccataaattactttctcct

SEQ ID NO: 49009 - DNA, 20 bp, Artificial Sequence
  Description of Artificial Sequence: Synthetic oligonucleotide
  Target: LAMA2; (+) strand; PAM type: NNNNGHTT; PAM sequence: ACTGGCTT
ctttctccttacagattttc

SEQ ID NO: 49010 - DNA, 20 bp, Artificial Sequence
  Description of Artificial Sequence: Synthetic oligonucleotide
  Target: LAMA2; (+) strand; PAM type: NNNNGHTT; PAM sequence: ACATGTTT
attttcactggcttttcatg

SEQ ID NO: 49011 - DNA, 20 bp, Artificial Sequence
  Description of Artificial Sequence: Synthetic oligonucleotide
  Target: LAMA2; (+) strand; PAM type: NNNNGHTT; PAM sequence: GAAGGTTT
ataccttcgtatattaaaag

SEQ ID NO: 49012 - DNA, 20 bp, Artificial Sequence
  Description of Artificial Sequence: Synthetic oligonucleotide
  Target: LAMA2; (+) strand; PAM type: NNNNGHTT; PAM sequence: TTGGGATT
tcgtatattaaaaggaaggt

SEQ ID NO: 49013 - DNA, 20 bp, Artificial Sequence
  Description of Artificial Sequence: Synthetic oligonucleotide
  Target: LAMA2; (+) strand; PAM type: NNNNGHTT; PAM sequence: AAAAGTTT
tgaaatgactgtgatcagtg

SEQ ID NO: 49014 - DNA, 20 bp, Artificial Sequence
  Description of Artificial Sequence: Synthetic oligonucleotide
  Target: LAMA2; (+) strand; PAM type: NNNNGHTT; PAM sequence: ATTCGCTT
tggcagtgaatgtgtattat

SEQ ID NO: 49015 - DNA, 20 bp, Artificial Sequence
  Description of Artificial Sequence: Synthetic oligonucleotide
  Target: LAMA2; (+) strand; PAM type: NNNNGHTT; PAM sequence: AATCGCTT
tcaggaggctgaggcgggag

SEQ ID NO: 49016 - DNA, 20 bp, Artificial Sequence
  Description of Artificial Sequence: Synthetic oligonucleotide
  Target: LAMA2; (+) strand; PAM type: NNNNGHTT; PAM sequence: CTTTGCTT
acaaaccaaaatgttactcc

SEQ ID NO: 49017 - DNA, 20 bp, Artificial Sequence
  Description of Artificial Sequence: Synthetic oligonucleotide
  Target: LAMA2; (+) strand; PAM type: NNNNGHTT; PAM sequence: GGAAGTTT
ctgtgagcagtctacctaat

SEQ ID NO: 49018 - DNA, 20 bp, Artificial Sequence
  Description of Artificial Sequence: Synthetic oligonucleotide
  Target: LAMA2; (+) strand; PAM type: NNNNGHTT; PAM sequence: TACCGATT
ttgttctcagtccctgaaca

SEQ ID NO: 49019 - DNA, 20 bp, Artificial Sequence
  Description of Artificial Sequence: Synthetic oligonucleotide
  Target: LAMA2; (+) strand; PAM type: NNNNGHTT; PAM sequence: CCCTGCTT
gtccctgaacataccgattg

SEQ ID NO: 49020 - DNA, 20 bp, Artificial Sequence
  Description of Artificial Sequence: Synthetic oligonucleotide
  Target: LAMA2; (+) strand; PAM type: NNNNGHTT; PAM sequence: TTCAGATT
ctttcagtatggcaagcaac

SEQ ID NO: 49021 - DNA, 20 bp, Artificial Sequence
  Description of Artificial Sequence: Synthetic oligonucleotide
  Target: LAMA2; (+) strand; PAM type: NNNNGHTT; PAM sequence: GACAGATT
cagattcctccatgagggtg

SEQ ID NO: 49022 - DNA, 20 bp, Artificial Sequence
  Description of Artificial Sequence: Synthetic oligonucleotide
  Target: LAMA2; (+) strand; PAM type: NNNNGHTT; PAM sequence: TAGCGCTT
gagggtggacagatttgctc

SEQ ID NO: 49023 - DNA, 20 bp, Artificial Sequence
  Description of Artificial Sequence: Synthetic oligonucleotide
  Target: LAMA2; (+) strand; PAM type: NNNNGHTT; PAM sequence: GGAAGTTT
gtcaaactggccttactgta

SEQ ID NO: 49024 - DNA, 20 bp, Artificial Sequence
  Description of Artificial Sequence: Synthetic oligonucleotide
  Target: LAMA2; (+) strand; PAM type: NNNNGHTT; PAM sequence: ATCTGCTT
gtaggaagtttgaaaatatc

SEQ ID NO: 49025 - DNA, 20 bp, Artificial Sequence
  Description of Artificial Sequence: Synthetic oligonucleotide
  Target: LAMA2; (+) strand; PAM type: NNNNGHTT; PAM sequence: CTCTGTTT
tctcttgaataatatcattg

SEQ ID NO: 49026 - DNA, 20 bp, Artificial Sequence
  Description of Artificial Sequence: Synthetic oligonucleotide
  Target: LAMA2; (+) strand; PAM type: NNNNGHTT; PAM sequence: TTTTGTTT
tgaataatatcattgctctg

SEQ ID NO: 49027 - DNA, 20 bp, Artificial Sequence
  Description of Artificial Sequence: Synthetic oligonucleotide
  Target: LAMA2; (+) strand; PAM type: NNNNGHTT; PAM sequence: GTTGGTTT
tgtttttattttattttatg

SEQ ID NO: 49028 - DNA, 20 bp, Artificial Sequence
  Description of Artificial Sequence: Synthetic oligonucleotide
  Target: LAMA2; (+) strand; PAM type: NNNNGHTT; PAM sequence: AAGCGATT
atatgtggcgggatccagag

SEQ ID NO: 49029 - DNA, 20 bp, Artificial Sequence
  Description of Artificial Sequence: Synthetic oligonucleotide
  Target: LAMA2; (+) strand; PAM type: NNNNGHTT; PAM sequence: TCAGGCTT
caggaagatgtgtctgtaaa

SEQ ID NO: 49030 - DNA, 20 bp, Artificial Sequence
  Description of Artificial Sequence: Synthetic oligonucleotide
  Target: LAMA2; (+) strand; PAM type: NNNNGHTT; PAM sequence: CAAAGATT
aagtgtgcaaattgcaaatg

SEQ ID NO: 49031 - DNA, 20 bp, Artificial Sequence
  Description of Artificial Sequence: Synthetic oligonucleotide
  Target: LAMA2; (+) strand; PAM type: NNNNGHTT; PAM sequence: GTATGCTT
ccttttaaaaataaccatcc

SEQ ID NO: 49032 - DNA, 20 bp, Artificial Sequence
  Description of Artificial Sequence: Synthetic oligonucleotide
  Target: LAMA2; (+) strand; PAM type: NNNNGHTT; PAM sequence: AATTGATT
gaaggaaaatctagcagaga

SEQ ID NO: 49033 - DNA, 20 bp, Artificial Sequence
  Description of Artificial Sequence: Synthetic oligonucleotide
  Target: LAMA2; (+) strand; PAM type: NNNNGHTT; PAM sequence: TTGTGCTT
tttgttaatttccacatcaa

SEQ ID NO: 49034 - DNA, 20 bp, Artificial Sequence
  Description of Artificial Sequence: Synthetic oligonucleotide
  Target: LAMA2; (+) strand; PAM type: NNNNGHTT; PAM sequence: AGTTGTTT
caaatacccaaaacggggaa

SEQ ID NO: 49035 - DNA, 20 bp, Artificial Sequence
  Description of Artificial Sequence: Synthetic oligonucleotide
  Target: LAMA2; (+) strand; PAM type: NNNNGHTT; PAM sequence: CATGGTTT
agaagaagtaaaaaacaatt

SEQ ID NO: 49036 - DNA, 20 bp, Artificial Sequence
  Description of Artificial Sequence: Synthetic oligonucleotide
  Target: LAMA2; (+) strand; PAM type: NNNNGHTT; PAM sequence: TTCAGCTT
ttccttgaatctttctgtaa

SEQ ID NO: 49037 - DNA, 20 bp, Artificial Sequence
  Description of Artificial Sequence: Synthetic oligonucleotide
  Target: LAMA2; (+) strand; PAM type: NNNNGHTT; PAM sequence: GAGGGTTT
ctgtagtaagatccacttca

SEQ ID NO: 49038 - DNA, 20 bp, Artificial Sequence
  Description of Artificial Sequence: Synthetic oligonucleotide
  Target: LAMA2; (+) strand; PAM type: NNNNGHTT; PAM sequence: GTCTGCTT
atccacttcagagggtttat

SEQ ID NO: 49039 - DNA, 20 bp, Artificial Sequence
  Description of Artificial Sequence: Synthetic oligonucleotide
  Target: LAMA2; (+) strand; PAM type: NNNNGHTT; PAM sequence: AGAGGTTT
actccaagaagcaaatgcca

SEQ ID NO: 49040 - DNA, 20 bp, Artificial Sequence
  Description of Artificial Sequence: Synthetic oligonucleotide
  Target: LAMA2; (+) strand; PAM type: NNNNGHTT; PAM sequence: CCTTGTTT
gaaagactgggtaggaaaag

SEQ ID NO: 49041 - DNA, 20 bp, Artificial Sequence
  Description of Artificial Sequence: Synthetic oligonucleotide
  Target: LAMA2; (+) strand; PAM type: NNNNGHTT; PAM sequence: TCACGATT
aaacaatggaaattcatttc

SEQ ID NO: 49042 - DNA, 20 bp, Artificial Sequence
  Description of Artificial Sequence: Synthetic oligonucleotide
  Target: LAMA2; (+) strand; PAM type: NNNNGHTT; PAM sequence: GGCAGATT
aagtacaagatccaggtgct

SEQ ID NO: 49043 - DNA, 20 bp, Artificial Sequence
  Description of Artificial Sequence: Synthetic oligonucleotide
  Target: LAMA2; (+) strand; PAM type: NNNNGHTT; PAM sequence: TTAAGATT
ctataccaccaccttgaggg

SEQ ID NO: 49044 - DNA, 20 bp, Artificial Sequence
  Description of Artificial Sequence: Synthetic oligonucleotide
  Target: LAMA2; (+) strand; PAM type: NNNNGHTT; PAM sequence: GGAGGCTT
ggtccaaaagacaagaaact

SEQ ID NO: 49045 - DNA, 20 bp, Artificial Sequence
  Description of Artificial Sequence: Synthetic oligonucleotide
  Target: LAMA2; (+) strand; PAM type: NNNNGHTT; PAM sequence: GAGAGTTT
gtgcatcaggcaggagcata

SEQ ID NO: 49046 - DNA, 20 bp, Artificial Sequence
  Description of Artificial Sequence: Synthetic oligonucleotide
  Target: LAMA2; (+) strand; PAM type: NNNNGHTT; PAM sequence: GCCTGATT
gagtttttagtaaatgttag

SEQ ID NO: 49047 - DNA, 20 bp, Artificial Sequence
  Description of Artificial Sequence: Synthetic oligonucleotide
  Target: LAMA2; (+) strand; PAM type: NNNNGHTT; PAM sequence: AAATGTTT
accaatgttgttaaatgaag

SEQ ID NO: 49048 - DNA, 20 bp, Artificial Sequence
  Description of Artificial Sequence: Synthetic oligonucleotide
  Target: LAMA2; (+) strand; PAM type: NNNNGHTT; PAM sequence: AACTGATT
caataaaagaaaaagataat

SEQ ID NO: 49049 - DNA, 20 bp, Artificial Sequence
  Description of Artificial Sequence: Synthetic oligonucleotide
  Target: LAMA2; (+) strand; PAM type: NNNNGHTT; PAM sequence: CAGGGTTT
tacagtactattgtatgaag

SEQ ID NO: 49050 - DNA, 20 bp, Artificial Sequence
  Description of Artificial Sequence: Synthetic oligonucleotide
  Target: LAMA2; (+) strand; PAM type: NNNNGHTT; PAM sequence: CTCAGTTT
cttacttaacctttctgtgc

SEQ ID NO: 49051 - DNA, 20 bp, Artificial Sequence
  Description of Artificial Sequence: Synthetic oligonucleotide
  Target: LAMA2; (+) strand; PAM type: NNNNGHTT; PAM sequence: AAGAGTTT
taaatgagtacatatttgta

SEQ ID NO: 49052 - DNA, 20 bp, Artificial Sequence
  Description of Artificial Sequence: Synthetic oligonucleotide
  Target: LAMA2; (+) strand; PAM type: NNNNGHTT; PAM sequence: TTTAGATT
gagtacatatttgtaaagag

SEQ ID NO: 49053 - DNA, 20 bp, Artificial Sequence
  Description of Artificial Sequence: Synthetic oligonucleotide
  Target: LAMA2; (+) strand; PAM type: NNNNGHTT; PAM sequence: AAGGGTTT
gtaaagagtttagatttgta

SEQ ID NO: 49054 - DNA, 20 bp, Artificial Sequence
  Description of Artificial Sequence: Synthetic oligonucleotide
  Target: LAMA2; (+) strand; PAM type: NNNNGHTT; PAM sequence: TTGTGCTT
gatttgtaaagggtttagaa

SEQ ID NO: 49055 - DNA, 20 bp, Artificial Sequence
  Description of Artificial Sequence: Synthetic oligonucleotide
  Target: LAMA2; (+) strand; PAM type: NNNNGHTT; PAM sequence: TACAGTTT
gacacatttatgggaaccta

SEQ ID NO: 49056 - DNA, 20 bp, Artificial Sequence
  Description of Artificial Sequence: Synthetic oligonucleotide
  Target: LAMA2; (+) strand; PAM type: NNNNGHTT; PAM sequence: TTAAGTTT
tgaccatgaatgtctgctcc

SEQ ID NO: 49057 - DNA, 20 bp, Artificial Sequence
  Description of Artificial Sequence: Synthetic oligonucleotide
  Target: LAMA2; (+) strand; PAM type: NNNNGHTT; PAM sequence: GTTTGTTT
catgaatgtctgctccttaa

SEQ ID NO: 49058 - DNA, 20 bp, Artificial Sequence
  Description of Artificial Sequence: Synthetic oligonucleotide
  Target: LAMA2; (+) strand; PAM type: NNNNGHTT; PAM sequence: TGGGGTTT
tccttaagtttgtttactag

SEQ ID NO: 49059 - DNA, 20 bp, Artificial Sequence
  Description of Artificial Sequence: Synthetic oligonucleotide
  Target: LAMA2; (+) strand; PAM type: NNNNGHTT; PAM sequence: AACCGTTT
atatttgaaaagtgaggtag

SEQ ID NO: 49060 - DNA, 20 bp, Artificial Sequence
  Description of Artificial Sequence: Synthetic oligonucleotide
  Target: LAMA2; (+) strand; PAM type: NNNNGHTT; PAM sequence: ATTTGATT
aatttggaatctcatttgat

SEQ ID NO: 49061 - DNA, 20 bp, Artificial Sequence
  Description of Artificial Sequence: Synthetic oligonucleotide
  Target: LAMA2; (+) strand; PAM type: NNNNGHTT; PAM sequence: GATTGATT
tggaatctcatttgatattt

SEQ ID NO: 49062 - DNA, 20 bp, Artificial Sequence
  Description of Artificial Sequence: Synthetic oligonucleotide
  Target: LAMA2; (+) strand; PAM type: NNNNGHTT; PAM sequence: ATGTGTTT
atatatgagtgtgtatatat

SEQ ID NO: 49063 - DNA, 20 bp, Artificial Sequence
  Description of Artificial Sequence: Synthetic oligonucleotide
  Target: LAMA2; (+) strand; PAM type: NNNNGHTT; PAM sequence: TACCGTTT
atgactcagatatttttcaa

SEQ ID NO: 49064 - DNA, 20 bp, Artificial Sequence
  Description of Artificial Sequence: Synthetic oligonucleotide
  Target: LAMA2; (+) strand; PAM type: NNNNGHTT; PAM sequence: TTATGTTT
ttcaataccgttttaatata

SEQ ID NO: 49065 - DNA, 20 bp, Artificial Sequence
  Description of Artificial Sequence: Synthetic oligonucleotide
  Target: LAMA2; (+) strand; PAM type: NNNNGHTT; PAM sequence: TTCTGTTT
tagtctttttgtctatgtat

SEQ ID NO: 49066 - DNA, 20 bp, Artificial Sequence
  Description of Artificial Sequence: Synthetic oligonucleotide
  Target: LAMA2; (+) strand; PAM type: NNNNGHTT; PAM sequence: TTCTGTTT
ttttgtctatgtatttctgt

SEQ ID NO: 49067 - DNA, 20 bp, Artificial Sequence
  Description of Artificial Sequence: Synthetic oligonucleotide
  Target: LAMA2; (+) strand; PAM type: NNNNGHTT; PAM sequence: TATAGTTT
tgaaatttacatagtattta

SEQ ID NO: 49068 - DNA, 20 bp, Artificial Sequence
  Description of Artificial Sequence: Synthetic oligonucleotide
  Target: LAMA2; (+) strand; PAM type: NNNNGHTT; PAM sequence: TTTTGTTT
gtatttatatagtttcatat

SEQ ID NO: 49069 - DNA, 20 bp, Artificial Sequence
  Description of Artificial Sequence: Synthetic oligonucleotide
  Target: LAMA2; (+) strand; PAM type: NNNNGHTT; PAM sequence: AACTGCTT
aagcatatttatatcattaa

SEQ ID NO: 49070 - DNA, 20 bp, Artificial Sequence
  Description of Artificial Sequence: Synthetic oligonucleotide
  Target: LAMA2; (+) strand; PAM type: NNNNGHTT; PAM sequence: ACAGGATT
atcattaaaactgcttcaaa

SEQ ID NO: 49071 - DNA, 20 bp, Artificial Sequence
  Description of Artificial Sequence: Synthetic oligonucleotide
  Target: LAMA2; (+) strand; PAM type: NNNNGHTT; PAM sequence: GCATGCTT
gataaataatattgtaatag

SEQ ID NO: 49072 - DNA, 20 bp, Artificial Sequence
  Description of Artificial Sequence: Synthetic oligonucleotide
  Target: LAMA2; (+) strand; PAM type: NNNNGHTT; PAM sequence: TTTTGCTT
taatattgtaataggcatgc

SEQ ID NO: 49073 - DNA, 20 bp, Artificial Sequence
  Description of Artificial Sequence: Synthetic oligonucleotide
  Target: LAMA2; (+) strand; PAM type: NNNNGHTT; PAM sequence: TTCTGATT
tgctttaataatattccaat

SEQ ID NO: 49074 - DNA, 20 bp, Artificial Sequence
  Description of Artificial Sequence: Synthetic oligonucleotide
  Target: LAMA2; (+) strand; PAM type: NNNNGHTT; PAM sequence: GTTAGTTT
actaataatgatattatatg

SEQ ID NO: 49075 - DNA, 20 bp, Artificial Sequence
  Description of Artificial Sequence: Synthetic oligonucleotide
  Target: LAMA2; (+) strand; PAM type: NNNNGHTT; PAM sequence: ACATGCTT
tgtcatctgttggaactgtt

SEQ ID NO: 49076 - DNA, 20 bp, Artificial Sequence
  Description of Artificial Sequence: Synthetic oligonucleotide
  Target: LAMA2; (+) strand; PAM type: NNNNGHTT; PAM sequence: GTGTGATT
ttttaaaaatctaattttca

SEQ ID NO: 49077 - DNA, 20 bp, Artificial Sequence
  Description of Artificial Sequence: Synthetic oligonucleotide
  Target: LAMA2; (+) strand; PAM type: NNNNGHTT; PAM sequence: TGAGGCTT
ataatatctaaaatatataa

SEQ ID NO: 49078 - DNA, 20 bp, Artificial Sequence
  Description of Artificial Sequence: Synthetic oligonucleotide
  Target: LAMA2; (+) strand; PAM type: NNNNGHTT; PAM sequence: GCAAGATT
tgggtggctcacgttaagtg

SEQ ID NO: 49079 - DNA, 20 bp, Artificial Sequence
  Description of Artificial Sequence: Synthetic oligonucleotide
  Target: LAMA2; (+) strand; PAM type: NNNNGHTT; PAM sequence: TCCAGATT
gtaattaccgagaataattt

SEQ ID NO: 49080 - DNA, 20 bp, Artificial Sequence
  Description of Artificial Sequence: Synthetic oligonucleotide
  Target: LAMA2; (+) strand; PAM type: NNNNGHTT; PAM sequence: ACATGCTT
taaaatatcataataatgtg

SEQ ID NO: 49081 - DNA, 20 bp, Artificial Sequence
  Description of Artificial Sequence: Synthetic oligonucleotide
  Target: LAMA2; (+) strand; PAM type: NNNNGHTT; PAM sequence: AGATGATT
tgaagtattttaagcaggat

SEQ ID NO: 49082 - DNA, 20 bp, Artificial Sequence
  Description of Artificial Sequence: Synthetic oligonucleotide
  Target: LAMA2; (+) strand; PAM type: NNNNGHTT; PAM sequence: GAGTGATT
gattttcatttttctgctcg

SEQ ID NO: 49083 - DNA, 20 bp, Artificial Sequence
  Description of Artificial Sequence: Synthetic oligonucleotide
  Target: LAMA2; (+) strand; PAM type: NNNNGHTT; PAM sequence: TAACGTTT
tttaatccatcagcattttc

SEQ ID NO: 49084 - DNA, 20 bp, Artificial Sequence
  Description of Artificial Sequence: Synthetic oligonucleotide
  Target: LAMA2; (+) strand; PAM type: NNNNGHTT; PAM sequence: AGATGATT
aatgcaaacttgaccgtaaa

SEQ ID NO: 49085 - DNA, 20 bp, Artificial Sequence
  Description of Artificial Sequence: Synthetic oligonucleotide
  Target: LAMA2; (+) strand; PAM type: NNNNGHTT; PAM sequence: GAAAGTTT
tgaataactcatcagagaat

SEQ ID NO: 49086 - DNA, 20 bp, Artificial Sequence
  Description of Artificial Sequence: Synthetic oligonucleotide
  Target: LAMA2; (+) strand; PAM type: NNNNGHTT; PAM sequence: TGGTGCTT
gaaagtttacttacctgatc

SEQ ID NO: 49087 - DNA, 20 bp, Artificial Sequence
  Description of Artificial Sequence: Synthetic oligonucleotide
  Target: LAMA2; (+) strand; PAM type: NNNNGHTT; PAM sequence: AAATGTTT
agaatgaaacctaagaaatc

SEQ ID NO: 49088 - DNA, 20 bp, Artificial Sequence
  Description of Artificial Sequence: Synthetic oligonucleotide
  Target: LAMA2; (+) strand; PAM type: NNNNGHTT; PAM sequence: CAATGATT
ttataatgtgaacactatag

SEQ ID NO: 49089 - DNA, 20 bp, Artificial Sequence
  Description of Artificial Sequence: Synthetic oligonucleotide
  Target: LAMA2; (+) strand; PAM type: NNNNGHTT; PAM sequence: AAAGGATT
tctatcaaatattagggcaa

SEQ ID NO: 49090 - DNA, 20 bp, Artificial Sequence
  Description of Artificial Sequence: Synthetic oligonucleotide
  Target: LAMA2; (+) strand; PAM type: NNNNGHTT; PAM sequence: TTCAGATT
atagatctgaaagtaatcaa

SEQ ID NO: 49091 - DNA, 20 bp, Artificial Sequence
  Description of Artificial Sequence: Synthetic oligonucleotide
  Target: LAMA2; (+) strand; PAM type: NNNNGHTT; PAM sequence: ATTTGATT
ggatatcatagaaaaggtcc

SEQ ID NO: 49092 - DNA, 20 bp, Artificial Sequence
  Description of Artificial Sequence: Synthetic oligonucleotide
  Target: LAMA2; (+) strand; PAM type: NNNNGHTT; PAM sequence: TCTTGCTT
ctgatctttggtattgtgca

SEQ ID NO: 49093 - DNA, 20 bp, Artificial Sequence
  Description of Artificial Sequence: Synthetic oligonucleotide
  Target: LAMA2; (+) strand; PAM type: NNNNGHTT; PAM sequence: AACTGATT
atcttgcttcacttcgagtt

SEQ ID NO: 49094 - DNA, 20 bp, Artificial Sequence
  Description of Artificial Sequence: Synthetic oligonucleotide
  Target: LAMA2; (+) strand; PAM type: NNNNGHTT; PAM sequence: GATAGTTT
aagtcctacatattcactct

SEQ ID NO: 49095 - DNA, 20 bp, Artificial Sequence
  Description of Artificial Sequence: Synthetic oligonucleotide
  Target: LAMA2; (+) strand; PAM type: NNNNGHTT; PAM sequence: AACAGTTT
ttttagggtctgacttctgt

SEQ ID NO: 49096 - DNA, 20 bp, Artificial Sequence
  Description of Artificial Sequence: Synthetic oligonucleotide
  Target: LAMA2; (+) strand; PAM type: NNNNGHTT; PAM sequence: CACAGATT
gtttgttcttttaaaggaag

SEQ ID NO: 49097 - DNA, 20 bp, Artificial Sequence
  Description of Artificial Sequence: Synthetic oligonucleotide
  Target: LAMA2; (+) strand; PAM type: NNNNGHTT; PAM sequence: GTCAGTTT
acttaaaaaatgaaatacat

SEQ ID NO: 49098 - DNA, 20 bp, Artificial Sequence
  Description of Artificial Sequence: Synthetic oligonucleotide
  Target: LAMA2; (+) strand; PAM type: NNNNGHTT; PAM sequence: GCTCGTTT
ctcagtaaaaatcagcagat

SEQ ID NO: 49099 - DNA, 20 bp, Artificial Sequence
  Description of Artificial Sequence: Synthetic oligonucleotide
  Target: LAMA2; (+) strand; PAM type: NNNNGHTT; PAM sequence: CTTTGATT
gtgtccctccctgtctgtga

SEQ ID NO: 49100 - DNA, 20 bp, Artificial Sequence
  Description of Artificial Sequence: Synthetic oligonucleotide
  Target: LAMA2; (+) strand; PAM type: NNNNGHTT; PAM sequence: TACGGCTT
gccagtcactcaaacactgc

SEQ ID NO: 49101 - DNA, 20 bp, Artificial Sequence
  Description of Artificial Sequence: Synthetic oligonucleotide
  Target: LAMA2; (+) strand; PAM type: NNNNGHTT; PAM sequence: GTTCGATT
ctacggcttgaaagttaaat

SEQ ID NO: 49102 - DNA, 20 bp, Artificial Sequence
  Description of Artificial Sequence: Synthetic oligonucleotide
  Target: LAMA2; (+) strand; PAM type: NNNNGHTT; PAM sequence: CTTAGTTT
ttttctggtaccagtcttat

SEQ ID NO: 49103 - DNA, 20 bp, Artificial Sequence
  Description of Artificial Sequence: Synthetic oligonucleotide
  Target: LAMA2; (+) strand; PAM type: NNNNGHTT; PAM sequence: AGGTGTTT
atccggatcaagaaaagtca

SEQ ID NO: 49104 - DNA, 20 bp, Artificial Sequence
  Description of Artificial Sequence: Synthetic oligonucleotide
  Target: LAMA2; (+) strand; PAM type: NNNNGHTT; PAM sequence: AGAGGTTT
gttcatcaaaaaatgcaggc

SEQ ID NO: 49105 - DNA, 20 bp, Artificial Sequence
  Description of Artificial Sequence: Synthetic oligonucleotide
  Target: LAMA2; (+) strand; PAM type: NNNNGHTT; PAM sequence: CCATGATT
atgcaggcagaggtttctaa

SEQ ID NO: 49106 - DNA, 20 bp, Artificial Sequence
  Description of Artificial Sequence: Synthetic oligonucleotide
  Target: LAMA2; (+) strand; PAM type: NNNNGHTT; PAM sequence: CCTTGATT
aagtaaagagtgaacattag

SEQ ID NO: 49107 - DNA, 20 bp, Artificial Sequence
  Description of Artificial Sequence: Synthetic oligonucleotide
  Target: LAMA2; (+) strand; PAM type: NNNNGHTT; PAM sequence: ACTAGTTT
tgacccttattccaacaatc

SEQ ID NO: 49108 - DNA, 20 bp, Artificial Sequence
  Description of Artificial Sequence: Synthetic oligonucleotide
  Target: LAMA2; (+) strand; PAM type: NNNNGHTT; PAM sequence: CTTTGTTT
atcactagtttgaatattac

SEQ ID NO: 49109 - DNA, 20 bp, Artificial Sequence
  Description of Artificial Sequence: Synthetic oligonucleotide
  Target: LAMA2; (+) strand; PAM type: NNNNGHTT; PAM sequence: CATGGATT
ttacctttgtttactaatgt

SEQ ID NO: 49110 - DNA, 20 bp, Artificial Sequence
  Description of Artificial Sequence: Synthetic oligonucleotide
  Target: LAMA2; (+) strand; PAM type: NNNNGHTT; PAM sequence: GTAAGATT
cacatactctcagcaccatg

SEQ ID NO: 49111 - DNA, 20 bp, Artificial Sequence
  Description of Artificial Sequence: Synthetic oligonucleotide
  Target: LAMA2; (+) strand; PAM type: NNNNGHTT; PAM sequence: TGTGGATT
attctccagcactttagata

SEQ ID NO: 49112 - DNA, 20 bp, Artificial Sequence
  Description of Artificial Sequence: Synthetic oligonucleotide
  Target: LAMA2; (+) strand; PAM type: NNNNGHTT; PAM sequence: ATAAGTTT
ttgataagttattctaaatg

SEQ ID NO: 49113 - DNA, 20 bp, Artificial Sequence
  Description of Artificial Sequence: Synthetic oligonucleotide
  Target: LAMA2; (+) strand; PAM type: NNNNGHTT; PAM sequence: CCTGGATT
acatgacttgcacaaaatag

SEQ ID NO: 49114 - DNA, 20 bp, Artificial Sequence
  Description of Artificial Sequence: Synthetic oligonucleotide
  Target: LAMA2; (+) strand; PAM type: NNNNGHTT; PAM sequence: TTTTGTTT
ctgggaccttgactgagtaa

SEQ ID NO: 49115 - DNA, 20 bp, Artificial Sequence
  Description of Artificial Sequence: Synthetic oligonucleotide
  Target: LAMA2; (+) strand; PAM type: NNNNGHTT; PAM sequence: CATGGTTT
taataatagtatctaccaca

SEQ ID NO: 49116 - DNA, 20 bp, Artificial Sequence
  Description of Artificial Sequence: Synthetic oligonucleotide
  Target: LAMA2; (+) strand; PAM type: NNNNGHTT; PAM sequence: ATTAGTTT
tcattattattattatcttt

SEQ ID NO: 49117 - DNA, 20 bp, Artificial Sequence
  Description of Artificial Sequence: Synthetic oligonucleotide
  Target: LAMA2; (+) strand; PAM type: NNNNGHTT; PAM sequence: TTGTGCTT
tttattaattgtgttataca

SEQ ID NO: 49118 - DNA, 20 bp, Artificial Sequence
  Description of Artificial Sequence: Synthetic oligonucleotide
  Target: LAMA2; (+) strand; PAM type: NNNNGHTT; PAM sequence: TCAGGTTT
caggaaaactagctaattac

SEQ ID NO: 49119 - DNA, 20 bp, Artificial Sequence
  Description of Artificial Sequence: Synthetic oligonucleotide
  Target: LAMA2; (+) strand; PAM type: NNNNGHTT; PAM sequence: TTATGATT
ggttttctttctatttagtg

SEQ ID NO: 49120 - DNA, 20 bp, Artificial Sequence
  Description of Artificial Sequence: Synthetic oligonucleotide
  Target: LAMA2; (+) strand; PAM type: NNNNGHTT; PAM sequence: TAATGATT
agataatttctatttgcaag

SEQ ID NO: 49121 - DNA, 20 bp, Artificial Sequence
  Description of Artificial Sequence: Synthetic oligonucleotide
  Target: LAMA2; (+) strand; PAM type: NNNNGHTT; PAM sequence: TTTGGCTT
gacacatctaaaataaatca

SEQ ID NO: 49122 - DNA, 20 bp, Artificial Sequence
  Description of Artificial Sequence: Synthetic oligonucleotide
  Target: LAMA2; (+) strand; PAM type: NNNNGHTT; PAM sequence: TAGTGTTT
agcaatgactaacatttatt

SEQ ID NO: 49123 - DNA, 20 bp, Artificial Sequence
  Description of Artificial Sequence: Synthetic oligonucleotide
  Target: LAMA2; (+) strand; PAM type: NNNNGHTT; PAM sequence: AAATGATT
attctaaatatattcagtga

SEQ ID NO: 49124 - DNA, 20 bp, Artificial Sequence
  Description of Artificial Sequence: Synthetic oligonucleotide
  Target: LAMA2; (+) strand; PAM type: NNNNGHTT; PAM sequence: AAAAGTTT
tagtcatcatataaccaatt

SEQ ID NO: 49125 - DNA, 20 bp, Artificial Sequence
  Description of Artificial Sequence: Synthetic oligonucleotide
  Target: LAMA2; (+) strand; PAM type: NNNNGHTT; PAM sequence: TTGGGTTT
ttccatttgaattcaagtat

SEQ ID NO: 49126 - DNA, 20 bp, Artificial Sequence
  Description of Artificial Sequence: Synthetic oligonucleotide
  Target: LAMA2; (+) strand; PAM type: NNNNGHTT; PAM sequence: GATGGCTT
ggcatgcattccttgtcttg

SEQ ID NO: 49127 - DNA, 20 bp, Artificial Sequence
  Description of Artificial Sequence: Synthetic oligonucleotide
  Target: LAMA2; (+) strand; PAM type: NNNNGHTT; PAM sequence: ATTGGATT
cattttaaagtatttgcaaa

SEQ ID NO: 49128 - DNA, 20 bp, Artificial Sequence
  Description of Artificial Sequence: Synthetic oligonucleotide
  Target: LAMA2; (+) strand; PAM type: NNNNGHTT; PAM sequence: GTGCGTTT
aaattggattattctgttgt

SEQ ID NO: 49129 - DNA, 20 bp, Artificial Sequence
  Description of Artificial Sequence: Synthetic oligonucleotide
  Target: LAMA2; (+) strand; PAM type: NNNNGHTT; PAM sequence: AGAAGCTT
tacatgatgtaccgaattta

SEQ ID NO: 49130 - DNA, 20 bp, Artificial Sequence
  Description of Artificial Sequence: Synthetic oligonucleotide
  Target: LAMA2; (+) strand; PAM type: NNNNGHTT; PAM sequence: TTAAGCTT
taccgaatttaagaagctta

SEQ ID NO: 49131 - DNA, 20 bp, Artificial Sequence
  Description of Artificial Sequence: Synthetic oligonucleotide
  Target: LAMA2; (+) strand; PAM type: NNNNGHTT; PAM sequence: ATTGGTTT
ttaagaagcttattaagctt

SEQ ID NO: 49132 - DNA, 20 bp, Artificial Sequence
  Description of Artificial Sequence: Synthetic oligonucleotide
  Target: LAMA2; (+) strand; PAM type: NNNNGHTT; PAM sequence: GTAAGTTT
taatataaaagatgaatgaa

SEQ ID NO: 49133 - DNA, 20 bp, Artificial Sequence
  Description of Artificial Sequence: Synthetic oligonucleotide
  Target: LAMA2; (+) strand; PAM type: NNNNGHTT; PAM sequence: CTTTGTTT
tttttactatttttcccctt

SEQ ID NO: 49134 - DNA, 20 bp, Artificial Sequence
  Description of Artificial Sequence: Synthetic oligonucleotide
  Target: LAMA2; (+) strand; PAM type: NNNNGHTT; PAM sequence: TGAAGCTT
tgttttccctcttataccgg

SEQ ID NO: 49135 - DNA, 20 bp, Artificial Sequence
  Description of Artificial Sequence: Synthetic oligonucleotide
  Target: LAMA2; (+) strand; PAM type: NNNNGHTT; PAM sequence: GAGAGATT
tttgctctgataattttttg

SEQ ID NO: 49136 - DNA, 20 bp, Artificial Sequence
  Description of Artificial Sequence: Synthetic oligonucleotide
  Target: LAMA2; (+) strand; PAM type: NNNNGHTT; PAM sequence: TTTTGTTT
tgataattttttggagagat

SEQ ID NO: 49137 - DNA, 20 bp, Artificial Sequence
  Description of Artificial Sequence: Synthetic oligonucleotide
  Target: LAMA2; (+) strand; PAM type: NNNNGHTT; PAM sequence: ATGTGATT
aatgtagaagtattactata

SEQ ID NO: 49138 - DNA, 20 bp, Artificial Sequence
  Description of Artificial Sequence: Synthetic oligonucleotide
  Target: LAMA2; (+) strand; PAM type: NNNNGHTT; PAM sequence: TACAGTTT
acagatattaatcaatatct

SEQ ID NO: 49139 - DNA, 20 bp, Artificial Sequence
  Description of Artificial Sequence: Synthetic oligonucleotide
  Target: LAMA2; (+) strand; PAM type: NNNNGHTT; PAM sequence: CTAGGTTT
aaattgcccctgaattatga

SEQ ID NO: 49140 - DNA, 20 bp, Artificial Sequence
  Description of Artificial Sequence: Synthetic oligonucleotide
  Target: LAMA2; (+) strand; PAM type: NNNNGHTT; PAM sequence: TTAGGTTT
ccctgaattatgactaggtt

SEQ ID NO: 49141 - DNA, 20 bp, Artificial Sequence
  Description of Artificial Sequence: Synthetic oligonucleotide
  Target: LAMA2; (+) strand; PAM type: NNNNGHTT; PAM sequence: TTTAGCTT
gaagagtcattttaacaaca

SEQ ID NO: 49142 - DNA, 20 bp, Artificial Sequence
  Description of Artificial Sequence: Synthetic oligonucleotide
  Target: LAMA2; (+) strand; PAM type: NNNNGHTT; PAM sequence: CATTGATT
ctgatacagcctggtgaatt

SEQ ID NO: 49143 - DNA, 20 bp, Artificial Sequence
  Description of Artificial Sequence: Synthetic oligonucleotide
  Target: LAMA2; (+) strand; PAM type: NNNNGHTT; PAM sequence: CTAGGTTT
gagaagacttaggatgactc

SEQ ID NO: 49144 - DNA, 20 bp, Artificial Sequence
  Description of Artificial Sequence: Synthetic oligonucleotide
  Target: LAMA2; (+) strand; PAM type: NNNNGHTT; PAM sequence: TTTTGCTT
gacttaggatgactcctagg

SEQ ID NO: 49145 - DNA, 20 bp, Artificial Sequence
  Description of Artificial Sequence: Synthetic oligonucleotide
  Target: LAMA2; (+) strand; PAM type: NNNNGHTT; PAM sequence: ATCAGCTT
gataatcactttgcattttt

SEQ ID NO: 49146 - DNA, 20 bp, Artificial Sequence
  Description of Artificial Sequence: Synthetic oligonucleotide
  Target: LAMA2; (+) strand; PAM type: NNNNGHTT; PAM sequence: CAATGATT
ttatagtaatgaattttaac

SEQ ID NO: 49147 - DNA, 20 bp, Artificial Sequence
  Description of Artificial Sequence: Synthetic oligonucleotide
  Target: LAMA2; (+) strand; PAM type: NNNNGHTT; PAM sequence: TACTGTTT
cccatcaccccccatgtgcc

SEQ ID NO: 49148 - DNA, 20 bp, Artificial Sequence
  Description of Artificial Sequence: Synthetic oligonucleotide
  Target: LAMA2; (+) strand; PAM type: NNNNGHTT; PAM sequence: GTCTGTTT
ttctgaaaaatagaatcgta

SEQ ID NO: 49149 - DNA, 20 bp, Artificial Sequence
  Description of Artificial Sequence: Synthetic oligonucleotide
  Target: LAMA2; (+) strand; PAM type: NNNNGHTT; PAM sequence: GGGGGTTT
cgtagtctgtttttttgagg

SEQ ID NO: 49150 - DNA, 20 bp, Artificial Sequence
  Description of Artificial Sequence: Synthetic oligonucleotide
  Target: LAMA2; (+) strand; PAM type: NNNNGHTT; PAM sequence: GTTTGTTT
gtctgtttttttgagggggg

SEQ ID NO: 49151 - DNA, 20 bp, Artificial Sequence
  Description of Artificial Sequence: Synthetic oligonucleotide
  Target: LAMA2; (+) strand; PAM type: NNNNGHTT; PAM sequence: GTTTGTTT
gtttttttgagggggggttt

SEQ ID NO: 49152 - DNA, 20 bp, Artificial Sequence
  Description of Artificial Sequence: Synthetic oligonucleotide
  Target: LAMA2; (+) strand; PAM type: NNNNGHTT; PAM sequence: CTTTGTTT
gagggggggtttgtttgttt

SEQ ID NO: 49153 - DNA, 20 bp, Artificial Sequence
  Description of Artificial Sequence: Synthetic oligonucleotide
  Target: LAMA2; (+) strand; PAM type: NNNNGHTT; PAM sequence: TTTGGCTT
ggggtttgtttgtttctttg

SEQ ID NO: 49154 - DNA, 20 bp, Artificial Sequence
  Description of Artificial Sequence: Synthetic oligonucleotide
  Target: LAMA2; (+) strand; PAM type: NNNNGHTT; PAM sequence: TTACGTTT
ttggcttccttcacttggtg

SEQ ID NO: 49155 - DNA, 20 bp, Artificial Sequence
  Description of Artificial Sequence: Synthetic oligonucleotide
  Target: LAMA2; (+) strand; PAM type: NNNNGHTT; PAM sequence: AGCAGTTT
tccatattgttgcatgtatc

SEQ ID NO: 49156 - DNA, 20 bp, Artificial Sequence
  Description of Artificial Sequence: Synthetic oligonucleotide
  Target: LAMA2; (+) strand; PAM type: NNNNGHTT; PAM sequence: AATTGCTT
tatcagcagtttgttctaaa

SEQ ID NO: 49157 - DNA, 20 bp, Artificial Sequence
  Description of Artificial Sequence: Synthetic oligonucleotide
  Target: LAMA2; (+) strand; PAM type: NNNNGHTT; PAM sequence: ACTTGCTT
catttgtgtaatgtacagtg

SEQ ID NO: 49158 - DNA, 20 bp, Artificial Sequence
  Description of Artificial Sequence: Synthetic oligonucleotide
  Target: LAMA2; (+) strand; PAM type: NNNNGHTT; PAM sequence: ACCTGTTT
taatgtacagtgacttgctt

SEQ ID NO: 49159 - DNA, 20 bp, Artificial Sequence
  Description of Artificial Sequence: Synthetic oligonucleotide
  Target: LAMA2; (+) strand; PAM type: NNNNGHTT; PAM sequence: GGGTGTTT
ttacctgtttaccatttaat

SEQ ID NO: 49160 - DNA, 20 bp, Artificial Sequence
  Description of Artificial Sequence: Synthetic oligonucleotide
  Target: LAMA2; (+) strand; PAM type: NNNNGHTT; PAM sequence: TCTAGTTT
taatgggtgtttgggtcatt

SEQ ID NO: 49161 - DNA, 20 bp, Artificial Sequence
  Description of Artificial Sequence: Synthetic oligonucleotide
  Target: LAMA2; (+) strand; PAM type: NNNNGHTT; PAM sequence: AAATGTTT
tcaaaagcatatttatggac

SEQ ID NO: 49162 - DNA, 20 bp, Artificial Sequence
  Description of Artificial Sequence: Synthetic oligonucleotide
  Target: LAMA2; (+) strand; PAM type: NNNNGHTT; PAM sequence: TCTTGTTT
ttctgatgcatgtgtatttc

SEQ ID NO: 49163 - DNA, 20 bp, Artificial Sequence
  Description of Artificial Sequence: Synthetic oligonucleotide
  Target: LAMA2; (+) strand; PAM type: NNNNGHTT; PAM sequence: AAGTGTTT
tcatttatacatcttttttg

SEQ ID NO: 49164 - DNA, 20 bp, Artificial Sequence
  Description of Artificial Sequence: Synthetic oligonucleotide
  Target: LAMA2; (+) strand; PAM type: NNNNGHTT; PAM sequence: CAAAGCTT
catcttttttgaagtgttta

SEQ ID NO: 49165 - DNA, 20 bp, Artificial Sequence
  Description of Artificial Sequence: Synthetic oligonucleotide
  Target: LAMA2; (+) strand; PAM type: NNNNGHTT; PAM sequence: AGTTGTTT
ttatgcccatttctattttg

SEQ ID NO: 49166 - DNA, 20 bp, Artificial Sequence
  Description of Artificial Sequence: Synthetic oligonucleotide
  Target: LAMA2; (+) strand; PAM type: NNNNGHTT; PAM sequence: GTTTGTTT
gcccatttctattttgagtt

SEQ ID NO: 49167 - DNA, 20 bp, Artificial Sequence
  Description of Artificial Sequence: Synthetic oligonucleotide
  Target: LAMA2; (+) strand; PAM type: NNNNGHTT; PAM sequence: CAAGGATT
gtttccttagtaatgcattg

SEQ ID NO: 49168 - DNA, 20 bp, Artificial Sequence
  Description of Artificial Sequence: Synthetic oligonucleotide
  Target: LAMA2; (+) strand; PAM type: NNNNGHTT; PAM sequence: TAAAGCTT
acatgttctttaacgtatgt

SEQ ID NO: 49169 - DNA, 20 bp, Artificial Sequence
  Description of Artificial Sequence: Synthetic oligonucleotide
  Target: LAMA2; (+) strand; PAM type: NNNNGHTT; PAM sequence: GCTTGCTT
gttctttaacgtatgttaaa

SEQ ID NO: 49170 - DNA, 20 bp, Artificial Sequence
  Description of Artificial Sequence: Synthetic oligonucleotide
  Target: LAMA2; (+) strand; PAM type: NNNNGHTT; PAM sequence: TATAGATT
atgttaaagcttgcttttca

SEQ ID NO: 49171 - DNA, 20 bp, Artificial Sequence
  Description of Artificial Sequence: Synthetic oligonucleotide
  Target: LAMA2; (+) strand; PAM type: NNNNGHTT; PAM sequence: GATTGCTT
taaagcttgcttttcatata

SEQ ID NO: 49172 - DNA, 20 bp, Artificial Sequence
  Description of Artificial Sequence: Synthetic oligonucleotide
  Target: LAMA2; (+) strand; PAM type: NNNNGHTT; PAM sequence: CCTAGTTT
ttcatatagattgcttttta

SEQ ID NO: 49173 - DNA, 20 bp, Artificial Sequence
  Description of Artificial Sequence: Synthetic oligonucleotide
  Target: LAMA2; (+) strand; PAM type: NNNNGHTT; PAM sequence: ACTAGCTT
atcatctaatctttataaac

SEQ ID NO: 49174 - DNA, 20 bp, Artificial Sequence
  Description of Artificial Sequence: Synthetic oligonucleotide
  Target: LAMA2; (+) strand; PAM type: NNNNGHTT; PAM sequence: CAAAGATT
tacccaagaaagacaaggtc

SEQ ID NO: 49175 - DNA, 20 bp, Artificial Sequence
  Description of Artificial Sequence: Synthetic oligonucleotide
  Target: LAMA2; (+) strand; PAM type: NNNNGHTT; PAM sequence: CCATGTTT
aaggtccaaagatttctctc

SEQ ID NO: 49176 - DNA, 20 bp, Artificial Sequence
  Description of Artificial Sequence: Synthetic oligonucleotide
  Target: LAMA2; (+) strand; PAM type: NNNNGHTT; PAM sequence: AGAAGTTT
tctctcccatgttttcttca

SEQ ID NO: 49177 - DNA, 20 bp, Artificial Sequence
  Description of Artificial Sequence: Synthetic oligonucleotide
  Target: LAMA2; (+) strand; PAM type: NNNNGHTT; PAM sequence: TAGAGTTT
atgttttcttcaagaagttt

SEQ ID NO: 49178 - DNA, 20 bp, Artificial Sequence
  Description of Artificial Sequence: Synthetic oligonucleotide
  Target: LAMA2; (+) strand; PAM type: NNNNGHTT; PAM sequence: GTAGGTTT
tagagttttagctcttaaat

SEQ ID NO: 49179 - DNA, 20 bp, Artificial Sequence
  Description of Artificial Sequence: Synthetic oligonucleotide
  Target: LAMA2; (+) strand; PAM type: NNNNGHTT; PAM sequence: TTTGGATT
ttttagctcttaaatgtagg

SEQ ID NO: 49180 - DNA, 20 bp, Artificial Sequence
  Description of Artificial Sequence: Synthetic oligonucleotide
  Target: LAMA2; (+) strand; PAM type: NNNNGHTT; PAM sequence: ATATGTTT
tcaaaatctatcaactatat

SEQ ID NO: 49181 - DNA, 20 bp, Artificial Sequence
  Description of Artificial Sequence: Synthetic oligonucleotide
  Target: LAMA2; (+) strand; PAM type: NNNNGHTT; PAM sequence: TTCTGCTT
ttatgcatttctggactctt

SEQ ID NO: 49182 - DNA, 20 bp, Artificial Sequence
  Description of Artificial Sequence: Synthetic oligonucleotide
  Target: LAMA2; (+) strand; PAM type: NNNNGHTT; PAM sequence: TGTAGCTT
ctagttaatatgttaattat

SEQ ID NO: 49183 - DNA, 20 bp, Artificial Sequence
  Description of Artificial Sequence: Synthetic oligonucleotide
  Target: LAMA2; (+) strand; PAM type: NNNNGHTT; PAM sequence: CATCGTTT
gtaaattcctcaacctcatt

SEQ ID NO: 49184 - DNA, 20 bp, Artificial Sequence
  Description of Artificial Sequence: Synthetic oligonucleotide
  Target: LAMA2; (+) strand; PAM type: NNNNGHTT; PAM sequence: CTAGGATT
attctttaccaaaaagcctg

SEQ ID NO: 49185 - DNA, 20 bp, Artificial Sequence
  Description of Artificial Sequence: Synthetic oligonucleotide
  Target: LAMA2; (+) strand; PAM type: NNNNGHTT; PAM sequence: GACAGCTT
agatcaatttgggaagaatt

SEQ ID NO: 49186 - DNA, 20 bp, Artificial Sequence
  Description of Artificial Sequence: Synthetic oligonucleotide
  Target: LAMA2; (+) strand; PAM type: NNNNGHTT; PAM sequence: AAATGTTT
ttgttataattttttctcag

SEQ ID NO: 49187 - DNA, 20 bp, Artificial Sequence
  Description of Artificial Sequence: Synthetic oligonucleotide
  Target: LAMA2; (+) strand; PAM type: NNNNGHTT; PAM sequence: TGTAGTTT
aattttttctcagaaatgtt

SEQ ID NO: 49188 - DNA, 20 bp, Artificial Sequence
  Description of Artificial Sequence: Synthetic oligonucleotide
  Target: LAMA2; (+) strand; PAM type: NNNNGHTT; PAM sequence: GCAAGCTT
atgtttgtagtttttgatgt

SEQ ID NO: 49189 - DNA, 20 bp, Artificial Sequence
  Description of Artificial Sequence: Synthetic oligonucleotide
  Target: LAMA2; (+) strand; PAM type: NNNNGHTT; PAM sequence: ATCCGTTT
gcatatatattgttaaatgt

SEQ ID NO: 49190 - DNA, 20 bp, Artificial Sequence
  Description of Artificial Sequence: Synthetic oligonucleotide
  Target: LAMA2; (+) strand; PAM type: NNNNGHTT; PAM sequence: TTCAGTTT
aagcaaatgctgtgttccat

SEQ ID NO: 49191 - DNA, 20 bp, Artificial Sequence
  Description of Artificial Sequence: Synthetic oligonucleotide
  Target: LAMA2; (+) strand; PAM type: NNNNGHTT; PAM sequence: AATTGCTT
tgtgttccatttcagtttta

SEQ ID NO: 49192 - DNA, 20 bp, Artificial Sequence
  Description of Artificial Sequence: Synthetic oligonucleotide
  Target: LAMA2; (+) strand; PAM type: NNNNGHTT; PAM sequence: TCTAGTTT
atcttgctaaacttattagt

SEQ ID NO: 49193 - DNA, 20 bp, Artificial Sequence
  Description of Artificial Sequence: Synthetic oligonucleotide
  Target: LAMA2; (+) strand; PAM type: NNNNGHTT; PAM sequence: GTGAGATT
gtttctttttggtccattta

SEQ ID NO: 49194 - DNA, 20 bp, Artificial Sequence
  Description of Artificial Sequence: Synthetic oligonucleotide
  Target: LAMA2; (+) strand; PAM type: NNNNGHTT; PAM sequence: GAGAGATT
ataatcatgtcatctgcaaa

SEQ ID NO: 49195 - DNA, 20 bp, Artificial Sequence
  Description of Artificial Sequence: Synthetic oligonucleotide
  Target: LAMA2; (+) strand; PAM type: NNNNGHTT; PAM sequence: CTTAGTTT
caaatatccttgccttgttc

SEQ ID NO: 49196 - DNA, 20 bp, Artificial Sequence
  Description of Artificial Sequence: Synthetic oligonucleotide
  Target: LAMA2; (+) strand; PAM type: NNNNGHTT; PAM sequence: AGGTGCTT
gttggctatattttacctgt

SEQ ID NO: 49197 - DNA, 20 bp, Artificial Sequence
  Description of Artificial Sequence: Synthetic oligonucleotide
  Target: LAMA2; (+) strand; PAM type: NNNNGHTT; PAM sequence: TATTGTTT
ttttacctgtaggtgctttt

SEQ ID NO: 49198 - DNA, 20 bp, Artificial Sequence
  Description of Artificial Sequence: Synthetic oligonucleotide
  Target: LAMA2; (+) strand; PAM type: NNNNGHTT; PAM sequence: TCGTGTTT
attgttttgaggatgccccc

SEQ ID NO: 49199 - DNA, 20 bp, Artificial Sequence
  Description of Artificial Sequence: Synthetic oligonucleotide
  Target: LAMA2; (+) strand; PAM type: NNNNGHTT; PAM sequence: TTTAGTTT
tgaggatgccccctcgtgtt

SEQ ID NO: 49200 - DNA, 20 bp, Artificial Sequence
  Description of Artificial Sequence: Synthetic oligonucleotide
  Target: LAMA2; (+) strand; PAM type: NNNNGHTT; PAM sequence: AAGAGCTT
cctcgtgtttttagtttgct

SEQ ID NO: 49201 - DNA, 20 bp, Artificial Sequence
  Description of Artificial Sequence: Synthetic oligonucleotide
  Target: LAMA2; (+) strand; PAM type: NNNNGHTT; PAM sequence: GACAGATT
tctttttaagctgttaatat

SEQ ID NO: 49202 - DNA, 20 bp, Artificial Sequence
  Description of Artificial Sequence: Synthetic oligonucleotide
  Target: LAMA2; (+) strand; PAM type: NNNNGHTT; PAM sequence: TACTGATT
gctgttaatatgacagatta

SEQ ID NO: 49203 - DNA, 20 bp, Artificial Sequence
  Description of Artificial Sequence: Synthetic oligonucleotide
  Target: LAMA2; (+) strand; PAM type: NNNNGHTT; PAM sequence: GATTGATT
ttaatatgacagattatact

SEQ ID NO: 49204 - DNA, 20 bp, Artificial Sequence
  Description of Artificial Sequence: Synthetic oligonucleotide
  Target: LAMA2; (+) strand; PAM type: NNNNGHTT; PAM sequence: CTCAGATT
atcaatccagtcttacaatc

SEQ ID NO: 49205 - DNA, 20 bp, Artificial Sequence
  Description of Artificial Sequence: Synthetic oligonucleotide
  Target: LAMA2; (+) strand; PAM type: NNNNGHTT; PAM sequence: TCCTGCTT
tcttacaatcctcagattaa

SEQ ID NO: 49206 - DNA, 20 bp, Artificial Sequence
  Description of Artificial Sequence: Synthetic oligonucleotide
  Target: LAMA2; (+) strand; PAM type: NNNNGHTT; PAM sequence: TGGGGATT
agattaatcctgcttggcca

SEQ ID NO: 49207 - DNA, 20 bp, Artificial Sequence
  Description of Artificial Sequence: Synthetic oligonucleotide
  Target: LAMA2; (+) strand; PAM type: NNNNGHTT; PAM sequence: TCCTGTTT
ccttttaaaattatgttgaa

SEQ ID NO: 49208 - DNA, 20 bp, Artificial Sequence
  Description of Artificial Sequence: Synthetic oligonucleotide
  Target: LAMA2; (+) strand; PAM type: NNNNGHTT; PAM sequence: TAATGATT
cctgtttgctagcattttct

SEQ ID NO: 49209 - DNA, 20 bp, Artificial Sequence
  Description of Artificial Sequence: Synthetic oligonucleotide
  Target: LAMA2; (+) strand; PAM type: NNNNGHTT; PAM sequence: CTACGTTT
ttttcttaatgattttggat

SEQ ID NO: 49210 - DNA, 20 bp, Artificial Sequence
  Description of Artificial Sequence: Synthetic oligonucleotide
  Target: LAMA2; (+) strand; PAM type: NNNNGHTT; PAM sequence: GCAAGCTT
tgtcgtcgggatgaggtact

SEQ ID NO: 49211 - DNA, 20 bp, Artificial Sequence
  Description of Artificial Sequence: Synthetic oligonucleotide
  Target: LAMA2; (+) strand; PAM type: NNNNGHTT; PAM sequence: AATGGATT
aggtactgcaagcttcatga

SEQ ID NO: 49212 - DNA, 20 bp, Artificial Sequence
  Description of Artificial Sequence: Synthetic oligonucleotide
  Target: LAMA2; (+) strand; PAM type: NNNNGHTT; PAM sequence: AAGCGTTT
tccctcctcataatttataa

SEQ ID NO: 49213 - DNA, 20 bp, Artificial Sequence
  Description of Artificial Sequence: Synthetic oligonucleotide
  Target: LAMA2; (+) strand; PAM type: NNNNGHTT; PAM sequence: ACAAGTTT
ataatatggtagtaatagga

SEQ ID NO: 49214 - DNA, 20 bp, Artificial Sequence
  Description of Artificial Sequence: Synthetic oligonucleotide
  Target: LAMA2; (+) strand; PAM type: NNNNGHTT; PAM sequence: TTTTGCTT
catgaaaagaacattccttc

SEQ ID NO: 49215 - DNA, 20 bp, Artificial Sequence
  Description of Artificial Sequence: Synthetic oligonucleotide
  Target: LAMA2; (+) strand; PAM type: NNNNGHTT; PAM sequence: TTGAGTTT
cattccttcttttgcttact

SEQ ID NO: 49216 - DNA, 20 bp, Artificial Sequence
  Description of Artificial Sequence: Synthetic oligonucleotide
  Target: LAMA2; (+) strand; PAM type: NNNNGHTT; PAM sequence: CCAAGTTT
gtttaattttctcttgtgtt

SEQ ID NO: 49217 - DNA, 20 bp, Artificial Sequence
  Description of Artificial Sequence: Synthetic oligonucleotide
  Target: LAMA2; (+) strand; PAM type: NNNNGHTT; PAM sequence: TTTTGTTT
ttctcttgtgttccaagttt

SEQ ID NO: 49218 - DNA, 20 bp, Artificial Sequence
  Description of Artificial Sequence: Synthetic oligonucleotide
  Target: LAMA2; (+) strand; PAM type: NNNNGHTT; PAM sequence: TTTTGTTT
gtgttccaagtttttttgtt

SEQ ID NO: 49219 - DNA, 20 bp, Artificial Sequence
  Description of Artificial Sequence: Synthetic oligonucleotide
  Target: LAMA2; (+) strand; PAM type: NNNNGHTT; PAM sequence: TTTTGTTT
aagtttttttgttttttgtt

SEQ ID NO: 49220 - DNA, 20 bp, Artificial Sequence
  Description of Artificial Sequence: Synthetic oligonucleotide
  Target: LAMA2; (+) strand; PAM type: NNNNGHTT; PAM sequence: CGGGGTTT
ttttgtatttttagtagaga

SEQ ID NO: 49221 - DNA, 20 bp, Artificial Sequence
  Description of Artificial Sequence: Synthetic oligonucleotide
  Target: LAMA2; (+) strand; PAM type: NNNNGHTT; PAM sequence: CTAGGATT
agcctcagcctcccaaaatg

SEQ ID NO: 49222 - DNA, 20 bp, Artificial Sequence
  Description of Artificial Sequence: Synthetic oligonucleotide
  Target: LAMA2; (+) strand; PAM type: NNNNGHTT; PAM sequence: CCAAGTTT
cgtgcccggccaattgtgtt

SEQ ID NO: 49223 - DNA, 20 bp, Artificial Sequence
  Description of Artificial Sequence: Synthetic oligonucleotide
  Target: LAMA2; (+) strand; PAM type: NNNNGHTT; PAM sequence: CATTGATT
cttaaggtgaaaccttagat

SEQ ID NO: 49224 - DNA, 20 bp, Artificial Sequence
  Description of Artificial Sequence: Synthetic oligonucleotide
  Target: LAMA2; (+) strand; PAM type: NNNNGHTT; PAM sequence: CTTTGTTT
acatttttttccagaaacta

SEQ ID NO: 49225 - DNA, 20 bp, Artificial Sequence
  Description of Artificial Sequence: Synthetic oligonucleotide
  Target: LAMA2; (+) strand; PAM type: NNNNGHTT; PAM sequence: CTGTGTTT
actccacatattttgatatg

SEQ ID NO: 49226 - DNA, 20 bp, Artificial Sequence
  Description of Artificial Sequence: Synthetic oligonucleotide
  Target: LAMA2; (+) strand; PAM type: NNNNGHTT; PAM sequence: CTTGGTTT
atgctgtgttttaattttca

SEQ ID NO: 49227 - DNA, 20 bp, Artificial Sequence
  Description of Artificial Sequence: Synthetic oligonucleotide
  Target: LAMA2; (+) strand; PAM type: NNNNGHTT; PAM sequence: TAATGTTT
tctttaatttattttgggga

SEQ ID NO: 49228 - DNA, 20 bp, Artificial Sequence
  Description of Artificial Sequence: Synthetic oligonucleotide
  Target: LAMA2; (+) strand; PAM type: NNNNGHTT; PAM sequence: TTTAGTTT
aatttattttggggataatg

SEQ ID NO: 49229 - DNA, 20 bp, Artificial Sequence
  Description of Artificial Sequence: Synthetic oligonucleotide
  Target: LAMA2; (+) strand; PAM type: NNNNGHTT; PAM sequence: TCTAGTTT
tatcgttactgttactagta

SEQ ID NO: 49230 - DNA, 20 bp, Artificial Sequence
  Description of Artificial Sequence: Synthetic oligonucleotide
  Target: LAMA2; (+) strand; PAM type: NNNNGHTT; PAM sequence: TTGAGATT
ttcagaccttttgaaaatta

SEQ ID NO: 49231 - DNA, 20 bp, Artificial Sequence
  Description of Artificial Sequence: Synthetic oligonucleotide
  Target: LAMA2; (+) strand; PAM type: NNNNGHTT; PAM sequence: ATTTGTTT
accttttgaaaattattgag

SEQ ID NO: 49232 - DNA, 20 bp, Artificial Sequence
  Description of Artificial Sequence: Synthetic oligonucleotide
  Target: LAMA2; (+) strand; PAM type: NNNNGHTT; PAM sequence: TTCAGTTT
ttttatggcccggaatagtg

SEQ ID NO: 49233 - DNA, 20 bp, Artificial Sequence
  Description of Artificial Sequence: Synthetic oligonucleotide
  Target: LAMA2; (+) strand; PAM type: NNNNGHTT; PAM sequence: GTTTGTTT
atggcccggaatagtgttca

SEQ ID NO: 49234 - DNA, 20 bp, Artificial Sequence
  Description of Artificial Sequence: Synthetic oligonucleotide
  Target: LAMA2; (+) strand; PAM type: NNNNGHTT; PAM sequence: AACGGTTT
tatataggtcaattatcctt

SEQ ID NO: 49235 - DNA, 20 bp, Artificial Sequence
  Description of Artificial Sequence: Synthetic oligonucleotide
  Target: LAMA2; (+) strand; PAM type: NNNNGHTT; PAM sequence: GTCCGTTT
gagtgttggactataacttt

SEQ ID NO: 49236 - DNA, 20 bp, Artificial Sequence
  Description of Artificial Sequence: Synthetic oligonucleotide
  Target: LAMA2; (+) strand; PAM type: NNNNGHTT; PAM sequence: TCAGGTTT
cgtttcttctttcacttctc

SEQ ID NO: 49237 - DNA, 20 bp, Artificial Sequence
  Description of Artificial Sequence: Synthetic oligonucleotide
  Target: LAMA2; (+) strand; PAM type: NNNNGHTT; PAM sequence: TTAGGATT
gatactaggtgcatgaacat

SEQ ID NO: 49238 - DNA, 20 bp, Artificial Sequence
  Description of Artificial Sequence: Synthetic oligonucleotide
  Target: LAMA2; (+) strand; PAM type: NNNNGHTT; PAM sequence: TGGTGTTT
tattgcaactttctttttaa

SEQ ID NO: 49239 - DNA, 20 bp, Artificial Sequence
  Description of Artificial Sequence: Synthetic oligonucleotide
  Target: LAMA2; (+) strand; PAM type: NNNNGHTT; PAM sequence: CCATGCTT
gggactacaggcgcatgcca

SEQ ID NO: 49240 - DNA, 20 bp, Artificial Sequence
  Description of Artificial Sequence: Synthetic oligonucleotide
  Target: LAMA2; (+) strand; PAM type: NNNNGHTT; PAM sequence: TTAAGTTT
ccaccatgcttggctaattt

SEQ ID NO: 49241 - DNA, 20 bp, Artificial Sequence
  Description of Artificial Sequence: Synthetic oligonucleotide
  Target: LAMA2; (+) strand; PAM type: NNNNGHTT; PAM sequence: CCATGCTT
atgagatctcactatattgc

SEQ ID NO: 49242 - DNA, 20 bp, Artificial Sequence
  Description of Artificial Sequence: Synthetic oligonucleotide
  Target: LAMA2; (+) strand; PAM type: NNNNGHTT; PAM sequence: CTGGGATT
tcaagtgatcctgcaaaatt

SEQ ID NO: 49243 - DNA, 20 bp, Artificial Sequence
  Description of Artificial Sequence: Synthetic oligonucleotide
  Target: LAMA2; (+) strand; PAM type: NNNNGHTT; PAM sequence: CCTAGCTT
tacaggtgtataccaccatg

SEQ ID NO: 49244 - DNA, 20 bp, Artificial Sequence
  Description of Artificial Sequence: Synthetic oligonucleotide
  Target: LAMA2; (+) strand; PAM type: NNNNGHTT; PAM sequence: GTATGATT
tccacttaatgtaaatattg

SEQ ID NO: 49245 - DNA, 20 bp, Artificial Sequence
  Description of Artificial Sequence: Synthetic oligonucleotide
  Target: LAMA2; (+) strand; PAM type: NNNNGHTT; PAM sequence: ATTGGATT
ttaatgtaaatattggtatg

SEQ ID NO: 49246 - DNA, 20 bp, Artificial Sequence
  Description of Artificial Sequence: Synthetic oligonucleotide
  Target: LAMA2; (+) strand; PAM type: NNNNGHTT; PAM sequence: ATTTGCTT
gattaagcctgcactttgct

SEQ ID NO: 49247 - DNA, 20 bp, Artificial Sequence
  Description of Artificial Sequence: Synthetic oligonucleotide
  Target: LAMA2; (+) strand; PAM type: NNNNGHTT; PAM sequence: TTTTGCTT
gcctgcactttgctatttgc

SEQ ID NO: 49248 - DNA, 20 bp, Artificial Sequence
  Description of Artificial Sequence: Synthetic oligonucleotide
  Target: LAMA2; (+) strand; PAM type: NNNNGHTT; PAM sequence: TTTGGATT
tataacatcttctcttgact

SEQ ID NO: 49249 - DNA, 20 bp, Artificial Sequence
  Description of Artificial Sequence: Synthetic oligonucleotide
  Target: LAMA2; (+) strand; PAM type: NNNNGHTT; PAM sequence: TTTGGTTT
atacctattcattttatttc

SEQ ID NO: 49250 - DNA, 20 bp, Artificial Sequence
  Description of Artificial Sequence: Synthetic oligonucleotide
  Target: LAMA2; (+) strand; PAM type: NNNNGHTT; PAM sequence: ATAAGCTT
tatattatacatctgacaat

SEQ ID NO: 49251 - DNA, 20 bp, Artificial Sequence
  Description of Artificial Sequence: Synthetic oligonucleotide
  Target: LAMA2; (+) strand; PAM type: NNNNGHTT; PAM sequence: TTACGATT
atacatctgacaatataagc

SEQ ID NO: 49252 - DNA, 20 bp, Artificial Sequence
  Description of Artificial Sequence: Synthetic oligonucleotide
  Target: LAMA2; (+) strand; PAM type: NNNNGHTT; PAM sequence: TTTTGATT
ctgacaatataagcttacga

SEQ ID NO: 49253 - DNA, 20 bp, Artificial Sequence
  Description of Artificial Sequence: Synthetic oligonucleotide
  Target: LAMA2; (+) strand; PAM type: NNNNGHTT; PAM sequence: TAATGCTT
ttccttgtgtatatcaattt

SEQ ID NO: 49254 - DNA, 20 bp, Artificial Sequence
  Description of Artificial Sequence: Synthetic oligonucleotide
  Target: LAMA2; (+) strand; PAM type: NNNNGHTT; PAM sequence: TGTTGTTT
aatctttatcattttattcc

SEQ ID NO: 49255 - DNA, 20 bp, Artificial Sequence
  Description of Artificial Sequence: Synthetic oligonucleotide
  Target: LAMA2; (+) strand; PAM type: NNNNGHTT; PAM sequence: AGGTGTTT
tttttttttttgttccagaa

SEQ ID NO: 49256 - DNA, 20 bp, Artificial Sequence
  Description of Artificial Sequence: Synthetic oligonucleotide
  Target: LAMA2; (+) strand; PAM type: NNNNGHTT; PAM sequence: AGATGTTT
ggtgttttttttttttccga

SEQ ID NO: 49257 - DNA, 20 bp, Artificial Sequence
  Description of Artificial Sequence: Synthetic oligonucleotide
  Target: LAMA2; (+) strand; PAM type: NNNNGHTT; PAM sequence: ACTGGTTT
cagagtatgtaatcctaaat

SEQ ID NO: 49258 - DNA, 20 bp, Artificial Sequence
  Description of Artificial Sequence: Synthetic oligonucleotide
  Target: LAMA2; (+) strand; PAM type: NNNNGHTT; PAM sequence: TTATGCTT
actggtttgcagcaatttaa

SEQ ID NO: 49259 - DNA, 20 bp, Artificial Sequence
  Description of Artificial Sequence: Synthetic oligonucleotide
  Target: LAMA2; (+) strand; PAM type: NNNNGHTT; PAM sequence: TTTTGTTT
tgcagcaatttaattatgct

SEQ ID NO: 49260 - DNA, 20 bp, Artificial Sequence
  Description of Artificial Sequence: Synthetic oligonucleotide
  Target: LAMA2; (+) strand; PAM type: NNNNGHTT; PAM sequence: GTGTGTTT
atgctttttgttttcttttt

SEQ ID NO: 49261 - DNA, 20 bp, Artificial Sequence
  Description of Artificial Sequence: Synthetic oligonucleotide
  Target: LAMA2; (+) strand; PAM type: NNNNGHTT; PAM sequence: ATGGGATT
tgtttaataattattttttc

SEQ ID NO: 49262 - DNA, 20 bp, Artificial Sequence
  Description of Artificial Sequence: Synthetic oligonucleotide
  Target: LAMA2; (+) strand; PAM type: NNNNGHTT; PAM sequence: GTAGGATT
tagttagatctgttggccct

SEQ ID NO: 49263 - DNA, 20 bp, Artificial Sequence
  Description of Artificial Sequence: Synthetic oligonucleotide
  Target: LAMA2; (+) strand; PAM type: NNNNGHTT; PAM sequence: TATAGTTT
atctgttggccctgtaggat

SEQ ID NO: 49264 - DNA, 20 bp, Artificial Sequence
  Description of Artificial Sequence: Synthetic oligonucleotide
  Target: LAMA2; (+) strand; PAM type: NNNNGHTT; PAM sequence: GATAGTTT
tatctgtattttttatttct

SEQ ID NO: 49265 - DNA, 20 bp, Artificial Sequence
  Description of Artificial Sequence: Synthetic oligonucleotide
  Target: LAMA2; (+) strand; PAM type: NNNNGHTT; PAM sequence: CACTGATT
tattgttaagtgtccaaagt

SEQ ID NO: 49266 - DNA, 20 bp, Artificial Sequence
  Description of Artificial Sequence: Synthetic oligonucleotide
  Target: LAMA2; (+) strand; PAM type: NNNNGHTT; PAM sequence: ACCTGTTT
tgattttttaatgcagccta

SEQ ID NO: 49267 - DNA, 20 bp, Artificial Sequence
  Description of Artificial Sequence: Synthetic oligonucleotide
  Target: LAMA2; (+) strand; PAM type: NNNNGHTT; PAM sequence: TAATGTTT
ttcatttattcttgaaaata

SEQ ID NO: 49268 - DNA, 20 bp, Artificial Sequence
  Description of Artificial Sequence: Synthetic oligonucleotide
  Target: LAMA2; (+) strand; PAM type: NNNNGHTT; PAM sequence: TCCTGTTT
ttcctactgactgacttttc

SEQ ID NO: 49269 - DNA, 20 bp, Artificial Sequence
  Description of Artificial Sequence: Synthetic oligonucleotide
  Target: LAMA2; (+) strand; PAM type: NNNNGHTT; PAM sequence: TCTTGATT
cctgtttctgagtcatattt

SEQ ID NO: 49270 - DNA, 20 bp, Artificial Sequence
  Description of Artificial Sequence: Synthetic oligonucleotide
  Target: LAMA2; (+) strand; PAM type: NNNNGHTT; PAM sequence: ATTGGATT
tatacttttcattgttgtgt

SEQ ID NO: 49271 - DNA, 20 bp, Artificial Sequence
  Description of Artificial Sequence: Synthetic oligonucleotide
  Target: LAMA2; (+) strand; PAM type: NNNNGHTT; PAM sequence: AACAGTTT
tgttgaactttatgctggca

SEQ ID NO: 49272 - DNA, 20 bp, Artificial Sequence
  Description of Artificial Sequence: Synthetic oligonucleotide
  Target: LAMA2; (+) strand; PAM type: NNNNGHTT; PAM sequence: CTTGGATT
gtttaggtagtcacgggtca

SEQ ID NO: 49273 - DNA, 20 bp, Artificial Sequence
  Description of Artificial Sequence: Synthetic oligonucleotide
  Target: LAMA2; (+) strand; PAM type: NNNNGHTT; PAM sequence: TGAAGCTT
acgggtcacttggattcttt

SEQ ID NO: 49274 - DNA, 20 bp, Artificial Sequence
  Description of Artificial Sequence: Synthetic oligonucleotide
  Target: LAMA2; (+) strand; PAM type: NNNNGHTT; PAM sequence: GCTTGCTT
gtcacttggattcttttgaa

SEQ ID NO: 49275 - DNA, 20 bp, Artificial Sequence
  Description of Artificial Sequence: Synthetic oligonucleotide
  Target: LAMA2; (+) strand; PAM type: NNNNGHTT; PAM sequence: TTGAGTTT
gattcttttgaagcttgctt

SEQ ID NO: 49276 - DNA, 20 bp, Artificial Sequence
  Description of Artificial Sequence: Synthetic oligonucleotide
  Target: LAMA2; (+) strand; PAM type: NNNNGHTT; PAM sequence: TATGGCTT
tttactctggctgttgaaaa

SEQ ID NO: 49277 - DNA, 20 bp, Artificial Sequence
  Description of Artificial Sequence: Synthetic oligonucleotide
  Target: LAMA2; (+) strand; PAM type: NNNNGHTT; PAM sequence: CCAAGCTT
tgttgaaaatatggcttatt

SEQ ID NO: 49278 - DNA, 20 bp, Artificial Sequence
  Description of Artificial Sequence: Synthetic oligonucleotide
  Target: LAMA2; (+) strand; PAM type: NNNNGHTT; PAM sequence: TAGGGTTT
ctgtaagaatttttgcagcc

SEQ ID NO: 49279 - DNA, 20 bp, Artificial Sequence
  Description of Artificial Sequence: Synthetic oligonucleotide
  Target: LAMA2; (+) strand; PAM type: NNNNGHTT; PAM sequence: GAACGCTT
attcagtcaatgactcaaga

SEQ ID NO: 49280 - DNA, 20 bp, Artificial Sequence
  Description of Artificial Sequence: Synthetic oligonucleotide
  Target: LAMA2; (+) strand; PAM type: NNNNGHTT; PAM sequence: ATAAGTTT
cacgtattctatttgccatc

SEQ ID NO: 49281 - DNA, 20 bp, Artificial Sequence
  Description of Artificial Sequence: Synthetic oligonucleotide
  Target: LAMA2; (+) strand; PAM type: NNNNGHTT; PAM sequence: CTCGGCTT
ccatcataagtttcagcagc

SEQ ID NO: 49282 - DNA, 20 bp, Artificial Sequence
  Description of Artificial Sequence: Synthetic oligonucleotide
  Target: LAMA2; (+) strand; PAM type: NNNNGHTT; PAM sequence: GCGGGCTT
tctctcaactcagctataat

SEQ ID NO: 49283 - DNA, 20 bp, Artificial Sequence
  Description of Artificial Sequence: Synthetic oligonucleotide
  Target: LAMA2; (+) strand; PAM type: NNNNGHTT; PAM sequence: TTGGGTTT
actcagctataatgcgggct

SEQ ID NO: 49284 - DNA, 20 bp, Artificial Sequence
  Description of Artificial Sequence: Synthetic oligonucleotide
  Target: LAMA2; (+) strand; PAM type: NNNNGHTT; PAM sequence: CACTGCTT
gcctagaaattgcctctgta

SEQ ID NO: 49285 - DNA, 20 bp, Artificial Sequence
  Description of Artificial Sequence: Synthetic oligonucleotide
  Target: LAMA2; (+) strand; PAM type: NNNNGHTT; PAM sequence: TCATGTTT
aattgcctctgtacactgct

SEQ ID NO: 49286 - DNA, 20 bp, Artificial Sequence
  Description of Artificial Sequence: Synthetic oligonucleotide
  Target: LAMA2; (+) strand; PAM type: NNNNGHTT; PAM sequence: CTGTGCTT
ttctctcagaaatcacagtc

SEQ ID NO: 49287 - DNA, 20 bp, Artificial Sequence
  Description of Artificial Sequence: Synthetic oligonucleotide
  Target: LAMA2; (+) strand; PAM type: NNNNGHTT; PAM sequence: AATTGTTT
ataattcaatatctaaaaac

SEQ ID NO: 49288 - DNA, 20 bp, Artificial Sequence
  Description of Artificial Sequence: Synthetic oligonucleotide
  Target: LAMA2; (+) strand; PAM type: NNNNGHTT; PAM sequence: CTTGGTTT
atatctaaaaacaattgttt

SEQ ID NO: 49289 - DNA, 20 bp, Artificial Sequence
  Description of Artificial Sequence: Synthetic oligonucleotide
  Target: LAMA2; (+) strand; PAM type: NNNNGHTT; PAM sequence: AACAGCTT
tttagttggttgtgtacttt

SEQ ID NO: 49290 - DNA, 20 bp, Artificial Sequence
  Description of Artificial Sequence: Synthetic oligonucleotide
  Target: LAMA2; (+) strand; PAM type: NNNNGHTT; PAM sequence: GTAGGATT
taatgcaacacaaaggtcaa

SEQ ID NO: 49291 - DNA, 20 bp, Artificial Sequence
  Description of Artificial Sequence: Synthetic oligonucleotide
  Target: LAMA2; (+) strand; PAM type: NNNNGHTT; PAM sequence: AATTGATT
atgttagtgggagtcgttcc

SEQ ID NO: 49292 - DNA, 20 bp, Artificial Sequence
  Description of Artificial Sequence: Synthetic oligonucleotide
  Target: LAMA2; (+) strand; PAM type: NNNNGHTT; PAM sequence: TCCTGTTT
aacgtgatgaccaagtgtgg

SEQ ID NO: 49293 - DNA, 20 bp, Artificial Sequence
  Description of Artificial Sequence: Synthetic oligonucleotide
  Target: LAMA2; (+) strand; PAM type: NNNNGHTT; PAM sequence: TGATGATT
ctagaggaaaacaagcatat

SEQ ID NO: 49294 - DNA, 20 bp, Artificial Sequence
  Description of Artificial Sequence: Synthetic oligonucleotide
  Target: LAMA2; (+) strand; PAM type: NNNNGHTT; PAM sequence: ATGTGATT
atgtctgacttcaattagac

SEQ ID NO: 49295 - DNA, 20 bp, Artificial Sequence
  Description of Artificial Sequence: Synthetic oligonucleotide
  Target: LAMA2; (+) strand; PAM type: NNNNGHTT; PAM sequence: TTAAGTTT
ttctattgtcaatagcatta

SEQ ID NO: 49296 - DNA, 20 bp, Artificial Sequence
  Description of Artificial Sequence: Synthetic oligonucleotide
  Target: LAMA2; (+) strand; PAM type: NNNNGHTT; PAM sequence: TTCAGCTT
ctatgactgacttttgcatt

SEQ ID NO: 49297 - DNA, 20 bp, Artificial Sequence
  Description of Artificial Sequence: Synthetic oligonucleotide
  Target: LAMA2; (+) strand; PAM type: NNNNGHTT; PAM sequence: TTCCGTTT
cctagggaaacttacaagag

SEQ ID NO: 49298 - DNA, 20 bp, Artificial Sequence
  Description of Artificial Sequence: Synthetic oligonucleotide
  Target: LAMA2; (+) strand; PAM type: NNNNGHTT; PAM sequence: CCAAGTTT
aaatcaggataaaatacatt

SEQ ID NO: 49299 - DNA, 20 bp, Artificial Sequence
  Description of Artificial Sequence: Synthetic oligonucleotide
  Target: LAMA2; (+) strand; PAM type: NNNNGHTT; PAM sequence: ATATGTTT
gtttctatgaaaacgtagtt

SEQ ID NO: 49300 - DNA, 20 bp, Artificial Sequence
  Description of Artificial Sequence: Synthetic oligonucleotide
  Target: LAMA2; (+) strand; PAM type: NNNNGHTT; PAM sequence: TTTTGATT
tgactaaagttgactgaatt

SEQ ID NO: 49301 - DNA, 20 bp, Artificial Sequence
  Description of Artificial Sequence: Synthetic oligonucleotide
  Target: LAMA2; (+) strand; PAM type: NNNNGHTT; PAM sequence: GACTGATT
tgctataaagaaatacctga

SEQ ID NO: 49302 - DNA, 20 bp, Artificial Sequence
  Description of Artificial Sequence: Synthetic oligonucleotide
  Target: LAMA2; (+) strand; PAM type: NNNNGHTT; PAM sequence: ACTGGTTT
ctgagactgattataagaaa

SEQ ID NO: 49303 - DNA, 20 bp, Artificial Sequence
  Description of Artificial Sequence: Synthetic oligonucleotide
  Target: LAMA2; (+) strand; PAM type: NNNNGHTT; PAM sequence: ATCTGTTT
tgtacaggaagcatagcggc

SEQ ID NO: 49304 - DNA, 20 bp, Artificial Sequence
  Description of Artificial Sequence: Synthetic oligonucleotide
  Target: LAMA2; (+) strand; PAM type: NNNNGHTT; PAM sequence: GGAAGCTT
tgtttctggtgaaggcctca

SEQ ID NO: 49305 - DNA, 20 bp, Artificial Sequence
  Description of Artificial Sequence: Synthetic oligonucleotide
  Target: LAMA2; (+) strand; PAM type: NNNNGHTT; PAM sequence: TGGGGATT
ccaggctccacctccaacac

SEQ ID NO: 49306 - DNA, 20 bp, Artificial Sequence
  Description of Artificial Sequence: Synthetic oligonucleotide
  Target: LAMA2; (+) strand; PAM type: NNNNGHTT; PAM sequence: ATGTGTTT
caagtaatttatttatgagc

SEQ ID NO: 49307 - DNA, 20 bp, Artificial Sequence
  Description of Artificial Sequence: Synthetic oligonucleotide
  Target: LAMA2; (+) strand; PAM type: NNNNGHTT; PAM sequence: TACTGTTT
ttatttatgagcatgtgttt

SEQ ID NO: 49308 - DNA, 20 bp, Artificial Sequence
  Description of Artificial Sequence: Synthetic oligonucleotide
  Target: LAMA2; (+) strand; PAM type: NNNNGHTT; PAM sequence: CAGTGATT
atgactttaatttaaatgaa

SEQ ID NO: 49309 - DNA, 20 bp, Artificial Sequence
  Description of Artificial Sequence: Synthetic oligonucleotide
  Target: LAMA2; (+) strand; PAM type: NNNNGHTT; PAM sequence: TTGAGATT
taatttaaatgaacagtgat

SEQ ID NO: 49310 - DNA, 20 bp, Artificial Sequence
  Description of Artificial Sequence: Synthetic oligonucleotide
  Target: LAMA2; (+) strand; PAM type: NNNNGHTT; PAM sequence: TATAGCTT
atgaacagtgatttgagatt

SEQ ID NO: 49311 - DNA, 20 bp, Artificial Sequence
  Description of Artificial Sequence: Synthetic oligonucleotide
  Target: LAMA2; (+) strand; PAM type: NNNNGHTT; PAM sequence: TTATGATT
taaacaaatattacctctat

SEQ ID NO: 49312 - DNA, 20 bp, Artificial Sequence
  Description of Artificial Sequence: Synthetic oligonucleotide
  Target: LAMA2; (+) strand; PAM type: NNNNGHTT; PAM sequence: TCTGGTTT
tctaaacacatggttaatgg

SEQ ID NO: 49313 - DNA, 20 bp, Artificial Sequence
  Description of Artificial Sequence: Synthetic oligonucleotide
  Target: LAMA2; (+) strand; PAM type: NNNNGHTT; PAM sequence: TCCTGATT
tataacttcctgaataaact

SEQ ID NO: 49314 - DNA, 20 bp, Artificial Sequence
  Description of Artificial Sequence: Synthetic oligonucleotide
  Target: LAMA2; (+) strand; PAM type: NNNNGHTT; PAM sequence: TCATGCTT
gtcaacaattttgtaaaaat

SEQ ID NO: 49315 - DNA, 20 bp, Artificial Sequence
  Description of Artificial Sequence: Synthetic oligonucleotide
  Target: LAMA2; (+) strand; PAM type: NNNNGHTT; PAM sequence: TTTGGTTT
aattttgtaaaaattcatgc

SEQ ID NO: 49316 - DNA, 20 bp, Artificial Sequence
  Description of Artificial Sequence: Synthetic oligonucleotide
  Target: LAMA2; (+) strand; PAM type: NNNNGHTT; PAM sequence: ATTTGATT
caggataatttaaatttatt

SEQ ID NO: 49317 - DNA, 20 bp, Artificial Sequence
  Description of Artificial Sequence: Synthetic oligonucleotide
  Target: LAMA2; (+) strand; PAM type: NNNNGHTT; PAM sequence: TATAGTTT
atttaaatttattatttgat

SEQ ID NO: 49318 - DNA, 20 bp, Artificial Sequence
  Description of Artificial Sequence: Synthetic oligonucleotide
  Target: LAMA2; (+) strand; PAM type: NNNNGHTT; PAM sequence: ACATGATT
atttgattatagttttgata

SEQ ID NO: 49319 - DNA, 20 bp, Artificial Sequence
  Description of Artificial Sequence: Synthetic oligonucleotide
  Target: LAMA2; (+) strand; PAM type: NNNNGHTT; PAM sequence: ACCCGATT
taacatgattttctattaat

SEQ ID NO: 49320 - DNA, 20 bp, Artificial Sequence
  Description of Artificial Sequence: Synthetic oligonucleotide
  Target: LAMA2; (+) strand; PAM type: NNNNGHTT; PAM sequence: TTTTGTTT
taatacccgattatggccta

SEQ ID NO: 49321 - DNA, 20 bp, Artificial Sequence
  Description of Artificial Sequence: Synthetic oligonucleotide
  Target: LAMA2; (+) strand; PAM type: NNNNGHTT; PAM sequence: ATTTGATT
taagacatcctaattttgaa

SEQ ID NO: 49322 - DNA, 20 bp, Artificial Sequence
  Description of Artificial Sequence: Synthetic oligonucleotide
  Target: LAMA2; (+) strand; PAM type: NNNNGHTT; PAM sequence: GGAAGCTT
agtgggttattctatgcctt

SEQ ID NO: 49323 - DNA, 20 bp, Artificial Sequence
  Description of Artificial Sequence: Synthetic oligonucleotide
  Target: LAMA2; (+) strand; PAM type: NNNNGHTT; PAM sequence: TTGGGTTT
aataatcacattttagatct

SEQ ID NO: 49324 - DNA, 20 bp, Artificial Sequence
  Description of Artificial Sequence: Synthetic oligonucleotide
  Target: LAMA2; (+) strand; PAM type: NNNNGHTT; PAM sequence: TACTGATT
cgcccttattgcagcctttc

SEQ ID NO: 49325 - DNA, 20 bp, Artificial Sequence
  Description of Artificial Sequence: Synthetic oligonucleotide
  Target: LAMA2; (+) strand; PAM type: NNNNGHTT; PAM sequence: CGGGGTTT
ttttgtatttttagtagaga

SEQ ID NO: 49326 - DNA, 20 bp, Artificial Sequence
  Description of Artificial Sequence: Synthetic oligonucleotide
  Target: LAMA2; (+) strand; PAM type: NNNNGHTT; PAM sequence: CTGGGATT
cgcctcggcctcccaaagtg

SEQ ID NO: 49327 - DNA, 20 bp, Artificial Sequence
  Description of Artificial Sequence: Synthetic oligonucleotide
  Target: LAMA2; (+) strand; PAM type: NNNNGHTT; PAM sequence: GGAAGATT
cattttaataacagaatctg

SEQ ID NO: 49328 - DNA, 20 bp, Artificial Sequence
  Description of Artificial Sequence: Synthetic oligonucleotide
  Target: LAMA2; (+) strand; PAM type: NNNNGHTT; PAM sequence: AGGAGTTT
atgcagccagacttggatct

SEQ ID NO: 49329 - DNA, 20 bp, Artificial Sequence
  Description of Artificial Sequence: Synthetic oligonucleotide
  Target: LAMA2; (+) strand; PAM type: NNNNGHTT; PAM sequence: CTCTGCTT
ctttgtaatgccaagtcatg

SEQ ID NO: 49330 - DNA, 20 bp, Artificial Sequence
  Description of Artificial Sequence: Synthetic oligonucleotide
  Target: LAMA2; (+) strand; PAM type: NNNNGHTT; PAM sequence: ACTGGTTT
gcttgggagacagaaactac

SEQ ID NO: 49331 - DNA, 20 bp, Artificial Sequence
  Description of Artificial Sequence: Synthetic oligonucleotide
  Target: LAMA2; (+) strand; PAM type: NNNNGHTT; PAM sequence: CGGAGTTT
aaaaccaaaaacaaacacgt

SEQ ID NO: 49332 - DNA, 20 bp, Artificial Sequence
  Description of Artificial Sequence: Synthetic oligonucleotide
  Target: LAMA2; (+) strand; PAM type: NNNNGHTT; PAM sequence: CTGGGATT
cctcccaactaaaggcacac

SEQ ID NO: 49333 - DNA, 20 bp, Artificial Sequence
  Description of Artificial Sequence: Synthetic oligonucleotide
  Target: LAMA2; (+) strand; PAM type: NNNNGHTT; PAM sequence: TGAAGATT
aaataatacaaaaataatga

SEQ ID NO: 49334 - DNA, 20 bp, Artificial Sequence
  Description of Artificial Sequence: Synthetic oligonucleotide
  Target: LAMA2; (+) strand; PAM type: NNNNGHTT; PAM sequence: TTGTGTTT
caccacgcccggctaatttt

SEQ ID NO: 49335 - DNA, 20 bp, Artificial Sequence
  Description of Artificial Sequence: Synthetic oligonucleotide
  Target: LAMA2; (+) strand; PAM type: NNNNGHTT; PAM sequence: CAGGGTTT
ttttgtgtttttaatagaga

SEQ ID NO: 49336 - DNA, 20 bp, Artificial Sequence
  Description of Artificial Sequence: Synthetic oligonucleotide
  Target: LAMA2; (+) strand; PAM type: NNNNGHTT; PAM sequence: CTGGGATT
ctcctcggcctcccaaagtg

SEQ ID NO: 49337 - DNA, 20 bp, Artificial Sequence
  Description of Artificial Sequence: Synthetic oligonucleotide
  Target: LAMA2; (+) strand; PAM type: NNNNGHTT; PAM sequence: CTCAGCTT
ggcctaatgaagaaccagaa

SEQ ID NO: 49338 - DNA, 20 bp, Artificial Sequence
  Description of Artificial Sequence: Synthetic oligonucleotide
  Target: LAMA2; (+) strand; PAM type: NNNNGHTT; PAM sequence: TTAAGATT
ataaaattattcaaaagaag

SEQ ID NO: 49339 - DNA, 20 bp, Artificial Sequence
  Description of Artificial Sequence: Synthetic oligonucleotide
  Target: LAMA2; (+) strand; PAM type: NNNNGHTT; PAM sequence: AAATGATT
aagaaatgtaaaacaaagga

SEQ ID NO: 49340 - DNA, 20 bp, Artificial Sequence
  Description of Artificial Sequence: Synthetic oligonucleotide
  Target: LAMA2; (+) strand; PAM type: NNNNGHTT; PAM sequence: TATAGATT
tgcagaagacattaggatat

SEQ ID NO: 49341 - DNA, 20 bp, Artificial Sequence
  Description of Artificial Sequence: Synthetic oligonucleotide
  Target: LAMA2; (+) strand; PAM type: NNNNGHTT; PAM sequence: AATTGATT
tagatgatcctgaaaaagaa

SEQ ID NO: 49342 - DNA, 20 bp, Artificial Sequence
  Description of Artificial Sequence: Synthetic oligonucleotide
  Target: LAMA2; (+) strand; PAM type: NNNNGHTT; PAM sequence: CCAAGCTT
tggaaaaaaaaaaaacaaac

SEQ ID NO: 49343 - DNA, 20 bp, Artificial Sequence
  Description of Artificial Sequence: Synthetic oligonucleotide
  Target: LAMA2; (+) strand; PAM type: NNNNGHTT; PAM sequence: CTTGGATT
ttacttctcttcaagctctc

SEQ ID NO: 49344 - DNA, 20 bp, Artificial Sequence
  Description of Artificial Sequence: Synthetic oligonucleotide
  Target: LAMA2; (+) strand; PAM type: NNNNGHTT; PAM sequence: TAATGCTT
tttggacttctcctattata

SEQ ID NO: 49345 - DNA, 20 bp, Artificial Sequence
  Description of Artificial Sequence: Synthetic oligonucleotide
  Target: LAMA2; (+) strand; PAM type: NNNNGHTT; PAM sequence: AAATGTTT
cgtaaggtatgtctccaaat

SEQ ID NO: 49346 - DNA, 20 bp, Artificial Sequence
  Description of Artificial Sequence: Synthetic oligonucleotide
  Target: LAMA2; (+) strand; PAM type: NNNNGHTT; PAM sequence: TATGGTTT
ctttctaattcacatagcat

SEQ ID NO: 49347 - DNA, 20 bp, Artificial Sequence
  Description of Artificial Sequence: Synthetic oligonucleotide
  Target: LAMA2; (+) strand; PAM type: NNNNGHTT; PAM sequence: TAATGTTT
ataaatgcaggaagcaattt

SEQ ID NO: 49348 - DNA, 20 bp, Artificial Sequence
  Description of Artificial Sequence: Synthetic oligonucleotide
  Target: LAMA2; (+) strand; PAM type: NNNNGHTT; PAM sequence: TGATGTTT
attttaatgtttatgttcac

SEQ ID NO: 49349 - DNA, 20 bp, Artificial Sequence
  Description of Artificial Sequence: Synthetic oligonucleotide
  Target: LAMA2; (+) strand; PAM type: NNNNGHTT; PAM sequence: ACATGATT
gtacaaagcctataacagat

SEQ ID NO: 49350 - DNA, 20 bp, Artificial Sequence
  Description of Artificial Sequence: Synthetic oligonucleotide
  Target: LAMA2; (+) strand; PAM type: NNNNGHTT; PAM sequence: ATGTGTTT
ataacagatacatgattaat

SEQ ID NO: 49351 - DNA, 20 bp, Artificial Sequence
  Description of Artificial Sequence: Synthetic oligonucleotide
  Target: LAMA2; (+) strand; PAM type: NNNNGHTT; PAM sequence: TGCTGTTT
cataaagttgtgttaatggt

SEQ ID NO: 49352 - DNA, 20 bp, Artificial Sequence
  Description of Artificial Sequence: Synthetic oligonucleotide
  Target: LAMA2; (+) strand; PAM type: NNNNGHTT; PAM sequence: ATAGGCTT
ttgctgtttttatctcctct

SEQ ID NO: 49353 - DNA, 20 bp, Artificial Sequence
  Description of Artificial Sequence: Synthetic oligonucleotide
  Target: LAMA2; (+) strand; PAM type: NNNNGHTT; PAM sequence: CTTGGATT
aactgcagcacagtgggatc

SEQ ID NO: 49354 - DNA, 20 bp, Artificial Sequence
  Description of Artificial Sequence: Synthetic oligonucleotide
  Target: LAMA2; (+) strand; PAM type: NNNNGHTT; PAM sequence: GACTGCTT
accctcgctgcaatctctgt

SEQ ID NO: 49355 - DNA, 20 bp, Artificial Sequence
  Description of Artificial Sequence: Synthetic oligonucleotide
  Target: LAMA2; (+) strand; PAM type: NNNNGHTT; PAM sequence: CTGTGATT
cctgggacagatgccacaac

SEQ ID NO: 49356 - DNA, 20 bp, Artificial Sequence
  Description of Artificial Sequence: Synthetic oligonucleotide
  Target: LAMA2; (+) strand; PAM type: NNNNGHTT; PAM sequence: TTCTGTTT
ctagggaaaacctccctcaa

SEQ ID NO: 49357 - DNA, 20 bp, Artificial Sequence
  Description of Artificial Sequence: Synthetic oligonucleotide
  Target: LAMA2; (+) strand; PAM type: NNNNGHTT; PAM sequence: CTCAGTTT
cctcaattctgtttccattg

SEQ ID NO: 49358 - DNA, 20 bp, Artificial Sequence
  Description of Artificial Sequence: Synthetic oligonucleotide
  Target: LAMA2; (+) strand; PAM type: NNNNGHTT; PAM sequence: CAGTGTTT
tgctcagttttaacttcatt

SEQ ID NO: 49359 - DNA, 20 bp, Artificial Sequence
  Description of Artificial Sequence: Synthetic oligonucleotide
  Target: LAMA2; (+) strand; PAM type: NNNNGHTT; PAM sequence: ACCTGCTT
cttcattcagtgtttgttat

SEQ ID NO: 49360 - DNA, 20 bp, Artificial Sequence
  Description of Artificial Sequence: Synthetic oligonucleotide
  Target: LAMA2; (+) strand; PAM type: NNNNGHTT; PAM sequence: TGGAGTTT
caaaatctcattgccagaca

SEQ ID NO: 49361 - DNA, 20 bp, Artificial Sequence
  Description of Artificial Sequence: Synthetic oligonucleotide
  Target: LAMA2; (+) strand; PAM type: NNNNGHTT; PAM sequence: CACTGCTT
tttgttggcataccgataaa

SEQ ID NO: 49362 - DNA, 20 bp, Artificial Sequence
  Description of Artificial Sequence: Synthetic oligonucleotide
  Target: LAMA2; (+) strand; PAM type: NNNNGHTT; PAM sequence: TAGAGCTT
accgataaacactgcttttc

SEQ ID NO: 49363 - DNA, 20 bp, Artificial Sequence
  Description of Artificial Sequence: Synthetic oligonucleotide
  Target: LAMA2; (+) strand; PAM type: NNNNGHTT; PAM sequence: TAGTGATT
atgatctattttcaatggta

SEQ ID NO: 49364 - DNA, 20 bp, Artificial Sequence
  Description of Artificial Sequence: Synthetic oligonucleotide
  Target: LAMA2; (+) strand; PAM type: NNNNGHTT; PAM sequence: ATTAGATT
agtgattttttaaaaaatat

SEQ ID NO: 49365 - DNA, 20 bp, Artificial Sequence
  Description of Artificial Sequence: Synthetic oligonucleotide
  Target: LAMA2; (+) strand; PAM type: NNNNGHTT; PAM sequence: ATTTGCTT
ttttttaaaaaatatattag

SEQ ID NO: 49366 - DNA, 20 bp, Artificial Sequence
  Description of Artificial Sequence: Synthetic oligonucleotide
  Target: LAMA2; (+) strand; PAM type: NNNNGHTT; PAM sequence: TAAGGCTT
agaaaatcacagctaaataa

SEQ ID NO: 49367 - DNA, 20 bp, Artificial Sequence
  Description of Artificial Sequence: Synthetic oligonucleotide
  Target: LAMA2; (+) strand; PAM type: NNNNGHTT; PAM sequence: GGAAGTTT
gaaaatatatttactgctgt

SEQ ID NO: 49368 - DNA, 20 bp, Artificial Sequence
  Description of Artificial Sequence: Synthetic oligonucleotide
  Target: LAMA2; (+) strand; PAM type: NNNNGHTT; PAM sequence: AAAGGATT
agagccaattaaaaaggtaa

SEQ ID NO: 49369 - DNA, 20 bp, Artificial Sequence
  Description of Artificial Sequence: Synthetic oligonucleotide
  Target: LAMA2; (+) strand; PAM type: NNNNGHTT; PAM sequence: TGCAGTTT
aaaatcaattccaggataaa

SEQ ID NO: 49370 - DNA, 20 bp, Artificial Sequence
  Description of Artificial Sequence: Synthetic oligonucleotide
  Target: LAMA2; (+) strand; PAM type: NNNNGHTT; PAM sequence: GGCAGTTT
ccttgagaattgaggaaaat

SEQ ID NO: 49371 - DNA, 20 bp, Artificial Sequence
  Description of Artificial Sequence: Synthetic oligonucleotide
  Target: LAMA2; (+) strand; PAM type: NNNNGHTT; PAM sequence: AAGGGCTT
aaatggcagtttctaccatc

SEQ ID NO: 49372 - DNA, 20 bp, Artificial Sequence
  Description of Artificial Sequence: Synthetic oligonucleotide
  Target: LAMA2; (+) strand; PAM type: NNNNGHTT; PAM sequence: TACAGCTT
ttaacctgctgcctatttct

SEQ ID NO: 49373 - DNA, 20 bp, Artificial Sequence
  Description of Artificial Sequence: Synthetic oligonucleotide
  Target: LAMA2; (+) strand; PAM type: NNNNGHTT; PAM sequence: CACTGTTT
cttacagcttacaatagcac

SEQ ID NO: 49374 - DNA, 20 bp, Artificial Sequence
  Description of Artificial Sequence: Synthetic oligonucleotide
  Target: LAMA2; (+) strand; PAM type: NNNNGHTT; PAM sequence: CAATGTTT
tagcaccactgtttaagact

SEQ ID NO: 49375 - DNA, 20 bp, Artificial Sequence
  Description of Artificial Sequence: Synthetic oligonucleotide
  Target: LAMA2; (+) strand; PAM type: NNNNGHTT; PAM sequence: TGTTGCTT
tttaagactcaatgttttta

SEQ ID NO: 49376 - DNA, 20 bp, Artificial Sequence
  Description of Artificial Sequence: Synthetic oligonucleotide
  Target: LAMA2; (+) strand; PAM type: NNNNGHTT; PAM sequence: CGGAGCTT
aatggtgtgaacctgggagg

SEQ ID NO: 49377 - DNA, 20 bp, Artificial Sequence
  Description of Artificial Sequence: Synthetic oligonucleotide
  Target: LAMA2; (+) strand; PAM type: NNNNGHTT; PAM sequence: TTCTGTTT
gagtctaatactcagtgttc

SEQ ID NO: 49378 - DNA, 20 bp, Artificial Sequence
  Description of Artificial Sequence: Synthetic oligonucleotide
  Target: LAMA2; (+) strand; PAM type: NNNNGHTT; PAM sequence: TTTTGTTT
taatactcagtgttcttctg

SEQ ID NO: 49379 - DNA, 20 bp, Artificial Sequence
  Description of Artificial Sequence: Synthetic oligonucleotide
  Target: LAMA2; (+) strand; PAM type: NNNNGHTT; PAM sequence: GGGTGATT
gctcccgttatgcattctca

SEQ ID NO: 49380 - DNA, 20 bp, Artificial Sequence
  Description of Artificial Sequence: Synthetic oligonucleotide
  Target: LAMA2; (+) strand; PAM type: NNNNGHTT; PAM sequence: TATTGCTT
cacttggctgcagcagctgc

SEQ ID NO: 49381 - DNA, 20 bp, Artificial Sequence
  Description of Artificial Sequence: Synthetic oligonucleotide
  Target: LAMA2; (+) strand; PAM type: NNNNGHTT; PAM sequence: TTATGTTT
ggaaccttgtccgggaagca

SEQ ID NO: 49382 - DNA, 20 bp, Artificial Sequence
  Description of Artificial Sequence: Synthetic oligonucleotide
  Target: LAMA2; (+) strand; PAM type: NNNNGHTT; PAM sequence: TCATGATT
ttccaaccaaccttaggcaa

SEQ ID NO: 49383 - DNA, 20 bp, Artificial Sequence
  Description of Artificial Sequence: Synthetic oligonucleotide
  Target: LAMA2; (+) strand; PAM type: NNNNGHTT; PAM sequence: TTTAGATT
ttcctttaactctttctaca

SEQ ID NO: 49384 - DNA, 20 bp, Artificial Sequence
  Description of Artificial Sequence: Synthetic oligonucleotide
  Target: LAMA2; (+) strand; PAM type: NNNNGHTT; PAM sequence: TGTGGCTT
gctccagtgtccacagatat

SEQ ID NO: 49385 - DNA, 20 bp, Artificial Sequence
  Description of Artificial Sequence: Synthetic oligonucleotide
  Target: LAMA2; (+) strand; PAM type: NNNNGHTT; PAM sequence: AAAAGATT
ttcactatgtgaattagtca

SEQ ID NO: 49386 - DNA, 20 bp, Artificial Sequence
  Description of Artificial Sequence: Synthetic oligonucleotide
  Target: LAMA2; (+) strand; PAM type: NNNNGHTT; PAM sequence: CCATGCTT
tcaaaaagatttacgtcctg

SEQ ID NO: 49387 - DNA, 20 bp, Artificial Sequence
  Description of Artificial Sequence: Synthetic oligonucleotide
  Target: LAMA2; (+) strand; PAM type: NNNNGHTT; PAM sequence: TGTTGCTT
tgcccactgcgtgtgagttc

SEQ ID NO: 49388 - DNA, 20 bp, Artificial Sequence
  Description of Artificial Sequence: Synthetic oligonucleotide
  Target: LAMA2; (+) strand; PAM type: NNNNGHTT; PAM sequence: CTTAGTTT
gatagacatgcagttcgtaa

SEQ ID NO: 49389 - DNA, 20 bp, Artificial Sequence
  Description of Artificial Sequence: Synthetic oligonucleotide
  Target: LAMA2; (+) strand; PAM type: NNNNGHTT; PAM sequence: CATTGTTT
cagcacacgaccaccaaggg

SEQ ID NO: 49390 - DNA, 20 bp, Artificial Sequence
  Description of Artificial Sequence: Synthetic oligonucleotide
  Target: LAMA2; (+) strand; PAM type: NNNNGHTT; PAM sequence: CAGAGATT
gggcattgtttttcaacatc

SEQ ID NO: 49391 - DNA, 20 bp, Artificial Sequence
  Description of Artificial Sequence: Synthetic oligonucleotide
  Target: LAMA2; (+) strand; PAM type: NNNNGHTT; PAM sequence: TGGAGATT
ctttttagaatcacaccatt

SEQ ID NO: 49392 - DNA, 20 bp, Artificial Sequence
  Description of Artificial Sequence: Synthetic oligonucleotide
  Target: LAMA2; (+) strand; PAM type: NNNNGHTT; PAM sequence: ACAGGTTT
atttcgaggctcgggaagaa

SEQ ID NO: 49393 - DNA, 20 bp, Artificial Sequence
  Description of Artificial Sequence: Synthetic oligonucleotide
  Target: LAMA2; (+) strand; PAM type: NNNNGHTT; PAM sequence: CTCTGATT
cgtcaggcatatggctgctc

SEQ ID NO: 49394 - DNA, 20 bp, Artificial Sequence
  Description of Artificial Sequence: Synthetic oligonucleotide
  Target: LAMA2; (+) strand; PAM type: NNNNGHTT; PAM sequence: CATTGTTT
atgacagaggtaaagttagt

SEQ ID NO: 49395 - DNA, 20 bp, Artificial Sequence
  Description of Artificial Sequence: Synthetic oligonucleotide
  Target: LAMA2; (+) strand; PAM type: NNNNGHTT; PAM sequence: AATGGTTT
ttggtgcaaagataccaatc

SEQ ID NO: 49396 - DNA, 20 bp, Artificial Sequence
  Description of Artificial Sequence: Synthetic oligonucleotide
  Target: LAMA2; (+) strand; PAM type: NNNNGHTT; PAM sequence: TTCAGTTT
taccaatcaatggttttgca

SEQ ID NO: 49397 - DNA, 20 bp, Artificial Sequence
  Description of Artificial Sequence: Synthetic oligonucleotide
  Target: LAMA2; (+) strand; PAM type: NNNNGHTT; PAM sequence: TAGTGATT
ttttgcattcagttttgtca

SEQ ID NO: 49398 - DNA, 20 bp, Artificial Sequence
  Description of Artificial Sequence: Synthetic oligonucleotide
  Target: LAMA2; (+) strand; PAM type: NNNNGHTT; PAM sequence: GAAAGATT
gacctacagatatcagataa

SEQ ID NO: 49399 - DNA, 20 bp, Artificial Sequence
  Description of Artificial Sequence: Synthetic oligonucleotide
  Target: LAMA2; (+) strand; PAM type: NNNNGHTT; PAM sequence: AAGTGATT
atcagataagaaagattgga

SEQ ID NO: 49400 - DNA, 20 bp, Artificial Sequence
  Description of Artificial Sequence: Synthetic oligonucleotide
  Target: LAMA2; (+) strand; PAM type: NNNNGHTT; PAM sequence: ATTGGTTT
ataagaaagattggaaagtg

SEQ ID NO: 49401 - DNA, 20 bp, Artificial Sequence
  Description of Artificial Sequence: Synthetic oligonucleotide
  Target: LAMA2; (+) strand; PAM type: NNNNGHTT; PAM sequence: GGAGGCTT
aatgatagaagataaaccat

SEQ ID NO: 49402 - DNA, 20 bp, Artificial Sequence
  Description of Artificial Sequence: Synthetic oligonucleotide
  Target: LAMA2; (+) strand; PAM type: NNNNGHTT; PAM sequence: GTGAGTTT
tggaattcactgcagacata

SEQ ID NO: 49403 - DNA, 20 bp, Artificial Sequence
  Description of Artificial Sequence: Synthetic oligonucleotide
  Target: LAMA2; (+) strand; PAM type: NNNNGHTT; PAM sequence: AATGGATT
aaattaactgttgtggtata

SEQ ID NO: 49404 - DNA, 20 bp, Artificial Sequence
  Description of Artificial Sequence: Synthetic oligonucleotide
  Target: LAMA2; (+) strand; PAM type: NNNNGHTT; PAM sequence: AAATGATT
tccctatgcatcatgttgag

SEQ ID NO: 49405 - DNA, 20 bp, Artificial Sequence
  Description of Artificial Sequence: Synthetic oligonucleotide
  Target: LAMA2; (+) strand; PAM type: NNNNGHTT; PAM sequence: CCGTGTTT
gaatacttcaagggagtatt

SEQ ID NO: 49406 - DNA, 20 bp, Artificial Sequence
  Description of Artificial Sequence: Synthetic oligonucleotide
  Target: LAMA2; (+) strand; PAM type: NNNNGHTT; PAM sequence: TGAGGCTT
ccaaaattggccaactgaaa

SEQ ID NO: 49407 - DNA, 20 bp, Artificial Sequence
  Description of Artificial Sequence: Synthetic oligonucleotide
  Target: LAMA2; (+) strand; PAM type: NNNNGHTT; PAM sequence: TCAAGCTT
gtcctggggcagaattaatc

SEQ ID NO: 49408 - DNA, 20 bp, Artificial Sequence
  Description of Artificial Sequence: Synthetic oligonucleotide
  Target: LAMA2; (+) strand; PAM type: NNNNGHTT; PAM sequence: AGATGATT
acatattgtcaaaagtaaaa

SEQ ID NO: 49409 - DNA, 20 bp, Artificial Sequence
  Description of Artificial Sequence: Synthetic oligonucleotide
  Target: LAMA2; (+) strand; PAM type: NNNNGHTT; PAM sequence: GATTGTTT
attgtcaaaagtaaaaagat

SEQ ID NO: 49410 - DNA, 20 bp, Artificial Sequence
  Description of Artificial Sequence: Synthetic oligonucleotide
  Target: LAMA2; (+) strand; PAM type: NNNNGHTT; PAM sequence: GTATGTTT
tgattgtttaatttgaaaga

SEQ ID NO: 49411 - DNA, 20 bp, Artificial Sequence
  Description of Artificial Sequence: Synthetic oligonucleotide
  Target: LAMA2; (+) strand; PAM type: NNNNGHTT; PAM sequence: AATGGATT
gtatgtttacagaacatggg

SEQ ID NO: 49412 - DNA, 20 bp, Artificial Sequence
  Description of Artificial Sequence: Synthetic oligonucleotide
  Target: LAMA2; (+) strand; PAM type: NNNNGHTT; PAM sequence: TACAGATT
tgggataaaatgagaaatca

SEQ ID NO: 49413 - DNA, 20 bp, Artificial Sequence
  Description of Artificial Sequence: Synthetic oligonucleotide
  Target: LAMA2; (+) strand; PAM type: NNNNGHTT; PAM sequence: GTAAGTTT
gagaaatcatacagatttag

SEQ ID NO: 49414 - DNA, 20 bp, Artificial Sequence
  Description of Artificial Sequence: Synthetic oligonucleotide
  Target: LAMA2; (+) strand; PAM type: NNNNGHTT; PAM sequence: ATATGTTT
tatgagaatatagaatcgat

SEQ ID NO: 49415 - DNA, 20 bp, Artificial Sequence
  Description of Artificial Sequence: Synthetic oligonucleotide
  Target: LAMA2; (+) strand; PAM type: NNNNGHTT; PAM sequence: AAATGTTT
atataaaaatactatttttc

SEQ ID NO: 49416 - DNA, 20 bp, Artificial Sequence
  Description of Artificial Sequence: Synthetic oligonucleotide
  Target: LAMA2; (+) strand; PAM type: NNNNGHTT; PAM sequence: TAATGCTT
tatttcatgcagaagatcca

SEQ ID NO: 49417 - DNA, 20 bp, Artificial Sequence
  Description of Artificial Sequence: Synthetic oligonucleotide
  Target: LAMA2; (+) strand; PAM type: NNNNGHTT; PAM sequence: TTCTGATT
gcagaagatccataatgctt

SEQ ID NO: 49418 - DNA, 20 bp, Artificial Sequence
  Description of Artificial Sequence: Synthetic oligonucleotide
  Target: LAMA2; (+) strand; PAM type: NNNNGHTT; PAM sequence: TTGGGTTT
cacttttatatatgtattcc

SEQ ID NO: 49419 - DNA, 20 bp, Artificial Sequence
  Description of Artificial Sequence: Synthetic oligonucleotide
  Target: LAMA2; (+) strand; PAM type: NNNNGHTT; PAM sequence: AGGAGATT
ttgatatttctcactataac

SEQ ID NO: 49420 - DNA, 20 bp, Artificial Sequence
  Description of Artificial Sequence: Synthetic oligonucleotide
  Target: LAMA2; (+) strand; PAM type: NNNNGHTT; PAM sequence: AGCAGATT
aattaggtggcagaagccat

SEQ ID NO: 49421 - DNA, 20 bp, Artificial Sequence
  Description of Artificial Sequence: Synthetic oligonucleotide
  Target: LAMA2; (+) strand; PAM type: NNNNGHTT; PAM sequence: GTGAGTTT
agaaaatagcaggtaatttc

SEQ ID NO: 49422 - DNA, 20 bp, Artificial Sequence
  Description of Artificial Sequence: Synthetic oligonucleotide
  Target: LAMA2; (+) strand; PAM type: NNNNGHTT; PAM sequence: AATAGATT
ggtaatttcgtgagtttgca

SEQ ID NO: 49423 - DNA, 20 bp, Artificial Sequence
  Description of Artificial Sequence: Synthetic oligonucleotide
  Target: LAMA2; (+) strand; PAM type: NNNNGHTT; PAM sequence: AAGAGTTT
atggttctgtactgcagtaa

SEQ ID NO: 49424 - DNA, 20 bp, Artificial Sequence
  Description of Artificial Sequence: Synthetic oligonucleotide
  Target: LAMA2; (+) strand; PAM type: NNNNGHTT; PAM sequence: CTTTGCTT
ttcatctttaattatacttt

SEQ ID NO: 49425 - DNA, 20 bp, Artificial Sequence
  Description of Artificial Sequence: Synthetic oligonucleotide
  Target: LAMA2; (+) strand; PAM type: NNNNGHTT; PAM sequence: CACTGTTT
tatgtctttttcttttgtca

SEQ ID NO: 49426 - DNA, 20 bp, Artificial Sequence
  Description of Artificial Sequence: Synthetic oligonucleotide
  Target: LAMA2; (+) strand; PAM type: NNNNGHTT; PAM sequence: TTTGGTTT
tacctcaccaaatgagatct

SEQ ID NO: 49427 - DNA, 20 bp, Artificial Sequence
  Description of Artificial Sequence: Synthetic oligonucleotide
  Target: LAMA2; (+) strand; PAM type: NNNNGHTT; PAM sequence: GACCGTTT
tgagatcttttggtttaagt

SEQ ID NO: 49428 - DNA, 20 bp, Artificial Sequence
  Description of Artificial Sequence: Synthetic oligonucleotide
  Target: LAMA2; (+) strand; PAM type: NNNNGHTT; PAM sequence: ATTTGATT
caaataaagctgtcatcagc

SEQ ID NO: 49429 - DNA, 20 bp, Artificial Sequence
  Description of Artificial Sequence: Synthetic oligonucleotide
  Target: LAMA2; (+) strand; PAM type: NNNNGHTT; PAM sequence: AAAGGTTT
taaggcagtggaattgtggc

SEQ ID NO: 49430 - DNA, 20 bp, Artificial Sequence
  Description of Artificial Sequence: Synthetic oligonucleotide
  Target: LAMA2; (+) strand; PAM type: NNNNGHTT; PAM sequence: AAAGGTTT
aattgtggcaaaggttttta

SEQ ID NO: 49431 - DNA, 20 bp, Artificial Sequence
  Description of Artificial Sequence: Synthetic oligonucleotide
  Target: LAMA2; (+) strand; PAM type: NNNNGHTT; PAM sequence: GAGAGTTT
aaatttaaatctcaaaagca

SEQ ID NO: 49432 - DNA, 20 bp, Artificial Sequence
  Description of Artificial Sequence: Synthetic oligonucleotide
  Target: LAMA2; (+) strand; PAM type: NNNNGHTT; PAM sequence: AAGAGTTT
atctcaaaagcagagagttt

SEQ ID NO: 49433 - DNA, 20 bp, Artificial Sequence
  Description of Artificial Sequence: Synthetic oligonucleotide
  Target: LAMA2; (+) strand; PAM type: NNNNGHTT; PAM sequence: TTCTGTTT
agagagtttaagagtttata

SEQ ID NO: 49434 - DNA, 20 bp, Artificial Sequence
  Description of Artificial Sequence: Synthetic oligonucleotide
  Target: LAMA2; (+) strand; PAM type: NNNNGHTT; PAM sequence: TGAGGTTT
ttaagagtttatattctgtt

SEQ ID NO: 49435 - DNA, 20 bp, Artificial Sequence
  Description of Artificial Sequence: Synthetic oligonucleotide
  Target: LAMA2; (+) strand; PAM type: NNNNGHTT; PAM sequence: CTTTGCTT
gtgctggcattatctttttt

SEQ ID NO: 49436 - DNA, 20 bp, Artificial Sequence
  Description of Artificial Sequence: Synthetic oligonucleotide
  Target: LAMA2; (+) strand; PAM type: NNNNGHTT; PAM sequence: TTTTGTTT
gcattatcttttttctttgc

SEQ ID NO: 49437 - DNA, 20 bp, Artificial Sequence
  Description of Artificial Sequence: Synthetic oligonucleotide
  Target: LAMA2; (+) strand; PAM type: NNNNGHTT; PAM sequence: TAAAGTTT
tttgcttttgtttcctttta

SEQ ID NO: 49438 - DNA, 20 bp, Artificial Sequence
  Description of Artificial Sequence: Synthetic oligonucleotide
  Target: LAMA2; (+) strand; PAM type: NNNNGHTT; PAM sequence: TGGAGTTT
gtagttatttaaatggaagc

SEQ ID NO: 49439 - DNA, 20 bp, Artificial Sequence
  Description of Artificial Sequence: Synthetic oligonucleotide
  Target: LAMA2; (+) strand; PAM type: NNNNGHTT; PAM sequence: TCAAGCTT
atatttgttgttgctgccat

SEQ ID NO: 49440 - DNA, 20 bp, Artificial Sequence
  Description of Artificial Sequence: Synthetic oligonucleotide
  Target: LAMA2; (+) strand; PAM type: NNNNGHTT; PAM sequence: ACTTGATT
gttgctgccattcaagcttc

SEQ ID NO: 49441 - DNA, 20 bp, Artificial Sequence
  Description of Artificial Sequence: Synthetic oligonucleotide
  Target: LAMA2; (+) strand; PAM type: NNNNGHTT; PAM sequence: AGAAGTTT
gagcccagagaacataaggg

SEQ ID NO: 49442 - DNA, 20 bp, Artificial Sequence
  Description of Artificial Sequence: Synthetic oligonucleotide
  Target: LAMA2; (+) strand; PAM type: NNNNGHTT; PAM sequence: AGTGGTTT
agtttttcttgcagaagggg

SEQ ID NO: 49443 - DNA, 20 bp, Artificial Sequence
  Description of Artificial Sequence: Synthetic oligonucleotide
  Target: LAMA2; (+) strand; PAM type: NNNNGHTT; PAM sequence: GTTTGCTT
tttcttgcagaaggggagtg

SEQ ID NO: 49444 - DNA, 20 bp, Artificial Sequence
  Description of Artificial Sequence: Synthetic oligonucleotide
  Target: LAMA2; (+) strand; PAM type: NNNNGHTT; PAM sequence: GTGTGTTT
aacctgaattttaattgaat

SEQ ID NO: 49445 - DNA, 20 bp, Artificial Sequence
  Description of Artificial Sequence: Synthetic oligonucleotide
  Target: LAMA2; (+) strand; PAM type: NNNNGHTT; PAM sequence: TGCAGATT
atcaagaccaatcttcagag

SEQ ID NO: 49446 - DNA, 20 bp, Artificial Sequence
  Description of Artificial Sequence: Synthetic oligonucleotide
  Target: LAMA2; (+) strand; PAM type: NNNNGHTT; PAM sequence: TTCAGTTT
caaagaacatgcattcataa

SEQ ID NO: 49447 - DNA, 20 bp, Artificial Sequence
  Description of Artificial Sequence: Synthetic oligonucleotide
  Target: LAMA2; (+) strand; PAM type: NNNNGHTT; PAM sequence: CTATGCTT
tcagtttcaataaaacctac

SEQ ID NO: 49448 - DNA, 20 bp, Artificial Sequence
  Description of Artificial Sequence: Synthetic oligonucleotide
  Target: LAMA2; (+) strand; PAM type: NNNNGHTT; PAM sequence: TAAAGTTT
aaacctacctatgcttgtta

SEQ ID NO: 49449 - DNA, 20 bp, Artificial Sequence
  Description of Artificial Sequence: Synthetic oligonucleotide
  Target: LAMA2; (+) strand; PAM type: NNNNGHTT; PAM sequence: TAAAGTTT
aactattcattgtcacattt

SEQ ID NO: 49450 - DNA, 20 bp, Artificial Sequence
  Description of Artificial Sequence: Synthetic oligonucleotide
  Target: LAMA2; (+) strand; PAM type: NNNNGHTT; PAM sequence: ACATGTTT
ttttaaagtttatttcccaa

SEQ ID NO: 49451 - DNA, 20 bp, Artificial Sequence
  Description of Artificial Sequence: Synthetic oligonucleotide
  Target: LAMA2; (+) strand; PAM type: NNNNGHTT; PAM sequence: CCCAGTTT
ttagtccatcataaaatagt

SEQ ID NO: 49452 - DNA, 20 bp, Artificial Sequence
  Description of Artificial Sequence: Synthetic oligonucleotide
  Target: LAMA2; (+) strand; PAM type: NNNNGHTT; PAM sequence: TTATGATT
tattaatatgttattttcaa

SEQ ID NO: 49453 - DNA, 20 bp, Artificial Sequence
  Description of Artificial Sequence: Synthetic oligonucleotide
  Target: LAMA2; (+) strand; PAM type: NNNNGHTT; PAM sequence: ATTAGATT
ctcagaaagaaatcaatatt

SEQ ID NO: 49454 - DNA, 20 bp, Artificial Sequence
  Description of Artificial Sequence: Synthetic oligonucleotide
  Target: LAMA2; (+) strand; PAM type: NNNNGHTT; PAM sequence: GGTGGTTT
tgcgtgatcattattttcta

SEQ ID NO: 49455 - DNA, 20 bp, Artificial Sequence
  Description of Artificial Sequence: Synthetic oligonucleotide
  Target: LAMA2; (+) strand; PAM type: NNNNGHTT; PAM sequence: GTCTGTTT
atggggaatgaccttgggtt

SEQ ID NO: 49456 - DNA, 20 bp, Artificial Sequence
  Description of Artificial Sequence: Synthetic oligonucleotide
  Target: LAMA2; (+) strand; PAM type: NNNNGHTT; PAM sequence: TTATGATT
catccaatatactaaacttc

SEQ ID NO: 49457 - DNA, 20 bp, Artificial Sequence
  Description of Artificial Sequence: Synthetic oligonucleotide
  Target: LAMA2; (+) strand; PAM type: NNNNGHTT; PAM sequence: TTAGGATT
gaggaagcaaaaatgcaata

SEQ ID NO: 49458 - DNA, 20 bp, Artificial Sequence
  Description of Artificial Sequence: Synthetic oligonucleotide
  Target: LAMA2; (+) strand; PAM type: NNNNGHTT; PAM sequence: AACAGCTT
acatgagccccagaaattta

SEQ ID NO: 49459 - DNA, 20 bp, Artificial Sequence
  Description of Artificial Sequence: Synthetic oligonucleotide
  Target: LAMA2; (+) strand; PAM type: NNNNGHTT; PAM sequence: TCTTGATT
cttcaaaacaatgttaatta

SEQ ID NO: 49460 - DNA, 20 bp, Artificial Sequence
  Description of Artificial Sequence: Synthetic oligonucleotide
  Target: LAMA2; (+) strand; PAM type: NNNNGHTT; PAM sequence: CATTGTTT
atctatgtatcaaaatatca

SEQ ID NO: 49461 - DNA, 20 bp, Artificial Sequence
  Description of Artificial Sequence: Synthetic oligonucleotide
  Target: LAMA2; (+) strand; PAM type: NNNNGHTT; PAM sequence: AGTAGATT
agaagccatactgataacat

SEQ ID NO: 49462 - DNA, 20 bp, Artificial Sequence
  Description of Artificial Sequence: Synthetic oligonucleotide
  Target: LAMA2; (+) strand; PAM type: NNNNGHTT; PAM sequence: CCCAGTTT
gcctggccaacatgatgaaa

SEQ ID NO: 49463 - DNA, 20 bp, Artificial Sequence
  Description of Artificial Sequence: Synthetic oligonucleotide
  Target: LAMA2; (+) strand; PAM type: NNNNGHTT; PAM sequence: CCAAGATT
taggcggaggttgtagtgag

SEQ ID NO: 49464 - DNA, 20 bp, Artificial Sequence
  Description of Artificial Sequence: Synthetic oligonucleotide
  Target: LAMA2; (+) strand; PAM type: NNNNGHTT; PAM sequence: GAGGGATT
aagaggaggaggaagaagag

SEQ ID NO: 49465 - DNA, 20 bp, Artificial Sequence
  Description of Artificial Sequence: Synthetic oligonucleotide
  Target: LAMA2; (+) strand; PAM type: NNNNGHTT; PAM sequence: GTAGGATT
aacgtgagaaggatattgct

SEQ ID NO: 49466 - DNA, 20 bp, Artificial Sequence
  Description of Artificial Sequence: Synthetic oligonucleotide
  Target: LAMA2; (+) strand; PAM type: NNNNGHTT; PAM sequence: GATTGATT
tgagaaggatattgctgtag

SEQ ID NO: 49467 - DNA, 20 bp, Artificial Sequence
  Description of Artificial Sequence: Synthetic oligonucleotide
  Target: LAMA2; (+) strand; PAM type: NNNNGHTT; PAM sequence: GATTGTTT
aaggatattgctgtaggatt

SEQ ID NO: 49468 - DNA, 20 bp, Artificial Sequence
  Description of Artificial Sequence: Synthetic oligonucleotide
  Target: LAMA2; (+) strand; PAM type: NNNNGHTT; PAM sequence: CGCTGTTT
tagtaatctaagtacattct

SEQ ID NO: 49469 - DNA, 20 bp, Artificial Sequence
  Description of Artificial Sequence: Synthetic oligonucleotide
  Target: LAMA2; (+) strand; PAM type: NNNNGHTT; PAM sequence: CTAGGATT
taagtacattctcgctgttt

SEQ ID NO: 49470 - DNA, 20 bp, Artificial Sequence
  Description of Artificial Sequence: Synthetic oligonucleotide
  Target: LAMA2; (+) strand; PAM type: NNNNGHTT; PAM sequence: ACTTGATT
aacaatgactcctccagctg

SEQ ID NO: 49471 - DNA, 20 bp, Artificial Sequence
  Description of Artificial Sequence: Synthetic oligonucleotide
  Target: LAMA2; (+) strand; PAM type: NNNNGHTT; PAM sequence: ATGTGATT
ccagctgacttgattgaaaa

SEQ ID NO: 49472 - DNA, 20 bp, Artificial Sequence
  Description of Artificial Sequence: Synthetic oligonucleotide
  Target: LAMA2; (+) strand; PAM type: NNNNGHTT; PAM sequence: ACCTGCTT
aggtaagctacctcctacta

SEQ ID NO: 49473 - DNA, 20 bp, Artificial Sequence
  Description of Artificial Sequence: Synthetic oligonucleotide
  Target: LAMA2; (+) strand; PAM type: NNNNGHTT; PAM sequence: TAAAGATT
gaaatagttgatcaaaaatt

SEQ ID NO: 49474 - DNA, 20 bp, Artificial Sequence
  Description of Artificial Sequence: Synthetic oligonucleotide
  Target: LAMA2; (+) strand; PAM type: NNNNGHTT; PAM sequence: GAATGTTT
atttaacaatcaggaattaa

SEQ ID NO: 49475 - DNA, 20 bp, Artificial Sequence
  Description of Artificial Sequence: Synthetic oligonucleotide
  Target: LAMA2; (+) strand; PAM type: NNNNGHTT; PAM sequence: CAATGATT
agttagagacatttaaactg

SEQ ID NO: 49476 - DNA, 20 bp, Artificial Sequence
  Description of Artificial Sequence: Synthetic oligonucleotide
  Target: LAMA2; (+) strand; PAM type: NNNNGHTT; PAM sequence: ATAGGATT
taaactgcaatgattaggag

SEQ ID NO: 49477 - DNA, 20 bp, Artificial Sequence
  Description of Artificial Sequence: Synthetic oligonucleotide
  Target: LAMA2; (+) strand; PAM type: NNNNGHTT; PAM sequence: CTGGGTTT
gattaggagataggattata

SEQ ID NO: 49478 - DNA, 20 bp, Artificial Sequence
  Description of Artificial Sequence: Synthetic oligonucleotide
  Target: LAMA2; (+) strand; PAM type: NNNNGHTT; PAM sequence: ATAAGCTT
agcaggctgttccctttaac

SEQ ID NO: 49479 - DNA, 20 bp, Artificial Sequence
  Description of Artificial Sequence: Synthetic oligonucleotide
  Target: LAMA2; (+) strand; PAM type: NNNNGHTT; PAM sequence: AACTGCTT
cattttaaaagtaattttaa

SEQ ID NO: 49480 - DNA, 20 bp, Artificial Sequence
  Description of Artificial Sequence: Synthetic oligonucleotide
  Target: LAMA2; (+) strand; PAM type: NNNNGHTT; PAM sequence: TCAAGATT
agatattctcttgtctgcct

SEQ ID NO: 49481 - DNA, 20 bp, Artificial Sequence
  Description of Artificial Sequence: Synthetic oligonucleotide
  Target: LAMA2; (+) strand; PAM type: NNNNGHTT; PAM sequence: CTGGGTTT
tgaatagatgagaaactggc

SEQ ID NO: 49482 - DNA, 20 bp, Artificial Sequence
  Description of Artificial Sequence: Synthetic oligonucleotide
  Target: LAMA2; (+) strand; PAM type: NNNNGHTT; PAM sequence: TTAGGCTT
gcactgggtgctacacctct

SEQ ID NO: 49483 - DNA, 20 bp, Artificial Sequence
  Description of Artificial Sequence: Synthetic oligonucleotide
  Target: LAMA2; (+) strand; PAM type: NNNNGHTT; PAM sequence: CTGGGATT
ggactgctccagccctacag

SEQ ID NO: 49484 - DNA, 20 bp, Artificial Sequence
  Description of Artificial Sequence: Synthetic oligonucleotide
  Target: LAMA2; (+) strand; PAM type: NNNNGHTT; PAM sequence: TAAGGATT
actaaatgagctgttaatgt

SEQ ID NO: 49485 - DNA, 20 bp, Artificial Sequence
  Description of Artificial Sequence: Synthetic oligonucleotide
  Target: LAMA2; (+) strand; PAM type: NNNNGHTT; PAM sequence: GTAAGTTT
gcacctggtgtgtagatgat

SEQ ID NO: 49486 - DNA, 20 bp, Artificial Sequence
  Description of Artificial Sequence: Synthetic oligonucleotide
  Target: LAMA2; (+) strand; PAM type: NNNNGHTT; PAM sequence: TATTGATT
tcactagttatatacccatg

SEQ ID NO: 49487 - DNA, 20 bp, Artificial Sequence
  Description of Artificial Sequence: Synthetic oligonucleotide
  Target: LAMA2; (+) strand; PAM type: NNNNGHTT; PAM sequence: ATAGGATT
ttatacatcttattttgtaa

SEQ ID NO: 49488 - DNA, 20 bp, Artificial Sequence
  Description of Artificial Sequence: Synthetic oligonucleotide
  Target: LAMA2; (+) strand; PAM type: NNNNGHTT; PAM sequence: AGATGATT
ttaagtatggtacatgagac

SEQ ID NO: 49489 - DNA, 20 bp, Artificial Sequence
  Description of Artificial Sequence: Synthetic oligonucleotide
  Target: LAMA2; (+) strand; PAM type: NNNNGHTT; PAM sequence: TTTGGTTT
atcatgaaaagaaaaaggaa

SEQ ID NO: 49490 - DNA, 20 bp, Artificial Sequence
  Description of Artificial Sequence: Synthetic oligonucleotide
  Target: LAMA2; (+) strand; PAM type: NNNNGHTT; PAM sequence: CTCTGTTT
ctacttggacaggttacttg

SEQ ID NO: 49491 - DNA, 20 bp, Artificial Sequence
  Description of Artificial Sequence: Synthetic oligonucleotide
  Target: LAMA2; (+) strand; PAM type: NNNNGHTT; PAM sequence: TTGGGTTT
tgctctgtttttgctaaatc

SEQ ID NO: 49492 - DNA, 20 bp, Artificial Sequence
  Description of Artificial Sequence: Synthetic oligonucleotide
  Target: LAMA2; (+) strand; PAM type: NNNNGHTT; PAM sequence: TAAGGATT
gggtttttacctatacatcc

SEQ ID NO: 49493 - DNA, 20 bp, Artificial Sequence
  Description of Artificial Sequence: Synthetic oligonucleotide
  Target: LAMA2; (+) strand; PAM type: NNNNGHTT; PAM sequence: GATTGATT
ttttacctatacatcctaag

SEQ ID NO: 49494 - DNA, 20 bp, Artificial Sequence
  Description of Artificial Sequence: Synthetic oligonucleotide
  Target: LAMA2; (+) strand; PAM type: NNNNGHTT; PAM sequence: TTCAGCTT
ctttacaaactgacatgcca

SEQ ID NO: 49495 - DNA, 20 bp, Artificial Sequence
  Description of Artificial Sequence: Synthetic oligonucleotide
  Target: LAMA2; (+) strand; PAM type: NNNNGHTT; PAM sequence: CATGGATT
attcagcttagttaccatca

SEQ ID NO: 49496 - DNA, 20 bp, Artificial Sequence
  Description of Artificial Sequence: Synthetic oligonucleotide
  Target: LAMA2; (+) strand; PAM type: NNNNGHTT; PAM sequence: AAAAGTTT
gattccatatagttcaagga

SEQ ID NO: 49497 - DNA, 20 bp, Artificial Sequence
  Description of Artificial Sequence: Synthetic oligonucleotide
  Target: LAMA2; (+) strand; PAM type: NNNNGHTT; PAM sequence: AACTGTTT
aaagtttataaaataactgc

SEQ ID NO: 49498 - DNA, 20 bp, Artificial Sequence
  Description of Artificial Sequence: Synthetic oligonucleotide
  Target: LAMA2; (+) strand; PAM type: NNNNGHTT; PAM sequence: ACATGCTT
aactgcaactgttttgtgac

SEQ ID NO: 49499 - DNA, 20 bp, Artificial Sequence
  Description of Artificial Sequence: Synthetic oligonucleotide
  Target: LAMA2; (+) strand; PAM type: NNNNGHTT; PAM sequence: AAATGATT
tgttttgtgacacatgctta

SEQ ID NO: 49500 - DNA, 20 bp, Artificial Sequence
  Description of Artificial Sequence: Synthetic oligonucleotide
  Target: LAMA2; (+) strand; PAM type: NNNNGHTT; PAM sequence: CACTGCTT
agtaaacttatactggtaag

SEQ ID NO: 49501 - DNA, 20 bp, Artificial Sequence
  Description of Artificial Sequence: Synthetic oligonucleotide
  Target: LAMA2; (+) strand; PAM type: NNNNGHTT; PAM sequence: TGAAGATT
gtgacctttccagtgagcat

SEQ ID NO: 49502 - DNA, 20 bp, Artificial Sequence
  Description of Artificial Sequence: Synthetic oligonucleotide
  Target: LAMA2; (+) strand; PAM type: NNNNGHTT; PAM sequence: GTGAGATT
aaatggaggacagaaagaat

SEQ ID NO: 49503 - DNA, 20 bp, Artificial Sequence
  Description of Artificial Sequence: Synthetic oligonucleotide
  Target: LAMA2; (+) strand; PAM type: NNNNGHTT; PAM sequence: TAGCGTTT
ggaatttcctttatcccagg

SEQ ID NO: 49504 - DNA, 20 bp, Artificial Sequence
  Description of Artificial Sequence: Synthetic oligonucleotide
  Target: LAMA2; (+) strand; PAM type: NNNNGHTT; PAM sequence: TTTGGTTT
ttcctttatcccaggtagcg

SEQ ID NO: 49505 - DNA, 20 bp, Artificial Sequence
  Description of Artificial Sequence: Synthetic oligonucleotide
  Target: LAMA2; (+) strand; PAM type: NNNNGHTT; PAM sequence: GACAGATT
agctatccaatctataaaat

SEQ ID NO: 49506 - DNA, 20 bp, Artificial Sequence
  Description of Artificial Sequence: Synthetic oligonucleotide
  Target: LAMA2; (+) strand; PAM type: NNNNGHTT; PAM sequence: CTCTGATT
tgagttgaagttctaaaatt

SEQ ID NO: 49507 - DNA, 20 bp, Artificial Sequence
  Description of Artificial Sequence: Synthetic oligonucleotide
  Target: LAMA2; (+) strand; PAM type: NNNNGHTT; PAM sequence: TCTGGATT
tcatgcaaccaaccttccat

SEQ ID NO: 49508 - DNA, 20 bp, Artificial Sequence
  Description of Artificial Sequence: Synthetic oligonucleotide
  Target: LAMA2; (+) strand; PAM type: NNNNGHTT; PAM sequence: ATATGATT
aatgttaaaaacctttcttc

SEQ ID NO: 49509 - DNA, 20 bp, Artificial Sequence
  Description of Artificial Sequence: Synthetic oligonucleotide
  Target: LAMA2; (+) strand; PAM type: NNNNGHTT; PAM sequence: ACATGCTT
tttgaatagtacattcaaat

SEQ ID NO: 49510 - DNA, 20 bp, Artificial Sequence
  Description of Artificial Sequence: Synthetic oligonucleotide
  Target: LAMA2; (+) strand; PAM type: NNNNGHTT; PAM sequence: AGTGGCTT
tacaaattgtcatctgcatt

SEQ ID NO: 49511 - DNA, 20 bp, Artificial Sequence
  Description of Artificial Sequence: Synthetic oligonucleotide
  Target: LAMA2; (+) strand; PAM type: NNNNGHTT; PAM sequence: GAGAGATT
attgcagtaatatcttagta

SEQ ID NO: 49512 - DNA, 20 bp, Artificial Sequence
  Description of Artificial Sequence: Synthetic oligonucleotide
  Target: LAMA2; (+) strand; PAM type: NNNNGHTT; PAM sequence: AAGTGTTT
ctctcataataatgtacctg

SEQ ID NO: 49513 - DNA, 20 bp, Artificial Sequence
  Description of Artificial Sequence: Synthetic oligonucleotide
  Target: LAMA2; (+) strand; PAM type: NNNNGHTT; PAM sequence: TCTTGATT
tacctcttatttataattca

SEQ ID NO: 49514 - DNA, 20 bp, Artificial Sequence
  Description of Artificial Sequence: Synthetic oligonucleotide
  Target: LAMA2; (+) strand; PAM type: NNNNGHTT; PAM sequence: GGCAGTTT
tcatcaaagcaagagctaag

SEQ ID NO: 49515 - DNA, 20 bp, Artificial Sequence
  Description of Artificial Sequence: Synthetic oligonucleotide
  Target: LAMA2; (+) strand; PAM type: NNNNGHTT; PAM sequence: ATATGCTT
atacatcccattccagtaac

SEQ ID NO: 49516 - DNA, 20 bp, Artificial Sequence
  Description of Artificial Sequence: Synthetic oligonucleotide
  Target: LAMA2; (+) strand; PAM type: NNNNGHTT; PAM sequence: TCATGTTT
catctacaggctattttatt

SEQ ID NO: 49517 - DNA, 20 bp, Artificial Sequence
  Description of Artificial Sequence: Synthetic oligonucleotide
  Target: LAMA2; (+) strand; PAM type: NNNNGHTT; PAM sequence: CTTTGCTT
cagttgtaaagactcttagc

SEQ ID NO: 49518 - DNA, 20 bp, Artificial Sequence
  Description of Artificial Sequence: Synthetic oligonucleotide
  Target: LAMA2; (+) strand; PAM type: NNNNGHTT; PAM sequence: GTTAGTTT
caggcctggtcattaaaaat

SEQ ID NO: 49519 - DNA, 20 bp, Artificial Sequence
  Description of Artificial Sequence: Synthetic oligonucleotide
  Target: LAMA2; (+) strand; PAM type: NNNNGHTT; PAM sequence: GCCAGATT
atttactatttgcagaaggg

SEQ ID NO: 49520 - DNA, 20 bp, Artificial Sequence
  Description of Artificial Sequence: Synthetic oligonucleotide
  Target: LAMA2; (+) strand; PAM type: NNNNGHTT; PAM sequence: ACCAGATT
acaaaggacaccatttcctc

SEQ ID NO: 49521 - DNA, 20 bp, Artificial Sequence
  Description of Artificial Sequence: Synthetic oligonucleotide
  Target: LAMA2; (+) strand; PAM type: NNNNGHTT; PAM sequence: TTGAGTTT
atttcttggtgttggagcca

SEQ ID NO: 49522 - DNA, 20 bp, Artificial Sequence
  Description of Artificial Sequence: Synthetic oligonucleotide
  Target: LAMA2; (+) strand; PAM type: NNNNGHTT; PAM sequence: CTGAGCTT
attgcccaaactgacctaaa

SEQ ID NO: 49523 - DNA, 20 bp, Artificial Sequence
  Description of Artificial Sequence: Synthetic oligonucleotide
  Target: LAMA2; (+) strand; PAM type: NNNNGHTT; PAM sequence: TCATGTTT
atttgtcaatgatctctagg

SEQ ID NO: 49524 - DNA, 20 bp, Artificial Sequence
  Description of Artificial Sequence: Synthetic oligonucleotide
  Target: LAMA2; (+) strand; PAM type: NNNNGHTT; PAM sequence: GATAGTTT
tgatctctaggtcatgtttt

SEQ ID NO: 49525 - DNA, 20 bp, Artificial Sequence
  Description of Artificial Sequence: Synthetic oligonucleotide
  Target: LAMA2; (+) strand; PAM type: NNNNGHTT; PAM sequence: TTCAGCTT
ctaggtcatgttttgatagt

SEQ ID NO: 49526 - DNA, 20 bp, Artificial Sequence
  Description of Artificial Sequence: Synthetic oligonucleotide
  Target: LAMA2; (+) strand; PAM type: NNNNGHTT; PAM sequence: AAGGGCTT
cctgtcttcccatattttaa

SEQ ID NO: 49527 - DNA, 20 bp, Artificial Sequence
  Description of Artificial Sequence: Synthetic oligonucleotide
  Target: LAMA2; (+) strand; PAM type: NNNNGHTT; PAM sequence: TTAGGCTT
tcccatattttaaaagggct

SEQ ID NO: 49528 - DNA, 20 bp, Artificial Sequence
  Description of Artificial Sequence: Synthetic oligonucleotide
  Target: LAMA2; (+) strand; PAM type: NNNNGHTT; PAM sequence: AACTGATT
ctgtcccttgtggctattaa

SEQ ID NO: 49529 - DNA, 20 bp, Artificial Sequence
  Description of Artificial Sequence: Synthetic oligonucleotide
  Target: LAMA2; (+) strand; PAM type: NNNNGHTT; PAM sequence: CTCTGTTT
gcacaccagagacccaaagt

SEQ ID NO: 49530 - DNA, 20 bp, Artificial Sequence
  Description of Artificial Sequence: Synthetic oligonucleotide
  Target: LAMA2; (+) strand; PAM type: NNNNGHTT; PAM sequence: TTTTGTTT
atgggtaagttatgttataa

SEQ ID NO: 49531 - DNA, 20 bp, Artificial Sequence
  Description of Artificial Sequence: Synthetic oligonucleotide
  Target: LAMA2; (+) strand; PAM type: NNNNGHTT; PAM sequence: TTTAGTTT
acaatcatggtatctttatt

SEQ ID NO: 49532 - DNA, 20 bp, Artificial Sequence
  Description of Artificial Sequence: Synthetic oligonucleotide
  Target: LAMA2; (+) strand; PAM type: NNNNGHTT; PAM sequence: TATTGATT
ctatttgagatagagaaacc

SEQ ID NO: 49533 - DNA, 20 bp, Artificial Sequence
  Description of Artificial Sequence: Synthetic oligonucleotide
  Target: LAMA2; (+) strand; PAM type: NNNNGHTT; PAM sequence: ACATGCTT
ttatgtatgacaattattaa

SEQ ID NO: 49534 - DNA, 20 bp, Artificial Sequence
  Description of Artificial Sequence: Synthetic oligonucleotide
  Target: LAMA2; (+) strand; PAM type: NNNNGHTT; PAM sequence: CATTGATT
ctatgaaaagcagaacctac

SEQ ID NO: 49535 - DNA, 20 bp, Artificial Sequence
  Description of Artificial Sequence: Synthetic oligonucleotide
  Target: LAMA2; (+) strand; PAM type: NNNNGHTT; PAM sequence: GAGTGCTT
agcagaacctaccattgatt

SEQ ID NO: 49536 - DNA, 20 bp, Artificial Sequence
  Description of Artificial Sequence: Synthetic oligonucleotide
  Target: LAMA2; (+) strand; PAM type: NNNNGHTT; PAM sequence: ATCTGTTT
agcaattcaaacctcaatga

SEQ ID NO: 49537 - DNA, 20 bp, Artificial Sequence
  Description of Artificial Sequence: Synthetic oligonucleotide
  Target: LAMA2; (+) strand; PAM type: NNNNGHTT; PAM sequence: TGCTGCTT
tattatattatgcagtcatg

SEQ ID NO: 49538 - DNA, 20 bp, Artificial Sequence
  Description of Artificial Sequence: Synthetic oligonucleotide
  Target: LAMA2; (+) strand; PAM type: NNNNGHTT; PAM sequence: TATAGTTT
tagcaaaggtacattaaaaa

SEQ ID NO: 49539 - DNA, 20 bp, Artificial Sequence
  Description of Artificial Sequence: Synthetic oligonucleotide
  Target: LAMA2; (+) strand; PAM type: NNNNGHTT; PAM sequence: GCCTGATT
caggaattaaactcgggtct

SEQ ID NO: 49540 - DNA, 20 bp, Artificial Sequence
  Description of Artificial Sequence: Synthetic oligonucleotide
  Target: LAMA2; (+) strand; PAM type: NNNNGHTT; PAM sequence: GAGTGTTT
ccatgcaaagatacaagata

SEQ ID NO: 49541 - DNA, 20 bp, Artificial Sequence
  Description of Artificial Sequence: Synthetic oligonucleotide
  Target: LAMA2; (+) strand; PAM type: NNNNGHTT; PAM sequence: GTCTGCTT
ggataggataggtctctaca

SEQ ID NO: 49542 - DNA, 20 bp, Artificial Sequence
  Description of Artificial Sequence: Synthetic oligonucleotide
  Target: LAMA2; (+) strand; PAM type: NNNNGHTT; PAM sequence: AAAAGTTT
agtggggaagagaactttgg

SEQ ID NO: 49543 - DNA, 20 bp, Artificial Sequence
  Description of Artificial Sequence: Synthetic oligonucleotide
  Target: LAMA2; (+) strand; PAM type: NNNNGHTT; PAM sequence: ATTTGCTT
aggagctcaggaaagtattt

SEQ ID NO: 49544 - DNA, 20 bp, Artificial Sequence
  Description of Artificial Sequence: Synthetic oligonucleotide
  Target: LAMA2; (+) strand; PAM type: NNNNGHTT; PAM sequence: AAAGGATT
aattccccattgtgttccag

SEQ ID NO: 49545 - DNA, 20 bp, Artificial Sequence
  Description of Artificial Sequence: Synthetic oligonucleotide
  Target: LAMA2; (+) strand; PAM type: NNNNGHTT; PAM sequence: TTTTGCTT
tgggactcaaaaagtaactt

SEQ ID NO: 49546 - DNA, 20 bp, Artificial Sequence
  Description of Artificial Sequence: Synthetic oligonucleotide
  Target: LAMA2; (+) strand; PAM type: NNNNGHTT; PAM sequence: TTCTGTTT
aatcaaggaaaagagagaat

SEQ ID NO: 49547 - DNA, 20 bp, Artificial Sequence
  Description of Artificial Sequence: Synthetic oligonucleotide
  Target: LAMA2; (+) strand; PAM type: NNNNGHTT; PAM sequence: GCACGTTT
ttttttttttaaaaaaaaca

SEQ ID NO: 49548 - DNA, 20 bp, Artificial Sequence
  Description of Artificial Sequence: Synthetic oligonucleotide
  Target: LAMA2; (+) strand; PAM type: NNNNGHTT; PAM sequence: TTAAGTTT
tttaaaaaaaacagcacgtt

SEQ ID NO: 49549 - DNA, 20 bp, Artificial Sequence
  Description of Artificial Sequence: Synthetic oligonucleotide
  Target: LAMA2; (+) strand; PAM type: NNNNGHTT; PAM sequence: CAAGGCTT
agacaaaactaacataaaat

SEQ ID NO: 49550 - DNA, 20 bp, Artificial Sequence
  Description of Artificial Sequence: Synthetic oligonucleotide
  Target: LAMA2; (+) strand; PAM type: NNNNGHTT; PAM sequence: TCTCGCTT
tttatttttttgagatggag

SEQ ID NO: 49551 - DNA, 20 bp, Artificial Sequence
  Description of Artificial Sequence: Synthetic oligonucleotide
  Target: LAMA2; (+) strand; PAM type: NNNNGHTT; PAM sequence: CTCAGCTT
ctggagtgcagtggccagat

SEQ ID NO: 49552 - DNA, 20 bp, Artificial Sequence
  Description of Artificial Sequence: Synthetic oligonucleotide
  Target: LAMA2; (+) strand; PAM type: NNNNGHTT; PAM sequence: CATGGTTT
ttttgtatttttagtcaaga

SEQ ID NO: 49553 - DNA, 20 bp, Artificial Sequence
  Description of Artificial Sequence: Synthetic oligonucleotide
  Target: LAMA2; (+) strand; PAM type: NNNNGHTT; PAM sequence: CTGGGATT
cacctcagcctcccaaaatg

SEQ ID NO: 49554 - DNA, 20 bp, Artificial Sequence
  Description of Artificial Sequence: Synthetic oligonucleotide
  Target: LAMA2; (+) strand; PAM type: NNNNGHTT; PAM sequence: AGGAGCTT
cacatacacaacagagaata

SEQ ID NO: 49555 - DNA, 20 bp, Artificial Sequence
  Description of Artificial Sequence: Synthetic oligonucleotide
  Target: LAMA2; (+) strand; PAM type: NNNNGHTT; PAM sequence: AAGAGTTT
attgtctgttagacttttct

SEQ ID NO: 49556 - DNA, 20 bp, Artificial Sequence
  Description of Artificial Sequence: Synthetic oligonucleotide
  Target: LAMA2; (+) strand; PAM type: NNNNGHTT; PAM sequence: GGGCGCTT
ggaccacagactcccactat

SEQ ID NO: 49557 - DNA, 20 bp, Artificial Sequence
  Description of Artificial Sequence: Synthetic oligonucleotide
  Target: LAMA2; (+) strand; PAM type: NNNNGHTT; PAM sequence: TTGTGTTT
tcgatgaggagtattacttc

SEQ ID NO: 49558 - DNA, 20 bp, Artificial Sequence
  Description of Artificial Sequence: Synthetic oligonucleotide
  Target: LAMA2; (+) strand; PAM type: NNNNGHTT; PAM sequence: CTAAGATT
ttcttgtgtttctttttctt

SEQ ID NO: 49559 - DNA, 20 bp, Artificial Sequence
  Description of Artificial Sequence: Synthetic oligonucleotide
  Target: LAMA2; (+) strand; PAM type: NNNNGHTT; PAM sequence: TTTTGTTT
ttctaagatttattttaaac

SEQ ID NO: 49560 - DNA, 20 bp, Artificial Sequence
  Description of Artificial Sequence: Synthetic oligonucleotide
  Target: LAMA2; (+) strand; PAM type: NNNNGHTT; PAM sequence: TTGAGCTT
gatttattttaaacttttgt

SEQ ID NO: 49561 - DNA, 20 bp, Artificial Sequence
  Description of Artificial Sequence: Synthetic oligonucleotide
  Target: LAMA2; (+) strand; PAM type: NNNNGHTT; PAM sequence: GTGTGATT
aggaaacttcctctcaattt

SEQ ID NO: 49562 - DNA, 20 bp, Artificial Sequence
  Description of Artificial Sequence: Synthetic oligonucleotide
  Target: LAMA2; (+) strand; PAM type: NNNNGHTT; PAM sequence: GAGAGATT
attacagtaataacttagta

SEQ ID NO: 49563 - DNA, 20 bp, Artificial Sequence
  Description of Artificial Sequence: Synthetic oligonucleotide
  Target: LAMA2; (+) strand; PAM type: NNNNGHTT; PAM sequence: TCCAGTTT
tgaaatccatgcacagaaaa

SEQ ID NO: 49564 - DNA, 20 bp, Artificial Sequence
  Description of Artificial Sequence: Synthetic oligonucleotide
  Target: LAMA2; (+) strand; PAM type: NNNNGHTT; PAM sequence: GTCAGCTT
aaatccagttttattcagtg

SEQ ID NO: 49565 - DNA, 20 bp, Artificial Sequence
  Description of Artificial Sequence: Synthetic oligonucleotide
  Target: LAMA2; (+) strand; PAM type: NNNNGHTT; PAM sequence: CTTGGTTT
tgaaccacttttaaatagat

SEQ ID NO: 49566 - DNA, 20 bp, Artificial Sequence
  Description of Artificial Sequence: Synthetic oligonucleotide
  Target: LAMA2; (+) strand; PAM type: NNNNGHTT; PAM sequence: TTATGCTT
atcttggtttatttcttcag

SEQ ID NO: 49567 - DNA, 20 bp, Artificial Sequence
  Description of Artificial Sequence: Synthetic oligonucleotide
  Target: LAMA2; (+) strand; PAM type: NNNNGHTT; PAM sequence: CCTTGCTT
ataataatggcaaaaatgaa

SEQ ID NO: 49568 - DNA, 20 bp, Artificial Sequence
  Description of Artificial Sequence: Synthetic oligonucleotide
  Target: LAMA2; (+) strand; PAM type: NNNNGHTT; PAM sequence: ATATGATT
tgtataaactttattaaatt

SEQ ID NO: 49569 - DNA, 20 bp, Artificial Sequence
  Description of Artificial Sequence: Synthetic oligonucleotide
  Target: LAMA2; (+) strand; PAM type: NNNNGHTT; PAM sequence: AATAGTTT
ataagacaaataagactcaa

SEQ ID NO: 49570 - DNA, 20 bp, Artificial Sequence
  Description of Artificial Sequence: Synthetic oligonucleotide
  Target: LAMA2; (+) strand; PAM type: NNNNGHTT; PAM sequence: CTCAGTTT
aaaatagtttgaatactatt

SEQ ID NO: 49571 - DNA, 20 bp, Artificial Sequence
  Description of Artificial Sequence: Synthetic oligonucleotide
  Target: LAMA2; (+) strand; PAM type: NNNNGHTT; PAM sequence: ATCAGCTT
tgaatactattctcagtttt

SEQ ID NO: 49572 - DNA, 20 bp, Artificial Sequence
  Description of Artificial Sequence: Synthetic oligonucleotide
  Target: LAMA2; (+) strand; PAM type: NNNNGHTT; PAM sequence: TCTTGATT
tgtgataaaagcagagagtc

SEQ ID NO: 49573 - DNA, 20 bp, Artificial Sequence
  Description of Artificial Sequence: Synthetic oligonucleotide
  Target: LAMA2; (+) strand; PAM type: NNNNGHTT; PAM sequence: AAGTGCTT
aagcagagagtctcttgatt

SEQ ID NO: 49574 - DNA, 20 bp, Artificial Sequence
  Description of Artificial Sequence: Synthetic oligonucleotide
  Target: LAMA2; (+) strand; PAM type: NNNNGHTT; PAM sequence: AGGAGCTT
tattaagctagatcttttta

SEQ ID NO: 49575 - DNA, 20 bp, Artificial Sequence
  Description of Artificial Sequence: Synthetic oligonucleotide
  Target: LAMA2; (+) strand; PAM type: NNNNGHTT; PAM sequence: TCTGGCTT
gttcttaatctgatattttt

SEQ ID NO: 49576 - DNA, 20 bp, Artificial Sequence
  Description of Artificial Sequence: Synthetic oligonucleotide
  Target: LAMA2; (+) strand; PAM type: NNNNGHTT; PAM sequence: ATAAGATT
cttttctttcatcaatgggc

SEQ ID NO: 49577 - DNA, 20 bp, Artificial Sequence
  Description of Artificial Sequence: Synthetic oligonucleotide
  Target: LAMA2; (+) strand; PAM type: NNNNGHTT; PAM sequence: ATGGGATT
tagtccccttgtaattctcc

SEQ ID NO: 49578 - DNA, 20 bp, Artificial Sequence
  Description of Artificial Sequence: Synthetic oligonucleotide
  Target: LAMA2; (+) strand; PAM type: NNNNGHTT; PAM sequence: GACGGTTT
ggactgagcctgaaacacaa

SEQ ID NO: 49579 - DNA, 20 bp, Artificial Sequence
  Description of Artificial Sequence: Synthetic oligonucleotide
  Target: LAMA2; (+) strand; PAM type: NNNNGHTT; PAM sequence: AGATGTTT
actaccttccagaaagccag

SEQ ID NO: 49580 - DNA, 20 bp, Artificial Sequence
  Description of Artificial Sequence: Synthetic oligonucleotide
  Target: LAMA2; (+) strand; PAM type: NNNNGHTT; PAM sequence: TCTTGATT
aacccaaatgaagatggaag

SEQ ID NO: 49581 - DNA, 20 bp, Artificial Sequence
  Description of Artificial Sequence: Synthetic oligonucleotide
  Target: LAMA2; (+) strand; PAM type: NNNNGHTT; PAM sequence: GTCAGCTT
gaagtcttgattttgcatat

SEQ ID NO: 49582 - DNA, 20 bp, Artificial Sequence
  Description of Artificial Sequence: Synthetic oligonucleotide
  Target: LAMA2; (+) strand; PAM type: NNNNGHTT; PAM sequence: AGAAGTTT
ttgcatatgtcagcttcact

SEQ ID NO: 49583 - DNA, 20 bp, Artificial Sequence
  Description of Artificial Sequence: Synthetic oligonucleotide
  Target: LAMA2; (+) strand; PAM type: NNNNGHTT; PAM sequence: TTCTGTTT
tgtcagcttcactagaagtt

SEQ ID NO: 49584 - DNA, 20 bp, Artificial Sequence
  Description of Artificial Sequence: Synthetic oligonucleotide
  Target: LAMA2; (+) strand; PAM type: NNNNGHTT; PAM sequence: GTTTGCTT
agcttcactagaagttttct

SEQ ID NO: 49585 - DNA, 20 bp, Artificial Sequence
  Description of Artificial Sequence: Synthetic oligonucleotide
  Target: LAMA2; (+) strand; PAM type: NNNNGHTT; PAM sequence: TTCAGATT
ctagaagttttctgtttgct

SEQ ID NO: 49586 - DNA, 20 bp, Artificial Sequence
  Description of Artificial Sequence: Synthetic oligonucleotide
  Target: LAMA2; (+) strand; PAM type: NNNNGHTT; PAM sequence: TACAGCTT
tctaatagtcgcaagacatg

SEQ ID NO: 49587 - DNA, 20 bp, Artificial Sequence
  Description of Artificial Sequence: Synthetic oligonucleotide
  Target: LAMA2; (+) strand; PAM type: NNNNGHTT; PAM sequence: TTTGGATT
acatgtacagcttttattat

SEQ ID NO: 49588 - DNA, 20 bp, Artificial Sequence
  Description of Artificial Sequence: Synthetic oligonucleotide
  Target: LAMA2; (+) strand; PAM type: NNNNGHTT; PAM sequence: TTTAGTTT
tgcatccataacacttttta

SEQ ID NO: 49589 - DNA, 20 bp, Artificial Sequence
  Description of Artificial Sequence: Synthetic oligonucleotide
  Target: LAMA2; (+) strand; PAM type: NNNNGHTT; PAM sequence: CTGTGTTT
actttttatttagttttttg

SEQ ID NO: 49590 - DNA, 20 bp, Artificial Sequence
  Description of Artificial Sequence: Synthetic oligonucleotide
  Target: LAMA2; (+) strand; PAM type: NNNNGHTT; PAM sequence: AGCAGATT
tatccatcaagcacagtaaa

SEQ ID NO: 49591 - DNA, 20 bp, Artificial Sequence
  Description of Artificial Sequence: Synthetic oligonucleotide
  Target: LAMA2; (+) strand; PAM type: NNNNGHTT; PAM sequence: TGGAGCTT
ttttcaagaaaaatactctt

SEQ ID NO: 49592 - DNA, 20 bp, Artificial Sequence
  Description of Artificial Sequence: Synthetic oligonucleotide
  Target: LAMA2; (+) strand; PAM type: NNNNGHTT; PAM sequence: AAAAGCTT
gctgaattgtatctacaaat

SEQ ID NO: 49593 - DNA, 20 bp, Artificial Sequence
  Description of Artificial Sequence: Synthetic oligonucleotide
  Target: LAMA2; (+) strand; PAM type: NNNNGHTT; PAM sequence: ATCTGATT
aaaagctttccttggttaaa

SEQ ID NO: 49594 - DNA, 20 bp, Artificial Sequence
  Description of Artificial Sequence: Synthetic oligonucleotide
  Target: LAMA2; (+) strand; PAM type: NNNNGHTT; PAM sequence: TTGCGTTT
ttaagtatcaaaatcggcac

SEQ ID NO: 49595 - DNA, 20 bp, Artificial Sequence
  Description of Artificial Sequence: Synthetic oligonucleotide
  Target: LAMA2; (+) strand; PAM type: NNNNGHTT; PAM sequence: ATTGGCTT
tttctaactttgctgtccta

SEQ ID NO: 49596 - DNA, 20 bp, Artificial Sequence
  Description of Artificial Sequence: Synthetic oligonucleotide
  Target: LAMA2; (+) strand; PAM type: NNNNGHTT; PAM sequence: GCATGCTT
ttggcttccttttctttcag

SEQ ID NO: 49597 - DNA, 20 bp, Artificial Sequence
  Description of Artificial Sequence: Synthetic oligonucleotide
  Target: LAMA2; (+) strand; PAM type: NNNNGHTT; PAM sequence: CCGGGATT
ttttctttcaggcatgcttg

SEQ ID NO: 49598 - DNA, 20 bp, Artificial Sequence
  Description of Artificial Sequence: Synthetic oligonucleotide
  Target: LAMA2; (+) strand; PAM type: NNNNGHTT; PAM sequence: CACAGATT
atgtaagggaaaaagatatt

SEQ ID NO: 49599 - DNA, 20 bp, Artificial Sequence
  Description of Artificial Sequence: Synthetic oligonucleotide
  Target: LAMA2; (+) strand; PAM type: NNNNGHTT; PAM sequence: TTCTGATT
aaaattatgtgtgccttttt

SEQ ID NO: 49600 - DNA, 20 bp, Artificial Sequence
  Description of Artificial Sequence: Synthetic oligonucleotide
  Target: LAMA2; (+) strand; PAM type: NNNNGHTT; PAM sequence: TAATGTTT
caaaatgcaacataacattt

SEQ ID NO: 49601 - DNA, 20 bp, Artificial Sequence
  Description of Artificial Sequence: Synthetic oligonucleotide
  Target: LAMA2; (+) strand; PAM type: NNNNGHTT; PAM sequence: ATGTGTTT
tatttcccaccaatttttac

SEQ ID NO: 49602 - DNA, 20 bp, Artificial Sequence
  Description of Artificial Sequence: Synthetic oligonucleotide
  Target: LAMA2; (+) strand; PAM type: NNNNGHTT; PAM sequence: ATAAGATT
atttttacatgtgtttatga

SEQ ID NO: 49603 - DNA, 20 bp, Artificial Sequence
  Description of Artificial Sequence: Synthetic oligonucleotide
  Target: LAMA2; (+) strand; PAM type: NNNNGHTT; PAM sequence: TGCAGTTT
gatttatataacaccatgga

SEQ ID NO: 49604 - DNA, 20 bp, Artificial Sequence
  Description of Artificial Sequence: Synthetic oligonucleotide
  Target: LAMA2; (+) strand; PAM type: NNNNGHTT; PAM sequence: CTTTGTTT
ttatttaaaatctttacgat

SEQ ID NO: 49605 - DNA, 20 bp, Artificial Sequence
  Description of Artificial Sequence: Synthetic oligonucleotide
  Target: LAMA2; (+) strand; PAM type: NNNNGHTT; PAM sequence: TTATGTTT
ttgaggtagctcttattttt

SEQ ID NO: 49606 - DNA, 20 bp, Artificial Sequence
  Description of Artificial Sequence: Synthetic oligonucleotide
  Target: LAMA2; (+) strand; PAM type: NNNNGHTT; PAM sequence: TTTTGTTT
ttaaggagtagccatcacct

SEQ ID NO: 49607 - DNA, 20 bp, Artificial Sequence
  Description of Artificial Sequence: Synthetic oligonucleotide
  Target: LAMA2; (+) strand; PAM type: NNNNGHTT; PAM sequence: AAGTGATT
aacctccgactcccgggttc

SEQ ID NO: 49608 - DNA, 20 bp, Artificial Sequence
  Description of Artificial Sequence: Synthetic oligonucleotide
  Target: LAMA2; (+) strand; PAM type: NNNNGHTT; PAM sequence: CGGGGTTT
ttttttatttttagtagaga

SEQ ID NO: 49609 - DNA, 20 bp, Artificial Sequence
  Description of Artificial Sequence: Synthetic oligonucleotide
  Target: LAMA2; (+) strand; PAM type: NNNNGHTT; PAM sequence: CTGGGATT
caccttggcctcccaaagtg

SEQ ID NO: 49610 - DNA, 20 bp, Artificial Sequence
  Description of Artificial Sequence: Synthetic oligonucleotide
  Target: LAMA2; (+) strand; PAM type: NNNNGHTT; PAM sequence: GCAGGTTT
ccctgagtctgaaggtgggg

SEQ ID NO: 49611 - DNA, 20 bp, Artificial Sequence
  Description of Artificial Sequence: Synthetic oligonucleotide
  Target: LAMA2; (+) strand; PAM type: NNNNGHTT; PAM sequence: GCCAGTTT
aggttttcctgctcctcgct

SEQ ID NO: 49612 - DNA, 20 bp, Artificial Sequence
  Description of Artificial Sequence: Synthetic oligonucleotide
  Target: LAMA2; (+) strand; PAM type: NNNNGHTT; PAM sequence: CGCAGCTT
gcagcaggcaaaggagcaag

SEQ ID NO: 49613 - DNA, 20 bp, Artificial Sequence
  Description of Artificial Sequence: Synthetic oligonucleotide
  Target: LAMA2; (+) strand; PAM type: NNNNGHTT; PAM sequence: ATTAGATT
cctgtcagatcagagacagc

SEQ ID NO: 49614 - DNA, 20 bp, Artificial Sequence
  Description of Artificial Sequence: Synthetic oligonucleotide
  Target: LAMA2; (+) strand; PAM type: NNNNGHTT; PAM sequence: ACAAGCTT
gactatctagttgcaggaaa

SEQ ID NO: 49615 - DNA, 20 bp, Artificial Sequence
  Description of Artificial Sequence: Synthetic oligonucleotide
  Target: LAMA2; (+) strand; PAM type: NNNNGHTT; PAM sequence: TAGGGCTT
tagttgcaggaaaacaagct

SEQ ID NO: 49616 - DNA, 20 bp, Artificial Sequence
  Description of Artificial Sequence: Synthetic oligonucleotide
  Target: LAMA2; (+) strand; PAM type: NNNNGHTT; PAM sequence: CACTGATT
gaaaacaagcttagggcttc

SEQ ID NO: 49617 - DNA, 20 bp, Artificial Sequence
  Description of Artificial Sequence: Synthetic oligonucleotide
  Target: LAMA2; (+) strand; PAM type: NNNNGHTT; PAM sequence: ACATGCTT
taaagtgcacagtaaatata

SEQ ID NO: 49618 - DNA, 20 bp, Artificial Sequence
  Description of Artificial Sequence: Synthetic oligonucleotide
  Target: LAMA2; (+) strand; PAM type: NNNNGHTT; PAM sequence: CCCAGCTT
ggagacgctgctctacagca

SEQ ID NO: 49619 - DNA, 20 bp, Artificial Sequence
  Description of Artificial Sequence: Synthetic oligonucleotide
  Target: LAMA2; (+) strand; PAM type: NNNNGHTT; PAM sequence: TCATGCTT
acagcacccagctttgactc

SEQ ID NO: 49620 - DNA, 20 bp, Artificial Sequence
  Description of Artificial Sequence: Synthetic oligonucleotide
  Target: LAMA2; (+) strand; PAM type: NNNNGHTT; PAM sequence: ATCTGCTT
cctctatgtgccccctctcc

SEQ ID NO: 49621 - DNA, 20 bp, Artificial Sequence
  Description of Artificial Sequence: Synthetic oligonucleotide
  Target: LAMA2; (+) strand; PAM type: NNNNGHTT; PAM sequence: TGCTGATT
aaataccccacatcattcct

SEQ ID NO: 49622 - DNA, 20 bp, Artificial Sequence
  Description of Artificial Sequence: Synthetic oligonucleotide
  Target: LAMA2; (+) strand; PAM type: NNNNGHTT; PAM sequence: TAGTGATT
actactcctgtcatcattct

SEQ ID NO: 49623 - DNA, 20 bp, Artificial Sequence
  Description of Artificial Sequence: Synthetic oligonucleotide
  Target: LAMA2; (+) strand; PAM type: NNNNGHTT; PAM sequence: TTCAGTTT
actcttccatactcttcact

SEQ ID NO: 49624 - DNA, 20 bp, Artificial Sequence
  Description of Artificial Sequence: Synthetic oligonucleotide
  Target: LAMA2; (+) strand; PAM type: NNNNGHTT; PAM sequence: AAGCGTTT
gcctctctggtctccatttg

SEQ ID NO: 49625 - DNA, 20 bp, Artificial Sequence
  Description of Artificial Sequence: Synthetic oligonucleotide
  Target: LAMA2; (+) strand; PAM type: NNNNGHTT; PAM sequence: TGTTGTTT
catttgaagcgtttttttgt

SEQ ID NO: 49626 - DNA, 20 bp, Artificial Sequence
  Description of Artificial Sequence: Synthetic oligonucleotide
  Target: LAMA2; (+) strand; PAM type: NNNNGHTT; PAM sequence: TTTGGTTT
gaagcgtttttttgttgttg

SEQ ID NO: 49627 - DNA, 20 bp, Artificial Sequence
  Description of Artificial Sequence: Synthetic oligonucleotide
  Target: LAMA2; (+) strand; PAM type: NNNNGHTT; PAM sequence: TTTTGTTT
tttttttgttgttgtttggt

SEQ ID NO: 49628 - DNA, 20 bp, Artificial Sequence
  Description of Artificial Sequence: Synthetic oligonucleotide
  Target: LAMA2; (+) strand; PAM type: NNNNGHTT; PAM sequence: TGTCGTTT
tttttttttttttcccactg

SEQ ID NO: 49629 - DNA, 20 bp, Artificial Sequence
  Description of Artificial Sequence: Synthetic oligonucleotide
  Target: LAMA2; (+) strand; PAM type: NNNNGHTT; PAM sequence: TCATGCTT
cttttttcttgttccttatc

SEQ ID NO: 49630 - DNA, 20 bp, Artificial Sequence
  Description of Artificial Sequence: Synthetic oligonucleotide
  Target: LAMA2; (+) strand; PAM type: NNNNGHTT; PAM sequence: ACCAGCTT
ctcatgctttcactgtagta

SEQ ID NO: 49631 - DNA, 20 bp, Artificial Sequence
  Description of Artificial Sequence: Synthetic oligonucleotide
  Target: LAMA2; (+) strand; PAM type: NNNNGHTT; PAM sequence: TACTGCTT
tcatgatctttcattggtat

SEQ ID NO: 49632 - DNA, 20 bp, Artificial Sequence
  Description of Artificial Sequence: Synthetic oligonucleotide
  Target: LAMA2; (+) strand; PAM type: NNNNGHTT; PAM sequence: CCCGGCTT
tacaggtgcccaccaccatg

SEQ ID NO: 49633 - DNA, 20 bp, Artificial Sequence
  Description of Artificial Sequence: Synthetic oligonucleotide
  Target: LAMA2; (+) strand; PAM type: NNNNGHTT; PAM sequence: CGGGGTTT
ttttgtatttttaatagaga

SEQ ID NO: 49634 - DNA, 20 bp, Artificial Sequence
  Description of Artificial Sequence: Synthetic oligonucleotide
  Target: LAMA2; (+) strand; PAM type: NNNNGHTT; PAM sequence: CCATGATT
cgatctcctgacctcatgat

SEQ ID NO: 49635 - DNA, 20 bp, Artificial Sequence
  Description of Artificial Sequence: Synthetic oligonucleotide
  Target: LAMA2; (+) strand; PAM type: NNNNGHTT; PAM sequence: AGGTGATT
tttttcttttccacattcct

SEQ ID NO: 49636 - DNA, 20 bp, Artificial Sequence
  Description of Artificial Sequence: Synthetic oligonucleotide
  Target: LAMA2; (+) strand; PAM type: NNNNGHTT; PAM sequence: TCTTGTTT
tattactttggatgaattat

SEQ ID NO: 49637 - DNA, 20 bp, Artificial Sequence
  Description of Artificial Sequence: Synthetic oligonucleotide
  Target: LAMA2; (+) strand; PAM type: NNNNGHTT; PAM sequence: TCCCGCTT
tgttctcaattctacccctc

SEQ ID NO: 49638 - DNA, 20 bp, Artificial Sequence
  Description of Artificial Sequence: Synthetic oligonucleotide
  Target: LAMA2; (+) strand; PAM type: NNNNGHTT; PAM sequence: ACTGGATT
gctatcacctcctcttctat

SEQ ID NO: 49639 - DNA, 20 bp, Artificial Sequence
  Description of Artificial Sequence: Synthetic oligonucleotide
  Target: LAMA2; (+) strand; PAM type: NNNNGHTT; PAM sequence: CCATGTTT
caccttactatatctaacag

SEQ ID NO: 49640 - DNA, 20 bp, Artificial Sequence
  Description of Artificial Sequence: Synthetic oligonucleotide
  Target: LAMA2; (+) strand; PAM type: NNNNGHTT; PAM sequence: ATTTGCTT
ttcttgaaaccctttgctca

SEQ ID NO: 49641 - DNA, 20 bp, Artificial Sequence
  Description of Artificial Sequence: Synthetic oligonucleotide
  Target: LAMA2; (+) strand; PAM type: NNNNGHTT; PAM sequence: CTCAGCTT
aaattccatagtggctcctt

SEQ ID NO: 49642 - DNA, 20 bp, Artificial Sequence
  Description of Artificial Sequence: Synthetic oligonucleotide
  Target: LAMA2; (+) strand; PAM type: NNNNGHTT; PAM sequence: ATTTGTTT
gggactcaatccttggagca

SEQ ID NO: 49643 - DNA, 20 bp, Artificial Sequence
  Description of Artificial Sequence: Synthetic oligonucleotide
  Target: LAMA2; (+) strand; PAM type: NNNNGHTT; PAM sequence: TGTGGCTT
atggtgatcttacccaggca

SEQ ID NO: 49644 - DNA, 20 bp, Artificial Sequence
  Description of Artificial Sequence: Synthetic oligonucleotide
  Target: LAMA2; (+) strand; PAM type: NNNNGHTT; PAM sequence: TTAAGTTT
acatcccacagtatttacta

SEQ ID NO: 49645 - DNA, 20 bp, Artificial Sequence
  Description of Artificial Sequence: Synthetic oligonucleotide
  Target: LAMA2; (+) strand; PAM type: NNNNGHTT; PAM sequence: TTATGATT
cacagtatttactattaagt

SEQ ID NO: 49646 - DNA, 20 bp, Artificial Sequence
  Description of Artificial Sequence: Synthetic oligonucleotide
  Target: LAMA2; (+) strand; PAM type: NNNNGHTT; PAM sequence: TACTGATT
taccactgtaaagaaacatt

SEQ ID NO: 49647 - DNA, 20 bp, Artificial Sequence
  Description of Artificial Sequence: Synthetic oligonucleotide
  Target: LAMA2; (+) strand; PAM type: NNNNGHTT; PAM sequence: ATATGTTT
tttatttcatccatattaag

SEQ ID NO: 49648 - DNA, 20 bp, Artificial Sequence
  Description of Artificial Sequence: Synthetic oligonucleotide
  Target: LAMA2; (+) strand; PAM type: NNNNGHTT; PAM sequence: TTTTGTTT
atatgtttcagtataatcca

SEQ ID NO: 49649 - DNA, 20 bp, Artificial Sequence
  Description of Artificial Sequence: Synthetic oligonucleotide
  Target: LAMA2; (+) strand; PAM type: NNNNGHTT; PAM sequence: TTCTGCTT
ttttagctcttattacaatg

SEQ ID NO: 49650 - DNA, 20 bp, Artificial Sequence
  Description of Artificial Sequence: Synthetic oligonucleotide
  Target: LAMA2; (+) strand; PAM type: NNNNGHTT; PAM sequence: TTTTGATT
tacaatcaaaattactggaa

SEQ ID NO: 49651 - DNA, 20 bp, Artificial Sequence
  Description of Artificial Sequence: Synthetic oligonucleotide
  Target: LAMA2; (+) strand; PAM type: NNNNGHTT; PAM sequence: AACTGTTT
atattttatgtcttacagta

SEQ ID NO: 49652 - DNA, 20 bp, Artificial Sequence
  Description of Artificial Sequence: Synthetic oligonucleotide
  Target: LAMA2; (+) strand; PAM type: NNNNGHTT; PAM sequence: ACCTGTTT
ttttaatggtagtaaacatt

SEQ ID NO: 49653 - DNA, 20 bp, Artificial Sequence
  Description of Artificial Sequence: Synthetic oligonucleotide
  Target: LAMA2; (+) strand; PAM type: NNNNGHTT; PAM sequence: TTTTGTTT
atggtagtaaacattacctg

SEQ ID NO: 49654 - DNA, 20 bp, Artificial Sequence
  Description of Artificial Sequence: Synthetic oligonucleotide
  Target: LAMA2; (+) strand; PAM type: NNNNGHTT; PAM sequence: AGGTGTTT
taaaccttaactattagaat

SEQ ID NO: 49655 - DNA, 20 bp, Artificial Sequence
  Description of Artificial Sequence: Synthetic oligonucleotide
  Target: LAMA2; (+) strand; PAM type: NNNNGHTT; PAM sequence: AGAAGTTT
ataacttttattttagttct

SEQ ID NO: 49656 - DNA, 20 bp, Artificial Sequence
  Description of Artificial Sequence: Synthetic oligonucleotide
  Target: LAMA2; (+) strand; PAM type: NNNNGHTT; PAM sequence: AGTTGATT
tttagttctagaagtttatc

SEQ ID NO: 49657 - DNA, 20 bp, Artificial Sequence
  Description of Artificial Sequence: Synthetic oligonucleotide
  Target: LAMA2; (+) strand; PAM type: NNNNGHTT; PAM sequence: TTAAGTTT
atcagttgattcagttattg

SEQ ID NO: 49658 - DNA, 20 bp, Artificial Sequence
  Description of Artificial Sequence: Synthetic oligonucleotide
  Target: LAMA2; (+) strand; PAM type: NNNNGHTT; PAM sequence: AAGCGATT
aacctccacctcccaggttc

SEQ ID NO: 49659 - DNA, 20 bp, Artificial Sequence
  Description of Artificial Sequence: Synthetic oligonucleotide
  Target: LAMA2; (+) strand; PAM type: NNNNGHTT; PAM sequence: CTGGGATT
tgcctcagcctcctgagtag

SEQ ID NO: 49660 - DNA, 20 bp, Artificial Sequence
  Description of Artificial Sequence: Synthetic oligonucleotide
  Target: LAMA2; (+) strand; PAM type: NNNNGHTT; PAM sequence: TGGGGTTT
tttttgcattttagtagaga

SEQ ID NO: 49661 - DNA, 20 bp, Artificial Sequence
  Description of Artificial Sequence: Synthetic oligonucleotide
  Target: LAMA2; (+) strand; PAM type: NNNNGHTT; PAM sequence: GGCTGATT
gggtttcaccattttagcca

SEQ ID NO: 49662 - DNA, 20 bp, Artificial Sequence
  Description of Artificial Sequence: Synthetic oligonucleotide
  Target: LAMA2; (+) strand; PAM type: NNNNGHTT; PAM sequence: CAGGGATT
tgcctcggcctcccaaagtt

SEQ ID NO: 49663 - DNA, 20 bp, Artificial Sequence
  Description of Artificial Sequence: Synthetic oligonucleotide
  Target: LAMA2; (+) strand; PAM type: NNNNGHTT; PAM sequence: TTGTGCTT
attatttgcaaatattataa

SEQ ID NO: 49664 - DNA, 20 bp, Artificial Sequence
  Description of Artificial Sequence: Synthetic oligonucleotide
  Target: LAMA2; (+) strand; PAM type: NNNNGHTT; PAM sequence: TCATGTTT
tatctgttataataataatt

SEQ ID NO: 49665 - DNA, 20 bp, Artificial Sequence
  Description of Artificial Sequence: Synthetic oligonucleotide
  Target: LAMA2; (+) strand; PAM type: NNNNGHTT; PAM sequence: ATAAGCTT
ttaaattgtctcccaaaata

SEQ ID NO: 49666 - DNA, 20 bp, Artificial Sequence
  Description of Artificial Sequence: Synthetic oligonucleotide
  Target: LAMA2; (+) strand; PAM type: NNNNGHTT; PAM sequence: TACTGATT
taataagctttctattttat

SEQ ID NO: 49667 - DNA, 20 bp, Artificial Sequence
  Description of Artificial Sequence: Synthetic oligonucleotide
  Target: LAMA2; (+) strand; PAM type: NNNNGHTT; PAM sequence: ATATGATT
ctattttattactgatttta

SEQ ID NO: 49668 - DNA, 20 bp, Artificial Sequence
  Description of Artificial Sequence: Synthetic oligonucleotide
  Target: LAMA2; (+) strand; PAM type: NNNNGHTT; PAM sequence: AACTGCTT
atttcttgtcatgttacgaa

SEQ ID NO: 49669 - DNA, 20 bp, Artificial Sequence
  Description of Artificial Sequence: Synthetic oligonucleotide
  Target: LAMA2; (+) strand; PAM type: NNNNGHTT; PAM sequence: CCTAGCTT
tacgaaaactgctttctatt

SEQ ID NO: 49670 - DNA, 20 bp, Artificial Sequence
  Description of Artificial Sequence: Synthetic oligonucleotide
  Target: LAMA2; (+) strand; PAM type: NNNNGHTT; PAM sequence: ATATGCTT
ataagatatttaaattactc

SEQ ID NO: 49671 - DNA, 20 bp, Artificial Sequence
  Description of Artificial Sequence: Synthetic oligonucleotide
  Target: LAMA2; (+) strand; PAM type: NNNNGHTT; PAM sequence: ATAGGTTT
catttaagaggtgatcatat

SEQ ID NO: 49672 - DNA, 20 bp, Artificial Sequence
  Description of Artificial Sequence: Synthetic oligonucleotide
  Target: LAMA2; (+) strand; PAM type: NNNNGHTT; PAM sequence: TCTTGCTT
aattccagaaataattacta

SEQ ID NO: 49673 - DNA, 20 bp, Artificial Sequence
  Description of Artificial Sequence: Synthetic oligonucleotide
  Target: LAMA2; (+) strand; PAM type: NNNNGHTT; PAM sequence: AACTGCTT
tagtatgctattttttcatc

SEQ ID NO: 49674 - DNA, 20 bp, Artificial Sequence
  Description of Artificial Sequence: Synthetic oligonucleotide
  Target: LAMA2; (+) strand; PAM type: NNNNGHTT; PAM sequence: ATTTGCTT
ggcatttttagcacagttat

SEQ ID NO: 49675 - DNA, 20 bp, Artificial Sequence
  Description of Artificial Sequence: Synthetic oligonucleotide
  Target: LAMA2; (+) strand; PAM type: NNNNGHTT; PAM sequence: ATATGATT
agcacagttatatttgcttt

SEQ ID NO: 49676 - DNA, 20 bp, Artificial Sequence
  Description of Artificial Sequence: Synthetic oligonucleotide
  Target: LAMA2; (+) strand; PAM type: NNNNGHTT; PAM sequence: TGCAGTTT
ttagaagcatttataaataa

SEQ ID NO: 49677 - DNA, 20 bp, Artificial Sequence
  Description of Artificial Sequence: Synthetic oligonucleotide
  Target: LAMA2; (+) strand; PAM type: NNNNGHTT; PAM sequence: TTAGGATT
gcagtttaatttcaattttg

SEQ ID NO: 49678 - DNA, 20 bp, Artificial Sequence
  Description of Artificial Sequence: Synthetic oligonucleotide
  Target: LAMA2; (+) strand; PAM type: NNNNGHTT; PAM sequence: TACTGATT
taagtgaggaaactgaagca

SEQ ID NO: 49679 - DNA, 20 bp, Artificial Sequence
  Description of Artificial Sequence: Synthetic oligonucleotide
  Target: LAMA2; (+) strand; PAM type: NNNNGHTT; PAM sequence: CTCAGTTT
cttttatgtgcaatatggct

SEQ ID NO: 49680 - DNA, 20 bp, Artificial Sequence
  Description of Artificial Sequence: Synthetic oligonucleotide
  Target: LAMA2; (+) strand; PAM type: NNNNGHTT; PAM sequence: CCTTGATT
tgaactctgcagtcagagtg

SEQ ID NO: 49681 - DNA, 20 bp, Artificial Sequence
  Description of Artificial Sequence: Synthetic oligonucleotide
  Target: LAMA2; (+) strand; PAM type: NNNNGHTT; PAM sequence: CCTGGCTT
cagagtgccttgattcaaat

SEQ ID NO: 49682 - DNA, 20 bp, Artificial Sequence
  Description of Artificial Sequence: Synthetic oligonucleotide
  Target: LAMA2; (+) strand; PAM type: NNNNGHTT; PAM sequence: CTTAGTTT
ttatttaacctgaatgaggt

SEQ ID NO: 49683 - DNA, 20 bp, Artificial Sequence
  Description of Artificial Sequence: Synthetic oligonucleotide
  Target: LAMA2; (+) strand; PAM type: NNNNGHTT; PAM sequence: CAGAGTTT
acaataatagtggctactca

SEQ ID NO: 49684 - DNA, 20 bp, Artificial Sequence
  Description of Artificial Sequence: Synthetic oligonucleotide
  Target: LAMA2; (+) strand; PAM type: NNNNGHTT; PAM sequence: TAAGGATT
ggctactcacagagtttttg

SEQ ID NO: 49685 - DNA, 20 bp, Artificial Sequence
  Description of Artificial Sequence: Synthetic oligonucleotide
  Target: LAMA2; (+) strand; PAM type: NNNNGHTT; PAM sequence: AAAGGCTT
atttgatgaaatactcaata

SEQ ID NO: 49686 - DNA, 20 bp, Artificial Sequence
  Description of Artificial Sequence: Synthetic oligonucleotide
  Target: LAMA2; (+) strand; PAM type: NNNNGHTT; PAM sequence: GTACGCTT
agaacattacttagtgcatg

SEQ ID NO: 49687 - DNA, 20 bp, Artificial Sequence
  Description of Artificial Sequence: Synthetic oligonucleotide
  Target: LAMA2; (+) strand; PAM type: NNNNGHTT; PAM sequence: GCTAGATT
aaattcatgtctagcgctat

SEQ ID NO: 49688 - DNA, 20 bp, Artificial Sequence
  Description of Artificial Sequence: Synthetic oligonucleotide
  Target: LAMA2; (+) strand; PAM type: NNNNGHTT; PAM sequence: GGTAGCTT
taacaaaatatcataaactg

SEQ ID NO: 49689 - DNA, 20 bp, Artificial Sequence
  Description of Artificial Sequence: Synthetic oligonucleotide
  Target: LAMA2; (+) strand; PAM type: NNNNGHTT; PAM sequence: GAAGGCTT
cagcaaagtcagtgtctggg

SEQ ID NO: 49690 - DNA, 20 bp, Artificial Sequence
  Description of Artificial Sequence: Synthetic oligonucleotide
  Target: LAMA2; (+) strand; PAM type: NNNNGHTT; PAM sequence: ACAGGATT
tattactatcacactgggag

SEQ ID NO: 49691 - DNA, 20 bp, Artificial Sequence
  Description of Artificial Sequence: Synthetic oligonucleotide
  Target: LAMA2; (+) strand; PAM type: NNNNGHTT; PAM sequence: TCTTGTTT
tggagatgggcactcactta

SEQ ID NO: 49692 - DNA, 20 bp, Artificial Sequence
  Description of Artificial Sequence: Synthetic oligonucleotide
  Target: LAMA2; (+) strand; PAM type: NNNNGHTT; PAM sequence: GAAAGCTT
gcataggaaagaaaactgta

SEQ ID NO: 49693 - DNA, 20 bp, Artificial Sequence
  Description of Artificial Sequence: Synthetic oligonucleotide
  Target: LAMA2; (+) strand; PAM type: NNNNGHTT; PAM sequence: TGTTGCTT
aatgatacttgcaagataat

SEQ ID NO: 49694 - DNA, 20 bp, Artificial Sequence
  Description of Artificial Sequence: Synthetic oligonucleotide
  Target: LAMA2; (+) strand; PAM type: NNNNGHTT; PAM sequence: GTCAGATT
aatcattgctacaccctgta

SEQ ID NO: 49695 - DNA, 20 bp, Artificial Sequence
  Description of Artificial Sequence: Synthetic oligonucleotide
  Target: LAMA2; (+) strand; PAM type: NNNNGHTT; PAM sequence: GACAGATT
acctctatcttcagtaaata

SEQ ID NO: 49696 - DNA, 20 bp, Artificial Sequence
  Description of Artificial Sequence: Synthetic oligonucleotide
  Target: LAMA2; (+) strand; PAM type: NNNNGHTT; PAM sequence: TTTTGTTT
tgtaactagaattcactatt

SEQ ID NO: 49697 - DNA, 20 bp, Artificial Sequence
  Description of Artificial Sequence: Synthetic oligonucleotide
  Target: LAMA2; (+) strand; PAM type: NNNNGHTT; PAM sequence: TAGAGATT
acctaacaaccttgccagaa

SEQ ID NO: 49698 - DNA, 20 bp, Artificial Sequence
  Description of Artificial Sequence: Synthetic oligonucleotide
  Target: LAMA2; (+) strand; PAM type: NNNNGHTT; PAM sequence: GCAGGTTT
ttgaacaaaaagtattagaa

SEQ ID NO: 49699 - DNA, 20 bp, Artificial Sequence
  Description of Artificial Sequence: Synthetic oligonucleotide
  Target: LAMA2; (+) strand; PAM type: NNNNGHTT; PAM sequence: TGCTGATT
aagagagtgtaaacactctc

SEQ ID NO: 49700 - DNA, 20 bp, Artificial Sequence
  Description of Artificial Sequence: Synthetic oligonucleotide
  Target: LAMA2; (+) strand; PAM type: NNNNGHTT; PAM sequence: ATGAGTTT
aaacactctctgctgattaa

SEQ ID NO: 49701 - DNA, 20 bp, Artificial Sequence
  Description of Artificial Sequence: Synthetic oligonucleotide
  Target: LAMA2; (+) strand; PAM type: NNNNGHTT; PAM sequence: GTTTGATT
actctctgctgattaaatga

SEQ ID NO: 49702 - DNA, 20 bp, Artificial Sequence
  Description of Artificial Sequence: Synthetic oligonucleotide
  Target: LAMA2; (+) strand; PAM type: NNNNGHTT; PAM sequence: CCAGGTTT
gtaagcaataaaacatcttt

SEQ ID NO: 49703 - DNA, 20 bp, Artificial Sequence
  Description of Artificial Sequence: Synthetic oligonucleotide
  Target: LAMA2; (+) strand; PAM type: NNNNGHTT; PAM sequence: AACTGATT
aaggaaaataaaatgtagga

SEQ ID NO: 49704 - DNA, 20 bp, Artificial Sequence
  Description of Artificial Sequence: Synthetic oligonucleotide
  Target: LAMA2; (+) strand; PAM type: NNNNGHTT; PAM sequence: TATTGCTT
catctccagtgaaacttaag

SEQ ID NO: 49705 - DNA, 20 bp, Artificial Sequence
  Description of Artificial Sequence: Synthetic oligonucleotide
  Target: LAMA2; (+) strand; PAM type: NNNNGHTT; PAM sequence: CTAGGTTT
aacacatatcaaactaagtg

SEQ ID NO: 49706 - DNA, 20 bp, Artificial Sequence
  Description of Artificial Sequence: Synthetic oligonucleotide
  Target: LAMA2; (+) strand; PAM type: NNNNGHTT; PAM sequence: CCTAGTTT
gtatatataatatctgaaaa

SEQ ID NO: 49707 - DNA, 20 bp, Artificial Sequence
  Description of Artificial Sequence: Synthetic oligonucleotide
  Target: LAMA2; (+) strand; PAM type: NNNNGHTT; PAM sequence: TCAAGTTT
ttctaaatcccagtaaaata

SEQ ID NO: 49708 - DNA, 20 bp, Artificial Sequence
  Description of Artificial Sequence: Synthetic oligonucleotide
  Target: LAMA2; (+) strand; PAM type: NNNNGHTT; PAM sequence: CAGAGATT
gaccaaaacaggtcactgta

SEQ ID NO: 49709 - DNA, 20 bp, Artificial Sequence
  Description of Artificial Sequence: Synthetic oligonucleotide
  Target: LAMA2; (+) strand; PAM type: NNNNGHTT; PAM sequence: ACAAGATT
acaataaacttatgagatag

SEQ ID NO: 49710 - DNA, 20 bp, Artificial Sequence
  Description of Artificial Sequence: Synthetic oligonucleotide
  Target: LAMA2; (+) strand; PAM type: NNNNGHTT; PAM sequence: ACTTGCTT
gatgctagagaaattaaata

SEQ ID NO: 49711 - DNA, 20 bp, Artificial Sequence
  Description of Artificial Sequence: Synthetic oligonucleotide
  Target: LAMA2; (+) strand; PAM type: NNNNGHTT; PAM sequence: CCATGTTT
taaaacagcagaggccatat

SEQ ID NO: 49712 - DNA, 20 bp, Artificial Sequence
  Description of Artificial Sequence: Synthetic oligonucleotide
  Target: LAMA2; (+) strand; PAM type: NNNNGHTT; PAM sequence: GCTGGTTT
gccatatccatgtttcaaat

SEQ ID NO: 49713 - DNA, 20 bp, Artificial Sequence
  Description of Artificial Sequence: Synthetic oligonucleotide
  Target: LAMA2; (+) strand; PAM type: NNNNGHTT; PAM sequence: GTTTGTTT
tatccatgtttcaaatgctg

SEQ ID NO: 49714 - DNA, 20 bp, Artificial Sequence
  Description of Artificial Sequence: Synthetic oligonucleotide
  Target: LAMA2; (+) strand; PAM type: NNNNGHTT; PAM sequence: AGATGTTT
aaatgctggtttgtttaaat

SEQ ID NO: 49715 - DNA, 20 bp, Artificial Sequence
  Description of Artificial Sequence: Synthetic oligonucleotide
  Target: LAMA2; (+) strand; PAM type: NNNNGHTT; PAM sequence: ACAAGATT
atttcatagtatccttgtgc

SEQ ID NO: 49716 - DNA, 20 bp, Artificial Sequence
  Description of Artificial Sequence: Synthetic oligonucleotide
  Target: LAMA2; (+) strand; PAM type: NNNNGHTT; PAM sequence: GTAAGCTT
gatatctccaatgatgaggc

SEQ ID NO: 49717 - DNA, 20 bp, Artificial Sequence
  Description of Artificial Sequence: Synthetic oligonucleotide
  Target: LAMA2; (+) strand; PAM type: NNNNGHTT; PAM sequence: AAATGCTT
gttgtgttcaaaatatctgt

SEQ ID NO: 49718 - DNA, 20 bp, Artificial Sequence
  Description of Artificial Sequence: Synthetic oligonucleotide
  Target: LAMA2; (+) strand; PAM type: NNNNGHTT; PAM sequence: ATGAGATT
tatgaattacagttaacaag

SEQ ID NO: 49719 - DNA, 20 bp, Artificial Sequence
  Description of Artificial Sequence: Synthetic oligonucleotide
  Target: LAMA2; (+) strand; PAM type: NNNNGHTT; PAM sequence: AAAAGATT
taacaagatgagattaatag

SEQ ID NO: 49720 - DNA, 20 bp, Artificial Sequence
  Description of Artificial Sequence: Synthetic oligonucleotide
  Target: LAMA2; (+) strand; PAM type: NNNNGHTT; PAM sequence: ACTTGTTT
atttgaactcaggtaagctc

SEQ ID NO: 49721 - DNA, 20 bp, Artificial Sequence
  Description of Artificial Sequence: Synthetic oligonucleotide
  Target: LAMA2; (+) strand; PAM type: NNNNGHTT; PAM sequence: TTATGTTT
attcctgtggcatctgttaa

SEQ ID NO: 49722 - DNA, 20 bp, Artificial Sequence
  Description of Artificial Sequence: Synthetic oligonucleotide
  Target: LAMA2; (+) strand; PAM type: NNNNGHTT; PAM sequence: AGGAGCTT
ctgcatgggtcttgccctct

SEQ ID NO: 49723 - DNA, 20 bp, Artificial Sequence
  Description of Artificial Sequence: Synthetic oligonucleotide
  Target: LAMA2; (+) strand; PAM type: NNNNGHTT; PAM sequence: TCTAGTTT
tgccctctaggagcttattc

SEQ ID NO: 49724 - DNA, 20 bp, Artificial Sequence
  Description of Artificial Sequence: Synthetic oligonucleotide
  Target: LAMA2; (+) strand; PAM type: NNNNGHTT; PAM sequence: ACTTGATT
catgtgaagtaagagtcctt

SEQ ID NO: 49725 - DNA, 20 bp, Artificial Sequence
  Description of Artificial Sequence: Synthetic oligonucleotide
  Target: LAMA2; (+) strand; PAM type: NNNNGHTT; PAM sequence: TGCAGATT
agtaagagtccttacttgat

SEQ ID NO: 49726 - DNA, 20 bp, Artificial Sequence
  Description of Artificial Sequence: Synthetic oligonucleotide
  Target: LAMA2; (+) strand; PAM type: NNNNGHTT; PAM sequence: GTAAGATT
tattttgaaagaaaccctga

SEQ ID NO: 49727 - DNA, 20 bp, Artificial Sequence
  Description of Artificial Sequence: Synthetic oligonucleotide
  Target: LAMA2; (+) strand; PAM type: NNNNGHTT; PAM sequence: AAATGTTT
aaaccctgagtaagattgct

SEQ ID NO: 49728 - DNA, 20 bp, Artificial Sequence
  Description of Artificial Sequence: Synthetic oligonucleotide
  Target: LAMA2; (+) strand; PAM type: NNNNGHTT; PAM sequence: TTTAGCTT
ctgagtaagattgctaaatg

SEQ ID NO: 49729 - DNA, 20 bp, Artificial Sequence
  Description of Artificial Sequence: Synthetic oligonucleotide
  Target: LAMA2; (+) strand; PAM type: NNNNGHTT; PAM sequence: CAAAGATT
gctaaatgtttagcttgaaa

SEQ ID NO: 49730 - DNA, 20 bp, Artificial Sequence
  Description of Artificial Sequence: Synthetic oligonucleotide
  Target: LAMA2; (+) strand; PAM type: NNNNGHTT; PAM sequence: CATAGCTT
agggaattagacttaatttt

SEQ ID NO: 49731 - DNA, 20 bp, Artificial Sequence
  Description of Artificial Sequence: Synthetic oligonucleotide
  Target: LAMA2; (+) strand; PAM type: NNNNGHTT; PAM sequence: CACAGCTT
ttcaccgtaaggaaaaactt

SEQ ID NO: 49732 - DNA, 20 bp, Artificial Sequence
  Description of Artificial Sequence: Synthetic oligonucleotide
  Target: LAMA2; (+) strand; PAM type: NNNNGHTT; PAM sequence: GTTAGATT
cattcctgtatggcaagaag

SEQ ID NO: 49733 - DNA, 20 bp, Artificial Sequence
  Description of Artificial Sequence: Synthetic oligonucleotide
  Target: LAMA2; (+) strand; PAM type: NNNNGHTT; PAM sequence: ATTTGATT
ataatattaatgttatagtc

SEQ ID NO: 49734 - DNA, 20 bp, Artificial Sequence
  Description of Artificial Sequence: Synthetic oligonucleotide
  Target: LAMA2; (+) strand; PAM type: NNNNGHTT; PAM sequence: AACAGTTT
ttgtagaaggaatatatacc

SEQ ID NO: 49735 - DNA, 20 bp, Artificial Sequence
  Description of Artificial Sequence: Synthetic oligonucleotide
  Target: LAMA2; (+) strand; PAM type: NNNNGHTT; PAM sequence: AAAAGTTT
atatgaaaagggtatgtcaa

SEQ ID NO: 49736 - DNA, 20 bp, Artificial Sequence
  Description of Artificial Sequence: Synthetic oligonucleotide
  Target: LAMA2; (+) strand; PAM type: NNNNGHTT; PAM sequence: TCCTGATT
aaaaagtttcaaaaagaggc

SEQ ID NO: 49737 - DNA, 20 bp, Artificial Sequence
  Description of Artificial Sequence: Synthetic oligonucleotide
  Target: LAMA2; (+) strand; PAM type: NNNNGHTT; PAM sequence: GTGTGTTT
aggctcctgatttatgtgtt

SEQ ID NO: 49738 - DNA, 20 bp, Artificial Sequence
  Description of Artificial Sequence: Synthetic oligonucleotide
  Target: LAMA2; (+) strand; PAM type: NNNNGHTT; PAM sequence: ATTTGATT
tttgtggacctaaccaggac

SEQ ID NO: 49739 - DNA, 20 bp, Artificial Sequence
  Description of Artificial Sequence: Synthetic oligonucleotide
  Target: LAMA2; (+) strand; PAM type: NNNNGHTT; PAM sequence: CCAAGTTT
aggacatttgattcaattaa

SEQ ID NO: 49740 - DNA, 20 bp, Artificial Sequence
  Description of Artificial Sequence: Synthetic oligonucleotide
  Target: LAMA2; (+) strand; PAM type: NNNNGHTT; PAM sequence: GAAAGATT
tagtatgtcagcaaccctct

SEQ ID NO: 49741 - DNA, 20 bp, Artificial Sequence
  Description of Artificial Sequence: Synthetic oligonucleotide
  Target: LAMA2; (+) strand; PAM type: NNNNGHTT; PAM sequence: AGAAGATT
agcaaccctctgaaagattg

SEQ ID NO: 49742 - DNA, 20 bp, Artificial Sequence
  Description of Artificial Sequence: Synthetic oligonucleotide
  Target: LAMA2; (+) strand; PAM type: NNNNGHTT; PAM sequence: ATTTGCTT
tgtccagagaatattacaat

SEQ ID NO: 49743 - DNA, 20 bp, Artificial Sequence
  Description of Artificial Sequence: Synthetic oligonucleotide
  Target: LAMA2; (+) strand; PAM type: NNNNGHTT; PAM sequence: TAATGATT
tttgaatctcttatttttag

SEQ ID NO: 49744 - DNA, 20 bp, Artificial Sequence
  Description of Artificial Sequence: Synthetic oligonucleotide
  Target: LAMA2; (+) strand; PAM type: NNNNGHTT; PAM sequence: ATTGGCTT
tcttatttttagtaatgatt

SEQ ID NO: 49745 - DNA, 20 bp, Artificial Sequence
  Description of Artificial Sequence: Synthetic oligonucleotide
  Target: LAMA2; (+) strand; PAM type: NNNNGHTT; PAM sequence: TAAGGATT
ttagtaatgattattggctt

SEQ ID NO: 49746 - DNA, 20 bp, Artificial Sequence
  Description of Artificial Sequence: Synthetic oligonucleotide
  Target: LAMA2; (+) strand; PAM type: NNNNGHTT; PAM sequence: TATTGCTT
taaatatggaatggctcttt

SEQ ID NO: 49747 - DNA, 20 bp, Artificial Sequence
  Description of Artificial Sequence: Synthetic oligonucleotide
  Target: LAMA2; (+) strand; PAM type: NNNNGHTT; PAM sequence: AGAGGATT
cctttggatggttgaataaa

SEQ ID NO: 49748 - DNA, 20 bp, Artificial Sequence
  Description of Artificial Sequence: Synthetic oligonucleotide
  Target: LAMA2; (+) strand; PAM type: NNNNGHTT; PAM sequence: TTGGGCTT
tctgcaatgacacttgaaat

SEQ ID NO: 49749 - DNA, 20 bp, Artificial Sequence
  Description of Artificial Sequence: Synthetic oligonucleotide
  Target: LAMA2; (+) strand; PAM type: NNNNGHTT; PAM sequence: ACCAGTTT
ttttcatctgaaaaagcctg

SEQ ID NO: 49750 - DNA, 20 bp, Artificial Sequence
  Description of Artificial Sequence: Synthetic oligonucleotide
  Target: LAMA2; (+) strand; PAM type: NNNNGHTT; PAM sequence: CCATGTTT
aaatagtcatcgaatgcctc

SEQ ID NO: 49751 - DNA, 20 bp, Artificial Sequence
  Description of Artificial Sequence: Synthetic oligonucleotide
  Target: LAMA2; (+) strand; PAM type: NNNNGHTT; PAM sequence: GCCAGTTT
gaactaaaaggagcatttaa

SEQ ID NO: 49752 - DNA, 20 bp, Artificial Sequence
  Description of Artificial Sequence: Synthetic oligonucleotide
  Target: LAMA2; (+) strand; PAM type: NNNNGHTT; PAM sequence: GAATGTTT
gccagttttaggtcatcggg

SEQ ID NO: 49753 - DNA, 20 bp, Artificial Sequence
  Description of Artificial Sequence: Synthetic oligonucleotide
  Target: LAMA2; (+) strand; PAM type: NNNNGHTT; PAM sequence: TAAGGATT
cctgatatacactgtagagc

SEQ ID NO: 49754 - DNA, 20 bp, Artificial Sequence
  Description of Artificial Sequence: Synthetic oligonucleotide
  Target: LAMA2; (+) strand; PAM type: NNNNGHTT; PAM sequence: TAATGATT
gaagctcttccttgccatgc

SEQ ID NO: 49755 - DNA, 20 bp, Artificial Sequence
  Description of Artificial Sequence: Synthetic oligonucleotide
  Target: LAMA2; (+) strand; PAM type: NNNNGHTT; PAM sequence: GTAGGCTT
gactgcatttgggagctagt

SEQ ID NO: 49756 - DNA, 20 bp, Artificial Sequence
  Description of Artificial Sequence: Synthetic oligonucleotide
  Target: LAMA2; (+) strand; PAM type: NNNNGHTT; PAM sequence: CATGGTTT
gctttcaagcaagagaaggt

SEQ ID NO: 49757 - DNA, 20 bp, Artificial Sequence
  Description of Artificial Sequence: Synthetic oligonucleotide
  Target: LAMA2; (+) strand; PAM type: NNNNGHTT; PAM sequence: CAAGGTTT
cgagaaatacaggagtatta

SEQ ID NO: 49758 - DNA, 20 bp, Artificial Sequence
  Description of Artificial Sequence: Synthetic oligonucleotide
  Target: LAMA2; (+) strand; PAM type: NNNNGHTT; PAM sequence: AGACGCTT
ttgttgtcatttcaaattta

SEQ ID NO: 49759 - DNA, 20 bp, Artificial Sequence
  Description of Artificial Sequence: Synthetic oligonucleotide
  Target: LAMA2; (+) strand; PAM type: NNNNGHTT; PAM sequence: CAGAGTTT
caggctgaatacataaaata

SEQ ID NO: 49760 - DNA, 20 bp, Artificial Sequence
  Description of Artificial Sequence: Synthetic oligonucleotide
  Target: LAMA2; (+) strand; PAM type: NNNNGHTT; PAM sequence: ACTGGCTT
cagaagtaggagaaacatca

SEQ ID NO: 49761 - DNA, 20 bp, Artificial Sequence
  Description of Artificial Sequence: Synthetic oligonucleotide
  Target: LAMA2; (+) strand; PAM type: NNNNGHTT; PAM sequence: AATCGCTT
tcaggaggctgaggcaggag

SEQ ID NO: 49762 - DNA, 20 bp, Artificial Sequence
  Description of Artificial Sequence: Synthetic oligonucleotide
  Target: LAMA2; (+) strand; PAM type: NNNNGHTT; PAM sequence: TGATGATT
gaaaacctacatatgaggcc

SEQ ID NO: 49763 - DNA, 20 bp, Artificial Sequence
  Description of Artificial Sequence: Synthetic oligonucleotide
  Target: LAMA2; (+) strand; PAM type: NNNNGHTT; PAM sequence: GTAAGTTT
acatatgaggcctgatgatt

SEQ ID NO: 49764 - DNA, 20 bp, Artificial Sequence
  Description of Artificial Sequence: Synthetic oligonucleotide
  Target: LAMA2; (+) strand; PAM type: NNNNGHTT; PAM sequence: TTTTGCTT
tgaggcctgatgattgtaag

SEQ ID NO: 49765 - DNA, 20 bp, Artificial Sequence
  Description of Artificial Sequence: Synthetic oligonucleotide
  Target: LAMA2; (+) strand; PAM type: NNNNGHTT; PAM sequence: TTATGTTT
tcttatgggtcatcctggta

SEQ ID NO: 49766 - DNA, 20 bp, Artificial Sequence
  Description of Artificial Sequence: Synthetic oligonucleotide
  Target: LAMA2; (+) strand; PAM type: NNNNGHTT; PAM sequence: GCCTGTTT
gtttaatggtgaaaccagaa

SEQ ID NO: 49767 - DNA, 20 bp, Artificial Sequence
  Description of Artificial Sequence: Synthetic oligonucleotide
  Target: LAMA2; (+) strand; PAM type: NNNNGHTT; PAM sequence: AAAAGCTT
aatgtaaacaatgtcttttt

SEQ ID NO: 49768 - DNA, 20 bp, Artificial Sequence
  Description of Artificial Sequence: Synthetic oligonucleotide
  Target: LAMA2; (+) strand; PAM type: NNNNGHTT; PAM sequence: CACAGATT
tgtcaagcaatttgagacct

SEQ ID NO: 49769 - DNA, 20 bp, Artificial Sequence
  Description of Artificial Sequence: Synthetic oligonucleotide
  Target: LAMA2; (+) strand; PAM type: NNNNGHTT; PAM sequence: AAAGGCTT
gattttttttttaagacagg

SEQ ID NO: 49770 - DNA, 20 bp, Artificial Sequence
  Description of Artificial Sequence: Synthetic oligonucleotide
  Target: LAMA2; (+) strand; PAM type: NNNNGHTT; PAM sequence: AGTAGCTT
ggaaaccaatttaggagtgg

SEQ ID NO: 49771 - DNA, 20 bp, Artificial Sequence
  Description of Artificial Sequence: Synthetic oligonucleotide
  Target: LAMA2; (+) strand; PAM type: NNNNGHTT; PAM sequence: AATTGTTT
aataatgtggcaatatactg

SEQ ID NO: 49772 - DNA, 20 bp, Artificial Sequence
  Description of Artificial Sequence: Synthetic oligonucleotide
  Target: LAMA2; (+) strand; PAM type: NNNNGHTT; PAM sequence: TAGAGCTT
aaccaagggagcatccaaat

SEQ ID NO: 49773 - DNA, 20 bp, Artificial Sequence
  Description of Artificial Sequence: Synthetic oligonucleotide
  Target: LAMA2; (+) strand; PAM type: NNNNGHTT; PAM sequence: AGAAGATT
gtagggtaaggtgtagaagt

SEQ ID NO: 49774 - DNA, 20 bp, Artificial Sequence
  Description of Artificial Sequence: Synthetic oligonucleotide
  Target: LAMA2; (+) strand; PAM type: NNNNGHTT; PAM sequence: TTGAGATT
aaggtgtagaagtagaagat

SEQ ID NO: 49775 - DNA, 20 bp, Artificial Sequence
  Description of Artificial Sequence: Synthetic oligonucleotide
  Target: LAMA2; (+) strand; PAM type: NNNNGHTT; PAM sequence: ACCAGATT
gtaccttgtcatattggaaa

SEQ ID NO: 49776 - DNA, 20 bp, Artificial Sequence
  Description of Artificial Sequence: Synthetic oligonucleotide
  Target: LAMA2; (+) strand; PAM type: NNNNGHTT; PAM sequence: CATAGTTT
aaaattcactgtggcaatgt

SEQ ID NO: 49777 - DNA, 20 bp, Artificial Sequence
  Description of Artificial Sequence: Synthetic oligonucleotide
  Target: LAMA2; (+) strand; PAM type: NNNNGHTT; PAM sequence: AGAAGTTT
aactctcaaaaagagttaat

SEQ ID NO: 49778 - DNA, 20 bp, Artificial Sequence
  Description of Artificial Sequence: Synthetic oligonucleotide
  Target: LAMA2; (+) strand; PAM type: NNNNGHTT; PAM sequence: TATTGTTT
gtggtggaaatgacgtcagc

SEQ ID NO: 49779 - DNA, 20 bp, Artificial Sequence
  Description of Artificial Sequence: Synthetic oligonucleotide
  Target: LAMA2; (+) strand; PAM type: NNNNGHTT; PAM sequence: TCTTGATT
atgaaacataaatacattct

SEQ ID NO: 49780 - DNA, 20 bp, Artificial Sequence
  Description of Artificial Sequence: Synthetic oligonucleotide
  Target: LAMA2; (+) strand; PAM type: NNNNGHTT; PAM sequence: GGCGGCTT
atatcatccaagttcaagct

SEQ ID NO: 49781 - DNA, 20 bp, Artificial Sequence
  Description of Artificial Sequence: Synthetic oligonucleotide
  Target: LAMA2; (+) strand; PAM type: NNNNGHTT; PAM sequence: CTGAGATT
tggcggcttcgtggctccag

SEQ ID NO: 49782 - DNA, 20 bp, Artificial Sequence
  Description of Artificial Sequence: Synthetic oligonucleotide
  Target: LAMA2; (+) strand; PAM type: NNNNGHTT; PAM sequence: TCTAGTTT
tcaattcactaacatgtcca

SEQ ID NO: 49783 - DNA, 20 bp, Artificial Sequence
  Description of Artificial Sequence: Synthetic oligonucleotide
  Target: LAMA2; (+) strand; PAM type: NNNNGHTT; PAM sequence: TTTTGTTT
atctagtttgtaactgactt

SEQ ID NO: 49784 - DNA, 20 bp, Artificial Sequence
  Description of Artificial Sequence: Synthetic oligonucleotide
  Target: LAMA2; (+) strand; PAM type: NNNNGHTT; PAM sequence: TATTGTTT
tttctcaacttttctttcga

SEQ ID NO: 49785 - DNA, 20 bp, Artificial Sequence
  Description of Artificial Sequence: Synthetic oligonucleotide
  Target: LAMA2; (+) strand; PAM type: NNNNGHTT; PAM sequence: CCATGTTT
tcaatgttgcattcttgctg

SEQ ID NO: 49786 - DNA, 20 bp, Artificial Sequence
  Description of Artificial Sequence: Synthetic oligonucleotide
  Target: LAMA2; (+) strand; PAM type: NNNNGHTT; PAM sequence: GGTGGTTT
gccatgtttattttttgtca

SEQ ID NO: 49787 - DNA, 20 bp, Artificial Sequence
  Description of Artificial Sequence: Synthetic oligonucleotide
  Target: LAMA2; (+) strand; PAM type: NNNNGHTT; PAM sequence: GCCTGTTT
aggtaggatgttctttcatt

SEQ ID NO: 49788 - DNA, 20 bp, Artificial Sequence
  Description of Artificial Sequence: Synthetic oligonucleotide
  Target: LAMA2; (+) strand; PAM type: NNNNGHTT; PAM sequence: AATTGATT
ttcctaactccttattgcat

SEQ ID NO: 49789 - DNA, 20 bp, Artificial Sequence
  Description of Artificial Sequence: Synthetic oligonucleotide
  Target: LAMA2; (+) strand; PAM type: NNNNGHTT; PAM sequence: TTCTGCTT
gattattgtgttaaatataa

SEQ ID NO: 49790 - DNA, 20 bp, Artificial Sequence
  Description of Artificial Sequence: Synthetic oligonucleotide
  Target: LAMA2; (+) strand; PAM type: NNNNGHTT; PAM sequence: CTGAGATT
ataagaaagaagatatcgat

SEQ ID NO: 49791 - DNA, 20 bp, Artificial Sequence
  Description of Artificial Sequence: Synthetic oligonucleotide
  Target: LAMA2; (+) strand; PAM type: NNNNGHTT; PAM sequence: GCTAGTTT
gaagatatcgatctgagatt

SEQ ID NO: 49792 - DNA, 20 bp, Artificial Sequence
  Description of Artificial Sequence: Synthetic oligonucleotide
  Target: LAMA2; (+) strand; PAM type: NNNNGHTT; PAM sequence: TTTAGATT
atcgatctgagattgctagt

SEQ ID NO: 49793 - DNA, 20 bp, Artificial Sequence
  Description of Artificial Sequence: Synthetic oligonucleotide
  Target: LAMA2; (+) strand; PAM type: NNNNGHTT; PAM sequence: CTATGCTT
ttatgaagaaccacctacat

SEQ ID NO: 49794 - DNA, 20 bp, Artificial Sequence
  Description of Artificial Sequence: Synthetic oligonucleotide
  Target: LAMA2; (+) strand; PAM type: NNNNGHTT; PAM sequence: GGTGGTTT
atctatgctttccaccttga

SEQ ID NO: 49795 - DNA, 20 bp, Artificial Sequence
  Description of Artificial Sequence: Synthetic oligonucleotide
  Target: LAMA2; (+) strand; PAM type: NNNNGHTT; PAM sequence: TAGAGATT
gagtaggagaaaaatttaca

SEQ ID NO: 49796 - DNA, 20 bp, Artificial Sequence
  Description of Artificial Sequence: Synthetic oligonucleotide
  Target: LAMA2; (+) strand; PAM type: NNNNGHTT; PAM sequence: GATTGATT
aggagaaaaatttacataga

SEQ ID NO: 49797 - DNA, 20 bp, Artificial Sequence
  Description of Artificial Sequence: Synthetic oligonucleotide
  Target: LAMA2; (+) strand; PAM type: NNNNGHTT; PAM sequence: ATTAGTTT
tgtagctacgatagcacagt

SEQ ID NO: 49798 - DNA, 20 bp, Artificial Sequence
  Description of Artificial Sequence: Synthetic oligonucleotide
  Target: LAMA2; (+) strand; PAM type: NNNNGHTT; PAM sequence: AAGGGATT
ttggatactatggaattgtc

SEQ ID NO: 49799 - DNA, 20 bp, Artificial Sequence
  Description of Artificial Sequence: Synthetic oligonucleotide
  Target: LAMA2; (+) strand; PAM type: NNNNGHTT; PAM sequence: CTCTGATT
ctgtcagcaatgtgcctgcc

SEQ ID NO: 49800 - DNA, 20 bp, Artificial Sequence
  Description of Artificial Sequence: Synthetic oligonucleotide
  Target: LAMA2; (+) strand; PAM type: NNNNGHTT; PAM sequence: GTAAGATT
ctgatttcttccagtaacaa

SEQ ID NO: 49801 - DNA, 20 bp, Artificial Sequence
  Description of Artificial Sequence: Synthetic oligonucleotide
  Target: LAMA2; (+) strand; PAM type: NNNNGHTT; PAM sequence: CTATGATT
ctgtctagcacatgggctgt

SEQ ID NO: 49802 - DNA, 20 bp, Artificial Sequence
  Description of Artificial Sequence: Synthetic oligonucleotide
  Target: LAMA2; (+) strand; PAM type: NNNNGHTT; PAM sequence: CATGGTTT
gatatatatatacaaatatg

SEQ ID NO: 49803 - DNA, 20 bp, Artificial Sequence
  Description of Artificial Sequence: Synthetic oligonucleotide
  Target: LAMA2; (+) strand; PAM type: NNNNGHTT; PAM sequence: TAATGCTT
gtttcataaatataccagtc

SEQ ID NO: 49804 - DNA, 20 bp, Artificial Sequence
  Description of Artificial Sequence: Synthetic oligonucleotide
  Target: LAMA2; (+) strand; PAM type: NNNNGHTT; PAM sequence: GAAGGATT
ctgcccataatatcatctat

SEQ ID NO: 49805 - DNA, 20 bp, Artificial Sequence
  Description of Artificial Sequence: Synthetic oligonucleotide
  Target: LAMA2; (+) strand; PAM type: NNNNGHTT; PAM sequence: GGCTGTTT
gcatattatataatttttgt

SEQ ID NO: 49806 - DNA, 20 bp, Artificial Sequence
  Description of Artificial Sequence: Synthetic oligonucleotide
  Target: LAMA2; (+) strand; PAM type: NNNNGHTT; PAM sequence: ATGTGTTT
tggctgtttccatttatttt

SEQ ID NO: 49807 - DNA, 20 bp, Artificial Sequence
  Description of Artificial Sequence: Synthetic oligonucleotide
  Target: LAMA2; (+) strand; PAM type: NNNNGHTT; PAM sequence: TCAAGATT
atttattttatgtgtttaat

SEQ ID NO: 49808 - DNA, 20 bp, Artificial Sequence
  Description of Artificial Sequence: Synthetic oligonucleotide
  Target: LAMA2; (+) strand; PAM type: NNNNGHTT; PAM sequence: CTGAGCTT
ctcctttttcttaagatggt

SEQ ID NO: 49809 - DNA, 20 bp, Artificial Sequence
  Description of Artificial Sequence: Synthetic oligonucleotide
  Target: LAMA2; (+) strand; PAM type: NNNNGHTT; PAM sequence: ACTGGTTT
gtgctgtctgaacattctgc

SEQ ID NO: 49810 - DNA, 20 bp, Artificial Sequence
  Description of Artificial Sequence: Synthetic oligonucleotide
  Target: LAMA2; (+) strand; PAM type: NNNNGHTT; PAM sequence: AGGTGTTT
tatacattgatgaaaaccct

SEQ ID NO: 49811 - DNA, 20 bp, Artificial Sequence
  Description of Artificial Sequence: Synthetic oligonucleotide
  Target: LAMA2; (+) strand; PAM type: NNNNGHTT; PAM sequence: AAGTGATT
cactacctgcactttctgtt

SEQ ID NO: 49812 - DNA, 20 bp, Artificial Sequence
  Description of Artificial Sequence: Synthetic oligonucleotide
  Target: LAMA2; (+) strand; PAM type: NNNNGHTT; PAM sequence: GGTAGTTT
tatagacttcagtaaggcag

SEQ ID NO: 49813 - DNA, 20 bp, Artificial Sequence
  Description of Artificial Sequence: Synthetic oligonucleotide
  Target: LAMA2; (+) strand; PAM type: NNNNGHTT; PAM sequence: ATTTGCTT
agggtagttttactctaaga

SEQ ID NO: 49814 - DNA, 20 bp, Artificial Sequence
  Description of Artificial Sequence: Synthetic oligonucleotide
  Target: LAMA2; (+) strand; PAM type: NNNNGHTT; PAM sequence: GGCAGTTT
tgcttttgaaaataatgtat

SEQ ID NO: 49815 - DNA, 20 bp, Artificial Sequence
  Description of Artificial Sequence: Synthetic oligonucleotide
  Target: LAMA2; (+) strand; PAM type: NNNNGHTT; PAM sequence: TTCGGCTT
tactcactttcttcttaatc

SEQ ID NO: 49816 - DNA, 20 bp, Artificial Sequence
  Description of Artificial Sequence: Synthetic oligonucleotide
  Target: LAMA2; (+) strand; PAM type: NNNNGHTT; PAM sequence: CCCCGATT
tccctaatttctccttgatg

SEQ ID NO: 49817 - DNA, 20 bp, Artificial Sequence
  Description of Artificial Sequence: Synthetic oligonucleotide
  Target: LAMA2; (+) strand; PAM type: NNNNGHTT; PAM sequence: AATTGTTT
cttgatgccccgatttattt

SEQ ID NO: 49818 - DNA, 20 bp, Artificial Sequence
  Description of Artificial Sequence: Synthetic oligonucleotide
  Target: LAMA2; (+) strand; PAM type: NNNNGHTT; PAM sequence: TTTGGATT
ttgttttaaaaagtaagcca

SEQ ID NO: 49819 - DNA, 20 bp, Artificial Sequence
  Description of Artificial Sequence: Synthetic oligonucleotide
  Target: LAMA2; (+) strand; PAM type: NNNNGHTT; PAM sequence: GGAAGCTT
aaaacaccacacttaatact

SEQ ID NO: 49820 - DNA, 20 bp, Artificial Sequence
  Description of Artificial Sequence: Synthetic oligonucleotide
  Target: LAMA2; (+) strand; PAM type: NNNNGHTT; PAM sequence: TCAGGATT
tgggtcttaaacaattaatt

SEQ ID NO: 49821 - DNA, 20 bp, Artificial Sequence
  Description of Artificial Sequence: Synthetic oligonucleotide
  Target: LAMA2; (+) strand; PAM type: NNNNGHTT; PAM sequence: AAATGCTT
tagtaggaaattatatgggc

SEQ ID NO: 49822 - DNA, 20 bp, Artificial Sequence
  Description of Artificial Sequence: Synthetic oligonucleotide
  Target: LAMA2; (+) strand; PAM type: NNNNGHTT; PAM sequence: ACAAGTTT
ctatgtaataaggaaacact

SEQ ID NO: 49823 - DNA, 20 bp, Artificial Sequence
  Description of Artificial Sequence: Synthetic oligonucleotide
  Target: LAMA2; (+) strand; PAM type: NNNNGHTT; PAM sequence: ATATGATT
ttattttgaaaaaaaggtta

SEQ ID NO: 49824 - DNA, 20 bp, Artificial Sequence
  Description of Artificial Sequence: Synthetic oligonucleotide
  Target: LAMA2; (+) strand; PAM type: NNNNGHTT; PAM sequence: AATGGTTT
caaaggaatgaatgtgagaa

SEQ ID NO: 49825 - DNA, 20 bp, Artificial Sequence
  Description of Artificial Sequence: Synthetic oligonucleotide
  Target: LAMA2; (+) strand; PAM type: NNNNGHTT; PAM sequence: TACAGCTT
aatgtgagaaaatggtttaa

SEQ ID NO: 49826 - DNA, 20 bp, Artificial Sequence
  Description of Artificial Sequence: Synthetic oligonucleotide
  Target: LAMA2; (+) strand; PAM type: NNNNGHTT; PAM sequence: TACAGATT
aaaatggtttaatacagctt

SEQ ID NO: 49827 - DNA, 20 bp, Artificial Sequence
  Description of Artificial Sequence: Synthetic oligonucleotide
  Target: LAMA2; (+) strand; PAM type: NNNNGHTT; PAM sequence: ACAGGTTT
ggtccgggcagaagttgaag

SEQ ID NO: 49828 - DNA, 20 bp, Artificial Sequence
  Description of Artificial Sequence: Synthetic oligonucleotide
  Target: LAMA2; (+) strand; PAM type: NNNNGHTT; PAM sequence: TTATGTTT
cgttagagaagaaagataat

SEQ ID NO: 49829 - DNA, 20 bp, Artificial Sequence
  Description of Artificial Sequence: Synthetic oligonucleotide
  Target: LAMA2; (+) strand; PAM type: NNNNGHTT; PAM sequence: TTCAGATT
taatttatgtttcaaatagg

SEQ ID NO: 49830 - DNA, 20 bp, Artificial Sequence
  Description of Artificial Sequence: Synthetic oligonucleotide
  Target: LAMA2; (+) strand; PAM type: NNNNGHTT; PAM sequence: ATAAGATT
aataagtgaattaaagttgg

SEQ ID NO: 49831 - DNA, 20 bp, Artificial Sequence
  Description of Artificial Sequence: Synthetic oligonucleotide
  Target: LAMA2; (+) strand; PAM type: NNNNGHTT; PAM sequence: ATGGGCTT
tattgtaattgagcaaataa

SEQ ID NO: 49832 - DNA, 20 bp, Artificial Sequence
  Description of Artificial Sequence: Synthetic oligonucleotide
  Target: LAMA2; (+) strand; PAM type: NNNNGHTT; PAM sequence: ACTGGCTT
tagaagccaataacgttggc

SEQ ID NO: 49833 - DNA, 20 bp, Artificial Sequence
  Description of Artificial Sequence: Synthetic oligonucleotide
  Target: LAMA2; (+) strand; PAM type: NNNNGHTT; PAM sequence: AAAGGCTT
gcactggcttcggagaaaag

SEQ ID NO: 49834 - DNA, 20 bp, Artificial Sequence
  Description of Artificial Sequence: Synthetic oligonucleotide
  Target: LAMA2; (+) strand; PAM type: NNNNGHTT; PAM sequence: AAAGGATT
aaggggtcagaaggcaaggc

SEQ ID NO: 49835 - DNA, 20 bp, Artificial Sequence
  Description of Artificial Sequence: Synthetic oligonucleotide
  Target: LAMA2; (+) strand; PAM type: NNNNGHTT; PAM sequence: GCTGGCTT
aaggcaaaggatttagaaat

SEQ ID NO: 49836 - DNA, 20 bp, Artificial Sequence
  Description of Artificial Sequence: Synthetic oligonucleotide
  Target: LAMA2; (+) strand; PAM type: NNNNGHTT; PAM sequence: GTCTGATT
agaaatgctggcttggcaga

SEQ ID NO: 49837 - DNA, 20 bp, Artificial Sequence
  Description of Artificial Sequence: Synthetic oligonucleotide
  Target: LAMA2; (+) strand; PAM type: NNNNGHTT; PAM sequence: GAGGGCTT
ggcttggcagagtctgattg

SEQ ID NO: 49838 - DNA, 20 bp, Artificial Sequence
  Description of Artificial Sequence: Synthetic oligonucleotide
  Target: LAMA2; (+) strand; PAM type: NNNNGHTT; PAM sequence: GGCAGATT
cttacagtaaggtatattga

SEQ ID NO: 49839 - DNA, 20 bp, Artificial Sequence
  Description of Artificial Sequence: Synthetic oligonucleotide
  Target: LAMA2; (+) strand; PAM type: NNNNGHTT; PAM sequence: CCAGGTTT
ttctgaaggagttccaatgt

SEQ ID NO: 49840 - DNA, 20 bp, Artificial Sequence
  Description of Artificial Sequence: Synthetic oligonucleotide
  Target: LAMA2; (+) strand; PAM type: NNNNGHTT; PAM sequence: TTTTGATT
aaggagttccaatgtccagg

SEQ ID NO: 49841 - DNA, 20 bp, Artificial Sequence
  Description of Artificial Sequence: Synthetic oligonucleotide
  Target: LAMA2; (+) strand; PAM type: NNNNGHTT; PAM sequence: TGCAGCTT
catgcctgggctacatgact

SEQ ID NO: 49842 - DNA, 20 bp, Artificial Sequence
  Description of Artificial Sequence: Synthetic oligonucleotide
  Target: LAMA2; (+) strand; PAM type: NNNNGHTT; PAM sequence: CCCGGTTT
tttgttatcaacagggtagg

SEQ ID NO: 49843 - DNA, 20 bp, Artificial Sequence
  Description of Artificial Sequence: Synthetic oligonucleotide
  Target: LAMA2; (+) strand; PAM type: NNNNGHTT; PAM sequence: TACAGTTT
atgaaagcagaatttgaatt

SEQ ID NO: 49844 - DNA, 20 bp, Artificial Sequence
  Description of Artificial Sequence: Synthetic oligonucleotide
  Target: LAMA2; (+) strand; PAM type: NNNNGHTT; PAM sequence: CCCTGATT
aataaaatgatagaatacta

SEQ ID NO: 49845 - DNA, 20 bp, Artificial Sequence
  Description of Artificial Sequence: Synthetic oligonucleotide
  Target: LAMA2; (+) strand; PAM type: NNNNGHTT; PAM sequence: GTGTGTTT
ttagcaggatcaataacagg

SEQ ID NO: 49846 - DNA, 20 bp, Artificial Sequence
  Description of Artificial Sequence: Synthetic oligonucleotide
  Target: LAMA2; (+) strand; PAM type: NNNNGHTT; PAM sequence: TTTTGTTT
ataacagggtgtgttttcat

SEQ ID NO: 49847 - DNA, 20 bp, Artificial Sequence
  Description of Artificial Sequence: Synthetic oligonucleotide
  Target: LAMA2; (+) strand; PAM type: NNNNGHTT; PAM sequence: TGTTGTTT
tgttttcatttttgtttcat

SEQ ID NO: 49848 - DNA, 20 bp, Artificial Sequence
  Description of Artificial Sequence: Synthetic oligonucleotide
  Target: LAMA2; (+) strand; PAM type: NNNNGHTT; PAM sequence: ATATGATT
ttttgtttcattgttgtttt

SEQ ID NO: 49849 - DNA, 20 bp, Artificial Sequence
  Description of Artificial Sequence: Synthetic oligonucleotide
  Target: LAMA2; (+) strand; PAM type: NNNNGHTT; PAM sequence: AGTGGCTT
caaattaaaatggcaagttc

SEQ ID NO: 49850 - DNA, 20 bp, Artificial Sequence
  Description of Artificial Sequence: Synthetic oligonucleotide
  Target: LAMA2; (+) strand; PAM type: NNNNGHTT; PAM sequence: TATTGATT
gttcagtggctttcaaactt

SEQ ID NO: 49851 - DNA, 20 bp, Artificial Sequence
  Description of Artificial Sequence: Synthetic oligonucleotide
  Target: LAMA2; (+) strand; PAM type: NNNNGHTT; PAM sequence: AATGGATT
attttagccaaaacctactc

SEQ ID NO: 49852 - DNA, 20 bp, Artificial Sequence
  Description of Artificial Sequence: Synthetic oligonucleotide
  Target: LAMA2; (+) strand; PAM type: NNNNGHTT; PAM sequence: TAAAGCTT
gagtcacttatatcaccatc

SEQ ID NO: 49853 - DNA, 20 bp, Artificial Sequence
  Description of Artificial Sequence: Synthetic oligonucleotide
  Target: LAMA2; (+) strand; PAM type: NNNNGHTT; PAM sequence: AACAGATT
acttctccccaagacataaa

SEQ ID NO: 49854 - DNA, 20 bp, Artificial Sequence
  Description of Artificial Sequence: Synthetic oligonucleotide
  Target: LAMA2; (+) strand; PAM type: NNNNGHTT; PAM sequence: GAGTGATT
gagaaatatggaggcatgat

SEQ ID NO: 49855 - DNA, 20 bp, Artificial Sequence
  Description of Artificial Sequence: Synthetic oligonucleotide
  Target: LAMA2; (+) strand; PAM type: NNNNGHTT; PAM sequence: AGAAGTTT
ggcagtgctcacacaccctt

SEQ ID NO: 49856 - DNA, 20 bp, Artificial Sequence
  Description of Artificial Sequence: Synthetic oligonucleotide
  Target: LAMA2; (+) strand; PAM type: NNNNGHTT; PAM sequence: CCAAGTTT
caactccattctatataatg

SEQ ID NO: 49857 - DNA, 20 bp, Artificial Sequence
  Description of Artificial Sequence: Synthetic oligonucleotide
  Target: LAMA2; (+) strand; PAM type: NNNNGHTT; PAM sequence: CTGTGTTT
atataagtgaacaaaacggc

SEQ ID NO: 49858 - DNA, 20 bp, Artificial Sequence
  Description of Artificial Sequence: Synthetic oligonucleotide
  Target: LAMA2; (+) strand; PAM type: NNNNGHTT; PAM sequence: TGGAGCTT
gcctgtgtttcctagccttc

SEQ ID NO: 49859 - DNA, 20 bp, Artificial Sequence
  Description of Artificial Sequence: Synthetic oligonucleotide
  Target: LAMA2; (+) strand; PAM type: NNNNGHTT; PAM sequence: GTATGATT
aggaacttagagtgatgaag

SEQ ID NO: 49860 - DNA, 20 bp, Artificial Sequence
  Description of Artificial Sequence: Synthetic oligonucleotide
  Target: LAMA2; (+) strand; PAM type: NNNNGHTT; PAM sequence: CCATGCTT
gcactggccctgagacagac

SEQ ID NO: 49861 - DNA, 20 bp, Artificial Sequence
  Description of Artificial Sequence: Synthetic oligonucleotide
  Target: LAMA2; (+) strand; PAM type: NNNNGHTT; PAM sequence: GGTGGCTT
aaaatcttccagtggcaaga

SEQ ID NO: 49862 - DNA, 20 bp, Artificial Sequence
  Description of Artificial Sequence: Synthetic oligonucleotide
  Target: LAMA2; (+) strand; PAM type: NNNNGHTT; PAM sequence: CATGGTTT
agaggagacacggttgacac

SEQ ID NO: 49863 - DNA, 20 bp, Artificial Sequence
  Description of Artificial Sequence: Synthetic oligonucleotide
  Target: LAMA2; (+) strand; PAM type: NNNNGHTT; PAM sequence: AATGGTTT
tgggataaaaaccagaagga

SEQ ID NO: 49864 - DNA, 20 bp, Artificial Sequence
  Description of Artificial Sequence: Synthetic oligonucleotide
  Target: LAMA2; (+) strand; PAM type: NNNNGHTT; PAM sequence: GGGAGTTT
attttaaaaattctgttgag

SEQ ID NO: 49865 - DNA, 20 bp, Artificial Sequence
  Description of Artificial Sequence: Synthetic oligonucleotide
  Target: LAMA2; (+) strand; PAM type: NNNNGHTT; PAM sequence: CAAGGATT
tggtcaccatgagaaaagca

SEQ ID NO: 49866 - DNA, 20 bp, Artificial Sequence
  Description of Artificial Sequence: Synthetic oligonucleotide
  Target: LAMA2; (+) strand; PAM type: NNNNGHTT; PAM sequence: AGAAGATT
cagacaaaatgataattgag

SEQ ID NO: 49867 - DNA, 20 bp, Artificial Sequence
  Description of Artificial Sequence: Synthetic oligonucleotide
  Target: LAMA2; (+) strand; PAM type: NNNNGHTT; PAM sequence: TCAAGCTT
tgtgaacagaaagaataaac

SEQ ID NO: 49868 - DNA, 20 bp, Artificial Sequence
  Description of Artificial Sequence: Synthetic oligonucleotide
  Target: LAMA2; (+) strand; PAM type: NNNNGHTT; PAM sequence: TAGAGTTT
atttaatcatactggctctt

SEQ ID NO: 49869 - DNA, 20 bp, Artificial Sequence
  Description of Artificial Sequence: Synthetic oligonucleotide
  Target: LAMA2; (+) strand; PAM type: NNNNGHTT; PAM sequence: ATCTGTTT
tttctcttgaaatgtctaaa

SEQ ID NO: 49870 - DNA, 20 bp, Artificial Sequence
  Description of Artificial Sequence: Synthetic oligonucleotide
  Target: LAMA2; (+) strand; PAM type: NNNNGHTT; PAM sequence: TCAGGCTT
atgcacagatgcagtcagta

SEQ ID NO: 49871 - DNA, 20 bp, Artificial Sequence
  Description of Artificial Sequence: Synthetic oligonucleotide
  Target: LAMA2; (+) strand; PAM type: NNNNGHTT; PAM sequence: ATAAGTTT
tttggcagagtgtgtcagtt

SEQ ID NO: 49872 - DNA, 20 bp, Artificial Sequence
  Description of Artificial Sequence: Synthetic oligonucleotide
  Target: LAMA2; (+) strand; PAM type: NNNNGHTT; PAM sequence: ATGCGTTT
aaaaataaatttgttggata

SEQ ID NO: 49873 - DNA, 20 bp, Artificial Sequence
  Description of Artificial Sequence: Synthetic oligonucleotide
  Target: LAMA2; (+) strand; PAM type: NNNNGHTT; PAM sequence: TAGAGCTT
ttcacatattttgcaaaagt

SEQ ID NO: 49874 - DNA, 20 bp, Artificial Sequence
  Description of Artificial Sequence: Synthetic oligonucleotide
  Target: LAMA2; (+) strand; PAM type: NNNNGHTT; PAM sequence: GCCTGTTT
cctggcctatacaccttatt

SEQ ID NO: 49875 - DNA, 20 bp, Artificial Sequence
  Description of Artificial Sequence: Synthetic oligonucleotide
  Target: LAMA2; (+) strand; PAM type: NNNNGHTT; PAM sequence: AACTGATT
tattgcctgttttcagcatc

SEQ ID NO: 49876 - DNA, 20 bp, Artificial Sequence
  Description of Artificial Sequence: Synthetic oligonucleotide
  Target: LAMA2; (+) strand; PAM type: NNNNGHTT; PAM sequence: ACATGTTT
attatctttctgccacagat

SEQ ID NO: 49877 - DNA, 20 bp, Artificial Sequence
  Description of Artificial Sequence: Synthetic oligonucleotide
  Target: LAMA2; (+) strand; PAM type: NNNNGHTT; PAM sequence: CCAAGTTT
cagatacatgtttttaattt

SEQ ID NO: 49878 - DNA, 20 bp, Artificial Sequence
  Description of Artificial Sequence: Synthetic oligonucleotide
  Target: LAMA2; (+) strand; PAM type: NNNNGHTT; PAM sequence: TTCAGTTT
tccaagtttccaatgcatca

SEQ ID NO: 49879 - DNA, 20 bp, Artificial Sequence
  Description of Artificial Sequence: Synthetic oligonucleotide
  Target: LAMA2; (+) strand; PAM type: NNNNGHTT; PAM sequence: AGAAGTTT
ctaacgggaatgcagctgag

SEQ ID NO: 49880 - DNA, 20 bp, Artificial Sequence
  Description of Artificial Sequence: Synthetic oligonucleotide
  Target: LAMA2; (+) strand; PAM type: NNNNGHTT; PAM sequence: TATAGTTT
aacccaaaactacatgctaa

SEQ ID NO: 49881 - DNA, 20 bp, Artificial Sequence
  Description of Artificial Sequence: Synthetic oligonucleotide
  Target: LAMA2; (+) strand; PAM type: NNNNGHTT; PAM sequence: TTTAGTTT
aaaactacatgctaatatag

SEQ ID NO: 49882 - DNA, 20 bp, Artificial Sequence
  Description of Artificial Sequence: Synthetic oligonucleotide
  Target: LAMA2; (+) strand; PAM type: NNNNGHTT; PAM sequence: GGAAGTTT
cattgtagtaaaaacattgg

SEQ ID NO: 49883 - DNA, 20 bp, Artificial Sequence
  Description of Artificial Sequence: Synthetic oligonucleotide
  Target: LAMA2; (+) strand; PAM type: NNNNGHTT; PAM sequence: AAAAGCTT
aaaatagtcattttcataga

SEQ ID NO: 49884 - DNA, 20 bp, Artificial Sequence
  Description of Artificial Sequence: Synthetic oligonucleotide
  Target: LAMA2; (+) strand; PAM type: NNNNGHTT; PAM sequence: TGTAGTTT
actttgtgttcaaggtaaaa

SEQ ID NO: 49885 - DNA, 20 bp, Artificial Sequence
  Description of Artificial Sequence: Synthetic oligonucleotide
  Target: LAMA2; (+) strand; PAM type: NNNNGHTT; PAM sequence: CTGAGTTT
agcaccagtggccatttggg

SEQ ID NO: 49886 - DNA, 20 bp, Artificial Sequence
  Description of Artificial Sequence: Synthetic oligonucleotide
  Target: LAMA2; (+) strand; PAM type: NNNNGHTT; PAM sequence: TATAGATT
ttttcaagaaaaaaaattta

SEQ ID NO: 49887 - DNA, 20 bp, Artificial Sequence
  Description of Artificial Sequence: Synthetic oligonucleotide
  Target: LAMA2; (+) strand; PAM type: NNNNGHTT; PAM sequence: GTCAGATT
gacaatgtgcataaattcta

SEQ ID NO: 49888 - DNA, 20 bp, Artificial Sequence
  Description of Artificial Sequence: Synthetic oligonucleotide
  Target: LAMA2; (+) strand; PAM type: NNNNGHTT; PAM sequence: TTTTGATT
aaattctagtcagatttttc

SEQ ID NO: 49889 - DNA, 20 bp, Artificial Sequence
  Description of Artificial Sequence: Synthetic oligonucleotide
  Target: LAMA2; (+) strand; PAM type: NNNNGHTT; PAM sequence: GGATGTTT
aacaataggacaattttgct

SEQ ID NO: 49890 - DNA, 20 bp, Artificial Sequence
  Description of Artificial Sequence: Synthetic oligonucleotide
  Target: LAMA2; (+) strand; PAM type: NNNNGHTT; PAM sequence: ACATGCTT
tattaaattccagaatatta

SEQ ID NO: 49891 - DNA, 20 bp, Artificial Sequence
  Description of Artificial Sequence: Synthetic oligonucleotide
  Target: LAMA2; (+) strand; PAM type: NNNNGHTT; PAM sequence: ATTTGTTT
tcataaaccaaacaatatat

SEQ ID NO: 49892 - DNA, 20 bp, Artificial Sequence
  Description of Artificial Sequence: Synthetic oligonucleotide
  Target: LAMA2; (+) strand; PAM type: NNNNGHTT; PAM sequence: AATGGTTT
tatatttgtttactgttatt

SEQ ID NO: 49893 - DNA, 20 bp, Artificial Sequence
  Description of Artificial Sequence: Synthetic oligonucleotide
  Target: LAMA2; (+) strand; PAM type: NNNNGHTT; PAM sequence: AATGGATT
gaatactattttataaaata

SEQ ID NO: 49894 - DNA, 20 bp, Artificial Sequence
  Description of Artificial Sequence: Synthetic oligonucleotide
  Target: LAMA2; (+) strand; PAM type: NNNNGHTT; PAM sequence: TTCTGATT
tttttttgcaatccttttct

SEQ ID NO: 49895 - DNA, 20 bp, Artificial Sequence
  Description of Artificial Sequence: Synthetic oligonucleotide
  Target: LAMA2; (+) strand; PAM type: NNNNGHTT; PAM sequence: TTCAGTTT
tgcaatccttttctttctga

SEQ ID NO: 49896 - DNA, 20 bp, Artificial Sequence
  Description of Artificial Sequence: Synthetic oligonucleotide
  Target: LAMA2; (+) strand; PAM type: NNNNGHTT; PAM sequence: CACGGCTT
ggacttgacgactaccgctg

SEQ ID NO: 49897 - DNA, 20 bp, Artificial Sequence
  Description of Artificial Sequence: Synthetic oligonucleotide
  Target: LAMA2; (+) strand; PAM type: NNNNGHTT; PAM sequence: AGAAGTTT
tcaatatttgcatatccttt

SEQ ID NO: 49898 - DNA, 20 bp, Artificial Sequence
  Description of Artificial Sequence: Synthetic oligonucleotide
  Target: LAMA2; (+) strand; PAM type: NNNNGHTT; PAM sequence: CAATGCTT
tcctttagaagtttaaatta

SEQ ID NO: 49899 - DNA, 20 bp, Artificial Sequence
  Description of Artificial Sequence: Synthetic oligonucleotide
  Target: LAMA2; (+) strand; PAM type: NNNNGHTT; PAM sequence: AGTTGTTT
cttagaatttgtccaaagaa

SEQ ID NO: 49900 - DNA, 20 bp, Artificial Sequence
  Description of Artificial Sequence: Synthetic oligonucleotide
  Target: LAMA2; (+) strand; PAM type: NNNNGHTT; PAM sequence: GTATGTTT
gaaagttgtttatttccacc

SEQ ID NO: 49901 - DNA, 20 bp, Artificial Sequence
  Description of Artificial Sequence: Synthetic oligonucleotide
  Target: LAMA2; (+) strand; PAM type: NNNNGHTT; PAM sequence: CAAAGATT
accgtatgtttagactttat

SEQ ID NO: 49902 - DNA, 20 bp, Artificial Sequence
  Description of Artificial Sequence: Synthetic oligonucleotide
  Target: LAMA2; (+) strand; PAM type: NNNNGHTT; PAM sequence: TTATGCTT
actatttacaattatctaac

SEQ ID NO: 49903 - DNA, 20 bp, Artificial Sequence
  Description of Artificial Sequence: Synthetic oligonucleotide
  Target: LAMA2; (+) strand; PAM type: NNNNGHTT; PAM sequence: AAAAGCTT
ataagaataaatcaattttc

SEQ ID NO: 49904 - DNA, 20 bp, Artificial Sequence
  Description of Artificial Sequence: Synthetic oligonucleotide
  Target: LAMA2; (+) strand; PAM type: NNNNGHTT; PAM sequence: TTCAGTTT
agacaataaagtatttgtta

SEQ ID NO: 49905 - DNA, 20 bp, Artificial Sequence
  Description of Artificial Sequence: Synthetic oligonucleotide
  Target: LAMA2; (+) strand; PAM type: NNNNGHTT; PAM sequence: AAATGTTT
ataggcaaacaatattattt

SEQ ID NO: 49906 - DNA, 20 bp, Artificial Sequence
  Description of Artificial Sequence: Synthetic oligonucleotide
  Target: LAMA2; (+) strand; PAM type: NNNNGHTT; PAM sequence: TATTGCTT
ttaaatgttttctcttacca

SEQ ID NO: 49907 - DNA, 20 bp, Artificial Sequence
  Description of Artificial Sequence: Synthetic oligonucleotide
  Target: LAMA2; (+) strand; PAM type: NNNNGHTT; PAM sequence: AACTGATT
aattaaggagtacagttcca

SEQ ID NO: 49908 - DNA, 20 bp, Artificial Sequence
  Description of Artificial Sequence: Synthetic oligonucleotide
  Target: LAMA2; (+) strand; PAM type: NNNNGHTT; PAM sequence: GATAGTTT
tactaacattatacacacat

SEQ ID NO: 49909 - DNA, 20 bp, Artificial Sequence
  Description of Artificial Sequence: Synthetic oligonucleotide
  Target: LAMA2; (+) strand; PAM type: NNNNGHTT; PAM sequence: AAAAGTTT
agcataattgatagcagtat

SEQ ID NO: 49910 - DNA, 20 bp, Artificial Sequence
  Description of Artificial Sequence: Synthetic oligonucleotide
  Target: LAMA2; (+) strand; PAM type: NNNNGHTT; PAM sequence: GAATGTTT
cagaagaggcagaaaggcct

SEQ ID NO: 49911 - DNA, 20 bp, Artificial Sequence
  Description of Artificial Sequence: Synthetic oligonucleotide
  Target: LAMA2; (+) strand; PAM type: NNNNGHTT; PAM sequence: ACAAGTTT
ctctttggcccctaagtgga

SEQ ID NO: 49912 - DNA, 20 bp, Artificial Sequence
  Description of Artificial Sequence: Synthetic oligonucleotide
  Target: LAMA2; (+) strand; PAM type: NNNNGHTT; PAM sequence: CCTTGATT
gacatcacctgaaatcatac

SEQ ID NO: 49913 - DNA, 20 bp, Artificial Sequence
  Description of Artificial Sequence: Synthetic oligonucleotide
  Target: LAMA2; (+) strand; PAM type: NNNNGHTT; PAM sequence: TAGAGCTT
cctgaaatcatacccttgat

SEQ ID NO: 49914 - DNA, 20 bp, Artificial Sequence
  Description of Artificial Sequence: Synthetic oligonucleotide
  Target: LAMA2; (+) strand; PAM type: NNNNGHTT; PAM sequence: TCCTGCTT
tagagcttttcttttccatg

SEQ ID NO: 49915 - DNA, 20 bp, Artificial Sequence
  Description of Artificial Sequence: Synthetic oligonucleotide
  Target: LAMA2; (+) strand; PAM type: NNNNGHTT; PAM sequence: GCTAGATT
cctgcttcacccactccttt

SEQ ID NO: 49916 - DNA, 20 bp, Artificial Sequence
  Description of Artificial Sequence: Synthetic oligonucleotide
  Target: LAMA2; (+) strand; PAM type: NNNNGHTT; PAM sequence: GTAAGCTT
ctcctaggaacacttaaatg

SEQ ID NO: 49917 - DNA, 20 bp, Artificial Sequence
  Description of Artificial Sequence: Synthetic oligonucleotide
  Target: LAMA2; (+) strand; PAM type: NNNNGHTT; PAM sequence: TCTTGTTT
tatcagcatccacttaagag

SEQ ID NO: 49918 - DNA, 20 bp, Artificial Sequence
  Description of Artificial Sequence: Synthetic oligonucleotide
  Target: LAMA2; (+) strand; PAM type: NNNNGHTT; PAM sequence: TTAAGCTT
aagtaactaaataattaggg

SEQ ID NO: 49919 - DNA, 20 bp, Artificial Sequence
  Description of Artificial Sequence: Synthetic oligonucleotide
  Target: LAMA2; (+) strand; PAM type: NNNNGHTT; PAM sequence: AGTGGATT
tatttgcatatatataaaac

SEQ ID NO: 49920 - DNA, 20 bp, Artificial Sequence
  Description of Artificial Sequence: Synthetic oligonucleotide
  Target: LAMA2; (+) strand; PAM type: NNNNGHTT; PAM sequence: GTGAGCTT
atacttgttaatacccacca

SEQ ID NO: 49921 - DNA, 20 bp, Artificial Sequence
  Description of Artificial Sequence: Synthetic oligonucleotide
  Target: LAMA2; (+) strand; PAM type: NNNNGHTT; PAM sequence: AAAAGATT
aaaagcatcgctggacacca

SEQ ID NO: 49922 - DNA, 20 bp, Artificial Sequence
  Description of Artificial Sequence: Synthetic oligonucleotide
  Target: LAMA2; (+) strand; PAM type: NNNNGHTT; PAM sequence: GAATGATT
acaattattgtgttaaagca

SEQ ID NO: 49923 - DNA, 20 bp, Artificial Sequence
  Description of Artificial Sequence: Synthetic oligonucleotide
  Target: LAMA2; (+) strand; PAM type: NNNNGHTT; PAM sequence: GTCAGTTT
gtatttaatcgataaaagct

SEQ ID NO: 49924 - DNA, 20 bp, Artificial Sequence
  Description of Artificial Sequence: Synthetic oligonucleotide
  Target: LAMA2; (+) strand; PAM type: NNNNGHTT; PAM sequence: AAGTGTTT
tatcaaatgtgagtgactta

SEQ ID NO: 49925 - DNA, 20 bp, Artificial Sequence
  Description of Artificial Sequence: Synthetic oligonucleotide
  Target: LAMA2; (+) strand; PAM type: NNNNGHTT; PAM sequence: TATAGCTT
ttccagtcctcaaacattgt

SEQ ID NO: 49926 - DNA, 20 bp, Artificial Sequence
  Description of Artificial Sequence: Synthetic oligonucleotide
  Target: LAMA2; (+) strand; PAM type: NNNNGHTT; PAM sequence: AATTGCTT
caggttatatttctctgaaa

SEQ ID NO: 49927 - DNA, 20 bp, Artificial Sequence
  Description of Artificial Sequence: Synthetic oligonucleotide
  Target: LAMA2; (+) strand; PAM type: NNNNGHTT; PAM sequence: GAGAGCTT
aataaatttgttccagtgct

SEQ ID NO: 49928 - DNA, 20 bp, Artificial Sequence
  Description of Artificial Sequence: Synthetic oligonucleotide
  Target: LAMA2; (+) strand; PAM type: NNNNGHTT; PAM sequence: AACTGCTT
actgatcaggttaggtctaa

SEQ ID NO: 49929 - DNA, 20 bp, Artificial Sequence
  Description of Artificial Sequence: Synthetic oligonucleotide
  Target: LAMA2; (+) strand; PAM type: NNNNGHTT; PAM sequence: ATCTGCTT
tgaacatttaatcaatctga

SEQ ID NO: 49930 - DNA, 20 bp, Artificial Sequence
  Description of Artificial Sequence: Synthetic oligonucleotide
  Target: LAMA2; (+) strand; PAM type: NNNNGHTT; PAM sequence: AATCGTTT
tataaaagcctaatgtcaca

SEQ ID NO: 49931 - DNA, 20 bp, Artificial Sequence
  Description of Artificial Sequence: Synthetic oligonucleotide
  Target: LAMA2; (+) strand; PAM type: NNNNGHTT; PAM sequence: TCATGTTT
aatgtcacaaatcgttttct

SEQ ID NO: 49932 - DNA, 20 bp, Artificial Sequence
  Description of Artificial Sequence: Synthetic oligonucleotide
  Target: LAMA2; (+) strand; PAM type: NNNNGHTT; PAM sequence: TGCAGATT
ttaactttcacagtcagcca

SEQ ID NO: 49933 - DNA, 20 bp, Artificial Sequence
  Description of Artificial Sequence: Synthetic oligonucleotide
  Target: LAMA2; (+) strand; PAM type: NNNNGHTT; PAM sequence: CTATGATT
ctcaggcagctaaagatggt

SEQ ID NO: 49934 - DNA, 20 bp, Artificial Sequence
  Description of Artificial Sequence: Synthetic oligonucleotide
  Target: LAMA2; (+) strand; PAM type: NNNNGHTT; PAM sequence: TATAGCTT
atgattatcttgccagtatt

SEQ ID NO: 49935 - DNA, 20 bp, Artificial Sequence
  Description of Artificial Sequence: Synthetic oligonucleotide
  Target: LAMA2; (+) strand; PAM type: NNNNGHTT; PAM sequence: AACTGTTT
gcctgttgaacaaaaattct

SEQ ID NO: 49936 - DNA, 20 bp, Artificial Sequence
  Description of Artificial Sequence: Synthetic oligonucleotide
  Target: LAMA2; (+) strand; PAM type: NNNNGHTT; PAM sequence: CAGTGTTT
gacactatattaaaaacagg

SEQ ID NO: 49937 - DNA, 20 bp, Artificial Sequence
  Description of Artificial Sequence: Synthetic oligonucleotide
  Target: LAMA2; (+) strand; PAM type: NNNNGHTT; PAM sequence: GTTGGATT
ctgcatttagggttcatcca

SEQ ID NO: 49938 - DNA, 20 bp, Artificial Sequence
  Description of Artificial Sequence: Synthetic oligonucleotide
  Target: LAMA2; (+) strand; PAM type: NNNNGHTT; PAM sequence: TTTTGTTT
ttccaaatcagtgttatata

SEQ ID NO: 49939 - DNA, 20 bp, Artificial Sequence
  Description of Artificial Sequence: Synthetic oligonucleotide
  Target: LAMA2; (+) strand; PAM type: NNNNGHTT; PAM sequence: AAAAGTTT
tatacaagaggacttaacaa

SEQ ID NO: 49940 - DNA, 20 bp, Artificial Sequence
  Description of Artificial Sequence: Synthetic oligonucleotide
  Target: LAMA2; (+) strand; PAM type: NNNNGHTT; PAM sequence: TTCTGATT
acaggccaaatttggcccat

SEQ ID NO: 49941 - DNA, 20 bp, Artificial Sequence
  Description of Artificial Sequence: Synthetic oligonucleotide
  Target: LAMA2; (+) strand; PAM type: NNNNGHTT; PAM sequence: TAATGTTT
attattattattattattat

SEQ ID NO: 49942 - DNA, 20 bp, Artificial Sequence
  Description of Artificial Sequence: Synthetic oligonucleotide
  Target: LAMA2; (+) strand; PAM type: NNNNGHTT; PAM sequence: GAATGCTT
caattccatcaacaacagca

SEQ ID NO: 49943 - DNA, 20 bp, Artificial Sequence
  Description of Artificial Sequence: Synthetic oligonucleotide
  Target: LAMA2; (+) strand; PAM type: NNNNGHTT; PAM sequence: TCTTGATT
atttctttttcacggcataa

SEQ ID NO: 49944 - DNA, 20 bp, Artificial Sequence
  Description of Artificial Sequence: Synthetic oligonucleotide
  Target: LAMA2; (+) strand; PAM type: NNNNGHTT; PAM sequence: TACTGTTT
ttcctatgtcctgcaaagcc

SEQ ID NO: 49945 - DNA, 20 bp, Artificial Sequence
  Description of Artificial Sequence: Synthetic oligonucleotide
  Target: LAMA2; (+) strand; PAM type: NNNNGHTT; PAM sequence: ATCAGTTT
ctaatgtatggactcttgct

SEQ ID NO: 49946 - DNA, 20 bp, Artificial Sequence
  Description of Artificial Sequence: Synthetic oligonucleotide
  Target: LAMA2; (+) strand; PAM type: NNNNGHTT; PAM sequence: TTTTGCTT
catgacttgctattaacctc

SEQ ID NO: 49947 - DNA, 20 bp, Artificial Sequence
  Description of Artificial Sequence: Synthetic oligonucleotide
  Target: LAMA2; (+) strand; PAM type: NNNNGHTT; PAM sequence: CACTGTTT
attaacctcttttgctttgt

SEQ ID NO: 49948 - DNA, 20 bp, Artificial Sequence
  Description of Artificial Sequence: Synthetic oligonucleotide
  Target: LAMA2; (+) strand; PAM type: NNNNGHTT; PAM sequence: ACAGGATT
ctgtgccctgtgaccctgtc

SEQ ID NO: 49949 - DNA, 20 bp, Artificial Sequence
  Description of Artificial Sequence: Synthetic oligonucleotide
  Target: LAMA2; (+) strand; PAM type: NNNNGHTT; PAM sequence: GTGTGTTT
catgcacgcgagggctggga

SEQ ID NO: 49950 - DNA, 20 bp, Artificial Sequence
  Description of Artificial Sequence: Synthetic oligonucleotide
  Target: LAMA2; (+) strand; PAM type: NNNNGHTT; PAM sequence: GTTAGTTT
gtacgtatactaactttgct

SEQ ID NO: 49951 - DNA, 20 bp, Artificial Sequence
  Description of Artificial Sequence: Synthetic oligonucleotide
  Target: LAMA2; (+) strand; PAM type: NNNNGHTT; PAM sequence: CCTTGATT
tttgctgttagttttggagg

SEQ ID NO: 49952 - DNA, 20 bp, Artificial Sequence
  Description of Artificial Sequence: Synthetic oligonucleotide
  Target: LAMA2; (+) strand; PAM type: NNNNGHTT; PAM sequence: TGCTGATT
tccaccttctgctgttcacc

SEQ ID NO: 49953 - DNA, 20 bp, Artificial Sequence
  Description of Artificial Sequence: Synthetic oligonucleotide
  Target: LAMA2; (+) strand; PAM type: NNNNGHTT; PAM sequence: GTGTGCTT
aacagctgagaaaatcctca

SEQ ID NO: 49954 - DNA, 20 bp, Artificial Sequence
  Description of Artificial Sequence: Synthetic oligonucleotide
  Target: LAMA2; (+) strand; PAM type: NNNNGHTT; PAM sequence: ATTTGATT
gaagctcctggaggcatttt

SEQ ID NO: 49955 - DNA, 20 bp, Artificial Sequence
  Description of Artificial Sequence: Synthetic oligonucleotide
  Target: LAMA2; (+) strand; PAM type: NNNNGHTT; PAM sequence: CAGGGTTT
tttatttgatttgtccatct

SEQ ID NO: 49956 - DNA, 20 bp, Artificial Sequence
  Description of Artificial Sequence: Synthetic oligonucleotide
  Target: LAMA2; (+) strand; PAM type: NNNNGHTT; PAM sequence: TACAGTTT
gatttgtccatctcagggtt

SEQ ID NO: 49957 - DNA, 20 bp, Artificial Sequence
  Description of Artificial Sequence: Synthetic oligonucleotide
  Target: LAMA2; (+) strand; PAM type: NNNNGHTT; PAM sequence: GACAGATT
caagttggcattgcctttgt

SEQ ID NO: 49958 - DNA, 20 bp, Artificial Sequence
  Description of Artificial Sequence: Synthetic oligonucleotide
  Target: LAMA2; (+) strand; PAM type: NNNNGHTT; PAM sequence: TGATGTTT
tttaagccttgaatgacaac

SEQ ID NO: 49959 - DNA, 20 bp, Artificial Sequence
  Description of Artificial Sequence: Synthetic oligonucleotide
  Target: LAMA2; (+) strand; PAM type: NNNNGHTT; PAM sequence: CCCAGCTT
tgacaactgatgtttctttt

SEQ ID NO: 49960 - DNA, 20 bp, Artificial Sequence
  Description of Artificial Sequence: Synthetic oligonucleotide
  Target: LAMA2; (+) strand; PAM type: NNNNGHTT; PAM sequence: TACTGCTT
tttatgaaaatccatgggca

SEQ ID NO: 49961 - DNA, 20 bp, Artificial Sequence
  Description of Artificial Sequence: Synthetic oligonucleotide
  Target: LAMA2; (+) strand; PAM type: NNNNGHTT; PAM sequence: AGCAGTTT
ctcacgtacagtaagtggag

SEQ ID NO: 49962 - DNA, 20 bp, Artificial Sequence
  Description of Artificial Sequence: Synthetic oligonucleotide
  Target: LAMA2; (+) strand; PAM type: NNNNGHTT; PAM sequence: TACTGATT
ttgctgtctctcttttttct

SEQ ID NO: 49963 - DNA, 20 bp, Artificial Sequence
  Description of Artificial Sequence: Synthetic oligonucleotide
  Target: LAMA2; (+) strand; PAM type: NNNNGHTT; PAM sequence: TCTGGATT
ctctcttttttcttactgat

SEQ ID NO: 49964 - DNA, 20 bp, Artificial Sequence
  Description of Artificial Sequence: Synthetic oligonucleotide
  Target: LAMA2; (+) strand; PAM type: NNNNGHTT; PAM sequence: TCTTGTTT
tatttgtgcatgtcaacatt

SEQ ID NO: 49965 - DNA, 20 bp, Artificial Sequence
  Description of Artificial Sequence: Synthetic oligonucleotide
  Target: LAMA2; (+) strand; PAM type: NNNNGHTT; PAM sequence: TATTGTTT
caacatttcttgttttagca

SEQ ID NO: 49966 - DNA, 20 bp, Artificial Sequence
  Description of Artificial Sequence: Synthetic oligonucleotide
  Target: LAMA2; (+) strand; PAM type: NNNNGHTT; PAM sequence: TTTTGTTT
agtatcttaaatagaagaat

SEQ ID NO: 49967 - DNA, 20 bp, Artificial Sequence
  Description of Artificial Sequence: Synthetic oligonucleotide
  Target: LAMA2; (+) strand; PAM type: NNNNGHTT; PAM sequence: TCTAGTTT
agaagaatttttgtttatgt

SEQ ID NO: 49968 - DNA, 20 bp, Artificial Sequence
  Description of Artificial Sequence: Synthetic oligonucleotide
  Target: LAMA2; (+) strand; PAM type: NNNNGHTT; PAM sequence: GCTGGATT
agttaacctcagaagctaaa

SEQ ID NO: 49969 - DNA, 20 bp, Artificial Sequence
  Description of Artificial Sequence: Synthetic oligonucleotide
  Target: LAMA2; (+) strand; PAM type: NNNNGHTT; PAM sequence: AATAGATT
gactgggtgttatttgggaa

SEQ ID NO: 49970 - DNA, 20 bp, Artificial Sequence
  Description of Artificial Sequence: Synthetic oligonucleotide
  Target: LAMA2; (+) strand; PAM type: NNNNGHTT; PAM sequence: GAGAGATT
tgtgaaggtaggtgagaggg

SEQ ID NO: 49971 - DNA, 20 bp, Artificial Sequence
  Description of Artificial Sequence: Synthetic oligonucleotide
  Target: LAMA2; (+) strand; PAM type: NNNNGHTT; PAM sequence: TATTGCTT
actatcaaagtattttataa

SEQ ID NO: 49972 - DNA, 20 bp, Artificial Sequence
  Description of Artificial Sequence: Synthetic oligonucleotide
  Target: LAMA2; (+) strand; PAM type: NNNNGHTT; PAM sequence: ATGGGATT
aatctggggtagataatata

SEQ ID NO: 49973 - DNA, 20 bp, Artificial Sequence
  Description of Artificial Sequence: Synthetic oligonucleotide
  Target: LAMA2; (+) strand; PAM type: NNNNGHTT; PAM sequence: AATGGCTT
gcattctgcccatcaacaac

SEQ ID NO: 49974 - DNA, 20 bp, Artificial Sequence
  Description of Artificial Sequence: Synthetic oligonucleotide
  Target: LAMA2; (+) strand; PAM type: NNNNGHTT; PAM sequence: GTGGGTTT
atcttttccctatcacatat

SEQ ID NO: 49975 - DNA, 20 bp, Artificial Sequence
  Description of Artificial Sequence: Synthetic oligonucleotide
  Target: LAMA2; (+) strand; PAM type: NNNNGHTT; PAM sequence: ACCAGTTT
tcctccagttacaaagctac

SEQ ID NO: 49976 - DNA, 20 bp, Artificial Sequence
  Description of Artificial Sequence: Synthetic oligonucleotide
  Target: LAMA2; (+) strand; PAM type: NNNNGHTT; PAM sequence: ATTTGCTT
acaccagttttataattctt

SEQ ID NO: 49977 - DNA, 20 bp, Artificial Sequence
  Description of Artificial Sequence: Synthetic oligonucleotide
  Target: LAMA2; (+) strand; PAM type: NNNNGHTT; PAM sequence: AAGTGTTT
tagttcagttgctggactgg

SEQ ID NO: 49978 - DNA, 20 bp, Artificial Sequence
  Description of Artificial Sequence: Synthetic oligonucleotide
  Target: LAMA2; (+) strand; PAM type: NNNNGHTT; PAM sequence: AGCAGTTT
tatattctttttaaaagaat

SEQ ID NO: 49979 - DNA, 20 bp, Artificial Sequence
  Description of Artificial Sequence: Synthetic oligonucleotide
  Target: LAMA2; (+) strand; PAM type: NNNNGHTT; PAM sequence: ATAGGATT
ccagaaaaaaatattaaatt

SEQ ID NO: 49980 - DNA, 20 bp, Artificial Sequence
  Description of Artificial Sequence: Synthetic oligonucleotide
  Target: LAMA2; (+) strand; PAM type: NNNNGHTT; PAM sequence: GATTGTTT
aaaaaaatattaaattatag

SEQ ID NO: 49981 - DNA, 20 bp, Artificial Sequence
  Description of Artificial Sequence: Synthetic oligonucleotide
  Target: LAMA2; (+) strand; PAM type: NNNNGHTT; PAM sequence: TATAGATT
attatcttataattatgctg

SEQ ID NO: 49982 - DNA, 20 bp, Artificial Sequence
  Description of Artificial Sequence: Synthetic oligonucleotide
  Target: LAMA2; (+) strand; PAM type: NNNNGHTT; PAM sequence: TAGTGATT
catatactgctcttaagcat

SEQ ID NO: 49983 - DNA, 20 bp, Artificial Sequence
  Description of Artificial Sequence: Synthetic oligonucleotide
  Target: LAMA2; (+) strand; PAM type: NNNNGHTT; PAM sequence: GAATGTTT
tgatttccacttacttctag

SEQ ID NO: 49984 - DNA, 20 bp, Artificial Sequence
  Description of Artificial Sequence: Synthetic oligonucleotide
  Target: LAMA2; (+) strand; PAM type: NNNNGHTT; PAM sequence: CCATGATT
tcccgttatggaaaaatatg

SEQ ID NO: 49985 - DNA, 20 bp, Artificial Sequence
  Description of Artificial Sequence: Synthetic oligonucleotide
  Target: LAMA2; (+) strand; PAM type: NNNNGHTT; PAM sequence: CCAGGATT
ttctatgatcttggcctttc

SEQ ID NO: 49986 - DNA, 20 bp, Artificial Sequence
  Description of Artificial Sequence: Synthetic oligonucleotide
  Target: LAMA2; (+) strand; PAM type: NNNNGHTT; PAM sequence: TTCGGTTT
gatcttggcctttcccagga

SEQ ID NO: 49987 - DNA, 20 bp, Artificial Sequence
  Description of Artificial Sequence: Synthetic oligonucleotide
  Target: LAMA2; (+) strand; PAM type: NNNNGHTT; PAM sequence: CCTAGTTT
attcggtttctacttctact

SEQ ID NO: 49988 - DNA, 20 bp, Artificial Sequence
  Description of Artificial Sequence: Synthetic oligonucleotide
  Target: LAMA2; (+) strand; PAM type: NNNNGHTT; PAM sequence: AATGGATT
attagtgcaagagaccaaaa

SEQ ID NO: 49989 - DNA, 20 bp, Artificial Sequence
  Description of Artificial Sequence: Synthetic oligonucleotide
  Target: LAMA2; (+) strand; PAM type: NNNNGHTT; PAM sequence: GGGTGTTT
ccaaaaaatggattcacctg

SEQ ID NO: 49990 - DNA, 20 bp, Artificial Sequence
  Description of Artificial Sequence: Synthetic oligonucleotide
  Target: LAMA2; (+) strand; PAM type: NNNNGHTT; PAM sequence: ACCTGTTT
tggggtgtttgatctgcagg

SEQ ID NO: 49991 - DNA, 20 bp, Artificial Sequence
  Description of Artificial Sequence: Synthetic oligonucleotide
  Target: LAMA2; (+) strand; PAM type: NNNNGHTT; PAM sequence: GGTAGCTT
ctgggggtgagagtaaggga

SEQ ID NO: 49992 - DNA, 20 bp, Artificial Sequence
  Description of Artificial Sequence: Synthetic oligonucleotide
  Target: LAMA2; (+) strand; PAM type: NNNNGHTT; PAM sequence: CAGTGCTT
tgtagtaagagaaatgtctg

SEQ ID NO: 49993 - DNA, 20 bp, Artificial Sequence
  Description of Artificial Sequence: Synthetic oligonucleotide
  Target: LAMA2; (+) strand; PAM type: NNNNGHTT; PAM sequence: TATTGCTT
acaggaaataaactttctcc

SEQ ID NO: 49994 - DNA, 20 bp, Artificial Sequence
  Description of Artificial Sequence: Synthetic oligonucleotide
  Target: LAMA2; (+) strand; PAM type: NNNNGHTT; PAM sequence: CTCAGTTT
ttgcttagaataagtaaaca

SEQ ID NO: 49995 - DNA, 20 bp, Artificial Sequence
  Description of Artificial Sequence: Synthetic oligonucleotide
  Target: LAMA2; (+) strand; PAM type: NNNNGHTT; PAM sequence: TTTTGCTT
atgtattgtacaagagttaa

SEQ ID NO: 49996 - DNA, 20 bp, Artificial Sequence
  Description of Artificial Sequence: Synthetic oligonucleotide
  Target: LAMA2; (+) strand; PAM type: NNNNGHTT; PAM sequence: CATGGATT
taatttagactgatccacat

SEQ ID NO: 49997 - DNA, 20 bp, Artificial Sequence
  Description of Artificial Sequence: Synthetic oligonucleotide
  Target: LAMA2; (+) strand; PAM type: NNNNGHTT; PAM sequence: TTTAGTTT
atctatacactcactgtaaa

SEQ ID NO: 49998 - DNA, 20 bp, Artificial Sequence
  Description of Artificial Sequence: Synthetic oligonucleotide
  Target: LAMA2; (+) strand; PAM type: NNNNGHTT; PAM sequence: TATAGCTT
cttggtccctaaaagatact

SEQ ID NO: 49999 - DNA, 20 bp, Artificial Sequence
  Description of Artificial Sequence: Synthetic oligonucleotide
  Target: LAMA2; (+) strand; PAM type: NNNNGHTT; PAM sequence: CCTGGATT
agggacagttgccagtgacc

SEQ ID NO: 50000 - DNA, 20 bp, Artificial Sequence
  Description of Artificial Sequence: Synthetic oligonucleotide
  Target: LAMA2; (+) strand; PAM type: NNNNGHTT; PAM sequence: TGTGGATT
cagcacacaggccttttata

SEQ ID NO: 50001 - DNA, 20 bp, Artificial Sequence
  Description of Artificial Sequence: Synthetic oligonucleotide
  Target: LAMA2; (+) strand; PAM type: NNNNGHTT; PAM sequence: CCGTGATT
tcagtgacttttcagtagat

SEQ ID NO: 50002 - DNA, 20 bp, Artificial Sequence
  Description of Artificial Sequence: Synthetic oligonucleotide
  Target: LAMA2; (+) strand; PAM type: NNNNGHTT; PAM sequence: CGTGGTTT
tgataaacagagaaagcaaa

SEQ ID NO: 50003 - DNA, 20 bp, Artificial Sequence
  Description of Artificial Sequence: Synthetic oligonucleotide
  Target: LAMA2; (+) strand; PAM type: NNNNGHTT; PAM sequence: TACTGCTT
aattcagccctttattcatt

SEQ ID NO: 50004 - DNA, 20 bp, Artificial Sequence
  Description of Artificial Sequence: Synthetic oligonucleotide
  Target: LAMA2; (+) strand; PAM type: NNNNGHTT; PAM sequence: CCATGTTT
cctttattcatttactgctt

SEQ ID NO: 50005 - DNA, 20 bp, Artificial Sequence
  Description of Artificial Sequence: Synthetic oligonucleotide
  Target: LAMA2; (+) strand; PAM type: NNNNGHTT; PAM sequence: CCTCGATT
catgtttagagcccattcta

SEQ ID NO: 50006 - DNA, 20 bp, Artificial Sequence
  Description of Artificial Sequence: Synthetic oligonucleotide
  Target: LAMA2; (+) strand; PAM type: NNNNGHTT; PAM sequence: CTAAGATT
tgctaatcattgagactcct

SEQ ID NO: 50007 - DNA, 20 bp, Artificial Sequence
  Description of Artificial Sequence: Synthetic oligonucleotide
  Target: LAMA2; (+) strand; PAM type: NNNNGHTT; PAM sequence: GGTAGATT
taaaacattatggcatttat

SEQ ID NO: 50008 - DNA, 20 bp, Artificial Sequence
  Description of Artificial Sequence: Synthetic oligonucleotide
  Target: LAMA2; (+) strand; PAM type: NNNNGHTT; PAM sequence: CAGAGATT
tatggtagattccttttcat

SEQ ID NO: 50009 - DNA, 20 bp, Artificial Sequence
  Description of Artificial Sequence: Synthetic oligonucleotide
  Target: LAMA2; (+) strand; PAM type: NNNNGHTT; PAM sequence: CCCAGATT
gaaaagatactagctgggtg

SEQ ID NO: 50010 - DNA, 20 bp, Artificial Sequence
  Description of Artificial Sequence: Synthetic oligonucleotide
  Target: LAMA2; (+) strand; PAM type: NNNNGHTT; PAM sequence: GACAGCTT
ttctaaaaggaattatttgg

SEQ ID NO: 50011 - DNA, 20 bp, Artificial Sequence
  Description of Artificial Sequence: Synthetic oligonucleotide
  Target: LAMA2; (+) strand; PAM type: NNNNGHTT; PAM sequence: TTAAGATT
tattttattaatttcccaaa

SEQ ID NO: 50012 - DNA, 20 bp, Artificial Sequence
  Description of Artificial Sequence: Synthetic oligonucleotide
  Target: LAMA2; (+) strand; PAM type: NNNNGHTT; PAM sequence: ATTTGCTT
aaatgaacaaagaagccatt

SEQ ID NO: 50013 - DNA, 20 bp, Artificial Sequence
  Description of Artificial Sequence: Synthetic oligonucleotide
  Target: LAMA2; (+) strand; PAM type: NNNNGHTT; PAM sequence: TAAAGTTT
agccattatttgcttaacag

SEQ ID NO: 50014 - DNA, 20 bp, Artificial Sequence
  Description of Artificial Sequence: Synthetic oligonucleotide
  Target: LAMA2; (+) strand; PAM type: NNNNGHTT; PAM sequence: CTTGGATT
tagtattttgaaacacaaaa

SEQ ID NO: 50015 - DNA, 20 bp, Artificial Sequence
  Description of Artificial Sequence: Synthetic oligonucleotide
  Target: LAMA2; (+) strand; PAM type: NNNNGHTT; PAM sequence: TGATGTTT
ttaacacagaataacccatg

SEQ ID NO: 50016 - DNA, 20 bp, Artificial Sequence
  Description of Artificial Sequence: Synthetic oligonucleotide
  Target: LAMA2; (+) strand; PAM type: NNNNGHTT; PAM sequence: AATAGATT
ataacccatgtgatgtttaa

SEQ ID NO: 50017 - DNA, 20 bp, Artificial Sequence
  Description of Artificial Sequence: Synthetic oligonucleotide
  Target: LAMA2; (+) strand; PAM type: NNNNGHTT; PAM sequence: TGGGGTTT
tatttttaatcactgcatag

SEQ ID NO: 50018 - DNA, 20 bp, Artificial Sequence
  Description of Artificial Sequence: Synthetic oligonucleotide
  Target: LAMA2; (+) strand; PAM type: NNNNGHTT; PAM sequence: ATCAGCTT
tagtggggtttttgggatat

SEQ ID NO: 50019 - DNA, 20 bp, Artificial Sequence
  Description of Artificial Sequence: Synthetic oligonucleotide
  Target: LAMA2; (+) strand; PAM type: NNNNGHTT; PAM sequence: CTTTGCTT
tatttaaaataaaacataca

SEQ ID NO: 50020 - DNA, 20 bp, Artificial Sequence
  Description of Artificial Sequence: Synthetic oligonucleotide
  Target: LAMA2; (+) strand; PAM type: NNNNGHTT; PAM sequence: CTATGTTT
tttgcaaaagtgatcatgaa

SEQ ID NO: 50021 - DNA, 20 bp, Artificial Sequence
  Description of Artificial Sequence: Synthetic oligonucleotide
  Target: LAMA2; (+) strand; PAM type: NNNNGHTT; PAM sequence: TGAAGTTT
acttggtgaaaccggaagtc

SEQ ID NO: 50022 - DNA, 20 bp, Artificial Sequence
  Description of Artificial Sequence: Synthetic oligonucleotide
  Target: LAMA2; (+) strand; PAM type: NNNNGHTT; PAM sequence: TGTCGTTT
tacagagatataatcaacat

SEQ ID NO: 50023 - DNA, 20 bp, Artificial Sequence
  Description of Artificial Sequence: Synthetic oligonucleotide
  Target: LAMA2; (+) strand; PAM type: NNNNGHTT; PAM sequence: AAATGATT
tgttgtacatttataatcaa

SEQ ID NO: 50024 - DNA, 20 bp, Artificial Sequence
  Description of Artificial Sequence: Synthetic oligonucleotide
  Target: LAMA2; (+) strand; PAM type: NNNNGHTT; PAM sequence: CAGTGATT
tcaaaaatgattaataatgg

SEQ ID NO: 50025 - DNA, 20 bp, Artificial Sequence
  Description of Artificial Sequence: Synthetic oligonucleotide
  Target: LAMA2; (+) strand; PAM type: NNNNGHTT; PAM sequence: TGCTGATT
aacatcagttgatctccaga

SEQ ID NO: 50026 - DNA, 20 bp, Artificial Sequence
  Description of Artificial Sequence: Synthetic oligonucleotide
  Target: LAMA2; (+) strand; PAM type: NNNNGHTT; PAM sequence: CTTTGCTT
tgctgattactgatctaaca

SEQ ID NO: 50027 - DNA, 20 bp, Artificial Sequence
  Description of Artificial Sequence: Synthetic oligonucleotide
  Target: LAMA2; (+) strand; PAM type: NNNNGHTT; PAM sequence: CATAGTTT
tgaaaggacagtaagtatgt

SEQ ID NO: 50028 - DNA, 20 bp, Artificial Sequence
  Description of Artificial Sequence: Synthetic oligonucleotide
  Target: LAMA2; (+) strand; PAM type: NNNNGHTT; PAM sequence: CCTTGTTT
tataaaacatcttctgttca

SEQ ID NO: 50029 - DNA, 20 bp, Artificial Sequence
  Description of Artificial Sequence: Synthetic oligonucleotide
  Target: LAMA2; (+) strand; PAM type: NNNNGHTT; PAM sequence: ATTTGTTT
cttgtttgcaccttctactc

SEQ ID NO: 50030 - DNA, 20 bp, Artificial Sequence
  Description of Artificial Sequence: Synthetic oligonucleotide
  Target: LAMA2; (+) strand; PAM type: NNNNGHTT; PAM sequence: TTGAGTTT
gttttgttagtaaaagatat

SEQ ID NO: 50031 - DNA, 20 bp, Artificial Sequence
  Description of Artificial Sequence: Synthetic oligonucleotide
  Target: LAMA2; (+) strand; PAM type: NNNNGHTT; PAM sequence: CCGTGATT
gtgtggaatggcaactatca

SEQ ID NO: 50032 - DNA, 20 bp, Artificial Sequence
  Description of Artificial Sequence: Synthetic oligonucleotide
  Target: LAMA2; (+) strand; PAM type: NNNNGHTT; PAM sequence: AGATGATT
gcaactatcaccgtgattct

SEQ ID NO: 50033 - DNA, 20 bp, Artificial Sequence
  Description of Artificial Sequence: Synthetic oligonucleotide
  Target: LAMA2; (+) strand; PAM type: NNNNGHTT; PAM sequence: AGTGGTTT
agttgttagagatcagtctc

SEQ ID NO: 50034 - DNA, 20 bp, Artificial Sequence
  Description of Artificial Sequence: Synthetic oligonucleotide
  Target: LAMA2; (+) strand; PAM type: NNNNGHTT; PAM sequence: AGCTGATT
attgaggaagctgttctgct

SEQ ID NO: 50035 - DNA, 20 bp, Artificial Sequence
  Description of Artificial Sequence: Synthetic oligonucleotide
  Target: LAMA2; (+) strand; PAM type: NNNNGHTT; PAM sequence: CTTTGTTT
agacagctgatcactgttgc

SEQ ID NO: 50036 - DNA, 20 bp, Artificial Sequence
  Description of Artificial Sequence: Synthetic oligonucleotide
  Target: LAMA2; (+) strand; PAM type: NNNNGHTT; PAM sequence: GCAAGTTT
cactgttgcctttgttttca

SEQ ID NO: 50037 - DNA, 20 bp, Artificial Sequence
  Description of Artificial Sequence: Synthetic oligonucleotide
  Target: LAMA2; (+) strand; PAM type: NNNNGHTT; PAM sequence: CTTTGATT
gaagagtaaactaaactcta

SEQ ID NO: 50038 - DNA, 20 bp, Artificial Sequence
  Description of Artificial Sequence: Synthetic oligonucleotide
  Target: LAMA2; (+) strand; PAM type: NNNNGHTT; PAM sequence: GGAGGTTT
ttctactctggcaaggctca

SEQ ID NO: 50039 - DNA, 20 bp, Artificial Sequence
  Description of Artificial Sequence: Synthetic oligonucleotide
  Target: LAMA2; (+) strand; PAM type: NNNNGHTT; PAM sequence: GAAGGTTT
ggtgttatgaagtggctaca

SEQ ID NO: 50040 - DNA, 20 bp, Artificial Sequence
  Description of Artificial Sequence: Synthetic oligonucleotide
  Target: LAMA2; (+) strand; PAM type: NNNNGHTT; PAM sequence: CCTAGCTT
tggctacagaaggtttgaaa

SEQ ID NO: 50041 - DNA, 20 bp, Artificial Sequence
  Description of Artificial Sequence: Synthetic oligonucleotide
  Target: LAMA2; (+) strand; PAM type: NNNNGHTT; PAM sequence: TGATGTTT
catttttttccccaaagacc

SEQ ID NO: 50042 - DNA, 20 bp, Artificial Sequence
  Description of Artificial Sequence: Synthetic oligonucleotide
  Target: LAMA2; (+) strand; PAM type: NNNNGHTT; PAM sequence: ATCAGTTT
cctgatgttttgtgcaacgc

SEQ ID NO: 50043 - DNA, 20 bp, Artificial Sequence
  Description of Artificial Sequence: Synthetic oligonucleotide
  Target: LAMA2; (+) strand; PAM type: NNNNGHTT; PAM sequence: TTTAGTTT
gtttctgatgaaatattttc

SEQ ID NO: 50044 - DNA, 20 bp, Artificial Sequence
  Description of Artificial Sequence: Synthetic oligonucleotide
  Target: LAMA2; (+) strand; PAM type: NNNNGHTT; PAM sequence: TTCAGTTT
ttctttagtttaggctgact

SEQ ID NO: 50045 - DNA, 20 bp, Artificial Sequence
  Description of Artificial Sequence: Synthetic oligonucleotide
  Target: LAMA2; (+) strand; PAM type: NNNNGHTT; PAM sequence: TATAGATT
agcccttcacatgcattatt

SEQ ID NO: 50046 - DNA, 20 bp, Artificial Sequence
  Description of Artificial Sequence: Synthetic oligonucleotide
  Target: LAMA2; (+) strand; PAM type: NNNNGHTT; PAM sequence: AATTGCTT
gaatggtacttacctcatag

SEQ ID NO: 50047 - DNA, 20 bp, Artificial Sequence
  Description of Artificial Sequence: Synthetic oligonucleotide
  Target: LAMA2; (+) strand; PAM type: NNNNGHTT; PAM sequence: CAAAGTTT
attattatttatagtacttt

SEQ ID NO: 50048 - DNA, 20 bp, Artificial Sequence
  Description of Artificial Sequence: Synthetic oligonucleotide
  Target: LAMA2; (+) strand; PAM type: NNNNGHTT; PAM sequence: TAGTGTTT
agtactttcaaagtttccat

SEQ ID NO: 50049 - DNA, 20 bp, Artificial Sequence
  Description of Artificial Sequence: Synthetic oligonucleotide
  Target: LAMA2; (+) strand; PAM type: NNNNGHTT; PAM sequence: ACTTGTTT
ccatctttgaaccacattga

SEQ ID NO: 50050 - DNA, 20 bp, Artificial Sequence
  Description of Artificial Sequence: Synthetic oligonucleotide
  Target: LAMA2; (+) strand; PAM type: NNNNGHTT; PAM sequence: TACAGCTT
catcagtctcagctgaggtc

SEQ ID NO: 50051 - DNA, 20 bp, Artificial Sequence
  Description of Artificial Sequence: Synthetic oligonucleotide
  Target: LAMA2; (+) strand; PAM type: NNNNGHTT; PAM sequence: AAAAGTTT
ccctaaatatatgctaatgt

SEQ ID NO: 50052 - DNA, 20 bp, Artificial Sequence
  Description of Artificial Sequence: Synthetic oligonucleotide
  Target: LAMA2; (+) strand; PAM type: NNNNGHTT; PAM sequence: ATTTGATT
tatttactcattttattcct

SEQ ID NO: 50053 - DNA, 20 bp, Artificial Sequence
  Description of Artificial Sequence: Synthetic oligonucleotide
  Target: LAMA2; (+) strand; PAM type: NNNNGHTT; PAM sequence: AATAGCTT
atcgctacctaaaattggtt

SEQ ID NO: 50054 - DNA, 20 bp, Artificial Sequence
  Description of Artificial Sequence: Synthetic oligonucleotide
  Target: LAMA2; (+) strand; PAM type: NNNNGHTT; PAM sequence: TTTAGCTT
aaaatactcagtgtcctcat

SEQ ID NO: 50055 - DNA, 20 bp, Artificial Sequence
  Description of Artificial Sequence: Synthetic oligonucleotide
  Target: LAMA2; (+) strand; PAM type: NNNNGHTT; PAM sequence: TTCAGCTT
ctcagtgtcctcattttagc

SEQ ID NO: 50056 - DNA, 20 bp, Artificial Sequence
  Description of Artificial Sequence: Synthetic oligonucleotide
  Target: LAMA2; (+) strand; PAM type: NNNNGHTT; PAM sequence: TTTGGTTT
ctcattttagcttcagcttc

SEQ ID NO: 50057 - DNA, 20 bp, Artificial Sequence
  Description of Artificial Sequence: Synthetic oligonucleotide
  Target: LAMA2; (+) strand; PAM type: NNNNGHTT; PAM sequence: GTGTGATT
ttctttggtttggatgcagt

SEQ ID NO: 50058 - DNA, 20 bp, Artificial Sequence
  Description of Artificial Sequence: Synthetic oligonucleotide
  Target: LAMA2; (+) strand; PAM type: NNNNGHTT; PAM sequence: GCATGATT
aaagatctgtaatactggct

SEQ ID NO: 50059 - DNA, 20 bp, Artificial Sequence
  Description of Artificial Sequence: Synthetic oligonucleotide
  Target: LAMA2; (+) strand; PAM type: NNNNGHTT; PAM sequence: CTGTGTTT
ataacaatctgaatttagta

SEQ ID NO: 50060 - DNA, 20 bp, Artificial Sequence
  Description of Artificial Sequence: Synthetic oligonucleotide
  Target: LAMA2; (+) strand; PAM type: NNNNGHTT; PAM sequence: ATTTGCTT
tataatcatggtcttgaaat

SEQ ID NO: 50061 - DNA, 20 bp, Artificial Sequence
  Description of Artificial Sequence: Synthetic oligonucleotide
  Target: LAMA2; (+) strand; PAM type: NNNNGHTT; PAM sequence: GCAGGATT
tttgctcctgtgcattttag

SEQ ID NO: 50062 - DNA, 20 bp, Artificial Sequence
  Description of Artificial Sequence: Synthetic oligonucleotide
  Target: LAMA2; (+) strand; PAM type: NNNNGHTT; PAM sequence: AATGGTTT
tagtattgctgaatttggag

SEQ ID NO: 50063 - DNA, 20 bp, Artificial Sequence
  Description of Artificial Sequence: Synthetic oligonucleotide
  Target: LAMA2; (+) strand; PAM type: NNNNGHTT; PAM sequence: TCCTGATT
tttggaaaggttctttgagg

SEQ ID NO: 50064 - DNA, 20 bp, Artificial Sequence
  Description of Artificial Sequence: Synthetic oligonucleotide
  Target: LAMA2; (+) strand; PAM type: NNNNGHTT; PAM sequence: AGTTGTTT
actgcactttatcaaagaac

SEQ ID NO: 50065 - DNA, 20 bp, Artificial Sequence
  Description of Artificial Sequence: Synthetic oligonucleotide
  Target: LAMA2; (+) strand; PAM type: NNNNGHTT; PAM sequence: TTCAGATT
ttccatgtctctacacactc

SEQ ID NO: 50066 - DNA, 20 bp, Artificial Sequence
  Description of Artificial Sequence: Synthetic oligonucleotide
  Target: LAMA2; (+) strand; PAM type: NNNNGHTT; PAM sequence: TTTGGTTT
ccctatgatagtaaattaca

SEQ ID NO: 50067 - DNA, 20 bp, Artificial Sequence
  Description of Artificial Sequence: Synthetic oligonucleotide
  Target: LAMA2; (+) strand; PAM type: NNNNGHTT; PAM sequence: CAATGTTT
tttaatttgcattccatttc

SEQ ID NO: 50068 - DNA, 20 bp, Artificial Sequence
  Description of Artificial Sequence: Synthetic oligonucleotide
  Target: LAMA2; (+) strand; PAM type: NNNNGHTT; PAM sequence: AGTAGCTT
actttttgagggcaaataaa

SEQ ID NO: 50069 - DNA, 20 bp, Artificial Sequence
  Description of Artificial Sequence: Synthetic oligonucleotide
  Target: LAMA2; (+) strand; PAM type: NNNNGHTT; PAM sequence: ATGTGTTT
atgtaaagggcactttcccc

SEQ ID NO: 50070 - DNA, 20 bp, Artificial Sequence
  Description of Artificial Sequence: Synthetic oligonucleotide
  Target: LAMA2; (+) strand; PAM type: NNNNGHTT; PAM sequence: AGAAGCTT
ttcatgagctagacttgtac

SEQ ID NO: 50071 - DNA, 20 bp, Artificial Sequence
  Description of Artificial Sequence: Synthetic oligonucleotide
  Target: LAMA2; (+) strand; PAM type: NNNNGHTT; PAM sequence: TATTGCTT
cattcagacagatgttagta

SEQ ID NO: 50072 - DNA, 20 bp, Artificial Sequence
  Description of Artificial Sequence: Synthetic oligonucleotide
  Target: LAMA2; (+) strand; PAM type: NNNNGHTT; PAM sequence: ATGTGCTT
cttacctttcacttatggaa

SEQ ID NO: 50073 - DNA, 20 bp, Artificial Sequence
  Description of Artificial Sequence: Synthetic oligonucleotide
  Target: LAMA2; (+) strand; PAM type: NNNNGHTT; PAM sequence: CCCTGATT
ctctagttctgcattctggt

SEQ ID NO: 50074 - DNA, 20 bp, Artificial Sequence
  Description of Artificial Sequence: Synthetic oligonucleotide
  Target: LAMA2; (+) strand; PAM type: NNNNGHTT; PAM sequence: AACTGATT
tagccatcctgttatcaaca

SEQ ID NO: 50075 - DNA, 20 bp, Artificial Sequence
  Description of Artificial Sequence: Synthetic oligonucleotide
  Target: LAMA2; (+) strand; PAM type: NNNNGHTT; PAM sequence: TAATGTTT
aaataaattaaagaataatt

SEQ ID NO: 50076 - DNA, 20 bp, Artificial Sequence
  Description of Artificial Sequence: Synthetic oligonucleotide
  Target: LAMA2; (+) strand; PAM type: NNNNGHTT; PAM sequence: AATTGCTT
ttggaggtgaaaaaagagca

SEQ ID NO: 50077 - DNA, 20 bp, Artificial Sequence
  Description of Artificial Sequence: Synthetic oligonucleotide
  Target: LAMA2; (+) strand; PAM type: NNNNGHTT; PAM sequence: GCTTGCTT
aggtgaaaaaagagcaaatt

SEQ ID NO: 50078 - DNA, 20 bp, Artificial Sequence
  Description of Artificial Sequence: Synthetic oligonucleotide
  Target: LAMA2; (+) strand; PAM type: NNNNGHTT; PAM sequence: TGCTGTTT
aaaattataattgttactac

SEQ ID NO: 50079 - DNA, 20 bp, Artificial Sequence
  Description of Artificial Sequence: Synthetic oligonucleotide
  Target: LAMA2; (+) strand; PAM type: NNNNGHTT; PAM sequence: TGCAGCTT
gctgtttttaacctatgaat

SEQ ID NO: 50080 - DNA, 20 bp, Artificial Sequence
  Description of Artificial Sequence: Synthetic oligonucleotide
  Target: LAMA2; (+) strand; PAM type: NNNNGHTT; PAM sequence: TATCGATT
acttgaaaaagtgtgtcagt

SEQ ID NO: 50081 - DNA, 20 bp, Artificial Sequence
  Description of Artificial Sequence: Synthetic oligonucleotide
  Target: LAMA2; (+) strand; PAM type: NNNNGHTT; PAM sequence: CAAAGTTT
attgtatcagttatacattc

SEQ ID NO: 50082 - DNA, 20 bp, Artificial Sequence
  Description of Artificial Sequence: Synthetic oligonucleotide
  Target: LAMA2; (+) strand; PAM type: NNNNGHTT; PAM sequence: AGTAGCTT
agttatacattccaaagttt

SEQ ID NO: 50083 - DNA, 20 bp, Artificial Sequence
  Description of Artificial Sequence: Synthetic oligonucleotide
  Target: LAMA2; (+) strand; PAM type: NNNNGHTT; PAM sequence: TCATGATT
aacaacaagtgcatacactc

SEQ ID NO: 50084 - DNA, 20 bp, Artificial Sequence
  Description of Artificial Sequence: Synthetic oligonucleotide
  Target: LAMA2; (+) strand; PAM type: NNNNGHTT; PAM sequence: CTGGGATT
ccttcctcaaggaggctaac

SEQ ID NO: 50085 - DNA, 20 bp, Artificial Sequence
  Description of Artificial Sequence: Synthetic oligonucleotide
  Target: LAMA2; (+) strand; PAM type: NNNNGHTT; PAM sequence: CCCAGATT
agagtatgttgcaaagctaa

SEQ ID NO: 50086 - DNA, 20 bp, Artificial Sequence
  Description of Artificial Sequence: Synthetic oligonucleotide
  Target: LAMA2; (+) strand; PAM type: NNNNGHTT; PAM sequence: CTCTGTTT
ttttttgagatggagtctca

SEQ ID NO: 50087 - DNA, 20 bp, Artificial Sequence
  Description of Artificial Sequence: Synthetic oligonucleotide
  Target: LAMA2; (+) strand; PAM type: NNNNGHTT; PAM sequence: TGGGGTTT
ttttgtatttttagtagaga

SEQ ID NO: 50088 - DNA, 20 bp, Artificial Sequence
  Description of Artificial Sequence: Synthetic oligonucleotide
  Target: LAMA2; (+) strand; PAM type: NNNNGHTT; PAM sequence: TACTGCTT
tgcccatctcaagcctccca

SEQ ID NO: 50089 - DNA, 20 bp, Artificial Sequence
  Description of Artificial Sequence: Synthetic oligonucleotide
  Target: LAMA2; (+) strand; PAM type: NNNNGHTT; PAM sequence: CTTGGATT
atctcaagcctcccatactg

SEQ ID NO: 50090 - DNA, 20 bp, Artificial Sequence
  Description of Artificial Sequence: Synthetic oligonucleotide
  Target: LAMA2; (+) strand; PAM type: NNNNGHTT; PAM sequence: CATCGCTT
taattgtccccagaaatgat

SEQ ID NO: 50091 - DNA, 20 bp, Artificial Sequence
  Description of Artificial Sequence: Synthetic oligonucleotide
  Target: LAMA2; (+) strand; PAM type: NNNNGHTT; PAM sequence: TAAAGTTT
gtcatggtgttctttcctcc

SEQ ID NO: 50092 - DNA, 20 bp, Artificial Sequence
  Description of Artificial Sequence: Synthetic oligonucleotide
  Target: LAMA2; (+) strand; PAM type: NNNNGHTT; PAM sequence: TGCTGATT
tctttcctcctaaagttttg

SEQ ID NO: 50093 - DNA, 20 bp, Artificial Sequence
  Description of Artificial Sequence: Synthetic oligonucleotide
  Target: LAMA2; (+) strand; PAM type: NNNNGHTT; PAM sequence: CATTGTTT
ttctctttctgtctctaaac

SEQ ID NO: 50094 - DNA, 20 bp, Artificial Sequence
  Description of Artificial Sequence: Synthetic oligonucleotide
  Target: LAMA2; (+) strand; PAM type: NNNNGHTT; PAM sequence: TGAGGTTT
tcctgttcctcacacatctg

SEQ ID NO: 50095 - DNA, 20 bp, Artificial Sequence
  Description of Artificial Sequence: Synthetic oligonucleotide
  Target: LAMA2; (+) strand; PAM type: NNNNGHTT; PAM sequence: AGAAGTTT
tctatcttgttctcacattc

SEQ ID NO: 50096 - DNA, 20 bp, Artificial Sequence
  Description of Artificial Sequence: Synthetic oligonucleotide
  Target: LAMA2; (+) strand; PAM type: NNNNGHTT; PAM sequence: AAGTGTTT
cttgccattctctttgtcca

SEQ ID NO: 50097 - DNA, 20 bp, Artificial Sequence
  Description of Artificial Sequence: Synthetic oligonucleotide
  Target: LAMA2; (+) strand; PAM type: NNNNGHTT; PAM sequence: AGGTGTTT
tttcctaggcaccataacca

SEQ ID NO: 50098 - DNA, 20 bp, Artificial Sequence
  Description of Artificial Sequence: Synthetic oligonucleotide
  Target: LAMA2; (+) strand; PAM type: NNNNGHTT; PAM sequence: GGGAGTTT
gtatagggctgggggtggtg

SEQ ID NO: 50099 - DNA, 20 bp, Artificial Sequence
  Description of Artificial Sequence: Synthetic oligonucleotide
  Target: LAMA2; (+) strand; PAM type: NNNNGHTT; PAM sequence: TGAAGATT
cttccaaatccttgctccct

SEQ ID NO: 50100 - DNA, 20 bp, Artificial Sequence
  Description of Artificial Sequence: Synthetic oligonucleotide
  Target: LAMA2; (+) strand; PAM type: NNNNGHTT; PAM sequence: AGTGGTTT
tataatttatcacctggtcc

SEQ ID NO: 50101 - DNA, 20 bp, Artificial Sequence
  Description of Artificial Sequence: Synthetic oligonucleotide
  Target: LAMA2; (+) strand; PAM type: NNNNGHTT; PAM sequence: CATGGTTT
gtggttttatcctttggcta

SEQ ID NO: 50102 - DNA, 20 bp, Artificial Sequence
  Description of Artificial Sequence: Synthetic oligonucleotide
  Target: LAMA2; (+) strand; PAM type: NNNNGHTT; PAM sequence: AGGAGTTT
caggaggatcactttagccc

SEQ ID NO: 50103 - DNA, 20 bp, Artificial Sequence
  Description of Artificial Sequence: Synthetic oligonucleotide
  Target: LAMA2; (+) strand; PAM type: NNNNGHTT; PAM sequence: ATGTGATT
tctgtattttataaatgttc

SEQ ID NO: 50104 - DNA, 20 bp, Artificial Sequence
  Description of Artificial Sequence: Synthetic oligonucleotide
  Target: LAMA2; (+) strand; PAM type: NNNNGHTT; PAM sequence: CGCAGATT
tgtgcagagataatgtggga

SEQ ID NO: 50105 - DNA, 20 bp, Artificial Sequence
  Description of Artificial Sequence: Synthetic oligonucleotide
  Target: LAMA2; (+) strand; PAM type: NNNNGHTT; PAM sequence: TTCTGATT
gagataatgtgggacgcaga

SEQ ID NO: 50106 - DNA, 20 bp, Artificial Sequence
  Description of Artificial Sequence: Synthetic oligonucleotide
  Target: LAMA2; (+) strand; PAM type: NNNNGHTT; PAM sequence: GCCCGATT
tttcctagatctggggtaga

SEQ ID NO: 50107 - DNA, 20 bp, Artificial Sequence
  Description of Artificial Sequence: Synthetic oligonucleotide
  Target: LAMA2; (+) strand; PAM type: NNNNGHTT; PAM sequence: ATAAGCTT
agcccgattatacatttcta

SEQ ID NO: 50108 - DNA, 20 bp, Artificial Sequence
  Description of Artificial Sequence: Synthetic oligonucleotide
  Target: LAMA2; (+) strand; PAM type: NNNNGHTT; PAM sequence: GTCTGATT
aggtggtgccaaaactgttg

SEQ ID NO: 50109 - DNA, 20 bp, Artificial Sequence
  Description of Artificial Sequence: Synthetic oligonucleotide
  Target: LAMA2; (+) strand; PAM type: NNNNGHTT; PAM sequence: GGGAGCTT
caacagtagcaatatcacct

SEQ ID NO: 50110 - DNA, 20 bp, Artificial Sequence
  Description of Artificial Sequence: Synthetic oligonucleotide
  Target: LAMA2; (+) strand; PAM type: NNNNGHTT; PAM sequence: TCCTGATT
aaccaggtgatcaaatcacc

SEQ ID NO: 50111 - DNA, 20 bp, Artificial Sequence
  Description of Artificial Sequence: Synthetic oligonucleotide
  Target: LAMA2; (+) strand; PAM type: NNNNGHTT; PAM sequence: CTAGGATT
agggggtgtggaccagccct

SEQ ID NO: 50112 - DNA, 20 bp, Artificial Sequence
  Description of Artificial Sequence: Synthetic oligonucleotide
  Target: LAMA2; (+) strand; PAM type: NNNNGHTT; PAM sequence: TAAAGCTT
ctggtggttctgaggcccac

SEQ ID NO: 50113 - DNA, 20 bp, Artificial Sequence
  Description of Artificial Sequence: Synthetic oligonucleotide
  Target: LAMA2; (+) strand; PAM type: NNNNGHTT; PAM sequence: TGGTGTTT
gagaaccagactgtggatct

SEQ ID NO: 50114 - DNA, 20 bp, Artificial Sequence
  Description of Artificial Sequence: Synthetic oligonucleotide
  Target: LAMA2; (+) strand; PAM type: NNNNGHTT; PAM sequence: TTGTGTTT
gcacttaactgagttctatg

SEQ ID NO: 50115 - DNA, 20 bp, Artificial Sequence
  Description of Artificial Sequence: Synthetic oligonucleotide
  Target: LAMA2; (+) strand; PAM type: NNNNGHTT; PAM sequence: AATTGTTT
ttctatgttgtgttttctct

SEQ ID NO: 50116 - DNA, 20 bp, Artificial Sequence
  Description of Artificial Sequence: Synthetic oligonucleotide
  Target: LAMA2; (+) strand; PAM type: NNNNGHTT; PAM sequence: TGAAGTTT
tttaatgtggacaagtctgt

SEQ ID NO: 50117 - DNA, 20 bp, Artificial Sequence
  Description of Artificial Sequence: Synthetic oligonucleotide
  Target: LAMA2; (+) strand; PAM type: NNNNGHTT; PAM sequence: CTTGGTTT
gaagccaaaataatctttta

SEQ ID NO: 50118 - DNA, 20 bp, Artificial Sequence
  Description of Artificial Sequence: Synthetic oligonucleotide
  Target: LAMA2; (+) strand; PAM type: NNNNGHTT; PAM sequence: TTTGGTTT
tggtttccatgcagtgcaaa

SEQ ID NO: 50119 - DNA, 20 bp, Artificial Sequence
  Description of Artificial Sequence: Synthetic oligonucleotide
  Target: LAMA2; (+) strand; PAM type: NNNNGHTT; PAM sequence: TTCAGCTT
ctccaaagcctctttgttca

SEQ ID NO: 50120 - DNA, 20 bp, Artificial Sequence
  Description of Artificial Sequence: Synthetic oligonucleotide
  Target: LAMA2; (+) strand; PAM type: NNNNGHTT; PAM sequence: AGGAGCTT
cattcagcttgtgaagcatc

SEQ ID NO: 50121 - DNA, 20 bp, Artificial Sequence
  Description of Artificial Sequence: Synthetic oligonucleotide
  Target: LAMA2; (+) strand; PAM type: NNNNGHTT; PAM sequence: AGCTGATT
tgcaggtgtcacctgcaaga

SEQ ID NO: 50122 - DNA, 20 bp, Artificial Sequence
  Description of Artificial Sequence: Synthetic oligonucleotide
  Target: LAMA2; (+) strand; PAM type: NNNNGHTT; PAM sequence: GGCAGTTT
tttattaaaagccctgccag

SEQ ID NO: 50123 - DNA, 20 bp, Artificial Sequence
  Description of Artificial Sequence: Synthetic oligonucleotide
  Target: LAMA2; (+) strand; PAM type: NNNNGHTT; PAM sequence: CTTTGTTT
tcactctccgtcctccttct

SEQ ID NO: 50124 - DNA, 20 bp, Artificial Sequence
  Description of Artificial Sequence: Synthetic oligonucleotide
  Target: LAMA2; (+) strand; PAM type: NNNNGHTT; PAM sequence: AATGGTTT
tttgtttacaagcaccagtt

SEQ ID NO: 50125 - DNA, 20 bp, Artificial Sequence
  Description of Artificial Sequence: Synthetic oligonucleotide
  Target: LAMA2; (+) strand; PAM type: NNNNGHTT; PAM sequence: TGCTGTTT
cattaagcagctcaggggac

SEQ ID NO: 50126 - DNA, 20 bp, Artificial Sequence
  Description of Artificial Sequence: Synthetic oligonucleotide
  Target: LAMA2; (+) strand; PAM type: NNNNGHTT; PAM sequence: CCAAGTTT
gagacctaattgaattcttg

SEQ ID NO: 50127 - DNA, 20 bp, Artificial Sequence
  Description of Artificial Sequence: Synthetic oligonucleotide
  Target: LAMA2; (+) strand; PAM type: NNNNGHTT; PAM sequence: ACATGTTT
caatgcaaaactaaaaatat

SEQ ID NO: 50128 - DNA, 20 bp, Artificial Sequence
  Description of Artificial Sequence: Synthetic oligonucleotide
  Target: LAMA2; (+) strand; PAM type: NNNNGHTT; PAM sequence: AAAAGATT
acatgttttttaaatctgct

SEQ ID NO: 50129 - DNA, 20 bp, Artificial Sequence
  Description of Artificial Sequence: Synthetic oligonucleotide
  Target: LAMA2; (+) strand; PAM type: NNNNGHTT; PAM sequence: CAGTGATT
ctaagccattaaaaccactc

SEQ ID NO: 50130 - DNA, 20 bp, Artificial Sequence
  Description of Artificial Sequence: Synthetic oligonucleotide
  Target: LAMA2; (+) strand; PAM type: NNNNGHTT; PAM sequence: ATGAGATT
attggggatgacatttcaat

SEQ ID NO: 50131 - DNA, 20 bp, Artificial Sequence
  Description of Artificial Sequence: Synthetic oligonucleotide
  Target: LAMA2; (+) strand; PAM type: NNNNGHTT; PAM sequence: TATAGTTT
attcttggctacttaaagaa

SEQ ID NO: 50132 - DNA, 20 bp, Artificial Sequence
  Description of Artificial Sequence: Synthetic oligonucleotide
  Target: LAMA2; (+) strand; PAM type: NNNNGHTT; PAM sequence: TAGGGATT
aaagaggttaatcatcaaag

SEQ ID NO: 50133 - DNA, 20 bp, Artificial Sequence
  Description of Artificial Sequence: Synthetic oligonucleotide
  Target: LAMA2; (+) strand; PAM type: NNNNGHTT; PAM sequence: CCCAGTTT
gctcactgcaacctccgcct

SEQ ID NO: 50134 - DNA, 20 bp, Artificial Sequence
  Description of Artificial Sequence: Synthetic oligonucleotide
  Target: LAMA2; (+) strand; PAM type: NNNNGHTT; PAM sequence: AAGTGATT
aacctccgcctcccagtttc

SEQ ID NO: 50135 - DNA, 20 bp, Artificial Sequence
  Description of Artificial Sequence: Synthetic oligonucleotide
  Target: LAMA2; (+) strand; PAM type: NNNNGHTT; PAM sequence: CAGGGTTT
ttttgtatttttagtagaga

SEQ ID NO: 50136 - DNA, 20 bp, Artificial Sequence
  Description of Artificial Sequence: Synthetic oligonucleotide
  Target: LAMA2; (+) strand; PAM type: NNNNGHTT; PAM sequence: TTGGGATT
cacctcggcctctcaaagtg

SEQ ID NO: 50137 - DNA, 20 bp, Artificial Sequence
  Description of Artificial Sequence: Synthetic oligonucleotide
  Target: LAMA2; (+) strand; PAM type: NNNNGHTT; PAM sequence: GCATGTTT
ccacacatttagactctgga

SEQ ID NO: 50138 - DNA, 20 bp, Artificial Sequence
  Description of Artificial Sequence: Synthetic oligonucleotide
  Target: LAMA2; (+) strand; PAM type: NNNNGHTT; PAM sequence: TTTCGATT
attccctgtggacaggttcc

SEQ ID NO: 50139 - DNA, 20 bp, Artificial Sequence
  Description of Artificial Sequence: Synthetic oligonucleotide
  Target: LAMA2; (+) strand; PAM type: NNNNGHTT; PAM sequence: TAGGGATT
gttcctttcgattgctcatg

SEQ ID NO: 50140 - DNA, 20 bp, Artificial Sequence
  Description of Artificial Sequence: Synthetic oligonucleotide
  Target: LAMA2; (+) strand; PAM type: NNNNGHTT; PAM sequence: CTCAGTTT
ttgctcctcctctttggtcc

SEQ ID NO: 50141 - DNA, 20 bp, Artificial Sequence
  Description of Artificial Sequence: Synthetic oligonucleotide
  Target: LAMA2; (+) strand; PAM type: NNNNGHTT; PAM sequence: AGTAGTTT
agcattaatattctgagatg

SEQ ID NO: 50142 - DNA, 20 bp, Artificial Sequence
  Description of Artificial Sequence: Synthetic oligonucleotide
  Target: LAMA2; (+) strand; PAM type: NNNNGHTT; PAM sequence: GGATGTTT
attctttgaacatctgcctg

SEQ ID NO: 50143 - DNA, 20 bp, Artificial Sequence
  Description of Artificial Sequence: Synthetic oligonucleotide
  Target: LAMA2; (+) strand; PAM type: NNNNGHTT; PAM sequence: CACAGTTT
actctttgtcacttctcttt

SEQ ID NO: 50144 - DNA, 20 bp, Artificial Sequence
  Description of Artificial Sequence: Synthetic oligonucleotide
  Target: LAMA2; (+) strand; PAM type: NNNNGHTT; PAM sequence: AGAAGCTT
agggccagggacaaggtgac

SEQ ID NO: 50145 - DNA, 20 bp, Artificial Sequence
  Description of Artificial Sequence: Synthetic oligonucleotide
  Target: LAMA2; (+) strand; PAM type: NNNNGHTT; PAM sequence: CAGTGTTT
aattcagagactttcttaac

SEQ ID NO: 50146 - DNA, 20 bp, Artificial Sequence
  Description of Artificial Sequence: Synthetic oligonucleotide
  Target: LAMA2; (+) strand; PAM type: NNNNGHTT; PAM sequence: TACAGATT
caaactcaagaactataata

SEQ ID NO: 50147 - DNA, 20 bp, Artificial Sequence
  Description of Artificial Sequence: Synthetic oligonucleotide
  Target: LAMA2; (+) strand; PAM type: NNNNGHTT; PAM sequence: ATCAGTTT
ccccccagtgtctggcctaa

SEQ ID NO: 50148 - DNA, 20 bp, Artificial Sequence
  Description of Artificial Sequence: Synthetic oligonucleotide
  Target: LAMA2; (+) strand; PAM type: NNNNGHTT; PAM sequence: ACATGATT
aaaaacattaatataaagta

SEQ ID NO: 50149 - DNA, 20 bp, Artificial Sequence
  Description of Artificial Sequence: Synthetic oligonucleotide
  Target: LAMA2; (+) strand; PAM type: NNNNGHTT; PAM sequence: TGCTGCTT
gattttggctgaatggaaat

SEQ ID NO: 50150 - DNA, 20 bp, Artificial Sequence
  Description of Artificial Sequence: Synthetic oligonucleotide
  Target: LAMA2; (+) strand; PAM type: NNNNGHTT; PAM sequence: ACAAGTTT
atgaatgtgagcatcacttg

SEQ ID NO: 50151 - DNA, 20 bp, Artificial Sequence
  Description of Artificial Sequence: Synthetic oligonucleotide
  Target: LAMA2; (+) strand; PAM type: NNNNGHTT; PAM sequence: AAATGCTT
gtgcctagcctgggatccag

SEQ ID NO: 50152 - DNA, 20 bp, Artificial Sequence
  Description of Artificial Sequence: Synthetic oligonucleotide
  Target: LAMA2; (+) strand; PAM type: NNNNGHTT; PAM sequence: ACATGATT
gttatcatcaaaatgaaaac

SEQ ID NO: 50153 - DNA, 20 bp, Artificial Sequence
  Description of Artificial Sequence: Synthetic oligonucleotide
  Target: LAMA2; (+) strand; PAM type: NNNNGHTT; PAM sequence: ACCAGTTT
ttaaaagttcttcaacaagc

SEQ ID NO: 50154 - DNA, 20 bp, Artificial Sequence
  Description of Artificial Sequence: Synthetic oligonucleotide
  Target: LAMA2; (+) strand; PAM type: NNNNGHTT; PAM sequence: TAAAGCTT
acactgttctaaattgtggt

SEQ ID NO: 50155 - DNA, 20 bp, Artificial Sequence
  Description of Artificial Sequence: Synthetic oligonucleotide
  Target: LAMA2; (+) strand; PAM type: NNNNGHTT; PAM sequence: GGTTGTTT
gaaaacattaaagaaattgg

SEQ ID NO: 50156 - DNA, 20 bp, Artificial Sequence
  Description of Artificial Sequence: Synthetic oligonucleotide
  Target: LAMA2; (+) strand; PAM type: NNNNGHTT; PAM sequence: TGGGGATT
cagcattgcacttggttccc

SEQ ID NO: 50157 - DNA, 20 bp, Artificial Sequence
  Description of Artificial Sequence: Synthetic oligonucleotide
  Target: LAMA2; (+) strand; PAM type: NNNNGHTT; PAM sequence: TGTAGATT
tcttcactacccttaggaaa

SEQ ID NO: 50158 - DNA, 20 bp, Artificial Sequence
  Description of Artificial Sequence: Synthetic oligonucleotide
  Target: LAMA2; (+) strand; PAM type: NNNNGHTT; PAM sequence: ATGTGCTT
ccttaggaaatgtagattct

SEQ ID NO: 50159 - DNA, 20 bp, Artificial Sequence
  Description of Artificial Sequence: Synthetic oligonucleotide
  Target: LAMA2; (+) strand; PAM type: NNNNGHTT; PAM sequence: ATGTGTTT
agcaagaatacataatgacc

SEQ ID NO: 50160 - DNA, 20 bp, Artificial Sequence
  Description of Artificial Sequence: Synthetic oligonucleotide
  Target: LAMA2; (+) strand; PAM type: NNNNGHTT; PAM sequence: GTAAGATT
cacagagactggagaaatca

SEQ ID NO: 50161 - DNA, 20 bp, Artificial Sequence
  Description of Artificial Sequence: Synthetic oligonucleotide
  Target: LAMA2; (+) strand; PAM type: NNNNGHTT; PAM sequence: TGTTGCTT
aattttagtagagaagtatt

SEQ ID NO: 50162 - DNA, 20 bp, Artificial Sequence
  Description of Artificial Sequence: Synthetic oligonucleotide
  Target: LAMA2; (+) strand; PAM type: NNNNGHTT; PAM sequence: CTAAGATT
gttgctttagaggaaggcat

SEQ ID NO: 50163 - DNA, 20 bp, Artificial Sequence
  Description of Artificial Sequence: Synthetic oligonucleotide
  Target: LAMA2; (+) strand; PAM type: NNNNGHTT; PAM sequence: AATGGATT
ggcaattgactgaagtctta

SEQ ID NO: 50164 - DNA, 20 bp, Artificial Sequence
  Description of Artificial Sequence: Synthetic oligonucleotide
  Target: LAMA2; (+) strand; PAM type: NNNNGHTT; PAM sequence: CATAGCTT
gtcttaaatggattaccata

SEQ ID NO: 50165 - DNA, 20 bp, Artificial Sequence
  Description of Artificial Sequence: Synthetic oligonucleotide
  Target: LAMA2; (+) strand; PAM type: NNNNGHTT; PAM sequence: AACTGATT
ctgctgtgacaaataccata

SEQ ID NO: 50166 - DNA, 20 bp, Artificial Sequence
  Description of Artificial Sequence: Synthetic oligonucleotide
  Target: LAMA2; (+) strand; PAM type: NNNNGHTT; PAM sequence: ATTAGCTT
gtgacaaataccataaactg

SEQ ID NO: 50167 - DNA, 20 bp, Artificial Sequence
  Description of Artificial Sequence: Synthetic oligonucleotide
  Target: LAMA2; (+) strand; PAM type: NNNNGHTT; PAM sequence: CTGTGCTT
aggacacagggagaaggcag

SEQ ID NO: 50168 - DNA, 20 bp, Artificial Sequence
  Description of Artificial Sequence: Synthetic oligonucleotide
  Target: LAMA2; (+) strand; PAM type: NNNNGHTT; PAM sequence: CTGAGTTT
tgaaagccaggcagaggaac

SEQ ID NO: 50169 - DNA, 20 bp, Artificial Sequence
  Description of Artificial Sequence: Synthetic oligonucleotide
  Target: LAMA2; (+) strand; PAM type: NNNNGHTT; PAM sequence: AAGAGTTT
tcctggtattcagggaagtg

SEQ ID NO: 50170 - DNA, 20 bp, Artificial Sequence
  Description of Artificial Sequence: Synthetic oligonucleotide
  Target: LAMA2; (+) strand; PAM type: NNNNGHTT; PAM sequence: AAGGGATT
ttgtgaacatcttctaagcc

SEQ ID NO: 50171 - DNA, 20 bp, Artificial Sequence
  Description of Artificial Sequence: Synthetic oligonucleotide
  Target: LAMA2; (+) strand; PAM type: NNNNGHTT; PAM sequence: CCTGGATT
ctggatattgatccagatga

SEQ ID NO: 50172 - DNA, 20 bp, Artificial Sequence
  Description of Artificial Sequence: Synthetic oligonucleotide
  Target: LAMA2; (+) strand; PAM type: NNNNGHTT; PAM sequence: TCTTGATT
tatccttaaattctagtctt

SEQ ID NO: 50173 - DNA, 20 bp, Artificial Sequence
  Description of Artificial Sequence: Synthetic oligonucleotide
  Target: LAMA2; (+) strand; PAM type: NNNNGHTT; PAM sequence: CCAAGCTT
tttaactatgtcagtgctcc

SEQ ID NO: 50174 - DNA, 20 bp, Artificial Sequence
  Description of Artificial Sequence: Synthetic oligonucleotide
  Target: LAMA2; (+) strand; PAM type: NNNNGHTT; PAM sequence: GTGGGATT
cacacatgtgatggaacaaa

SEQ ID NO: 50175 - DNA, 20 bp, Artificial Sequence
  Description of Artificial Sequence: Synthetic oligonucleotide
  Target: LAMA2; (+) strand; PAM type: NNNNGHTT; PAM sequence: CTATGATT
agaacagagggaggataaag

SEQ ID NO: 50176 - DNA, 20 bp, Artificial Sequence
  Description of Artificial Sequence: Synthetic oligonucleotide
  Target: LAMA2; (+) strand; PAM type: NNNNGHTT; PAM sequence: GGTAGTTT
gccaggaaatgggaggttgg

SEQ ID NO: 50177 - DNA, 20 bp, Artificial Sequence
  Description of Artificial Sequence: Synthetic oligonucleotide
  Target: LAMA2; (+) strand; PAM type: NNNNGHTT; PAM sequence: TATGGTTT
gtggtctacacaaaacccgc

SEQ ID NO: 50178 - DNA, 20 bp, Artificial Sequence
  Description of Artificial Sequence: Synthetic oligonucleotide
  Target: LAMA2; (+) strand; PAM type: NNNNGHTT; PAM sequence: CTGCGCTT
aaaacccgctatggttttgt

SEQ ID NO: 50179 - DNA, 20 bp, Artificial Sequence
  Description of Artificial Sequence: Synthetic oligonucleotide
  Target: LAMA2; (+) strand; PAM type: NNNNGHTT; PAM sequence: TTCTGTTT
ttacagggtagtctcttttt

SEQ ID NO: 50180 - DNA, 20 bp, Artificial Sequence
  Description of Artificial Sequence: Synthetic oligonucleotide
  Target: LAMA2; (+) strand; PAM type: NNNNGHTT; PAM sequence: ATGAGATT
cttgtctaatttagtgtcct

SEQ ID NO: 50181 - DNA, 20 bp, Artificial Sequence
  Description of Artificial Sequence: Synthetic oligonucleotide
  Target: LAMA2; (+) strand; PAM type: NNNNGHTT; PAM sequence: AGGAGTTT
agccttaaatgggccaggca

SEQ ID NO: 50182 - DNA, 20 bp, Artificial Sequence
  Description of Artificial Sequence: Synthetic oligonucleotide
  Target: LAMA2; (+) strand; PAM type: NNNNGHTT; PAM sequence: GACAGTTT
acatttttaactgtcttcaa

SEQ ID NO: 50183 - DNA, 20 bp, Artificial Sequence
  Description of Artificial Sequence: Synthetic oligonucleotide
  Target: LAMA2; (+) strand; PAM type: NNNNGHTT; PAM sequence: TAATGCTT
tgctctttcatgaaatggaa

SEQ ID NO: 50184 - DNA, 20 bp, Artificial Sequence
  Description of Artificial Sequence: Synthetic oligonucleotide
  Target: LAMA2; (+) strand; PAM type: NNNNGHTT; PAM sequence: AATAGTTT
atgtgtaagtgcccagttga

SEQ ID NO: 50185 - DNA, 20 bp, Artificial Sequence
  Description of Artificial Sequence: Synthetic oligonucleotide
  Target: LAMA2; (+) strand; PAM type: NNNNGHTT; PAM sequence: AAATGTTT
actgcaaggccatttactaa

SEQ ID NO: 50186 - DNA, 20 bp, Artificial Sequence
  Description of Artificial Sequence: Synthetic oligonucleotide
  Target: LAMA2; (+) strand; PAM type: NNNNGHTT; PAM sequence: AGAGGCTT
gtcacctcagcgggccccag

SEQ ID NO: 50187 - DNA, 20 bp, Artificial Sequence
  Description of Artificial Sequence: Synthetic oligonucleotide
  Target: LAMA2; (+) strand; PAM type: NNNNGHTT; PAM sequence: GATAGATT
ttatgaatcttctgaaagca

SEQ ID NO: 50188 - DNA, 20 bp, Artificial Sequence
  Description of Artificial Sequence: Synthetic oligonucleotide
  Target: LAMA2; (+) strand; PAM type: NNNNGHTT; PAM sequence: TTCTGCTT
gatgtattctgacttgctaa

SEQ ID NO: 50189 - DNA, 20 bp, Artificial Sequence
  Description of Artificial Sequence: Synthetic oligonucleotide
  Target: LAMA2; (+) strand; PAM type: NNNNGHTT; PAM sequence: TAAAGTTT
ttattcagtagcctccgtgg

SEQ ID NO: 50190 - DNA, 20 bp, Artificial Sequence
  Description of Artificial Sequence: Synthetic oligonucleotide
  Target: LAMA2; (+) strand; PAM type: NNNNGHTT; PAM sequence: TTCTGATT
cgtggtaaagtttgtatctg

SEQ ID NO: 50191 - DNA, 20 bp, Artificial Sequence
  Description of Artificial Sequence: Synthetic oligonucleotide
  Target: LAMA2; (+) strand; PAM type: NNNNGHTT; PAM sequence: CTTTGATT
ctgatttccaaaagcactat

SEQ ID NO: 50192 - DNA, 20 bp, Artificial Sequence
  Description of Artificial Sequence: Synthetic oligonucleotide
  Target: LAMA2; (+) strand; PAM type: NNNNGHTT; PAM sequence: AAATGCTT
agagaaagaaaaacaaatga

SEQ ID NO: 50193 - DNA, 20 bp, Artificial Sequence
  Description of Artificial Sequence: Synthetic oligonucleotide
  Target: LAMA2; (+) strand; PAM type: NNNNGHTT; PAM sequence: GTGGGATT
gtggtctctttcatctcatc

SEQ ID NO: 50194 - DNA, 20 bp, Artificial Sequence
  Description of Artificial Sequence: Synthetic oligonucleotide
  Target: LAMA2; (+) strand; PAM type: NNNNGHTT; PAM sequence: AAGTGCTT
ttctctattgtgagactcca

SEQ ID NO: 50195 - DNA, 20 bp, Artificial Sequence
  Description of Artificial Sequence: Synthetic oligonucleotide
  Target: LAMA2; (+) strand; PAM type: NNNNGHTT; PAM sequence: TCAGGCTT
taaagtccatgttgcattta

SEQ ID NO: 50196 - DNA, 20 bp, Artificial Sequence
  Description of Artificial Sequence: Synthetic oligonucleotide
  Target: LAMA2; (+) strand; PAM type: NNNNGHTT; PAM sequence: TACGGATT
ctagaaacggggctgcaaag

SEQ ID NO: 50197 - DNA, 20 bp, Artificial Sequence
  Description of Artificial Sequence: Synthetic oligonucleotide
  Target: LAMA2; (+) strand; PAM type: NNNNGHTT; PAM sequence: ATTTGATT
ggctgcaaagtacggattta

SEQ ID NO: 50198 - DNA, 20 bp, Artificial Sequence
  Description of Artificial Sequence: Synthetic oligonucleotide
  Target: LAMA2; (+) strand; PAM type: NNNNGHTT; PAM sequence: AAGAGCTT
cggatttaatttgattatct

SEQ ID NO: 50199 - DNA, 20 bp, Artificial Sequence
  Description of Artificial Sequence: Synthetic oligonucleotide
  Target: LAMA2; (+) strand; PAM type: NNNNGHTT; PAM sequence: TGGGGATT
tattggagctagaaggttcc

SEQ ID NO: 50200 - DNA, 20 bp, Artificial Sequence
  Description of Artificial Sequence: Synthetic oligonucleotide
  Target: LAMA2; (+) strand; PAM type: NNNNGHTT; PAM sequence: TCAAGATT
gacttaagctggacccagtc

SEQ ID NO: 50201 - DNA, 20 bp, Artificial Sequence
  Description of Artificial Sequence: Synthetic oligonucleotide
  Target: LAMA2; (+) strand; PAM type: NNNNGHTT; PAM sequence: GTCGGTTT
ctttttctacatagcctgct

SEQ ID NO: 50202 - DNA, 20 bp, Artificial Sequence
  Description of Artificial Sequence: Synthetic oligonucleotide
  Target: LAMA2; (+) strand; PAM type: NNNNGHTT; PAM sequence: ATAGGCTT
aatatccacaggaaaatcaa

SEQ ID NO: 50203 - DNA, 20 bp, Artificial Sequence
  Description of Artificial Sequence: Synthetic oligonucleotide
  Target: LAMA2; (+) strand; PAM type: NNNNGHTT; PAM sequence: CGGAGTTT
tagaatgtacagatacaaca

SEQ ID NO: 50204 - DNA, 20 bp, Artificial Sequence
  Description of Artificial Sequence: Synthetic oligonucleotide
  Target: LAMA2; (+) strand; PAM type: NNNNGHTT; PAM sequence: ATTAGATT
cttgccaaatgtatgtagac

SEQ ID NO: 50205 - DNA, 20 bp, Artificial Sequence
  Description of Artificial Sequence: Synthetic oligonucleotide
  Target: LAMA2; (+) strand; PAM type: NNNNGHTT; PAM sequence: ATCTGCTT
tttaataatagaataatttc

SEQ ID NO: 50206 - DNA, 20 bp, Artificial Sequence
  Description of Artificial Sequence: Synthetic oligonucleotide
  Target: LAMA2; (+) strand; PAM type: NNNNGHTT; PAM sequence: ATTGGCTT
actgcgcagtccttgccctc

SEQ ID NO: 50207 - DNA, 20 bp, Artificial Sequence
  Description of Artificial Sequence: Synthetic oligonucleotide
  Target: LAMA2; (+) strand; PAM type: NNNNGHTT; PAM sequence: AAGTGATT
aacctccgcctcccgggttc

SEQ ID NO: 50208 - DNA, 20 bp, Artificial Sequence
  Description of Artificial Sequence: Synthetic oligonucleotide
  Target: LAMA2; (+) strand; PAM type: NNNNGHTT; PAM sequence: CTGGGATT
tgcctcagcctcccaagtag

SEQ ID NO: 50209 - DNA, 20 bp, Artificial Sequence
  Description of Artificial Sequence: Synthetic oligonucleotide
  Target: LAMA2; (+) strand; PAM type: NNNNGHTT; PAM sequence: ACGGGTTT
tttttgtatttttagtagag

SEQ ID NO: 50210 - DNA, 20 bp, Artificial Sequence
  Description of Artificial Sequence: Synthetic oligonucleotide
  Target: LAMA2; (+) strand; PAM type: NNNNGHTT; PAM sequence: TTGTGATT
ctggtcttgaactcctgacc

SEQ ID NO: 50211 - DNA, 20 bp, Artificial Sequence
  Description of Artificial Sequence: Synthetic oligonucleotide
  Target: LAMA2; (+) strand; PAM type: NNNNGHTT; PAM sequence: CTGGGATT
tgccttggcctcccaaaatg

SEQ ID NO: 50212 - DNA, 20 bp, Artificial Sequence
  Description of Artificial Sequence: Synthetic oligonucleotide
  Target: LAMA2; (+) strand; PAM type: NNNNGHTT; PAM sequence: AGCAGATT
ctatactctttaccctttcc

SEQ ID NO: 50213 - DNA, 20 bp, Artificial Sequence
  Description of Artificial Sequence: Synthetic oligonucleotide
  Target: LAMA2; (+) strand; PAM type: NNNNGHTT; PAM sequence: CTATGTTT
ttccagcagattgtctcatg

SEQ ID NO: 50214 - DNA, 20 bp, Artificial Sequence
  Description of Artificial Sequence: Synthetic oligonucleotide
  Target: LAMA2; (+) strand; PAM type: NNNNGHTT; PAM sequence: AACAGCTT
aaacagactttattttttag

SEQ ID NO: 50215 - DNA, 20 bp, Artificial Sequence
  Description of Artificial Sequence: Synthetic oligonucleotide
  Target: LAMA2; (+) strand; PAM type: NNNNGHTT; PAM sequence: CATAGTTT
cctcctcatcacccaaagtc

SEQ ID NO: 50216 - DNA, 20 bp, Artificial Sequence
  Description of Artificial Sequence: Synthetic oligonucleotide
  Target: LAMA2; (+) strand; PAM type: NNNNGHTT; PAM sequence: ATGGGTTT
ctcttggtattgtacattct

SEQ ID NO: 50217 - DNA, 20 bp, Artificial Sequence
  Description of Artificial Sequence: Synthetic oligonucleotide
  Target: LAMA2; (+) strand; PAM type: NNNNGHTT; PAM sequence: AAAAGTTT
accgttgttgtaaaatatag

SEQ ID NO: 50218 - DNA, 20 bp, Artificial Sequence
  Description of Artificial Sequence: Synthetic oligonucleotide
  Target: LAMA2; (+) strand; PAM type: NNNNGHTT; PAM sequence: CTATGCTT
tttactgcccgaaaactcct

SEQ ID NO: 50219 - DNA, 20 bp, Artificial Sequence
  Description of Artificial Sequence: Synthetic oligonucleotide
  Target: LAMA2; (+) strand; PAM type: NNNNGHTT; PAM sequence: CATAGTTT
actcatatttttactacatc

SEQ ID NO: 50220 - DNA, 20 bp, Artificial Sequence
  Description of Artificial Sequence: Synthetic oligonucleotide
  Target: LAMA2; (+) strand; PAM type: NNNNGHTT; PAM sequence: ATTAGCTT
acagtgtggtactttttcat

SEQ ID NO: 50221 - DNA, 20 bp, Artificial Sequence
  Description of Artificial Sequence: Synthetic oligonucleotide
  Target: LAMA2; (+) strand; PAM type: NNNNGHTT; PAM sequence: TAAGGTTT
ttcccttggtaatatacact

SEQ ID NO: 50222 - DNA, 20 bp, Artificial Sequence
  Description of Artificial Sequence: Synthetic oligonucleotide
  Target: LAMA2; (+) strand; PAM type: NNNNGHTT; PAM sequence: CATTGTTT
tgtagtgttgaataatattt

SEQ ID NO: 50223 - DNA, 20 bp, Artificial Sequence
  Description of Artificial Sequence: Synthetic oligonucleotide
  Target: LAMA2; (+) strand; PAM type: NNNNGHTT; PAM sequence: CACTGTTT
atttcattgtttagacatat

SEQ ID NO: 50224 - DNA, 20 bp, Artificial Sequence
  Description of Artificial Sequence: Synthetic oligonucleotide
  Target: LAMA2; (+) strand; PAM type: NNNNGHTT; PAM sequence: GGTTGCTT
cccctactgaaggacatctt

SEQ ID NO: 50225 - DNA, 20 bp, Artificial Sequence
  Description of Artificial Sequence: Synthetic oligonucleotide
  Target: LAMA2; (+) strand; PAM type: NNNNGHTT; PAM sequence: TTAAGTTT
gtgcagacttttgtgtggac

SEQ ID NO: 50226 - DNA, 20 bp, Artificial Sequence
  Description of Artificial Sequence: Synthetic oligonucleotide
  Target: LAMA2; (+) strand; PAM type: NNNNGHTT; PAM sequence: GCATGATT
atttgggtgaatataaagga

SEQ ID NO: 50227 - DNA, 20 bp, Artificial Sequence
  Description of Artificial Sequence: Synthetic oligonucleotide
  Target: LAMA2; (+) strand; PAM type: NNNNGHTT; PAM sequence: TTTAGTTT
gatggtatggtaagagtata

SEQ ID NO: 50228 - DNA, 20 bp, Artificial Sequence
  Description of Artificial Sequence: Synthetic oligonucleotide
  Target: LAMA2; (+) strand; PAM type: NNNNGHTT; PAM sequence: GAGAGTTT
cattcccaccggcaataaat

SEQ ID NO: 50229 - DNA, 20 bp, Artificial Sequence
  Description of Artificial Sequence: Synthetic oligonucleotide
  Target: LAMA2; (+) strand; PAM type: NNNNGHTT; PAM sequence: TGGTGTTT
tccacatcctcaatagcatt

SEQ ID NO: 50230 - DNA, 20 bp, Artificial Sequence
  Description of Artificial Sequence: Synthetic oligonucleotide
  Target: LAMA2; (+) strand; PAM type: NNNNGHTT; PAM sequence: TAGTGTTT
tcaatagcatttggtgtttt

SEQ ID NO: 50231 - DNA, 20 bp, Artificial Sequence
  Description of Artificial Sequence: Synthetic oligonucleotide
  Target: LAMA2; (+) strand; PAM type: NNNNGHTT; PAM sequence: TTTGGATT
agcatttggtgtttttagtg

SEQ ID NO: 50232 - DNA, 20 bp, Artificial Sequence
  Description of Artificial Sequence: Synthetic oligonucleotide
  Target: LAMA2; (+) strand; PAM type: NNNNGHTT; PAM sequence: TCTTGTTT
aagtgtgtatggtatctcat

SEQ ID NO: 50233 - DNA, 20 bp, Artificial Sequence
  Description of Artificial Sequence: Synthetic oligonucleotide
  Target: LAMA2; (+) strand; PAM type: NNNNGHTT; PAM sequence: TTTAGTTT
gtatggtatctcattcttgt

SEQ ID NO: 50234 - DNA, 20 bp, Artificial Sequence
  Description of Artificial Sequence: Synthetic oligonucleotide
  Target: LAMA2; (+) strand; PAM type: NNNNGHTT; PAM sequence: ATATGCTT
atgatgtcgagcatcttttc

SEQ ID NO: 50235 - DNA, 20 bp, Artificial Sequence
  Description of Artificial Sequence: Synthetic oligonucleotide
  Target: LAMA2; (+) strand; PAM type: NNNNGHTT; PAM sequence: GGTTGTTT
ctttttccattttttcattg

SEQ ID NO: 50236 - DNA, 20 bp, Artificial Sequence
  Description of Artificial Sequence: Synthetic oligonucleotide
  Target: LAMA2; (+) strand; PAM type: NNNNGHTT; PAM sequence: CAGAGTTT
ggttgttttcttgtcgaatt

SEQ ID NO: 50237 - DNA, 20 bp, Artificial Sequence
  Description of Artificial Sequence: Synthetic oligonucleotide
  Target: LAMA2; (+) strand; PAM type: NNNNGHTT; PAM sequence: ATTTGCTT
cagatatgtcttttgccatt

SEQ ID NO: 50238 - DNA, 20 bp, Artificial Sequence
  Description of Artificial Sequence: Synthetic oligonucleotide
  Target: LAMA2; (+) strand; PAM type: NNNNGHTT; PAM sequence: TGTGGCTT
gccattatttgcttcccctc

SEQ ID NO: 50239 - DNA, 20 bp, Artificial Sequence
  Description of Artificial Sequence: Synthetic oligonucleotide
  Target: LAMA2; (+) strand; PAM type: NNNNGHTT; PAM sequence: AGAAGTTT
agaagtgtctttcacagagc

SEQ ID NO: 50240 - DNA, 20 bp, Artificial Sequence
  Description of Artificial Sequence: Synthetic oligonucleotide
  Target: LAMA2; (+) strand; PAM type: NNNNGHTT; PAM sequence: CCCAGCTT
agtttttaattgtaacgaag

SEQ ID NO: 50241 - DNA, 20 bp, Artificial Sequence
  Description of Artificial Sequence: Synthetic oligonucleotide
  Target: LAMA2; (+) strand; PAM type: NNNNGHTT; PAM sequence: TTAGGTTT
aacgaagcccagcttatcaa

SEQ ID NO: 50242 - DNA, 20 bp, Artificial Sequence
  Description of Artificial Sequence: Synthetic oligonucleotide
  Target: LAMA2; (+) strand; PAM type: NNNNGHTT; PAM sequence: TCTAGATT
cattgccatatccacggtca

SEQ ID NO: 50243 - DNA, 20 bp, Artificial Sequence
  Description of Artificial Sequence: Synthetic oligonucleotide
  Target: LAMA2; (+) strand; PAM type: NNNNGHTT; PAM sequence: TACAGTTT
atgctatcttctaggagcgt

SEQ ID NO: 50244 - DNA, 20 bp, Artificial Sequence
  Description of Artificial Sequence: Synthetic oligonucleotide
  Target: LAMA2; (+) strand; PAM type: NNNNGHTT; PAM sequence: AGTAGTTT
aaataaactttttactttac

SEQ ID NO: 50245 - DNA, 20 bp, Artificial Sequence
  Description of Artificial Sequence: Synthetic oligonucleotide
  Target: LAMA2; (+) strand; PAM type: NNNNGHTT; PAM sequence: TTTAGATT
actttttactttacagtagt

SEQ ID NO: 50246 - DNA, 20 bp, Artificial Sequence
  Description of Artificial Sequence: Synthetic oligonucleotide
  Target: LAMA2; (+) strand; PAM type: NNNNGHTT; PAM sequence: CAGTGTTT
agactgtattcatatttttt

SEQ ID NO: 50247 - DNA, 20 bp, Artificial Sequence
  Description of Artificial Sequence: Synthetic oligonucleotide
  Target: LAMA2; (+) strand; PAM type: NNNNGHTT; PAM sequence: GAATGTTT
atattttttcagtgtttact

SEQ ID NO: 50248 - DNA, 20 bp, Artificial Sequence
  Description of Artificial Sequence: Synthetic oligonucleotide
  Target: LAMA2; (+) strand; PAM type: NNNNGHTT; PAM sequence: TACTGTTT
gtgtttactgaatgtttttt

SEQ ID NO: 50249 - DNA, 20 bp, Artificial Sequence
  Description of Artificial Sequence: Synthetic oligonucleotide
  Target: LAMA2; (+) strand; PAM type: NNNNGHTT; PAM sequence: CAGTGTTT
cactgtcaaaaatactgtaa

SEQ ID NO: 50250 - DNA, 20 bp, Artificial Sequence
  Description of Artificial Sequence: Synthetic oligonucleotide
  Target: LAMA2; (+) strand; PAM type: NNNNGHTT; PAM sequence: GAGAGTTT
acagtgtttctgatgacttt

SEQ ID NO: 50251 - DNA, 20 bp, Artificial Sequence
  Description of Artificial Sequence: Synthetic oligonucleotide
  Target: LAMA2; (+) strand; PAM type: NNNNGHTT; PAM sequence: ATGTGTTT
ttgagagtttggacaggttc

SEQ ID NO: 50252 - DNA, 20 bp, Artificial Sequence
  Description of Artificial Sequence: Synthetic oligonucleotide
  Target: LAMA2; (+) strand; PAM type: NNNNGHTT; PAM sequence: TGGGGTTT
ttggtaagctgtccctcaat

SEQ ID NO: 50253 - DNA, 20 bp, Artificial Sequence
  Description of Artificial Sequence: Synthetic oligonucleotide
  Target: LAMA2; (+) strand; PAM type: NNNNGHTT; PAM sequence: TCATGATT
gggtttgcctcatatctttc

SEQ ID NO: 50254 - DNA, 20 bp, Artificial Sequence
  Description of Artificial Sequence: Synthetic oligonucleotide
  Target: LAMA2; (+) strand; PAM type: NNNNGHTT; PAM sequence: ATGAGTTT
ctcatgattagaatggaatt

SEQ ID NO: 50255 - DNA, 20 bp, Artificial Sequence
  Description of Artificial Sequence: Synthetic oligonucleotide
  Target: LAMA2; (+) strand; PAM type: NNNNGHTT; PAM sequence: TAGTGTTT
ccctgatcacctgactaaca

SEQ ID NO: 50256 - DNA, 20 bp, Artificial Sequence
  Description of Artificial Sequence: Synthetic oligonucleotide
  Target: LAMA2; (+) strand; PAM type: NNNNGHTT; PAM sequence: GCCAGATT
acctgactaacatagtgttt

SEQ ID NO: 50257 - DNA, 20 bp, Artificial Sequence
  Description of Artificial Sequence: Synthetic oligonucleotide
  Target: LAMA2; (+) strand; PAM type: NNNNGHTT; PAM sequence: TTCAGATT
ctatttttatctgcccattc

SEQ ID NO: 50258 - DNA, 20 bp, Artificial Sequence
  Description of Artificial Sequence: Synthetic oligonucleotide
  Target: LAMA2; (+) strand; PAM type: NNNNGHTT; PAM sequence: GATGGTTT
gaattataattagagagtta

SEQ ID NO: 50259 - DNA, 20 bp, Artificial Sequence
  Description of Artificial Sequence: Synthetic oligonucleotide
  Target: LAMA2; (+) strand; PAM type: NNNNGHTT; PAM sequence: CCCAGATT
actgggatattcaagaactc

SEQ ID NO: 50260 - DNA, 20 bp, Artificial Sequence
  Description of Artificial Sequence: Synthetic oligonucleotide
  Target: LAMA2; (+) strand; PAM type: NNNNGHTT; PAM sequence: CAGAGTTT
cttttttttttttttttaaa

SEQ ID NO: 50261 - DNA, 20 bp, Artificial Sequence
  Description of Artificial Sequence: Synthetic oligonucleotide
  Target: LAMA2; (+) strand; PAM type: NNNNGHTT; PAM sequence: TCCTGCTT
ctcctaggttcaagcaattc

SEQ ID NO: 50262 - DNA, 20 bp, Artificial Sequence
  Description of Artificial Sequence: Synthetic oligonucleotide
  Target: LAMA2; (+) strand; PAM type: NNNNGHTT; PAM sequence: CTGGGATT
tgcttcagcctcccaagtag

SEQ ID NO: 50263 - DNA, 20 bp, Artificial Sequence
  Description of Artificial Sequence: Synthetic oligonucleotide
  Target: LAMA2; (+) strand; PAM type: NNNNGHTT; PAM sequence: CAGGGTTT
tttttttttttaagtagaga

SEQ ID NO: 50264 - DNA, 20 bp, Artificial Sequence
  Description of Artificial Sequence: Synthetic oligonucleotide
  Target: LAMA2; (+) strand; PAM type: NNNNGHTT; PAM sequence: CTGGGATT
cgcctcagcctcccaaagtg

SEQ ID NO: 50265 - DNA, 20 bp, Artificial Sequence
  Description of Artificial Sequence: Synthetic oligonucleotide
  Target: LAMA2; (+) strand; PAM type: NNNNGHTT; PAM sequence: CTCTGCTT
tctttgttatgctccttttt

SEQ ID NO: 50266 - DNA, 20 bp, Artificial Sequence
  Description of Artificial Sequence: Synthetic oligonucleotide
  Target: LAMA2; (+) strand; PAM type: NNNNGHTT; PAM sequence: TTTAGATT
accagtcacttgatacagtc

SEQ ID NO: 50267 - DNA, 20 bp, Artificial Sequence
  Description of Artificial Sequence: Synthetic oligonucleotide
  Target: LAMA2; (+) strand; PAM type: NNNNGHTT; PAM sequence: AAGGGCTT
ggagctaccctctcttcttt

SEQ ID NO: 50268 - DNA, 20 bp, Artificial Sequence
  Description of Artificial Sequence: Synthetic oligonucleotide
  Target: LAMA2; (+) strand; PAM type: NNNNGHTT; PAM sequence: CATTGTTT
gggcttttatattttatact

SEQ ID NO: 50269 - DNA, 20 bp, Artificial Sequence
  Description of Artificial Sequence: Synthetic oligonucleotide
  Target: LAMA2; (+) strand; PAM type: NNNNGHTT; PAM sequence: TTTTGATT
catatatctctttcaatgca

SEQ ID NO: 50270 - DNA, 20 bp, Artificial Sequence
  Description of Artificial Sequence: Synthetic oligonucleotide
  Target: LAMA2; (+) strand; PAM type: NNNNGHTT; PAM sequence: TCATGTTT
aagttcctcacatatgagaa

SEQ ID NO: 50271 - DNA, 20 bp, Artificial Sequence
  Description of Artificial Sequence: Synthetic oligonucleotide
  Target: LAMA2; (+) strand; PAM type: NNNNGHTT; PAM sequence: AGATGCTT
acagtatgtgtgaaatatta

SEQ ID NO: 50272 - DNA, 20 bp, Artificial Sequence
  Description of Artificial Sequence: Synthetic oligonucleotide
  Target: LAMA2; (+) strand; PAM type: NNNNGHTT; PAM sequence: CCTGGATT
tatttctcactccactgctg

SEQ ID NO: 50273 - DNA, 20 bp, Artificial Sequence
  Description of Artificial Sequence: Synthetic oligonucleotide
  Target: LAMA2; (+) strand; PAM type: NNNNGHTT; PAM sequence: AACTGTTT
cactcccagcccactactga

SEQ ID NO: 50274 - DNA, 20 bp, Artificial Sequence
  Description of Artificial Sequence: Synthetic oligonucleotide
  Target: LAMA2; (+) strand; PAM type: NNNNGHTT; PAM sequence: TGCAGCTT
ttaattttacttgaaatctc

SEQ ID NO: 50275 - DNA, 20 bp, Artificial Sequence
  Description of Artificial Sequence: Synthetic oligonucleotide
  Target: LAMA2; (+) strand; PAM type: NNNNGHTT; PAM sequence: CTCTGTTT
ttcttaacatactgtcctct

SEQ ID NO: 50276 - DNA, 20 bp, Artificial Sequence
  Description of Artificial Sequence: Synthetic oligonucleotide
  Target: LAMA2; (+) strand; PAM type: NNNNGHTT; PAM sequence: CCATGTTT
cttggggactaggcctcagt

SEQ ID NO: 50277 - DNA, 20 bp, Artificial Sequence
  Description of Artificial Sequence: Synthetic oligonucleotide
  Target: LAMA2; (+) strand; PAM type: NNNNGHTT; PAM sequence: TCATGCTT
tttcaaggctgacttcattc

SEQ ID NO: 50278 - DNA, 20 bp, Artificial Sequence
  Description of Artificial Sequence: Synthetic oligonucleotide
  Target: LAMA2; (+) strand; PAM type: NNNNGHTT; PAM sequence: TATGGATT
tttggtcctatgtgccttac

SEQ ID NO: 50279 - DNA, 20 bp, Artificial Sequence
  Description of Artificial Sequence: Synthetic oligonucleotide
  Target: LAMA2; (+) strand; PAM type: NNNNGHTT; PAM sequence: CAGTGTTT
ttctcctgtgtagaacatct

SEQ ID NO: 50280 - DNA, 20 bp, Artificial Sequence
  Description of Artificial Sequence: Synthetic oligonucleotide
  Target: LAMA2; (+) strand; PAM type: NNNNGHTT; PAM sequence: TTCAGTTT
ctctttcatccttcatcaaa

SEQ ID NO: 50281 - DNA, 20 bp, Artificial Sequence
  Description of Artificial Sequence: Synthetic oligonucleotide
  Target: LAMA2; (+) strand; PAM type: NNNNGHTT; PAM sequence: TATGGCTT
ttctcttccttaaattgtac

SEQ ID NO: 50282 - DNA, 20 bp, Artificial Sequence
  Description of Artificial Sequence: Synthetic oligonucleotide
  Target: LAMA2; (+) strand; PAM type: NNNNGHTT; PAM sequence: CTCTGCTT
ctctcccaccatgatctaat

SEQ ID NO: 50283 - DNA, 20 bp, Artificial Sequence
  Description of Artificial Sequence: Synthetic oligonucleotide
  Target: LAMA2; (+) strand; PAM type: NNNNGHTT; PAM sequence: TACGGATT
ggtctggtcatctggacccc

SEQ ID NO: 50284 - DNA, 20 bp, Artificial Sequence
  Description of Artificial Sequence: Synthetic oligonucleotide
  Target: LAMA2; (+) strand; PAM type: NNNNGHTT; PAM sequence: TCCTGCTT
ctctttcttcctcatgatgc

SEQ ID NO: 50285 - DNA, 20 bp, Artificial Sequence
  Description of Artificial Sequence: Synthetic oligonucleotide
  Target: LAMA2; (+) strand; PAM type: NNNNGHTT; PAM sequence: CTGGGCTT
atccaattcattaccacaca

SEQ ID NO: 50286 - DNA, 20 bp, Artificial Sequence
  Description of Artificial Sequence: Synthetic oligonucleotide
  Target: LAMA2; (+) strand; PAM type: NNNNGHTT; PAM sequence: TGTAGTTT
tctcatccaatctcatattg

SEQ ID NO: 50287 - DNA, 20 bp, Artificial Sequence
  Description of Artificial Sequence: Synthetic oligonucleotide
  Target: LAMA2; (+) strand; PAM type: NNNNGHTT; PAM sequence: TTGGGATT
ccaatctcatattgtgtagt

SEQ ID NO: 50288 - DNA, 20 bp, Artificial Sequence
  Description of Artificial Sequence: Synthetic oligonucleotide
  Target: LAMA2; (+) strand; PAM type: NNNNGHTT; PAM sequence: ATTTGTTT
gtgtagtttgggattaccac

SEQ ID NO: 50289 - DNA, 20 bp, Artificial Sequence
  Description of Artificial Sequence: Synthetic oligonucleotide
  Target: LAMA2; (+) strand; PAM type: NNNNGHTT; PAM sequence: CTCTGCTT
atttgttttttagctggtct

SEQ ID NO: 50290 - DNA, 20 bp, Artificial Sequence
  Description of Artificial Sequence: Synthetic oligonucleotide
  Target: LAMA2; (+) strand; PAM type: NNNNGHTT; PAM sequence: GAATGTTT
ctccgtaacgtagccagaat

SEQ ID NO: 50291 - DNA, 20 bp, Artificial Sequence
  Description of Artificial Sequence: Synthetic oligonucleotide
  Target: LAMA2; (+) strand; PAM type: NNNNGHTT; PAM sequence: CAGTGCTT
caaatgtgaatacgtcatcg

SEQ ID NO: 50292 - DNA, 20 bp, Artificial Sequence
  Description of Artificial Sequence: Synthetic oligonucleotide
  Target: LAMA2; (+) strand; PAM type: NNNNGHTT; PAM sequence: CCAAGATT
tctgtgccatcgcaggggtt

SEQ ID NO: 50293 - DNA, 20 bp, Artificial Sequence
  Description of Artificial Sequence: Synthetic oligonucleotide
  Target: LAMA2; (+) strand; PAM type: NNNNGHTT; PAM sequence: CTGTGCTT
caggggttccaagattcctc

SEQ ID NO: 50294 - DNA, 20 bp, Artificial Sequence
  Description of Artificial Sequence: Synthetic oligonucleotide
  Target: LAMA2; (+) strand; PAM type: NNNNGHTT; PAM sequence: TCTAGTTT
tcttataccactatttttcc

SEQ ID NO: 50295 - DNA, 20 bp, Artificial Sequence
  Description of Artificial Sequence: Synthetic oligonucleotide
  Target: LAMA2; (+) strand; PAM type: NNNNGHTT; PAM sequence: TTTTGTTT
tccaaatgggcaagaaacct

SEQ ID NO: 50296 - DNA, 20 bp, Artificial Sequence
  Description of Artificial Sequence: Synthetic oligonucleotide
  Target: LAMA2; (+) strand; PAM type: NNNNGHTT; PAM sequence: ATTTGTTT
ataataggtgttaagtcaat

SEQ ID NO: 50297 - DNA, 20 bp, Artificial Sequence
  Description of Artificial Sequence: Synthetic oligonucleotide
  Target: LAMA2; (+) strand; PAM type: NNNNGHTT; PAM sequence: GAATGATT
atatttgtttaattaattgt

SEQ ID NO: 50298 - DNA, 20 bp, Artificial Sequence
  Description of Artificial Sequence: Synthetic oligonucleotide
  Target: LAMA2; (+) strand; PAM type: NNNNGHTT; PAM sequence: TTTTGTTT
tataattatattgttgaata

SEQ ID NO: 50299 - DNA, 20 bp, Artificial Sequence
  Description of Artificial Sequence: Synthetic oligonucleotide
  Target: LAMA2; (+) strand; PAM type: NNNNGHTT; PAM sequence: AGTAGATT
gtaaggggagaatgctatgt

SEQ ID NO: 50300 - DNA, 20 bp, Artificial Sequence
  Description of Artificial Sequence: Synthetic oligonucleotide
  Target: LAMA2; (+) strand; PAM type: NNNNGHTT; PAM sequence: TTTTGTTT
aactgtataaaatattaaaa

SEQ ID NO: 50301 - DNA, 20 bp, Artificial Sequence
  Description of Artificial Sequence: Synthetic oligonucleotide
  Target: LAMA2; (+) strand; PAM type: NNNNGHTT; PAM sequence: ACTAGTTT
aacatttccaaaaggatgaa

SEQ ID NO: 50302 - DNA, 20 bp, Artificial Sequence
  Description of Artificial Sequence: Synthetic oligonucleotide
  Target: LAMA2; (+) strand; PAM type: NNNNGHTT; PAM sequence: AAACGATT
aaaggatgaaactagttttt

SEQ ID NO: 50303 - DNA, 20 bp, Artificial Sequence
  Description of Artificial Sequence: Synthetic oligonucleotide
  Target: LAMA2; (+) strand; PAM type: NNNNGHTT; PAM sequence: ATAAGTTT
acgatttaagtgccaatatt

SEQ ID NO: 50304 - DNA, 20 bp, Artificial Sequence
  Description of Artificial Sequence: Synthetic oligonucleotide
  Target: LAMA2; (+) strand; PAM type: NNNNGHTT; PAM sequence: ACAAGATT
agtgccaatattataagttt

SEQ ID NO: 50305 - DNA, 20 bp, Artificial Sequence
  Description of Artificial Sequence: Synthetic oligonucleotide
  Target: LAMA2; (+) strand; PAM type: NNNNGHTT; PAM sequence: TATAGTTT
taagtttacaagattttatt

SEQ ID NO: 50306 - DNA, 20 bp, Artificial Sequence
  Description of Artificial Sequence: Synthetic oligonucleotide
  Target: LAMA2; (+) strand; PAM type: NNNNGHTT; PAM sequence: AAAAGATT
agattttatttatagttttt

SEQ ID NO: 50307 - DNA, 20 bp, Artificial Sequence
  Description of Artificial Sequence: Synthetic oligonucleotide
  Target: LAMA2; (+) strand; PAM type: NNNNGHTT; PAM sequence: CAGTGTTT
taaaagatttcaactgctaa

SEQ ID NO: 50308 - DNA, 20 bp, Artificial Sequence
  Description of Artificial Sequence: Synthetic oligonucleotide
  Target: LAMA2; (+) strand; PAM type: NNNNGHTT; PAM sequence: TTTGGTTT
tataaaacaagtcatatctt

SEQ ID NO: 50309 - DNA, 20 bp, Artificial Sequence
  Description of Artificial Sequence: Synthetic oligonucleotide
  Target: LAMA2; (+) strand; PAM type: NNNNGHTT; PAM sequence: TATGGCTT
ccttgtgtgttgttggtcct

SEQ ID NO: 50310 - DNA, 20 bp, Artificial Sequence
  Description of Artificial Sequence: Synthetic oligonucleotide
  Target: LAMA2; (+) strand; PAM type: NNNNGHTT; PAM sequence: GAGTGCTT
gtccttatggcttgcctgat

SEQ ID NO: 50311 - DNA, 20 bp, Artificial Sequence
  Description of Artificial Sequence: Synthetic oligonucleotide
  Target: LAMA2; (+) strand; PAM type: NNNNGHTT; PAM sequence: AAATGATT
gacccttgagagtatcatat

SEQ ID NO: 50312 - DNA, 20 bp, Artificial Sequence
  Description of Artificial Sequence: Synthetic oligonucleotide
  Target: LAMA2; (+) strand; PAM type: NNNNGHTT; PAM sequence: TTAGGTTT
caatgttatctattcagtag

SEQ ID NO: 50313 - DNA, 20 bp, Artificial Sequence
  Description of Artificial Sequence: Synthetic oligonucleotide
  Target: LAMA2; (+) strand; PAM type: NNNNGHTT; PAM sequence: ATTAGATT
tcagtagttaggtttgctcc

SEQ ID NO: 50314 - DNA, 20 bp, Artificial Sequence
  Description of Artificial Sequence: Synthetic oligonucleotide
  Target: LAMA2; (+) strand; PAM type: NNNNGHTT; PAM sequence: TCTAGTTT
ttaggtttgctccattagat

SEQ ID NO: 50315 - DNA, 20 bp, Artificial Sequence
  Description of Artificial Sequence: Synthetic oligonucleotide
  Target: LAMA2; (+) strand; PAM type: NNNNGHTT; PAM sequence: TGCAGATT
atccaaccaagaaaattatg

SEQ ID NO: 50316 - DNA, 20 bp, Artificial Sequence
  Description of Artificial Sequence: Synthetic oligonucleotide
  Target: LAMA2; (+) strand; PAM type: NNNNGHTT; PAM sequence: AACTGCTT
gattttaagaggcacagtag

SEQ ID NO: 50317 - DNA, 20 bp, Artificial Sequence
  Description of Artificial Sequence: Synthetic oligonucleotide
  Target: LAMA2; (+) strand; PAM type: NNNNGHTT; PAM sequence: TAAAGATT
tcatttacaaaggaacactg

SEQ ID NO: 50318 - DNA, 20 bp, Artificial Sequence
  Description of Artificial Sequence: Synthetic oligonucleotide
  Target: LAMA2; (+) strand; PAM type: NNNNGHTT; PAM sequence: GGAAGATT
atccaagatagagaatgaaa

SEQ ID NO: 50319 - DNA, 20 bp, Artificial Sequence
  Description of Artificial Sequence: Synthetic oligonucleotide
  Target: LAMA2; (+) strand; PAM type: NNNNGHTT; PAM sequence: GTGAGATT
ttatcaatagcctgtcctgg

SEQ ID NO: 50320 - DNA, 20 bp, Artificial Sequence
  Description of Artificial Sequence: Synthetic oligonucleotide
  Target: LAMA2; (+) strand; PAM type: NNNNGHTT; PAM sequence: GATTGATT
caatagcctgtcctgggtga

SEQ ID NO: 50321 - DNA, 20 bp, Artificial Sequence
  Description of Artificial Sequence: Synthetic oligonucleotide
  Target: LAMA2; (+) strand; PAM type: NNNNGHTT; PAM sequence: TTTTGCTT
gtgagattgatttttgtgaa

SEQ ID NO: 50322 - DNA, 20 bp, Artificial Sequence
  Description of Artificial Sequence: Synthetic oligonucleotide
  Target: LAMA2; (+) strand; PAM type: NNNNGHTT; PAM sequence: ATAGGCTT
taggtgatagtgcatttgtc

SEQ ID NO: 50323 - DNA, 20 bp, Artificial Sequence
  Description of Artificial Sequence: Synthetic oligonucleotide
  Target: LAMA2; (+) strand; PAM type: NNNNGHTT; PAM sequence: ACATGATT
cttaattactgtgtaatgag

SEQ ID NO: 50324 - DNA, 20 bp, Artificial Sequence
  Description of Artificial Sequence: Synthetic oligonucleotide
  Target: LAMA2; (+) strand; PAM type: NNNNGHTT; PAM sequence: ATATGATT
tatatctagatgatgttctg

SEQ ID NO: 50325 - DNA, 20 bp, Artificial Sequence
  Description of Artificial Sequence: Synthetic oligonucleotide
  Target: LAMA2; (+) strand; PAM type: NNNNGHTT; PAM sequence: TCCAGTTT
cctccactcacctagaatac

SEQ ID NO: 50326 - DNA, 20 bp, Artificial Sequence
  Description of Artificial Sequence: Synthetic oligonucleotide
  Target: LAMA2; (+) strand; PAM type: NNNNGHTT; PAM sequence: AGAGGATT
tgggaaggatgagaggatgg

SEQ ID NO: 50327 - DNA, 20 bp, Artificial Sequence
  Description of Artificial Sequence: Synthetic oligonucleotide
  Target: LAMA2; (+) strand; PAM type: NNNNGHTT; PAM sequence: CTGGGCTT
ggaagaataacttatgggca

SEQ ID NO: 50328 - DNA, 20 bp, Artificial Sequence
  Description of Artificial Sequence: Synthetic oligonucleotide
  Target: LAMA2; (+) strand; PAM type: NNNNGHTT; PAM sequence: ATGGGTTT
tgcaacaaaccccattatgc

SEQ ID NO: 50329 - DNA, 20 bp, Artificial Sequence
  Description of Artificial Sequence: Synthetic oligonucleotide
  Target: LAMA2; (+) strand; PAM type: NNNNGHTT; PAM sequence: TGATGCTT
catgctaacccgcattaagt

SEQ ID NO: 50330 - DNA, 20 bp, Artificial Sequence
  Description of Artificial Sequence: Synthetic oligonucleotide
  Target: LAMA2; (+) strand; PAM type: NNNNGHTT; PAM sequence: CTGTGTTT
ctagagaggaagctcttctt

SEQ ID NO: 50331 - DNA, 20 bp, Artificial Sequence
  Description of Artificial Sequence: Synthetic oligonucleotide
  Target: LAMA2; (+) strand; PAM type: NNNNGHTT; PAM sequence: TCCAGTTT
acttcgtgtgtattcaaagg

SEQ ID NO: 50332 - DNA, 20 bp, Artificial Sequence
  Description of Artificial Sequence: Synthetic oligonucleotide
  Target: LAMA2; (+) strand; PAM type: NNNNGHTT; PAM sequence: TGGAGATT
gaaagcagtgtagttgggac

SEQ ID NO: 50333 - DNA, 20 bp, Artificial Sequence
  Description of Artificial Sequence: Synthetic oligonucleotide
  Target: LAMA2; (+) strand; PAM type: NNNNGHTT; PAM sequence: CCAAGCTT
tcacatgcctggctcttctc

SEQ ID NO: 50334 - DNA, 20 bp, Artificial Sequence
  Description of Artificial Sequence: Synthetic oligonucleotide
  Target: LAMA2; (+) strand; PAM type: NNNNGHTT; PAM sequence: AGCAGCTT
ttcaactgtagctcttgagc

SEQ ID NO: 50335 - DNA, 20 bp, Artificial Sequence
  Description of Artificial Sequence: Synthetic oligonucleotide
  Target: LAMA2; (+) strand; PAM type: NNNNGHTT; PAM sequence: CTGAGCTT
ctcttgagcagcagcttcct

SEQ ID NO: 50336 - DNA, 20 bp, Artificial Sequence
  Description of Artificial Sequence: Synthetic oligonucleotide
  Target: LAMA2; (+) strand; PAM type: NNNNGHTT; PAM sequence: GTCAGTTT
agcatagcaccaggcatatg

SEQ ID NO: 50337 - DNA, 20 bp, Artificial Sequence
  Description of Artificial Sequence: Synthetic oligonucleotide
  Target: LAMA2; (+) strand; PAM type: NNNNGHTT; PAM sequence: ATAGGCTT
gtcagtttgagtgctattag

SEQ ID NO: 50338 - DNA, 20 bp, Artificial Sequence
  Description of Artificial Sequence: Synthetic oligonucleotide
  Target: LAMA2; (+) strand; PAM type: NNNNGHTT; PAM sequence: ATTGGTTT
tttagaacttccaagggatc

SEQ ID NO: 50339 - DNA, 20 bp, Artificial Sequence
  Description of Artificial Sequence: Synthetic oligonucleotide
  Target: LAMA2; (+) strand; PAM type: NNNNGHTT; PAM sequence: GTTTGATT
gaacttccaagggatcattg

SEQ ID NO: 50340 - DNA, 20 bp, Artificial Sequence
  Description of Artificial Sequence: Synthetic oligonucleotide
  Target: LAMA2; (+) strand; PAM type: NNNNGHTT; PAM sequence: CTATGCTT
ccacgacaatttgccagaca

SEQ ID NO: 50341 - DNA, 20 bp, Artificial Sequence
  Description of Artificial Sequence: Synthetic oligonucleotide
  Target: LAMA2; (+) strand; PAM type: NNNNGHTT; PAM sequence: GAGGGCTT
catgtgctagaataggtaag

SEQ ID NO: 50342 - DNA, 20 bp, Artificial Sequence
  Description of Artificial Sequence: Synthetic oligonucleotide
  Target: LAMA2; (+) strand; PAM type: NNNNGHTT; PAM sequence: GCTGGATT
gttggaattgaatctcgaaa

SEQ ID NO: 50343 - DNA, 20 bp, Artificial Sequence
  Description of Artificial Sequence: Synthetic oligonucleotide
  Target: LAMA2; (+) strand; PAM type: NNNNGHTT; PAM sequence: ATTTGTTT
aattgaatctcgaaagctgg

SEQ ID NO: 50344 - DNA, 20 bp, Artificial Sequence
  Description of Artificial Sequence: Synthetic oligonucleotide
  Target: LAMA2; (+) strand; PAM type: NNNNGHTT; PAM sequence: GCAAGATT
gaagaatggtaataaggttg

SEQ ID NO: 50345 - DNA, 20 bp, Artificial Sequence
  Description of Artificial Sequence: Synthetic oligonucleotide
  Target: LAMA2; (+) strand; PAM type: NNNNGHTT; PAM sequence: AATTGTTT
ttggcaagattggttaggaa

SEQ ID NO: 50346 - DNA, 20 bp, Artificial Sequence
  Description of Artificial Sequence: Synthetic oligonucleotide
  Target: LAMA2; (+) strand; PAM type: NNNNGHTT; PAM sequence: TAGAGCTT
agaccaagttctcaccccct

SEQ ID NO: 50347 - DNA, 20 bp, Artificial Sequence
  Description of Artificial Sequence: Synthetic oligonucleotide
  Target: LAMA2; (+) strand; PAM type: NNNNGHTT; PAM sequence: ATGAGTTT
caagaaggtgctaagaaggg

SEQ ID NO: 50348 - DNA, 20 bp, Artificial Sequence
  Description of Artificial Sequence: Synthetic oligonucleotide
  Target: LAMA2; (+) strand; PAM type: NNNNGHTT; PAM sequence: GGTTGATT
tactaaaactatgccaggga

SEQ ID NO: 50349 - DNA, 20 bp, Artificial Sequence
  Description of Artificial Sequence: Synthetic oligonucleotide
  Target: LAMA2; (+) strand; PAM type: NNNNGHTT; PAM sequence: AATTGTTT
ttgcatagggtcttagtgct

SEQ ID NO: 50350 - DNA, 20 bp, Artificial Sequence
  Description of Artificial Sequence: Synthetic oligonucleotide
  Target: LAMA2; (+) strand; PAM type: NNNNGHTT; PAM sequence: TGGAGTTT
ttttaacttctttcttatca

SEQ ID NO: 50351 - DNA, 20 bp, Artificial Sequence
  Description of Artificial Sequence: Synthetic oligonucleotide
  Target: LAMA2; (+) strand; PAM type: NNNNGHTT; PAM sequence: GTAGGATT
tctttcttatcatggagttt

SEQ ID NO: 50352 - DNA, 20 bp, Artificial Sequence
  Description of Artificial Sequence: Synthetic oligonucleotide
  Target: LAMA2; (+) strand; PAM type: NNNNGHTT; PAM sequence: TTAAGTTT
atgaagaaaaagaatatatt

SEQ ID NO: 50353 - DNA, 20 bp, Artificial Sequence
  Description of Artificial Sequence: Synthetic oligonucleotide
  Target: LAMA2; (+) strand; PAM type: NNNNGHTT; PAM sequence: AGCAGTTT
tagactagaaaaatatccaa

SEQ ID NO: 50354 - DNA, 20 bp, Artificial Sequence
  Description of Artificial Sequence: Synthetic oligonucleotide
  Target: LAMA2; (+) strand; PAM type: NNNNGHTT; PAM sequence: TAGTGATT
gccaagctgttgaccttagt

SEQ ID NO: 50355 - DNA, 20 bp, Artificial Sequence
  Description of Artificial Sequence: Synthetic oligonucleotide
  Target: LAMA2; (+) strand; PAM type: NNNNGHTT; PAM sequence: ATGTGTTT
gtatgtgtgtgtgtatgtga

SEQ ID NO: 50356 - DNA, 20 bp, Artificial Sequence
  Description of Artificial Sequence: Synthetic oligonucleotide
  Target: LAMA2; (+) strand; PAM type: NNNNGHTT; PAM sequence: CCAAGTTT
gtgcaaacacgtgcaggaag

SEQ ID NO: 50357 - DNA, 20 bp, Artificial Sequence
  Description of Artificial Sequence: Synthetic oligonucleotide
  Target: LAMA2; (+) strand; PAM type: NNNNGHTT; PAM sequence: CAAGGATT
tacaacactcaccagaaaag

SEQ ID NO: 50358 - DNA, 20 bp, Artificial Sequence
  Description of Artificial Sequence: Synthetic oligonucleotide
  Target: LAMA2; (+) strand; PAM type: NNNNGHTT; PAM sequence: CACAGTTT
agtaacctagggactggatg

SEQ ID NO: 50359 - DNA, 20 bp, Artificial Sequence
  Description of Artificial Sequence: Synthetic oligonucleotide
  Target: LAMA2; (+) strand; PAM type: NNNNGHTT; PAM sequence: TAATGTTT
agtgaaaataattccattat

SEQ ID NO: 50360 - DNA, 20 bp, Artificial Sequence
  Description of Artificial Sequence: Synthetic oligonucleotide
  Target: LAMA2; (+) strand; PAM type: NNNNGHTT; PAM sequence: AATGGATT
gaaaaaaattttaattttcc

SEQ ID NO: 50361 - DNA, 20 bp, Artificial Sequence
  Description of Artificial Sequence: Synthetic oligonucleotide
  Target: LAMA2; (+) strand; PAM type: NNNNGHTT; PAM sequence: ACAAGATT
tagtatgcaagcactctggt

SEQ ID NO: 50362 - DNA, 20 bp, Artificial Sequence
  Description of Artificial Sequence: Synthetic oligonucleotide
  Target: LAMA2; (+) strand; PAM type: NNNNGHTT; PAM sequence: GACAGTTT
cttattcaaaactatattga

SEQ ID NO: 50363 - DNA, 20 bp, Artificial Sequence
  Description of Artificial Sequence: Synthetic oligonucleotide
  Target: LAMA2; (+) strand; PAM type: NNNNGHTT; PAM sequence: TTGTGATT
caaaactatattgagacagt

SEQ ID NO: 50364 - DNA, 20 bp, Artificial Sequence
  Description of Artificial Sequence: Synthetic oligonucleotide
  Target: LAMA2; (+) strand; PAM type: NNNNGHTT; PAM sequence: GAAGGCTT
atctttttagtaaaagagaa

SEQ ID NO: 50365 - DNA, 20 bp, Artificial Sequence
  Description of Artificial Sequence: Synthetic oligonucleotide
  Target: LAMA2; (+) strand; PAM type: NNNNGHTT; PAM sequence: TTTTGTTT
caatgttatacacacaccat

SEQ ID NO: 50366 - DNA, 20 bp, Artificial Sequence
  Description of Artificial Sequence: Synthetic oligonucleotide
  Target: LAMA2; (+) strand; PAM type: NNNNGHTT; PAM sequence: GGCTGTTT
gaatactctttgggaggtgg

SEQ ID NO: 50367 - DNA, 20 bp, Artificial Sequence
  Description of Artificial Sequence: Synthetic oligonucleotide
  Target: LAMA2; (+) strand; PAM type: NNNNGHTT; PAM sequence: TTCTGTTT
gaggtggggctgttttgggg

SEQ ID NO: 50368 - DNA, 20 bp, Artificial Sequence
  Description of Artificial Sequence: Synthetic oligonucleotide
  Target: LAMA2; (+) strand; PAM type: NNNNGHTT; PAM sequence: GCATGATT
tttactttgctgacactgct

SEQ ID NO: 50369 - DNA, 20 bp, Artificial Sequence
  Description of Artificial Sequence: Synthetic oligonucleotide
  Target: LAMA2; (+) strand; PAM type: NNNNGHTT; PAM sequence: CTGTGATT
gctgacactgctgcatgatt

SEQ ID NO: 50370 - DNA, 20 bp, Artificial Sequence
  Description of Artificial Sequence: Synthetic oligonucleotide
  Target: LAMA2; (+) strand; PAM type: NNNNGHTT; PAM sequence: CTTTGTTT
gtagctaagcatttctccct

SEQ ID NO: 50371 - DNA, 20 bp, Artificial Sequence
  Description of Artificial Sequence: Synthetic oligonucleotide
  Target: LAMA2; (+) strand; PAM type: NNNNGHTT; PAM sequence: TCAAGCTT
tctaaaacaaatctatagga

SEQ ID NO: 50372 - DNA, 20 bp, Artificial Sequence
  Description of Artificial Sequence: Synthetic oligonucleotide
  Target: LAMA2; (+) strand; PAM type: NNNNGHTT; PAM sequence: GCCTGTTT
caagcttattgaggcagaca

SEQ ID NO: 50373 - DNA, 20 bp, Artificial Sequence
  Description of Artificial Sequence: Synthetic oligonucleotide
  Target: LAMA2; (+) strand; PAM type: NNNNGHTT; PAM sequence: TGAAGATT
aaactgcaacatgtggaggc

SEQ ID NO: 50374 - DNA, 20 bp, Artificial Sequence
  Description of Artificial Sequence: Synthetic oligonucleotide
  Target: LAMA2; (+) strand; PAM type: NNNNGHTT; PAM sequence: TTGTGCTT
taaagatatttcaaaaataa

SEQ ID NO: 50375 - DNA, 20 bp, Artificial Sequence
  Description of Artificial Sequence: Synthetic oligonucleotide
  Target: LAMA2; (+) strand; PAM type: NNNNGHTT; PAM sequence: TATTGCTT
tttcaaaaataattgtgctt

SEQ ID NO: 50376 - DNA, 20 bp, Artificial Sequence
  Description of Artificial Sequence: Synthetic oligonucleotide
  Target: LAMA2; (+) strand; PAM type: NNNNGHTT; PAM sequence: AAGCGTTT
tctctgccatagcatataac

SEQ ID NO: 50377 - DNA, 20 bp, Artificial Sequence
  Description of Artificial Sequence: Synthetic oligonucleotide
  Target: LAMA2; (+) strand; PAM type: NNNNGHTT; PAM sequence: CTCTGATT
ttaaaagaccaaatacagct

SEQ ID NO: 50378 - DNA, 20 bp, Artificial Sequence
  Description of Artificial Sequence: Synthetic oligonucleotide
  Target: LAMA2; (+) strand; PAM type: NNNNGHTT; PAM sequence: TAAAGTTT
ccatttaatggaagaagtaa

SEQ ID NO: 50379 - DNA, 20 bp, Artificial Sequence
  Description of Artificial Sequence: Synthetic oligonucleotide
  Target: LAMA2; (+) strand; PAM type: NNNNGHTT; PAM sequence: CATCGATT
aatacatctgatcaataatt

SEQ ID NO: 50380 - DNA, 20 bp, Artificial Sequence
  Description of Artificial Sequence: Synthetic oligonucleotide
  Target: LAMA2; (+) strand; PAM type: NNNNGHTT; PAM sequence: GGGAGCTT
tgaaagaaaatgcagccagt

SEQ ID NO: 50381 - DNA, 20 bp, Artificial Sequence
  Description of Artificial Sequence: Synthetic oligonucleotide
  Target: LAMA2; (+) strand; PAM type: NNNNGHTT; PAM sequence: TGTAGCTT
ccagtgggagcttatctagc

SEQ ID NO: 50382 - DNA, 20 bp, Artificial Sequence
  Description of Artificial Sequence: Synthetic oligonucleotide
  Target: LAMA2; (+) strand; PAM type: NNNNGHTT; PAM sequence: ATGTGTTT
cttcatcatctctattaatt

SEQ ID NO: 50383 - DNA, 20 bp, Artificial Sequence
  Description of Artificial Sequence: Synthetic oligonucleotide
  Target: LAMA2; (+) strand; PAM type: NNNNGHTT; PAM sequence: AGGAGCTT
gtccctgggagaattcatta

SEQ ID NO: 50384 - DNA, 20 bp, Artificial Sequence
  Description of Artificial Sequence: Synthetic oligonucleotide
  Target: LAMA2; (+) strand; PAM type: NNNNGHTT; PAM sequence: TAGAGTTT
gacatctgtaaaatcaaagg

SEQ ID NO: 50385 - DNA, 20 bp, Artificial Sequence
  Description of Artificial Sequence: Synthetic oligonucleotide
  Target: LAMA2; (+) strand; PAM type: NNNNGHTT; PAM sequence: TTTTGTTT
attacataagaataggcaac

SEQ ID NO: 50386 - DNA, 20 bp, Artificial Sequence
  Description of Artificial Sequence: Synthetic oligonucleotide
  Target: LAMA2; (+) strand; PAM type: NNNNGHTT; PAM sequence: TATTGTTT
ataggcaacttttgttttgt

SEQ ID NO: 50387 - DNA, 20 bp, Artificial Sequence
  Description of Artificial Sequence: Synthetic oligonucleotide
  Target: LAMA2; (+) strand; PAM type: NNNNGHTT; PAM sequence: TTTAGTTT
ttgatacattaaagcagcac

SEQ ID NO: 50388 - DNA, 20 bp, Artificial Sequence
  Description of Artificial Sequence: Synthetic oligonucleotide
  Target: LAMA2; (+) strand; PAM type: NNNNGHTT; PAM sequence: AATGGCTT
gcagcactttagtttctcca

SEQ ID NO: 50389 - DNA, 20 bp, Artificial Sequence
  Description of Artificial Sequence: Synthetic oligonucleotide
  Target: LAMA2; (+) strand; PAM type: NNNNGHTT; PAM sequence: ACTGGTTT
tggcttttcaaatactgggg

SEQ ID NO: 50390 - DNA, 20 bp, Artificial Sequence
  Description of Artificial Sequence: Synthetic oligonucleotide
  Target: LAMA2; (+) strand; PAM type: NNNNGHTT; PAM sequence: TGTTGCTT
actggtttttaatgaacatc

SEQ ID NO: 50391 - DNA, 20 bp, Artificial Sequence
  Description of Artificial Sequence: Synthetic oligonucleotide
  Target: LAMA2; (+) strand; PAM type: NNNNGHTT; PAM sequence: TTGGGATT
ttttaatgaacatctgttgc

SEQ ID NO: 50392 - DNA, 20 bp, Artificial Sequence
  Description of Artificial Sequence: Synthetic oligonucleotide
  Target: LAMA2; (+) strand; PAM type: NNNNGHTT; PAM sequence: GCATGTTT
aaaatataataaacgtgcat

SEQ ID NO: 50393 - DNA, 20 bp, Artificial Sequence
  Description of Artificial Sequence: Synthetic oligonucleotide
  Target: LAMA2; (+) strand; PAM type: NNNNGHTT; PAM sequence: AAATGCTT
gcatgtttagaaattgggaa

SEQ ID NO: 50394 - DNA, 20 bp, Artificial Sequence
  Description of Artificial Sequence: Synthetic oligonucleotide
  Target: LAMA2; (+) strand; PAM type: NNNNGHTT; PAM sequence: TGTTGTTT
aaattgggaaaaatgctttt

SEQ ID NO: 50395 - DNA, 20 bp, Artificial Sequence
  Description of Artificial Sequence: Synthetic oligonucleotide
  Target: LAMA2; (+) strand; PAM type: NNNNGHTT; PAM sequence: TTTTGCTT
gaaaaatgctttttgttgtt

SEQ ID NO: 50396 - DNA, 20 bp, Artificial Sequence
  Description of Artificial Sequence: Synthetic oligonucleotide
  Target: LAMA2; (+) strand; PAM type: NNNNGHTT; PAM sequence: CTTTGCTT
aatattatgcattttagata

SEQ ID NO: 50397 - DNA, 20 bp, Artificial Sequence
  Description of Artificial Sequence: Synthetic oligonucleotide
  Target: LAMA2; (+) strand; PAM type: NNNNGHTT; PAM sequence: GGCAGATT
ggatgtgagatcaacttcaa

SEQ ID NO: 50398 - DNA, 20 bp, Artificial Sequence
  Description of Artificial Sequence: Synthetic oligonucleotide
  Target: LAMA2; (+) strand; PAM type: NNNNGHTT; PAM sequence: CAGGGTTT
ttcaccactgcaagaagcaa

SEQ ID NO: 50399 - DNA, 20 bp, Artificial Sequence
  Description of Artificial Sequence: Synthetic oligonucleotide
  Target: LAMA2; (+) strand; PAM type: NNNNGHTT; PAM sequence: TGTGGTTT
aaaaatctcagttaattcat

SEQ ID NO: 50400 - DNA, 20 bp, Artificial Sequence
  Description of Artificial Sequence: Synthetic oligonucleotide
  Target: LAMA2; (+) strand; PAM type: NNNNGHTT; PAM sequence: ATTTGTTT
atcctggggactcattttca

SEQ ID NO: 50401 - DNA, 20 bp, Artificial Sequence
  Description of Artificial Sequence: Synthetic oligonucleotide
  Target: LAMA2; (+) strand; PAM type: NNNNGHTT; PAM sequence: ATATGTTT
gtatgagaataaatgctagc

SEQ ID NO: 50402 - DNA, 20 bp, Artificial Sequence
  Description of Artificial Sequence: Synthetic oligonucleotide
  Target: LAMA2; (+) strand; PAM type: NNNNGHTT; PAM sequence: CACTGCTT
ttagtagatcctattatcaa

SEQ ID NO: 50403 - DNA, 20 bp, Artificial Sequence
  Description of Artificial Sequence: Synthetic oligonucleotide
  Target: LAMA2; (+) strand; PAM type: NNNNGHTT; PAM sequence: ATTTGCTT
cctctttggtcaatatgaat

SEQ ID NO: 50404 - DNA, 20 bp, Artificial Sequence
  Description of Artificial Sequence: Synthetic oligonucleotide
  Target: LAMA2; (+) strand; PAM type: NNNNGHTT; PAM sequence: TGGAGATT
caacaggggtagactggaga

SEQ ID NO: 50405 - DNA, 20 bp, Artificial Sequence
  Description of Artificial Sequence: Synthetic oligonucleotide
  Target: LAMA2; (+) strand; PAM type: NNNNGHTT; PAM sequence: CCAGGCTT
actggagatggagatttatc

SEQ ID NO: 50406 - DNA, 20 bp, Artificial Sequence
  Description of Artificial Sequence: Synthetic oligonucleotide
  Target: LAMA2; (+) strand; PAM type: NNNNGHTT; PAM sequence: AAAGGATT
cccacgtctatacaccagag

SEQ ID NO: 50407 - DNA, 20 bp, Artificial Sequence
  Description of Artificial Sequence: Synthetic oligonucleotide
  Target: LAMA2; (+) strand; PAM type: NNNNGHTT; PAM sequence: GTCTGATT
aattatgcatagatcaggtg

SEQ ID NO: 50408 - DNA, 20 bp, Artificial Sequence
  Description of Artificial Sequence: Synthetic oligonucleotide
  Target: LAMA2; (+) strand; PAM type: NNNNGHTT; PAM sequence: CAAAGCTT
atgttcattgagatgtaata

SEQ ID NO: 50409 - DNA, 20 bp, Artificial Sequence
  Description of Artificial Sequence: Synthetic oligonucleotide
  Target: LAMA2; (+) strand; PAM type: NNNNGHTT; PAM sequence: GGCAGTTT
tgagatgtaatacaaagctt

SEQ ID NO: 50410 - DNA, 20 bp, Artificial Sequence
  Description of Artificial Sequence: Synthetic oligonucleotide
  Target: LAMA2; (+) strand; PAM type: NNNNGHTT; PAM sequence: AAAGGCTT
gacggaaggaaggactcacc

SEQ ID NO: 50411 - DNA, 20 bp, Artificial Sequence
  Description of Artificial Sequence: Synthetic oligonucleotide
  Target: LAMA2; (+) strand; PAM type: NNNNGHTT; PAM sequence: TTTTGTTT
aaccatcagtacttttacat

SEQ ID NO: 50412 - DNA, 20 bp, Artificial Sequence
  Description of Artificial Sequence: Synthetic oligonucleotide
  Target: LAMA2; (+) strand; PAM type: NNNNGHTT; PAM sequence: AAATGCTT
taaattgctgtgggaaaagt

SEQ ID NO: 50413 - DNA, 20 bp, Artificial Sequence
  Description of Artificial Sequence: Synthetic oligonucleotide
  Target: LAMA2; (+) strand; PAM type: NNNNGHTT; PAM sequence: TTCAGCTT
tcagactgacatttatctat

SEQ ID NO: 50414 - DNA, 20 bp, Artificial Sequence
  Description of Artificial Sequence: Synthetic oligonucleotide
  Target: LAMA2; (+) strand; PAM type: NNNNGHTT; PAM sequence: TTATGTTT
gacatttatctatttcagct

SEQ ID NO: 50415 - DNA, 20 bp, Artificial Sequence
  Description of Artificial Sequence: Synthetic oligonucleotide
  Target: LAMA2; (+) strand; PAM type: NNNNGHTT; PAM sequence: TCCTGATT
aatatctaccgtgctatgac

SEQ ID NO: 50416 - DNA, 20 bp, Artificial Sequence
  Description of Artificial Sequence: Synthetic oligonucleotide
  Target: LAMA2; (+) strand; PAM type: NNNNGHTT; PAM sequence: AACTGTTT
tcctgattagttcataaata

SEQ ID NO: 50417 - DNA, 20 bp, Artificial Sequence
  Description of Artificial Sequence: Synthetic oligonucleotide
  Target: LAMA2; (+) strand; PAM type: NNNNGHTT; PAM sequence: TAGTGTTT
gtggacataggtaaacccat

SEQ ID NO: 50418 - DNA, 20 bp, Artificial Sequence
  Description of Artificial Sequence: Synthetic oligonucleotide
  Target: LAMA2; (+) strand; PAM type: NNNNGHTT; PAM sequence: TCCTGTTT
caatgatagacacctttcct

SEQ ID NO: 50419 - DNA, 20 bp, Artificial Sequence
  Description of Artificial Sequence: Synthetic oligonucleotide
  Target: LAMA2; (+) strand; PAM type: NNNNGHTT; PAM sequence: AGAGGATT
tcttaataaatttacccatc

SEQ ID NO: 50420 - DNA, 20 bp, Artificial Sequence
  Description of Artificial Sequence: Synthetic oligonucleotide
  Target: LAMA2; (+) strand; PAM type: NNNNGHTT; PAM sequence: TTTTGTTT
taaatttacccatcagagga

SEQ ID NO: 50421 - DNA, 20 bp, Artificial Sequence
  Description of Artificial Sequence: Synthetic oligonucleotide
  Target: LAMA2; (+) strand; PAM type: NNNNGHTT; PAM sequence: AACAGTTT
gttttcagtcttagtatgaa

SEQ ID NO: 50422 - DNA, 20 bp, Artificial Sequence
  Description of Artificial Sequence: Synthetic oligonucleotide
  Target: LAMA2; (+) strand; PAM type: NNNNGHTT; PAM sequence: TTTTGCTT
cagtcttagtatgaaaacag

SEQ ID NO: 50423 - DNA, 20 bp, Artificial Sequence
  Description of Artificial Sequence: Synthetic oligonucleotide
  Target: LAMA2; (+) strand; PAM type: NNNNGHTT; PAM sequence: AGATGCTT
ctgctacgcgtagtctacta

SEQ ID NO: 50424 - DNA, 20 bp, Artificial Sequence
  Description of Artificial Sequence: Synthetic oligonucleotide
  Target: LAMA2; (+) strand; PAM type: NNNNGHTT; PAM sequence: CATGGTTT
cactgcattgaacgttatgg

SEQ ID NO: 50425 - DNA, 20 bp, Artificial Sequence
  Description of Artificial Sequence: Synthetic oligonucleotide
  Target: LAMA2; (+) strand; PAM type: NNNNGHTT; PAM sequence: TTAGGATT
tattttaattttatctgata

SEQ ID NO: 50426 - DNA, 20 bp, Artificial Sequence
  Description of Artificial Sequence: Synthetic oligonucleotide
  Target: LAMA2; (+) strand; PAM type: NNNNGHTT; PAM sequence: GTATGTTT
atgtatataaacataaaact

SEQ ID NO: 50427 - DNA, 20 bp, Artificial Sequence
  Description of Artificial Sequence: Synthetic oligonucleotide
  Target: LAMA2; (+) strand; PAM type: NNNNGHTT; PAM sequence: TGATGCTT
gaaacagacttctattaaaa

SEQ ID NO: 50428 - DNA, 20 bp, Artificial Sequence
  Description of Artificial Sequence: Synthetic oligonucleotide
  Target: LAMA2; (+) strand; PAM type: NNNNGHTT; PAM sequence: GGGAGATT
ttcctttccttttttggtgg

SEQ ID NO: 50429 - DNA, 20 bp, Artificial Sequence
  Description of Artificial Sequence: Synthetic oligonucleotide
  Target: LAMA2; (+) strand; PAM type: NNNNGHTT; PAM sequence: GCAAGTTT
atgttatccaaattaaactg

SEQ ID NO: 50430 - DNA, 20 bp, Artificial Sequence
  Description of Artificial Sequence: Synthetic oligonucleotide
  Target: LAMA2; (+) strand; PAM type: NNNNGHTT; PAM sequence: ATTTGTTT
ctccaaaacccatatctaaa

SEQ ID NO: 50431 - DNA, 20 bp, Artificial Sequence
  Description of Artificial Sequence: Synthetic oligonucleotide
  Target: LAMA2; (+) strand; PAM type: NNNNGHTT; PAM sequence: GGGAGCTT
gaaggcccatgtccattttg

SEQ ID NO: 50432 - DNA, 20 bp, Artificial Sequence
  Description of Artificial Sequence: Synthetic oligonucleotide
  Target: LAMA2; (+) strand; PAM type: NNNNGHTT; PAM sequence: AGCAGTTT
caaaaagctggccatggaat

SEQ ID NO: 50433 - DNA, 20 bp, Artificial Sequence
  Description of Artificial Sequence: Synthetic oligonucleotide
  Target: LAMA2; (+) strand; PAM type: NNNNGHTT; PAM sequence: AAATGTTT
agcagccaatatatttgcta

SEQ ID NO: 50434 - DNA, 20 bp, Artificial Sequence
  Description of Artificial Sequence: Synthetic oligonucleotide
  Target: LAMA2; (+) strand; PAM type: NNNNGHTT; PAM sequence: ATATGTTT
aactttatggggtatgtgtt

SEQ ID NO: 50435 - DNA, 20 bp, Artificial Sequence
  Description of Artificial Sequence: Synthetic oligonucleotide
  Target: LAMA2; (+) strand; PAM type: NNNNGHTT; PAM sequence: TGATGTTT
ggggtatgtgttatatgttt

SEQ ID NO: 50436 - DNA, 20 bp, Artificial Sequence
  Description of Artificial Sequence: Synthetic oligonucleotide
  Target: LAMA2; (+) strand; PAM type: NNNNGHTT; PAM sequence: TCATGTTT
tgtttttcttttttttattc

SEQ ID NO: 50437 - DNA, 20 bp, Artificial Sequence
  Description of Artificial Sequence: Synthetic oligonucleotide
  Target: LAMA2; (+) strand; PAM type: NNNNGHTT; PAM sequence: TCAGGTTT
gggatgcatgcacagaatgt

SEQ ID NO: 50438 - DNA, 20 bp, Artificial Sequence
  Description of Artificial Sequence: Synthetic oligonucleotide
  Target: LAMA2; (+) strand; PAM type: NNNNGHTT; PAM sequence: GGTGGTTT
cataggtatacctgtgccat

SEQ ID NO: 50439 - DNA, 20 bp, Artificial Sequence
  Description of Artificial Sequence: Synthetic oligonucleotide
  Target: LAMA2; (+) strand; PAM type: NNNNGHTT; PAM sequence: GTCAGATT
tgagataacatatgacacca

SEQ ID NO: 50440 - DNA, 20 bp, Artificial Sequence
  Description of Artificial Sequence: Synthetic oligonucleotide
  Target: LAMA2; (+) strand; PAM type: NNNNGHTT; PAM sequence: ATTAGTTT
cactgttggtgggaatgtaa

SEQ ID NO: 50441 - DNA, 20 bp, Artificial Sequence
  Description of Artificial Sequence: Synthetic oligonucleotide
  Target: LAMA2; (+) strand; PAM type: NNNNGHTT; PAM sequence: TGGCGATT
aaccattgtggaagacagtg

SEQ ID NO: 50442 - DNA, 20 bp, Artificial Sequence
  Description of Artificial Sequence: Synthetic oligonucleotide
  Target: LAMA2; (+) strand; PAM type: NNNNGHTT; PAM sequence: GTATGTTT
actctaaagacacatataca

SEQ ID NO: 50443 - DNA, 20 bp, Artificial Sequence
  Description of Artificial Sequence: Synthetic oligonucleotide
  Target: LAMA2; (+) strand; PAM type: NNNNGHTT; PAM sequence: GATAGATT
caacccaaatgcccatcaat

SEQ ID NO: 50444 - DNA, 20 bp, Artificial Sequence
  Description of Artificial Sequence: Synthetic oligonucleotide
  Target: LAMA2; (+) strand; PAM type: NNNNGHTT; PAM sequence: GAAAGCTT
gcagggatatggatgaagct

SEQ ID NO: 50445 - DNA, 20 bp, Artificial Sequence
  Description of Artificial Sequence: Synthetic oligonucleotide
  Target: LAMA2; (+) strand; PAM type: NNNNGHTT; PAM sequence: AGGGGCTT
ggacaaatagttaatgcatg

SEQ ID NO: 50446 - DNA, 20 bp, Artificial Sequence
  Description of Artificial Sequence: Synthetic oligonucleotide
  Target: LAMA2; (+) strand; PAM type: NNNNGHTT; PAM sequence: AATCGCTT
tcgggaggctgagacagtag

SEQ ID NO: 50447 - DNA, 20 bp, Artificial Sequence
  Description of Artificial Sequence: Synthetic oligonucleotide
  Target: LAMA2; (+) strand; PAM type: NNNNGHTT; PAM sequence: CAAAGCTT
gcatatgtattcctatgtaa

SEQ ID NO: 50448 - DNA, 20 bp, Artificial Sequence
  Description of Artificial Sequence: Synthetic oligonucleotide
  Target: LAMA2; (+) strand; PAM type: NNNNGHTT; PAM sequence: GCTTGCTT
atgtattcctatgtaacaaa

SEQ ID NO: 50449 - DNA, 20 bp, Artificial Sequence
  Description of Artificial Sequence: Synthetic oligonucleotide
  Target: LAMA2; (+) strand; PAM type: NNNNGHTT; PAM sequence: TAATGATT
aaagtcatttttgtgcacct

SEQ ID NO: 50450 - DNA, 20 bp, Artificial Sequence
  Description of Artificial Sequence: Synthetic oligonucleotide
  Target: LAMA2; (+) strand; PAM type: NNNNGHTT; PAM sequence: GATTGCTT
tcatttttgtgcaccttaat

SEQ ID NO: 50451 - DNA, 20 bp, Artificial Sequence
  Description of Artificial Sequence: Synthetic oligonucleotide
  Target: LAMA2; (+) strand; PAM type: NNNNGHTT; PAM sequence: TCTTGTTT
tgtgcaccttaatgattgct

SEQ ID NO: 50452 - DNA, 20 bp, Artificial Sequence
  Description of Artificial Sequence: Synthetic oligonucleotide
  Target: LAMA2; (+) strand; PAM type: NNNNGHTT; PAM sequence: AATGGTTT
atgattgcttcttgtttaca

SEQ ID NO: 50453 - DNA, 20 bp, Artificial Sequence
  Description of Artificial Sequence: Synthetic oligonucleotide
  Target: LAMA2; (+) strand; PAM type: NNNNGHTT; PAM sequence: ACCAGATT
tctgttgtcattctttttcc

SEQ ID NO: 50454 - DNA, 20 bp, Artificial Sequence
  Description of Artificial Sequence: Synthetic oligonucleotide
  Target: LAMA2; (+) strand; PAM type: NNNNGHTT; PAM sequence: AGAAGTTT
tccaccagattcttctctgc

SEQ ID NO: 50455 - DNA, 20 bp, Artificial Sequence
  Description of Artificial Sequence: Synthetic oligonucleotide
  Target: LAMA2; (+) strand; PAM type: NNNNGHTT; PAM sequence: TTTAGCTT
cagattcttctctgcagaag

SEQ ID NO: 50456 - DNA, 20 bp, Artificial Sequence
  Description of Artificial Sequence: Synthetic oligonucleotide
  Target: LAMA2; (+) strand; PAM type: NNNNGHTT; PAM sequence: AGCTGATT
caaaagatatttcttatgaa

SEQ ID NO: 50457 - DNA, 20 bp, Artificial Sequence
  Description of Artificial Sequence: Synthetic oligonucleotide
  Target: LAMA2; (+) strand; PAM type: NNNNGHTT; PAM sequence: TACAGCTT
catttaacaaagaaaaaaca

SEQ ID NO: 50458 - DNA, 20 bp, Artificial Sequence
  Description of Artificial Sequence: Synthetic oligonucleotide
  Target: LAMA2; (+) strand; PAM type: NNNNGHTT; PAM sequence: TACTGCTT
ataggtagagccaaatctgc

SEQ ID NO: 50459 - DNA, 20 bp, Artificial Sequence
  Description of Artificial Sequence: Synthetic oligonucleotide
  Target: LAMA2; (+) strand; PAM type: NNNNGHTT; PAM sequence: GAAAGCTT
ttcttgaaatctaagaagca

SEQ ID NO: 50460 - DNA, 20 bp, Artificial Sequence
  Description of Artificial Sequence: Synthetic oligonucleotide
  Target: LAMA2; (+) strand; PAM type: NNNNGHTT; PAM sequence: GAAGGCTT
atttaatcattggtactctg

SEQ ID NO: 50461 - DNA, 20 bp, Artificial Sequence
  Description of Artificial Sequence: Synthetic oligonucleotide
  Target: LAMA2; (+) strand; PAM type: NNNNGHTT; PAM sequence: CCTAGTTT
gtactctggaaggcttccca

SEQ ID NO: 50462 - DNA, 20 bp, Artificial Sequence
  Description of Artificial Sequence: Synthetic oligonucleotide
  Target: LAMA2; (+) strand; PAM type: NNNNGHTT; PAM sequence: GGGAGCTT
ccacctagtttgctggacca

SEQ ID NO: 50463 - DNA, 20 bp, Artificial Sequence
  Description of Artificial Sequence: Synthetic oligonucleotide
  Target: LAMA2; (+) strand; PAM type: NNNNGHTT; PAM sequence: CTGTGATT
aactaatcagcctatggtta

SEQ ID NO: 50464 - DNA, 20 bp, Artificial Sequence
  Description of Artificial Sequence: Synthetic oligonucleotide
  Target: LAMA2; (+) strand; PAM type: NNNNGHTT; PAM sequence: GGAGGATT
acaatagtggtgaaatattg

SEQ ID NO: 50465 - DNA, 20 bp, Artificial Sequence
  Description of Artificial Sequence: Synthetic oligonucleotide
  Target: LAMA2; (+) strand; PAM type: NNNNGHTT; PAM sequence: ATGTGATT
ccatatttgttctttaagac

SEQ ID NO: 50466 - DNA, 20 bp, Artificial Sequence
  Description of Artificial Sequence: Synthetic oligonucleotide
  Target: LAMA2; (+) strand; PAM type: NNNNGHTT; PAM sequence: CATAGATT
ggctgctataatgaaaatat

SEQ ID NO: 50467 - DNA, 20 bp, Artificial Sequence
  Description of Artificial Sequence: Synthetic oligonucleotide
  Target: LAMA2; (+) strand; PAM type: NNNNGHTT; PAM sequence: GCTGGTTT
ggtccaagatcaaggtgctg

SEQ ID NO: 50468 - DNA, 20 bp, Artificial Sequence
  Description of Artificial Sequence: Synthetic oligonucleotide
  Target: LAMA2; (+) strand; PAM type: NNNNGHTT; PAM sequence: AGCTGCTT
tggtttggtgcctggtaagg

SEQ ID NO: 50469 - DNA, 20 bp, Artificial Sequence
  Description of Artificial Sequence: Synthetic oligonucleotide
  Target: LAMA2; (+) strand; PAM type: NNNNGHTT; PAM sequence: TATAGTTT
agagatggctgtctccttgt

SEQ ID NO: 50470 - DNA, 20 bp, Artificial Sequence
  Description of Artificial Sequence: Synthetic oligonucleotide
  Target: LAMA2; (+) strand; PAM type: NNNNGHTT; PAM sequence: GCAGGCTT
tataaattgaccacagttct

SEQ ID NO: 50471 - DNA, 20 bp, Artificial Sequence
  Description of Artificial Sequence: Synthetic oligonucleotide
  Target: LAMA2; (+) strand; PAM type: NNNNGHTT; PAM sequence: GGAGGTTT
atcacaagaacagcaagggg

SEQ ID NO: 50472 - DNA, 20 bp, Artificial Sequence
  Description of Artificial Sequence: Synthetic oligonucleotide
  Target: LAMA2; (+) strand; PAM type: NNNNGHTT; PAM sequence: CCATGATT
gcaaggggggaggtttgctc

SEQ ID NO: 50473 - DNA, 20 bp, Artificial Sequence
  Description of Artificial Sequence: Synthetic oligonucleotide
  Target: LAMA2; (+) strand; PAM type: NNNNGHTT; PAM sequence: ATGAGATT
tgtgggtattacaacttgag

SEQ ID NO: 50474 - DNA, 20 bp, Artificial Sequence
  Description of Artificial Sequence: Synthetic oligonucleotide
  Target: LAMA2; (+) strand; PAM type: NNNNGHTT; PAM sequence: TTAGGTTT
aaataccatcacattgggaa

SEQ ID NO: 50475 - DNA, 20 bp, Artificial Sequence
  Description of Artificial Sequence: Synthetic oligonucleotide
  Target: LAMA2; (+) strand; PAM type: NNNNGHTT; PAM sequence: CAGTGTTT
ctcaattctttctactatcc

SEQ ID NO: 50476 - DNA, 20 bp, Artificial Sequence
  Description of Artificial Sequence: Synthetic oligonucleotide
  Target: LAMA2; (+) strand; PAM type: NNNNGHTT; PAM sequence: GAAGGCTT
gggtacatcagaagctctga

SEQ ID NO: 50477 - DNA, 20 bp, Artificial Sequence
  Description of Artificial Sequence: Synthetic oligonucleotide
  Target: LAMA2; (+) strand; PAM type: NNNNGHTT; PAM sequence: CCCAGATT
tctgagaaggcttgttaaag

SEQ ID NO: 50478 - DNA, 20 bp, Artificial Sequence
  Description of Artificial Sequence: Synthetic oligonucleotide
  Target: LAMA2; (+) strand; PAM type: NNNNGHTT; PAM sequence: GTAGGTTT
cccccagaatttctgagtct

SEQ ID NO: 50479 - DNA, 20 bp, Artificial Sequence
  Description of Artificial Sequence: Synthetic oligonucleotide
  Target: LAMA2; (+) strand; PAM type: NNNNGHTT; PAM sequence: TGCTGCTT
ctccaaggtggtgatgctgc

SEQ ID NO: 50480 - DNA, 20 bp, Artificial Sequence
  Description of Artificial Sequence: Synthetic oligonucleotide
  Target: LAMA2; (+) strand; PAM type: NNNNGHTT; PAM sequence: CTCTGCTT
ctcacatacccctctgcctg

SEQ ID NO: 50481 - DNA, 20 bp, Artificial Sequence
  Description of Artificial Sequence: Synthetic oligonucleotide
  Target: LAMA2; (+) strand; PAM type: NNNNGHTT; PAM sequence: ACCTGTTT
tgcttgtcctgactatgtac

SEQ ID NO: 50482 - DNA, 20 bp, Artificial Sequence
  Description of Artificial Sequence: Synthetic oligonucleotide
  Target: LAMA2; (+) strand; PAM type: NNNNGHTT; PAM sequence: AGGAGTTT
caaccgagacccctcattct

SEQ ID NO: 50483 - DNA, 20 bp, Artificial Sequence
  Description of Artificial Sequence: Synthetic oligonucleotide
  Target: LAMA2; (+) strand; PAM type: NNNNGHTT; PAM sequence: AAGAGTTT
aataagtattcagctgacaa

SEQ ID NO: 50484 - DNA, 20 bp, Artificial Sequence
  Description of Artificial Sequence: Synthetic oligonucleotide
  Target: LAMA2; (+) strand; PAM type: NNNNGHTT; PAM sequence: AAATGTTT
aactaataatataactgtgt

SEQ ID NO: 50485 - DNA, 20 bp, Artificial Sequence
  Description of Artificial Sequence: Synthetic oligonucleotide
  Target: LAMA2; (+) strand; PAM type: NNNNGHTT; PAM sequence: CTACGATT
cctgaagcacctggagaatc

SEQ ID NO: 50486 - DNA, 20 bp, Artificial Sequence
  Description of Artificial Sequence: Synthetic oligonucleotide
  Target: LAMA2; (+) strand; PAM type: NNNNGHTT; PAM sequence: TACAGTTT
aatcctacgattccaaggag

SEQ ID NO: 50487 - DNA, 20 bp, Artificial Sequence
  Description of Artificial Sequence: Synthetic oligonucleotide
  Target: LAMA2; (+) strand; PAM type: NNNNGHTT; PAM sequence: CAGTGCTT
gaagggttataagtctagac

SEQ ID NO: 50488 - DNA, 20 bp, Artificial Sequence
  Description of Artificial Sequence: Synthetic oligonucleotide
  Target: LAMA2; (+) strand; PAM type: NNNNGHTT; PAM sequence: CAGAGCTT
tgactatcttatcagcaatg

SEQ ID NO: 50489 - DNA, 20 bp, Artificial Sequence
  Description of Artificial Sequence: Synthetic oligonucleotide
  Target: LAMA2; (+) strand; PAM type: NNNNGHTT; PAM sequence: TTGCGTTT
tcttatcagcaatgcagagc

SEQ ID NO: 50490 - DNA, 20 bp, Artificial Sequence
  Description of Artificial Sequence: Synthetic oligonucleotide
  Target: LAMA2; (+) strand; PAM type: NNNNGHTT; PAM sequence: CACTGTTT
ccaagtgttatgctacaggt

SEQ ID NO: 50491 - DNA, 20 bp, Artificial Sequence
  Description of Artificial Sequence: Synthetic oligonucleotide
  Target: LAMA2; (+) strand; PAM type: NNNNGHTT; PAM sequence: GTATGCTT
ttttttaaactcttacctga

SEQ ID NO: 50492 - DNA, 20 bp, Artificial Sequence
  Description of Artificial Sequence: Synthetic oligonucleotide
  Target: LAMA2; (+) strand; PAM type: NNNNGHTT; PAM sequence: CCATGCTT
ttcttttgaggttagaaaca

SEQ ID NO: 50493 - DNA, 20 bp, Artificial Sequence
  Description of Artificial Sequence: Synthetic oligonucleotide
  Target: LAMA2; (+) strand; PAM type: NNNNGHTT; PAM sequence: CCCTGTTT
ttgagaaacatattacattt

SEQ ID NO: 50494 - DNA, 20 bp, Artificial Sequence
  Description of Artificial Sequence: Synthetic oligonucleotide
  Target: LAMA2; (+) strand; PAM type: NNNNGHTT; PAM sequence: TACTGATT
tattacatttccctgtttgt

SEQ ID NO: 50495 - DNA, 20 bp, Artificial Sequence
  Description of Artificial Sequence: Synthetic oligonucleotide
  Target: LAMA2; (+) strand; PAM type: NNNNGHTT; PAM sequence: CCATGTTT
tgcccagcagatgctgaata

SEQ ID NO: 50496 - DNA, 20 bp, Artificial Sequence
  Description of Artificial Sequence: Synthetic oligonucleotide
  Target: LAMA2; (+) strand; PAM type: NNNNGHTT; PAM sequence: GCATGTTT
gaataccatgttttcatgtg

SEQ ID NO: 50497 - DNA, 20 bp, Artificial Sequence
  Description of Artificial Sequence: Synthetic oligonucleotide
  Target: LAMA2; (+) strand; PAM type: NNNNGHTT; PAM sequence: GTTTGTTT
accatgttttcatgtggcat

SEQ ID NO: 50498 - DNA, 20 bp, Artificial Sequence
  Description of Artificial Sequence: Synthetic oligonucleotide
  Target: LAMA2; (+) strand; PAM type: NNNNGHTT; PAM sequence: ATTTGTTT
tttgtttactaatttacaaa

SEQ ID NO: 50499 - DNA, 20 bp, Artificial Sequence
  Description of Artificial Sequence: Synthetic oligonucleotide
  Target: LAMA2; (+) strand; PAM type: NNNNGHTT; PAM sequence: AAGGGCTT
ggcctttgagagaaatttgg

SEQ ID NO: 50500 - DNA, 20 bp, Artificial Sequence
  Description of Artificial Sequence: Synthetic oligonucleotide
  Target: LAMA2; (+) strand; PAM type: NNNNGHTT; PAM sequence: AAGAGATT
aaatttggaagggcttcaga

SEQ ID NO: 50501 - DNA, 20 bp, Artificial Sequence
  Description of Artificial Sequence: Synthetic oligonucleotide
  Target: LAMA2; (+) strand; PAM type: NNNNGHTT; PAM sequence: AGATGATT
gcttcagaaagagattgacc

SEQ ID NO: 50502 - DNA, 20 bp, Artificial Sequence
  Description of Artificial Sequence: Synthetic oligonucleotide
  Target: LAMA2; (+) strand; PAM type: NNNNGHTT; PAM sequence: CTGAGATT
ttattttttcttttgacaaa

SEQ ID NO: 50503 - DNA, 20 bp, Artificial Sequence
  Description of Artificial Sequence: Synthetic oligonucleotide
  Target: LAMA2; (+) strand; PAM type: NNNNGHTT; PAM sequence: TACAGTTT
actgagatttccagataatt

SEQ ID NO: 50504 - DNA, 20 bp, Artificial Sequence
  Description of Artificial Sequence: Synthetic oligonucleotide
  Target: LAMA2; (+) strand; PAM type: NNNNGHTT; PAM sequence: AGATGCTT
ttatcacacgtataagtaaa

SEQ ID NO: 50505 - DNA, 20 bp, Artificial Sequence
  Description of Artificial Sequence: Synthetic oligonucleotide
  Target: LAMA2; (+) strand; PAM type: NNNNGHTT; PAM sequence: CTTTGTTT
acacgtataagtaaaagatg

SEQ ID NO: 50506 - DNA, 20 bp, Artificial Sequence
  Description of Artificial Sequence: Synthetic oligonucleotide
  Target: LAMA2; (+) strand; PAM type: NNNNGHTT; PAM sequence: ATGAGTTT
ctccttctgtaattaggcta

SEQ ID NO: 50507 - DNA, 20 bp, Artificial Sequence
  Description of Artificial Sequence: Synthetic oligonucleotide
  Target: LAMA2; (+) strand; PAM type: NNNNGHTT; PAM sequence: GTTTGTTT
ttctgtaattaggctaatga

SEQ ID NO: 50508 - DNA, 20 bp, Artificial Sequence
  Description of Artificial Sequence: Synthetic oligonucleotide
  Target: LAMA2; (+) strand; PAM type: NNNNGHTT; PAM sequence: AGTTGATT
ttagggacttttggactatc

SEQ ID NO: 50509 - DNA, 20 bp, Artificial Sequence
  Description of Artificial Sequence: Synthetic oligonucleotide
  Target: LAMA2; (+) strand; PAM type: NNNNGHTT; PAM sequence: TTTTGTTT
cttttggactatcagttgat

SEQ ID NO: 50510 - DNA, 20 bp, Artificial Sequence
  Description of Artificial Sequence: Synthetic oligonucleotide
  Target: LAMA2; (+) strand; PAM type: NNNNGHTT; PAM sequence: TAGTGATT
atgagggttgggaaaagtga

SEQ ID NO: 50511 - DNA, 20 bp, Artificial Sequence
  Description of Artificial Sequence: Synthetic oligonucleotide
  Target: LAMA2; (+) strand; PAM type: NNNNGHTT; PAM sequence: TACAGATT
accagagaacttgttaaaaa

SEQ ID NO: 50512 - DNA, 20 bp, Artificial Sequence
  Description of Artificial Sequence: Synthetic oligonucleotide
  Target: LAMA2; (+) strand; PAM type: NNNNGHTT; PAM sequence: AGGGGATT
catgtattaacaagcccttc

SEQ ID NO: 50513 - DNA, 20 bp, Artificial Sequence
  Description of Artificial Sequence: Synthetic oligonucleotide
  Target: LAMA2; (+) strand; PAM type: NNNNGHTT; PAM sequence: GTTAGTTT
ttcaggggattatgaggcat

SEQ ID NO: 50514 - DNA, 20 bp, Artificial Sequence
  Description of Artificial Sequence: Synthetic oligonucleotide
  Target: LAMA2; (+) strand; PAM type: NNNNGHTT; PAM sequence: TAGAGTTT
attactgtctttcaagtatt

SEQ ID NO: 50515 - DNA, 20 bp, Artificial Sequence
  Description of Artificial Sequence: Synthetic oligonucleotide
  Target: LAMA2; (+) strand; PAM type: NNNNGHTT; PAM sequence: CATAGATT
tcagttggaagaaaaagaaa

SEQ ID NO: 50516 - DNA, 20 bp, Artificial Sequence
  Description of Artificial Sequence: Synthetic oligonucleotide
  Target: LAMA2; (+) strand; PAM type: NNNNGHTT; PAM sequence: CACAGTTT
caatgacctagaattctgtt

SEQ ID NO: 50517 - DNA, 20 bp, Artificial Sequence
  Description of Artificial Sequence: Synthetic oligonucleotide
  Target: LAMA2; (+) strand; PAM type: NNNNGHTT; PAM sequence: AGTGGATT
ggtctcagtacaatgaaaca

SEQ ID NO: 50518 - DNA, 20 bp, Artificial Sequence
  Description of Artificial Sequence: Synthetic oligonucleotide
  Target: LAMA2; (+) strand; PAM type: NNNNGHTT; PAM sequence: GATTGTTT
tcagtacaatgaaacaagtg

SEQ ID NO: 50519 - DNA, 20 bp, Artificial Sequence
  Description of Artificial Sequence: Synthetic oligonucleotide
  Target: LAMA2; (+) strand; PAM type: NNNNGHTT; PAM sequence: GTTTGATT
tacaatgaaacaagtggatt

SEQ ID NO: 50520 - DNA, 20 bp, Artificial Sequence
  Description of Artificial Sequence: Synthetic oligonucleotide
  Target: LAMA2; (+) strand; PAM type: NNNNGHTT; PAM sequence: ATCAGATT
tcttaaaactcatttcatca

SEQ ID NO: 50521 - DNA, 20 bp, Artificial Sequence
  Description of Artificial Sequence: Synthetic oligonucleotide
  Target: LAMA2; (+) strand; PAM type: NNNNGHTT; PAM sequence: ACATGATT
tcaatcagattcctagaatg

SEQ ID NO: 50522 - DNA, 20 bp, Artificial Sequence
  Description of Artificial Sequence: Synthetic oligonucleotide
  Target: LAMA2; (+) strand; PAM type: NNNNGHTT; PAM sequence: AAAGGTTT
ttattttacttacaaattta

SEQ ID NO: 50523 - DNA, 20 bp, Artificial Sequence
  Description of Artificial Sequence: Synthetic oligonucleotide
  Target: LAMA2; (+) strand; PAM type: NNNNGHTT; PAM sequence: ATCTGTTT
atttaaaaggtttcttaaaa

SEQ ID NO: 50524 - DNA, 20 bp, Artificial Sequence
  Description of Artificial Sequence: Synthetic oligonucleotide
  Target: LAMA2; (+) strand; PAM type: NNNNGHTT; PAM sequence: TTTCGCTT
aaaggtttcttaaaaatctg

SEQ ID NO: 50525 - DNA, 20 bp, Artificial Sequence
  Description of Artificial Sequence: Synthetic oligonucleotide
  Target: LAMA2; (+) strand; PAM type: NNNNGHTT; PAM sequence: ACCAGTTT
aattataaatggtctcaggt

SEQ ID NO: 50526 - DNA, 20 bp, Artificial Sequence
  Description of Artificial Sequence: Synthetic oligonucleotide
  Target: LAMA2; (+) strand; PAM type: NNNNGHTT; PAM sequence: ACTTGATT
gtctcaggtaccagttttca

SEQ ID NO: 50527 - DNA, 20 bp, Artificial Sequence
  Description of Artificial Sequence: Synthetic oligonucleotide
  Target: LAMA2; (+) strand; PAM type: NNNNGHTT; PAM sequence: ACATGTTT
gcacacagtgaatctatttt

SEQ ID NO: 50528 - DNA, 20 bp, Artificial Sequence
  Description of Artificial Sequence: Synthetic oligonucleotide
  Target: LAMA2; (+) strand; PAM type: NNNNGHTT; PAM sequence: CATGGTTT
atgttagcatctctttgtaa

SEQ ID NO: 50529 - DNA, 20 bp, Artificial Sequence
  Description of Artificial Sequence: Synthetic oligonucleotide
  Target: LAMA2; (+) strand; PAM type: NNNNGHTT; PAM sequence: AGCTGTTT
ccttctgaaaaaagtgaaga

SEQ ID NO: 50530 - DNA, 20 bp, Artificial Sequence
  Description of Artificial Sequence: Synthetic oligonucleotide
  Target: LAMA2; (+) strand; PAM type: NNNNGHTT; PAM sequence: TGATGCTT
gactacaaaaacaaagttga

SEQ ID NO: 50531 - DNA, 20 bp, Artificial Sequence
  Description of Artificial Sequence: Synthetic oligonucleotide
  Target: LAMA2; (+) strand; PAM type: NNNNGHTT; PAM sequence: GGGGGCTT
caagagtgacaactctgaaa

SEQ ID NO: 50532 - DNA, 20 bp, Artificial Sequence
  Description of Artificial Sequence: Synthetic oligonucleotide
  Target: LAMA2; (+) strand; PAM type: NNNNGHTT; PAM sequence: TTTTGTTT
cagaacaagaaatgactttt

SEQ ID NO: 50533 - DNA, 20 bp, Artificial Sequence
  Description of Artificial Sequence: Synthetic oligonucleotide
  Target: LAMA2; (+) strand; PAM type: NNNNGHTT; PAM sequence: TTTTGTTT
aagaaatgacttttttttgt

SEQ ID NO: 50534 - DNA, 20 bp, Artificial Sequence
  Description of Artificial Sequence: Synthetic oligonucleotide
  Target: LAMA2; (+) strand; PAM type: NNNNGHTT; PAM sequence: TTTTGTTT
atgacttttttttgtttttg

SEQ ID NO: 50535 - DNA, 20 bp, Artificial Sequence
  Description of Artificial Sequence: Synthetic oligonucleotide
  Target: LAMA2; (+) strand; PAM type: NNNNGHTT; PAM sequence: TGCAGCTT
atattcatatcatattattt

SEQ ID NO: 50536 - DNA, 20 bp, Artificial Sequence
  Description of Artificial Sequence: Synthetic oligonucleotide
  Target: LAMA2; (+) strand; PAM type: NNNNGHTT; PAM sequence: CAGAGCTT
atagctcaatgaattgagac

SEQ ID NO: 50537 - DNA, 20 bp, Artificial Sequence
  Description of Artificial Sequence: Synthetic oligonucleotide
  Target: LAMA2; (+) strand; PAM type: NNNNGHTT; PAM sequence: AACAGATT
tctgatggaactagaactaa

SEQ ID NO: 50538 - DNA, 20 bp, Artificial Sequence
  Description of Artificial Sequence: Synthetic oligonucleotide
  Target: LAMA2; (+) strand; PAM type: NNNNGHTT; PAM sequence: TGCTGTTT
cccagagacaaatttacctt

SEQ ID NO: 50539 - DNA, 20 bp, Artificial Sequence
  Description of Artificial Sequence: Synthetic oligonucleotide
  Target: LAMA2; (+) strand; PAM type: NNNNGHTT; PAM sequence: AAATGTTT
ggcatatagtatgtatgtag

SEQ ID NO: 50540 - DNA, 20 bp, Artificial Sequence
  Description of Artificial Sequence: Synthetic oligonucleotide
  Target: LAMA2; (+) strand; PAM type: NNNNGHTT; PAM sequence: CCAGGATT
taacaattgaatacaatcaa

SEQ ID NO: 50541 - DNA, 20 bp, Artificial Sequence
  Description of Artificial Sequence: Synthetic oligonucleotide
  Target: LAMA2; (+) strand; PAM type: NNNNGHTT; PAM sequence: TTTAGATT
tctattcatttctattttcc

SEQ ID NO: 50542 - DNA, 20 bp, Artificial Sequence
  Description of Artificial Sequence: Synthetic oligonucleotide
  Target: LAMA2; (+) strand; PAM type: NNNNGHTT; PAM sequence: AGAGGCTT
tcattctggtagaatattga

SEQ ID NO: 50543 - DNA, 20 bp, Artificial Sequence
  Description of Artificial Sequence: Synthetic oligonucleotide
  Target: LAMA2; (+) strand; PAM type: NNNNGHTT; PAM sequence: GCATGATT
ctgtcctgtcacaggctcca

SEQ ID NO: 50544 - DNA, 20 bp, Artificial Sequence
  Description of Artificial Sequence: Synthetic oligonucleotide
  Target: LAMA2; (+) strand; PAM type: NNNNGHTT; PAM sequence: AACCGTTT
gcacctgtctattttatggc

SEQ ID NO: 50545 - DNA, 20 bp, Artificial Sequence
  Description of Artificial Sequence: Synthetic oligonucleotide
  Target: LAMA2; (+) strand; PAM type: NNNNGHTT; PAM sequence: ATTCGTTT
agtcaatagtacctttagct

SEQ ID NO: 50546 - DNA, 20 bp, Artificial Sequence
  Description of Artificial Sequence: Synthetic oligonucleotide
  Target: LAMA2; (+) strand; PAM type: NNNNGHTT; PAM sequence: TGATGTTT
tagctattcgtttcttttag

SEQ ID NO: 50547 - DNA, 20 bp, Artificial Sequence
  Description of Artificial Sequence: Synthetic oligonucleotide
  Target: LAMA2; (+) strand; PAM type: NNNNGHTT; PAM sequence: TGGAGCTT
tgggcacccctacaaatacc

SEQ ID NO: 50548 - DNA, 20 bp, Artificial Sequence
  Description of Artificial Sequence: Synthetic oligonucleotide
  Target: LAMA2; (+) strand; PAM type: NNNNGHTT; PAM sequence: TCCTGTTT
ggtattgaaattctgagtgg

SEQ ID NO: 50549 - DNA, 20 bp, Artificial Sequence
  Description of Artificial Sequence: Synthetic oligonucleotide
  Target: LAMA2; (+) strand; PAM type: NNNNGHTT; PAM sequence: TTTGGATT
tgaaattctgagtggtcctg

SEQ ID NO: 50550 - DNA, 20 bp, Artificial Sequence
  Description of Artificial Sequence: Synthetic oligonucleotide
  Target: LAMA2; (+) strand; PAM type: NNNNGHTT; PAM sequence: CCACGTTT
ttggattttccttgtatgtg

SEQ ID NO: 50551 - DNA, 20 bp, Artificial Sequence
  Description of Artificial Sequence: Synthetic oligonucleotide
  Target: LAMA2; (+) strand; PAM type: NNNNGHTT; PAM sequence: ACTTGTTT
tgtgccacgtttaactaaag

SEQ ID NO: 50552 - DNA, 20 bp, Artificial Sequence
  Description of Artificial Sequence: Synthetic oligonucleotide
  Target: LAMA2; (+) strand; PAM type: NNNNGHTT; PAM sequence: CATAGATT
ctgaatcaatatgaataagg

SEQ ID NO: 50553 - DNA, 20 bp, Artificial Sequence
  Description of Artificial Sequence: Synthetic oligonucleotide
  Target: LAMA2; (+) strand; PAM type: NNNNGHTT; PAM sequence: GGTTGCTT
ataaggcatagattatttat

SEQ ID NO: 50554 - DNA, 20 bp, Artificial Sequence
  Description of Artificial Sequence: Synthetic oligonucleotide
  Target: LAMA2; (+) strand; PAM type: NNNNGHTT; PAM sequence: GGGTGTTT
aaatggctgaaaatcacatg

SEQ ID NO: 50555 - DNA, 20 bp, Artificial Sequence
  Description of Artificial Sequence: Synthetic oligonucleotide
  Target: LAMA2; (+) strand; PAM type: NNNNGHTT; PAM sequence: ACAGGTTT
atggggtgtttgttaagcca

SEQ ID NO: 50556 - DNA, 20 bp, Artificial Sequence
  Description of Artificial Sequence: Synthetic oligonucleotide
  Target: LAMA2; (+) strand; PAM type: NNNNGHTT; PAM sequence: TGGGGTTT
agagtctgtgtaggctgctc

SEQ ID NO: 50557 - DNA, 20 bp, Artificial Sequence
  Description of Artificial Sequence: Synthetic oligonucleotide
  Target: LAMA2; (+) strand; PAM type: NNNNGHTT; PAM sequence: ATTTGATT
aaaactgacacattgcatct

SEQ ID NO: 50558 - DNA, 20 bp, Artificial Sequence
  Description of Artificial Sequence: Synthetic oligonucleotide
  Target: LAMA2; (+) strand; PAM type: NNNNGHTT; PAM sequence: AATTGATT
ggaaacgtgctagacaccaa

SEQ ID NO: 50559 - DNA, 20 bp, Artificial Sequence
  Description of Artificial Sequence: Synthetic oligonucleotide
  Target: LAMA2; (+) strand; PAM type: NNNNGHTT; PAM sequence: CCGTGTTT
tgagaatggggcccagaaat

SEQ ID NO: 50560 - DNA, 20 bp, Artificial Sequence
  Description of Artificial Sequence: Synthetic oligonucleotide
  Target: LAMA2; (+) strand; PAM type: NNNNGHTT; PAM sequence: CAGTGATT
ccgtgttttaaaaattcctc

SEQ ID NO: 50561 - DNA, 20 bp, Artificial Sequence
  Description of Artificial Sequence: Synthetic oligonucleotide
  Target: LAMA2; (+) strand; PAM type: NNNNGHTT; PAM sequence: TGCAGCTT
aattcctccagtgattaaga

SEQ ID NO: 50562 - DNA, 20 bp, Artificial Sequence
  Description of Artificial Sequence: Synthetic oligonucleotide
  Target: LAMA2; (+) strand; PAM type: NNNNGHTT; PAM sequence: CTCTGATT
tataaacactaaaacaccat

SEQ ID NO: 50563 - DNA, 20 bp, Artificial Sequence
  Description of Artificial Sequence: Synthetic oligonucleotide
  Target: LAMA2; (+) strand; PAM type: NNNNGHTT; PAM sequence: CTGAGTTT
ggagggagtctaagtcaccc

SEQ ID NO: 50564 - DNA, 20 bp, Artificial Sequence
  Description of Artificial Sequence: Synthetic oligonucleotide
  Target: LAMA2; (+) strand; PAM type: NNNNGHTT; PAM sequence: AAGAGCTT
aagtcacccctgagtttagg

SEQ ID NO: 50565 - DNA, 20 bp, Artificial Sequence
  Description of Artificial Sequence: Synthetic oligonucleotide
  Target: LAMA2; (+) strand; PAM type: NNNNGHTT; PAM sequence: AGTGGTTT
gacattttgggggaaagttc

SEQ ID NO: 50566 - DNA, 20 bp, Artificial Sequence
  Description of Artificial Sequence: Synthetic oligonucleotide
  Target: LAMA2; (+) strand; PAM type: NNNNGHTT; PAM sequence: ATAGGCTT
ggggaaagttcagtggtttg

SEQ ID NO: 50567 - DNA, 20 bp, Artificial Sequence
  Description of Artificial Sequence: Synthetic oligonucleotide
  Target: LAMA2; (+) strand; PAM type: NNNNGHTT; PAM sequence: ATTGGTTT
ttgtgagactaagctaagga

SEQ ID NO: 50568 - DNA, 20 bp, Artificial Sequence
  Description of Artificial Sequence: Synthetic oligonucleotide
  Target: LAMA2; (+) strand; PAM type: NNNNGHTT; PAM sequence: AATGGTTT
tggctcacttaaactgaata

SEQ ID NO: 50569 - DNA, 20 bp, Artificial Sequence
  Description of Artificial Sequence: Synthetic oligonucleotide
  Target: LAMA2; (+) strand; PAM type: NNNNGHTT; PAM sequence: AAATGATT
gggtatttgaggttgaatag

SEQ ID NO: 50570 - DNA, 20 bp, Artificial Sequence
  Description of Artificial Sequence: Synthetic oligonucleotide
  Target: LAMA2; (+) strand; PAM type: NNNNGHTT; PAM sequence: GGGAGATT
atactatgataatattgact

SEQ ID NO: 50571 - DNA, 20 bp, Artificial Sequence
  Description of Artificial Sequence: Synthetic oligonucleotide
  Target: LAMA2; (+) strand; PAM type: NNNNGHTT; PAM sequence: AAAAGTTT
tattgactgggagattcagc

SEQ ID NO: 50572 - DNA, 20 bp, Artificial Sequence
  Description of Artificial Sequence: Synthetic oligonucleotide
  Target: LAMA2; (+) strand; PAM type: NNNNGHTT; PAM sequence: CAGAGCTT
agagcaacaggaaccccagc

SEQ ID NO: 50573 - DNA, 20 bp, Artificial Sequence
  Description of Artificial Sequence: Synthetic oligonucleotide
  Target: LAMA2; (+) strand; PAM type: NNNNGHTT; PAM sequence: GAAGGCTT
gaatttggagccagatcata

SEQ ID NO: 50574 - DNA, 20 bp, Artificial Sequence
  Description of Artificial Sequence: Synthetic oligonucleotide
  Target: LAMA2; (+) strand; PAM type: NNNNGHTT; PAM sequence: GGAGGATT
gctacttggaggctgaggtg

SEQ ID NO: 50575 - DNA, 20 bp, Artificial Sequence
  Description of Artificial Sequence: Synthetic oligonucleotide
  Target: LAMA2; (+) strand; PAM type: NNNNGHTT; PAM sequence: GATTGCTT
cttggaggctgaggtgggag

SEQ ID NO: 50576 - DNA, 20 bp, Artificial Sequence
  Description of Artificial Sequence: Synthetic oligonucleotide
  Target: LAMA2; (+) strand; PAM type: NNNNGHTT; PAM sequence: AGAAGTTT
tgggaggattgcttgagccc

SEQ ID NO: 50577 - DNA, 20 bp, Artificial Sequence
  Description of Artificial Sequence: Synthetic oligonucleotide
  Target: LAMA2; (+) strand; PAM type: NNNNGHTT; PAM sequence: GATAGCTT
aaaacaataatagacaggaa

SEQ ID NO: 50578 - DNA, 20 bp, Artificial Sequence
  Description of Artificial Sequence: Synthetic oligonucleotide
  Target: LAMA2; (+) strand; PAM type: NNNNGHTT; PAM sequence: TTCTGTTT
tccctatacataggccttct

SEQ ID NO: 50579 - DNA, 20 bp, Artificial Sequence
  Description of Artificial Sequence: Synthetic oligonucleotide
  Target: LAMA2; (+) strand; PAM type: NNNNGHTT; PAM sequence: CTAAGTTT
ctttctgtttcttaaatact

SEQ ID NO: 50580 - DNA, 20 bp, Artificial Sequence
  Description of Artificial Sequence: Synthetic oligonucleotide
  Target: LAMA2; (+) strand; PAM type: NNNNGHTT; PAM sequence: CTTTGTTT
cattttctatctgtgcctct

SEQ ID NO: 50581 - DNA, 20 bp, Artificial Sequence
  Description of Artificial Sequence: Synthetic oligonucleotide
  Target: LAMA2; (+) strand; PAM type: NNNNGHTT; PAM sequence: AACAGATT
acagtatctagcaaaggcaa

SEQ ID NO: 50582 - DNA, 20 bp, Artificial Sequence
  Description of Artificial Sequence: Synthetic oligonucleotide
  Target: LAMA2; (+) strand; PAM type: NNNNGHTT; PAM sequence: GATTGTTT
tatctagcaaaggcaaaaca

SEQ ID NO: 50583 - DNA, 20 bp, Artificial Sequence
  Description of Artificial Sequence: Synthetic oligonucleotide
  Target: LAMA2; (+) strand; PAM type: NNNNGHTT; PAM sequence: CAGAGCTT
aatggtgtgaacctgggagg

SEQ ID NO: 50584 - DNA, 20 bp, Artificial Sequence
  Description of Artificial Sequence: Synthetic oligonucleotide
  Target: LAMA2; (+) strand; PAM type: NNNNGHTT; PAM sequence: CCAAGATT
gaggcagagcttgcagtgag

SEQ ID NO: 50585 - DNA, 20 bp, Artificial Sequence
  Description of Artificial Sequence: Synthetic oligonucleotide
  Target: LAMA2; (+) strand; PAM type: NNNNGHTT; PAM sequence: TTCTGATT
tttaacctcttgatcatcat

SEQ ID NO: 50586 - DNA, 20 bp, Artificial Sequence
  Description of Artificial Sequence: Synthetic oligonucleotide
  Target: LAMA2; (+) strand; PAM type: NNNNGHTT; PAM sequence: CTTTGCTT
gctaagaagcacattttgat

SEQ ID NO: 50587 - DNA, 20 bp, Artificial Sequence
  Description of Artificial Sequence: Synthetic oligonucleotide
  Target: LAMA2; (+) strand; PAM type: NNNNGHTT; PAM sequence: AAAAGATT
attttgatctttgcttttac

SEQ ID NO: 50588 - DNA, 20 bp, Artificial Sequence
  Description of Artificial Sequence: Synthetic oligonucleotide
  Target: LAMA2; (+) strand; PAM type: NNNNGHTT; PAM sequence: CCCTGTTT
cacacgtgtggaaatatctt

SEQ ID NO: 50589 - DNA, 20 bp, Artificial Sequence
  Description of Artificial Sequence: Synthetic oligonucleotide
  Target: LAMA2; (+) strand; PAM type: NNNNGHTT; PAM sequence: AAAAGATT
attcaaacaagccatgttgt

SEQ ID NO: 50590 - DNA, 20 bp, Artificial Sequence
  Description of Artificial Sequence: Synthetic oligonucleotide
  Target: LAMA2; (+) strand; PAM type: NNNNGHTT; PAM sequence: TTGTGTTT
agccatgttgtaaaagattc

SEQ ID NO: 50591 - DNA, 20 bp, Artificial Sequence
  Description of Artificial Sequence: Synthetic oligonucleotide
  Target: LAMA2; (+) strand; PAM type: NNNNGHTT; PAM sequence: GGGAGATT
taagatatgacttgtaatca

SEQ ID NO: 50592 - DNA, 20 bp, Artificial Sequence
  Description of Artificial Sequence: Synthetic oligonucleotide
  Target: LAMA2; (+) strand; PAM type: NNNNGHTT; PAM sequence: CAGAGTTT
ttttttttttttttttgaga

SEQ ID NO: 50593 - DNA, 20 bp, Artificial Sequence
  Description of Artificial Sequence: Synthetic oligonucleotide
  Target: LAMA2; (+) strand; PAM type: NNNNGHTT; PAM sequence: GCTGGATT
gtttcgctcttgtcacccag

SEQ ID NO: 50594 - DNA, 20 bp, Artificial Sequence
  Description of Artificial Sequence: Synthetic oligonucleotide
  Target: LAMA2; (+) strand; PAM type: NNNNGHTT; PAM sequence: AAGTGATT
taacctccacctctcaggtc

SEQ ID NO: 50595 - DNA, 20 bp, Artificial Sequence
  Description of Artificial Sequence: Synthetic oligonucleotide
  Target: LAMA2; (+) strand; PAM type: NNNNGHTT; PAM sequence: CTGAGATT
tgcctcagcctcccaagtag

SEQ ID NO: 50596 - DNA, 20 bp, Artificial Sequence
  Description of Artificial Sequence: Synthetic oligonucleotide
  Target: LAMA2; (+) strand; PAM type: NNNNGHTT; PAM sequence: CGAGGTTT
ttttgtatttttagtagaga

SEQ ID NO: 50597 - DNA, 20 bp, Artificial Sequence
  Description of Artificial Sequence: Synthetic oligonucleotide
  Target: LAMA2; (+) strand; PAM type: NNNNGHTT; PAM sequence: AGTTGTTT
tgcacgggctgataaacata

SEQ ID NO: 50598 - DNA, 20 bp, Artificial Sequence
  Description of Artificial Sequence: Synthetic oligonucleotide
  Target: LAMA2; (+) strand; PAM type: NNNNGHTT; PAM sequence: AATAGATT
tatgttgcatgatattgcat

SEQ ID NO: 50599 - DNA, 20 bp, Artificial Sequence
  Description of Artificial Sequence: Synthetic oligonucleotide
  Target: LAMA2; (+) strand; PAM type: NNNNGHTT; PAM sequence: TTCTGATT
tatctgtgatgcattggtat

SEQ ID NO: 50600 - DNA, 20 bp, Artificial Sequence
  Description of Artificial Sequence: Synthetic oligonucleotide
  Target: LAMA2; (+) strand; PAM type: NNNNGHTT; PAM sequence: CTTTGTTT
tctgatttttattacctaat

SEQ ID NO: 50601 - DNA, 20 bp, Artificial Sequence
  Description of Artificial Sequence: Synthetic oligonucleotide
  Target: LAMA2; (+) strand; PAM type: NNNNGHTT; PAM sequence: CTATGTTT
aaaaaagaaaataatattgt

SEQ ID NO: 50602 - DNA, 20 bp, Artificial Sequence
  Description of Artificial Sequence: Synthetic oligonucleotide
  Target: LAMA2; (+) strand; PAM type: NNNNGHTT; PAM sequence: TGCAGATT
atgtggggttcttgttaaag

SEQ ID NO: 50603 - DNA, 20 bp, Artificial Sequence
  Description of Artificial Sequence: Synthetic oligonucleotide
  Target: LAMA2; (+) strand; PAM type: NNNNGHTT; PAM sequence: AATGGATT
ctgagtcagtagttcccagg

SEQ ID NO: 50604 - DNA, 20 bp, Artificial Sequence
  Description of Artificial Sequence: Synthetic oligonucleotide
  Target: LAMA2; (+) strand; PAM type: NNNNGHTT; PAM sequence: TTGAGATT
cagtagttcccaggaatgga

SEQ ID NO: 50605 - DNA, 20 bp, Artificial Sequence
  Description of Artificial Sequence: Synthetic oligonucleotide
  Target: LAMA2; (+) strand; PAM type: NNNNGHTT; PAM sequence: ATGAGCTT
attgagattatgcatttcta

SEQ ID NO: 50606 - DNA, 20 bp, Artificial Sequence
  Description of Artificial Sequence: Synthetic oligonucleotide
  Target: LAMA2; (+) strand; PAM type: NNNNGHTT; PAM sequence: TAAGGTTT
atgaaggtaaattacttcct

SEQ ID NO: 50607 - DNA, 20 bp, Artificial Sequence
  Description of Artificial Sequence: Synthetic oligonucleotide
  Target: LAMA2; (+) strand; PAM type: NNNNGHTT; PAM sequence: CATAGCTT
aaattacttccttaaggttt

SEQ ID NO: 50608 - DNA, 20 bp, Artificial Sequence
  Description of Artificial Sequence: Synthetic oligonucleotide
  Target: LAMA2; (+) strand; PAM type: NNNNGHTT; PAM sequence: TGTAGCTT
cagaagggctgtcacttgga

SEQ ID NO: 50609 - DNA, 20 bp, Artificial Sequence
  Description of Artificial Sequence: Synthetic oligonucleotide
  Target: LAMA2; (+) strand; PAM type: NNNNGHTT; PAM sequence: GAATGATT
actgtgccctagtacataga

SEQ ID NO: 50610 - DNA, 20 bp, Artificial Sequence
  Description of Artificial Sequence: Synthetic oligonucleotide
  Target: LAMA2; (+) strand; PAM type: NNNNGHTT; PAM sequence: AAAGGCTT
gtgggaatatctgcaagtgc

SEQ ID NO: 50611 - DNA, 20 bp, Artificial Sequence
  Description of Artificial Sequence: Synthetic oligonucleotide
  Target: LAMA2; (+) strand; PAM type: NNNNGHTT; PAM sequence: CTGTGATT
gctcagtgcaaattttaaaa

SEQ ID NO: 50612 - DNA, 20 bp, Artificial Sequence
  Description of Artificial Sequence: Synthetic oligonucleotide
  Target: LAMA2; (+) strand; PAM type: NNNNGHTT; PAM sequence: AGGGGTTT
ggatctatcattaagtagac

SEQ ID NO: 50613 - DNA, 20 bp, Artificial Sequence
  Description of Artificial Sequence: Synthetic oligonucleotide
  Target: LAMA2; (+) strand; PAM type: NNNNGHTT; PAM sequence: AGTGGCTT
tagcaagagaccaaaaactg

SEQ ID NO: 50614 - DNA, 20 bp, Artificial Sequence
  Description of Artificial Sequence: Synthetic oligonucleotide
  Target: LAMA2; (+) strand; PAM type: NNNNGHTT; PAM sequence: GGCAGATT
aaatccatgatcaaagtatt

SEQ ID NO: 50615 - DNA, 20 bp, Artificial Sequence
  Description of Artificial Sequence: Synthetic oligonucleotide
  Target: LAMA2; (+) strand; PAM type: NNNNGHTT; PAM sequence: CACCGTTT
accactttctggttcataga

SEQ ID NO: 50616 - DNA, 20 bp, Artificial Sequence
  Description of Artificial Sequence: Synthetic oligonucleotide
  Target: LAMA2; (+) strand; PAM type: NNNNGHTT; PAM sequence: TCCCGTTT
cttttttataagggcagtaa

SEQ ID NO: 50617 - DNA, 20 bp, Artificial Sequence
  Description of Artificial Sequence: Synthetic oligonucleotide
  Target: LAMA2; (+) strand; PAM type: NNNNGHTT; PAM sequence: CTCTGCTT
agtaatcccgtttatgaagt

SEQ ID NO: 50618 - DNA, 20 bp, Artificial Sequence
  Description of Artificial Sequence: Synthetic oligonucleotide
  Target: LAMA2; (+) strand; PAM type: NNNNGHTT; PAM sequence: TGAGGATT
acttcctaatcctatcacct

SEQ ID NO: 50619 - DNA, 20 bp, Artificial Sequence
  Description of Artificial Sequence: Synthetic oligonucleotide
  Target: LAMA2; (+) strand; PAM type: NNNNGHTT; PAM sequence: TTAGGATT
taatcctatcaccttgagga

SEQ ID NO: 50620 - DNA, 20 bp, Artificial Sequence
  Description of Artificial Sequence: Synthetic oligonucleotide
  Target: LAMA2; (+) strand; PAM type: NNNNGHTT; PAM sequence: CAAAGATT
aaagtgatcaacatgggatc

SEQ ID NO: 50621 - DNA, 20 bp, Artificial Sequence
  Description of Artificial Sequence: Synthetic oligonucleotide
  Target: LAMA2; (+) strand; PAM type: NNNNGHTT; PAM sequence: AAATGCTT
atccaaagattggaataaca

SEQ ID NO: 50622 - DNA, 20 bp, Artificial Sequence
  Description of Artificial Sequence: Synthetic oligonucleotide
  Target: LAMA2; (+) strand; PAM type: NNNNGHTT; PAM sequence: CAAAGCTT
agaaaaaaactataagtggt

SEQ ID NO: 50623 - DNA, 20 bp, Artificial Sequence
  Description of Artificial Sequence: Synthetic oligonucleotide
  Target: LAMA2; (+) strand; PAM type: NNNNGHTT; PAM sequence: TGGTGATT
agttaaatctgtaggtagaa

SEQ ID NO: 50624 - DNA, 20 bp, Artificial Sequence
  Description of Artificial Sequence: Synthetic oligonucleotide
  Target: LAMA2; (+) strand; PAM type: NNNNGHTT; PAM sequence: CACTGATT
aaatagcaatatttgtctct

SEQ ID NO: 50625 - DNA, 20 bp, Artificial Sequence
  Description of Artificial Sequence: Synthetic oligonucleotide
  Target: LAMA2; (+) strand; PAM type: NNNNGHTT; PAM sequence: CCAGGATT
actgattttactcttctagg

SEQ ID NO: 50626 - DNA, 20 bp, Artificial Sequence
  Description of Artificial Sequence: Synthetic oligonucleotide
  Target: LAMA2; (+) strand; PAM type: NNNNGHTT; PAM sequence: TTGAGTTT
tttactcttctaggccagga

SEQ ID NO: 50627 - DNA, 20 bp, Artificial Sequence
  Description of Artificial Sequence: Synthetic oligonucleotide
  Target: LAMA2; (+) strand; PAM type: NNNNGHTT; PAM sequence: GGTTGATT
tctcatgaaacagtccatta

SEQ ID NO: 50628 - DNA, 20 bp, Artificial Sequence
  Description of Artificial Sequence: Synthetic oligonucleotide
  Target: LAMA2; (+) strand; PAM type: NNNNGHTT; PAM sequence: GATGGTTT
ttaggttgattcttccatgt

SEQ ID NO: 50629 - DNA, 20 bp, Artificial Sequence
  Description of Artificial Sequence: Synthetic oligonucleotide
  Target: LAMA2; (+) strand; PAM type: NNNNGHTT; PAM sequence: CTAAGTTT
tttcttaaaaagtattttcc

SEQ ID NO: 50630 - DNA, 20 bp, Artificial Sequence
  Description of Artificial Sequence: Synthetic oligonucleotide
  Target: LAMA2; (+) strand; PAM type: NNNNGHTT; PAM sequence: ATCTGCTT
acagaactcccattgaatac

SEQ ID NO: 50631 - DNA, 20 bp, Artificial Sequence
  Description of Artificial Sequence: Synthetic oligonucleotide
  Target: LAMA2; (+) strand; PAM type: NNNNGHTT; PAM sequence: TTATGTTT
ctcccattgaatacatctgc

SEQ ID NO: 50632 - DNA, 20 bp, Artificial Sequence
  Description of Artificial Sequence: Synthetic oligonucleotide
  Target: LAMA2; (+) strand; PAM type: NNNNGHTT; PAM sequence: TATAGATT
tcacaaagtactcatttgta

SEQ ID NO: 50633 - DNA, 20 bp, Artificial Sequence
  Description of Artificial Sequence: Synthetic oligonucleotide
  Target: LAMA2; (+) strand; PAM type: NNNNGHTT; PAM sequence: AGTAGTTT
atgctccatctttctttaaa

SEQ ID NO: 50634 - DNA, 20 bp, Artificial Sequence
  Description of Artificial Sequence: Synthetic oligonucleotide
  Target: LAMA2; (+) strand; PAM type: NNNNGHTT; PAM sequence: CTTCGCTT
actagtatcgcataactttt

SEQ ID NO: 50635 - DNA, 20 bp, Artificial Sequence
  Description of Artificial Sequence: Synthetic oligonucleotide
  Target: LAMA2; (+) strand; PAM type: NNNNGHTT; PAM sequence: AGTAGTTT
aactcttcaaggactggcta

SEQ ID NO: 50636 - DNA, 20 bp, Artificial Sequence
  Description of Artificial Sequence: Synthetic oligonucleotide
  Target: LAMA2; (+) strand; PAM type: NNNNGHTT; PAM sequence: CTAAGCTT
aacatgatgtaccttttttg

SEQ ID NO: 50637 - DNA, 20 bp, Artificial Sequence
  Description of Artificial Sequence: Synthetic oligonucleotide
  Target: LAMA2; (+) strand; PAM type: NNNNGHTT; PAM sequence: GTAGGATT
gaaagtcaggaatacaaggg

SEQ ID NO: 50638 - DNA, 20 bp, Artificial Sequence
  Description of Artificial Sequence: Synthetic oligonucleotide
  Target: LAMA2; (+) strand; PAM type: NNNNGHTT; PAM sequence: ACTTGTTT
taatagaagcaaatactagt

SEQ ID NO: 50639 - DNA, 20 bp, Artificial Sequence
  Description of Artificial Sequence: Synthetic oligonucleotide
  Target: LAMA2; (+) strand; PAM type: NNNNGHTT; PAM sequence: GAGTGTTT
tttgttctcccaatggacat

SEQ ID NO: 50640 - DNA, 20 bp, Artificial Sequence
  Description of Artificial Sequence: Synthetic oligonucleotide
  Target: LAMA2; (+) strand; PAM type: NNNNGHTT; PAM sequence: ATCTGTTT
gtactcacacattcacacat

SEQ ID NO: 50641 - DNA, 20 bp, Artificial Sequence
  Description of Artificial Sequence: Synthetic oligonucleotide
  Target: LAMA2; (+) strand; PAM type: NNNNGHTT; PAM sequence: ATCTGCTT
ttcctagagcagcacttaca

SEQ ID NO: 50642 - DNA, 20 bp, Artificial Sequence
  Description of Artificial Sequence: Synthetic oligonucleotide
  Target: LAMA2; (+) strand; PAM type: NNNNGHTT; PAM sequence: ACAGGCTT
agacaaatgtaaatttacaa

SEQ ID NO: 50643 - DNA, 20 bp, Artificial Sequence
  Description of Artificial Sequence: Synthetic oligonucleotide
  Target: LAMA2; (+) strand; PAM type: NNNNGHTT; PAM sequence: CATTGTTT
catgtatacctatgaagtgg

SEQ ID NO: 50644 - DNA, 20 bp, Artificial Sequence
  Description of Artificial Sequence: Synthetic oligonucleotide
  Target: LAMA2; (+) strand; PAM type: NNNNGHTT; PAM sequence: ATAGGCTT
aagtggcattgtttaaatag

SEQ ID NO: 50645 - DNA, 20 bp, Artificial Sequence
  Description of Artificial Sequence: Synthetic oligonucleotide
  Target: LAMA2; (+) strand; PAM type: NNNNGHTT; PAM sequence: GTTGGTTT
ataggcttttcttggtctaa

SEQ ID NO: 50646 - DNA, 20 bp, Artificial Sequence
  Description of Artificial Sequence: Synthetic oligonucleotide
  Target: LAMA2; (+) strand; PAM type: NNNNGHTT; PAM sequence: GTAAGTTT
ctattctttttgctatgtta

SEQ ID NO: 50647 - DNA, 20 bp, Artificial Sequence
  Description of Artificial Sequence: Synthetic oligonucleotide
  Target: LAMA2; (+) strand; PAM type: NNNNGHTT; PAM sequence: TGAAGTTT
ttttgctatgttagtaagtt

SEQ ID NO: 50648 - DNA, 20 bp, Artificial Sequence
  Description of Artificial Sequence: Synthetic oligonucleotide
  Target: LAMA2; (+) strand; PAM type: NNNNGHTT; PAM sequence: AATTGCTT
tcaggaggctgaggcaggag

SEQ ID NO: 50649 - DNA, 20 bp, Artificial Sequence
  Description of Artificial Sequence: Synthetic oligonucleotide
  Target: LAMA2; (+) strand; PAM type: NNNNGHTT; PAM sequence: GGAGGCTT
agagaaattagtaaaagaga

SEQ ID NO: 50650 - DNA, 20 bp, Artificial Sequence
  Description of Artificial Sequence: Synthetic oligonucleotide
  Target: LAMA2; (+) strand; PAM type: NNNNGHTT; PAM sequence: ACTTGCTT
aagagaggaggcttgaattc

SEQ ID NO: 50651 - DNA, 20 bp, Artificial Sequence
  Description of Artificial Sequence: Synthetic oligonucleotide
  Target: LAMA2; (+) strand; PAM type: NNNNGHTT; PAM sequence: AGGAGCTT
taaattgccacctatgtctg

SEQ ID NO: 50652 - DNA, 20 bp, Artificial Sequence
  Description of Artificial Sequence: Synthetic oligonucleotide
  Target: LAMA2; (+) strand; PAM type: NNNNGHTT; PAM sequence: GGAAGCTT
ctcccaagaaataaaggaca

SEQ ID NO: 50653 - DNA, 20 bp, Artificial Sequence
  Description of Artificial Sequence: Synthetic oligonucleotide
  Target: LAMA2; (+) strand; PAM type: NNNNGHTT; PAM sequence: ATTTGTTT
ctgtccttgatgggtatgtc

SEQ ID NO: 50654 - DNA, 20 bp, Artificial Sequence
  Description of Artificial Sequence: Synthetic oligonucleotide
  Target: LAMA2; (+) strand; PAM type: NNNNGHTT; PAM sequence: AAATGTTT
ggtatgtcatttgtttttgg

SEQ ID NO: 50655 - DNA, 20 bp, Artificial Sequence
  Description of Artificial Sequence: Synthetic oligonucleotide
  Target: LAMA2; (+) strand; PAM type: NNNNGHTT; PAM sequence: TGATGCTT
ttggaaatgtttgtgtattt

SEQ ID NO: 50656 - DNA, 20 bp, Artificial Sequence
  Description of Artificial Sequence: Synthetic oligonucleotide
  Target: LAMA2; (+) strand; PAM type: NNNNGHTT; PAM sequence: AAAGGTTT
gtgtattttgatgcttgtcc

SEQ ID NO: 50657 - DNA, 20 bp, Artificial Sequence
  Description of Artificial Sequence: Synthetic oligonucleotide
  Target: LAMA2; (+) strand; PAM type: NNNNGHTT; PAM sequence: TCCTGATT
agtagagaatcattttcaaa

SEQ ID NO: 50658 - DNA, 20 bp, Artificial Sequence
  Description of Artificial Sequence: Synthetic oligonucleotide
  Target: LAMA2; (+) strand; PAM type: NNNNGHTT; PAM sequence: ATAGGCTT
gctatatggcctttctgtgg

SEQ ID NO: 50659 - DNA, 20 bp, Artificial Sequence
  Description of Artificial Sequence: Synthetic oligonucleotide
  Target: LAMA2; (+) strand; PAM type: NNNNGHTT; PAM sequence: CAAAGCTT
cttaattaggagggtctggg

SEQ ID NO: 50660 - DNA, 20 bp, Artificial Sequence
  Description of Artificial Sequence: Synthetic oligonucleotide
  Target: LAMA2; (+) strand; PAM type: NNNNGHTT; PAM sequence: GTCTGATT
ttgctacagcagcatcaaaa

SEQ ID NO: 50661 - DNA, 20 bp, Artificial Sequence
  Description of Artificial Sequence: Synthetic oligonucleotide
  Target: LAMA2; (+) strand; PAM type: NNNNGHTT; PAM sequence: TATGGCTT
gatttacaagtagactcaaa

SEQ ID NO: 50662 - DNA, 20 bp, Artificial Sequence
  Description of Artificial Sequence: Synthetic oligonucleotide
  Target: LAMA2; (+) strand; PAM type: NNNNGHTT; PAM sequence: TTCTGTTT
ataacatatatgaaaataca

SEQ ID NO: 50663 - DNA, 20 bp, Artificial Sequence
  Description of Artificial Sequence: Synthetic oligonucleotide
  Target: LAMA2; (+) strand; PAM type: NNNNGHTT; PAM sequence: TTCAGTTT
aaatacattctgtttcaaat

SEQ ID NO: 50664 - DNA, 20 bp, Artificial Sequence
  Description of Artificial Sequence: Synthetic oligonucleotide
  Target: LAMA2; (+) strand; PAM type: NNNNGHTT; PAM sequence: TCATGTTT
ttctgtttcaaatttcagtt

SEQ ID NO: 50665 - DNA, 20 bp, Artificial Sequence
  Description of Artificial Sequence: Synthetic oligonucleotide
  Target: LAMA2; (+) strand; PAM type: NNNNGHTT; PAM sequence: GATGGCTT
aaacaatttattgttaaaag

SEQ ID NO: 50666 - DNA, 20 bp, Artificial Sequence
  Description of Artificial Sequence: Synthetic oligonucleotide
  Target: LAMA2; (+) strand; PAM type: NNNNGHTT; PAM sequence: AGCAGCTT
tacattttctcctgtaaaat

SEQ ID NO: 50667 - DNA, 20 bp, Artificial Sequence
  Description of Artificial Sequence: Synthetic oligonucleotide
  Target: LAMA2; (+) strand; PAM type: NNNNGHTT; PAM sequence: CTGGGATT
aaaatagcagcttattctag

SEQ ID NO: 50668 - DNA, 20 bp, Artificial Sequence
  Description of Artificial Sequence: Synthetic oligonucleotide
  Target: LAMA2; (+) strand; PAM type: NNNNGHTT; PAM sequence: ATATGCTT
cagccttctgtgtataactg

SEQ ID NO: 50669 - DNA, 20 bp, Artificial Sequence
  Description of Artificial Sequence: Synthetic oligonucleotide
  Target: LAMA2; (+) strand; PAM type: NNNNGHTT; PAM sequence: TTGGGATT
gatatgcttttcctacaatt

SEQ ID NO: 50670 - DNA, 20 bp, Artificial Sequence
  Description of Artificial Sequence: Synthetic oligonucleotide
  Target: LAMA2; (+) strand; PAM type: NNNNGHTT; PAM sequence: CAAAGCTT
agataaatctacatcacatg

SEQ ID NO: 50671 - DNA, 20 bp, Artificial Sequence
  Description of Artificial Sequence: Synthetic oligonucleotide
  Target: LAMA2; (+) strand; PAM type: NNNNGHTT; PAM sequence: TAATGTTT
ctgttataaagaaaaaatgc

SEQ ID NO: 50672 - DNA, 20 bp, Artificial Sequence
  Description of Artificial Sequence: Synthetic oligonucleotide
  Target: LAMA2; (+) strand; PAM type: NNNNGHTT; PAM sequence: GAAAGATT
tgggaagtgcacctacccca

SEQ ID NO: 50673 - DNA, 20 bp, Artificial Sequence
  Description of Artificial Sequence: Synthetic oligonucleotide
  Target: LAMA2; (+) strand; PAM type: NNNNGHTT; PAM sequence: GCATGCTT
caagtgctctgaatctcaca

SEQ ID NO: 50674 - DNA, 20 bp, Artificial Sequence
  Description of Artificial Sequence: Synthetic oligonucleotide
  Target: LAMA2; (+) strand; PAM type: NNNNGHTT; PAM sequence: ATAAGTTT
atagctgaattattagaaat

SEQ ID NO: 50675 - DNA, 20 bp, Artificial Sequence
  Description of Artificial Sequence: Synthetic oligonucleotide
  Target: LAMA2; (+) strand; PAM type: NNNNGHTT; PAM sequence: GCCAGATT
ttggccatgatcatttggaa

SEQ ID NO: 50676 - DNA, 20 bp, Artificial Sequence
  Description of Artificial Sequence: Synthetic oligonucleotide
  Target: LAMA2; (+) strand; PAM type: NNNNGHTT; PAM sequence: CAAAGCTT
ttcaatgccactgcagcctt

SEQ ID NO: 50677 - DNA, 20 bp, Artificial Sequence
  Description of Artificial Sequence: Synthetic oligonucleotide
  Target: LAMA2; (+) strand; PAM type: NNNNGHTT; PAM sequence: ATTTGTTT
aaatcccagtaaattggtat

SEQ ID NO: 50678 - DNA, 20 bp, Artificial Sequence
  Description of Artificial Sequence: Synthetic oligonucleotide
  Target: LAMA2; (+) strand; PAM type: NNNNGHTT; PAM sequence: GCAAGTTT
aaaattatctcagaaaccaa

SEQ ID NO: 50679 - DNA, 20 bp, Artificial Sequence
  Description of Artificial Sequence: Synthetic oligonucleotide
  Target: LAMA2; (+) strand; PAM type: NNNNGHTT; PAM sequence: TGAAGTTT
acacacaaattggttacata

SEQ ID NO: 50680 - DNA, 20 bp, Artificial Sequence
  Description of Artificial Sequence: Synthetic oligonucleotide
  Target: LAMA2; (+) strand; PAM type: NNNNGHTT; PAM sequence: ATATGCTT
taataaaaacatactggatc

SEQ ID NO: 50681 - DNA, 20 bp, Artificial Sequence
  Description of Artificial Sequence: Synthetic oligonucleotide
  Target: LAMA2; (+) strand; PAM type: NNNNGHTT; PAM sequence: CCATGTTT
atgcttctaaacaatttata

SEQ ID NO: 50682 - DNA, 20 bp, Artificial Sequence
  Description of Artificial Sequence: Synthetic oligonucleotide
  Target: LAMA2; (+) strand; PAM type: NNNNGHTT; PAM sequence: TAGAGTTT
tacatttggaacaagtattt

SEQ ID NO: 50683 - DNA, 20 bp, Artificial Sequence
  Description of Artificial Sequence: Synthetic oligonucleotide
  Target: LAMA2; (+) strand; PAM type: NNNNGHTT; PAM sequence: TTATGCTT
ccttcaatggtgacaaatct

SEQ ID NO: 50684 - DNA, 20 bp, Artificial Sequence
  Description of Artificial Sequence: Synthetic oligonucleotide
  Target: LAMA2; (+) strand; PAM type: NNNNGHTT; PAM sequence: TTTTGTTT
tcagaaccatcatttattta

SEQ ID NO: 50685 - DNA, 20 bp, Artificial Sequence
  Description of Artificial Sequence: Synthetic oligonucleotide
  Target: LAMA2; (+) strand; PAM type: NNNNGHTT; PAM sequence: ATCTGATT
gagaattttttgggggagaa

SEQ ID NO: 50686 - DNA, 20 bp, Artificial Sequence
  Description of Artificial Sequence: Synthetic oligonucleotide
  Target: LAMA2; (+) strand; PAM type: NNNNGHTT; PAM sequence: CTTTGCTT
aagaaactgatcaatatttt

SEQ ID NO: 50687 - DNA, 20 bp, Artificial Sequence
  Description of Artificial Sequence: Synthetic oligonucleotide
  Target: LAMA2; (+) strand; PAM type: NNNNGHTT; PAM sequence: CTAGGATT
gtgttgggcaaaaatacttt

SEQ ID NO: 50688 - DNA, 20 bp, Artificial Sequence
  Description of Artificial Sequence: Synthetic oligonucleotide
  Target: LAMA2; (+) strand; PAM type: NNNNGHTT; PAM sequence: TACTGTTT
catattctatgagcaatttg

SEQ ID NO: 50689 - DNA, 20 bp, Artificial Sequence
  Description of Artificial Sequence: Synthetic oligonucleotide
  Target: LAMA2; (+) strand; PAM type: NNNNGHTT; PAM sequence: TTTGGTTT
tatgagcaatttgtactgtt

SEQ ID NO: 50690 - DNA, 20 bp, Artificial Sequence
  Description of Artificial Sequence: Synthetic oligonucleotide
  Target: LAMA2; (+) strand; PAM type: NNNNGHTT; PAM sequence: ACCTGTTT
aagttcaccattttcatttc

SEQ ID NO: 50691 - DNA, 20 bp, Artificial Sequence
  Description of Artificial Sequence: Synthetic oligonucleotide
  Target: LAMA2; (+) strand; PAM type: NNNNGHTT; PAM sequence: GTATGATT
ttcatttcacctgttttatt

SEQ ID NO: 50692 - DNA, 20 bp, Artificial Sequence
  Description of Artificial Sequence: Synthetic oligonucleotide
  Target: LAMA2; (+) strand; PAM type: NNNNGHTT; PAM sequence: AATTGCTT
caataaaaatttgctgtagt

SEQ ID NO: 50693 - DNA, 20 bp, Artificial Sequence
  Description of Artificial Sequence: Synthetic oligonucleotide
  Target: LAMA2; (+) strand; PAM type: NNNNGHTT; PAM sequence: AGGTGTTT
tgtaacattttatgataagg

SEQ ID NO: 50694 - DNA, 20 bp, Artificial Sequence
  Description of Artificial Sequence: Synthetic oligonucleotide
  Target: LAMA2; (+) strand; PAM type: NNNNGHTT; PAM sequence: CCATGCTT
gtgcacttacttcttaccac

SEQ ID NO: 50695 - DNA, 20 bp, Artificial Sequence
  Description of Artificial Sequence: Synthetic oligonucleotide
  Target: LAMA2; (+) strand; PAM type: NNNNGHTT; PAM sequence: CAGTGATT
aaataagtgctatagagaat

SEQ ID NO: 50696 - DNA, 20 bp, Artificial Sequence
  Description of Artificial Sequence: Synthetic oligonucleotide
  Target: LAMA2; (+) strand; PAM type: NNNNGHTT; PAM sequence: GAATGTTT
ctgtcccagaaattttgttg

SEQ ID NO: 50697 - DNA, 20 bp, Artificial Sequence
  Description of Artificial Sequence: Synthetic oligonucleotide
  Target: LAMA2; (+) strand; PAM type: NNNNGHTT; PAM sequence: TTTAGTTT
atgaacagaatgaataaaat

SEQ ID NO: 50698 - DNA, 20 bp, Artificial Sequence
  Description of Artificial Sequence: Synthetic oligonucleotide
  Target: LAMA2; (+) strand; PAM type: NNNNGHTT; PAM sequence: ATGAGATT
ctatagctcaacagagaaga

SEQ ID NO: 50699 - DNA, 20 bp, Artificial Sequence
  Description of Artificial Sequence: Synthetic oligonucleotide
  Target: LAMA2; (+) strand; PAM type: NNNNGHTT; PAM sequence: CAAAGCTT
ttattaagtatagaagagtt

SEQ ID NO: 50700 - DNA, 20 bp, Artificial Sequence
  Description of Artificial Sequence: Synthetic oligonucleotide
  Target: LAMA2; (+) strand; PAM type: NNNNGHTT; PAM sequence: GAATGTTT
ctagccctataaagaaggaa

SEQ ID NO: 50701 - DNA, 20 bp, Artificial Sequence
  Description of Artificial Sequence: Synthetic oligonucleotide
  Target: LAMA2; (+) strand; PAM type: NNNNGHTT; PAM sequence: CAATGTTT
acctccaagcataattaaga

SEQ ID NO: 50702 - DNA, 20 bp, Artificial Sequence
  Description of Artificial Sequence: Synthetic oligonucleotide
  Target: LAMA2; (+) strand; PAM type: NNNNGHTT; PAM sequence: CTTTGATT
aagacaatgtttaaaatcaa

SEQ ID NO: 50703 - DNA, 20 bp, Artificial Sequence
  Description of Artificial Sequence: Synthetic oligonucleotide
  Target: LAMA2; (+) strand; PAM type: NNNNGHTT; PAM sequence: ATACGATT
ttataagcaggagaaagcta

SEQ ID NO: 50704 - DNA, 20 bp, Artificial Sequence
  Description of Artificial Sequence: Synthetic oligonucleotide
  Target: LAMA2; (+) strand; PAM type: NNNNGHTT; PAM sequence: ATTTGTTT
agcaggagaaagctaatacg

SEQ ID NO: 50705 - DNA, 20 bp, Artificial Sequence
  Description of Artificial Sequence: Synthetic oligonucleotide
  Target: LAMA2; (+) strand; PAM type: NNNNGHTT; PAM sequence: ATTTGTTT
tgaggaaagtactataaagc

SEQ ID NO: 50706 - DNA, 20 bp, Artificial Sequence
  Description of Artificial Sequence: Synthetic oligonucleotide
  Target: LAMA2; (+) strand; PAM type: NNNNGHTT; PAM sequence: AGTTGCTT
cagtaattttttctcatctt

SEQ ID NO: 50707 - DNA, 20 bp, Artificial Sequence
  Description of Artificial Sequence: Synthetic oligonucleotide
  Target: LAMA2; (+) strand; PAM type: NNNNGHTT; PAM sequence: AGATGTTT
ctctaaaataacagagaatt

SEQ ID NO: 50708 - DNA, 20 bp, Artificial Sequence
  Description of Artificial Sequence: Synthetic oligonucleotide
  Target: LAMA2; (+) strand; PAM type: NNNNGHTT; PAM sequence: ATCAGATT
aagcctacattatctatcag

SEQ ID NO: 50709 - DNA, 20 bp, Artificial Sequence
  Description of Artificial Sequence: Synthetic oligonucleotide
  Target: LAMA2; (+) strand; PAM type: NNNNGHTT; PAM sequence: GGGGGTTT
ggatagatgtatacaagaag

SEQ ID NO: 50710 - DNA, 20 bp, Artificial Sequence
  Description of Artificial Sequence: Synthetic oligonucleotide
  Target: LAMA2; (+) strand; PAM type: NNNNGHTT; PAM sequence: GCCTGCTT
tactctttccactttcttct

SEQ ID NO: 50711 - DNA, 20 bp, Artificial Sequence
  Description of Artificial Sequence: Synthetic oligonucleotide
  Target: LAMA2; (+) strand; PAM type: NNNNGHTT; PAM sequence: GGCAGCTT
gcttttattctagccacact

SEQ ID NO: 50712 - DNA, 20 bp, Artificial Sequence
  Description of Artificial Sequence: Synthetic oligonucleotide
  Target: LAMA2; (+) strand; PAM type: NNNNGHTT; PAM sequence: CATGGCTT
ctgcaagcacctcagcgggt

SEQ ID NO: 50713 - DNA, 20 bp, Artificial Sequence
  Description of Artificial Sequence: Synthetic oligonucleotide
  Target: LAMA2; (+) strand; PAM type: NNNNGHTT; PAM sequence: TCTGGATT
ctgtgccatttgtagtcctg

SEQ ID NO: 50714 - DNA, 20 bp, Artificial Sequence
  Description of Artificial Sequence: Synthetic oligonucleotide
  Target: LAMA2; (+) strand; PAM type: NNNNGHTT; PAM sequence: GTTGGATT
tgtagtcctgtctggattgg

SEQ ID NO: 50715 - DNA, 20 bp, Artificial Sequence
  Description of Artificial Sequence: Synthetic oligonucleotide
  Target: LAMA2; (+) strand; PAM type: NNNNGHTT; PAM sequence: TGTAGTTT
attgggttggattgggttgt

SEQ ID NO: 50716 - DNA, 20 bp, Artificial Sequence
  Description of Artificial Sequence: Synthetic oligonucleotide
  Target: LAMA2; (+) strand; PAM type: NNNNGHTT; PAM sequence: GACTGATT
gccttcattgtggaatagta

SEQ ID NO: 50717 - DNA, 20 bp, Artificial Sequence
  Description of Artificial Sequence: Synthetic oligonucleotide
  Target: LAMA2; (+) strand; PAM type: NNNNGHTT; PAM sequence: TCCAGTTT
gccaggtggtaatcttaact

SEQ ID NO: 50718 - DNA, 20 bp, Artificial Sequence
  Description of Artificial Sequence: Synthetic oligonucleotide
  Target: LAMA2; (+) strand; PAM type: NNNNGHTT; PAM sequence: TTCCGCTT
gtgatggtgagtggtgccac

SEQ ID NO: 50719 - DNA, 20 bp, Artificial Sequence
  Description of Artificial Sequence: Synthetic oligonucleotide
  Target: LAMA2; (+) strand; PAM type: NNNNGHTT; PAM sequence: CCTTGATT
gtgccacttccgcttccacc

SEQ ID NO: 50720 - DNA, 20 bp, Artificial Sequence
  Description of Artificial Sequence: Synthetic oligonucleotide
  Target: LAMA2; (+) strand; PAM type: NNNNGHTT; PAM sequence: CACTGATT
aaacagtaccatattttgga

SEQ ID NO: 50721 - DNA, 20 bp, Artificial Sequence
  Description of Artificial Sequence: Synthetic oligonucleotide
  Target: LAMA2; (+) strand; PAM type: NNNNGHTT; PAM sequence: ACCTGCTT
ttccacaattctatcaatcc

SEQ ID NO: 50722 - DNA, 20 bp, Artificial Sequence
  Description of Artificial Sequence: Synthetic oligonucleotide
  Target: LAMA2; (+) strand; PAM type: NNNNGHTT; PAM sequence: GTTGGTTT
tgccagacggagggctcagt

SEQ ID NO: 50723 - DNA, 20 bp, Artificial Sequence
  Description of Artificial Sequence: Synthetic oligonucleotide
  Target: LAMA2; (+) strand; PAM type: NNNNGHTT; PAM sequence: ACTTGATT
cagaatgagtcatcctatcc

SEQ ID NO: 50724 - DNA, 20 bp, Artificial Sequence
  Description of Artificial Sequence: Synthetic oligonucleotide
  Target: LAMA2; (+) strand; PAM type: NNNNGHTT; PAM sequence: CACAGTTT
acataggatacaaatatctt

SEQ ID NO: 50725 - DNA, 20 bp, Artificial Sequence
  Description of Artificial Sequence: Synthetic oligonucleotide
  Target: LAMA2; (+) strand; PAM type: NNNNGHTT; PAM sequence: CCCAGATT
gtccatccacatacctcttc

SEQ ID NO: 50726 - DNA, 20 bp, Artificial Sequence
  Description of Artificial Sequence: Synthetic oligonucleotide
  Target: LAMA2; (+) strand; PAM type: NNNNGHTT; PAM sequence: TCATGCTT
ctttgccaccaattttttaa

SEQ ID NO: 50727 - DNA, 20 bp, Artificial Sequence
  Description of Artificial Sequence: Synthetic oligonucleotide
  Target: LAMA2; (+) strand; PAM type: NNNNGHTT; PAM sequence: GCAGGCTT
ctccctgtgaggccatcagt

SEQ ID NO: 50728 - DNA, 20 bp, Artificial Sequence
  Description of Artificial Sequence: Synthetic oligonucleotide
  Target: LAMA2; (+) strand; PAM type: NNNNGHTT; PAM sequence: GGGCGTTT
gtggcaggagtggaggccat

SEQ ID NO: 50729 - DNA, 20 bp, Artificial Sequence
  Description of Artificial Sequence: Synthetic oligonucleotide
  Target: LAMA2; (+) strand; PAM type: NNNNGHTT; PAM sequence: GGCAGTTT
aaagcatccagttcatgaaa

SEQ ID NO: 50730 - DNA, 20 bp, Artificial Sequence
  Description of Artificial Sequence: Synthetic oligonucleotide
  Target: LAMA2; (+) strand; PAM type: NNNNGHTT; PAM sequence: TTCAGTTT
tgatgacctacagtcaaaca

SEQ ID NO: 50731 - DNA, 20 bp, Artificial Sequence
  Description of Artificial Sequence: Synthetic oligonucleotide
  Target: LAMA2; (+) strand; PAM type: NNNNGHTT; PAM sequence: AGAGGCTT
gggccttgctccaaaatcct

SEQ ID NO: 50732 - DNA, 20 bp, Artificial Sequence
  Description of Artificial Sequence: Synthetic oligonucleotide
  Target: LAMA2; (+) strand; PAM type: NNNNGHTT; PAM sequence: AAAGGCTT
gtcacctatgggagcctgcc

SEQ ID NO: 50733 - DNA, 20 bp, Artificial Sequence
  Description of Artificial Sequence: Synthetic oligonucleotide
  Target: LAMA2; (+) strand; PAM type: NNNNGHTT; PAM sequence: AGCAGTTT
tcatacggcccaatcggcag

SEQ ID NO: 50734 - DNA, 20 bp, Artificial Sequence
  Description of Artificial Sequence: Synthetic oligonucleotide
  Target: LAMA2; (+) strand; PAM type: NNNNGHTT; PAM sequence: CAATGCTT
cattttaacacacccaggaa

SEQ ID NO: 50735 - DNA, 20 bp, Artificial Sequence
  Description of Artificial Sequence: Synthetic oligonucleotide
  Target: LAMA2; (+) strand; PAM type: NNNNGHTT; PAM sequence: AATAGATT
attaaccatcacagtgaatg

SEQ ID NO: 50736 - DNA, 20 bp, Artificial Sequence
  Description of Artificial Sequence: Synthetic oligonucleotide
  Target: LAMA2; (+) strand; PAM type: NNNNGHTT; PAM sequence: TAGTGCTT
tggaaatgtcttagatgtct

SEQ ID NO: 50737 - DNA, 20 bp, Artificial Sequence
  Description of Artificial Sequence: Synthetic oligonucleotide
  Target: LAMA2; (+) strand; PAM type: NNNNGHTT; PAM sequence: TTCAGATT
atgcagaatgaattccatag

SEQ ID NO: 50738 - DNA, 20 bp, Artificial Sequence
  Description of Artificial Sequence: Synthetic oligonucleotide
  Target: LAMA2; (+) strand; PAM type: NNNNGHTT; PAM sequence: ACCTGTTT
aaaattatcacataatctcc

SEQ ID NO: 50739 - DNA, 20 bp, Artificial Sequence
  Description of Artificial Sequence: Synthetic oligonucleotide
  Target: LAMA2; (+) strand; PAM type: NNNNGHTT; PAM sequence: TCTAGTTT
tctctaagtcagtggaatag

SEQ ID NO: 50740 - DNA, 20 bp, Artificial Sequence
  Description of Artificial Sequence: Synthetic oligonucleotide
  Target: LAMA2; (+) strand; PAM type: NNNNGHTT; PAM sequence: ATTTGTTT
atcctgaatttcctttctca

SEQ ID NO: 50741 - DNA, 20 bp, Artificial Sequence
  Description of Artificial Sequence: Synthetic oligonucleotide
  Target: LAMA2; (+) strand; PAM type: NNNNGHTT; PAM sequence: AAAAGTTT
aataagtattagaaattggg

SEQ ID NO: 50742 - DNA, 20 bp, Artificial Sequence
  Description of Artificial Sequence: Synthetic oligonucleotide
  Target: LAMA2; (+) strand; PAM type: NNNNGHTT; PAM sequence: CATTGATT
gatggatagatagatagata

SEQ ID NO: 50743 - DNA, 20 bp, Artificial Sequence
  Description of Artificial Sequence: Synthetic oligonucleotide
  Target: LAMA2; (+) strand; PAM type: NNNNGHTT; PAM sequence: GACAGATT
tagatgatagatggatgata

SEQ ID NO: 50744 - DNA, 20 bp, Artificial Sequence
  Description of Artificial Sequence: Synthetic oligonucleotide
  Target: LAMA2; (+) strand; PAM type: NNNNGHTT; PAM sequence: AATAGATT
agatagatagatagatagat

SEQ ID NO: 50745 - DNA, 20 bp, Artificial Sequence
  Description of Artificial Sequence: Synthetic oligonucleotide
  Target: LAMA2; (+) strand; PAM type: NNNNGHTT; PAM sequence: AAGAGATT
agatgatagacagaaagaat

SEQ ID NO: 50746 - DNA, 20 bp, Artificial Sequence
  Description of Artificial Sequence: Synthetic oligonucleotide
  Target: LAMA2; (+) strand; PAM type: NNNNGHTT; PAM sequence: ATTGGCTT
taagagatttattatgaaga

SEQ ID NO: 50747 - DNA, 20 bp, Artificial Sequence
  Description of Artificial Sequence: Synthetic oligonucleotide
  Target: LAMA2; (+) strand; PAM type: NNNNGHTT; PAM sequence: ACGTGATT
ttattatgaagaattggctt

SEQ ID NO: 50748 - DNA, 20 bp, Artificial Sequence
  Description of Artificial Sequence: Synthetic oligonucleotide
  Target: LAMA2; (+) strand; PAM type: NNNNGHTT; PAM sequence: CTTTGCTT
agggaaggaattcctccttt

SEQ ID NO: 50749 - DNA, 20 bp, Artificial Sequence
  Description of Artificial Sequence: Synthetic oligonucleotide
  Target: LAMA2; (+) strand; PAM type: NNNNGHTT; PAM sequence: AAGAGATT
ttttgttctattcagccctc

SEQ ID NO: 50750 - DNA, 20 bp, Artificial Sequence
  Description of Artificial Sequence: Synthetic oligonucleotide
  Target: LAMA2; (+) strand; PAM type: NNNNGHTT; PAM sequence: TAATGTTT
ctcacagacacacccggaaa

SEQ ID NO: 50751 - DNA, 20 bp, Artificial Sequence
  Description of Artificial Sequence: Synthetic oligonucleotide
  Target: LAMA2; (+) strand; PAM type: NNNNGHTT; PAM sequence: GTAAGCTT
ctgtgctgtgtaagcaagat

SEQ ID NO: 50752 - DNA, 20 bp, Artificial Sequence
  Description of Artificial Sequence: Synthetic oligonucleotide
  Target: LAMA2; (+) strand; PAM type: NNNNGHTT; PAM sequence: AAGAGCTT
aactccatagaaacctcaaa

SEQ ID NO: 50753 - DNA, 20 bp, Artificial Sequence
  Description of Artificial Sequence: Synthetic oligonucleotide
  Target: LAMA2; (+) strand; PAM type: NNNNGHTT; PAM sequence: ATACGCTT
gaagcactgaactactacaa

SEQ ID NO: 50754 - DNA, 20 bp, Artificial Sequence
  Description of Artificial Sequence: Synthetic oligonucleotide
  Target: LAMA2; (+) strand; PAM type: NNNNGHTT; PAM sequence: AAAAGTTT
caggtagtcagttatttaat

SEQ ID NO: 50755 - DNA, 20 bp, Artificial Sequence
  Description of Artificial Sequence: Synthetic oligonucleotide
  Target: LAMA2; (+) strand; PAM type: NNNNGHTT; PAM sequence: TTTAGTTT
aaagcaaaaagctaattaac

SEQ ID NO: 50756 - DNA, 20 bp, Artificial Sequence
  Description of Artificial Sequence: Synthetic oligonucleotide
  Target: LAMA2; (+) strand; PAM type: NNNNGHTT; PAM sequence: ATGAGATT
atattttaaagaattgactc

SEQ ID NO: 50757 - DNA, 20 bp, Artificial Sequence
  Description of Artificial Sequence: Synthetic oligonucleotide
  Target: LAMA2; (+) strand; PAM type: NNNNGHTT; PAM sequence: GGCAGTTT
attgccgtcttgaatccaaa

SEQ ID NO: 50758 - DNA, 20 bp, Artificial Sequence
  Description of Artificial Sequence: Synthetic oligonucleotide
  Target: LAMA2; (+) strand; PAM type: NNNNGHTT; PAM sequence: ACCTGCTT
ccccaacatcatggagggtg

SEQ ID NO: 50759 - DNA, 20 bp, Artificial Sequence
  Description of Artificial Sequence: Synthetic oligonucleotide
  Target: LAMA2; (+) strand; PAM type: NNNNGHTT; PAM sequence: TGCTGTTT
attcacagcaacatctagac

SEQ ID NO: 50760 - DNA, 20 bp, Artificial Sequence
  Description of Artificial Sequence: Synthetic oligonucleotide
  Target: LAMA2; (+) strand; PAM type: NNNNGHTT; PAM sequence: TCAAGTTT
tctcacatgatggacataat

SEQ ID NO: 50761 - DNA, 20 bp, Artificial Sequence
  Description of Artificial Sequence: Synthetic oligonucleotide
  Target: LAMA2; (+) strand; PAM type: NNNNGHTT; PAM sequence: CTCTGCTT
atttgatgagcactaactat

SEQ ID NO: 50762 - DNA, 20 bp, Artificial Sequence
  Description of Artificial Sequence: Synthetic oligonucleotide
  Target: LAMA2; (+) strand; PAM type: NNNNGHTT; PAM sequence: CTATGATT
acattaaaattgacaggtta

SEQ ID NO: 50763 - DNA, 20 bp, Artificial Sequence
  Description of Artificial Sequence: Synthetic oligonucleotide
  Target: LAMA2; (+) strand; PAM type: NNNNGHTT; PAM sequence: ATTGGATT
caggttactatgattttcat

SEQ ID NO: 50764 - DNA, 20 bp, Artificial Sequence
  Description of Artificial Sequence: Synthetic oligonucleotide
  Target: LAMA2; (+) strand; PAM type: NNNNGHTT; PAM sequence: AAGGGATT
ggattaaaatgtctaaaaca

SEQ ID NO: 50765 - DNA, 20 bp, Artificial Sequence
  Description of Artificial Sequence: Synthetic oligonucleotide
  Target: LAMA2; (+) strand; PAM type: NNNNGHTT; PAM sequence: GAATGATT
attttcatatatataatagg

SEQ ID NO: 50766 - DNA, 20 bp, Artificial Sequence
  Description of Artificial Sequence: Synthetic oligonucleotide
  Target: LAMA2; (+) strand; PAM type: NNNNGHTT; PAM sequence: CACAGATT
tgatagatcaagcaaagaga

SEQ ID NO: 50767 - DNA, 20 bp, Artificial Sequence
  Description of Artificial Sequence: Synthetic oligonucleotide
  Target: LAMA2; (+) strand; PAM type: NNNNGHTT; PAM sequence: AAAAGTTT
ttggtacaaaacaattgaca

SEQ ID NO: 50768 - DNA, 20 bp, Artificial Sequence
  Description of Artificial Sequence: Synthetic oligonucleotide
  Target: LAMA2; (+) strand; PAM type: NNNNGHTT; PAM sequence: CATGGCTT
aaacatacttcaaagtaatc

SEQ ID NO: 50769 - DNA, 20 bp, Artificial Sequence
  Description of Artificial Sequence: Synthetic oligonucleotide
  Target: LAMA2; (+) strand; PAM type: NNNNGHTT; PAM sequence: CACAGTTT
tccatggcttgagaaaaaaa

SEQ ID NO: 50770 - DNA, 20 bp, Artificial Sequence
  Description of Artificial Sequence: Synthetic oligonucleotide
  Target: LAMA2; (+) strand; PAM type: NNNNGHTT; PAM sequence: TACAGTTT
gtggtaccaacaggaaaatg

SEQ ID NO: 50771 - DNA, 20 bp, Artificial Sequence
  Description of Artificial Sequence: Synthetic oligonucleotide
  Target: LAMA2; (+) strand; PAM type: NNNNGHTT; PAM sequence: TAAGGTTT
aagaactgatactaattatc

SEQ ID NO: 50772 - DNA, 20 bp, Artificial Sequence
  Description of Artificial Sequence: Synthetic oligonucleotide
  Target: LAMA2; (+) strand; PAM type: NNNNGHTT; PAM sequence: AGATGTTT
ttatctaaggtttctgctca

SEQ ID NO: 50773 - DNA, 20 bp, Artificial Sequence
  Description of Artificial Sequence: Synthetic oligonucleotide
  Target: LAMA2; (+) strand; PAM type: NNNNGHTT; PAM sequence: AGTTGATT
acagggttgacaaaacagca

SEQ ID NO: 50774 - DNA, 20 bp, Artificial Sequence
  Description of Artificial Sequence: Synthetic oligonucleotide
  Target: LAMA2; (+) strand; PAM type: NNNNGHTT; PAM sequence: TATAGATT
gatcataactgtagatacat

SEQ ID NO: 50775 - DNA, 20 bp, Artificial Sequence
  Description of Artificial Sequence: Synthetic oligonucleotide
  Target: LAMA2; (+) strand; PAM type: NNNNGHTT; PAM sequence: GTAAGTTT
atacttaggtgaagtaaaca

SEQ ID NO: 50776 - DNA, 20 bp, Artificial Sequence
  Description of Artificial Sequence: Synthetic oligonucleotide
  Target: LAMA2; (+) strand; PAM type: NNNNGHTT; PAM sequence: CTCAGCTT
ggaaaaagaagaaaaatttc

SEQ ID NO: 50777 - DNA, 20 bp, Artificial Sequence
  Description of Artificial Sequence: Synthetic oligonucleotide
  Target: LAMA2; (+) strand; PAM type: NNNNGHTT; PAM sequence: AATAGTTT
tctatcttatttcctactta

SEQ ID NO: 50778 - DNA, 20 bp, Artificial Sequence
  Description of Artificial Sequence: Synthetic oligonucleotide
  Target: LAMA2; (+) strand; PAM type: NNNNGHTT; PAM sequence: ACATGTTT
tttctaaattcatgatgcat

SEQ ID NO: 50779 - DNA, 20 bp, Artificial Sequence
  Description of Artificial Sequence: Synthetic oligonucleotide
  Target: LAMA2; (+) strand; PAM type: NNNNGHTT; PAM sequence: TTCAGTTT
cacatcacattttcccaccc

SEQ ID NO: 50780 - DNA, 20 bp, Artificial Sequence
  Description of Artificial Sequence: Synthetic oligonucleotide
  Target: LAMA2; (+) strand; PAM type: NNNNGHTT; PAM sequence: CTGTGCTT
ttcccaatataggtacatta

SEQ ID NO: 50781 - DNA, 20 bp, Artificial Sequence
  Description of Artificial Sequence: Synthetic oligonucleotide
  Target: LAMA2; (+) strand; PAM type: NNNNGHTT; PAM sequence: CTTAGATT
aatataggtacattactgtg

SEQ ID NO: 50782 - DNA, 20 bp, Artificial Sequence
  Description of Artificial Sequence: Synthetic oligonucleotide
  Target: LAMA2; (+) strand; PAM type: NNNNGHTT; PAM sequence: TTTAGCTT
tttatgtcctcattcttccc

SEQ ID NO: 50783 - DNA, 20 bp, Artificial Sequence
  Description of Artificial Sequence: Synthetic oligonucleotide
  Target: LAMA2; (+) strand; PAM type: NNNNGHTT; PAM sequence: CTCAGCTT
cttccttttttcctcgtcct

SEQ ID NO: 50784 - DNA, 20 bp, Artificial Sequence
  Description of Artificial Sequence: Synthetic oligonucleotide
  Target: LAMA2; (+) strand; PAM type: NNNNGHTT; PAM sequence: CTTTGATT
tttattccttaaaggactcc

SEQ ID NO: 50785 - DNA, 20 bp, Artificial Sequence
  Description of Artificial Sequence: Synthetic oligonucleotide
  Target: LAMA2; (+) strand; PAM type: NNNNGHTT; PAM sequence: TGATGCTT
ttttttttcagtgggccatt

SEQ ID NO: 50786 - DNA, 20 bp, Artificial Sequence
  Description of Artificial Sequence: Synthetic oligonucleotide
  Target: LAMA2; (+) strand; PAM type: NNNNGHTT; PAM sequence: GCTTGATT
ttttcagtgggccatttgat

SEQ ID NO: 50787 - DNA, 20 bp, Artificial Sequence
  Description of Artificial Sequence: Synthetic oligonucleotide
  Target: LAMA2; (+) strand; PAM type: NNNNGHTT; PAM sequence: AAAAGATT
gttgtgggtacaataactgc

SEQ ID NO: 50788 - DNA, 20 bp, Artificial Sequence
  Description of Artificial Sequence: Synthetic oligonucleotide
  Target: LAMA2; (+) strand; PAM type: NNNNGHTT; PAM sequence: GGAAGATT
cactttgggaggctgaggtg

SEQ ID NO: 50789 - DNA, 20 bp, Artificial Sequence
  Description of Artificial Sequence: Synthetic oligonucleotide
  Target: LAMA2; (+) strand; PAM type: NNNNGHTT; PAM sequence: GATTGCTT
ttgggaggctgaggtgggaa

SEQ ID NO: 50790 - DNA, 20 bp, Artificial Sequence
  Description of Artificial Sequence: Synthetic oligonucleotide
  Target: LAMA2; (+) strand; PAM type: NNNNGHTT; PAM sequence: AGGAGTTT
tgggaagattgcttgagccc

SEQ ID NO: 50791 - DNA, 20 bp, Artificial Sequence
  Description of Artificial Sequence: Synthetic oligonucleotide
  Target: LAMA2; (+) strand; PAM type: NNNNGHTT; PAM sequence: GGAAGCTT
agtgccaaccctgtccaaag

SEQ ID NO: 50792 - DNA, 20 bp, Artificial Sequence
  Description of Artificial Sequence: Synthetic oligonucleotide
  Target: LAMA2; (+) strand; PAM type: NNNNGHTT; PAM sequence: CGGGGTTT
ttttgtatttttagtagaga

SEQ ID NO: 50793 - DNA, 20 bp, Artificial Sequence
  Description of Artificial Sequence: Synthetic oligonucleotide
  Target: LAMA2; (+) strand; PAM type: NNNNGHTT; PAM sequence: CACCGTTT
ttttagtagagacggggttt

SEQ ID NO: 50794 - DNA, 20 bp, Artificial Sequence
  Description of Artificial Sequence: Synthetic oligonucleotide
  Target: LAMA2; (+) strand; PAM type: NNNNGHTT; PAM sequence: CTGGGATT
tgatccgcccgcccaaagtg

SEQ ID NO: 50795 - DNA, 20 bp, Artificial Sequence
  Description of Artificial Sequence: Synthetic oligonucleotide
  Target: LAMA2; (+) strand; PAM type: NNNNGHTT; PAM sequence: CATAGTTT
tcaacttctttttactccgt

SEQ ID NO: 50796 - DNA, 20 bp, Artificial Sequence
  Description of Artificial Sequence: Synthetic oligonucleotide
  Target: LAMA2; (+) strand; PAM type: NNNNGHTT; PAM sequence: AGCTGTTT
attaatctgtatttctgaag

SEQ ID NO: 50797 - DNA, 20 bp, Artificial Sequence
  Description of Artificial Sequence: Synthetic oligonucleotide
  Target: LAMA2; (+) strand; PAM type: NNNNGHTT; PAM sequence: GTTTGTTT
atctgtatttctgaagagct

SEQ ID NO: 50798 - DNA, 20 bp, Artificial Sequence
  Description of Artificial Sequence: Synthetic oligonucleotide
  Target: LAMA2; (+) strand; PAM type: NNNNGHTT; PAM sequence: TTTTGCTT
gtttgttttcttactgtata

SEQ ID NO: 50799 - DNA, 20 bp, Artificial Sequence
  Description of Artificial Sequence: Synthetic oligonucleotide
  Target: LAMA2; (+) strand; PAM type: NNNNGHTT; PAM sequence: ATATGCTT
ttgctttctccatgggaaag

SEQ ID NO: 50800 - DNA, 20 bp, Artificial Sequence
  Description of Artificial Sequence: Synthetic oligonucleotide
  Target: LAMA2; (+) strand; PAM type: NNNNGHTT; PAM sequence: GGGGGCTT
actgcacagccccagcatgt

SEQ ID NO: 50801 - DNA, 20 bp, Artificial Sequence
  Description of Artificial Sequence: Synthetic oligonucleotide
  Target: LAMA2; (+) strand; PAM type: NNNNGHTT; PAM sequence: GGGTGTTT
ctgatgtcacaggatccttg

SEQ ID NO: 50802 - DNA, 20 bp, Artificial Sequence
  Description of Artificial Sequence: Synthetic oligonucleotide
  Target: LAMA2; (+) strand; PAM type: NNNNGHTT; PAM sequence: CTGAGTTT
gtggccagtggcacctttgc

SEQ ID NO: 50803 - DNA, 20 bp, Artificial Sequence
  Description of Artificial Sequence: Synthetic oligonucleotide
  Target: LAMA2; (+) strand; PAM type: NNNNGHTT; PAM sequence: GGGTGATT
ctggatcccacacctgccaa

SEQ ID NO: 50804 - DNA, 20 bp, Artificial Sequence
  Description of Artificial Sequence: Synthetic oligonucleotide
  Target: LAMA2; (+) strand; PAM type: NNNNGHTT; PAM sequence: ATTGGCTT
gctgaaccagacatactaca

SEQ ID NO: 50805 - DNA, 20 bp, Artificial Sequence
  Description of Artificial Sequence: Synthetic oligonucleotide
  Target: LAMA2; (+) strand; PAM type: NNNNGHTT; PAM sequence: AGGAGCTT
cagggaatgcggtggcaccc

SEQ ID NO: 50806 - DNA, 20 bp, Artificial Sequence
  Description of Artificial Sequence: Synthetic oligonucleotide
  Target: LAMA2; (+) strand; PAM type: NNNNGHTT; PAM sequence: GTGTGTTT
atggtgagctggggaagggg

SEQ ID NO: 50807 - DNA, 20 bp, Artificial Sequence
  Description of Artificial Sequence: Synthetic oligonucleotide
  Target: LAMA2; (+) strand; PAM type: NNNNGHTT; PAM sequence: CCCTGTTT
gggaagggggtgtgtttcaa

SEQ ID NO: 50808 - DNA, 20 bp, Artificial Sequence
  Description of Artificial Sequence: Synthetic oligonucleotide
  Target: LAMA2; (+) strand; PAM type: NNNNGHTT; PAM sequence: TGAGGTTT
tgtcccacatcctggaagaa

SEQ ID NO: 50809 - DNA, 20 bp, Artificial Sequence
  Description of Artificial Sequence: Synthetic oligonucleotide
  Target: LAMA2; (+) strand; PAM type: NNNNGHTT; PAM sequence: AGGTGCTT
ggagggttagcaaggtgaag

SEQ ID NO: 50810 - DNA, 20 bp, Artificial Sequence
  Description of Artificial Sequence: Synthetic oligonucleotide
  Target: LAMA2; (+) strand; PAM type: NNNNGHTT; PAM sequence: CGGGGTTT
tgcccacgtctggctgagtc

SEQ ID NO: 50811 - DNA, 20 bp, Artificial Sequence
  Description of Artificial Sequence: Synthetic oligonucleotide
  Target: LAMA2; (+) strand; PAM type: NNNNGHTT; PAM sequence: TGCTGATT
ctcagaggggaggaagtgta

SEQ ID NO: 50812 - DNA, 20 bp, Artificial Sequence
  Description of Artificial Sequence: Synthetic oligonucleotide
  Target: LAMA2; (+) strand; PAM type: NNNNGHTT; PAM sequence: TCCAGTTT
aaagcaccataagttctcac

SEQ ID NO: 50813 - DNA, 20 bp, Artificial Sequence
  Description of Artificial Sequence: Synthetic oligonucleotide
  Target: LAMA2; (+) strand; PAM type: NNNNGHTT; PAM sequence: CCTGGCTT
cccccttccttcaggcagtc

SEQ ID NO: 50814 - DNA, 20 bp, Artificial Sequence
  Description of Artificial Sequence: Synthetic oligonucleotide
  Target: LAMA2; (+) strand; PAM type: NNNNGHTT; PAM sequence: TGGAGCTT
ggcagtccctggcttgaagg

SEQ ID NO: 50815 - DNA, 20 bp, Artificial Sequence
  Description of Artificial Sequence: Synthetic oligonucleotide
  Target: LAMA2; (+) strand; PAM type: NNNNGHTT; PAM sequence: CTCAGCTT
cctggctgggttgcaacagc

SEQ ID NO: 50816 - DNA, 20 bp, Artificial Sequence
  Description of Artificial Sequence: Synthetic oligonucleotide
  Target: LAMA2; (+) strand; PAM type: NNNNGHTT; PAM sequence: AAGAGTTT
tgagaccctcttgctctcag

SEQ ID NO: 50817 - DNA, 20 bp, Artificial Sequence
  Description of Artificial Sequence: Synthetic oligonucleotide
  Target: LAMA2; (+) strand; PAM type: NNNNGHTT; PAM sequence: CTCTGTTT
gagttttcatcgcctgctcc

SEQ ID NO: 50818 - DNA, 20 bp, Artificial Sequence
  Description of Artificial Sequence: Synthetic oligonucleotide
  Target: LAMA2; (+) strand; PAM type: NNNNGHTT; PAM sequence: CACTGCTT
tcgcctgctccctctgtttt

SEQ ID NO: 50819 - DNA, 20 bp, Artificial Sequence
  Description of Artificial Sequence: Synthetic oligonucleotide
  Target: LAMA2; (+) strand; PAM type: NNNNGHTT; PAM sequence: TGGTGTTT
ttttcactgcttggtgactg

SEQ ID NO: 50820 - DNA, 20 bp, Artificial Sequence
  Description of Artificial Sequence: Synthetic oligonucleotide
  Target: LAMA2; (+) strand; PAM type: NNNNGHTT; PAM sequence: TTTTGTTT
actgcttggtgactgtggtg

SEQ ID NO: 50821 - DNA, 20 bp, Artificial Sequence
  Description of Artificial Sequence: Synthetic oligonucleotide
  Target: LAMA2; (+) strand; PAM type: NNNNGHTT; PAM sequence: GAGTGTTT
tggatatccctaaaggtctt

SEQ ID NO: 50822 - DNA, 20 bp, Artificial Sequence
  Description of Artificial Sequence: Synthetic oligonucleotide
  Target: LAMA2; (+) strand; PAM type: NNNNGHTT; PAM sequence: CCATGATT
actattttatactcaatatt

SEQ ID NO: 50823 - DNA, 20 bp, Artificial Sequence
  Description of Artificial Sequence: Synthetic oligonucleotide
  Target: LAMA2; (+) strand; PAM type: NNNNGHTT; PAM sequence: TCCAGATT
atcaggaatggctatgatag

SEQ ID NO: 50824 - DNA, 20 bp, Artificial Sequence
  Description of Artificial Sequence: Synthetic oligonucleotide
  Target: LAMA2; (+) strand; PAM type: NNNNGHTT; PAM sequence: CCCTGTTT
taaataaaattactttcttt

SEQ ID NO: 50825 - DNA, 20 bp, Artificial Sequence
  Description of Artificial Sequence: Synthetic oligonucleotide
  Target: LAMA2; (+) strand; PAM type: NNNNGHTT; PAM sequence: TTTAGTTT
aaaattactttctttccctg

SEQ ID NO: 50826 - DNA, 20 bp, Artificial Sequence
  Description of Artificial Sequence: Synthetic oligonucleotide
  Target: LAMA2; (+) strand; PAM type: NNNNGHTT; PAM sequence: ATAGGATT
atcagtgaacgtgatgtcat

SEQ ID NO: 50827 - DNA, 20 bp, Artificial Sequence
  Description of Artificial Sequence: Synthetic oligonucleotide
  Target: LAMA2; (+) strand; PAM type: NNNNGHTT; PAM sequence: TTCTGATT
aagaaacactgtgcagtctg

SEQ ID NO: 50828 - DNA, 20 bp, Artificial Sequence
  Description of Artificial Sequence: Synthetic oligonucleotide
  Target: LAMA2; (+) strand; PAM type: NNNNGHTT; PAM sequence: ATTGGCTT
cagtctgttctgattcctcc

SEQ ID NO: 50829 - DNA, 20 bp, Artificial Sequence
  Description of Artificial Sequence: Synthetic oligonucleotide
  Target: LAMA2; (+) strand; PAM type: NNNNGHTT; PAM sequence: TATAGTTT
ggcttaattcctataataaa

SEQ ID NO: 50830 - DNA, 20 bp, Artificial Sequence
  Description of Artificial Sequence: Synthetic oligonucleotide
  Target: LAMA2; (+) strand; PAM type: NNNNGHTT; PAM sequence: CAAAGTTT
cctataataaatatagtttc

SEQ ID NO: 50831 - DNA, 20 bp, Artificial Sequence
  Description of Artificial Sequence: Synthetic oligonucleotide
  Target: LAMA2; (+) strand; PAM type: NNNNGHTT; PAM sequence: TGATGCTT
tatatttatcatgtacaaca

SEQ ID NO: 50832 - DNA, 20 bp, Artificial Sequence
  Description of Artificial Sequence: Synthetic oligonucleotide
  Target: LAMA2; (+) strand; PAM type: NNNNGHTT; PAM sequence: GCTGGCTT
tactctcttagcaaagccat

SEQ ID NO: 50833 - DNA, 20 bp, Artificial Sequence
  Description of Artificial Sequence: Synthetic oligonucleotide
  Target: LAMA2; (+) strand; PAM type: NNNNGHTT; PAM sequence: TAGTGATT
tagcaaagccatgctggctt

SEQ ID NO: 50834 - DNA, 20 bp, Artificial Sequence
  Description of Artificial Sequence: Synthetic oligonucleotide
  Target: LAMA2; (+) strand; PAM type: NNNNGHTT; PAM sequence: CAGGGTTT
gcataaaatgatagatgtct

SEQ ID NO: 50835 - DNA, 20 bp, Artificial Sequence
  Description of Artificial Sequence: Synthetic oligonucleotide
  Target: LAMA2; (+) strand; PAM type: NNNNGHTT; PAM sequence: CTAAGTTT
gaacaatgccacaatgcaat

SEQ ID NO: 50836 - DNA, 20 bp, Artificial Sequence
  Description of Artificial Sequence: Synthetic oligonucleotide
  Target: LAMA2; (+) strand; PAM type: NNNNGHTT; PAM sequence: TTATGATT
ggtgccatcctacctgctct

SEQ ID NO: 50837 - DNA, 20 bp, Artificial Sequence
  Description of Artificial Sequence: Synthetic oligonucleotide
  Target: LAMA2; (+) strand; PAM type: NNNNGHTT; PAM sequence: GTGAGATT
gtaggtagaataatcaagag

SEQ ID NO: 50838 - DNA, 20 bp, Artificial Sequence
  Description of Artificial Sequence: Synthetic oligonucleotide
  Target: LAMA2; (+) strand; PAM type: NNNNGHTT; PAM sequence: TGTTGTTT
taatcaagaggtgagattga

SEQ ID NO: 50839 - DNA, 20 bp, Artificial Sequence
  Description of Artificial Sequence: Synthetic oligonucleotide
  Target: LAMA2; (+) strand; PAM type: NNNNGHTT; PAM sequence: TTTTGATT
agaggtgagattgatgttgt

SEQ ID NO: 50840 - DNA, 20 bp, Artificial Sequence
  Description of Artificial Sequence: Synthetic oligonucleotide
  Target: LAMA2; (+) strand; PAM type: NNNNGHTT; PAM sequence: CCTTGATT
ttttatatttttgaatgctc

SEQ ID NO: 50841 - DNA, 20 bp, Artificial Sequence
  Description of Artificial Sequence: Synthetic oligonucleotide
  Target: LAMA2; (+) strand; PAM type: NNNNGHTT; PAM sequence: GGGGGATT
taaattatcatgagcaattt

SEQ ID NO: 50842 - DNA, 20 bp, Artificial Sequence
  Description of Artificial Sequence: Synthetic oligonucleotide
  Target: LAMA2; (+) strand; PAM type: NNNNGHTT; PAM sequence: AGCTGCTT
tgagtctcctttgagtgctc

SEQ ID NO: 50843 - DNA, 20 bp, Artificial Sequence
  Description of Artificial Sequence: Synthetic oligonucleotide
  Target: LAMA2; (+) strand; PAM type: NNNNGHTT; PAM sequence: AAGAGATT
ccagggacctacagcctttt

SEQ ID NO: 50844 - DNA, 20 bp, Artificial Sequence
  Description of Artificial Sequence: Synthetic oligonucleotide
  Target: LAMA2; (+) strand; PAM type: NNNNGHTT; PAM sequence: GGGTGTTT
tgaccaaagccgtctctttg

SEQ ID NO: 50845 - DNA, 20 bp, Artificial Sequence
  Description of Artificial Sequence: Synthetic oligonucleotide
  Target: LAMA2; (+) strand; PAM type: NNNNGHTT; PAM sequence: TGGTGATT
gcaccttaaaaattgatgca

SEQ ID NO: 50846 - DNA, 20 bp, Artificial Sequence
  Description of Artificial Sequence: Synthetic oligonucleotide
  Target: LAMA2; (+) strand; PAM type: NNNNGHTT; PAM sequence: GTATGATT
ttttcttattttaaaattgt

SEQ ID NO: 50847 - DNA, 20 bp, Artificial Sequence
  Description of Artificial Sequence: Synthetic oligonucleotide
  Target: LAMA2; (+) strand; PAM type: NNNNGHTT; PAM sequence: AGCAGCTT
attttttaaattattataaa

SEQ ID NO: 50848 - DNA, 20 bp, Artificial Sequence
  Description of Artificial Sequence: Synthetic oligonucleotide
  Target: LAMA2; (+) strand; PAM type: NNNNGHTT; PAM sequence: AATAGTTT
ctcatatcttttcctatgca

SEQ ID NO: 50849 - DNA, 20 bp, Artificial Sequence
  Description of Artificial Sequence: Synthetic oligonucleotide
  Target: LAMA2; (+) strand; PAM type: NNNNGHTT; PAM sequence: AACTGTTT
caaatgggtgatatttatat

SEQ ID NO: 50850 - DNA, 20 bp, Artificial Sequence
  Description of Artificial Sequence: Synthetic oligonucleotide
  Target: LAMA2; (+) strand; PAM type: NNNNGHTT; PAM sequence: ACTAGATT
atttttaaaatgtatattga

SEQ ID NO: 50851 - DNA, 20 bp, Artificial Sequence
  Description of Artificial Sequence: Synthetic oligonucleotide
  Target: LAMA2; (+) strand; PAM type: NNNNGHTT; PAM sequence: CCTTGATT
tattatagtaagaacattat

SEQ ID NO: 50852 - DNA, 20 bp, Artificial Sequence
  Description of Artificial Sequence: Synthetic oligonucleotide
  Target: LAMA2; (+) strand; PAM type: NNNNGHTT; PAM sequence: TTTTGATT
agtaagaacattatccttga

SEQ ID NO: 50853 - DNA, 20 bp, Artificial Sequence
  Description of Artificial Sequence: Synthetic oligonucleotide
  Target: LAMA2; (+) strand; PAM type: NNNNGHTT; PAM sequence: CACAGTTT
aacccttacatatatccctg

SEQ ID NO: 50854 - DNA, 20 bp, Artificial Sequence
  Description of Artificial Sequence: Synthetic oligonucleotide
  Target: LAMA2; (+) strand; PAM type: NNNNGHTT; PAM sequence: AGCAGTTT
atatatccctgcacagtttg

SEQ ID NO: 50855 - DNA, 20 bp, Artificial Sequence
  Description of Artificial Sequence: Synthetic oligonucleotide
  Target: LAMA2; (+) strand; PAM type: NNNNGHTT; PAM sequence: TTAAGTTT
atttttaatttaaaatcatt

SEQ ID NO: 50856 - DNA, 20 bp, Artificial Sequence
  Description of Artificial Sequence: Synthetic oligonucleotide
  Target: LAMA2; (+) strand; PAM type: NNNNGHTT; PAM sequence: ACTTGCTT
atgtaaacaataacttttaa

SEQ ID NO: 50857 - DNA, 20 bp, Artificial Sequence
  Description of Artificial Sequence: Synthetic oligonucleotide
  Target: LAMA2; (+) strand; PAM type: NNNNGHTT; PAM sequence: GCTTGTTT
aaacaataacttttaaactt

SEQ ID NO: 50858 - DNA, 20 bp, Artificial Sequence
  Description of Artificial Sequence: Synthetic oligonucleotide
  Target: LAMA2; (+) strand; PAM type: NNNNGHTT; PAM sequence: TAATGATT
atttctgtgttccattatgg

SEQ ID NO: 50859 - DNA, 20 bp, Artificial Sequence
  Description of Artificial Sequence: Synthetic oligonucleotide
  Target: LAMA2; (+) strand; PAM type: NNNNGHTT; PAM sequence: ATTTGTTT
ctttttttataagtgactat

SEQ ID NO: 50860 - DNA, 20 bp, Artificial Sequence
  Description of Artificial Sequence: Synthetic oligonucleotide
  Target: LAMA2; (+) strand; PAM type: NNNNGHTT; PAM sequence: TGGTGCTT
gtctttccattttgaatatt

SEQ ID NO: 50861 - DNA, 20 bp, Artificial Sequence
  Description of Artificial Sequence: Synthetic oligonucleotide
  Target: LAMA2; (+) strand; PAM type: NNNNGHTT; PAM sequence: AAAAGTTT
tttggtgcttgagataaata

SEQ ID NO: 50862 - DNA, 20 bp, Artificial Sequence
  Description of Artificial Sequence: Synthetic oligonucleotide
  Target: LAMA2; (+) strand; PAM type: NNNNGHTT; PAM sequence: GTATGCTT
ttatctattaatcaatggca

SEQ ID NO: 50863 - DNA, 20 bp, Artificial Sequence
  Description of Artificial Sequence: Synthetic oligonucleotide
  Target: LAMA2; (+) strand; PAM type: NNNNGHTT; PAM sequence: TGACGTTT
ttcattttttcctgctataa

SEQ ID NO: 50864 - DNA, 20 bp, Artificial Sequence
  Description of Artificial Sequence: Synthetic oligonucleotide
  Target: LAMA2; (+) strand; PAM type: NNNNGHTT; PAM sequence: CTCTGTTT
gcaacttacataaaaataga

SEQ ID NO: 50865 - DNA, 20 bp, Artificial Sequence
  Description of Artificial Sequence: Synthetic oligonucleotide
  Target: LAMA2; (+) strand; PAM type: NNNNGHTT; PAM sequence: TATTGTTT
gaaagagaataccaagaatt

SEQ ID NO: 50866 - DNA, 20 bp, Artificial Sequence
  Description of Artificial Sequence: Synthetic oligonucleotide
  Target: LAMA2; (+) strand; PAM type: NNNNGHTT; PAM sequence: TGATGCTT
acagctcaggaactcagatg

SEQ ID NO: 50867 - DNA, 20 bp, Artificial Sequence
  Description of Artificial Sequence: Synthetic oligonucleotide
  Target: LAMA2; (+) strand; PAM type: NNNNGHTT; PAM sequence: ATTAGCTT
atgaatatgtataaagtata

SEQ ID NO: 50868 - DNA, 20 bp, Artificial Sequence
  Description of Artificial Sequence: Synthetic oligonucleotide
  Target: LAMA2; (+) strand; PAM type: NNNNGHTT; PAM sequence: TGCTGCTT
agtataattagcttagaaaa

SEQ ID NO: 50869 - DNA, 20 bp, Artificial Sequence
  Description of Artificial Sequence: Synthetic oligonucleotide
  Target: LAMA2; (+) strand; PAM type: NNNNGHTT; PAM sequence: ATGTGCTT
cacctgtcctgatattgttg

SEQ ID NO: 50870 - DNA, 20 bp, Artificial Sequence
  Description of Artificial Sequence: Synthetic oligonucleotide
  Target: LAMA2; (+) strand; PAM type: NNNNGHTT; PAM sequence: CGGTGCTT
caaattccagtgagttgaaa

SEQ ID NO: 50871 - DNA, 20 bp, Artificial Sequence
  Description of Artificial Sequence: Synthetic oligonucleotide
  Target: LAMA2; (+) strand; PAM type: NNNNGHTT; PAM sequence: TAGTGTTT
gcttttcacccataacatgt

SEQ ID NO: 50872 - DNA, 20 bp, Artificial Sequence
  Description of Artificial Sequence: Synthetic oligonucleotide
  Target: LAMA2; (+) strand; PAM type: NNNNGHTT; PAM sequence: CCCAGATT
tgaaaagcctgtcctttaaa

SEQ ID NO: 50873 - DNA, 20 bp, Artificial Sequence
  Description of Artificial Sequence: Synthetic oligonucleotide
  Target: LAMA2; (+) strand; PAM type: NNNNGHTT; PAM sequence: GACTGCTT
ttaaacccagattgctggca

SEQ ID NO: 50874 - DNA, 20 bp, Artificial Sequence
  Description of Artificial Sequence: Synthetic oligonucleotide
  Target: LAMA2; (+) strand; PAM type: NNNNGHTT; PAM sequence: GAGAGCTT
ctctttactttaatatttta

SEQ ID NO: 50875 - DNA, 20 bp, Artificial Sequence
  Description of Artificial Sequence: Synthetic oligonucleotide
  Target: LAMA2; (+) strand; PAM type: NNNNGHTT; PAM sequence: TCTTGATT
catgtcttttcctccaaatc

SEQ ID NO: 50876 - DNA, 20 bp, Artificial Sequence
  Description of Artificial Sequence: Synthetic oligonucleotide
  Target: LAMA2; (+) strand; PAM type: NNNNGHTT; PAM sequence: CGGTGCTT
tttttaacctctcaattcca

SEQ ID NO: 50877 - DNA, 20 bp, Artificial Sequence
  Description of Artificial Sequence: Synthetic oligonucleotide
  Target: LAMA2; (+) strand; PAM type: NNNNGHTT; PAM sequence: CCCAGTTT
ggcctccaaattgctcattg

SEQ ID NO: 50878 - DNA, 20 bp, Artificial Sequence
  Description of Artificial Sequence: Synthetic oligonucleotide
  Target: LAMA2; (+) strand; PAM type: NNNNGHTT; PAM sequence: TCATGTTT
atagccttcagtcagggctg

SEQ ID NO: 50879 - DNA, 20 bp, Artificial Sequence
  Description of Artificial Sequence: Synthetic oligonucleotide
  Target: LAMA2; (+) strand; PAM type: NNNNGHTT; PAM sequence: GATAGTTT
tgataccaatggcagacaaa

SEQ ID NO: 50880 - DNA, 20 bp, Artificial Sequence
  Description of Artificial Sequence: Synthetic oligonucleotide
  Target: LAMA2; (+) strand; PAM type: NNNNGHTT; PAM sequence: TAATGATT
aagttataacaaatcaaatc

SEQ ID NO: 50881 - DNA, 20 bp, Artificial Sequence
  Description of Artificial Sequence: Synthetic oligonucleotide
  Target: LAMA2; (+) strand; PAM type: NNNNGHTT; PAM sequence: AAAGGATT
tcaaatctaatgatttactc

SEQ ID NO: 50882 - DNA, 20 bp, Artificial Sequence
  Description of Artificial Sequence: Synthetic oligonucleotide
  Target: LAMA2; (+) strand; PAM type: NNNNGHTT; PAM sequence: GTAAGATT
aatgatattaatgccaggat

SEQ ID NO: 50883 - DNA, 20 bp, Artificial Sequence
  Description of Artificial Sequence: Synthetic oligonucleotide
  Target: LAMA2; (+) strand; PAM type: NNNNGHTT; PAM sequence: ATTGGTTT
tattaatgccaggatgtaag

SEQ ID NO: 50884 - DNA, 20 bp, Artificial Sequence
  Description of Artificial Sequence: Synthetic oligonucleotide
  Target: LAMA2; (+) strand; PAM type: NNNNGHTT; PAM sequence: CTAAGATT
aaatcatacttagcacaaga

SEQ ID NO: 50885 - DNA, 20 bp, Artificial Sequence
  Description of Artificial Sequence: Synthetic oligonucleotide
  Target: LAMA2; (+) strand; PAM type: NNNNGHTT; PAM sequence: ATCTGCTT
attaggaagaaggcaaggat

SEQ ID NO: 50886 - DNA, 20 bp, Artificial Sequence
  Description of Artificial Sequence: Synthetic oligonucleotide
  Target: LAMA2; (+) strand; PAM type: NNNNGHTT; PAM sequence: TCCAGATT
gaaaaaggaaataaatggca

SEQ ID NO: 50887 - DNA, 20 bp, Artificial Sequence
  Description of Artificial Sequence: Synthetic oligonucleotide
  Target: LAMA2; (+) strand; PAM type: NNNNGHTT; PAM sequence: AAATGTTT
ccagattgaaaaataagtac

SEQ ID NO: 50888 - DNA, 20 bp, Artificial Sequence
  Description of Artificial Sequence: Synthetic oligonucleotide
  Target: LAMA2; (+) strand; PAM type: NNNNGHTT; PAM sequence: TAGTGCTT
gtggttcatgcctgtaaccc

SEQ ID NO: 50889 - DNA, 20 bp, Artificial Sequence
  Description of Artificial Sequence: Synthetic oligonucleotide
  Target: LAMA2; (+) strand; PAM type: NNNNGHTT; PAM sequence: GGTGGATT
tgctttaggaggctgaggca

SEQ ID NO: 50890 - DNA, 20 bp, Artificial Sequence
  Description of Artificial Sequence: Synthetic oligonucleotide
  Target: LAMA2; (+) strand; PAM type: NNNNGHTT; PAM sequence: GATTGCTT
ttaggaggctgaggcaggtg

SEQ ID NO: 50891 - DNA, 20 bp, Artificial Sequence
  Description of Artificial Sequence: Synthetic oligonucleotide
  Target: LAMA2; (+) strand; PAM type: NNNNGHTT; PAM sequence: AAGAGTTT
caggtggattgcttgaggcc

SEQ ID NO: 50892 - DNA, 20 bp, Artificial Sequence
  Description of Artificial Sequence: Synthetic oligonucleotide
  Target: LAMA2; (+) strand; PAM type: NNNNGHTT; PAM sequence: AAAAGTTT
ctcatctctacaaccaaaaa

SEQ ID NO: 50893 - DNA, 20 bp, Artificial Sequence
  Description of Artificial Sequence: Synthetic oligonucleotide
  Target: LAMA2; (+) strand; PAM type: NNNNGHTT; PAM sequence: GTGAGCTT
aaagttactagaactaataa

SEQ ID NO: 50894 - DNA, 20 bp, Artificial Sequence
  Description of Artificial Sequence: Synthetic oligonucleotide
  Target: LAMA2; (+) strand; PAM type: NNNNGHTT; PAM sequence: TACAGTTT
ggaagttgaaattaaaaggt

SEQ ID NO: 50895 - DNA, 20 bp, Artificial Sequence
  Description of Artificial Sequence: Synthetic oligonucleotide
  Target: LAMA2; (+) strand; PAM type: NNNNGHTT; PAM sequence: AGAAGATT
atataccatgttcatagatc

SEQ ID NO: 50896 - DNA, 20 bp, Artificial Sequence
  Description of Artificial Sequence: Synthetic oligonucleotide
  Target: LAMA2; (+) strand; PAM type: NNNNGHTT; PAM sequence: CCTAGTTT
agattcaatattcctataat

SEQ ID NO: 50897 - DNA, 20 bp, Artificial Sequence
  Description of Artificial Sequence: Synthetic oligonucleotide
  Target: LAMA2; (+) strand; PAM type: NNNNGHTT; PAM sequence: CAAGGTTT
aatcccagtaaaaatcctag

SEQ ID NO: 50898 - DNA, 20 bp, Artificial Sequence
  Description of Artificial Sequence: Synthetic oligonucleotide
  Target: LAMA2; (+) strand; PAM type: NNNNGHTT; PAM sequence: ATATGTTT
tttttcctaaaaatttacag

SEQ ID NO: 50899 - DNA, 20 bp, Artificial Sequence
  Description of Artificial Sequence: Synthetic oligonucleotide
  Target: LAMA2; (+) strand; PAM type: NNNNGHTT; PAM sequence: AATAGATT
tgttggtatcaatattgaca

SEQ ID NO: 50900 - DNA, 20 bp, Artificial Sequence
  Description of Artificial Sequence: Synthetic oligonucleotide
  Target: LAMA2; (+) strand; PAM type: NNNNGHTT; PAM sequence: AATAGATT
attgacaaatagattattag

SEQ ID NO: 50901 - DNA, 20 bp, Artificial Sequence
  Description of Artificial Sequence: Synthetic oligonucleotide
  Target: LAMA2; (+) strand; PAM type: NNNNGHTT; PAM sequence: AAATGATT
agatccagacatgtatggtc

SEQ ID NO: 50902 - DNA, 20 bp, Artificial Sequence
  Description of Artificial Sequence: Synthetic oligonucleotide
  Target: LAMA2; (+) strand; PAM type: NNNNGHTT; PAM sequence: CAAAGATT
ctttgtgatcttgggtaaag

SEQ ID NO: 50903 - DNA, 20 bp, Artificial Sequence
  Description of Artificial Sequence: Synthetic oligonucleotide
  Target: LAMA2; (+) strand; PAM type: NNNNGHTT; PAM sequence: TCCAGATT
tatctgataaaggacccata

SEQ ID NO: 50904 - DNA, 20 bp, Artificial Sequence
  Description of Artificial Sequence: Synthetic oligonucleotide
  Target: LAMA2; (+) strand; PAM type: NNNNGHTT; PAM sequence: AAAAGATT
taacccaagaaaatttgaac

SEQ ID NO: 50905 - DNA, 20 bp, Artificial Sequence
  Description of Artificial Sequence: Synthetic oligonucleotide
  Target: LAMA2; (+) strand; PAM type: NNNNGHTT; PAM sequence: TTCTGCTT
attaccatatgatccagcca

SEQ ID NO: 50906 - DNA, 20 bp, Artificial Sequence
  Description of Artificial Sequence: Synthetic oligonucleotide
  Target: LAMA2; (+) strand; PAM type: NNNNGHTT; PAM sequence: GAATGTTT
acaaaaagagagtacatgca

SEQ ID NO: 50907 - DNA, 20 bp, Artificial Sequence
  Description of Artificial Sequence: Synthetic oligonucleotide
  Target: LAMA2; (+) strand; PAM type: NNNNGHTT; PAM sequence: AAGAGATT
agagaaggaaggatagaaga

SEQ ID NO: 50908 - DNA, 20 bp, Artificial Sequence
  Description of Artificial Sequence: Synthetic oligonucleotide
  Target: LAMA2; (+) strand; PAM type: NNNNGHTT; PAM sequence: ATTGGTTT
caaaacttatccaattgtaa

SEQ ID NO: 50909 - DNA, 20 bp, Artificial Sequence
  Description of Artificial Sequence: Synthetic oligonucleotide
  Target: LAMA2; (+) strand; PAM type: NNNNGHTT; PAM sequence: CATGGTTT
tccaattgtaaattggtttg

SEQ ID NO: 50910 - DNA, 20 bp, Artificial Sequence
  Description of Artificial Sequence: Synthetic oligonucleotide
  Target: LAMA2; (+) strand; PAM type: NNNNGHTT; PAM sequence: GCCAGTTT
ggtttgcatggtttatttat

SEQ ID NO: 50911 - DNA, 20 bp, Artificial Sequence
  Description of Artificial Sequence: Synthetic oligonucleotide
  Target: LAMA2; (+) strand; PAM type: NNNNGHTT; PAM sequence: CTTAGATT
tccctccacaatttccacaa

SEQ ID NO: 50912 - DNA, 20 bp, Artificial Sequence
  Description of Artificial Sequence: Synthetic oligonucleotide
  Target: LAMA2; (+) strand; PAM type: NNNNGHTT; PAM sequence: TGTTGTTT
tagattttagcctctttcac

SEQ ID NO: 50913 - DNA, 20 bp, Artificial Sequence
  Description of Artificial Sequence: Synthetic oligonucleotide
  Target: LAMA2; (+) strand; PAM type: NNNNGHTT; PAM sequence: GCAGGTTT
ttaggttcaaaggtacatgt

SEQ ID NO: 50914 - DNA, 20 bp, Artificial Sequence
  Description of Artificial Sequence: Synthetic oligonucleotide
  Target: LAMA2; (+) strand; PAM type: NNNNGHTT; PAM sequence: GGAGGTTT
tataggtaaactcttgtcat

SEQ ID NO: 50915 - DNA, 20 bp, Artificial Sequence
  Description of Artificial Sequence: Synthetic oligonucleotide
  Target: LAMA2; (+) strand; PAM type: NNNNGHTT; PAM sequence: TATAGATT
cttgtcatggaggtttgttg

SEQ ID NO: 50916 - DNA, 20 bp, Artificial Sequence
  Description of Artificial Sequence: Synthetic oligonucleotide
  Target: LAMA2; (+) strand; PAM type: NNNNGHTT; PAM sequence: CTCTGTTT
actacccaatagttattttt

SEQ ID NO: 50917 - DNA, 20 bp, Artificial Sequence
  Description of Artificial Sequence: Synthetic oligonucleotide
  Target: LAMA2; (+) strand; PAM type: NNNNGHTT; PAM sequence: ATTTGATT
tataaatgagaacatgctgt

SEQ ID NO: 50918 - DNA, 20 bp, Artificial Sequence
  Description of Artificial Sequence: Synthetic oligonucleotide
  Target: LAMA2; (+) strand; PAM type: NNNNGHTT; PAM sequence: ATTAGTTT
atttgattttctgttcctgc

SEQ ID NO: 50919 - DNA, 20 bp, Artificial Sequence
  Description of Artificial Sequence: Synthetic oligonucleotide
  Target: LAMA2; (+) strand; PAM type: NNNNGHTT; PAM sequence: ACATGATT
catccatgttcctgcaaagg

SEQ ID NO: 50920 - DNA, 20 bp, Artificial Sequence
  Description of Artificial Sequence: Synthetic oligonucleotide
  Target: LAMA2; (+) strand; PAM type: NNNNGHTT; PAM sequence: ATTCGTTT
cctgcaaaggacatgattgc

SEQ ID NO: 50921 - DNA, 20 bp, Artificial Sequence
  Description of Artificial Sequence: Synthetic oligonucleotide
  Target: LAMA2; (+) strand; PAM type: NNNNGHTT; PAM sequence: GTTAGCTT
cctcactttgcacacctgaa

SEQ ID NO: 50922 - DNA, 20 bp, Artificial Sequence
  Description of Artificial Sequence: Synthetic oligonucleotide
  Target: LAMA2; (+) strand; PAM type: NNNNGHTT; PAM sequence: AAATGCTT
gctttaaaattatgactttt

SEQ ID NO: 50923 - DNA, 20 bp, Artificial Sequence
  Description of Artificial Sequence: Synthetic oligonucleotide
  Target: LAMA2; (+) strand; PAM type: NNNNGHTT; PAM sequence: GTCAGATT
attatgacttttaaatgctt

SEQ ID NO: 50924 - DNA, 20 bp, Artificial Sequence
  Description of Artificial Sequence: Synthetic oligonucleotide
  Target: LAMA2; (+) strand; PAM type: NNNNGHTT; PAM sequence: AGCTGTTT
cactccaaggcactggggaa

SEQ ID NO: 50925 - DNA, 20 bp, Artificial Sequence
  Description of Artificial Sequence: Synthetic oligonucleotide
  Target: LAMA2; (+) strand; PAM type: NNNNGHTT; PAM sequence: TCTAGTTT
aaagctgttttctttttttg

SEQ ID NO: 50926 - DNA, 20 bp, Artificial Sequence
  Description of Artificial Sequence: Synthetic oligonucleotide
  Target: LAMA2; (+) strand; PAM type: NNNNGHTT; PAM sequence: TCAGGATT
gcctatattatcttgacaat

SEQ ID NO: 50927 - DNA, 20 bp, Artificial Sequence
  Description of Artificial Sequence: Synthetic oligonucleotide
  Target: LAMA2; (+) strand; PAM type: NNNNGHTT; PAM sequence: CTGAGCTT
ttccaaattgactcagactc

SEQ ID NO: 50928 - DNA, 20 bp, Artificial Sequence
  Description of Artificial Sequence: Synthetic oligonucleotide
  Target: LAMA2; (+) strand; PAM type: NNNNGHTT; PAM sequence: TAGAGTTT
aaattcctctctccactttt

SEQ ID NO: 50929 - DNA, 20 bp, Artificial Sequence
  Description of Artificial Sequence: Synthetic oligonucleotide
  Target: LAMA2; (+) strand; PAM type: NNNNGHTT; PAM sequence: GACAGATT
cttctctttgctcattgtcg

SEQ ID NO: 50930 - DNA, 20 bp, Artificial Sequence
  Description of Artificial Sequence: Synthetic oligonucleotide
  Target: LAMA2; (+) strand; PAM type: NNNNGHTT; PAM sequence: TGCTGTTT
agattgtcagctgtcacttc

SEQ ID NO: 50931 - DNA, 20 bp, Artificial Sequence
  Description of Artificial Sequence: Synthetic oligonucleotide
  Target: LAMA2; (+) strand; PAM type: NNNNGHTT; PAM sequence: ATGTGTTT
ctgtcacttctgctgttttc

SEQ ID NO: 50932 - DNA, 20 bp, Artificial Sequence
  Description of Artificial Sequence: Synthetic oligonucleotide
  Target: LAMA2; (+) strand; PAM type: NNNNGHTT; PAM sequence: GTTTGTTT
cacttctgctgttttcatgt

SEQ ID NO: 50933 - DNA, 20 bp, Artificial Sequence
  Description of Artificial Sequence: Synthetic oligonucleotide
  Target: LAMA2; (+) strand; PAM type: NNNNGHTT; PAM sequence: AATTGTTT
attgtaatttcctgtctcta

SEQ ID NO: 50934 - DNA, 20 bp, Artificial Sequence
  Description of Artificial Sequence: Synthetic oligonucleotide
  Target: LAMA2; (+) strand; PAM type: NNNNGHTT; PAM sequence: TTTTGATT
aatttcctgtctctaaattg

SEQ ID NO: 50935 - DNA, 20 bp, Artificial Sequence
  Description of Artificial Sequence: Synthetic oligonucleotide
  Target: LAMA2; (+) strand; PAM type: NNNNGHTT; PAM sequence: TGAGGCTT
tagaatctgagtgggtaacc

SEQ ID NO: 50936 - DNA, 20 bp, Artificial Sequence
  Description of Artificial Sequence: Synthetic oligonucleotide
  Target: LAMA2; (+) strand; PAM type: NNNNGHTT; PAM sequence: TCCTGTTT
agaactgtagcaatgagaat

SEQ ID NO: 50937 - DNA, 20 bp, Artificial Sequence
  Description of Artificial Sequence: Synthetic oligonucleotide
  Target: LAMA2; (+) strand; PAM type: NNNNGHTT; PAM sequence: ATCAGTTT
ttttcccagcagaaaacatc

SEQ ID NO: 50938 - DNA, 20 bp, Artificial Sequence
  Description of Artificial Sequence: Synthetic oligonucleotide
  Target: LAMA2; (+) strand; PAM type: NNNNGHTT; PAM sequence: AGATGTTT
gtgttcttttttatttatgt

SEQ ID NO: 50939 - DNA, 20 bp, Artificial Sequence
  Description of Artificial Sequence: Synthetic oligonucleotide
  Target: LAMA2; (+) strand; PAM type: NNNNGHTT; PAM sequence: TCTAGTTT
taccaagttctgtaatcttt

SEQ ID NO: 50940 - DNA, 20 bp, Artificial Sequence
  Description of Artificial Sequence: Synthetic oligonucleotide
  Target: LAMA2; (+) strand; PAM type: NNNNGHTT; PAM sequence: TTCAGATT
tatgtctgtgataatctgag

SEQ ID NO: 50941 - DNA, 20 bp, Artificial Sequence
  Description of Artificial Sequence: Synthetic oligonucleotide
  Target: LAMA2; (+) strand; PAM type: NNNNGHTT; PAM sequence: TCCTGTTT
tttaaaatttacacataaga

SEQ ID NO: 50942 - DNA, 20 bp, Artificial Sequence
  Description of Artificial Sequence: Synthetic oligonucleotide
  Target: LAMA2; (+) strand; PAM type: NNNNGHTT; PAM sequence: GTTTGATT
aaatttacacataagatcct

SEQ ID NO: 50943 - DNA, 20 bp, Artificial Sequence
  Description of Artificial Sequence: Synthetic oligonucleotide
  Target: LAMA2; (+) strand; PAM type: NNNNGHTT; PAM sequence: TAATGATT
cttggtatatatgaattatg

SEQ ID NO: 50944 - DNA, 20 bp, Artificial Sequence
  Description of Artificial Sequence: Synthetic oligonucleotide
  Target: LAMA2; (+) strand; PAM type: NNNNGHTT; PAM sequence: CTTTGCTT
ctgagtctaaacaaatatat

SEQ ID NO: 50945 - DNA, 20 bp, Artificial Sequence
  Description of Artificial Sequence: Synthetic oligonucleotide
  Target: LAMA2; (+) strand; PAM type: NNNNGHTT; PAM sequence: CAGAGATT
gcttggagataattgtggct

SEQ ID NO: 50946 - DNA, 20 bp, Artificial Sequence
  Description of Artificial Sequence: Synthetic oligonucleotide
  Target: LAMA2; (+) strand; PAM type: NNNNGHTT; PAM sequence: AGAAGATT
tggctcagagattgtcattt

SEQ ID NO: 50947 - DNA, 20 bp, Artificial Sequence
  Description of Artificial Sequence: Synthetic oligonucleotide
  Target: LAMA2; (+) strand; PAM type: NNNNGHTT; PAM sequence: TTGTGTTT
agagattgtcatttagaaga

SEQ ID NO: 50948 - DNA, 20 bp, Artificial Sequence
  Description of Artificial Sequence: Synthetic oligonucleotide
  Target: LAMA2; (+) strand; PAM type: NNNNGHTT; PAM sequence: TACCGCTT
tagaagattgtgttttgcca

SEQ ID NO: 50949 - DNA, 20 bp, Artificial Sequence
  Description of Artificial Sequence: Synthetic oligonucleotide
  Target: LAMA2; (+) strand; PAM type: NNNNGHTT; PAM sequence: ATTTGCTT
cagtccacaactagagtgaa

SEQ ID NO: 50950 - DNA, 20 bp, Artificial Sequence
  Description of Artificial Sequence: Synthetic oligonucleotide
  Target: LAMA2; (+) strand; PAM type: NNNNGHTT; PAM sequence: ATGTGTTT
cttaaggataaagtcagggg

SEQ ID NO: 50951 - DNA, 20 bp, Artificial Sequence
  Description of Artificial Sequence: Synthetic oligonucleotide
  Target: LAMA2; (+) strand; PAM type: NNNNGHTT; PAM sequence: ATTTGCTT
ggggatgtgtttagttctta

SEQ ID NO: 50952 - DNA, 20 bp, Artificial Sequence
  Description of Artificial Sequence: Synthetic oligonucleotide
  Target: LAMA2; (+) strand; PAM type: NNNNGHTT; PAM sequence: TATGGTTT
atccctccactccattattc

SEQ ID NO: 50953 - DNA, 20 bp, Artificial Sequence
  Description of Artificial Sequence: Synthetic oligonucleotide
  Target: LAMA2; (+) strand; PAM type: NNNNGHTT; PAM sequence: ATTTGTTT
tatggttttagatgtatgac

SEQ ID NO: 50954 - DNA, 20 bp, Artificial Sequence
  Description of Artificial Sequence: Synthetic oligonucleotide
  Target: LAMA2; (+) strand; PAM type: NNNNGHTT; PAM sequence: CGGGGTTT
gtccacaggcaacaggtcct

SEQ ID NO: 50955 - DNA, 20 bp, Artificial Sequence
  Description of Artificial Sequence: Synthetic oligonucleotide
  Target: LAMA2; (+) strand; PAM type: NNNNGHTT; PAM sequence: AAAAGCTT
atgccaaaggctgtcttcag

SEQ ID NO: 50956 - DNA, 20 bp, Artificial Sequence
  Description of Artificial Sequence: Synthetic oligonucleotide
  Target: LAMA2; (+) strand; PAM type: NNNNGHTT; PAM sequence: TCAGGATT
aggctgtcttcagaaaagct

SEQ ID NO: 50957 - DNA, 20 bp, Artificial Sequence
  Description of Artificial Sequence: Synthetic oligonucleotide
  Target: LAMA2; (+) strand; PAM type: NNNNGHTT; PAM sequence: CATAGTTT
atgtaaaaggtcagtgtggc

SEQ ID NO: 50958 - DNA, 20 bp, Artificial Sequence
  Description of Artificial Sequence: Synthetic oligonucleotide
  Target: LAMA2; (+) strand; PAM type: NNNNGHTT; PAM sequence: GCATGATT
tggagaatgtaatttcttta

SEQ ID NO: 50959 - DNA, 20 bp, Artificial Sequence
  Description of Artificial Sequence: Synthetic oligonucleotide
  Target: LAMA2; (+) strand; PAM type: NNNNGHTT; PAM sequence: TGATGATT
tttctttagcatgatttttg

SEQ ID NO: 50960 - DNA, 20 bp, Artificial Sequence
  Description of Artificial Sequence: Synthetic oligonucleotide
  Target: LAMA2; (+) strand; PAM type: NNNNGHTT; PAM sequence: ACTAGTTT
taatgcaagtaaactttctc

SEQ ID NO: 50961 - DNA, 20 bp, Artificial Sequence
  Description of Artificial Sequence: Synthetic oligonucleotide
  Target: LAMA2; (+) strand; PAM type: NNNNGHTT; PAM sequence: ATAAGTTT
gtatagtaacttttagtgta

SEQ ID NO: 50962 - DNA, 20 bp, Artificial Sequence
  Description of Artificial Sequence: Synthetic oligonucleotide
  Target: LAMA2; (+) strand; PAM type: NNNNGHTT; PAM sequence: CTGTGATT
ccagccatagtggctcacac

SEQ ID NO: 50963 - DNA, 20 bp, Artificial Sequence
  Description of Artificial Sequence: Synthetic oligonucleotide
  Target: LAMA2; (+) strand; PAM type: NNNNGHTT; PAM sequence: TAGTGCTT
gtggctcacacctgtgattc

SEQ ID NO: 50964 - DNA, 20 bp, Artificial Sequence
  Description of Artificial Sequence: Synthetic oligonucleotide
  Target: LAMA2; (+) strand; PAM type: NNNNGHTT; PAM sequence: GATCGCTT
ttggaaggctgagccaggag

SEQ ID NO: 50965 - DNA, 20 bp, Artificial Sequence
  Description of Artificial Sequence: Synthetic oligonucleotide
  Target: LAMA2; (+) strand; PAM type: NNNNGHTT; PAM sequence: AAGTGATT
agcctctgtctcccaggttc

SEQ ID NO: 50966 - DNA, 20 bp, Artificial Sequence
  Description of Artificial Sequence: Synthetic oligonucleotide
  Target: LAMA2; (+) strand; PAM type: NNNNGHTT; PAM sequence: CTGGGATT
gtgattgtcctgcctcatat

SEQ ID NO: 50967 - DNA, 20 bp, Artificial Sequence
  Description of Artificial Sequence: Synthetic oligonucleotide
  Target: LAMA2; (+) strand; PAM type: NNNNGHTT; PAM sequence: CAGGGTTT
ctttgcattttgagtagaga

SEQ ID NO: 50968 - DNA, 20 bp, Artificial Sequence
  Description of Artificial Sequence: Synthetic oligonucleotide
  Target: LAMA2; (+) strand; PAM type: NNNNGHTT; PAM sequence: CTGAGATT
cgcctcggcctcccaaagtg

SEQ ID NO: 50969 - DNA, 20 bp, Artificial Sequence
  Description of Artificial Sequence: Synthetic oligonucleotide
  Target: LAMA2; (+) strand; PAM type: NNNNGHTT; PAM sequence: TTCTGATT
acatttttcttgtattttat

SEQ ID NO: 50970 - DNA, 20 bp, Artificial Sequence
  Description of Artificial Sequence: Synthetic oligonucleotide
  Target: LAMA2; (+) strand; PAM type: NNNNGHTT; PAM sequence: ATGGGTTT
aaaatatctactgccatatt

SEQ ID NO: 50971 - DNA, 20 bp, Artificial Sequence
  Description of Artificial Sequence: Synthetic oligonucleotide
  Target: LAMA2; (+) strand; PAM type: NNNNGHTT; PAM sequence: ACCTGTTT
tgtctcccatttgaattgcc

SEQ ID NO: 50972 - DNA, 20 bp, Artificial Sequence
  Description of Artificial Sequence: Synthetic oligonucleotide
  Target: LAMA2; (+) strand; PAM type: NNNNGHTT; PAM sequence: TTCAGTTT
aattgccacctgtttctctc

SEQ ID NO: 50973 - DNA, 20 bp, Artificial Sequence
  Description of Artificial Sequence: Synthetic oligonucleotide
  Target: LAMA2; (+) strand; PAM type: NNNNGHTT; PAM sequence: TCATGTTT
catgctactattccaagcct

SEQ ID NO: 50974 - DNA, 20 bp, Artificial Sequence
  Description of Artificial Sequence: Synthetic oligonucleotide
  Target: LAMA2; (+) strand; PAM type: NNNNGHTT; PAM sequence: AACTGCTT
ttcacctctcttctttgcct

SEQ ID NO: 50975 - DNA, 20 bp, Artificial Sequence
  Description of Artificial Sequence: Synthetic oligonucleotide
  Target: LAMA2; (+) strand; PAM type: NNNNGHTT; PAM sequence: TCAGGATT
aactgctttcttccagacct

SEQ ID NO: 50976 - DNA, 20 bp, Artificial Sequence
  Description of Artificial Sequence: Synthetic oligonucleotide
  Target: LAMA2; (+) strand; PAM type: NNNNGHTT; PAM sequence: ATCTGATT
tccaggaaacctaacacctc

SEQ ID NO: 50977 - DNA, 20 bp, Artificial Sequence
  Description of Artificial Sequence: Synthetic oligonucleotide
  Target: LAMA2; (+) strand; PAM type: NNNNGHTT; PAM sequence: TATAGTTT
tttacatgccccctctctgg

SEQ ID NO: 50978 - DNA, 20 bp, Artificial Sequence
  Description of Artificial Sequence: Synthetic oligonucleotide
  Target: LAMA2; (+) strand; PAM type: NNNNGHTT; PAM sequence: ATAGGCTT
ctctctggtatagttttctc

SEQ ID NO: 50979 - DNA, 20 bp, Artificial Sequence
  Description of Artificial Sequence: Synthetic oligonucleotide
  Target: LAMA2; (+) strand; PAM type: NNNNGHTT; PAM sequence: TGGGGTTT
catcttcttgaggaaagaca

SEQ ID NO: 50980 - DNA, 20 bp, Artificial Sequence
  Description of Artificial Sequence: Synthetic oligonucleotide
  Target: LAMA2; (+) strand; PAM type: NNNNGHTT; PAM sequence: GTTGGCTT
tattttttacaataaatggt

SEQ ID NO: 50981 - DNA, 20 bp, Artificial Sequence
  Description of Artificial Sequence: Synthetic oligonucleotide
  Target: LAMA2; (+) strand; PAM type: NNNNGHTT; PAM sequence: AGAGGTTT
ttacttatcttagaaagaga

SEQ ID NO: 50982 - DNA, 20 bp, Artificial Sequence
  Description of Artificial Sequence: Synthetic oligonucleotide
  Target: LAMA2; (+) strand; PAM type: NNNNGHTT; PAM sequence: GCATGTTT
tttaaaatcatttatatttg

SEQ ID NO: 50983 - DNA, 20 bp, Artificial Sequence
  Description of Artificial Sequence: Synthetic oligonucleotide
  Target: LAMA2; (+) strand; PAM type: NNNNGHTT; PAM sequence: TCTCGATT
atatgaaattacaagttcta

SEQ ID NO: 50984 - DNA, 20 bp, Artificial Sequence
  Description of Artificial Sequence: Synthetic oligonucleotide
  Target: LAMA2; (+) strand; PAM type: NNNNGHTT; PAM sequence: AGGTGATT
gaatagggaggaagggagcg

SEQ ID NO: 50985 - DNA, 20 bp, Artificial Sequence
  Description of Artificial Sequence: Synthetic oligonucleotide
  Target: LAMA2; (+) strand; PAM type: NNNNGHTT; PAM sequence: TTAAGATT
tgcaagaaccaatcctgtct

SEQ ID NO: 50986 - DNA, 20 bp, Artificial Sequence
  Description of Artificial Sequence: Synthetic oligonucleotide
  Target: LAMA2; (+) strand; PAM type: NNNNGHTT; PAM sequence: ATTAGTTT
gttaggagacagaaatgttc

SEQ ID NO: 50987 - DNA, 20 bp, Artificial Sequence
  Description of Artificial Sequence: Synthetic oligonucleotide
  Target: LAMA2; (+) strand; PAM type: NNNNGHTT; PAM sequence: GAATGTTT
caaggctatgacggagatgg

SEQ ID NO: 50988 - DNA, 20 bp, Artificial Sequence
  Description of Artificial Sequence: Synthetic oligonucleotide
  Target: LAMA2; (+) strand; PAM type: NNNNGHTT; PAM sequence: CTCTGATT
cttgctacattatgacattt

SEQ ID NO: 50989 - DNA, 20 bp, Artificial Sequence
  Description of Artificial Sequence: Synthetic oligonucleotide
  Target: LAMA2; (+) strand; PAM type: NNNNGHTT; PAM sequence: TAGAGATT
cttgacagcagctattaaaa

SEQ ID NO: 50990 - DNA, 20 bp, Artificial Sequence
  Description of Artificial Sequence: Synthetic oligonucleotide
  Target: LAMA2; (+) strand; PAM type: NNNNGHTT; PAM sequence: TGTTGCTT
taccctccatatttctaatt

SEQ ID NO: 50991 - DNA, 20 bp, Artificial Sequence
  Description of Artificial Sequence: Synthetic oligonucleotide
  Target: LAMA2; (+) strand; PAM type: NNNNGHTT; PAM sequence: GTTAGTTT
gttcaattcagtacagttca

SEQ ID NO: 50992 - DNA, 20 bp, Artificial Sequence
  Description of Artificial Sequence: Synthetic oligonucleotide
  Target: LAMA2; (+) strand; PAM type: NNNNGHTT; PAM sequence: GTGAGCTT
cagtacagttcagttagttt

SEQ ID NO: 50993 - DNA, 20 bp, Artificial Sequence
  Description of Artificial Sequence: Synthetic oligonucleotide
  Target: LAMA2; (+) strand; PAM type: NNNNGHTT; PAM sequence: ATTTGTTT
atctgaacttgccgggagca

SEQ ID NO: 50994 - DNA, 20 bp, Artificial Sequence
  Description of Artificial Sequence: Synthetic oligonucleotide
  Target: LAMA2; (+) strand; PAM type: NNNNGHTT; PAM sequence: TTTTGCTT
aacttgccgggagcaatttg

SEQ ID NO: 50995 - DNA, 20 bp, Artificial Sequence
  Description of Artificial Sequence: Synthetic oligonucleotide
  Target: LAMA2; (+) strand; PAM type: NNNNGHTT; PAM sequence: GTGAGTTT
aaaagtaaatttgcccttgt

SEQ ID NO: 50996 - DNA, 20 bp, Artificial Sequence
  Description of Artificial Sequence: Synthetic oligonucleotide
  Target: LAMA2; (+) strand; PAM type: NNNNGHTT; PAM sequence: TTGAGATT
aaatttgcccttgtgtgagt

SEQ ID NO: 50997 - DNA, 20 bp, Artificial Sequence
  Description of Artificial Sequence: Synthetic oligonucleotide
  Target: LAMA2; (+) strand; PAM type: NNNNGHTT; PAM sequence: GAATGTTT
ctgtctacattgcactgatc

SEQ ID NO: 50998 - DNA, 20 bp, Artificial Sequence
  Description of Artificial Sequence: Synthetic oligonucleotide
  Target: LAMA2; (+) strand; PAM type: NNNNGHTT; PAM sequence: TGAGGCTT
aagtattttgttgatggata

SEQ ID NO: 50999 - DNA, 20 bp, Artificial Sequence
  Description of Artificial Sequence: Synthetic oligonucleotide
  Target: LAMA2; (+) strand; PAM type: NNNNGHTT; PAM sequence: CACTGCTT
agtaccaccaggtgaatgaa

SEQ ID NO: 51000 - DNA, 20 bp, Artificial Sequence
  Description of Artificial Sequence: Synthetic oligonucleotide
  Target: LAMA2; (+) strand; PAM type: NNNNGHTT; PAM sequence: CTTGGTTT
gaggcaaggaagaagtagac

SEQ ID NO: 51001 - DNA, 20 bp, Artificial Sequence
  Description of Artificial Sequence: Synthetic oligonucleotide
  Target: LAMA2; (+) strand; PAM type: NNNNGHTT; PAM sequence: AAAAGTTT
gaagtagaccttggtttatt

SEQ ID NO: 51002 - DNA, 20 bp, Artificial Sequence
  Description of Artificial Sequence: Synthetic oligonucleotide
  Target: LAMA2; (+) strand; PAM type: NNNNGHTT; PAM sequence: TTAAGATT
ttattaaaagtttgagaata

SEQ ID NO: 51003 - DNA, 20 bp, Artificial Sequence
  Description of Artificial Sequence: Synthetic oligonucleotide
  Target: LAMA2; (+) strand; PAM type: NNNNGHTT; PAM sequence: TTCAGTTT
taccttatattgactaactt

SEQ ID NO: 51004 - DNA, 20 bp, Artificial Sequence
  Description of Artificial Sequence: Synthetic oligonucleotide
  Target: LAMA2; (+) strand; PAM type: NNNNGHTT; PAM sequence: AGGAGTTT
tgggcagatcacctgaggta

SEQ ID NO: 51005 - DNA, 20 bp, Artificial Sequence
  Description of Artificial Sequence: Synthetic oligonucleotide
  Target: LAMA2; (+) strand; PAM type: NNNNGHTT; PAM sequence: CTGAGATT
gatacggaggttacagtgag

SEQ ID NO: 51006 - DNA, 20 bp, Artificial Sequence
  Description of Artificial Sequence: Synthetic oligonucleotide
  Target: LAMA2; (+) strand; PAM type: NNNNGHTT; PAM sequence: GGCGGTTT
tgacagctcattttaaagga

SEQ ID NO: 51007 - DNA, 20 bp, Artificial Sequence
  Description of Artificial Sequence: Synthetic oligonucleotide
  Target: LAMA2; (+) strand; PAM type: NNNNGHTT; PAM sequence: CATTGCTT
gcccaaataatgaatcagtg

SEQ ID NO: 51008 - DNA, 20 bp, Artificial Sequence
  Description of Artificial Sequence: Synthetic oligonucleotide
  Target: LAMA2; (+) strand; PAM type: NNNNGHTT; PAM sequence: TTAAGTTT
atgaaacattattccaatca

SEQ ID NO: 51009 - DNA, 20 bp, Artificial Sequence
  Description of Artificial Sequence: Synthetic oligonucleotide
  Target: LAMA2; (+) strand; PAM type: NNNNGHTT; PAM sequence: TGAAGATT
ccgttcagacaagtgggtct

SEQ ID NO: 51010 - DNA, 20 bp, Artificial Sequence
  Description of Artificial Sequence: Synthetic oligonucleotide
  Target: LAMA2; (+) strand; PAM type: NNNNGHTT; PAM sequence: TTGAGATT
cacttgcaaacgctaacctg

SEQ ID NO: 51011 - DNA, 20 bp, Artificial Sequence
  Description of Artificial Sequence: Synthetic oligonucleotide
  Target: LAMA2; (+) strand; PAM type: NNNNGHTT; PAM sequence: CAAAGTTT
gaaattgctgatccctcata

SEQ ID NO: 51012 - DNA, 20 bp, Artificial Sequence
  Description of Artificial Sequence: Synthetic oligonucleotide
  Target: LAMA2; (+) strand; PAM type: NNNNGHTT; PAM sequence: TTTTGATT
tgctgatccctcatacaaag

SEQ ID NO: 51013 - DNA, 20 bp, Artificial Sequence
  Description of Artificial Sequence: Synthetic oligonucleotide
  Target: LAMA2; (+) strand; PAM type: NNNNGHTT; PAM sequence: GAAAGATT
tagaggggcaggttctattg

SEQ ID NO: 51014 - DNA, 20 bp, Artificial Sequence
  Description of Artificial Sequence: Synthetic oligonucleotide
  Target: LAMA2; (+) strand; PAM type: NNNNGHTT; PAM sequence: CGTAGCTT
gattatccctaagagcgaga

SEQ ID NO: 51015 - DNA, 20 bp, Artificial Sequence
  Description of Artificial Sequence: Synthetic oligonucleotide
  Target: LAMA2; (+) strand; PAM type: NNNNGHTT; PAM sequence: TGGGGCTT
aaaggcctgtgcaataaaaa

SEQ ID NO: 51016 - DNA, 20 bp, Artificial Sequence
  Description of Artificial Sequence: Synthetic oligonucleotide
  Target: LAMA2; (+) strand; PAM type: NNNNGHTT; PAM sequence: CTGGGCTT
gcttagagctaaaaacttat

SEQ ID NO: 51017 - DNA, 20 bp, Artificial Sequence
  Description of Artificial Sequence: Synthetic oligonucleotide
  Target: LAMA2; (+) strand; PAM type: NNNNGHTT; PAM sequence: CTGAGATT
tgtgtgttcagaatcagagt

SEQ ID NO: 51018 - DNA, 20 bp, Artificial Sequence
  Description of Artificial Sequence: Synthetic oligonucleotide
  Target: LAMA2; (+) strand; PAM type: NNNNGHTT; PAM sequence: TGGCGTTT
aatcagagtctgagattcta

SEQ ID NO: 51019 - DNA, 20 bp, Artificial Sequence
  Description of Artificial Sequence: Synthetic oligonucleotide
  Target: LAMA2; (+) strand; PAM type: NNNNGHTT; PAM sequence: GGTGGTTT
aaatgcaggtgttgatgtct

SEQ ID NO: 51020 - DNA, 20 bp, Artificial Sequence
  Description of Artificial Sequence: Synthetic oligonucleotide
  Target: LAMA2; (+) strand; PAM type: NNNNGHTT; PAM sequence: TTTAGTTT
aggtgttgatgtctggtggt

SEQ ID NO: 51021 - DNA, 20 bp, Artificial Sequence
  Description of Artificial Sequence: Synthetic oligonucleotide
  Target: LAMA2; (+) strand; PAM type: NNNNGHTT; PAM sequence: TGGTGCTT
aggaagagcatatgcaagca

SEQ ID NO: 51022 - DNA, 20 bp, Artificial Sequence
  Description of Artificial Sequence: Synthetic oligonucleotide
  Target: LAMA2; (+) strand; PAM type: NNNNGHTT; PAM sequence: GAGGGTTT
ttcttactttcagatcagaa

SEQ ID NO: 51023 - DNA, 20 bp, Artificial Sequence
  Description of Artificial Sequence: Synthetic oligonucleotide
  Target: LAMA2; (+) strand; PAM type: NNNNGHTT; PAM sequence: CAATGATT
cgaatcattgtcaccaaatt

SEQ ID NO: 51024 - DNA, 20 bp, Artificial Sequence
  Description of Artificial Sequence: Synthetic oligonucleotide
  Target: LAMA2; (+) strand; PAM type: NNNNGHTT; PAM sequence: GAGGGATT
ctgcataatgcagaaaattg

SEQ ID NO: 51025 - DNA, 20 bp, Artificial Sequence
  Description of Artificial Sequence: Synthetic oligonucleotide
  Target: LAMA2; (+) strand; PAM type: NNNNGHTT; PAM sequence: CAAAGATT
gggattttttctaagaagta

SEQ ID NO: 51026 - DNA, 20 bp, Artificial Sequence
  Description of Artificial Sequence: Synthetic oligonucleotide
  Target: LAMA2; (+) strand; PAM type: NNNNGHTT; PAM sequence: TGTAGATT
acctaggagagaaatacagt

SEQ ID NO: 51027 - DNA, 20 bp, Artificial Sequence
  Description of Artificial Sequence: Synthetic oligonucleotide
  Target: LAMA2; (+) strand; PAM type: NNNNGHTT; PAM sequence: ATATGTTT
gaatatatacataggtatac

SEQ ID NO: 51028 - DNA, 20 bp, Artificial Sequence
  Description of Artificial Sequence: Synthetic oligonucleotide
  Target: LAMA2; (+) strand; PAM type: NNNNGHTT; PAM sequence: CCCAGTTT
cagcactttctcatacatct

SEQ ID NO: 51029 - DNA, 20 bp, Artificial Sequence
  Description of Artificial Sequence: Synthetic oligonucleotide
  Target: LAMA2; (+) strand; PAM type: NNNNGHTT; PAM sequence: AGATGTTT
catatcagtcacatgaagga

SEQ ID NO: 51030 - DNA, 20 bp, Artificial Sequence
  Description of Artificial Sequence: Synthetic oligonucleotide
  Target: LAMA2; (+) strand; PAM type: NNNNGHTT; PAM sequence: TAGTGATT
tcttccaactctgtgtccta

SEQ ID NO: 51031 - DNA, 20 bp, Artificial Sequence
  Description of Artificial Sequence: Synthetic oligonucleotide
  Target: LAMA2; (+) strand; PAM type: NNNNGHTT; PAM sequence: ACTAGATT
tagtgatttcattgtaccag

SEQ ID NO: 51032 - DNA, 20 bp, Artificial Sequence
  Description of Artificial Sequence: Synthetic oligonucleotide
  Target: LAMA2; (+) strand; PAM type: NNNNGHTT; PAM sequence: AGCAGTTT
atttcagagaaatactgtgt

SEQ ID NO: 51033 - DNA, 20 bp, Artificial Sequence
  Description of Artificial Sequence: Synthetic oligonucleotide
  Target: LAMA2; (+) strand; PAM type: NNNNGHTT; PAM sequence: CTGCGATT
aagtgacttgcaactctgcc

SEQ ID NO: 51034 - DNA, 20 bp, Artificial Sequence
  Description of Artificial Sequence: Synthetic oligonucleotide
  Target: LAMA2; (+) strand; PAM type: NNNNGHTT; PAM sequence: TGCTGCTT
ccagtcgacccttgctactc

SEQ ID NO: 51035 - DNA, 20 bp, Artificial Sequence
  Description of Artificial Sequence: Synthetic oligonucleotide
  Target: LAMA2; (+) strand; PAM type: NNNNGHTT; PAM sequence: TCCTGCTT
ttccattccctcattgtgag

SEQ ID NO: 51036 - DNA, 20 bp, Artificial Sequence
  Description of Artificial Sequence: Synthetic oligonucleotide
  Target: LAMA2; (+) strand; PAM type: NNNNGHTT; PAM sequence: TTGAGTTT
gacgtatgtgtgtgtagcct

SEQ ID NO: 51037 - DNA, 20 bp, Artificial Sequence
  Description of Artificial Sequence: Synthetic oligonucleotide
  Target: LAMA2; (+) strand; PAM type: NNNNGHTT; PAM sequence: CTAGGCTT
ttagagagaaagtagaatga

SEQ ID NO: 51038 - DNA, 20 bp, Artificial Sequence
  Description of Artificial Sequence: Synthetic oligonucleotide
  Target: LAMA2; (+) strand; PAM type: NNNNGHTT; PAM sequence: TTGGGTTT
gaatgactaggcttctgtta

SEQ ID NO: 51039 - DNA, 20 bp, Artificial Sequence
  Description of Artificial Sequence: Synthetic oligonucleotide
  Target: LAMA2; (+) strand; PAM type: NNNNGHTT; PAM sequence: TATGGATT
gggaatctagaaaataaaac

SEQ ID NO: 51040 - DNA, 20 bp, Artificial Sequence
  Description of Artificial Sequence: Synthetic oligonucleotide
  Target: LAMA2; (+) strand; PAM type: NNNNGHTT; PAM sequence: GTTGGATT
atcacaagtaaaaaaattca

SEQ ID NO: 51041 - DNA, 20 bp, Artificial Sequence
  Description of Artificial Sequence: Synthetic oligonucleotide
  Target: LAMA2; (+) strand; PAM type: NNNNGHTT; PAM sequence: GAGTGCTT
tttatttaaaatcagcccag

SEQ ID NO: 51042 - DNA, 20 bp, Artificial Sequence
  Description of Artificial Sequence: Synthetic oligonucleotide
  Target: LAMA2; (+) strand; PAM type: NNNNGHTT; PAM sequence: CTAGGTTT
gcccaggagtgcttattttt

SEQ ID NO: 51043 - DNA, 20 bp, Artificial Sequence
  Description of Artificial Sequence: Synthetic oligonucleotide
  Target: LAMA2; (+) strand; PAM type: NNNNGHTT; PAM sequence: AATAGCTT
aaatctgcaattcttctctg

SEQ ID NO: 51044 - DNA, 20 bp, Artificial Sequence
  Description of Artificial Sequence: Synthetic oligonucleotide
  Target: LAMA2; (+) strand; PAM type: NNNNGHTT; PAM sequence: AAATGTTT
attctatcaccaaagctaca

SEQ ID NO: 51045 - DNA, 20 bp, Artificial Sequence
  Description of Artificial Sequence: Synthetic oligonucleotide
  Target: LAMA2; (+) strand; PAM type: NNNNGHTT; PAM sequence: TAGCGCTT
aaaatgcagagaatcaaaat

SEQ ID NO: 51046 - DNA, 20 bp, Artificial Sequence
  Description of Artificial Sequence: Synthetic oligonucleotide
  Target: LAMA2; (+) strand; PAM type: NNNNGHTT; PAM sequence: TCTTGCTT
tttctcaccatacatgaata

SEQ ID NO: 51047 - DNA, 20 bp, Artificial Sequence
  Description of Artificial Sequence: Synthetic oligonucleotide
  Target: LAMA2; (+) strand; PAM type: NNNNGHTT; PAM sequence: ACTGGCTT
gatatcacagtcataatcag

SEQ ID NO: 51048 - DNA, 20 bp, Artificial Sequence
  Description of Artificial Sequence: Synthetic oligonucleotide
  Target: LAMA2; (+) strand; PAM type: NNNNGHTT; PAM sequence: GTATGCTT
gactggctttatttcagaga

SEQ ID NO: 51049 - DNA, 20 bp, Artificial Sequence
  Description of Artificial Sequence: Synthetic oligonucleotide
  Target: LAMA2; (+) strand; PAM type: NNNNGHTT; PAM sequence: CAAAGATT
tatgcttttggtagcctatc

SEQ ID NO: 51050 - DNA, 20 bp, Artificial Sequence
  Description of Artificial Sequence: Synthetic oligonucleotide
  Target: LAMA2; (+) strand; PAM type: NNNNGHTT; PAM sequence: TTGTGATT
agtattataagaaagatgaa

SEQ ID NO: 51051 - DNA, 20 bp, Artificial Sequence
  Description of Artificial Sequence: Synthetic oligonucleotide
  Target: LAMA2; (+) strand; PAM type: NNNNGHTT; PAM sequence: GTGGGCTT
ttacttggaaagtatatttt

SEQ ID NO: 51052 - DNA, 20 bp, Artificial Sequence
  Description of Artificial Sequence: Synthetic oligonucleotide
  Target: LAMA2; (+) strand; PAM type: NNNNGHTT; PAM sequence: TGATGTTT
agtgactgaactagacatat

SEQ ID NO: 51053 - DNA, 20 bp, Artificial Sequence
  Description of Artificial Sequence: Synthetic oligonucleotide
  Target: LAMA2; (+) strand; PAM type: NNNNGHTT; PAM sequence: CCGTGCTT
gacatattgatgttttagag

SEQ ID NO: 51054 - DNA, 20 bp, Artificial Sequence
  Description of Artificial Sequence: Synthetic oligonucleotide
  Target: LAMA2; (+) strand; PAM type: NNNNGHTT; PAM sequence: TTATGCTT
ccgtgctttgctggaatatt

SEQ ID NO: 51055 - DNA, 20 bp, Artificial Sequence
  Description of Artificial Sequence: Synthetic oligonucleotide
  Target: LAMA2; (+) strand; PAM type: NNNNGHTT; PAM sequence: CTTTGTTT
ctttgctggaatattttatg

SEQ ID NO: 51056 - DNA, 20 bp, Artificial Sequence
  Description of Artificial Sequence: Synthetic oligonucleotide
  Target: LAMA2; (+) strand; PAM type: NNNNGHTT; PAM sequence: TTTGGCTT
tttttcagtgatgtcaggtc

SEQ ID NO: 51057 - DNA, 20 bp, Artificial Sequence
  Description of Artificial Sequence: Synthetic oligonucleotide
  Target: LAMA2; (+) strand; PAM type: NNNNGHTT; PAM sequence: ATGTGCTT
cagacactttaaacaatgtt

SEQ ID NO: 51058 - DNA, 20 bp, Artificial Sequence
  Description of Artificial Sequence: Synthetic oligonucleotide
  Target: LAMA2; (+) strand; PAM type: NNNNGHTT; PAM sequence: AGAAGTTT
agtataatctgtagtataac

SEQ ID NO: 51059 - DNA, 20 bp, Artificial Sequence
  Description of Artificial Sequence: Synthetic oligonucleotide
  Target: LAMA2; (+) strand; PAM type: NNNNGHTT; PAM sequence: GGTGGTTT
ataacattcttccccagtta

SEQ ID NO: 51060 - DNA, 20 bp, Artificial Sequence
  Description of Artificial Sequence: Synthetic oligonucleotide
  Target: LAMA2; (+) strand; PAM type: NNNNGHTT; PAM sequence: TTAAGTTT
ttcttccccagttaggtggt

SEQ ID NO: 51061 - DNA, 20 bp, Artificial Sequence
  Description of Artificial Sequence: Synthetic oligonucleotide
  Target: LAMA2; (+) strand; PAM type: NNNNGHTT; PAM sequence: AGAAGTTT
gcacaaccgggtataaaatg

SEQ ID NO: 51062 - DNA, 20 bp, Artificial Sequence
  Description of Artificial Sequence: Synthetic oligonucleotide
  Target: LAMA2; (+) strand; PAM type: NNNNGHTT; PAM sequence: CCCAGTTT
tattaactgcctcattcatt

SEQ ID NO: 51063 - DNA, 20 bp, Artificial Sequence
  Description of Artificial Sequence: Synthetic oligonucleotide
  Target: LAMA2; (+) strand; PAM type: NNNNGHTT; PAM sequence: AAAGGTTT
tacccactattaattactgt

SEQ ID NO: 51064 - DNA, 20 bp, Artificial Sequence
  Description of Artificial Sequence: Synthetic oligonucleotide
  Target: LAMA2; (+) strand; PAM type: NNNNGHTT; PAM sequence: AAATGCTT
ccaccagcccctaccatgcc

SEQ ID NO: 51065 - DNA, 20 bp, Artificial Sequence
  Description of Artificial Sequence: Synthetic oligonucleotide
  Target: LAMA2; (+) strand; PAM type: NNNNGHTT; PAM sequence: TCTTGCTT
gtcagcatatatatggtgca

SEQ ID NO: 51066 - DNA, 20 bp, Artificial Sequence
  Description of Artificial Sequence: Synthetic oligonucleotide
  Target: LAMA2; (+) strand; PAM type: NNNNGHTT; PAM sequence: TAAGGTTT
ttattttcatggaaaggtct

SEQ ID NO: 51067 - DNA, 20 bp, Artificial Sequence
  Description of Artificial Sequence: Synthetic oligonucleotide
  Target: LAMA2; (+) strand; PAM type: NNNNGHTT; PAM sequence: TATAGATT
tccgctcatctacttctttt

SEQ ID NO: 51068 - DNA, 20 bp, Artificial Sequence
  Description of Artificial Sequence: Synthetic oligonucleotide
  Target: LAMA2; (+) strand; PAM type: NNNNGHTT; PAM sequence: TGTTGCTT
aataagaaatgacatcttac

SEQ ID NO: 51069 - DNA, 20 bp, Artificial Sequence
  Description of Artificial Sequence: Synthetic oligonucleotide
  Target: LAMA2; (+) strand; PAM type: NNNNGHTT; PAM sequence: CTTAGTTT
gaaatgacatcttactgttg

SEQ ID NO: 51070 - DNA, 20 bp, Artificial Sequence
  Description of Artificial Sequence: Synthetic oligonucleotide
  Target: LAMA2; (+) strand; PAM type: NNNNGHTT; PAM sequence: GAGTGCTT
cagttctttatgataatctt

SEQ ID NO: 51071 - DNA, 20 bp, Artificial Sequence
  Description of Artificial Sequence: Synthetic oligonucleotide
  Target: LAMA2; (+) strand; PAM type: NNNNGHTT; PAM sequence: AAATGATT
gtgctttttacgaatttcat

SEQ ID NO: 51072 - DNA, 20 bp, Artificial Sequence
  Description of Artificial Sequence: Synthetic oligonucleotide
  Target: LAMA2; (+) strand; PAM type: NNNNGHTT; PAM sequence: GTATGTTT
cgaatttcataaatgattat

SEQ ID NO: 51073 - DNA, 20 bp, Artificial Sequence
  Description of Artificial Sequence: Synthetic oligonucleotide
  Target: LAMA2; (+) strand; PAM type: NNNNGHTT; PAM sequence: GCCAGTTT
aacactttgcatatttgcct

SEQ ID NO: 51074 - DNA, 20 bp, Artificial Sequence
  Description of Artificial Sequence: Synthetic oligonucleotide
  Target: LAMA2; (+) strand; PAM type: NNNNGHTT; PAM sequence: TGTTGCTT
aattacaacttggttatata

SEQ ID NO: 51075 - DNA, 20 bp, Artificial Sequence
  Description of Artificial Sequence: Synthetic oligonucleotide
  Target: LAMA2; (+) strand; PAM type: NNNNGHTT; PAM sequence: TGAGGCTT
ggttatatatgttgcttagg

SEQ ID NO: 51076 - DNA, 20 bp, Artificial Sequence
  Description of Artificial Sequence: Synthetic oligonucleotide
  Target: LAMA2; (+) strand; PAM type: NNNNGHTT; PAM sequence: CTCTGATT
atgttgcttaggtgaggctt

SEQ ID NO: 51077 - DNA, 20 bp, Artificial Sequence
  Description of Artificial Sequence: Synthetic oligonucleotide
  Target: LAMA2; (+) strand; PAM type: NNNNGHTT; PAM sequence: CCTAGTTT
cccaaaatgctctactaatc

SEQ ID NO: 51078 - DNA, 20 bp, Artificial Sequence
  Description of Artificial Sequence: Synthetic oligonucleotide
  Target: LAMA2; (+) strand; PAM type: NNNNGHTT; PAM sequence: CATTGTTT
tggtagaatgcagtagttag

SEQ ID NO: 51079 - DNA, 20 bp, Artificial Sequence
  Description of Artificial Sequence: Synthetic oligonucleotide
  Target: LAMA2; (+) strand; PAM type: NNNNGHTT; PAM sequence: TGTGGATT
ttgtttatggaatgggacta

SEQ ID NO: 51080 - DNA, 20 bp, Artificial Sequence
  Description of Artificial Sequence: Synthetic oligonucleotide
  Target: LAMA2; (+) strand; PAM type: NNNNGHTT; PAM sequence: GCAAGCTT
cactgccatttattaaccat

SEQ ID NO: 51081 - DNA, 20 bp, Artificial Sequence
  Description of Artificial Sequence: Synthetic oligonucleotide
  Target: LAMA2; (+) strand; PAM type: NNNNGHTT; PAM sequence: TAAGGATT
atcatacatcaatgttattg

SEQ ID NO: 51082 - DNA, 20 bp, Artificial Sequence
  Description of Artificial Sequence: Synthetic oligonucleotide
  Target: LAMA2; (+) strand; PAM type: NNNNGHTT; PAM sequence: CAATGCTT
atgcgtgtaacatacacatt

SEQ ID NO: 51083 - DNA, 20 bp, Artificial Sequence
  Description of Artificial Sequence: Synthetic oligonucleotide
  Target: LAMA2; (+) strand; PAM type: NNNNGHTT; PAM sequence: ATAGGATT
taaataatattgtgggaagt

SEQ ID NO: 51084 - DNA, 20 bp, Artificial Sequence
  Description of Artificial Sequence: Synthetic oligonucleotide
  Target: LAMA2; (+) strand; PAM type: NNNNGHTT; PAM sequence: TTTTGTTT
gaagtataggatttttcata

SEQ ID NO: 51085 - DNA, 20 bp, Artificial Sequence
  Description of Artificial Sequence: Synthetic oligonucleotide
  Target: LAMA2; (+) strand; PAM type: NNNNGHTT; PAM sequence: TGCAGTTT
tttcagtcttaagatatatt

SEQ ID NO: 51086 - DNA, 20 bp, Artificial Sequence
  Description of Artificial Sequence: Synthetic oligonucleotide
  Target: LAMA2; (+) strand; PAM type: NNNNGHTT; PAM sequence: GTAAGATT
gcagtttaatgcatacctga

SEQ ID NO: 51087 - DNA, 20 bp, Artificial Sequence
  Description of Artificial Sequence: Synthetic oligonucleotide
  Target: LAMA2; (+) strand; PAM type: NNNNGHTT; PAM sequence: AACAGATT
aagatttctaaacttatatc

SEQ ID NO: 51088 - DNA, 20 bp, Artificial Sequence
  Description of Artificial Sequence: Synthetic oligonucleotide
  Target: LAMA2; (+) strand; PAM type: NNNNGHTT; PAM sequence: TAATGATT
atctttattttctttcccct

SEQ ID NO: 51089 - DNA, 20 bp, Artificial Sequence
  Description of Artificial Sequence: Synthetic oligonucleotide
  Target: LAMA2; (+) strand; PAM type: NNNNGHTT; PAM sequence: AACTGCTT
tattgttgtactcgaattta

SEQ ID NO: 51090 - DNA, 20 bp, Artificial Sequence
  Description of Artificial Sequence: Synthetic oligonucleotide
  Target: LAMA2; (+) strand; PAM type: NNNNGHTT; PAM sequence: TAAAGTTT
tattacaatataaattaatc

SEQ ID NO: 51091 - DNA, 20 bp, Artificial Sequence
  Description of Artificial Sequence: Synthetic oligonucleotide
  Target: LAMA2; (+) strand; PAM type: NNNNGHTT; PAM sequence: TATTGTTT
ttggacccaatttgtaaaaa

SEQ ID NO: 51092 - DNA, 20 bp, Artificial Sequence
  Description of Artificial Sequence: Synthetic oligonucleotide
  Target: LAMA2; (+) strand; PAM type: NNNNGHTT; PAM sequence: TGTTGTTT
attatcagatatgtgctaaa

SEQ ID NO: 51093 - DNA, 20 bp, Artificial Sequence
  Description of Artificial Sequence: Synthetic oligonucleotide
  Target: LAMA2; (+) strand; PAM type: NNNNGHTT; PAM sequence: GGAGGATT
aatattattatactgaagtt

SEQ ID NO: 51094 - DNA, 20 bp, Artificial Sequence
  Description of Artificial Sequence: Synthetic oligonucleotide
  Target: LAMA2; (+) strand; PAM type: NNNNGHTT; PAM sequence: CTGAGATT
attctgctaaacaatcatat

SEQ ID NO: 51095 - DNA, 20 bp, Artificial Sequence
  Description of Artificial Sequence: Synthetic oligonucleotide
  Target: LAMA2; (+) strand; PAM type: NNNNGHTT; PAM sequence: CAATGATT
gagattttgaaaatctaatc

SEQ ID NO: 51096 - DNA, 20 bp, Artificial Sequence
  Description of Artificial Sequence: Synthetic oligonucleotide
  Target: LAMA2; (+) strand; PAM type: NNNNGHTT; PAM sequence: AAAAGTTT
caatgattcattttggtaat

SEQ ID NO: 51097 - DNA, 20 bp, Artificial Sequence
  Description of Artificial Sequence: Synthetic oligonucleotide
  Target: LAMA2; (+) strand; PAM type: NNNNGHTT; PAM sequence: GGAGGTTT
gaataaaagactaattcttt

SEQ ID NO: 51098 - DNA, 20 bp, Artificial Sequence
  Description of Artificial Sequence: Synthetic oligonucleotide
  Target: LAMA2; (+) strand; PAM type: NNNNGHTT; PAM sequence: ATATGATT
taaaaacacatatttttaaa

SEQ ID NO: 51099 - DNA, 20 bp, Artificial Sequence
  Description of Artificial Sequence: Synthetic oligonucleotide
  Target: LAMA2; (+) strand; PAM type: NNNNGHTT; PAM sequence: TCTTGCTT
ccaataaattaaatacattt

SEQ ID NO: 51100 - DNA, 20 bp, Artificial Sequence
  Description of Artificial Sequence: Synthetic oligonucleotide
  Target: LAMA2; (+) strand; PAM type: NNNNGHTT; PAM sequence: TTTTGTTT
aaaacttatttaatcctttt

SEQ ID NO: 51101 - DNA, 20 bp, Artificial Sequence
  Description of Artificial Sequence: Synthetic oligonucleotide
  Target: LAMA2; (+) strand; PAM type: NNNNGHTT; PAM sequence: AATGGCTT
cagaaaatgaagaccatcta

SEQ ID NO: 51102 - DNA, 20 bp, Artificial Sequence
  Description of Artificial Sequence: Synthetic oligonucleotide
  Target: LAMA2; (+) strand; PAM type: NNNNGHTT; PAM sequence: TGAAGTTT
accaactgtgtcagttgacc

SEQ ID NO: 51103 - DNA, 20 bp, Artificial Sequence
  Description of Artificial Sequence: Synthetic oligonucleotide
  Target: LAMA2; (+) strand; PAM type: NNNNGHTT; PAM sequence: CTAAGATT
ttaacttttaccattttttt

SEQ ID NO: 51104 - DNA, 20 bp, Artificial Sequence
  Description of Artificial Sequence: Synthetic oligonucleotide
  Target: LAMA2; (+) strand; PAM type: NNNNGHTT; PAM sequence: TACTGTTT
actattatctggaaattaga

SEQ ID NO: 51105 - DNA, 20 bp, Artificial Sequence
  Description of Artificial Sequence: Synthetic oligonucleotide
  Target: LAMA2; (+) strand; PAM type: NNNNGHTT; PAM sequence: AGGGGATT
actcatccttcagtattggc

SEQ ID NO: 51106 - DNA, 20 bp, Artificial Sequence
  Description of Artificial Sequence: Synthetic oligonucleotide
  Target: LAMA2; (+) strand; PAM type: NNNNGHTT; PAM sequence: TATTGTTT
ctatgtaaattcttacagtg

SEQ ID NO: 51107 - DNA, 20 bp, Artificial Sequence
  Description of Artificial Sequence: Synthetic oligonucleotide
  Target: LAMA2; (+) strand; PAM type: NNNNGHTT; PAM sequence: AAAAGTTT
ttatgaaataatgacaagaa

SEQ ID NO: 51108 - DNA, 20 bp, Artificial Sequence
  Description of Artificial Sequence: Synthetic oligonucleotide
  Target: LAMA2; (+) strand; PAM type: NNNNGHTT; PAM sequence: CTGTGTTT
agggacaactgtattgtctt

SEQ ID NO: 51109 - DNA, 20 bp, Artificial Sequence
  Description of Artificial Sequence: Synthetic oligonucleotide
  Target: LAMA2; (+) strand; PAM type: NNNNGHTT; PAM sequence: CACAGTTT
ctgatgtaccaccacaaaga

SEQ ID NO: 51110 - DNA, 20 bp, Artificial Sequence
  Description of Artificial Sequence: Synthetic oligonucleotide
  Target: LAMA2; (+) strand; PAM type: NNNNGHTT; PAM sequence: CAAAGATT
aaagcatgatataataacaa

SEQ ID NO: 51111 - DNA, 20 bp, Artificial Sequence
  Description of Artificial Sequence: Synthetic oligonucleotide
  Target: LAMA2; (+) strand; PAM type: NNNNGHTT; PAM sequence: ATTTGCTT
ataccaattggagcaaaaac

SEQ ID NO: 51112 - DNA, 20 bp, Artificial Sequence
  Description of Artificial Sequence: Synthetic oligonucleotide
  Target: LAMA2; (+) strand; PAM type: NNNNGHTT; PAM sequence: ATTTGCTT
ggagcaaaaacatttgcttc

SEQ ID NO: 51113 - DNA, 20 bp, Artificial Sequence
  Description of Artificial Sequence: Synthetic oligonucleotide
  Target: LAMA2; (+) strand; PAM type: NNNNGHTT; PAM sequence: CACAGTTT
cacagaggaaacttaaaccc

SEQ ID NO: 51114 - DNA, 20 bp, Artificial Sequence
  Description of Artificial Sequence: Synthetic oligonucleotide
  Target: LAMA2; (+) strand; PAM type: NNNNGHTT; PAM sequence: GTTTGATT
gaggaaacttaaaccccaca

SEQ ID NO: 51115 - DNA, 20 bp, Artificial Sequence
  Description of Artificial Sequence: Synthetic oligonucleotide
  Target: LAMA2; (+) strand; PAM type: NNNNGHTT; PAM sequence: GGTGGTTT
acagttaatattaaaatctc

SEQ ID NO: 51116 - DNA, 20 bp, Artificial Sequence
  Description of Artificial Sequence: Synthetic oligonucleotide
  Target: LAMA2; (+) strand; PAM type: NNNNGHTT; PAM sequence: TAACGTTT
ctcggtggtttttacttttt

SEQ ID NO: 51117 - DNA, 20 bp, Artificial Sequence
  Description of Artificial Sequence: Synthetic oligonucleotide
  Target: LAMA2; (+) strand; PAM type: NNNNGHTT; PAM sequence: TTCAGATT
tttaaaaacctgagtaactt

SEQ ID NO: 51118 - DNA, 20 bp, Artificial Sequence
  Description of Artificial Sequence: Synthetic oligonucleotide
  Target: LAMA2; (+) strand; PAM type: NNNNGHTT; PAM sequence: AAATGTTT
gcatggcctaacatacctga

SEQ ID NO: 51119 - DNA, 20 bp, Artificial Sequence
  Description of Artificial Sequence: Synthetic oligonucleotide
  Target: LAMA2; (+) strand; PAM type: NNNNGHTT; PAM sequence: GTTAGTTT
ctatcctaaaatgaaaatac

SEQ ID NO: 51120 - DNA, 20 bp, Artificial Sequence
  Description of Artificial Sequence: Synthetic oligonucleotide
  Target: LAMA2; (+) strand; PAM type: NNNNGHTT; PAM sequence: CCCTGCTT
aacccccaccccaacccctg

SEQ ID NO: 51121 - DNA, 20 bp, Artificial Sequence
  Description of Artificial Sequence: Synthetic oligonucleotide
  Target: LAMA2; (+) strand; PAM type: NNNNGHTT; PAM sequence: TGCAGATT
cccctgccctgctttggaaa

SEQ ID NO: 51122 - DNA, 20 bp, Artificial Sequence
  Description of Artificial Sequence: Synthetic oligonucleotide
  Target: LAMA2; (+) strand; PAM type: NNNNGHTT; PAM sequence: CCTCGTTT
aatgcagattaaatcttaag

SEQ ID NO: 51123 - DNA, 20 bp, Artificial Sequence
  Description of Artificial Sequence: Synthetic oligonucleotide
  Target: LAMA2; (+) strand; PAM type: NNNNGHTT; PAM sequence: ATTTGCTT
aatttaatttacctaaaaaa

SEQ ID NO: 51124 - DNA, 20 bp, Artificial Sequence
  Description of Artificial Sequence: Synthetic oligonucleotide
  Target: LAMA2; (+) strand; PAM type: NNNNGHTT; PAM sequence: CCTCGCTT
ccgaggtcagccagccacag

SEQ ID NO: 51125 - DNA, 20 bp, Artificial Sequence
  Description of Artificial Sequence: Synthetic oligonucleotide
  Target: LAMA2; (+) strand; PAM type: NNNNGHTT; PAM sequence: CATGGATT
cacagcctcgctttgtcaag

SEQ ID NO: 51126 - DNA, 20 bp, Artificial Sequence
  Description of Artificial Sequence: Synthetic oligonucleotide
  Target: LAMA2; (+) strand; PAM type: NNNNGHTT; PAM sequence: CTTTGTTT
taagccactaactccacacc

SEQ ID NO: 51127 - DNA, 20 bp, Artificial Sequence
  Description of Artificial Sequence: Synthetic oligonucleotide
  Target: LAMA2; (+) strand; PAM type: NNNNGHTT; PAM sequence: TTTTGTTT
cactaactccacaccctttg

SEQ ID NO: 51128 - DNA, 20 bp, Artificial Sequence
  Description of Artificial Sequence: Synthetic oligonucleotide
  Target: LAMA2; (+) strand; PAM type: NNNNGHTT; PAM sequence: CACAGATT
cacagctaaagatgtactgg

SEQ ID NO: 51129 - DNA, 20 bp, Artificial Sequence
  Description of Artificial Sequence: Synthetic oligonucleotide
  Target: LAMA2; (+) strand; PAM type: NNNNGHTT; PAM sequence: CATAGATT
gtagtctgccttccttcttt

SEQ ID NO: 51130 - DNA, 20 bp, Artificial Sequence
  Description of Artificial Sequence: Synthetic oligonucleotide
  Target: LAMA2; (+) strand; PAM type: NNNNGHTT; PAM sequence: CGGTGCTT
caagtcttctagctctgccc

SEQ ID NO: 51131 - DNA, 20 bp, Artificial Sequence
  Description of Artificial Sequence: Synthetic oligonucleotide
  Target: LAMA2; (+) strand; PAM type: NNNNGHTT; PAM sequence: AAGAGATT
ctgaaatttttccagttgag

SEQ ID NO: 51132 - DNA, 20 bp, Artificial Sequence
  Description of Artificial Sequence: Synthetic oligonucleotide
  Target: LAMA2; (+) strand; PAM type: NNNNGHTT; PAM sequence: TTTAGATT
aaaatcttgatattttatta

SEQ ID NO: 51133 - DNA, 20 bp, Artificial Sequence
  Description of Artificial Sequence: Synthetic oligonucleotide
  Target: LAMA2; (+) strand; PAM type: NNNNGHTT; PAM sequence: TCTAGTTT
aaataaaaataaagcattta

SEQ ID NO: 51134 - DNA, 20 bp, Artificial Sequence
  Description of Artificial Sequence: Synthetic oligonucleotide
  Target: LAMA2; (+) strand; PAM type: NNNNGHTT; PAM sequence: TAAGGATT
tatataaaattatattgact

SEQ ID NO: 51135 - DNA, 20 bp, Artificial Sequence
  Description of Artificial Sequence: Synthetic oligonucleotide
  Target: LAMA2; (+) strand; PAM type: NNNNGHTT; PAM sequence: TTAAGATT
agttaaatatagtcaaaata

SEQ ID NO: 51136 - DNA, 20 bp, Artificial Sequence
  Description of Artificial Sequence: Synthetic oligonucleotide
  Target: LAMA2; (+) strand; PAM type: NNNNGHTT; PAM sequence: GGCAGATT
cactgcactccagcctgggt

SEQ ID NO: 51137 - DNA, 20 bp, Artificial Sequence
  Description of Artificial Sequence: Synthetic oligonucleotide
  Target: LAMA2; (+) strand; PAM type: NNNNGHTT; PAM sequence: CATGGTTT
ttatcttggtatccttgtta

SEQ ID NO: 51138 - DNA, 20 bp, Artificial Sequence
  Description of Artificial Sequence: Synthetic oligonucleotide
  Target: LAMA2; (+) strand; PAM type: NNNNGHTT; PAM sequence: AGATGCTT
ttacatggtttcaccaaagg

SEQ ID NO: 51139 - DNA, 20 bp, Artificial Sequence
  Description of Artificial Sequence: Synthetic oligonucleotide
  Target: LAMA2; (+) strand; PAM type: NNNNGHTT; PAM sequence: CTGTGCTT
aaaggagatgcttgggtaat

SEQ ID NO: 51140 - DNA, 20 bp, Artificial Sequence
  Description of Artificial Sequence: Synthetic oligonucleotide
  Target: LAMA2; (+) strand; PAM type: NNNNGHTT; PAM sequence: TGCTGTTT
tatatgccataaaattcaaa

SEQ ID NO: 51141 - DNA, 20 bp, Artificial Sequence
  Description of Artificial Sequence: Synthetic oligonucleotide
  Target: LAMA2; (+) strand; PAM type: NNNNGHTT; PAM sequence: GCCTGATT
ctgtttgagtggggaatgga

SEQ ID NO: 51142 - DNA, 20 bp, Artificial Sequence
  Description of Artificial Sequence: Synthetic oligonucleotide
  Target: LAMA2; (+) strand; PAM type: NNNNGHTT; PAM sequence: AATGGCTT
ttttttaatgtaagcccaga

SEQ ID NO: 51143 - DNA, 20 bp, Artificial Sequence
  Description of Artificial Sequence: Synthetic oligonucleotide
  Target: LAMA2; (+) strand; PAM type: NNNNGHTT; PAM sequence: CAAAGTTT
aaatggcttctcttgtagct

SEQ ID NO: 51144 - DNA, 20 bp, Artificial Sequence
  Description of Artificial Sequence: Synthetic oligonucleotide
  Target: LAMA2; (+) strand; PAM type: NNNNGHTT; PAM sequence: TTATGATT
aaagtttacataataacttc

SEQ ID NO: 51145 - DNA, 20 bp, Artificial Sequence
  Description of Artificial Sequence: Synthetic oligonucleotide
  Target: LAMA2; (+) strand; PAM type: NNNNGHTT; PAM sequence: TGCTGCTT
taatcaaatattactatctc

SEQ ID NO: 51146 - DNA, 20 bp, Artificial Sequence
  Description of Artificial Sequence: Synthetic oligonucleotide
  Target: LAMA2; (+) strand; PAM type: NNNNGHTT; PAM sequence: GCAGGTTT
ttaagttcaggcgtataagt

SEQ ID NO: 51147 - DNA, 20 bp, Artificial Sequence
  Description of Artificial Sequence: Synthetic oligonucleotide
  Target: LAMA2; (+) strand; PAM type: NNNNGHTT; PAM sequence: GGGGGTTT
cataggtaaacctgtgtcat

SEQ ID NO: 51148 - DNA, 20 bp, Artificial Sequence
  Description of Artificial Sequence: Synthetic oligonucleotide
  Target: LAMA2; (+) strand; PAM type: NNNNGHTT; PAM sequence: GTTTGTTT
ggtaaacctgtgtcatgggg

SEQ ID NO: 51149 - DNA, 20 bp, Artificial Sequence
  Description of Artificial Sequence: Synthetic oligonucleotide
  Target: LAMA2; (+) strand; PAM type: NNNNGHTT; PAM sequence: TTTAGATT
ccaaaagaattccattctat

SEQ ID NO: 51150 - DNA, 20 bp, Artificial Sequence
  Description of Artificial Sequence: Synthetic oligonucleotide
  Target: LAMA2; (+) strand; PAM type: NNNNGHTT; PAM sequence: GATTGATT
aagaattccattctatttta

SEQ ID NO: 51151 - DNA, 20 bp, Artificial Sequence
  Description of Artificial Sequence: Synthetic oligonucleotide
  Target: LAMA2; (+) strand; PAM type: NNNNGHTT; PAM sequence: CTCTGTTT
gtagtggccttttgtcatat

SEQ ID NO: 51152 - DNA, 20 bp, Artificial Sequence
  Description of Artificial Sequence: Synthetic oligonucleotide
  Target: LAMA2; (+) strand; PAM type: NNNNGHTT; PAM sequence: GTCTGTTT
ataaatattaattaaattgg

SEQ ID NO: 51153 - DNA, 20 bp, Artificial Sequence
  Description of Artificial Sequence: Synthetic oligonucleotide
  Target: LAMA2; (+) strand; PAM type: NNNNGHTT; PAM sequence: AATTGCTT
gtgtacttttatttgataac

SEQ ID NO: 51154 - DNA, 20 bp, Artificial Sequence
  Description of Artificial Sequence: Synthetic oligonucleotide
  Target: LAMA2; (+) strand; PAM type: NNNNGHTT; PAM sequence: TTTTGTTT
ctcatgaatttataattttt

SEQ ID NO: 51155 - DNA, 20 bp, Artificial Sequence
  Description of Artificial Sequence: Synthetic oligonucleotide
  Target: LAMA2; (+) strand; PAM type: NNNNGHTT; PAM sequence: TTTTGCTT
gaatttataatttttttttg

SEQ ID NO: 51156 - DNA, 20 bp, Artificial Sequence
  Description of Artificial Sequence: Synthetic oligonucleotide
  Target: LAMA2; (+) strand; PAM type: NNNNGHTT; PAM sequence: ATATGTTT
gcctgcagaaatcagtacgt

SEQ ID NO: 51157 - DNA, 20 bp, Artificial Sequence
  Description of Artificial Sequence: Synthetic oligonucleotide
  Target: LAMA2; (+) strand; PAM type: NNNNGHTT; PAM sequence: TCATGCTT
tatataccttttagtaacgc

SEQ ID NO: 51158 - DNA, 20 bp, Artificial Sequence
  Description of Artificial Sequence: Synthetic oligonucleotide
  Target: LAMA2; (+) strand; PAM type: NNNNGHTT; PAM sequence: AAAAGTTT
atgcttcattgcctattgca

SEQ ID NO: 51159 - DNA, 20 bp, Artificial Sequence
  Description of Artificial Sequence: Synthetic oligonucleotide
  Target: LAMA2; (+) strand; PAM type: NNNNGHTT; PAM sequence: TTCAGCTT
cattgcctattgcaaaaagt

SEQ ID NO: 51160 - DNA, 20 bp, Artificial Sequence
  Description of Artificial Sequence: Synthetic oligonucleotide
  Target: LAMA2; (+) strand; PAM type: NNNNGHTT; PAM sequence: TTTGGTTT
cagctttgcatgtactatat

SEQ ID NO: 51161 - DNA, 20 bp, Artificial Sequence
  Description of Artificial Sequence: Synthetic oligonucleotide
  Target: LAMA2; (+) strand; PAM type: NNNNGHTT; PAM sequence: TTTTGCTT
ttgcatgtactatattttgg

SEQ ID NO: 51162 - DNA, 20 bp, Artificial Sequence
  Description of Artificial Sequence: Synthetic oligonucleotide
  Target: LAMA2; (+) strand; PAM type: NNNNGHTT; PAM sequence: AAATGTTT
atgtggataaaggtgatata

SEQ ID NO: 51163 - DNA, 20 bp, Artificial Sequence
  Description of Artificial Sequence: Synthetic oligonucleotide
  Target: LAMA2; (+) strand; PAM type: NNNNGHTT; PAM sequence: AAAAGTTT
atgtttttaatagtgttata

SEQ ID NO: 51164 - DNA, 20 bp, Artificial Sequence
  Description of Artificial Sequence: Synthetic oligonucleotide
  Target: LAMA2; (+) strand; PAM type: NNNNGHTT; PAM sequence: AGAAGTTT
tgggaggatcacttgaggcc

SEQ ID NO: 51165 - DNA, 20 bp, Artificial Sequence
  Description of Artificial Sequence: Synthetic oligonucleotide
  Target: LAMA2; (+) strand; PAM type: NNNNGHTT; PAM sequence: ACTAGATT
tgaatttctctatagaatta

SEQ ID NO: 51166 - DNA, 20 bp, Artificial Sequence
  Description of Artificial Sequence: Synthetic oligonucleotide
  Target: LAMA2; (+) strand; PAM type: NNNNGHTT; PAM sequence: TGCTGTTT
ctatagaattaactagatta

SEQ ID NO: 51167 - DNA, 20 bp, Artificial Sequence
  Description of Artificial Sequence: Synthetic oligonucleotide
  Target: LAMA2; (+) strand; PAM type: NNNNGHTT; PAM sequence: AGAGGATT
acacgaatgacttaattgca

SEQ ID NO: 51168 - DNA, 20 bp, Artificial Sequence
  Description of Artificial Sequence: Synthetic oligonucleotide
  Target: LAMA2; (+) strand; PAM type: NNNNGHTT; PAM sequence: TGTTGTTT
atagataaggtctacactgt

SEQ ID NO: 51169 - DNA, 20 bp, Artificial Sequence
  Description of Artificial Sequence: Synthetic oligonucleotide
  Target: LAMA2; (+) strand; PAM type: NNNNGHTT; PAM sequence: CACAGTTT
atgttctctcttaaacatcc

SEQ ID NO: 51170 - DNA, 20 bp, Artificial Sequence
  Description of Artificial Sequence: Synthetic oligonucleotide
  Target: LAMA2; (+) strand; PAM type: NNNNGHTT; PAM sequence: TATAGATT
aaaaggtgactccttaggaa

SEQ ID NO: 51171 - DNA, 20 bp, Artificial Sequence
  Description of Artificial Sequence: Synthetic oligonucleotide
  Target: LAMA2; (+) strand; PAM type: NNNNGHTT; PAM sequence: AAGTGATT
aggaatatagattaaaaatt

SEQ ID NO: 51172 - DNA, 20 bp, Artificial Sequence
  Description of Artificial Sequence: Synthetic oligonucleotide
  Target: LAMA2; (+) strand; PAM type: NNNNGHTT; PAM sequence: TCAAGTTT
gattaaaaattaagtgattg

SEQ ID NO: 51173 - DNA, 20 bp, Artificial Sequence
  Description of Artificial Sequence: Synthetic oligonucleotide
  Target: LAMA2; (+) strand; PAM type: NNNNGHTT; PAM sequence: CTCAGTTT
ctaaatctaaatcattttgc

SEQ ID NO: 51174 - DNA, 20 bp, Artificial Sequence
  Description of Artificial Sequence: Synthetic oligonucleotide
  Target: LAMA2; (+) strand; PAM type: NNNNGHTT; PAM sequence: AACGGTTT
aaggaagggaaaaatgaaca

SEQ ID NO: 51175 - DNA, 20 bp, Artificial Sequence
  Description of Artificial Sequence: Synthetic oligonucleotide
  Target: LAMA2; (+) strand; PAM type: NNNNGHTT; PAM sequence: CTGTGTTT
catacaaaataaagggatca

SEQ ID NO: 51176 - DNA, 20 bp, Artificial Sequence
  Description of Artificial Sequence: Synthetic oligonucleotide
  Target: LAMA2; (+) strand; PAM type: NNNNGHTT; PAM sequence: ATGTGATT
atttacttccctttgagcac

SEQ ID NO: 51177 - DNA, 20 bp, Artificial Sequence
  Description of Artificial Sequence: Synthetic oligonucleotide
  Target: LAMA2; (+) strand; PAM type: NNNNGHTT; PAM sequence: AGCAGTTT
gcatgtagccttgaacctta

SEQ ID NO: 51178 - DNA, 20 bp, Artificial Sequence
  Description of Artificial Sequence: Synthetic oligonucleotide
  Target: LAMA2; (+) strand; PAM type: NNNNGHTT; PAM sequence: AGTGGTTT
agcatcccagcaatagaata

SEQ ID NO: 51179 - DNA, 20 bp, Artificial Sequence
  Description of Artificial Sequence: Synthetic oligonucleotide
  Target: LAMA2; (+) strand; PAM type: NNNNGHTT; PAM sequence: AGCTGTTT
tttttttaacctacaaaaac

SEQ ID NO: 51180 - DNA, 20 bp, Artificial Sequence
  Description of Artificial Sequence: Synthetic oligonucleotide
  Target: LAMA2; (+) strand; PAM type: NNNNGHTT; PAM sequence: GAAAGATT
atgaaattgaactgcaccat

SEQ ID NO: 51181 - DNA, 20 bp, Artificial Sequence
  Description of Artificial Sequence: Synthetic oligonucleotide
  Target: LAMA2; (+) strand; PAM type: NNNNGHTT; PAM sequence: AAGGGTTT
taaatgtaggcctttagtct

SEQ ID NO: 51182 - DNA, 20 bp, Artificial Sequence
  Description of Artificial Sequence: Synthetic oligonucleotide
  Target: LAMA2; (+) strand; PAM type: NNNNGHTT; PAM sequence: GATAGCTT
tgttcttcaaaagacatttt

SEQ ID NO: 51183 - DNA, 20 bp, Artificial Sequence
  Description of Artificial Sequence: Synthetic oligonucleotide
  Target: LAMA2; (+) strand; PAM type: NNNNGHTT; PAM sequence: CCCTGATT
aaaccaattttgtgtaaaaa

SEQ ID NO: 51184 - DNA, 20 bp, Artificial Sequence
  Description of Artificial Sequence: Synthetic oligonucleotide
  Target: LAMA2; (+) strand; PAM type: NNNNGHTT; PAM sequence: TCTGGCTT
aaccctgatttaaatacagt

SEQ ID NO: 51185 - DNA, 20 bp, Artificial Sequence
  Description of Artificial Sequence: Synthetic oligonucleotide
  Target: LAMA2; (+) strand; PAM type: NNNNGHTT; PAM sequence: AGATGCTT
cagactaggtgacattttaa

SEQ ID NO: 51186 - DNA, 20 bp, Artificial Sequence
  Description of Artificial Sequence: Synthetic oligonucleotide
  Target: LAMA2; (+) strand; PAM type: NNNNGHTT; PAM sequence: CCTTGCTT
ttttaaagatgctttcattt

SEQ ID NO: 51187 - DNA, 20 bp, Artificial Sequence
  Description of Artificial Sequence: Synthetic oligonucleotide
  Target: LAMA2; (+) strand; PAM type: NNNNGHTT; PAM sequence: GCCTGCTT
tcctaacatctactcccctg

SEQ ID NO: 51188 - DNA, 20 bp, Artificial Sequence
  Description of Artificial Sequence: Synthetic oligonucleotide
  Target: LAMA2; (+) strand; PAM type: NNNNGHTT; PAM sequence: TTTTGCTT
ttgacatttgccatcacaca

SEQ ID NO: 51189 - DNA, 20 bp, Artificial Sequence
  Description of Artificial Sequence: Synthetic oligonucleotide
  Target: LAMA2; (+) strand; PAM type: NNNNGHTT; PAM sequence: CCATGCTT
ttttgctttagctgttatgg

SEQ ID NO: 51190 - DNA, 20 bp, Artificial Sequence
  Description of Artificial Sequence: Synthetic oligonucleotide
  Target: LAMA2; (+) strand; PAM type: NNNNGHTT; PAM sequence: AATTGTTT
ttgtcacattaataagatga

SEQ ID NO: 51191 - DNA, 20 bp, Artificial Sequence
  Description of Artificial Sequence: Synthetic oligonucleotide
  Target: LAMA2; (+) strand; PAM type: NNNNGHTT; PAM sequence: AACTGATT
tttttatcgtcagtatcagt

SEQ ID NO: 51192 - DNA, 20 bp, Artificial Sequence
  Description of Artificial Sequence: Synthetic oligonucleotide
  Target: LAMA2; (+) strand; PAM type: NNNNGHTT; PAM sequence: GTTGGATT
atcagtaactgattgtaatt

SEQ ID NO: 51193 - DNA, 20 bp, Artificial Sequence
  Description of Artificial Sequence: Synthetic oligonucleotide
  Target: LAMA2; (+) strand; PAM type: NNNNGHTT; PAM sequence: CCAGGATT
catagagggaatgtctttcc

SEQ ID NO: 51194 - DNA, 20 bp, Artificial Sequence
  Description of Artificial Sequence: Synthetic oligonucleotide
  Target: LAMA2; (+) strand; PAM type: NNNNGHTT; PAM sequence: AAGCGATT
ggtccttttcctttaactcg

SEQ ID NO: 51195 - DNA, 20 bp, Artificial Sequence
  Description of Artificial Sequence: Synthetic oligonucleotide
  Target: LAMA2; (+) strand; PAM type: NNNNGHTT; PAM sequence: GTTAGTTT
ggggttggagtgggggagag

SEQ ID NO: 51196 - DNA, 20 bp, Artificial Sequence
  Description of Artificial Sequence: Synthetic oligonucleotide
  Target: LAMA2; (+) strand; PAM type: NNNNGHTT; PAM sequence: TTTTGTTT
tggagtgggggagaggttag

SEQ ID NO: 51197 - DNA, 20 bp, Artificial Sequence
  Description of Artificial Sequence: Synthetic oligonucleotide
  Target: LAMA2; (+) strand; PAM type: NNNNGHTT; PAM sequence: TTTTGTTT
tgggggagaggttagttttg

SEQ ID NO: 51198 - DNA, 20 bp, Artificial Sequence
  Description of Artificial Sequence: Synthetic oligonucleotide
  Target: LAMA2; (+) strand; PAM type: NNNNGHTT; PAM sequence: TATTGTTT
tgagaatgataatcaccact

SEQ ID NO: 51199 - DNA, 20 bp, Artificial Sequence
  Description of Artificial Sequence: Synthetic oligonucleotide
  Target: LAMA2; (+) strand; PAM type: NNNNGHTT; PAM sequence: AATGGCTT
ctggtataaacaacaataaa

SEQ ID NO: 51200 - DNA, 20 bp, Artificial Sequence
  Description of Artificial Sequence: Synthetic oligonucleotide
  Target: LAMA2; (+) strand; PAM type: NNNNGHTT; PAM sequence: TTTTGTTT
ttatactttttacatttatt

SEQ ID NO: 51201 - DNA, 20 bp, Artificial Sequence
  Description of Artificial Sequence: Synthetic oligonucleotide
  Target: LAMA2; (+) strand; PAM type: NNNNGHTT; PAM sequence: AGCTGATT
ttttggagtagataggaaat

SEQ ID NO: 51202 - DNA, 20 bp, Artificial Sequence
  Description of Artificial Sequence: Synthetic oligonucleotide
  Target: LAMA2; (+) strand; PAM type: NNNNGHTT; PAM sequence: AGAAGTTT
tgctctttacttacccaatt

SEQ ID NO: 51203 - DNA, 20 bp, Artificial Sequence
  Description of Artificial Sequence: Synthetic oligonucleotide
  Target: LAMA2; (+) strand; PAM type: NNNNGHTT; PAM sequence: CAGAGCTT
gaagtttactaggatagaaa

SEQ ID NO: 51204 - DNA, 20 bp, Artificial Sequence
  Description of Artificial Sequence: Synthetic oligonucleotide
  Target: LAMA2; (+) strand; PAM type: NNNNGHTT; PAM sequence: GGCAGTTT
ggtagaaagaaagaaggaag

SEQ ID NO: 51205 - DNA, 20 bp, Artificial Sequence
  Description of Artificial Sequence: Synthetic oligonucleotide
  Target: LAMA2; (+) strand; PAM type: NNNNGHTT; PAM sequence: TCTTGTTT
gaaagaaggaagggcagttt

SEQ ID NO: 51206 - DNA, 20 bp, Artificial Sequence
  Description of Artificial Sequence: Synthetic oligonucleotide
  Target: LAMA2; (+) strand; PAM type: NNNNGHTT; PAM sequence: AAAGGCTT
agttttcttgtttgaacaag

SEQ ID NO: 51207 - DNA, 20 bp, Artificial Sequence
  Description of Artificial Sequence: Synthetic oligonucleotide
  Target: LAMA2; (+) strand; PAM type: NNNNGHTT; PAM sequence: CTCAGTTT
actcaaacctttttagatac

SEQ ID NO: 51208 - DNA, 20 bp, Artificial Sequence
  Description of Artificial Sequence: Synthetic oligonucleotide
  Target: LAMA2; (+) strand; PAM type: NNNNGHTT; PAM sequence: TTCTGTTT
tcagttttccatgtcaaaaa

SEQ ID NO: 51209 - DNA, 20 bp, Artificial Sequence
  Description of Artificial Sequence: Synthetic oligonucleotide
  Target: LAMA2; (+) strand; PAM type: NNNNGHTT; PAM sequence: ATCAGTTT
gaaaagccctttcttagttc

SEQ ID NO: 51210 - DNA, 20 bp, Artificial Sequence
  Description of Artificial Sequence: Synthetic oligonucleotide
  Target: LAMA2; (+) strand; PAM type: NNNNGHTT; PAM sequence: AAAAGATT
aaaaaacctagaaaacaaca

SEQ ID NO: 51211 - DNA, 20 bp, Artificial Sequence
  Description of Artificial Sequence: Synthetic oligonucleotide
  Target: LAMA2; (+) strand; PAM type: NNNNGHTT; PAM sequence: ACAAGATT
gatcattatgtatgtaaagc

SEQ ID NO: 51212 - DNA, 20 bp, Artificial Sequence
  Description of Artificial Sequence: Synthetic oligonucleotide
  Target: LAMA2; (+) strand; PAM type: NNNNGHTT; PAM sequence: CAAGGTTT
aaagaaaccagatgttactt

SEQ ID NO: 51213 - DNA, 20 bp, Artificial Sequence
  Description of Artificial Sequence: Synthetic oligonucleotide
  Target: LAMA2; (+) strand; PAM type: NNNNGHTT; PAM sequence: TGAAGTTT
ccagatgttacttcaaggtt

SEQ ID NO: 51214 - DNA, 20 bp, Artificial Sequence
  Description of Artificial Sequence: Synthetic oligonucleotide
  Target: LAMA2; (+) strand; PAM type: NNNNGHTT; PAM sequence: GTAAGATT
ttcaaggtttgaagttttat

SEQ ID NO: 51215 - DNA, 20 bp, Artificial Sequence
  Description of Artificial Sequence: Synthetic oligonucleotide
  Target: LAMA2; (+) strand; PAM type: NNNNGHTT; PAM sequence: CAAAGTTT
taaaggagttctttcactca

SEQ ID NO: 51216 - DNA, 20 bp, Artificial Sequence
  Description of Artificial Sequence: Synthetic oligonucleotide
  Target: LAMA2; (+) strand; PAM type: NNNNGHTT; PAM sequence: TGAAGATT
caatcacctctagtagggcc

SEQ ID NO: 51217 - DNA, 20 bp, Artificial Sequence
  Description of Artificial Sequence: Synthetic oligonucleotide
  Target: LAMA2; (+) strand; PAM type: NNNNGHTT; PAM sequence: GAAGGATT
gcctgaagatttcctgaagg

SEQ ID NO: 51218 - DNA, 20 bp, Artificial Sequence
  Description of Artificial Sequence: Synthetic oligonucleotide
  Target: LAMA2; (+) strand; PAM type: NNNNGHTT; PAM sequence: GGAAGTTT
aaaccaaggcagtgggagaa

SEQ ID NO: 51219 - DNA, 20 bp, Artificial Sequence
  Description of Artificial Sequence: Synthetic oligonucleotide
  Target: LAMA2; (+) strand; PAM type: NNNNGHTT; PAM sequence: TCCAGTTT
gtccatttaggaaaaagaag

SEQ ID NO: 51220 - DNA, 20 bp, Artificial Sequence
  Description of Artificial Sequence: Synthetic oligonucleotide
  Target: LAMA2; (+) strand; PAM type: NNNNGHTT; PAM sequence: GAAAGCTT
ctcactggttaggataagct

SEQ ID NO: 51221 - DNA, 20 bp, Artificial Sequence
  Description of Artificial Sequence: Synthetic oligonucleotide
  Target: LAMA2; (+) strand; PAM type: NNNNGHTT; PAM sequence: CTGTGCTT
ggaacacagtataatcagag

SEQ ID NO: 51222 - DNA, 20 bp, Artificial Sequence
  Description of Artificial Sequence: Synthetic oligonucleotide
  Target: LAMA2; (+) strand; PAM type: NNNNGHTT; PAM sequence: TAAAGATT
tttttattatttcttcattg

SEQ ID NO: 51223 - DNA, 20 bp, Artificial Sequence
  Description of Artificial Sequence: Synthetic oligonucleotide
  Target: LAMA2; (+) strand; PAM type: NNNNGHTT; PAM sequence: GAGTGCTT
tcttcattgtaaagatttct

SEQ ID NO: 51224 - DNA, 20 bp, Artificial Sequence
  Description of Artificial Sequence: Synthetic oligonucleotide
  Target: LAMA2; (+) strand; PAM type: NNNNGHTT; PAM sequence: GGCAGATT
cactttgggaggctgaggca

SEQ ID NO: 51225 - DNA, 20 bp, Artificial Sequence
  Description of Artificial Sequence: Synthetic oligonucleotide
  Target: LAMA2; (+) strand; PAM type: NNNNGHTT; PAM sequence: AGGAGTTT
caggcagattgcatgaactc

SEQ ID NO: 51226 - DNA, 20 bp, Artificial Sequence
  Description of Artificial Sequence: Synthetic oligonucleotide
  Target: LAMA2; (+) strand; PAM type: NNNNGHTT; PAM sequence: CCATGTTT
gaggatgaggctgcagtgag

SEQ ID NO: 51227 - DNA, 20 bp, Artificial Sequence
  Description of Artificial Sequence: Synthetic oligonucleotide
  Target: LAMA2; (+) strand; PAM type: NNNNGHTT; PAM sequence: ATCAGTTT
gcatttcaaagaaattccca

SEQ ID NO: 51228 - DNA, 20 bp, Artificial Sequence
  Description of Artificial Sequence: Synthetic oligonucleotide
  Target: LAMA2; (+) strand; PAM type: NNNNGHTT; PAM sequence: ATGAGTTT
agtagccaatttttttccaa

SEQ ID NO: 51229 - DNA, 20 bp, Artificial Sequence
  Description of Artificial Sequence: Synthetic oligonucleotide
  Target: LAMA2; (+) strand; PAM type: NNNNGHTT; PAM sequence: TTCTGATT
tactaaatgaatattacatt

SEQ ID NO: 51230 - DNA, 20 bp, Artificial Sequence
  Description of Artificial Sequence: Synthetic oligonucleotide
  Target: LAMA2; (+) strand; PAM type: NNNNGHTT; PAM sequence: AGTAGCTT
attaaagacatttattttaa

SEQ ID NO: 51231 - DNA, 20 bp, Artificial Sequence
  Description of Artificial Sequence: Synthetic oligonucleotide
  Target: LAMA2; (+) strand; PAM type: NNNNGHTT; PAM sequence: CTGGGTTT
ttattttaaagtagctttct

SEQ ID NO: 51232 - DNA, 20 bp, Artificial Sequence
  Description of Artificial Sequence: Synthetic oligonucleotide
  Target: LAMA2; (+) strand; PAM type: NNNNGHTT; PAM sequence: TGTTGATT
aaagtagctttctctgggtt

SEQ ID NO: 51233 - DNA, 20 bp, Artificial Sequence
  Description of Artificial Sequence: Synthetic oligonucleotide
  Target: LAMA2; (+) strand; PAM type: NNNNGHTT; PAM sequence: TAATGTTT
tataataatgggatactcaa

SEQ ID NO: 51234 - DNA, 20 bp, Artificial Sequence
  Description of Artificial Sequence: Synthetic oligonucleotide
  Target: LAMA2; (+) strand; PAM type: NNNNGHTT; PAM sequence: TCATGATT
ctcaataatgtttgagttca

SEQ ID NO: 51235 - DNA, 20 bp, Artificial Sequence
  Description of Artificial Sequence: Synthetic oligonucleotide
  Target: LAMA2; (+) strand; PAM type: NNNNGHTT; PAM sequence: TAATGCTT
tgaaatgccttaaagatact

SEQ ID NO: 51236 - DNA, 20 bp, Artificial Sequence
  Description of Artificial Sequence: Synthetic oligonucleotide
  Target: LAMA2; (+) strand; PAM type: NNNNGHTT; PAM sequence: TAGTGATT
ccttaaagatacttaatgct

SEQ ID NO: 51237 - DNA, 20 bp, Artificial Sequence
  Description of Artificial Sequence: Synthetic oligonucleotide
  Target: LAMA2; (+) strand; PAM type: NNNNGHTT; PAM sequence: GGATGTTT
tagagccaaacattctaaaa

SEQ ID NO: 51238 - DNA, 20 bp, Artificial Sequence
  Description of Artificial Sequence: Synthetic oligonucleotide
  Target: LAMA2; (+) strand; PAM type: NNNNGHTT; PAM sequence: TAAAGATT
cttacaagagtgacatatcc

SEQ ID NO: 51239 - DNA, 20 bp, Artificial Sequence
  Description of Artificial Sequence: Synthetic oligonucleotide
  Target: LAMA2; (+) strand; PAM type: NNNNGHTT; PAM sequence: TTTTGATT
tttcttctagagatacagta

SEQ ID NO: 51240 - DNA, 20 bp, Artificial Sequence
  Description of Artificial Sequence: Synthetic oligonucleotide
  Target: LAMA2; (+) strand; PAM type: NNNNGHTT; PAM sequence: ACCTGATT
gagatacagtattttgattt

SEQ ID NO: 51241 - DNA, 20 bp, Artificial Sequence
  Description of Artificial Sequence: Synthetic oligonucleotide
  Target: LAMA2; (+) strand; PAM type: NNNNGHTT; PAM sequence: TTTTGATT
tttcttctagagatatagta

SEQ ID NO: 51242 - DNA, 20 bp, Artificial Sequence
  Description of Artificial Sequence: Synthetic oligonucleotide
  Target: LAMA2; (+) strand; PAM type: NNNNGHTT; PAM sequence: ACCTGATT
gagatatagtattttgattt

SEQ ID NO: 51243 - DNA, 20 bp, Artificial Sequence
  Description of Artificial Sequence: Synthetic oligonucleotide
  Target: LAMA2; (+) strand; PAM type: NNNNGHTT; PAM sequence: TTTTGATT
tttcttctagagatacagta

SEQ ID NO: 51244 - DNA, 20 bp, Artificial Sequence
  Description of Artificial Sequence: Synthetic oligonucleotide
  Target: LAMA2; (+) strand; PAM type: NNNNGHTT; PAM sequence: ACCTGTTT
gagatacagtattttgattt

SEQ ID NO: 51245 - DNA, 20 bp, Artificial Sequence
  Description of Artificial Sequence: Synthetic oligonucleotide
  Target: LAMA2; (+) strand; PAM type: NNNNGHTT; PAM sequence: AGTTGTTT
attttgatttacctgtttta

SEQ ID NO: 51246 - DNA, 20 bp, Artificial Sequence
  Description of Artificial Sequence: Synthetic oligonucleotide
  Target: LAMA2; (+) strand; PAM type: NNNNGHTT; PAM sequence: TACTGATT
agtattcaaaaggaaaagac

SEQ ID NO: 51247 - DNA, 20 bp, Artificial Sequence
  Description of Artificial Sequence: Synthetic oligonucleotide
  Target: LAMA2; (+) strand; PAM type: NNNNGHTT; PAM sequence: AACAGTTT
ctgattatgtactggctgtc

SEQ ID NO: 51248 - DNA, 20 bp, Artificial Sequence
  Description of Artificial Sequence: Synthetic oligonucleotide
  Target: LAMA2; (+) strand; PAM type: NNNNGHTT; PAM sequence: GAATGTTT
gtcaacagtttgggctaagt

SEQ ID NO: 51249 - DNA, 20 bp, Artificial Sequence
  Description of Artificial Sequence: Synthetic oligonucleotide
  Target: LAMA2; (+) strand; PAM type: NNNNGHTT; PAM sequence: TTCAGTTT
agtttgggctaagtgaatgt

SEQ ID NO: 51250 - DNA, 20 bp, Artificial Sequence
  Description of Artificial Sequence: Synthetic oligonucleotide
  Target: LAMA2; (+) strand; PAM type: NNNNGHTT; PAM sequence: AATAGATT
tgaatgtgtgagagctgggc

SEQ ID NO: 51251 - DNA, 20 bp, Artificial Sequence
  Description of Artificial Sequence: Synthetic oligonucleotide
  Target: LAMA2; (+) strand; PAM type: NNNNGHTT; PAM sequence: ACCTGTTT
aagatgctggcaggttaggg

SEQ ID NO: 51252 - DNA, 20 bp, Artificial Sequence
  Description of Artificial Sequence: Synthetic oligonucleotide
  Target: LAMA2; (+) strand; PAM type: NNNNGHTT; PAM sequence: TTATGCTT
ggcaggttagggacctgttt

SEQ ID NO: 51253 - DNA, 20 bp, Artificial Sequence
  Description of Artificial Sequence: Synthetic oligonucleotide
  Target: LAMA2; (+) strand; PAM type: NNNNGHTT; PAM sequence: TGAGGATT
ccctcccaacactgttgcac

SEQ ID NO: 51254 - DNA, 20 bp, Artificial Sequence
  Description of Artificial Sequence: Synthetic oligonucleotide
  Target: LAMA2; (+) strand; PAM type: NNNNGHTT; PAM sequence: GTAGGATT
caagccatagcagttactct

SEQ ID NO: 51255 - DNA, 20 bp, Artificial Sequence
  Description of Artificial Sequence: Synthetic oligonucleotide
  Target: LAMA2; (+) strand; PAM type: NNNNGHTT; PAM sequence: TTTTGCTT
tattgggtataacaacatca

SEQ ID NO: 51256 - DNA, 20 bp, Artificial Sequence
  Description of Artificial Sequence: Synthetic oligonucleotide
  Target: LAMA2; (+) strand; PAM type: NNNNGHTT; PAM sequence: AATAGATT
gttagatatgtattctatac

SEQ ID NO: 51257 - DNA, 20 bp, Artificial Sequence
  Description of Artificial Sequence: Synthetic oligonucleotide
  Target: LAMA2; (+) strand; PAM type: NNNNGHTT; PAM sequence: CTCAGTTT
acctctagtgacattagata

SEQ ID NO: 51258 - DNA, 20 bp, Artificial Sequence
  Description of Artificial Sequence: Synthetic oligonucleotide
  Target: LAMA2; (+) strand; PAM type: NNNNGHTT; PAM sequence: AATGGCTT
cattagatactcagttttaa

SEQ ID NO: 51259 - DNA, 20 bp, Artificial Sequence
  Description of Artificial Sequence: Synthetic oligonucleotide
  Target: LAMA2; (+) strand; PAM type: NNNNGHTT; PAM sequence: GTTAGATT
gacttggagttctcagagca

SEQ ID NO: 51260 - DNA, 20 bp, Artificial Sequence
  Description of Artificial Sequence: Synthetic oligonucleotide
  Target: LAMA2; (+) strand; PAM type: NNNNGHTT; PAM sequence: AATTGTTT
acatgtcaccacgcccagct

SEQ ID NO: 51261 - DNA, 20 bp, Artificial Sequence
  Description of Artificial Sequence: Synthetic oligonucleotide
  Target: LAMA2; (+) strand; PAM type: NNNNGHTT; PAM sequence: CAGGGCTT
ttttgtatttttagttgata

SEQ ID NO: 51262 - DNA, 20 bp, Artificial Sequence
  Description of Artificial Sequence: Synthetic oligonucleotide
  Target: LAMA2; (+) strand; PAM type: NNNNGHTT; PAM sequence: CCAGGATT
acagggcttcaccatgttgg

SEQ ID NO: 51263 - DNA, 20 bp, Artificial Sequence
  Description of Artificial Sequence: Synthetic oligonucleotide
  Target: LAMA2; (+) strand; PAM type: NNNNGHTT; PAM sequence: CTGGGATT
tgccttggcctcccaaagtt

SEQ ID NO: 51264 - DNA, 20 bp, Artificial Sequence
  Description of Artificial Sequence: Synthetic oligonucleotide
  Target: LAMA2; (+) strand; PAM type: NNNNGHTT; PAM sequence: TCCCGTTT
tcaacacactaatcatggaa

SEQ ID NO: 51265 - DNA, 20 bp, Artificial Sequence
  Description of Artificial Sequence: Synthetic oligonucleotide
  Target: LAMA2; (+) strand; PAM type: NNNNGHTT; PAM sequence: CCAGGCTT
atcccgttttttttttttta

SEQ ID NO: 51266 - DNA, 20 bp, Artificial Sequence
  Description of Artificial Sequence: Synthetic oligonucleotide
  Target: LAMA2; (+) strand; PAM type: NNNNGHTT; PAM sequence: TGTTGTTT
tgagggatattattcaattg

SEQ ID NO: 51267 - DNA, 20 bp, Artificial Sequence
  Description of Artificial Sequence: Synthetic oligonucleotide
  Target: LAMA2; (+) strand; PAM type: NNNNGHTT; PAM sequence: GTTTGTTT
ggatattattcaattgtgtt

SEQ ID NO: 51268 - DNA, 20 bp, Artificial Sequence
  Description of Artificial Sequence: Synthetic oligonucleotide
  Target: LAMA2; (+) strand; PAM type: NNNNGHTT; PAM sequence: TTTTGTTT
ttattcaattgtgttgtttg

SEQ ID NO: 51269 - DNA, 20 bp, Artificial Sequence
  Description of Artificial Sequence: Synthetic oligonucleotide
  Target: LAMA2; (+) strand; PAM type: NNNNGHTT; PAM sequence: TTTTGTTT
caattgtgttgtttgttttg

SEQ ID NO: 51270 - DNA, 20 bp, Artificial Sequence
  Description of Artificial Sequence: Synthetic oligonucleotide
  Target: LAMA2; (+) strand; PAM type: NNNNGHTT; PAM sequence: TTTTGTTT
gtgttgtttgttttgttttg

SEQ ID NO: 51271 - DNA, 20 bp, Artificial Sequence
  Description of Artificial Sequence: Synthetic oligonucleotide
  Target: LAMA2; (+) strand; PAM type: NNNNGHTT; PAM sequence: TTTTGTTT
gtttgttttgttttgttttg

SEQ ID NO: 51272 - DNA, 20 bp, Artificial Sequence
  Description of Artificial Sequence: Synthetic oligonucleotide
  Target: LAMA2; (+) strand; PAM type: NNNNGHTT; PAM sequence: TTTTGTTT
ttttgttttgttttgttttg

SEQ ID NO: 51273 - DNA, 20 bp, Artificial Sequence
  Description of Artificial Sequence: Synthetic oligonucleotide
  Target: LAMA2; (+) strand; PAM type: NNNNGHTT; PAM sequence: TTTTGTTT
ttttgttttgttttgttttg

SEQ ID NO: 51274 - DNA, 20 bp, Artificial Sequence
  Description of Artificial Sequence: Synthetic oligonucleotide
  Target: LAMA2; (+) strand; PAM type: NNNNGHTT; PAM sequence: TTTTGTTT
ttttgttttgttttgttttg

SEQ ID NO: 51275 - DNA, 20 bp, Artificial Sequence
  Description of Artificial Sequence: Synthetic oligonucleotide
  Target: LAMA2; (+) strand; PAM type: NNNNGHTT; PAM sequence: TTTTGTTT
ttttgttttgttttgttttg

SEQ ID NO: 51276 - DNA, 20 bp, Artificial Sequence
  Description of Artificial Sequence: Synthetic oligonucleotide
  Target: LAMA2; (+) strand; PAM type: NNNNGHTT; PAM sequence: CAGGGTTT
ttttgtatttttagtagaga

SEQ ID NO: 51277 - DNA, 20 bp, Artificial Sequence
  Description of Artificial Sequence: Synthetic oligonucleotide
  Target: LAMA2; (+) strand; PAM type: NNNNGHTT; PAM sequence: CTGGGATT
catctcagcctcccaaagtg

SEQ ID NO: 51278 - DNA, 20 bp, Artificial Sequence
  Description of Artificial Sequence: Synthetic oligonucleotide
  Target: LAMA2; (+) strand; PAM type: NNNNGHTT; PAM sequence: CTGTGTTT
gccatcacacccagcctcaa

SEQ ID NO: 51279 - DNA, 20 bp, Artificial Sequence
  Description of Artificial Sequence: Synthetic oligonucleotide
  Target: LAMA2; (+) strand; PAM type: NNNNGHTT; PAM sequence: AACTGATT
caactgtgttttttaaacaa

SEQ ID NO: 51280 - DNA, 20 bp, Artificial Sequence
  Description of Artificial Sequence: Synthetic oligonucleotide
  Target: LAMA2; (+) strand; PAM type: NNNNGHTT; PAM sequence: AGTCGCTT
aaatgaagtaaactacatac

SEQ ID NO: 51281 - DNA, 20 bp, Artificial Sequence
  Description of Artificial Sequence: Synthetic oligonucleotide
  Target: LAMA2; (+) strand; PAM type: NNNNGHTT; PAM sequence: ATATGATT
tcagccccattcagaattgg

SEQ ID NO: 51282 - DNA, 20 bp, Artificial Sequence
  Description of Artificial Sequence: Synthetic oligonucleotide
  Target: LAMA2; (+) strand; PAM type: NNNNGHTT; PAM sequence: TCTTGATT
actcatgaattccagtcaga

SEQ ID NO: 51283 - DNA, 20 bp, Artificial Sequence
  Description of Artificial Sequence: Synthetic oligonucleotide
  Target: LAMA2; (+) strand; PAM type: NNNNGHTT; PAM sequence: TAATGATT
aatgccaaggtcttctctga

SEQ ID NO: 51284 - DNA, 20 bp, Artificial Sequence
  Description of Artificial Sequence: Synthetic oligonucleotide
  Target: LAMA2; (+) strand; PAM type: NNNNGHTT; PAM sequence: AGCAGCTT
aatgattttggttcactttc

SEQ ID NO: 51285 - DNA, 20 bp, Artificial Sequence
  Description of Artificial Sequence: Synthetic oligonucleotide
  Target: LAMA2; (+) strand; PAM type: NNNNGHTT; PAM sequence: TCTTGCTT
cctctactgtgctgtctttc

SEQ ID NO: 51286 - DNA, 20 bp, Artificial Sequence
  Description of Artificial Sequence: Synthetic oligonucleotide
  Target: LAMA2; (+) strand; PAM type: NNNNGHTT; PAM sequence: ATCTGCTT
tttgccaagtcccattgctc

SEQ ID NO: 51287 - DNA, 20 bp, Artificial Sequence
  Description of Artificial Sequence: Synthetic oligonucleotide
  Target: LAMA2; (+) strand; PAM type: NNNNGHTT; PAM sequence: CATTGTTT
aattgtacatttcctacctc

SEQ ID NO: 51288 - DNA, 20 bp, Artificial Sequence
  Description of Artificial Sequence: Synthetic oligonucleotide
  Target: LAMA2; (+) strand; PAM type: NNNNGHTT; PAM sequence: CCATGATT
ctgtatgtagaagggaaatt

SEQ ID NO: 51289 - DNA, 20 bp, Artificial Sequence
  Description of Artificial Sequence: Synthetic oligonucleotide
  Target: LAMA2; (+) strand; PAM type: NNNNGHTT; PAM sequence: AGTGGTTT
ggggaaggcaagaataagaa

SEQ ID NO: 51290 - DNA, 20 bp, Artificial Sequence
  Description of Artificial Sequence: Synthetic oligonucleotide
  Target: LAMA2; (+) strand; PAM type: NNNNGHTT; PAM sequence: GTAGGCTT
ataagaaagtggtttaagca

SEQ ID NO: 51291 - DNA, 20 bp, Artificial Sequence
  Description of Artificial Sequence: Synthetic oligonucleotide
  Target: LAMA2; (+) strand; PAM type: NNNNGHTT; PAM sequence: CCCTGTTT
tgggtggtggaggaaacagc

SEQ ID NO: 51292 - DNA, 20 bp, Artificial Sequence
  Description of Artificial Sequence: Synthetic oligonucleotide
  Target: LAMA2; (+) strand; PAM type: NNNNGHTT; PAM sequence: ATTTGATT
gtcctcttcatggagataca

SEQ ID NO: 51293 - DNA, 20 bp, Artificial Sequence
  Description of Artificial Sequence: Synthetic oligonucleotide
  Target: LAMA2; (+) strand; PAM type: NNNNGHTT; PAM sequence: GGCTGTTT
tggtgtcatgatcatatgga

SEQ ID NO: 51294 - DNA, 20 bp, Artificial Sequence
  Description of Artificial Sequence: Synthetic oligonucleotide
  Target: LAMA2; (+) strand; PAM type: NNNNGHTT; PAM sequence: TTTGGTTT
catgatcatatggaggctgt

SEQ ID NO: 51295 - DNA, 20 bp, Artificial Sequence
  Description of Artificial Sequence: Synthetic oligonucleotide
  Target: LAMA2; (+) strand; PAM type: NNNNGHTT; PAM sequence: GTTGGTTT
tggaggtaatgatgatgcta

SEQ ID NO: 51296 - DNA, 20 bp, Artificial Sequence
  Description of Artificial Sequence: Synthetic oligonucleotide
  Target: LAMA2; (+) strand; PAM type: NNNNGHTT; PAM sequence: GAGAGATT
gcatttgaacaaatggcaaa

SEQ ID NO: 51297 - DNA, 20 bp, Artificial Sequence
  Description of Artificial Sequence: Synthetic oligonucleotide
  Target: LAMA2; (+) strand; PAM type: NNNNGHTT; PAM sequence: TACAGATT
gcgctatcaatgaacaaagt

SEQ ID NO: 51298 - DNA, 20 bp, Artificial Sequence
  Description of Artificial Sequence: Synthetic oligonucleotide
  Target: LAMA2; (+) strand; PAM type: NNNNGHTT; PAM sequence: TGGTGATT
tcctgaaagtaaccctttga

SEQ ID NO: 51299 - DNA, 20 bp, Artificial Sequence
  Description of Artificial Sequence: Synthetic oligonucleotide
  Target: LAMA2; (+) strand; PAM type: NNNNGHTT; PAM sequence: TTATGATT
aaataatcaactagtgttat

SEQ ID NO: 51300 - DNA, 20 bp, Artificial Sequence
  Description of Artificial Sequence: Synthetic oligonucleotide
  Target: LAMA2; (+) strand; PAM type: NNNNGHTT; PAM sequence: GAATGATT
tgaaatgtatgttctgagta

SEQ ID NO: 51301 - DNA, 20 bp, Artificial Sequence
  Description of Artificial Sequence: Synthetic oligonucleotide
  Target: LAMA2; (+) strand; PAM type: NNNNGHTT; PAM sequence: AATAGTTT
ctcttgaaaactaaaagaaa

SEQ ID NO: 51302 - DNA, 20 bp, Artificial Sequence
  Description of Artificial Sequence: Synthetic oligonucleotide
  Target: LAMA2; (+) strand; PAM type: NNNNGHTT; PAM sequence: CTTAGTTT
aactaaaagaaaaatagttt

SEQ ID NO: 51303 - DNA, 20 bp, Artificial Sequence
  Description of Artificial Sequence: Synthetic oligonucleotide
  Target: LAMA2; (+) strand; PAM type: NNNNGHTT; PAM sequence: AGAAGTTT
atggagaaatgtatgacgtt

SEQ ID NO: 51304 - DNA, 20 bp, Artificial Sequence
  Description of Artificial Sequence: Synthetic oligonucleotide
  Target: LAMA2; (+) strand; PAM type: NNNNGHTT; PAM sequence: GCATGCTT
acgttagaagtttgttagtt

SEQ ID NO: 51305 - DNA, 20 bp, Artificial Sequence
  Description of Artificial Sequence: Synthetic oligonucleotide
  Target: LAMA2; (+) strand; PAM type: NNNNGHTT; PAM sequence: GGGTGTTT
gtataatggtgtctgcatat

SEQ ID NO: 51306 - DNA, 20 bp, Artificial Sequence
  Description of Artificial Sequence: Synthetic oligonucleotide
  Target: LAMA2; (+) strand; PAM type: NNNNGHTT; PAM sequence: GATGGCTT
aacttcaaagaagaaacgat

SEQ ID NO: 51307 - DNA, 20 bp, Artificial Sequence
  Description of Artificial Sequence: Synthetic oligonucleotide
  Target: LAMA2; (+) strand; PAM type: NNNNGHTT; PAM sequence: GAGAGATT
gaagctacttcaaactttct

SEQ ID NO: 51308 - DNA, 20 bp, Artificial Sequence
  Description of Artificial Sequence: Synthetic oligonucleotide
  Target: LAMA2; (+) strand; PAM type: NNNNGHTT; PAM sequence: TCTTGTTT
tttactcttggttctttgta

SEQ ID NO: 51309 - DNA, 20 bp, Artificial Sequence
  Description of Artificial Sequence: Synthetic oligonucleotide
  Target: LAMA2; (+) strand; PAM type: NNNNGHTT; PAM sequence: GTAGGCTT
tggtccccaaatggtctaac

SEQ ID NO: 51310 - DNA, 20 bp, Artificial Sequence
  Description of Artificial Sequence: Synthetic oligonucleotide
  Target: LAMA2; (+) strand; PAM type: NNNNGHTT; PAM sequence: TTCAGATT
caaatggtctaacgtaggct

SEQ ID NO: 51311 - DNA, 20 bp, Artificial Sequence
  Description of Artificial Sequence: Synthetic oligonucleotide
  Target: LAMA2; (+) strand; PAM type: NNNNGHTT; PAM sequence: CAGTGTTT
aaatgaaaggaagaaaacta

SEQ ID NO: 51312 - DNA, 20 bp, Artificial Sequence
  Description of Artificial Sequence: Synthetic oligonucleotide
  Target: LAMA2; (+) strand; PAM type: NNNNGHTT; PAM sequence: CAGTGATT
ttaaattatactttcagatc

SEQ ID NO: 51313 - DNA, 20 bp, Artificial Sequence
  Description of Artificial Sequence: Synthetic oligonucleotide
  Target: LAMA2; (+) strand; PAM type: NNNNGHTT; PAM sequence: CACAGATT
tatgacctgaactgaaataa

SEQ ID NO: 51314 - DNA, 20 bp, Artificial Sequence
  Description of Artificial Sequence: Synthetic oligonucleotide
  Target: LAMA2; (+) strand; PAM type: NNNNGHTT; PAM sequence: TGGGGATT
actatttgactttgcatgca

SEQ ID NO: 51315 - DNA, 20 bp, Artificial Sequence
  Description of Artificial Sequence: Synthetic oligonucleotide
  Target: LAMA2; (+) strand; PAM type: NNNNGHTT; PAM sequence: AATGGATT
gtgtccttggtgaaaataat

SEQ ID NO: 51316 - DNA, 20 bp, Artificial Sequence
  Description of Artificial Sequence: Synthetic oligonucleotide
  Target: LAMA2; (+) strand; PAM type: NNNNGHTT; PAM sequence: ATTTGTTT
aatggattctgaatttaaat

SEQ ID NO: 51317 - DNA, 20 bp, Artificial Sequence
  Description of Artificial Sequence: Synthetic oligonucleotide
  Target: LAMA2; (+) strand; PAM type: NNNNGHTT; PAM sequence: AAAGGCTT
accacaagtatcagagtgag

SEQ ID NO: 51318 - DNA, 20 bp, Artificial Sequence
  Description of Artificial Sequence: Synthetic oligonucleotide
  Target: LAMA2; (+) strand; PAM type: NNNNGHTT; PAM sequence: TTTTGCTT
gcattatggacttttttttt

SEQ ID NO: 51319 - DNA, 20 bp, Artificial Sequence
  Description of Artificial Sequence: Synthetic oligonucleotide
  Target: LAMA2; (+) strand; PAM type: NNNNGHTT; PAM sequence: TGGCGCTT
tcatttcacatgtctgcaaa

SEQ ID NO: 51320 - DNA, 20 bp, Artificial Sequence
  Description of Artificial Sequence: Synthetic oligonucleotide
  Target: LAMA2; (+) strand; PAM type: NNNNGHTT; PAM sequence: AGGTGCTT
tctgctggtctcctctttaa

SEQ ID NO: 51321 - DNA, 20 bp, Artificial Sequence
  Description of Artificial Sequence: Synthetic oligonucleotide
  Target: LAMA2; (+) strand; PAM type: NNNNGHTT; PAM sequence: TCTTGTTT
ggtgctttatatctgatatc

SEQ ID NO: 51322 - DNA, 20 bp, Artificial Sequence
  Description of Artificial Sequence: Synthetic oligonucleotide
  Target: LAMA2; (+) strand; PAM type: NNNNGHTT; PAM sequence: ACTAGATT
ttgtttttgtatttctctga

SEQ ID NO: 51323 - DNA, 20 bp, Artificial Sequence
  Description of Artificial Sequence: Synthetic oligonucleotide
  Target: LAMA2; (+) strand; PAM type: NNNNGHTT; PAM sequence: GTCAGCTT
tagaaatgcgtaaaggcaaa

SEQ ID NO: 51324 - DNA, 20 bp, Artificial Sequence
  Description of Artificial Sequence: Synthetic oligonucleotide
  Target: LAMA2; (+) strand; PAM type: NNNNGHTT; PAM sequence: CCCAGATT
ggagttggacgtgtagagta

SEQ ID NO: 51325 - DNA, 20 bp, Artificial Sequence
  Description of Artificial Sequence: Synthetic oligonucleotide
  Target: LAMA2; (+) strand; PAM type: NNNNGHTT; PAM sequence: TAAAGATT
catcaaggtaaccaacttaa

SEQ ID NO: 51326 - DNA, 20 bp, Artificial Sequence
  Description of Artificial Sequence: Synthetic oligonucleotide
  Target: LAMA2; (+) strand; PAM type: NNNNGHTT; PAM sequence: AGTAGTTT
attaaatgatagaattttga

SEQ ID NO: 51327 - DNA, 20 bp, Artificial Sequence
  Description of Artificial Sequence: Synthetic oligonucleotide
  Target: LAMA2; (+) strand; PAM type: NNNNGHTT; PAM sequence: CCCAGTTT
atagaattttgaagtagttt

SEQ ID NO: 51328 - DNA, 20 bp, Artificial Sequence
  Description of Artificial Sequence: Synthetic oligonucleotide
  Target: LAMA2; (+) strand; PAM type: NNNNGHTT; PAM sequence: GTATGTTT
ttatacatgtctgggagtgg

SEQ ID NO: 51329 - DNA, 20 bp, Artificial Sequence
  Description of Artificial Sequence: Synthetic oligonucleotide
  Target: LAMA2; (+) strand; PAM type: NNNNGHTT; PAM sequence: CGCTGTTT
tggtaggaatttgggggtgt

SEQ ID NO: 51330 - DNA, 20 bp, Artificial Sequence
  Description of Artificial Sequence: Synthetic oligonucleotide
  Target: LAMA2; (+) strand; PAM type: NNNNGHTT; PAM sequence: TCAGGCTT
aatttgggggtgtcgctgtt

SEQ ID NO: 51331 - DNA, 20 bp, Artificial Sequence
  Description of Artificial Sequence: Synthetic oligonucleotide
  Target: LAMA2; (+) strand; PAM type: NNNNGHTT; PAM sequence: TATTGCTT
ccaaagcataagagcaccat

SEQ ID NO: 51332 - DNA, 20 bp, Artificial Sequence
  Description of Artificial Sequence: Synthetic oligonucleotide
  Target: LAMA2; (+) strand; PAM type: NNNNGHTT; PAM sequence: TGCAGTTT
acatagccaccatagaaaaa

SEQ ID NO: 51333 - DNA, 20 bp, Artificial Sequence
  Description of Artificial Sequence: Synthetic oligonucleotide
  Target: LAMA2; (+) strand; PAM type: NNNNGHTT; PAM sequence: AACTGATT
taaaatgggaagtaactgag

SEQ ID NO: 51334 - DNA, 20 bp, Artificial Sequence
  Description of Artificial Sequence: Synthetic oligonucleotide
  Target: LAMA2; (+) strand; PAM type: NNNNGHTT; PAM sequence: TGGAGCTT
tgattcagttattctatctt

SEQ ID NO: 51335 - DNA, 20 bp, Artificial Sequence
  Description of Artificial Sequence: Synthetic oligonucleotide
  Target: LAMA2; (+) strand; PAM type: NNNNGHTT; PAM sequence: TATAGATT
attatcaacatctagtacca

SEQ ID NO: 51336 - DNA, 20 bp, Artificial Sequence
  Description of Artificial Sequence: Synthetic oligonucleotide
  Target: LAMA2; (+) strand; PAM type: NNNNGHTT; PAM sequence: TCTTGTTT
acttccctcccattttctct

SEQ ID NO: 51337 - DNA, 20 bp, Artificial Sequence
  Description of Artificial Sequence: Synthetic oligonucleotide
  Target: LAMA2; (+) strand; PAM type: NNNNGHTT; PAM sequence: TAGAGTTT
tgttgactctgggtgataca

SEQ ID NO: 51338 - DNA, 20 bp, Artificial Sequence
  Description of Artificial Sequence: Synthetic oligonucleotide
  Target: LAMA2; (+) strand; PAM type: NNNNGHTT; PAM sequence: TGCTGTTT
gggtgatacatagagtttca

SEQ ID NO: 51339 - DNA, 20 bp, Artificial Sequence
  Description of Artificial Sequence: Synthetic oligonucleotide
  Target: LAMA2; (+) strand; PAM type: NNNNGHTT; PAM sequence: AAAAGTTT
acttaattttttccataata

SEQ ID NO: 51340 - DNA, 20 bp, Artificial Sequence
  Description of Artificial Sequence: Synthetic oligonucleotide
  Target: LAMA2; (+) strand; PAM type: NNNNGHTT; PAM sequence: GGAAGTTT
atatttttagttctttttaa

SEQ ID NO: 51341 - DNA, 20 bp, Artificial Sequence
  Description of Artificial Sequence: Synthetic oligonucleotide
  Target: LAMA2; (+) strand; PAM type: NNNNGHTT; PAM sequence: GAGTGCTT
atgtgtgagagagagtgaca

SEQ ID NO: 51342 - DNA, 20 bp, Artificial Sequence
  Description of Artificial Sequence: Synthetic oligonucleotide
  Target: LAMA2; (+) strand; PAM type: NNNNGHTT; PAM sequence: GCGTGTTT
gagagagtgacagagtgctt

SEQ ID NO: 51343 - DNA, 20 bp, Artificial Sequence
  Description of Artificial Sequence: Synthetic oligonucleotide
  Target: LAMA2; (+) strand; PAM type: NNNNGHTT; PAM sequence: CCGGGTTT
tgagggaattaagtacttaa

SEQ ID NO: 51344 - DNA, 20 bp, Artificial Sequence
  Description of Artificial Sequence: Synthetic oligonucleotide
  Target: LAMA2; (+) strand; PAM type: NNNNGHTT; PAM sequence: AAAAGATT
aacattgcatcctcaaagaa

SEQ ID NO: 51345 - DNA, 20 bp, Artificial Sequence
  Description of Artificial Sequence: Synthetic oligonucleotide
  Target: LAMA2; (+) strand; PAM type: NNNNGHTT; PAM sequence: CGAAGTTT
cagtcagggaaatatgacat

SEQ ID NO: 51346 - DNA, 20 bp, Artificial Sequence
  Description of Artificial Sequence: Synthetic oligonucleotide
  Target: LAMA2; (+) strand; PAM type: NNNNGHTT; PAM sequence: GACTGCTT
tgacatcgaagttttgttat

SEQ ID NO: 51347 - DNA, 20 bp, Artificial Sequence
  Description of Artificial Sequence: Synthetic oligonucleotide
  Target: LAMA2; (+) strand; PAM type: NNNNGHTT; PAM sequence: ACCAGATT
ctgcttgtctcaaaagagag

SEQ ID NO: 51348 - DNA, 20 bp, Artificial Sequence
  Description of Artificial Sequence: Synthetic oligonucleotide
  Target: LAMA2; (+) strand; PAM type: NNNNGHTT; PAM sequence: AATAGCTT
agaaaatgaaataaaatgat

SEQ ID NO: 51349 - DNA, 20 bp, Artificial Sequence
  Description of Artificial Sequence: Synthetic oligonucleotide
  Target: LAMA2; (+) strand; PAM type: NNNNGHTT; PAM sequence: TGCAGCTT
aagaattttaggagaaatca

SEQ ID NO: 51350 - DNA, 20 bp, Artificial Sequence
  Description of Artificial Sequence: Synthetic oligonucleotide
  Target: LAMA2; (+) strand; PAM type: NNNNGHTT; PAM sequence: AAAGGCTT
tattatgtaagccataggaa

SEQ ID NO: 51351 - DNA, 20 bp, Artificial Sequence
  Description of Artificial Sequence: Synthetic oligonucleotide
  Target: LAMA2; (+) strand; PAM type: NNNNGHTT; PAM sequence: TATTGATT
agccaagatcagactctgag

SEQ ID NO: 51352 - DNA, 20 bp, Artificial Sequence
  Description of Artificial Sequence: Synthetic oligonucleotide
  Target: LAMA2; (+) strand; PAM type: NNNNGHTT; PAM sequence: GCCAGTTT
ggaatgttagaaactaaaca

SEQ ID NO: 51353 - DNA, 20 bp, Artificial Sequence
  Description of Artificial Sequence: Synthetic oligonucleotide
  Target: LAMA2; (+) strand; PAM type: NNNNGHTT; PAM sequence: ACACGATT
ttcgacgtctcctccagggt

SEQ ID NO: 51354 - DNA, 20 bp, Artificial Sequence
  Description of Artificial Sequence: Synthetic oligonucleotide
  Target: LAMA2; (+) strand; PAM type: NNNNGHTT; PAM sequence: TGCTGTTT
agatgtggatgcaaatgcaa

SEQ ID NO: 51355 - DNA, 20 bp, Artificial Sequence
  Description of Artificial Sequence: Synthetic oligonucleotide
  Target: LAMA2; (+) strand; PAM type: NNNNGHTT; PAM sequence: TCCTGTTT
aggtaatgtgttcatcctcc

SEQ ID NO: 51356 - DNA, 20 bp, Artificial Sequence
  Description of Artificial Sequence: Synthetic oligonucleotide
  Target: LAMA2; (+) strand; PAM type: NNNNGHTT; PAM sequence: TCACGTTT
taaagctctgtaaaacttga

SEQ ID NO: 51357 - DNA, 20 bp, Artificial Sequence
  Description of Artificial Sequence: Synthetic oligonucleotide
  Target: LAMA2; (+) strand; PAM type: NNNNGHTT; PAM sequence: TGACGATT
tgagtaagaattttcttctt

SEQ ID NO: 51358 - DNA, 20 bp, Artificial Sequence
  Description of Artificial Sequence: Synthetic oligonucleotide
  Target: LAMA2; (+) strand; PAM type: NNNNGHTT; PAM sequence: TGTTGTTT
tgtgtatttatttaaacagc

SEQ ID NO: 51359 - DNA, 20 bp, Artificial Sequence
  Description of Artificial Sequence: Synthetic oligonucleotide
  Target: LAMA2; (+) strand; PAM type: NNNNGHTT; PAM sequence: ATCAGTTT
gttttgtctttatctgtggc

SEQ ID NO: 51360 - DNA, 20 bp, Artificial Sequence
  Description of Artificial Sequence: Synthetic oligonucleotide
  Target: LAMA2; (+) strand; PAM type: NNNNGHTT; PAM sequence: TCTTGTTT
ggcatcagttttttgtatat

SEQ ID NO: 51361 - DNA, 20 bp, Artificial Sequence
  Description of Artificial Sequence: Synthetic oligonucleotide
  Target: LAMA2; (+) strand; PAM type: NNNNGHTT; PAM sequence: AAGTGTTT
ttttagttgcctcaagagca

SEQ ID NO: 51362 - DNA, 20 bp, Artificial Sequence
  Description of Artificial Sequence: Synthetic oligonucleotide
  Target: LAMA2; (+) strand; PAM type: NNNNGHTT; PAM sequence: AATCGATT
taagtatacctcatcttctg

SEQ ID NO: 51363 - DNA, 20 bp, Artificial Sequence
  Description of Artificial Sequence: Synthetic oligonucleotide
  Target: LAMA2; (+) strand; PAM type: NNNNGHTT; PAM sequence: TTATGATT
acctcatcttctgaatcgat

SEQ ID NO: 51364 - DNA, 20 bp, Artificial Sequence
  Description of Artificial Sequence: Synthetic oligonucleotide
  Target: LAMA2; (+) strand; PAM type: NNNNGHTT; PAM sequence: AAAAGATT
gttcatactcacatctaatt

SEQ ID NO: 51365 - DNA, 20 bp, Artificial Sequence
  Description of Artificial Sequence: Synthetic oligonucleotide
  Target: LAMA2; (+) strand; PAM type: NNNNGHTT; PAM sequence: ATAAGCTT
tgggaaatatcacaggagct

SEQ ID NO: 51366 - DNA, 20 bp, Artificial Sequence
  Description of Artificial Sequence: Synthetic oligonucleotide
  Target: LAMA2; (+) strand; PAM type: NNNNGHTT; PAM sequence: TCTGGTTT
tataagctttcaaaacatga

SEQ ID NO: 51367 - DNA, 20 bp, Artificial Sequence
  Description of Artificial Sequence: Synthetic oligonucleotide
  Target: LAMA2; (+) strand; PAM type: NNNNGHTT; PAM sequence: AATTGCTT
atgatgcacttaatattcat

SEQ ID NO: 51368 - DNA, 20 bp, Artificial Sequence
  Description of Artificial Sequence: Synthetic oligonucleotide
  Target: LAMA2; (+) strand; PAM type: NNNNGHTT; PAM sequence: AGAAGCTT
gcagaatgcctgccttttaa

SEQ ID NO: 51369 - DNA, 20 bp, Artificial Sequence
  Description of Artificial Sequence: Synthetic oligonucleotide
  Target: LAMA2; (+) strand; PAM type: NNNNGHTT; PAM sequence: TGTTGATT
ctgccttttaaagaagcttg

SEQ ID NO: 51370 - DNA, 20 bp, Artificial Sequence
  Description of Artificial Sequence: Synthetic oligonucleotide
  Target: LAMA2; (+) strand; PAM type: NNNNGHTT; PAM sequence: CTGGGCTT
accaaatataatggataatc

SEQ ID NO: 51371 - DNA, 20 bp, Artificial Sequence
  Description of Artificial Sequence: Synthetic oligonucleotide
  Target: LAMA2; (+) strand; PAM type: NNNNGHTT; PAM sequence: TTGAGATT
cttgtcagaatcatcctgag

SEQ ID NO: 51372 - DNA, 20 bp, Artificial Sequence
  Description of Artificial Sequence: Synthetic oligonucleotide
  Target: LAMA2; (+) strand; PAM type: NNNNGHTT; PAM sequence: CCTCGTTT
aaaccacacgctgaagttat

SEQ ID NO: 51373 - DNA, 20 bp, Artificial Sequence
  Description of Artificial Sequence: Synthetic oligonucleotide
  Target: LAMA2; (+) strand; PAM type: NNNNGHTT; PAM sequence: GTTGGATT
aattttgaaatcaaatccag

SEQ ID NO: 51374 - DNA, 20 bp, Artificial Sequence
  Description of Artificial Sequence: Synthetic oligonucleotide
  Target: LAMA2; (+) strand; PAM type: NNNNGHTT; PAM sequence: TTGGGCTT
tagacaagtcacttaacccc

SEQ ID NO: 51375 - DNA, 20 bp, Artificial Sequence
  Description of Artificial Sequence: Synthetic oligonucleotide
  Target: LAMA2; (+) strand; PAM type: NNNNGHTT; PAM sequence: CCTTGCTT
aagaatgataaaaatatcta

SEQ ID NO: 51376 - DNA, 20 bp, Artificial Sequence
  Description of Artificial Sequence: Synthetic oligonucleotide
  Target: LAMA2; (+) strand; PAM type: NNNNGHTT; PAM sequence: ACTTGTTT
tcagtaatttacatgaatta

SEQ ID NO: 51377 - DNA, 20 bp, Artificial Sequence
  Description of Artificial Sequence: Synthetic oligonucleotide
  Target: LAMA2; (+) strand; PAM type: NNNNGHTT; PAM sequence: GGTAGTTT
agaaaaataccatgaaactg

SEQ ID NO: 51378 - DNA, 20 bp, Artificial Sequence
  Description of Artificial Sequence: Synthetic oligonucleotide
  Target: LAMA2; (+) strand; PAM type: NNNNGHTT; PAM sequence: GGCAGATT
aagtctgagatcaaggtact

SEQ ID NO: 51379 - DNA, 20 bp, Artificial Sequence
  Description of Artificial Sequence: Synthetic oligonucleotide
  Target: LAMA2; (+) strand; PAM type: NNNNGHTT; PAM sequence: TGGTGTTT
gatcaaggtactggcagatt

SEQ ID NO: 51380 - DNA, 20 bp, Artificial Sequence
  Description of Artificial Sequence: Synthetic oligonucleotide
  Target: LAMA2; (+) strand; PAM type: NNNNGHTT; PAM sequence: GCCAGTTT
agatttggtgtttagtgaga

SEQ ID NO: 51381 - DNA, 20 bp, Artificial Sequence
  Description of Artificial Sequence: Synthetic oligonucleotide
  Target: LAMA2; (+) strand; PAM type: NNNNGHTT; PAM sequence: GGAGGCTT
agagccagtttttcatagaa

SEQ ID NO: 51382 - DNA, 20 bp, Artificial Sequence
  Description of Artificial Sequence: Synthetic oligonucleotide
  Target: LAMA2; (+) strand; PAM type: NNNNGHTT; PAM sequence: GTAGGATT
taataccatcactttggcgg

SEQ ID NO: 51383 - DNA, 20 bp, Artificial Sequence
  Description of Artificial Sequence: Synthetic oligonucleotide
  Target: LAMA2; (+) strand; PAM type: NNNNGHTT; PAM sequence: CTGGGATT
tcacacagtaattagcagag

SEQ ID NO: 51384 - DNA, 20 bp, Artificial Sequence
  Description of Artificial Sequence: Synthetic oligonucleotide
  Target: LAMA2; (+) strand; PAM type: NNNNGHTT; PAM sequence: TCTTGCTT
agtggtcttcactctcaaca

SEQ ID NO: 51385 - DNA, 20 bp, Artificial Sequence
  Description of Artificial Sequence: Synthetic oligonucleotide
  Target: LAMA2; (+) strand; PAM type: NNNNGHTT; PAM sequence: TATAGCTT
gagcaggaaaatctctcaaa

SEQ ID NO: 51386 - DNA, 20 bp, Artificial Sequence
  Description of Artificial Sequence: Synthetic oligonucleotide
  Target: LAMA2; (+) strand; PAM type: NNNNGHTT; PAM sequence: ATGGGTTT
agtgggaaatgtacatgttg

SEQ ID NO: 51387 - DNA, 20 bp, Artificial Sequence
  Description of Artificial Sequence: Synthetic oligonucleotide
  Target: LAMA2; (+) strand; PAM type: NNNNGHTT; PAM sequence: TCTAGATT
gtgtgtagtaggctatacca

SEQ ID NO: 51388 - DNA, 20 bp, Artificial Sequence
  Description of Artificial Sequence: Synthetic oligonucleotide
  Target: LAMA2; (+) strand; PAM type: NNNNGHTT; PAM sequence: CTATGCTT
ttgtgcaagtactgtacagt

SEQ ID NO: 51389 - DNA, 20 bp, Artificial Sequence
  Description of Artificial Sequence: Synthetic oligonucleotide
  Target: LAMA2; (+) strand; PAM type: NNNNGHTT; PAM sequence: AACTGATT
tatgcttttaactattcagt

SEQ ID NO: 51390 - DNA, 20 bp, Artificial Sequence
  Description of Artificial Sequence: Synthetic oligonucleotide
  Target: LAMA2; (+) strand; PAM type: NNNNGHTT; PAM sequence: AACTGTTT
taaaattttaactattcagt

SEQ ID NO: 51391 - DNA, 20 bp, Artificial Sequence
  Description of Artificial Sequence: Synthetic oligonucleotide
  Target: LAMA2; (+) strand; PAM type: NNNNGHTT; PAM sequence: GCATGTTT
taaaaaccaaatgagtcaat

SEQ ID NO: 51392 - DNA, 20 bp, Artificial Sequence
  Description of Artificial Sequence: Synthetic oligonucleotide
  Target: LAMA2; (+) strand; PAM type: NNNNGHTT; PAM sequence: CAGAGTTT
aatatgggttcactttggca

SEQ ID NO: 51393 - DNA, 20 bp, Artificial Sequence
  Description of Artificial Sequence: Synthetic oligonucleotide
  Target: LAMA2; (+) strand; PAM type: NNNNGHTT; PAM sequence: CTAGGCTT
tggtacagcctactacacac

SEQ ID NO: 51394 - DNA, 20 bp, Artificial Sequence
  Description of Artificial Sequence: Synthetic oligonucleotide
  Target: LAMA2; (+) strand; PAM type: NNNNGHTT; PAM sequence: AGTTGTTT
taatgtgtcaatgccaaaac

SEQ ID NO: 51395 - DNA, 20 bp, Artificial Sequence
  Description of Artificial Sequence: Synthetic oligonucleotide
  Target: LAMA2; (+) strand; PAM type: NNNNGHTT; PAM sequence: TCATGATT
gaccaggtcattctctttct

SEQ ID NO: 51396 - DNA, 20 bp, Artificial Sequence
  Description of Artificial Sequence: Synthetic oligonucleotide
  Target: LAMA2; (+) strand; PAM type: NNNNGHTT; PAM sequence: CCAGGATT
cttttcctgtgaaaatgaca

SEQ ID NO: 51397 - DNA, 20 bp, Artificial Sequence
  Description of Artificial Sequence: Synthetic oligonucleotide
  Target: LAMA2; (+) strand; PAM type: NNNNGHTT; PAM sequence: ATCAGATT
tgacaccaggattgaatttg

SEQ ID NO: 51398 - DNA, 20 bp, Artificial Sequence
  Description of Artificial Sequence: Synthetic oligonucleotide
  Target: LAMA2; (+) strand; PAM type: NNNNGHTT; PAM sequence: TGTCGATT
ttgaatttgatcagattatt

SEQ ID NO: 51399 - DNA, 20 bp, Artificial Sequence
  Description of Artificial Sequence: Synthetic oligonucleotide
  Target: LAMA2; (+) strand; PAM type: NNNNGHTT; PAM sequence: AGTTGCTT
tgtggtctcatttcctacaa

SEQ ID NO: 51400 - DNA, 20 bp, Artificial Sequence
  Description of Artificial Sequence: Synthetic oligonucleotide
  Target: LAMA2; (+) strand; PAM type: NNNNGHTT; PAM sequence: GAGTGATT
tttacagcagcactaccata

SEQ ID NO: 51401 - DNA, 20 bp, Artificial Sequence
  Description of Artificial Sequence: Synthetic oligonucleotide
  Target: LAMA2; (+) strand; PAM type: NNNNGHTT; PAM sequence: AAGTGCTT
taccatagagtgatttatac

SEQ ID NO: 51402 - DNA, 20 bp, Artificial Sequence
  Description of Artificial Sequence: Synthetic oligonucleotide
  Target: LAMA2; (+) strand; PAM type: NNNNGHTT; PAM sequence: AAAAGCTT
tttcttctgatctcagggga

SEQ ID NO: 51403 - DNA, 20 bp, Artificial Sequence
  Description of Artificial Sequence: Synthetic oligonucleotide
  Target: LAMA2; (+) strand; PAM type: NNNNGHTT; PAM sequence: CTGAGATT
caccttctgtatatcaggca

SEQ ID NO: 51404 - DNA, 20 bp, Artificial Sequence
  Description of Artificial Sequence: Synthetic oligonucleotide
  Target: LAMA2; (+) strand; PAM type: NNNNGHTT; PAM sequence: AAGTGTTT
acctaaagttagaagctagg

SEQ ID NO: 51405 - DNA, 20 bp, Artificial Sequence
  Description of Artificial Sequence: Synthetic oligonucleotide
  Target: LAMA2; (+) strand; PAM type: NNNNGHTT; PAM sequence: CGTGGATT
agcaaaaagtaatcagcatt

SEQ ID NO: 51406 - DNA, 20 bp, Artificial Sequence
  Description of Artificial Sequence: Synthetic oligonucleotide
  Target: LAMA2; (+) strand; PAM type: NNNNGHTT; PAM sequence: TTGAGCTT
agcattcgtggattaaatag

SEQ ID NO: 51407 - DNA, 20 bp, Artificial Sequence
  Description of Artificial Sequence: Synthetic oligonucleotide
  Target: LAMA2; (+) strand; PAM type: NNNNGHTT; PAM sequence: TTTAGTTT
aaagaatggataatgataac

SEQ ID NO: 51408 - DNA, 20 bp, Artificial Sequence
  Description of Artificial Sequence: Synthetic oligonucleotide
  Target: LAMA2; (+) strand; PAM type: NNNNGHTT; PAM sequence: CCAAGATT
taataactctcatggataaa

SEQ ID NO: 51409 - DNA, 20 bp, Artificial Sequence
  Description of Artificial Sequence: Synthetic oligonucleotide
  Target: LAMA2; (+) strand; PAM type: NNNNGHTT; PAM sequence: GTGTGATT
gcagaaggctgatgctgtac

SEQ ID NO: 51410 - DNA, 20 bp, Artificial Sequence
  Description of Artificial Sequence: Synthetic oligonucleotide
  Target: LAMA2; (+) strand; PAM type: NNNNGHTT; PAM sequence: ATAGGTTT
catactttgacaacaaacct

SEQ ID NO: 51411 - DNA, 20 bp, Artificial Sequence
  Description of Artificial Sequence: Synthetic oligonucleotide
  Target: LAMA2; (+) strand; PAM type: NNNNGHTT; PAM sequence: AAAAGCTT
gggtctgtcctgtgcataat

SEQ ID NO: 51412 - DNA, 20 bp, Artificial Sequence
  Description of Artificial Sequence: Synthetic oligonucleotide
  Target: LAMA2; (+) strand; PAM type: NNNNGHTT; PAM sequence: CTTCGATT
tgtcctgtgcataataaaag

SEQ ID NO: 51413 - DNA, 20 bp, Artificial Sequence
  Description of Artificial Sequence: Synthetic oligonucleotide
  Target: LAMA2; (+) strand; PAM type: NNNNGHTT; PAM sequence: GCAGGTTT
tatcatgtggatgatgtgga

SEQ ID NO: 51414 - DNA, 20 bp, Artificial Sequence
  Description of Artificial Sequence: Synthetic oligonucleotide
  Target: LAMA2; (+) strand; PAM type: NNNNGHTT; PAM sequence: AAAGGATT
gatgatgtggagcaggtttg

SEQ ID NO: 51415 - DNA, 20 bp, Artificial Sequence
  Description of Artificial Sequence: Synthetic oligonucleotide
  Target: LAMA2; (+) strand; PAM type: NNNNGHTT; PAM sequence: ATATGTTT
agcagtacatttgcatagtc

SEQ ID NO: 51416 - DNA, 20 bp, Artificial Sequence
  Description of Artificial Sequence: Synthetic oligonucleotide
  Target: LAMA2; (+) strand; PAM type: NNNNGHTT; PAM sequence: AAGAGATT
tttataaaatttgcaaaggt

SEQ ID NO: 51417 - DNA, 20 bp, Artificial Sequence
  Description of Artificial Sequence: Synthetic oligonucleotide
  Target: LAMA2; (+) strand; PAM type: NNNNGHTT; PAM sequence: TTAAGTTT
gagattttggctacaatcag

SEQ ID NO: 51418 - DNA, 20 bp, Artificial Sequence
  Description of Artificial Sequence: Synthetic oligonucleotide
  Target: LAMA2; (+) strand; PAM type: NNNNGHTT; PAM sequence: AGGGGTTT
tccaatgttctttcatgtcg

SEQ ID NO: 51419 - DNA, 20 bp, Artificial Sequence
  Description of Artificial Sequence: Synthetic oligonucleotide
  Target: LAMA2; (+) strand; PAM type: NNNNGHTT; PAM sequence: GAGAGCTT
tataatttttttttcctaaa

SEQ ID NO: 51420 - DNA, 20 bp, Artificial Sequence
  Description of Artificial Sequence: Synthetic oligonucleotide
  Target: LAMA2; (+) strand; PAM type: NNNNGHTT; PAM sequence: AACTGATT
cctaaagagagctttcccca

SEQ ID NO: 51421 - DNA, 20 bp, Artificial Sequence
  Description of Artificial Sequence: Synthetic oligonucleotide
  Target: LAMA2; (+) strand; PAM type: NNNNGHTT; PAM sequence: TTAAGTTT
gagagctttccccaaactga

SEQ ID NO: 51422 - DNA, 20 bp, Artificial Sequence
  Description of Artificial Sequence: Synthetic oligonucleotide
  Target: LAMA2; (+) strand; PAM type: NNNNGHTT; PAM sequence: TTATGTTT
tgagcatgaattcactatat

SEQ ID NO: 51423 - DNA, 20 bp, Artificial Sequence
  Description of Artificial Sequence: Synthetic oligonucleotide
  Target: LAMA2; (+) strand; PAM type: NNNNGHTT; PAM sequence: CTAGGTTT
aacaaaattagaaccccagc

SEQ ID NO: 51424 - DNA, 20 bp, Artificial Sequence
  Description of Artificial Sequence: Synthetic oligonucleotide
  Target: LAMA2; (+) strand; PAM type: NNNNGHTT; PAM sequence: ACAGGATT
cagcctaggttttatctctt

SEQ ID NO: 51425 - DNA, 20 bp, Artificial Sequence
  Description of Artificial Sequence: Synthetic oligonucleotide
  Target: LAMA2; (+) strand; PAM type: NNNNGHTT; PAM sequence: AAGTGCTT
attgacacataggatcctac

SEQ ID NO: 51426 - DNA, 20 bp, Artificial Sequence
  Description of Artificial Sequence: Synthetic oligonucleotide
  Target: LAMA2; (+) strand; PAM type: NNNNGHTT; PAM sequence: ATGGGATT
agtgcttcaactggaaacct

SEQ ID NO: 51427 - DNA, 20 bp, Artificial Sequence
  Description of Artificial Sequence: Synthetic oligonucleotide
  Target: LAMA2; (+) strand; PAM type: NNNNGHTT; PAM sequence: TAATGATT
aactggaaacctatgggatt

SEQ ID NO: 51428 - DNA, 20 bp, Artificial Sequence
  Description of Artificial Sequence: Synthetic oligonucleotide
  Target: LAMA2; (+) strand; PAM type: NNNNGHTT; PAM sequence: TTCTGCTT
aaacctatgggatttaatga

SEQ ID NO: 51429 - DNA, 20 bp, Artificial Sequence
  Description of Artificial Sequence: Synthetic oligonucleotide
  Target: LAMA2; (+) strand; PAM type: NNNNGHTT; PAM sequence: AGAGGATT
taaaatatttagctataagt

SEQ ID NO: 51430 - DNA, 20 bp, Artificial Sequence
  Description of Artificial Sequence: Synthetic oligonucleotide
  Target: LAMA2; (+) strand; PAM type: NNNNGHTT; PAM sequence: AGGAGTTT
tcaaaaaccattaagtgcta

SEQ ID NO: 51431 - DNA, 20 bp, Artificial Sequence
  Description of Artificial Sequence: Synthetic oligonucleotide
  Target: LAMA2; (+) strand; PAM type: NNNNGHTT; PAM sequence: ATACGTTT
tttccatttaaaggatatac

SEQ ID NO: 51432 - DNA, 20 bp, Artificial Sequence
  Description of Artificial Sequence: Synthetic oligonucleotide
  Target: LAMA2; (+) strand; PAM type: NNNNGHTT; PAM sequence: TAGAGTTT
catttctttctctacatctc

SEQ ID NO: 51433 - DNA, 20 bp, Artificial Sequence
  Description of Artificial Sequence: Synthetic oligonucleotide
  Target: LAMA2; (+) strand; PAM type: NNNNGHTT; PAM sequence: CTTTGTTT
aaaagtcttaacttccaact

SEQ ID NO: 51434 - DNA, 20 bp, Artificial Sequence
  Description of Artificial Sequence: Synthetic oligonucleotide
  Target: LAMA2; (+) strand; PAM type: NNNNGHTT; PAM sequence: GATAGTTT
cttgtcaacatgaaattgag

SEQ ID NO: 51435 - DNA, 20 bp, Artificial Sequence
  Description of Artificial Sequence: Synthetic oligonucleotide
  Target: LAMA2; (+) strand; PAM type: NNNNGHTT; PAM sequence: CATTGTTT
gtttgaaagcgtgacccatt

SEQ ID NO: 51436 - DNA, 20 bp, Artificial Sequence
  Description of Artificial Sequence: Synthetic oligonucleotide
  Target: LAMA2; (+) strand; PAM type: NNNNGHTT; PAM sequence: AATGGTTT
gtgacccattcattgtttaa

SEQ ID NO: 51437 - DNA, 20 bp, Artificial Sequence
  Description of Artificial Sequence: Synthetic oligonucleotide
  Target: LAMA2; (+) strand; PAM type: NNNNGHTT; PAM sequence: AAGCGTTT
accaacaccaacttttccct

SEQ ID NO: 51438 - DNA, 20 bp, Artificial Sequence
  Description of Artificial Sequence: Synthetic oligonucleotide
  Target: LAMA2; (+) strand; PAM type: NNNNGHTT; PAM sequence: GTAGGATT
tttctttggtaaacttctaa

SEQ ID NO: 51439 - DNA, 20 bp, Artificial Sequence
  Description of Artificial Sequence: Synthetic oligonucleotide
  Target: LAMA2; (+) strand; PAM type: NNNNGHTT; PAM sequence: CAAAGATT
atcactaattatcaattctg

SEQ ID NO: 51440 - DNA, 20 bp, Artificial Sequence
  Description of Artificial Sequence: Synthetic oligonucleotide
  Target: LAMA2; (+) strand; PAM type: NNNNGHTT; PAM sequence: TTATGATT
acataaagtattatgctaat

SEQ ID NO: 51441 - DNA, 20 bp, Artificial Sequence
  Description of Artificial Sequence: Synthetic oligonucleotide
  Target: LAMA2; (+) strand; PAM type: NNNNGHTT; PAM sequence: GGGTGTTT
agtattcctatgtatacgta

SEQ ID NO: 51442 - DNA, 20 bp, Artificial Sequence
  Description of Artificial Sequence: Synthetic oligonucleotide
  Target: LAMA2; (+) strand; PAM type: NNNNGHTT; PAM sequence: CAGAGATT
gtagggtgttttgtaggttg

SEQ ID NO: 51443 - DNA, 20 bp, Artificial Sequence
  Description of Artificial Sequence: Synthetic oligonucleotide
  Target: LAMA2; (+) strand; PAM type: NNNNGHTT; PAM sequence: TCACGTTT
gttttgtaggttgcagagat

SEQ ID NO: 51444 - DNA, 20 bp, Artificial Sequence
  Description of Artificial Sequence: Synthetic oligonucleotide
  Target: LAMA2; (+) strand; PAM type: NNNNGHTT; PAM sequence: ATCAGATT
agtatactacaattacccac

SEQ ID NO: 51445 - DNA, 20 bp, Artificial Sequence
  Description of Artificial Sequence: Synthetic oligonucleotide
  Target: LAMA2; (+) strand; PAM type: NNNNGHTT; PAM sequence: ATCTGCTT
atcagattaagggcatcatg

SEQ ID NO: 51446 - DNA, 20 bp, Artificial Sequence
  Description of Artificial Sequence: Synthetic oligonucleotide
  Target: LAMA2; (+) strand; PAM type: NNNNGHTT; PAM sequence: GAGTGTTT
ggaggaagagtgggaagccg

SEQ ID NO: 51447 - DNA, 20 bp, Artificial Sequence
  Description of Artificial Sequence: Synthetic oligonucleotide
  Target: LAMA2; (+) strand; PAM type: NNNNGHTT; PAM sequence: ACAAGATT
acaagtgtgaattcactcat

SEQ ID NO: 51448 - DNA, 20 bp, Artificial Sequence
  Description of Artificial Sequence: Synthetic oligonucleotide
  Target: LAMA2; (+) strand; PAM type: NNNNGHTT; PAM sequence: GAATGATT
tacaagattggcaaatggga

SEQ ID NO: 51449 - DNA, 20 bp, Artificial Sequence
  Description of Artificial Sequence: Synthetic oligonucleotide
  Target: LAMA2; (+) strand; PAM type: NNNNGHTT; PAM sequence: TCATGTTT
cacacttcttcccagcataa

SEQ ID NO: 51450 - DNA, 20 bp, Artificial Sequence
  Description of Artificial Sequence: Synthetic oligonucleotide
  Target: LAMA2; (+) strand; PAM type: NNNNGHTT; PAM sequence: TTCAGCTT
cattcacccatatgcctgcc

SEQ ID NO: 51451 - DNA, 20 bp, Artificial Sequence
  Description of Artificial Sequence: Synthetic oligonucleotide
  Target: LAMA2; (+) strand; PAM type: NNNNGHTT; PAM sequence: GCTTGATT
cacccatatgcctgccttca

SEQ ID NO: 51452 - DNA, 20 bp, Artificial Sequence
  Description of Artificial Sequence: Synthetic oligonucleotide
  Target: LAMA2; (+) strand; PAM type: NNNNGHTT; PAM sequence: TAATGTTT
tgaaataatcctatattttt

SEQ ID NO: 51453 - DNA, 20 bp, Artificial Sequence
  Description of Artificial Sequence: Synthetic oligonucleotide
  Target: LAMA2; (+) strand; PAM type: NNNNGHTT; PAM sequence: TCAGGATT
gagctgtgctaatactttga

SEQ ID NO: 51454 - DNA, 20 bp, Artificial Sequence
  Description of Artificial Sequence: Synthetic oligonucleotide
  Target: LAMA2; (+) strand; PAM type: NNNNGHTT; PAM sequence: TATTGTTT
aatactttgatcaggattgt

SEQ ID NO: 51455 - DNA, 20 bp, Artificial Sequence
  Description of Artificial Sequence: Synthetic oligonucleotide
  Target: LAMA2; (+) strand; PAM type: NNNNGHTT; PAM sequence: GTAAGTTT
ttctctaattacacacttgt

SEQ ID NO: 51456 - DNA, 20 bp, Artificial Sequence
  Description of Artificial Sequence: Synthetic oligonucleotide
  Target: LAMA2; (+) strand; PAM type: NNNNGHTT; PAM sequence: TGGTGTTT
aataatttttatagaactcc

SEQ ID NO: 51457 - DNA, 20 bp, Artificial Sequence
  Description of Artificial Sequence: Synthetic oligonucleotide
  Target: LAMA2; (+) strand; PAM type: NNNNGHTT; PAM sequence: GTTTGTTT
atttttatagaactcctggt

SEQ ID NO: 51458 - DNA, 20 bp, Artificial Sequence
  Description of Artificial Sequence: Synthetic oligonucleotide
  Target: LAMA2; (+) strand; PAM type: NNNNGHTT; PAM sequence: GTTTGTTT
ttatagaactcctggtgttt

SEQ ID NO: 51459 - DNA, 20 bp, Artificial Sequence
  Description of Artificial Sequence: Synthetic oligonucleotide
  Target: LAMA2; (+) strand; PAM type: NNNNGHTT; PAM sequence: GTTTGTTT
agaactcctggtgtttgttt

SEQ ID NO: 51460 - DNA, 20 bp, Artificial Sequence
  Description of Artificial Sequence: Synthetic oligonucleotide
  Target: LAMA2; (+) strand; PAM type: NNNNGHTT; PAM sequence: GTTTGTTT
ctcctggtgtttgtttgttt

SEQ ID NO: 51461 - DNA, 20 bp, Artificial Sequence
  Description of Artificial Sequence: Synthetic oligonucleotide
  Target: LAMA2; (+) strand; PAM type: NNNNGHTT; PAM sequence: GTTTGTTT
tggtgtttgtttgtttgttt

SEQ ID NO: 51462 - DNA, 20 bp, Artificial Sequence
  Description of Artificial Sequence: Synthetic oligonucleotide
  Target: LAMA2; (+) strand; PAM type: NNNNGHTT; PAM sequence: TGTTGCTT
tgtttgtttgtttgtttatt

SEQ ID NO: 51463 - DNA, 20 bp, Artificial Sequence
  Description of Artificial Sequence: Synthetic oligonucleotide
  Target: LAMA2; (+) strand; PAM type: NNNNGHTT; PAM sequence: GAGTGATT
tcattcctactaaagagcag

SEQ ID NO: 51464 - DNA, 20 bp, Artificial Sequence
  Description of Artificial Sequence: Synthetic oligonucleotide
  Target: LAMA2; (+) strand; PAM type: NNNNGHTT; PAM sequence: GTCAGTTT
tgtcataaagaccttagaat

SEQ ID NO: 51465 - DNA, 20 bp, Artificial Sequence
  Description of Artificial Sequence: Synthetic oligonucleotide
  Target: LAMA2; (+) strand; PAM type: NNNNGHTT; PAM sequence: TTATGCTT
tagaagagataaaattgttg

SEQ ID NO: 51466 - DNA, 20 bp, Artificial Sequence
  Description of Artificial Sequence: Synthetic oligonucleotide
  Target: LAMA2; (+) strand; PAM type: NNNNGHTT; PAM sequence: TCATGCTT
aaaagtgtatcttatttttc

SEQ ID NO: 51467 - DNA, 20 bp, Artificial Sequence
  Description of Artificial Sequence: Synthetic oligonucleotide
  Target: LAMA2; (+) strand; PAM type: NNNNGHTT; PAM sequence: TTAAGATT
tcatgcttctaaaattcaca

SEQ ID NO: 51468 - DNA, 20 bp, Artificial Sequence
  Description of Artificial Sequence: Synthetic oligonucleotide
  Target: LAMA2; (+) strand; PAM type: NNNNGHTT; PAM sequence: AGGGGCTT
tttattaattatgaaagaat

SEQ ID NO: 51469 - DNA, 20 bp, Artificial Sequence
  Description of Artificial Sequence: Synthetic oligonucleotide
  Target: LAMA2; (+) strand; PAM type: NNNNGHTT; PAM sequence: CCTTGTTT
ccaattcaaagccagactta

SEQ ID NO: 51470 - DNA, 20 bp, Artificial Sequence
  Description of Artificial Sequence: Synthetic oligonucleotide
  Target: LAMA2; (+) strand; PAM type: NNNNGHTT; PAM sequence: TAGTGTTT
cagacttaccttgtttctcc

SEQ ID NO: 51471 - DNA, 20 bp, Artificial Sequence
  Description of Artificial Sequence: Synthetic oligonucleotide
  Target: LAMA2; (+) strand; PAM type: NNNNGHTT; PAM sequence: CTGTGTTT
aactggggggatctacagct

SEQ ID NO: 51472 - DNA, 20 bp, Artificial Sequence
  Description of Artificial Sequence: Synthetic oligonucleotide
  Target: LAMA2; (+) strand; PAM type: NNNNGHTT; PAM sequence: TCATGTTT
acagatacataaaaatagcc

SEQ ID NO: 51473 - DNA, 20 bp, Artificial Sequence
  Description of Artificial Sequence: Synthetic oligonucleotide
  Target: LAMA2; (+) strand; PAM type: NNNNGHTT; PAM sequence: TATTGATT
ttcattaattatgcatccaa

SEQ ID NO: 51474 - DNA, 20 bp, Artificial Sequence
  Description of Artificial Sequence: Synthetic oligonucleotide
  Target: LAMA2; (+) strand; PAM type: NNNNGHTT; PAM sequence: ACTGGATT
ttgtcatcctacaaacatca

SEQ ID NO: 51475 - DNA, 20 bp, Artificial Sequence
  Description of Artificial Sequence: Synthetic oligonucleotide
  Target: LAMA2; (+) strand; PAM type: NNNNGHTT; PAM sequence: AGATGTTT
agtactgtattgtatgtact

SEQ ID NO: 51476 - DNA, 20 bp, Artificial Sequence
  Description of Artificial Sequence: Synthetic oligonucleotide
  Target: LAMA2; (+) strand; PAM type: NNNNGHTT; PAM sequence: TTGAGTTT
tattgtatgtactagatgtt

SEQ ID NO: 51477 - DNA, 20 bp, Artificial Sequence
  Description of Artificial Sequence: Synthetic oligonucleotide
  Target: LAMA2; (+) strand; PAM type: NNNNGHTT; PAM sequence: AAGTGCTT
caatataactatctactacc

SEQ ID NO: 51478 - DNA, 20 bp, Artificial Sequence
  Description of Artificial Sequence: Synthetic oligonucleotide
  Target: LAMA2; (+) strand; PAM type: NNNNGHTT; PAM sequence: GGTGGTTT
acacctcatgaaaggtgaga

SEQ ID NO: 51479 - DNA, 20 bp, Artificial Sequence
  Description of Artificial Sequence: Synthetic oligonucleotide
  Target: LAMA2; (+) strand; PAM type: NNNNGHTT; PAM sequence: ATCTGATT
tgacagactgaatagatatg

SEQ ID NO: 51480 - DNA, 20 bp, Artificial Sequence
  Description of Artificial Sequence: Synthetic oligonucleotide
  Target: LAMA2; (+) strand; PAM type: NNNNGHTT; PAM sequence: CAGAGTTT
ggtaaagatcatatgcatag

SEQ ID NO: 51481 - DNA, 20 bp, Artificial Sequence
  Description of Artificial Sequence: Synthetic oligonucleotide
  Target: LAMA2; (+) strand; PAM type: NNNNGHTT; PAM sequence: ATGCGTTT
gcagagtttccgtgactaaa

SEQ ID NO: 51482 - DNA, 20 bp, Artificial Sequence
  Description of Artificial Sequence: Synthetic oligonucleotide
  Target: LAMA2; (+) strand; PAM type: NNNNGHTT; PAM sequence: GTTTGCTT
agtttccgtgactaaaatgc

SEQ ID NO: 51483 - DNA, 20 bp, Artificial Sequence
  Description of Artificial Sequence: Synthetic oligonucleotide
  Target: LAMA2; (+) strand; PAM type: NNNNGHTT; PAM sequence: GGATGATT
gttattttctaaaaagcctg

SEQ ID NO: 51484 - DNA, 20 bp, Artificial Sequence
  Description of Artificial Sequence: Synthetic oligonucleotide
  Target: LAMA2; (+) strand; PAM type: NNNNGHTT; PAM sequence: TAGTGCTT
ccaagaatgggtgatacaga

SEQ ID NO: 51485 - DNA, 20 bp, Artificial Sequence
  Description of Artificial Sequence: Synthetic oligonucleotide
  Target: LAMA2; (+) strand; PAM type: NNNNGHTT; PAM sequence: AAATGCTT
catggagccatacagcagca

SEQ ID NO: 51486 - DNA, 20 bp, Artificial Sequence
  Description of Artificial Sequence: Synthetic oligonucleotide
  Target: LAMA2; (+) strand; PAM type: NNNNGHTT; PAM sequence: AGGTGATT
ttcagagacctgagttgaaa

SEQ ID NO: 51487 - DNA, 20 bp, Artificial Sequence
  Description of Artificial Sequence: Synthetic oligonucleotide
  Target: LAMA2; (+) strand; PAM type: NNNNGHTT; PAM sequence: ATATGTTT
cataccttttggttcactta

SEQ ID NO: 51488 - DNA, 20 bp, Artificial Sequence
  Description of Artificial Sequence: Synthetic oligonucleotide
  Target: LAMA2; (+) strand; PAM type: NNNNGHTT; PAM sequence: AATGGATT
aacaccaattctattttcaa

SEQ ID NO: 51489 - DNA, 20 bp, Artificial Sequence
  Description of Artificial Sequence: Synthetic oligonucleotide
  Target: LAMA2; (+) strand; PAM type: NNNNGHTT; PAM sequence: GTATGTTT
ctgtgtatctaaccactggg

SEQ ID NO: 51490 - DNA, 20 bp, Artificial Sequence
  Description of Artificial Sequence: Synthetic oligonucleotide
  Target: LAMA2; (+) strand; PAM type: NNNNGHTT; PAM sequence: GAGAGATT
gtatgtttactctattaata

SEQ ID NO: 51491 - DNA, 20 bp, Artificial Sequence
  Description of Artificial Sequence: Synthetic oligonucleotide
  Target: LAMA2; (+) strand; PAM type: NNNNGHTT; PAM sequence: AATGGCTT
agttacgatctgggctcagg

SEQ ID NO: 51492 - DNA, 20 bp, Artificial Sequence
  Description of Artificial Sequence: Synthetic oligonucleotide
  Target: LAMA2; (+) strand; PAM type: NNNNGHTT; PAM sequence: GTGAGTTT
gtcaagaattcaaaaacaag

SEQ ID NO: 51493 - DNA, 20 bp, Artificial Sequence
  Description of Artificial Sequence: Synthetic oligonucleotide
  Target: LAMA2; (+) strand; PAM type: NNNNGHTT; PAM sequence: TTTGGCTT
aaaatttatacagtcatttt

SEQ ID NO: 51494 - DNA, 20 bp, Artificial Sequence
  Description of Artificial Sequence: Synthetic oligonucleotide
  Target: LAMA2; (+) strand; PAM type: NNNNGHTT; PAM sequence: CTTAGATT
ttatacagtcatttttttgg

SEQ ID NO: 51495 - DNA, 20 bp, Artificial Sequence
  Description of Artificial Sequence: Synthetic oligonucleotide
  Target: LAMA2; (+) strand; PAM type: NNNNGHTT; PAM sequence: AGGTGATT
atttttttggcttagattat

SEQ ID NO: 51496 - DNA, 20 bp, Artificial Sequence
  Description of Artificial Sequence: Synthetic oligonucleotide
  Target: LAMA2; (+) strand; PAM type: NNNNGHTT; PAM sequence: GACTGATT
aggtgatttgggttagacat

SEQ ID NO: 51497 - DNA, 20 bp, Artificial Sequence
  Description of Artificial Sequence: Synthetic oligonucleotide
  Target: LAMA2; (+) strand; PAM type: NNNNGHTT; PAM sequence: AAATGCTT
acatgactgattgaagagcc

SEQ ID NO: 51498 - DNA, 20 bp, Artificial Sequence
  Description of Artificial Sequence: Synthetic oligonucleotide
  Target: LAMA2; (+) strand; PAM type: NNNNGHTT; PAM sequence: GAGAGCTT
tatcattttcttttgaaact

SEQ ID NO: 51499 - DNA, 20 bp, Artificial Sequence
  Description of Artificial Sequence: Synthetic oligonucleotide
  Target: LAMA2; (+) strand; PAM type: NNNNGHTT; PAM sequence: ATATGTTT
ttgcaaaattatatcctgta

SEQ ID NO: 51500 - DNA, 20 bp, Artificial Sequence
  Description of Artificial Sequence: Synthetic oligonucleotide
  Target: LAMA2; (+) strand; PAM type: NNNNGHTT; PAM sequence: GGGTGCTT
taatatgtttgaaaaatgtt

SEQ ID NO: 51501 - DNA, 20 bp, Artificial Sequence
  Description of Artificial Sequence: Synthetic oligonucleotide
  Target: LAMA2; (+) strand; PAM type: NNNNGHTT; PAM sequence: AGATGTTT
cttttctccctattttgtca

SEQ ID NO: 51502 - DNA, 20 bp, Artificial Sequence
  Description of Artificial Sequence: Synthetic oligonucleotide
  Target: LAMA2; (+) strand; PAM type: NNNNGHTT; PAM sequence: ACATGTTT
aattgatcaatagtaacatg

SEQ ID NO: 51503 - DNA, 20 bp, Artificial Sequence
  Description of Artificial Sequence: Synthetic oligonucleotide
  Target: LAMA2; (+) strand; PAM type: NNNNGHTT; PAM sequence: TTATGATT
tcaatagtaacatgacatgt

SEQ ID NO: 51504 - DNA, 20 bp, Artificial Sequence
  Description of Artificial Sequence: Synthetic oligonucleotide
  Target: LAMA2; (+) strand; PAM type: NNNNGHTT; PAM sequence: CATTGTTT
ttttaaaacactttcacaaa

SEQ ID NO: 51505 - DNA, 20 bp, Artificial Sequence
  Description of Artificial Sequence: Synthetic oligonucleotide
  Target: LAMA2; (+) strand; PAM type: NNNNGHTT; PAM sequence: TATTGCTT
attaattctgagtgtagtgc

SEQ ID NO: 51506 - DNA, 20 bp, Artificial Sequence
  Description of Artificial Sequence: Synthetic oligonucleotide
  Target: LAMA2; (+) strand; PAM type: NNNNGHTT; PAM sequence: TTACGTTT
gtgtgacatttcatgaaaat

SEQ ID NO: 51507 - DNA, 20 bp, Artificial Sequence
  Description of Artificial Sequence: Synthetic oligonucleotide
  Target: LAMA2; (+) strand; PAM type: NNNNGHTT; PAM sequence: GTCAGTTT
cacttgagtcaaacagagag

SEQ ID NO: 51508 - DNA, 20 bp, Artificial Sequence
  Description of Artificial Sequence: Synthetic oligonucleotide
  Target: LAMA2; (+) strand; PAM type: NNNNGHTT; PAM sequence: ACTGGCTT
acctctcatatgggacaaaa

SEQ ID NO: 51509 - DNA, 20 bp, Artificial Sequence
  Description of Artificial Sequence: Synthetic oligonucleotide
  Target: LAMA2; (+) strand; PAM type: NNNNGHTT; PAM sequence: GAATGTTT
agttagttgttcagtaagaa

SEQ ID NO: 51510 - DNA, 20 bp, Artificial Sequence
  Description of Artificial Sequence: Synthetic oligonucleotide
  Target: LAMA2; (+) strand; PAM type: NNNNGHTT; PAM sequence: AGCTGTTT
gttcagtaagaagaatgttt

SEQ ID NO: 51511 - DNA, 20 bp, Artificial Sequence
  Description of Artificial Sequence: Synthetic oligonucleotide
  Target: LAMA2; (+) strand; PAM type: NNNNGHTT; PAM sequence: GAATGCTT
tctgctgaacacactttggg

SEQ ID NO: 51512 - DNA, 20 bp, Artificial Sequence
  Description of Artificial Sequence: Synthetic oligonucleotide
  Target: LAMA2; (+) strand; PAM type: NNNNGHTT; PAM sequence: GTGAGTTT
gggacatatgagctaagtga

SEQ ID NO: 51513 - DNA, 20 bp, Artificial Sequence
  Description of Artificial Sequence: Synthetic oligonucleotide
  Target: LAMA2; (+) strand; PAM type: NNNNGHTT; PAM sequence: TTCAGCTT
tatgagctaagtgagtgagt

SEQ ID NO: 51514 - DNA, 20 bp, Artificial Sequence
  Description of Artificial Sequence: Synthetic oligonucleotide
  Target: LAMA2; (+) strand; PAM type: NNNNGHTT; PAM sequence: AAGAGTTT
atagggataccgagaactct

SEQ ID NO: 51515 - DNA, 20 bp, Artificial Sequence
  Description of Artificial Sequence: Synthetic oligonucleotide
  Target: LAMA2; (+) strand; PAM type: NNNNGHTT; PAM sequence: TTGTGCTT
agggtgtgatatcataagac

SEQ ID NO: 51516 - DNA, 20 bp, Artificial Sequence
  Description of Artificial Sequence: Synthetic oligonucleotide
  Target: LAMA2; (+) strand; PAM type: NNNNGHTT; PAM sequence: TAAAGTTT
tcataagacttgtgctttag

SEQ ID NO: 51517 - DNA, 20 bp, Artificial Sequence
  Description of Artificial Sequence: Synthetic oligonucleotide
  Target: LAMA2; (+) strand; PAM type: NNNNGHTT; PAM sequence: AGCAGTTT
tttagtaaagtttctttagc

SEQ ID NO: 51518 - DNA, 20 bp, Artificial Sequence
  Description of Artificial Sequence: Synthetic oligonucleotide
  Target: LAMA2; (+) strand; PAM type: NNNNGHTT; PAM sequence: AACAGATT
ctcttctatagtagtagaat

SEQ ID NO: 51519 - DNA, 20 bp, Artificial Sequence
  Description of Artificial Sequence: Synthetic oligonucleotide
  Target: LAMA2; (+) strand; PAM type: NNNNGHTT; PAM sequence: TGAAGATT
gggggagggaggagaagggg

SEQ ID NO: 51520 - DNA, 20 bp, Artificial Sequence
  Description of Artificial Sequence: Synthetic oligonucleotide
  Target: LAMA2; (+) strand; PAM type: NNNNGHTT; PAM sequence: ATATGCTT
tataaactctaaagatagta

SEQ ID NO: 51521 - DNA, 20 bp, Artificial Sequence
  Description of Artificial Sequence: Synthetic oligonucleotide
  Target: LAMA2; (+) strand; PAM type: NNNNGHTT; PAM sequence: AAATGATT
cggtataacaaacagggata

SEQ ID NO: 51522 - DNA, 20 bp, Artificial Sequence
  Description of Artificial Sequence: Synthetic oligonucleotide
  Target: LAMA2; (+) strand; PAM type: NNNNGHTT; PAM sequence: ATATGTTT
aaatgtgaaagtagttaaaa

SEQ ID NO: 51523 - DNA, 20 bp, Artificial Sequence
  Description of Artificial Sequence: Synthetic oligonucleotide
  Target: LAMA2; (+) strand; PAM type: NNNNGHTT; PAM sequence: TTAGGTTT
aaagtagttaaaaatatgtt

SEQ ID NO: 51524 - DNA, 20 bp, Artificial Sequence
  Description of Artificial Sequence: Synthetic oligonucleotide
  Target: LAMA2; (+) strand; PAM type: NNNNGHTT; PAM sequence: TCCAGATT
cccccaataggtctaatttt

SEQ ID NO: 51525 - DNA, 20 bp, Artificial Sequence
  Description of Artificial Sequence: Synthetic oligonucleotide
  Target: LAMA2; (+) strand; PAM type: NNNNGHTT; PAM sequence: TCTGGTTT
tcagtatcttctgtgacatt

SEQ ID NO: 51526 - DNA, 20 bp, Artificial Sequence
  Description of Artificial Sequence: Synthetic oligonucleotide
  Target: LAMA2; (+) strand; PAM type: NNNNGHTT; PAM sequence: CTTGGCTT
tctcatttataagtcttctc

SEQ ID NO: 51527 - DNA, 20 bp, Artificial Sequence
  Description of Artificial Sequence: Synthetic oligonucleotide
  Target: LAMA2; (+) strand; PAM type: NNNNGHTT; PAM sequence: CATTGCTT
tcaaattgactctagactca

SEQ ID NO: 51528 - DNA, 20 bp, Artificial Sequence
  Description of Artificial Sequence: Synthetic oligonucleotide
  Target: LAMA2; (+) strand; PAM type: NNNNGHTT; PAM sequence: TGAGGTTT
taaaaagaaattaagcccta

SEQ ID NO: 51529 - DNA, 20 bp, Artificial Sequence
  Description of Artificial Sequence: Synthetic oligonucleotide
  Target: LAMA2; (+) strand; PAM type: NNNNGHTT; PAM sequence: TTTTGATT
tgaggtttagttgttcagaa

SEQ ID NO: 51530 - DNA, 20 bp, Artificial Sequence
  Description of Artificial Sequence: Synthetic oligonucleotide
  Target: LAMA2; (+) strand; PAM type: NNNNGHTT; PAM sequence: TTCTGTTT
ttataataaaactatagctg

SEQ ID NO: 51531 - DNA, 20 bp, Artificial Sequence
  Description of Artificial Sequence: Synthetic oligonucleotide
  Target: LAMA2; (+) strand; PAM type: NNNNGHTT; PAM sequence: AAAGGCTT
aaatttaaaaggaaaagaag

SEQ ID NO: 51532 - DNA, 20 bp, Artificial Sequence
  Description of Artificial Sequence: Synthetic oligonucleotide
  Target: LAMA2; (+) strand; PAM type: NNNNGHTT; PAM sequence: ACCTGCTT
cttggcaaaataaccttact

SEQ ID NO: 51533 - DNA, 20 bp, Artificial Sequence
  Description of Artificial Sequence: Synthetic oligonucleotide
  Target: LAMA2; (+) strand; PAM type: NNNNGHTT; PAM sequence: ATAAGATT
taaccttactacctgctttg

SEQ ID NO: 51534 - DNA, 20 bp, Artificial Sequence
  Description of Artificial Sequence: Synthetic oligonucleotide
  Target: LAMA2; (+) strand; PAM type: NNNNGHTT; PAM sequence: ATCTGTTT
cacaagtagcaaattactgt

SEQ ID NO: 51535 - DNA, 20 bp, Artificial Sequence
  Description of Artificial Sequence: Synthetic oligonucleotide
  Target: LAMA2; (+) strand; PAM type: NNNNGHTT; PAM sequence: ATCAGTTT
ttatttgggcagctgttgta

SEQ ID NO: 51536 - DNA, 20 bp, Artificial Sequence
  Description of Artificial Sequence: Synthetic oligonucleotide
  Target: LAMA2; (+) strand; PAM type: NNNNGHTT; PAM sequence: TGGAGTTT
ttgtaatcagtttgaattat

SEQ ID NO: 51537 - DNA, 20 bp, Artificial Sequence
  Description of Artificial Sequence: Synthetic oligonucleotide
  Target: LAMA2; (+) strand; PAM type: NNNNGHTT; PAM sequence: AGCTGTTT
gcaagggccagatcacagga

SEQ ID NO: 51538 - DNA, 20 bp, Artificial Sequence
  Description of Artificial Sequence: Synthetic oligonucleotide
  Target: LAMA2; (+) strand; PAM type: NNNNGHTT; PAM sequence: AGGAGTTT
aagctgtttaaactgtgttg

SEQ ID NO: 51539 - DNA, 20 bp, Artificial Sequence
  Description of Artificial Sequence: Synthetic oligonucleotide
  Target: LAMA2; (+) strand; PAM type: NNNNGHTT; PAM sequence: ACTTGATT
tttgcatttcatcttgatga

SEQ ID NO: 51540 - DNA, 20 bp, Artificial Sequence
  Description of Artificial Sequence: Synthetic oligonucleotide
  Target: LAMA2; (+) strand; PAM type: NNNNGHTT; PAM sequence: ATTGGATT
aactgaagacaaagcgaaca

SEQ ID NO: 51541 - DNA, 20 bp, Artificial Sequence
  Description of Artificial Sequence: Synthetic oligonucleotide
  Target: LAMA2; (+) strand; PAM type: NNNNGHTT; PAM sequence: TTATGCTT
tagtctaggcaggaggtaaa

SEQ ID NO: 51542 - DNA, 20 bp, Artificial Sequence
  Description of Artificial Sequence: Synthetic oligonucleotide
  Target: LAMA2; (+) strand; PAM type: NNNNGHTT; PAM sequence: GAGGGATT
atgtacgaaaaggcaaaaag

SEQ ID NO: 51543 - DNA, 20 bp, Artificial Sequence
  Description of Artificial Sequence: Synthetic oligonucleotide
  Target: LAMA2; (+) strand; PAM type: NNNNGHTT; PAM sequence: CATGGTTT
atacaattacatgttacaaa

SEQ ID NO: 51544 - DNA, 20 bp, Artificial Sequence
  Description of Artificial Sequence: Synthetic oligonucleotide
  Target: LAMA2; (+) strand; PAM type: NNNNGHTT; PAM sequence: AACTGTTT
tgttaattattcctcagtaa

SEQ ID NO: 51545 - DNA, 20 bp, Artificial Sequence
  Description of Artificial Sequence: Synthetic oligonucleotide
  Target: LAMA2; (+) strand; PAM type: NNNNGHTT; PAM sequence: TGTTGATT
ggagaagaaattagtgaagc

SEQ ID NO: 51546 - DNA, 20 bp, Artificial Sequence
  Description of Artificial Sequence: Synthetic oligonucleotide
  Target: LAMA2; (+) strand; PAM type: NNNNGHTT; PAM sequence: GATTGATT
aagaaattagtgaagctgtt

SEQ ID NO: 51547 - DNA, 20 bp, Artificial Sequence
  Description of Artificial Sequence: Synthetic oligonucleotide
  Target: LAMA2; (+) strand; PAM type: NNNNGHTT; PAM sequence: TCTAGTTT
ggagaaagtcaggatgactc

SEQ ID NO: 51548 - DNA, 20 bp, Artificial Sequence
  Description of Artificial Sequence: Synthetic oligonucleotide
  Target: LAMA2; (+) strand; PAM type: NNNNGHTT; PAM sequence: AGTAGATT
tcaggatgactctctagttt

SEQ ID NO: 51549 - DNA, 20 bp, Artificial Sequence
  Description of Artificial Sequence: Synthetic oligonucleotide
  Target: LAMA2; (+) strand; PAM type: NNNNGHTT; PAM sequence: TACAGATT
aaaaaaagtaagttaagtaa

SEQ ID NO: 51550 - DNA, 20 bp, Artificial Sequence
  Description of Artificial Sequence: Synthetic oligonucleotide
  Target: LAMA2; (+) strand; PAM type: NNNNGHTT; PAM sequence: TTTTGATT
tgggagttagatgataatta

SEQ ID NO: 51551 - DNA, 20 bp, Artificial Sequence
  Description of Artificial Sequence: Synthetic oligonucleotide
  Target: LAMA2; (+) strand; PAM type: NNNNGHTT; PAM sequence: GAATGTTT
atgataattattttgatttg

SEQ ID NO: 51552 - DNA, 20 bp, Artificial Sequence
  Description of Artificial Sequence: Synthetic oligonucleotide
  Target: LAMA2; (+) strand; PAM type: NNNNGHTT; PAM sequence: TTTAGCTT
aattattttgatttggaatg

SEQ ID NO: 51553 - DNA, 20 bp, Artificial Sequence
  Description of Artificial Sequence: Synthetic oligonucleotide
  Target: LAMA2; (+) strand; PAM type: NNNNGHTT; PAM sequence: TTGAGTTT
cattgtaagtagatataaac

SEQ ID NO: 51554 - DNA, 20 bp, Artificial Sequence
  Description of Artificial Sequence: Synthetic oligonucleotide
  Target: LAMA2; (+) strand; PAM type: NNNNGHTT; PAM sequence: AGGAGATT
tcaaaaatagaccccagggt

SEQ ID NO: 51555 - DNA, 20 bp, Artificial Sequence
  Description of Artificial Sequence: Synthetic oligonucleotide
  Target: LAMA2; (+) strand; PAM type: NNNNGHTT; PAM sequence: GAGAGCTT
atgaaaggtaaaagaagcca

SEQ ID NO: 51556 - DNA, 20 bp, Artificial Sequence
  Description of Artificial Sequence: Synthetic oligonucleotide
  Target: LAMA2; (+) strand; PAM type: NNNNGHTT; PAM sequence: TAAAGTTT
tgcacaaacatgaattcaga

SEQ ID NO: 51557 - DNA, 20 bp, Artificial Sequence
  Description of Artificial Sequence: Synthetic oligonucleotide
  Target: LAMA2; (+) strand; PAM type: NNNNGHTT; PAM sequence: CTGAGTTT
taaagtttaaaagaactcca

SEQ ID NO: 51558 - DNA, 20 bp, Artificial Sequence
  Description of Artificial Sequence: Synthetic oligonucleotide
  Target: LAMA2; (+) strand; PAM type: NNNNGHTT; PAM sequence: GGATGATT
aaataaggctccagcaatgt

SEQ ID NO: 51559 - DNA, 20 bp, Artificial Sequence
  Description of Artificial Sequence: Synthetic oligonucleotide
  Target: LAMA2; (+) strand; PAM type: NNNNGHTT; PAM sequence: ACCAGATT
atgattgctccttttcagtg

SEQ ID NO: 51560 - DNA, 20 bp, Artificial Sequence
  Description of Artificial Sequence: Synthetic oligonucleotide
  Target: LAMA2; (+) strand; PAM type: NNNNGHTT; PAM sequence: ATTTGTTT
tccttttcagtgaccagatt

SEQ ID NO: 51561 - DNA, 20 bp, Artificial Sequence
  Description of Artificial Sequence: Synthetic oligonucleotide
  Target: LAMA2; (+) strand; PAM type: NNNNGHTT; PAM sequence: ATTAGATT
tgcaaagttgagaacactca

SEQ ID NO: 51562 - DNA, 20 bp, Artificial Sequence
  Description of Artificial Sequence: Synthetic oligonucleotide
  Target: LAMA2; (+) strand; PAM type: NNNNGHTT; PAM sequence: CTTAGCTT
taatagccaaagtaaaaaca

SEQ ID NO: 51563 - DNA, 20 bp, Artificial Sequence
  Description of Artificial Sequence: Synthetic oligonucleotide
  Target: LAMA2; (+) strand; PAM type: NNNNGHTT; PAM sequence: CATTGATT
cttagcttataacaactcag

SEQ ID NO: 51564 - DNA, 20 bp, Artificial Sequence
  Description of Artificial Sequence: Synthetic oligonucleotide
  Target: LAMA2; (+) strand; PAM type: NNNNGHTT; PAM sequence: TCATGTTT
attgtgttgctgctctttaa

SEQ ID NO: 51565 - DNA, 20 bp, Artificial Sequence
  Description of Artificial Sequence: Synthetic oligonucleotide
  Target: LAMA2; (+) strand; PAM type: NNNNGHTT; PAM sequence: GAATGATT
tctttaatcatgttttctta

SEQ ID NO: 51566 - DNA, 20 bp, Artificial Sequence
  Description of Artificial Sequence: Synthetic oligonucleotide
  Target: LAMA2; (+) strand; PAM type: NNNNGHTT; PAM sequence: ACTGGCTT
gaggaaaaccacctccagtc

SEQ ID NO: 51567 - DNA, 20 bp, Artificial Sequence
  Description of Artificial Sequence: Synthetic oligonucleotide
  Target: LAMA2; (+) strand; PAM type: NNNNGHTT; PAM sequence: AACAGTTT
gtatatgaaaaagtcttgaa

SEQ ID NO: 51568 - DNA, 20 bp, Artificial Sequence
  Description of Artificial Sequence: Synthetic oligonucleotide
  Target: LAMA2; (+) strand; PAM type: NNNNGHTT; PAM sequence: TCTTGTTT
attattcttttaggtatttt

SEQ ID NO: 51569 - DNA, 20 bp, Artificial Sequence
  Description of Artificial Sequence: Synthetic oligonucleotide
  Target: LAMA2; (+) strand; PAM type: NNNNGHTT; PAM sequence: GTTTGTTT
ttcttttaggtatttttctt

SEQ ID NO: 51570 - DNA, 20 bp, Artificial Sequence
  Description of Artificial Sequence: Synthetic oligonucleotide
  Target: LAMA2; (+) strand; PAM type: NNNNGHTT; PAM sequence: TCTGGTTT
cttgtttgtttttacaaaag

SEQ ID NO: 51571 - DNA, 20 bp, Artificial Sequence
  Description of Artificial Sequence: Synthetic oligonucleotide
  Target: LAMA2; (+) strand; PAM type: NNNNGHTT; PAM sequence: TTGTGTTT
gtccttttttaataaggcaa

SEQ ID NO: 51572 - DNA, 20 bp, Artificial Sequence
  Description of Artificial Sequence: Synthetic oligonucleotide
  Target: LAMA2; (+) strand; PAM type: NNNNGHTT; PAM sequence: GTTTGATT
ttttttaataaggcaattgt

SEQ ID NO: 51573 - DNA, 20 bp, Artificial Sequence
  Description of Artificial Sequence: Synthetic oligonucleotide
  Target: LAMA2; (+) strand; PAM type: NNNNGHTT; PAM sequence: TGATGTTT
ttcaagggaattttggaatt

SEQ ID NO: 51574 - DNA, 20 bp, Artificial Sequence
  Description of Artificial Sequence: Synthetic oligonucleotide
  Target: LAMA2; (+) strand; PAM type: NNNNGHTT; PAM sequence: CTCTGTTT
ttttggaatttgatgtttct

SEQ ID NO: 51575 - DNA, 20 bp, Artificial Sequence
  Description of Artificial Sequence: Synthetic oligonucleotide
  Target: LAMA2; (+) strand; PAM type: NNNNGHTT; PAM sequence: CACTGATT
tctctctgttttccaaagaa

SEQ ID NO: 51576 - DNA, 20 bp, Artificial Sequence
  Description of Artificial Sequence: Synthetic oligonucleotide
  Target: LAMA2; (+) strand; PAM type: NNNNGHTT; PAM sequence: ACATGTTT
agctataaaattaagaagat

SEQ ID NO: 51577 - DNA, 20 bp, Artificial Sequence
  Description of Artificial Sequence: Synthetic oligonucleotide
  Target: LAMA2; (+) strand; PAM type: NNNNGHTT; PAM sequence: CCTTGCTT
tcaaatgcccattttcaaac

SEQ ID NO: 51578 - DNA, 20 bp, Artificial Sequence
  Description of Artificial Sequence: Synthetic oligonucleotide
  Target: LAMA2; (+) strand; PAM type: NNNNGHTT; PAM sequence: AAAGGTTT
attcagatcctacatcagac

SEQ ID NO: 51579 - DNA, 20 bp, Artificial Sequence
  Description of Artificial Sequence: Synthetic oligonucleotide
  Target: LAMA2; (+) strand; PAM type: NNNNGHTT; PAM sequence: CCTAGCTT
agcatgtaattcagaaaaag

SEQ ID NO: 51580 - DNA, 20 bp, Artificial Sequence
  Description of Artificial Sequence: Synthetic oligonucleotide
  Target: LAMA2; (+) strand; PAM type: NNNNGHTT; PAM sequence: GTCTGCTT
caatgagataaggagttcct

SEQ ID NO: 51581 - DNA, 20 bp, Artificial Sequence
  Description of Artificial Sequence: Synthetic oligonucleotide
  Target: LAMA2; (+) strand; PAM type: NNNNGHTT; PAM sequence: TGCAGTTT
cctgtctgctttctaaacaa

SEQ ID NO: 51582 - DNA, 20 bp, Artificial Sequence
  Description of Artificial Sequence: Synthetic oligonucleotide
  Target: LAMA2; (+) strand; PAM type: NNNNGHTT; PAM sequence: CATAGATT
gtaaaacttacagaaagagc

SEQ ID NO: 51583 - DNA, 20 bp, Artificial Sequence
  Description of Artificial Sequence: Synthetic oligonucleotide
  Target: LAMA2; (+) strand; PAM type: NNNNGHTT; PAM sequence: ATCTGATT
aggcatatttctaattaatt

SEQ ID NO: 51584 - DNA, 20 bp, Artificial Sequence
  Description of Artificial Sequence: Synthetic oligonucleotide
  Target: LAMA2; (+) strand; PAM type: NNNNGHTT; PAM sequence: CCTTGCTT
ttgttatttagcatttttaa

SEQ ID NO: 51585 - DNA, 20 bp, Artificial Sequence
  Description of Artificial Sequence: Synthetic oligonucleotide
  Target: LAMA2; (+) strand; PAM type: NNNNGHTT; PAM sequence: TCTAGATT
ctttattttctaactactta

SEQ ID NO: 51586 - DNA, 20 bp, Artificial Sequence
  Description of Artificial Sequence: Synthetic oligonucleotide
  Target: LAMA2; (+) strand; PAM type: NNNNGHTT; PAM sequence: ATTGGTTT
tagttatctcttttatcttc

SEQ ID NO: 51587 - DNA, 20 bp, Artificial Sequence
  Description of Artificial Sequence: Synthetic oligonucleotide
  Target: LAMA2; (+) strand; PAM type: NNNNGHTT; PAM sequence: GATAGTTT
tattttcatgctctttgggg

SEQ ID NO: 51588 - DNA, 20 bp, Artificial Sequence
  Description of Artificial Sequence: Synthetic oligonucleotide
  Target: LAMA2; (+) strand; PAM type: NNNNGHTT; PAM sequence: AAGTGCTT
taaattgctaaatatagtgc

SEQ ID NO: 51589 - DNA, 20 bp, Artificial Sequence
  Description of Artificial Sequence: Synthetic oligonucleotide
  Target: LAMA2; (+) strand; PAM type: NNNNGHTT; PAM sequence: TTTAGTTT
cgctgagaaacttgaggtaa

SEQ ID NO: 51590 - DNA, 20 bp, Artificial Sequence
  Description of Artificial Sequence: Synthetic oligonucleotide
  Target: LAMA2; (+) strand; PAM type: NNNNGHTT; PAM sequence: TAAGGATT
atttagtttatatgtaaagc

SEQ ID NO: 51591 - DNA, 20 bp, Artificial Sequence
  Description of Artificial Sequence: Synthetic oligonucleotide
  Target: LAMA2; (+) strand; PAM type: NNNNGHTT; PAM sequence: TTAAGTTT
tttatatgtaaagctaagga

SEQ ID NO: 51592 - DNA, 20 bp, Artificial Sequence
  Description of Artificial Sequence: Synthetic oligonucleotide
  Target: LAMA2; (+) strand; PAM type: NNNNGHTT; PAM sequence: TGAAGTTT
cactatgctcactagagttc

SEQ ID NO: 51593 - DNA, 20 bp, Artificial Sequence
  Description of Artificial Sequence: Synthetic oligonucleotide
  Target: LAMA2; (+) strand; PAM type: NNNNGHTT; PAM sequence: CCAGGATT
tgttgcatgttagaacaaca

SEQ ID NO: 51594 - DNA, 20 bp, Artificial Sequence
  Description of Artificial Sequence: Synthetic oligonucleotide
  Target: LAMA2; (+) strand; PAM type: NNNNGHTT; PAM sequence: GATGGATT
tttgacatctttgttgaaga

SEQ ID NO: 51595 - DNA, 20 bp, Artificial Sequence
  Description of Artificial Sequence: Synthetic oligonucleotide
  Target: LAMA2; (+) strand; PAM type: NNNNGHTT; PAM sequence: CGCTGTTT
ttgaagagatggattggagt

SEQ ID NO: 51596 - DNA, 20 bp, Artificial Sequence
  Description of Artificial Sequence: Synthetic oligonucleotide
  Target: LAMA2; (+) strand; PAM type: NNNNGHTT; PAM sequence: CATTGCTT
tggagataatggcactctga

SEQ ID NO: 51597 - DNA, 20 bp, Artificial Sequence
  Description of Artificial Sequence: Synthetic oligonucleotide
  Target: LAMA2; (+) strand; PAM type: NNNNGHTT; PAM sequence: TGGAGCTT
ttagcatcataatggcgtgt

SEQ ID NO: 51598 - DNA, 20 bp, Artificial Sequence
  Description of Artificial Sequence: Synthetic oligonucleotide
  Target: LAMA2; (+) strand; PAM type: NNNNGHTT; PAM sequence: ATATGCTT
acatttttttttaatttcac

SEQ ID NO: 51599 - DNA, 20 bp, Artificial Sequence
  Description of Artificial Sequence: Synthetic oligonucleotide
  Target: LAMA2; (+) strand; PAM type: NNNNGHTT; PAM sequence: ATTTGCTT
ctagcagtatggggagacac

SEQ ID NO: 51600 - DNA, 20 bp, Artificial Sequence
  Description of Artificial Sequence: Synthetic oligonucleotide
  Target: LAMA2; (+) strand; PAM type: NNNNGHTT; PAM sequence: ATGGGATT
ttaattacactctaattaga

SEQ ID NO: 51601 - DNA, 20 bp, Artificial Sequence
  Description of Artificial Sequence: Synthetic oligonucleotide
  Target: LAMA2; (+) strand; PAM type: NNNNGHTT; PAM sequence: AATTGATT
actctaattagaatgggatt

SEQ ID NO: 51602 - DNA, 20 bp, Artificial Sequence
  Description of Artificial Sequence: Synthetic oligonucleotide
  Target: LAMA2; (+) strand; PAM type: NNNNGHTT; PAM sequence: AAGAGTTT
aattgatttggttaaaccgt

SEQ ID NO: 51603 - DNA, 20 bp, Artificial Sequence
  Description of Artificial Sequence: Synthetic oligonucleotide
  Target: LAMA2; (+) strand; PAM type: NNNNGHTT; PAM sequence: CCATGTTT
taagagtttattacagacta

SEQ ID NO: 51604 - DNA, 20 bp, Artificial Sequence
  Description of Artificial Sequence: Synthetic oligonucleotide
  Target: LAMA2; (+) strand; PAM type: NNNNGHTT; PAM sequence: TTTTGTTT
agactaccatgtttttaatt

SEQ ID NO: 51605 - DNA, 20 bp, Artificial Sequence
  Description of Artificial Sequence: Synthetic oligonucleotide
  Target: LAMA2; (+) strand; PAM type: NNNNGHTT; PAM sequence: TTTTGTTT
accatgtttttaattttttg

SEQ ID NO: 51606 - DNA, 20 bp, Artificial Sequence
  Description of Artificial Sequence: Synthetic oligonucleotide
  Target: LAMA2; (+) strand; PAM type: NNNNGHTT; PAM sequence: ATTAGTTT
ttaattttttgttttgttta

SEQ ID NO: 51607 - DNA, 20 bp, Artificial Sequence
  Description of Artificial Sequence: Synthetic oligonucleotide
  Target: LAMA2; (+) strand; PAM type: NNNNGHTT; PAM sequence: AGGTGTTT
agggtataaaagttctgtcc

SEQ ID NO: 51608 - DNA, 20 bp, Artificial Sequence
  Description of Artificial Sequence: Synthetic oligonucleotide
  Target: LAMA2; (+) strand; PAM type: NNNNGHTT; PAM sequence: GACAGATT
aggtgtttctactccaaaaa

SEQ ID NO: 51609 - DNA, 20 bp, Artificial Sequence
  Description of Artificial Sequence: Synthetic oligonucleotide
  Target: LAMA2; (+) strand; PAM type: NNNNGHTT; PAM sequence: TTATGTTT
ttctactccaaaaagacaga

SEQ ID NO: 51610 - DNA, 20 bp, Artificial Sequence
  Description of Artificial Sequence: Synthetic oligonucleotide
  Target: LAMA2; (+) strand; PAM type: NNNNGHTT; PAM sequence: ATGAGCTT
agcaactgtctaattatctg

SEQ ID NO: 51611 - DNA, 20 bp, Artificial Sequence
  Description of Artificial Sequence: Synthetic oligonucleotide
  Target: LAMA2; (+) strand; PAM type: NNNNGHTT; PAM sequence: AAAAGTTT
tcatttgccagtcattcacc

SEQ ID NO: 51612 - DNA, 20 bp, Artificial Sequence
  Description of Artificial Sequence: Synthetic oligonucleotide
  Target: LAMA2; (+) strand; PAM type: NNNNGHTT; PAM sequence: CTAAGATT
aatccagtggttgttcaaat

SEQ ID NO: 51613 - DNA, 20 bp, Artificial Sequence
  Description of Artificial Sequence: Synthetic oligonucleotide
  Target: LAMA2; (+) strand; PAM type: NNNNGHTT; PAM sequence: ATTTGCTT
agtggttgttcaaatctaag

SEQ ID NO: 51614 - DNA, 20 bp, Artificial Sequence
  Description of Artificial Sequence: Synthetic oligonucleotide
  Target: LAMA2; (+) strand; PAM type: NNNNGHTT; PAM sequence: TCTAGCTT
caaacctaaggttattcaaa

SEQ ID NO: 51615 - DNA, 20 bp, Artificial Sequence
  Description of Artificial Sequence: Synthetic oligonucleotide
  Target: LAMA2; (+) strand; PAM type: NNNNGHTT; PAM sequence: TGATGATT
tctagcttcatttattctag

SEQ ID NO: 51616 - DNA, 20 bp, Artificial Sequence
  Description of Artificial Sequence: Synthetic oligonucleotide
  Target: LAMA2; (+) strand; PAM type: NNNNGHTT; PAM sequence: AAATGTTT
taaatgaatctttatcacta

SEQ ID NO: 51617 - DNA, 20 bp, Artificial Sequence
  Description of Artificial Sequence: Synthetic oligonucleotide
  Target: LAMA2; (+) strand; PAM type: NNNNGHTT; PAM sequence: TTGTGATT
aacagccattagaggtatat

SEQ ID NO: 51618 - DNA, 20 bp, Artificial Sequence
  Description of Artificial Sequence: Synthetic oligonucleotide
  Target: LAMA2; (+) strand; PAM type: NNNNGHTT; PAM sequence: AGCTGTTT
tacatgcattgttaagctca

SEQ ID NO: 51619 - DNA, 20 bp, Artificial Sequence
  Description of Artificial Sequence: Synthetic oligonucleotide
  Target: LAMA2; (+) strand; PAM type: NNNNGHTT; PAM sequence: ATTAGATT
cattgtacattttcccattt

SEQ ID NO: 51620 - DNA, 20 bp, Artificial Sequence
  Description of Artificial Sequence: Synthetic oligonucleotide
  Target: LAMA2; (+) strand; PAM type: NNNNGHTT; PAM sequence: TTTTGATT
tattgtgagctacggtcata

SEQ ID NO: 51621 - DNA, 20 bp, Artificial Sequence
  Description of Artificial Sequence: Synthetic oligonucleotide
  Target: LAMA2; (+) strand; PAM type: NNNNGHTT; PAM sequence: TGGGGCTT
aagtctatttttagttctat

SEQ ID NO: 51622 - DNA, 20 bp, Artificial Sequence
  Description of Artificial Sequence: Synthetic oligonucleotide
  Target: LAMA2; (+) strand; PAM type: NNNNGHTT; PAM sequence: AAATGATT
ttcctttgtagatccctgtg

SEQ ID NO: 51623 - DNA, 20 bp, Artificial Sequence
  Description of Artificial Sequence: Synthetic oligonucleotide
  Target: LAMA2; (+) strand; PAM type: NNNNGHTT; PAM sequence: TAAAGATT
atccctgtgaaatgattttt

SEQ ID NO: 51624 - DNA, 20 bp, Artificial Sequence
  Description of Artificial Sequence: Synthetic oligonucleotide
  Target: LAMA2; (+) strand; PAM type: NNNNGHTT; PAM sequence: TTATGATT
tgaaatgattttttaaagat

SEQ ID NO: 51625 - DNA, 20 bp, Artificial Sequence
  Description of Artificial Sequence: Synthetic oligonucleotide
  Target: LAMA2; (+) strand; PAM type: NNNNGHTT; PAM sequence: TAAAGTTT
attttttaaagatttatgat

SEQ ID NO: 51626 - DNA, 20 bp, Artificial Sequence
  Description of Artificial Sequence: Synthetic oligonucleotide
  Target: LAMA2; (+) strand; PAM type: NNNNGHTT; PAM sequence: TATTGTTT
aaagatttatgattaaagtt

SEQ ID NO: 51627 - DNA, 20 bp, Artificial Sequence
  Description of Artificial Sequence: Synthetic oligonucleotide
  Target: LAMA2; (+) strand; PAM type: NNNNGHTT; PAM sequence: AATTGTTT
tgaaaatgtaattataagta

SEQ ID NO: 51628 - DNA, 20 bp, Artificial Sequence
  Description of Artificial Sequence: Synthetic oligonucleotide
  Target: LAMA2; (+) strand; PAM type: NNNNGHTT; PAM sequence: TTTTGTTT
tataagtaaattgtttttat

SEQ ID NO: 51629 - DNA, 20 bp, Artificial Sequence
  Description of Artificial Sequence: Synthetic oligonucleotide
  Target: LAMA2; (+) strand; PAM type: NNNNGHTT; PAM sequence: TGTGGCTT
gagtgcatgggttgggtaaa

SEQ ID NO: 51630 - DNA, 20 bp, Artificial Sequence
  Description of Artificial Sequence: Synthetic oligonucleotide
  Target: LAMA2; (+) strand; PAM type: NNNNGHTT; PAM sequence: TACAGCTT
cagaagcagagcaacaccag

SEQ ID NO: 51631 - DNA, 20 bp, Artificial Sequence
  Description of Artificial Sequence: Synthetic oligonucleotide
  Target: LAMA2; (+) strand; PAM type: NNNNGHTT; PAM sequence: GTATGTTT
ccagtacagctttgttcata

SEQ ID NO: 51632 - DNA, 20 bp, Artificial Sequence
  Description of Artificial Sequence: Synthetic oligonucleotide
  Target: LAMA2; (+) strand; PAM type: NNNNGHTT; PAM sequence: TGCTGCTT
ccccttgctggccgacattc

SEQ ID NO: 51633 - DNA, 20 bp, Artificial Sequence
  Description of Artificial Sequence: Synthetic oligonucleotide
  Target: LAMA2; (+) strand; PAM type: NNNNGHTT; PAM sequence: ATGAGATT
gagttgtctcaccagcagtg

SEQ ID NO: 51634 - DNA, 20 bp, Artificial Sequence
  Description of Artificial Sequence: Synthetic oligonucleotide
  Target: LAMA2; (+) strand; PAM type: NNNNGHTT; PAM sequence: ACATGCTT
aagaatcaaactgtgctctc

SEQ ID NO: 51635 - DNA, 20 bp, Artificial Sequence
  Description of Artificial Sequence: Synthetic oligonucleotide
  Target: LAMA2; (+) strand; PAM type: NNNNGHTT; PAM sequence: TCTTGCTT
tcacatgcttaccactgcct

SEQ ID NO: 51636 - DNA, 20 bp, Artificial Sequence
  Description of Artificial Sequence: Synthetic oligonucleotide
  Target: LAMA2; (+) strand; PAM type: NNNNGHTT; PAM sequence: AGCTGTTT
gcctttgcacctcttgtcaa

SEQ ID NO: 51637 - DNA, 20 bp, Artificial Sequence
  Description of Artificial Sequence: Synthetic oligonucleotide
  Target: LAMA2; (+) strand; PAM type: NNNNGHTT; PAM sequence: ACATGTTT
tcaaagctgtttatctattg

SEQ ID NO: 51638 - DNA, 20 bp, Artificial Sequence
  Description of Artificial Sequence: Synthetic oligonucleotide
  Target: LAMA2; (+) strand; PAM type: NNNNGHTT; PAM sequence: CCTAGCTT
aagaagtgtgagatagttct

SEQ ID NO: 51639 - DNA, 20 bp, Artificial Sequence
  Description of Artificial Sequence: Synthetic oligonucleotide
  Target: LAMA2; (+) strand; PAM type: NNNNGHTT; PAM sequence: TGGTGTTT
tctggctagagctaaaagcc

SEQ ID NO: 51640 - DNA, 20 bp, Artificial Sequence
  Description of Artificial Sequence: Synthetic oligonucleotide
  Target: LAMA2; (+) strand; PAM type: NNNNGHTT; PAM sequence: GCCAGATT
gcatttcagagcccagctgt

SEQ ID NO: 51641 - DNA, 20 bp, Artificial Sequence
  Description of Artificial Sequence: Synthetic oligonucleotide
  Target: LAMA2; (+) strand; PAM type: NNNNGHTT; PAM sequence: GCTAGATT
aagaaatttttaaaaccgag

SEQ ID NO: 51642 - DNA, 20 bp, Artificial Sequence
  Description of Artificial Sequence: Synthetic oligonucleotide
  Target: LAMA2; (+) strand; PAM type: NNNNGHTT; PAM sequence: ATGCGTTT
aaagtagggaaaaataaacc

SEQ ID NO: 51643 - DNA, 20 bp, Artificial Sequence
  Description of Artificial Sequence: Synthetic oligonucleotide
  Target: LAMA2; (+) strand; PAM type: NNNNGHTT; PAM sequence: GCTGGCTT
gagatggctaaaaagcgaag

SEQ ID NO: 51644 - DNA, 20 bp, Artificial Sequence
  Description of Artificial Sequence: Synthetic oligonucleotide
  Target: LAMA2; (+) strand; PAM type: NNNNGHTT; PAM sequence: GTAGGTTT
aaattctgggatggcactgt

SEQ ID NO: 51645 - DNA, 20 bp, Artificial Sequence
  Description of Artificial Sequence: Synthetic oligonucleotide
  Target: LAMA2; (+) strand; PAM type: NNNNGHTT; PAM sequence: TTGTGTTT
tcatattttggaatggttct

SEQ ID NO: 51646 - DNA, 20 bp, Artificial Sequence
  Description of Artificial Sequence: Synthetic oligonucleotide
  Target: LAMA2; (+) strand; PAM type: NNNNGHTT; PAM sequence: GAGTGATT
ataaactatataacttgtag

SEQ ID NO: 51647 - DNA, 20 bp, Artificial Sequence
  Description of Artificial Sequence: Synthetic oligonucleotide
  Target: LAMA2; (+) strand; PAM type: NNNNGHTT; PAM sequence: ATTTGTTT
atatacactgccaaggtcta

SEQ ID NO: 51648 - DNA, 20 bp, Artificial Sequence
  Description of Artificial Sequence: Synthetic oligonucleotide
  Target: LAMA2; (+) strand; PAM type: NNNNGHTT; PAM sequence: ACCTGTTT
aaggtctaatttgtttttcc

SEQ ID NO: 51649 - DNA, 20 bp, Artificial Sequence
  Description of Artificial Sequence: Synthetic oligonucleotide
  Target: LAMA2; (+) strand; PAM type: NNNNGHTT; PAM sequence: ATGTGTTT
cacctgtttttcctcatgcc

SEQ ID NO: 51650 - DNA, 20 bp, Artificial Sequence
  Description of Artificial Sequence: Synthetic oligonucleotide
  Target: LAMA2; (+) strand; PAM type: NNNNGHTT; PAM sequence: GACAGTTT
caatatattgatgccgactg

SEQ ID NO: 51651 - DNA, 20 bp, Artificial Sequence
  Description of Artificial Sequence: Synthetic oligonucleotide
  Target: LAMA2; (+) strand; PAM type: NNNNGHTT; PAM sequence: TGCTGATT
gactggacagtttttaccga

SEQ ID NO: 51652 - DNA, 20 bp, Artificial Sequence
  Description of Artificial Sequence: Synthetic oligonucleotide
  Target: LAMA2; (+) strand; PAM type: NNNNGHTT; PAM sequence: TTCAGTTT
aaattaaataacaataaata

SEQ ID NO: 51653 - DNA, 20 bp, Artificial Sequence
  Description of Artificial Sequence: Synthetic oligonucleotide
  Target: LAMA2; (+) strand; PAM type: NNNNGHTT; PAM sequence: TACTGATT
agccacatgtggctagtaac

SEQ ID NO: 51654 - DNA, 20 bp, Artificial Sequence
  Description of Artificial Sequence: Synthetic oligonucleotide
  Target: LAMA2; (+) strand; PAM type: NNNNGHTT; PAM sequence: CTTTGTTT
atcactgacattctgatagc

SEQ ID NO: 51655 - DNA, 20 bp, Artificial Sequence
  Description of Artificial Sequence: Synthetic oligonucleotide
  Target: LAMA2; (+) strand; PAM type: NNNNGHTT; PAM sequence: ATTTGATT
taatttattaaacctttgca

SEQ ID NO: 51656 - DNA, 20 bp, Artificial Sequence
  Description of Artificial Sequence: Synthetic oligonucleotide
  Target: LAMA2; (+) strand; PAM type: NNNNGHTT; PAM sequence: CTATGATT
gcaatttgattatgtaggta

SEQ ID NO: 51657 - DNA, 20 bp, Artificial Sequence
  Description of Artificial Sequence: Synthetic oligonucleotide
  Target: LAMA2; (+) strand; PAM type: NNNNGHTT; PAM sequence: TGTAGTTT
tgcaaaagtaaacattcaag

SEQ ID NO: 51658 - DNA, 20 bp, Artificial Sequence
  Description of Artificial Sequence: Synthetic oligonucleotide
  Target: LAMA2; (+) strand; PAM type: NNNNGHTT; PAM sequence: ATGGGTTT
ttattgaaaaaataaaatgt

SEQ ID NO: 51659 - DNA, 20 bp, Artificial Sequence
  Description of Artificial Sequence: Synthetic oligonucleotide
  Target: LAMA2; (+) strand; PAM type: NNNNGHTT; PAM sequence: GGTTGCTT
atgtatgggtttttgcattt

SEQ ID NO: 51660 - DNA, 20 bp, Artificial Sequence
  Description of Artificial Sequence: Synthetic oligonucleotide
  Target: LAMA2; (+) strand; PAM type: NNNNGHTT; PAM sequence: CAGGGATT
ctcttcggcctcccaaaatg

SEQ ID NO: 51661 - DNA, 20 bp, Artificial Sequence
  Description of Artificial Sequence: Synthetic oligonucleotide
  Target: LAMA2; (+) strand; PAM type: NNNNGHTT; PAM sequence: ATCTGTTT
agtaaacctaatttttaaac

SEQ ID NO: 51662 - DNA, 20 bp, Artificial Sequence
  Description of Artificial Sequence: Synthetic oligonucleotide
  Target: LAMA2; (+) strand; PAM type: NNNNGHTT; PAM sequence: GAATGTTT
ttagactatataatccaaaa

SEQ ID NO: 51663 - DNA, 20 bp, Artificial Sequence
  Description of Artificial Sequence: Synthetic oligonucleotide
  Target: LAMA2; (+) strand; PAM type: NNNNGHTT; PAM sequence: CTTTGTTT
ccaaaagaatgtttcttgga

SEQ ID NO: 51664 - DNA, 20 bp, Artificial Sequence
  Description of Artificial Sequence: Synthetic oligonucleotide
  Target: LAMA2; (+) strand; PAM type: NNNNGHTT; PAM sequence: AAACGTTT
aaatctttttcaaaataaat

SEQ ID NO: 51665 - DNA, 20 bp, Artificial Sequence
  Description of Artificial Sequence: Synthetic oligonucleotide
  Target: LAMA2; (+) strand; PAM type: NNNNGHTT; PAM sequence: TTCAGATT
tttcaaaataaataaacgtt

SEQ ID NO: 51666 - DNA, 20 bp, Artificial Sequence
  Description of Artificial Sequence: Synthetic oligonucleotide
  Target: LAMA2; (+) strand; PAM type: NNNNGHTT; PAM sequence: CAAGGTTT
ttttttttctaacttttgag

SEQ ID NO: 51667 - DNA, 20 bp, Artificial Sequence
  Description of Artificial Sequence: Synthetic oligonucleotide
  Target: LAMA2; (+) strand; PAM type: NNNNGHTT; PAM sequence: TATAGTTT
tttttaaaaactttttggta

SEQ ID NO: 51668 - DNA, 20 bp, Artificial Sequence
  Description of Artificial Sequence: Synthetic oligonucleotide
  Target: LAMA2; (+) strand; PAM type: NNNNGHTT; PAM sequence: GTTTGTTT
taaaaactttttggtatata

SEQ ID NO: 51669 - DNA, 20 bp, Artificial Sequence
  Description of Artificial Sequence: Synthetic oligonucleotide
  Target: LAMA2; (+) strand; PAM type: NNNNGHTT; PAM sequence: TCATGTTT
agtcagttaattcctgtacc

SEQ ID NO: 51670 - DNA, 20 bp, Artificial Sequence
  Description of Artificial Sequence: Synthetic oligonucleotide
  Target: LAMA2; (+) strand; PAM type: NNNNGHTT; PAM sequence: GTGAGATT
ctcatgtttaaatgctgtgg

SEQ ID NO: 51671 - DNA, 20 bp, Artificial Sequence
  Description of Artificial Sequence: Synthetic oligonucleotide
  Target: LAMA2; (+) strand; PAM type: NNNNGHTT; PAM sequence: CAGAGTTT
aaccagtagacaatggaaac

SEQ ID NO: 51672 - DNA, 20 bp, Artificial Sequence
  Description of Artificial Sequence: Synthetic oligonucleotide
  Target: LAMA2; (+) strand; PAM type: NNNNGHTT; PAM sequence: CACAGTTT
gtttgctgggtacacgtgtg

SEQ ID NO: 51673 - DNA, 20 bp, Artificial Sequence
  Description of Artificial Sequence: Synthetic oligonucleotide
  Target: LAMA2; (+) strand; PAM type: NNNNGHTT; PAM sequence: CAAGGCTT
gcctgcatgtgtctgctcca

SEQ ID NO: 51674 - DNA, 20 bp, Artificial Sequence
  Description of Artificial Sequence: Synthetic oligonucleotide
  Target: LAMA2; (+) strand; PAM type: NNNNGHTT; PAM sequence: TATTGCTT
cactaccatcaccctaatga

SEQ ID NO: 51675 - DNA, 20 bp, Artificial Sequence
  Description of Artificial Sequence: Synthetic oligonucleotide
  Target: LAMA2; (+) strand; PAM type: NNNNGHTT; PAM sequence: TTTTGCTT
catcaccctaatgatattgc

SEQ ID NO: 51676 - DNA, 20 bp, Artificial Sequence
  Description of Artificial Sequence: Synthetic oligonucleotide
  Target: LAMA2; (+) strand; PAM type: NNNNGHTT; PAM sequence: TCCCGATT
ccgtacaatatactcagtag

SEQ ID NO: 51677 - DNA, 20 bp, Artificial Sequence
  Description of Artificial Sequence: Synthetic oligonucleotide
  Target: LAMA2; (+) strand; PAM type: NNNNGHTT; PAM sequence: GTCTGTTT
aggatgttccctggaggttg

SEQ ID NO: 51678 - DNA, 20 bp, Artificial Sequence
  Description of Artificial Sequence: Synthetic oligonucleotide
  Target: LAMA2; (+) strand; PAM type: NNNNGHTT; PAM sequence: ATCAGATT
agttctctaaacacatttat

SEQ ID NO: 51679 - DNA, 20 bp, Artificial Sequence
  Description of Artificial Sequence: Synthetic oligonucleotide
  Target: LAMA2; (+) strand; PAM type: NNNNGHTT; PAM sequence: GCAAGATT
tcctactcttaaacgataaa

SEQ ID NO: 51680 - DNA, 20 bp, Artificial Sequence
  Description of Artificial Sequence: Synthetic oligonucleotide
  Target: LAMA2; (+) strand; PAM type: NNNNGHTT; PAM sequence: TTCTGTTT
atcattaatactaatctctt

SEQ ID NO: 51681 - DNA, 20 bp, Artificial Sequence
  Description of Artificial Sequence: Synthetic oligonucleotide
  Target: LAMA2; (+) strand; PAM type: NNNNGHTT; PAM sequence: TATAGCTT
ttttacttttatgtgttgta

SEQ ID NO: 51682 - DNA, 20 bp, Artificial Sequence
  Description of Artificial Sequence: Synthetic oligonucleotide
  Target: LAMA2; (+) strand; PAM type: NNNNGHTT; PAM sequence: TGAAGTTT
tacattttttctggaaccat

SEQ ID NO: 51683 - DNA, 20 bp, Artificial Sequence
  Description of Artificial Sequence: Synthetic oligonucleotide
  Target: LAMA2; (+) strand; PAM type: NNNNGHTT; PAM sequence: TTGTGTTT
gcaatcaactctgcaaagac

SEQ ID NO: 51684 - DNA, 20 bp, Artificial Sequence
  Description of Artificial Sequence: Synthetic oligonucleotide
  Target: LAMA2; (+) strand; PAM type: NNNNGHTT; PAM sequence: TTTCGTTT
gcatcctagcattcccctat

SEQ ID NO: 51685 - DNA, 20 bp, Artificial Sequence
  Description of Artificial Sequence: Synthetic oligonucleotide
  Target: LAMA2; (+) strand; PAM type: NNNNGHTT; PAM sequence: CACTGTTT
attttcgtttaactattttg

SEQ ID NO: 51686 - DNA, 20 bp, Artificial Sequence
  Description of Artificial Sequence: Synthetic oligonucleotide
  Target: LAMA2; (+) strand; PAM type: NNNNGHTT; PAM sequence: ATCAGCTT
tttatagaaactcaatagtg

SEQ ID NO: 51687 - DNA, 20 bp, Artificial Sequence
  Description of Artificial Sequence: Synthetic oligonucleotide
  Target: LAMA2; (+) strand; PAM type: NNNNGHTT; PAM sequence: GCTTGTTT
tagaaactcaatagtgatca

SEQ ID NO: 51688 - DNA, 20 bp, Artificial Sequence
  Description of Artificial Sequence: Synthetic oligonucleotide
  Target: LAMA2; (+) strand; PAM type: NNNNGHTT; PAM sequence: TGCTGCTT
atacaattattcattttgtc

SEQ ID NO: 51689 - DNA, 20 bp, Artificial Sequence
  Description of Artificial Sequence: Synthetic oligonucleotide
  Target: LAMA2; (+) strand; PAM type: NNNNGHTT; PAM sequence: TGAGGTTT
taaatccaccacttgaatga

SEQ ID NO: 51690 - DNA, 20 bp, Artificial Sequence
  Description of Artificial Sequence: Synthetic oligonucleotide
  Target: LAMA2; (+) strand; PAM type: NNNNGHTT; PAM sequence: AGAAGTTT
ggccatagacacccactctg

SEQ ID NO: 51691 - DNA, 20 bp, Artificial Sequence
  Description of Artificial Sequence: Synthetic oligonucleotide
  Target: LAMA2; (+) strand; PAM type: NNNNGHTT; PAM sequence: ACTGGCTT
ctaaaactgtaaggacccat

SEQ ID NO: 51692 - DNA, 20 bp, Artificial Sequence
  Description of Artificial Sequence: Synthetic oligonucleotide
  Target: LAMA2; (+) strand; PAM type: NNNNGHTT; PAM sequence: GGAAGTTT
acccatactggcttcttaaa

SEQ ID NO: 51693 - DNA, 20 bp, Artificial Sequence
  Description of Artificial Sequence: Synthetic oligonucleotide
  Target: LAMA2; (+) strand; PAM type: NNNNGHTT; PAM sequence: TTATGATT
atagcctctgcacgtggaaa

SEQ ID NO: 51694 - DNA, 20 bp, Artificial Sequence
  Description of Artificial Sequence: Synthetic oligonucleotide
  Target: LAMA2; (+) strand; PAM type: NNNNGHTT; PAM sequence: AGTAGTTT
aaatattgaaaagtctgcac

SEQ ID NO: 51695 - DNA, 20 bp, Artificial Sequence
  Description of Artificial Sequence: Synthetic oligonucleotide
  Target: LAMA2; (+) strand; PAM type: NNNNGHTT; PAM sequence: CCATGATT
tatctgaactatctaaaact

SEQ ID NO: 51696 - DNA, 20 bp, Artificial Sequence
  Description of Artificial Sequence: Synthetic oligonucleotide
  Target: LAMA2; (+) strand; PAM type: NNNNGHTT; PAM sequence: AACAGATT
atttgaaaattggaatagaa

SEQ ID NO: 51697 - DNA, 20 bp, Artificial Sequence
  Description of Artificial Sequence: Synthetic oligonucleotide
  Target: LAMA2; (+) strand; PAM type: NNNNGHTT; PAM sequence: AAAGGATT
ggaggaaaatagcctacatt

SEQ ID NO: 51698 - DNA, 20 bp, Artificial Sequence
  Description of Artificial Sequence: Synthetic oligonucleotide
  Target: LAMA2; (+) strand; PAM type: NNNNGHTT; PAM sequence: CTTTGCTT
atagcctacattaaaggatt

SEQ ID NO: 51699 - DNA, 20 bp, Artificial Sequence
  Description of Artificial Sequence: Synthetic oligonucleotide
  Target: LAMA2; (+) strand; PAM type: NNNNGHTT; PAM sequence: ATGGGCTT
cactttaaattcctaactac

SEQ ID NO: 51700 - DNA, 20 bp, Artificial Sequence
  Description of Artificial Sequence: Synthetic oligonucleotide
  Target: LAMA2; (+) strand; PAM type: NNNNGHTT; PAM sequence: GCTTGCTT
ttaaattcctaactacatgg

SEQ ID NO: 51701 - DNA, 20 bp, Artificial Sequence
  Description of Artificial Sequence: Synthetic oligonucleotide
  Target: LAMA2; (+) strand; PAM type: NNNNGHTT; PAM sequence: TCAAGATT
attaggaatgaacatgtcta

SEQ ID NO: 51702 - DNA, 20 bp, Artificial Sequence
  Description of Artificial Sequence: Synthetic oligonucleotide
  Target: LAMA2; (+) strand; PAM type: NNNNGHTT; PAM sequence: ATATGCTT
tgaatgaattatagaaagct

SEQ ID NO: 51703 - DNA, 20 bp, Artificial Sequence
  Description of Artificial Sequence: Synthetic oligonucleotide
  Target: LAMA2; (+) strand; PAM type: NNNNGHTT; PAM sequence: CACAGCTT
tagaaagctatatgcttctg

SEQ ID NO: 51704 - DNA, 20 bp, Artificial Sequence
  Description of Artificial Sequence: Synthetic oligonucleotide
  Target: LAMA2; (+) strand; PAM type: NNNNGHTT; PAM sequence: TTGAGATT
ctatatgcttctgcacagct

SEQ ID NO: 51705 - DNA, 20 bp, Artificial Sequence
  Description of Artificial Sequence: Synthetic oligonucleotide
  Target: LAMA2; (+) strand; PAM type: NNNNGHTT; PAM sequence: AGCTGATT
gctttgagattgagatgggg

SEQ ID NO: 51706 - DNA, 20 bp, Artificial Sequence
  Description of Artificial Sequence: Synthetic oligonucleotide
  Target: LAMA2; (+) strand; PAM type: NNNNGHTT; PAM sequence: AACTGTTT
tacatttctacttgaaatgt

SEQ ID NO: 51707 - DNA, 20 bp, Artificial Sequence
  Description of Artificial Sequence: Synthetic oligonucleotide
  Target: LAMA2; (+) strand; PAM type: NNNNGHTT; PAM sequence: CGATGTTT
tgagaaaaaactagactatg

SEQ ID NO: 51708 - DNA, 20 bp, Artificial Sequence
  Description of Artificial Sequence: Synthetic oligonucleotide
  Target: LAMA2; (+) strand; PAM type: NNNNGHTT; PAM sequence: GTTTGTTT
aaaaaactagactatgcgat

SEQ ID NO: 51709 - DNA, 20 bp, Artificial Sequence
  Description of Artificial Sequence: Synthetic oligonucleotide
  Target: LAMA2; (+) strand; PAM type: NNNNGHTT; PAM sequence: TAAGGTTT
atgtttgttttatttatttt

SEQ ID NO: 51710 - DNA, 20 bp, Artificial Sequence
  Description of Artificial Sequence: Synthetic oligonucleotide
  Target: LAMA2; (+) strand; PAM type: NNNNGHTT; PAM sequence: TAGAGTTT
aaacataaacaattaagtga

SEQ ID NO: 51711 - DNA, 20 bp, Artificial Sequence
  Description of Artificial Sequence: Synthetic oligonucleotide
  Target: LAMA2; (+) strand; PAM type: NNNNGHTT; PAM sequence: CAGTGTTT
tattcaagagatattcgtta

SEQ ID NO: 51712 - DNA, 20 bp, Artificial Sequence
  Description of Artificial Sequence: Synthetic oligonucleotide
  Target: LAMA2; (+) strand; PAM type: NNNNGHTT; PAM sequence: ACCTGCTT
gacaatctccctagacatgt

SEQ ID NO: 51713 - DNA, 20 bp, Artificial Sequence
  Description of Artificial Sequence: Synthetic oligonucleotide
  Target: LAMA2; (+) strand; PAM type: NNNNGHTT; PAM sequence: GTCAGTTT
agacatgtacctgcttgtgt

SEQ ID NO: 51714 - DNA, 20 bp, Artificial Sequence
  Description of Artificial Sequence: Synthetic oligonucleotide
  Target: LAMA2; (+) strand; PAM type: NNNNGHTT; PAM sequence: TTTGGTTT
gtgtcagtttgacttaaatc

SEQ ID NO: 51715 - DNA, 20 bp, Artificial Sequence
  Description of Artificial Sequence: Synthetic oligonucleotide
  Target: LAMA2; (+) strand; PAM type: NNNNGHTT; PAM sequence: TTCTGATT
aataaaagtagaggctataa

SEQ ID NO: 51716 - DNA, 20 bp, Artificial Sequence
  Description of Artificial Sequence: Synthetic oligonucleotide
  Target: LAMA2; (+) strand; PAM type: NNNNGHTT; PAM sequence: AGAAGATT
gattttaacaaaaactgctc

SEQ ID NO: 51717 - DNA, 20 bp, Artificial Sequence
  Description of Artificial Sequence: Synthetic oligonucleotide
  Target: LAMA2; (+) strand; PAM type: NNNNGHTT; PAM sequence: CCATGTTT
ttcaactgctcttaaacttt

SEQ ID NO: 51718 - DNA, 20 bp, Artificial Sequence
  Description of Artificial Sequence: Synthetic oligonucleotide
  Target: LAMA2; (+) strand; PAM type: NNNNGHTT; PAM sequence: TCCTGCTT
ctcttaaactttccatgttt

SEQ ID NO: 51719 - DNA, 20 bp, Artificial Sequence
  Description of Artificial Sequence: Synthetic oligonucleotide
  Target: LAMA2; (+) strand; PAM type: NNNNGHTT; PAM sequence: AATGGTTT
ttatttaaattttcatttct

SEQ ID NO: 51720 - DNA, 20 bp, Artificial Sequence
  Description of Artificial Sequence: Synthetic oligonucleotide
  Target: LAMA2; (+) strand; PAM type: NNNNGHTT; PAM sequence: GAATGTTT
cttcttttcctttactcaca

SEQ ID NO: 51721 - DNA, 20 bp, Artificial Sequence
  Description of Artificial Sequence: Synthetic oligonucleotide
  Target: LAMA2; (+) strand; PAM type: NNNNGHTT; PAM sequence: GTTAGCTT
actcacagaatgtttacaca

SEQ ID NO: 51722 - DNA, 20 bp, Artificial Sequence
  Description of Artificial Sequence: Synthetic oligonucleotide
  Target: LAMA2; (+) strand; PAM type: NNNNGHTT; PAM sequence: CCTGGTTT
acacagttagctttcctaag

SEQ ID NO: 51723 - DNA, 20 bp, Artificial Sequence
  Description of Artificial Sequence: Synthetic oligonucleotide
  Target: LAMA2; (+) strand; PAM type: NNNNGHTT; PAM sequence: TAATGCTT
agctgataatgcattttccc

SEQ ID NO: 51724 - DNA, 20 bp, Artificial Sequence
  Description of Artificial Sequence: Synthetic oligonucleotide
  Target: LAMA2; (+) strand; PAM type: NNNNGHTT; PAM sequence: TTTAGTTT
agttaacttacttttgtatt

SEQ ID NO: 51725 - DNA, 20 bp, Artificial Sequence
  Description of Artificial Sequence: Synthetic oligonucleotide
  Target: LAMA2; (+) strand; PAM type: NNNNGHTT; PAM sequence: ATGGGTTT
tatttgcacctatatttcct

SEQ ID NO: 51726 - DNA, 20 bp, Artificial Sequence
  Description of Artificial Sequence: Synthetic oligonucleotide
  Target: LAMA2; (+) strand; PAM type: NNNNGHTT; PAM sequence: GACAGCTT
acatatgcatatgtaaagag

SEQ ID NO: 51727 - DNA, 20 bp, Artificial Sequence
  Description of Artificial Sequence: Synthetic oligonucleotide
  Target: LAMA2; (+) strand; PAM type: NNNNGHTT; PAM sequence: GTCAGCTT
ccttaccaaatctgtagaca

SEQ ID NO: 51728 - DNA, 20 bp, Artificial Sequence
  Description of Artificial Sequence: Synthetic oligonucleotide
  Target: LAMA2; (+) strand; PAM type: NNNNGHTT; PAM sequence: GATCGTTT
ttggcaggtcaaagcaggag

SEQ ID NO: 51729 - DNA, 20 bp, Artificial Sequence
  Description of Artificial Sequence: Synthetic oligonucleotide
  Target: LAMA2; (+) strand; PAM type: NNNNGHTT; PAM sequence: AGGAGTTT
caggaggatcgtttgagccc

SEQ ID NO: 51730 - DNA, 20 bp, Artificial Sequence
  Description of Artificial Sequence: Synthetic oligonucleotide
  Target: LAMA2; (+) strand; PAM type: NNNNGHTT; PAM sequence: AAATGTTT
taagaccctttctctacaaa

SEQ ID NO: 51731 - DNA, 20 bp, Artificial Sequence
  Description of Artificial Sequence: Synthetic oligonucleotide
  Target: LAMA2; (+) strand; PAM type: NNNNGHTT; PAM sequence: CTGTGATT
atgggcatggtcgtgcacaa

SEQ ID NO: 51732 - DNA, 20 bp, Artificial Sequence
  Description of Artificial Sequence: Synthetic oligonucleotide
  Target: LAMA2; (+) strand; PAM type: NNNNGHTT; PAM sequence: ATTTGATT
agtatctatatcccctgtcc

SEQ ID NO: 51733 - DNA, 20 bp, Artificial Sequence
  Description of Artificial Sequence: Synthetic oligonucleotide
  Target: LAMA2; (+) strand; PAM type: NNNNGHTT; PAM sequence: CCCAGATT
taaaagcaatccctcaactg

SEQ ID NO: 51734 - DNA, 20 bp, Artificial Sequence
  Description of Artificial Sequence: Synthetic oligonucleotide
  Target: LAMA2; (+) strand; PAM type: NNNNGHTT; PAM sequence: TCTAGTTT
aaacgtaattttccatttaa

SEQ ID NO: 51735 - DNA, 20 bp, Artificial Sequence
  Description of Artificial Sequence: Synthetic oligonucleotide
  Target: LAMA2; (+) strand; PAM type: NNNNGHTT; PAM sequence: CAATGCTT
ctgccatgaccaaaagaaca

SEQ ID NO: 51736 - DNA, 20 bp, Artificial Sequence
  Description of Artificial Sequence: Synthetic oligonucleotide
  Target: LAMA2; (+) strand; PAM type: NNNNGHTT; PAM sequence: TTGTGATT
tgtaaaccagatcatgttat

SEQ ID NO: 51737 - DNA, 20 bp, Artificial Sequence
  Description of Artificial Sequence: Synthetic oligonucleotide
  Target: LAMA2; (+) strand; PAM type: NNNNGHTT; PAM sequence: ACGTGTTT
agatcatgttatttgtgatt

SEQ ID NO: 51738 - DNA, 20 bp, Artificial Sequence
  Description of Artificial Sequence: Synthetic oligonucleotide
  Target: LAMA2; (+) strand; PAM type: NNNNGHTT; PAM sequence: CTTGGATT
agatgtataaccacgagtaa

SEQ ID NO: 51739 - DNA, 20 bp, Artificial Sequence
  Description of Artificial Sequence: Synthetic oligonucleotide
  Target: LAMA2; (+) strand; PAM type: NNNNGHTT; PAM sequence: AGTGGTTT
gattatttcaggaatgcaga

SEQ ID NO: 51740 - DNA, 20 bp, Artificial Sequence
  Description of Artificial Sequence: Synthetic oligonucleotide
  Target: LAMA2; (+) strand; PAM type: NNNNGHTT; PAM sequence: TCAGGATT
aaggtgggtagatcacaagg

SEQ ID NO: 51741 - DNA, 20 bp, Artificial Sequence
  Description of Artificial Sequence: Synthetic oligonucleotide
  Target: LAMA2; (+) strand; PAM type: NNNNGHTT; PAM sequence: AATTGCTT
ttgggaggctgaggcaggag

SEQ ID NO: 51742 - DNA, 20 bp, Artificial Sequence
  Description of Artificial Sequence: Synthetic oligonucleotide
  Target: LAMA2; (+) strand; PAM type: NNNNGHTT; PAM sequence: CCGAGATT
gaggccgaggttgcagtgag

SEQ ID NO: 51743 - DNA, 20 bp, Artificial Sequence
  Description of Artificial Sequence: Synthetic oligonucleotide
  Target: LAMA2; (+) strand; PAM type: NNNNGHTT; PAM sequence: TCATGATT
tggtaaaatttaacagtcat

SEQ ID NO: 51744 - DNA, 20 bp, Artificial Sequence
  Description of Artificial Sequence: Synthetic oligonucleotide
  Target: LAMA2; (+) strand; PAM type: NNNNGHTT; PAM sequence: TCCTGATT
aaaaaaactataacaagtat

SEQ ID NO: 51745 - DNA, 20 bp, Artificial Sequence
  Description of Artificial Sequence: Synthetic oligonucleotide
  Target: LAMA2; (+) strand; PAM type: NNNNGHTT; PAM sequence: CAATGATT
aatgataccaaagtatttct

SEQ ID NO: 51746 - DNA, 20 bp, Artificial Sequence
  Description of Artificial Sequence: Synthetic oligonucleotide
  Target: LAMA2; (+) strand; PAM type: NNNNGHTT; PAM sequence: TGTAGATT
catttctccccaaaatgata

SEQ ID NO: 51747 - DNA, 20 bp, Artificial Sequence
  Description of Artificial Sequence: Synthetic oligonucleotide
  Target: LAMA2; (+) strand; PAM type: NNNNGHTT; PAM sequence: GACAGCTT
cttatttttctgtgaatcat

SEQ ID NO: 51748 - DNA, 20 bp, Artificial Sequence
  Description of Artificial Sequence: Synthetic oligonucleotide
  Target: LAMA2; (+) strand; PAM type: NNNNGHTT; PAM sequence: TAAAGTTT
gatatcagcacattagaagg

SEQ ID NO: 51749 - DNA, 20 bp, Artificial Sequence
  Description of Artificial Sequence: Synthetic oligonucleotide
  Target: LAMA2; (+) strand; PAM type: NNNNGHTT; PAM sequence: GAATGATT
acaacagtgaactgttcagt

SEQ ID NO: 51750 - DNA, 20 bp, Artificial Sequence
  Description of Artificial Sequence: Synthetic oligonucleotide
  Target: LAMA2; (+) strand; PAM type: NNNNGHTT; PAM sequence: CCAGGATT
aattcttagaagaaaatata

SEQ ID NO: 51751 - DNA, 20 bp, Artificial Sequence
  Description of Artificial Sequence: Synthetic oligonucleotide
  Target: LAMA2; (+) strand; PAM type: NNNNGHTT; PAM sequence: ACTTGATT
ttgaccttcgggaaaagaac

SEQ ID NO: 51752 - DNA, 20 bp, Artificial Sequence
  Description of Artificial Sequence: Synthetic oligonucleotide
  Target: LAMA2; (+) strand; PAM type: NNNNGHTT; PAM sequence: ACAAGATT
agaacacttgattgaacaaa

SEQ ID NO: 51753 - DNA, 20 bp, Artificial Sequence
  Description of Artificial Sequence: Synthetic oligonucleotide
  Target: LAMA2; (+) strand; PAM type: NNNNGHTT; PAM sequence: TGCAGTTT
ccaaaaggggaaaagctcac

SEQ ID NO: 51754 - DNA, 20 bp, Artificial Sequence
  Description of Artificial Sequence: Synthetic oligonucleotide
  Target: LAMA2; (+) strand; PAM type: NNNNGHTT; PAM sequence: CCCAGATT
attccactcctgggtacaga

SEQ ID NO: 51755 - DNA, 20 bp, Artificial Sequence
  Description of Artificial Sequence: Synthetic oligonucleotide
  Target: LAMA2; (+) strand; PAM type: NNNNGHTT; PAM sequence: GAATGTTT
gcataataagacatgtacaa

SEQ ID NO: 51756 - DNA, 20 bp, Artificial Sequence
  Description of Artificial Sequence: Synthetic oligonucleotide
  Target: LAMA2; (+) strand; PAM type: NNNNGHTT; PAM sequence: TGTAGATT
gtgctatatggtaccatttt

SEQ ID NO: 51757 - DNA, 20 bp, Artificial Sequence
  Description of Artificial Sequence: Synthetic oligonucleotide
  Target: LAMA2; (+) strand; PAM type: NNNNGHTT; PAM sequence: TATTGTTT
acaagtagcactaaacaaca

SEQ ID NO: 51758 - DNA, 20 bp, Artificial Sequence
  Description of Artificial Sequence: Synthetic oligonucleotide
  Target: LAMA2; (+) strand; PAM type: NNNNGHTT; PAM sequence: TATTGTTT
actcataagagatgcaatgg

SEQ ID NO: 51759 - DNA, 20 bp, Artificial Sequence
  Description of Artificial Sequence: Synthetic oligonucleotide
  Target: LAMA2; (+) strand; PAM type: NNNNGHTT; PAM sequence: GGTAGATT
tattgtttctgaaatttggt

SEQ ID NO: 51760 - DNA, 20 bp, Artificial Sequence
  Description of Artificial Sequence: Synthetic oligonucleotide
  Target: LAMA2; (+) strand; PAM type: NNNNGHTT; PAM sequence: CGCAGCTT
atgttattatacagtgttaa

SEQ ID NO: 51761 - DNA, 20 bp, Artificial Sequence
  Description of Artificial Sequence: Synthetic oligonucleotide
  Target: LAMA2; (+) strand; PAM type: NNNNGHTT; PAM sequence: CATCGTTT
atacagtgttaacgcagctt

SEQ ID NO: 51762 - DNA, 20 bp, Artificial Sequence
  Description of Artificial Sequence: Synthetic oligonucleotide
  Target: LAMA2; (+) strand; PAM type: NNNNGHTT; PAM sequence: TTTTGTTT
acaaatgccctcgtcaattt

SEQ ID NO: 51763 - DNA, 20 bp, Artificial Sequence
  Description of Artificial Sequence: Synthetic oligonucleotide
  Target: LAMA2; (+) strand; PAM type: NNNNGHTT; PAM sequence: AATAGATT
taccagatcaaatattctga

SEQ ID NO: 51764 - DNA, 20 bp, Artificial Sequence
  Description of Artificial Sequence: Synthetic oligonucleotide
  Target: LAMA2; (+) strand; PAM type: NNNNGHTT; PAM sequence: ACTTGATT
atagatttccactaaaggat

SEQ ID NO: 51765 - DNA, 20 bp, Artificial Sequence
  Description of Artificial Sequence: Synthetic oligonucleotide
  Target: LAMA2; (+) strand; PAM type: NNNNGHTT; PAM sequence: ACCAGCTT
aaaagaaatgaatgtgaatc

SEQ ID NO: 51766 - DNA, 20 bp, Artificial Sequence
  Description of Artificial Sequence: Synthetic oligonucleotide
  Target: LAMA2; (+) strand; PAM type: NNNNGHTT; PAM sequence: TAGTGCTT
tgaatcaccagctttcagga

SEQ ID NO: 51767 - DNA, 20 bp, Artificial Sequence
  Description of Artificial Sequence: Synthetic oligonucleotide
  Target: LAMA2; (+) strand; PAM type: NNNNGHTT; PAM sequence: AACAGATT
caggatagtgcttaaaataa

SEQ ID NO: 51768 - DNA, 20 bp, Artificial Sequence
  Description of Artificial Sequence: Synthetic oligonucleotide
  Target: LAMA2; (+) strand; PAM type: NNNNGHTT; PAM sequence: TAATGTTT
agtaagttaaaatgacattt

SEQ ID NO: 51769 - DNA, 20 bp, Artificial Sequence
  Description of Artificial Sequence: Synthetic oligonucleotide
  Target: LAMA2; (+) strand; PAM type: NNNNGHTT; PAM sequence: ATTAGATT
gtataagtctgttagacata

SEQ ID NO: 51770 - DNA, 20 bp, Artificial Sequence
  Description of Artificial Sequence: Synthetic oligonucleotide
  Target: LAMA2; (+) strand; PAM type: NNNNGHTT; PAM sequence: TTTAGATT
gtctgttagacataattaga

SEQ ID NO: 51771 - DNA, 20 bp, Artificial Sequence
  Description of Artificial Sequence: Synthetic oligonucleotide
  Target: LAMA2; (+) strand; PAM type: NNNNGHTT; PAM sequence: ACAAGTTT
attcagtgctggttaaattg

SEQ ID NO: 51772 - DNA, 20 bp, Artificial Sequence
  Description of Artificial Sequence: Synthetic oligonucleotide
  Target: LAMA2; (+) strand; PAM type: NNNNGHTT; PAM sequence: AACGGTTT
aagttttatatttcaaagct

SEQ ID NO: 51773 - DNA, 20 bp, Artificial Sequence
  Description of Artificial Sequence: Synthetic oligonucleotide
  Target: LAMA2; (+) strand; PAM type: NNNNGHTT; PAM sequence: TTGTGATT
tttgatacccatagagttat

SEQ ID NO: 51774 - DNA, 20 bp, Artificial Sequence
  Description of Artificial Sequence: Synthetic oligonucleotide
  Target: LAMA2; (+) strand; PAM type: NNNNGHTT; PAM sequence: ATGGGTTT
ttgtgattcctttctgctaa

SEQ ID NO: 51775 - DNA, 20 bp, Artificial Sequence
  Description of Artificial Sequence: Synthetic oligonucleotide
  Target: LAMA2; (+) strand; PAM type: NNNNGHTT; PAM sequence: AGTAGTTT
agctaaggaatttttaattg

SEQ ID NO: 51776 - DNA, 20 bp, Artificial Sequence
  Description of Artificial Sequence: Synthetic oligonucleotide
  Target: LAMA2; (+) strand; PAM type: NNNNGHTT; PAM sequence: TTGTGTTT
ggaatttttaattgagtagt

SEQ ID NO: 51777 - DNA, 20 bp, Artificial Sequence
  Description of Artificial Sequence: Synthetic oligonucleotide
  Target: LAMA2; (+) strand; PAM type: NNNNGHTT; PAM sequence: ACATGATT
tggtggacacgtaactacat

SEQ ID NO: 51778 - DNA, 20 bp, Artificial Sequence
  Description of Artificial Sequence: Synthetic oligonucleotide
  Target: LAMA2; (+) strand; PAM type: NNNNGHTT; PAM sequence: TGATGTTT
agtaaattattggaacatga

SEQ ID NO: 51779 - DNA, 20 bp, Artificial Sequence
  Description of Artificial Sequence: Synthetic oligonucleotide
  Target: LAMA2; (+) strand; PAM type: NNNNGHTT; PAM sequence: GCATGCTT
cagtagcaagaagaaagcag

SEQ ID NO: 51780 - DNA, 20 bp, Artificial Sequence
  Description of Artificial Sequence: Synthetic oligonucleotide
  Target: LAMA2; (+) strand; PAM type: NNNNGHTT; PAM sequence: ACATGTTT
ctaaatgtgggaggcaggtt

SEQ ID NO: 51781 - DNA, 20 bp, Artificial Sequence
  Description of Artificial Sequence: Synthetic oligonucleotide
  Target: LAMA2; (+) strand; PAM type: NNNNGHTT; PAM sequence: GCCTGATT
gccacaaggttgggagtcag

SEQ ID NO: 51782 - DNA, 20 bp, Artificial Sequence
  Description of Artificial Sequence: Synthetic oligonucleotide
  Target: LAMA2; (+) strand; PAM type: NNNNGHTT; PAM sequence: GAGGGATT
ccacttgtgaatataaggga

SEQ ID NO: 51783 - DNA, 20 bp, Artificial Sequence
  Description of Artificial Sequence: Synthetic oligonucleotide
  Target: LAMA2; (+) strand; PAM type: NNNNGHTT; PAM sequence: ATGGGTTT
ttgacaccctttgtctcctg

SEQ ID NO: 51784 - DNA, 20 bp, Artificial Sequence
  Description of Artificial Sequence: Synthetic oligonucleotide
  Target: LAMA2; (+) strand; PAM type: NNNNGHTT; PAM sequence: ATCTGCTT
tgttactttcagcatcacaa

SEQ ID NO: 51785 - DNA, 20 bp, Artificial Sequence
  Description of Artificial Sequence: Synthetic oligonucleotide
  Target: LAMA2; (+) strand; PAM type: NNNNGHTT; PAM sequence: AAATGATT
atctcacaagcaaaaatggt

SEQ ID NO: 51786 - DNA, 20 bp, Artificial Sequence
  Description of Artificial Sequence: Synthetic oligonucleotide
  Target: LAMA2; (+) strand; PAM type: NNNNGHTT; PAM sequence: AGCTGTTT
atgattagaaagatatttcc

SEQ ID NO: 51787 - DNA, 20 bp, Artificial Sequence
  Description of Artificial Sequence: Synthetic oligonucleotide
  Target: LAMA2; (+) strand; PAM type: NNNNGHTT; PAM sequence: AACCGTTT
atatttccagctgttttcaa

SEQ ID NO: 51788 - DNA, 20 bp, Artificial Sequence
  Description of Artificial Sequence: Synthetic oligonucleotide
  Target: LAMA2; (+) strand; PAM type: NNNNGHTT; PAM sequence: TTCTGTTT
agctaagccataaatgagac

SEQ ID NO: 51789 - DNA, 20 bp, Artificial Sequence
  Description of Artificial Sequence: Synthetic oligonucleotide
  Target: LAMA2; (+) strand; PAM type: NNNNGHTT; PAM sequence: ATCTGTTT
tgtgatcagaccagagccga

SEQ ID NO: 51790 - DNA, 20 bp, Artificial Sequence
  Description of Artificial Sequence: Synthetic oligonucleotide
  Target: LAMA2; (+) strand; PAM type: NNNNGHTT; PAM sequence: CGTAGCTT
tatgcattgcaaaaggatac

SEQ ID NO: 51791 - DNA, 20 bp, Artificial Sequence
  Description of Artificial Sequence: Synthetic oligonucleotide
  Target: LAMA2; (+) strand; PAM type: NNNNGHTT; PAM sequence: GCAGGCTT
aatcagctccactggagcca

SEQ ID NO: 51792 - DNA, 20 bp, Artificial Sequence
  Description of Artificial Sequence: Synthetic oligonucleotide
  Target: LAMA2; (+) strand; PAM type: NNNNGHTT; PAM sequence: GGCGGTTT
cactggagccagcaggcttt

SEQ ID NO: 51793 - DNA, 20 bp, Artificial Sequence
  Description of Artificial Sequence: Synthetic oligonucleotide
  Target: LAMA2; (+) strand; PAM type: NNNNGHTT; PAM sequence: AGCTGCTT
ggttccaaagcagttatggc

SEQ ID NO: 51794 - DNA, 20 bp, Artificial Sequence
  Description of Artificial Sequence: Synthetic oligonucleotide
  Target: LAMA2; (+) strand; PAM type: NNNNGHTT; PAM sequence: CAAGGTTT
cttgtccctgtcccccttcc

SEQ ID NO: 51795 - DNA, 20 bp, Artificial Sequence
  Description of Artificial Sequence: Synthetic oligonucleotide
  Target: LAMA2; (+) strand; PAM type: NNNNGHTT; PAM sequence: AGTGGCTT
ggtttgcagggtccctgcag

SEQ ID NO: 51796 - DNA, 20 bp, Artificial Sequence
  Description of Artificial Sequence: Synthetic oligonucleotide
  Target: LAMA2; (+) strand; PAM type: NNNNGHTT; PAM sequence: GAGTGCTT
acctttttacaaatctacca

SEQ ID NO: 51797 - DNA, 20 bp, Artificial Sequence
  Description of Artificial Sequence: Synthetic oligonucleotide
  Target: LAMA2; (+) strand; PAM type: NNNNGHTT; PAM sequence: ATTGGCTT
ccccagccctgggccaggga

SEQ ID NO: 51798 - DNA, 20 bp, Artificial Sequence
  Description of Artificial Sequence: Synthetic oligonucleotide
  Target: LAMA2; (+) strand; PAM type: NNNNGHTT; PAM sequence: ATTAGTTT
tatgacaactcagagagata

SEQ ID NO: 51799 - DNA, 20 bp, Artificial Sequence
  Description of Artificial Sequence: Synthetic oligonucleotide
  Target: LAMA2; (+) strand; PAM type: NNNNGHTT; PAM sequence: TAAAGATT
gaaaacatttagataagcaa

SEQ ID NO: 51800 - DNA, 20 bp, Artificial Sequence
  Description of Artificial Sequence: Synthetic oligonucleotide
  Target: LAMA2; (+) strand; PAM type: NNNNGHTT; PAM sequence: CAAAGCTT
cttaccttctaagtaaacaa

SEQ ID NO: 51801 - DNA, 20 bp, Artificial Sequence
  Description of Artificial Sequence: Synthetic oligonucleotide
  Target: LAMA2; (+) strand; PAM type: NNNNGHTT; PAM sequence: CTCAGTTT
aagtaaacaacaaagctttc

SEQ ID NO: 51802 - DNA, 20 bp, Artificial Sequence
  Description of Artificial Sequence: Synthetic oligonucleotide
  Target: LAMA2; (+) strand; PAM type: NNNNGHTT; PAM sequence: AGAGGATT
tattattattattattaggt

SEQ ID NO: 51803 - DNA, 20 bp, Artificial Sequence
  Description of Artificial Sequence: Synthetic oligonucleotide
  Target: LAMA2; (+) strand; PAM type: NNNNGHTT; PAM sequence: AGACGTTT
ttcatgcagaatggctactg

SEQ ID NO: 51804 - DNA, 20 bp, Artificial Sequence
  Description of Artificial Sequence: Synthetic oligonucleotide
  Target: LAMA2; (+) strand; PAM type: NNNNGHTT; PAM sequence: GAATGCTT
atgctctcatttgaatctta

SEQ ID NO: 51805 - DNA, 20 bp, Artificial Sequence
  Description of Artificial Sequence: Synthetic oligonucleotide
  Target: LAMA2; (+) strand; PAM type: NNNNGHTT; PAM sequence: CCTGGTTT
atcttagaatgctttagaat

SEQ ID NO: 51806 - DNA, 20 bp, Artificial Sequence
  Description of Artificial Sequence: Synthetic oligonucleotide
  Target: LAMA2; (+) strand; PAM type: NNNNGHTT; PAM sequence: TCTAGATT
aatcctggtttcacatgtct

SEQ ID NO: 51807 - DNA, 20 bp, Artificial Sequence
  Description of Artificial Sequence: Synthetic oligonucleotide
  Target: LAMA2; (+) strand; PAM type: NNNNGHTT; PAM sequence: AAAAGATT
cattgcggaaaggacttttt

SEQ ID NO: 51808 - DNA, 20 bp, Artificial Sequence
  Description of Artificial Sequence: Synthetic oligonucleotide
  Target: LAMA2; (+) strand; PAM type: NNNNGHTT; PAM sequence: AAATGCTT
tctggaggctgaggcaggag

SEQ ID NO: 51809 - DNA, 20 bp, Artificial Sequence
  Description of Artificial Sequence: Synthetic oligonucleotide
  Target: LAMA2; (+) strand; PAM type: NNNNGHTT; PAM sequence: AGAGGTTT
aatgcttaaaccagggggac

SEQ ID NO: 51810 - DNA, 20 bp, Artificial Sequence
  Description of Artificial Sequence: Synthetic oligonucleotide
  Target: LAMA2; (+) strand; PAM type: NNNNGHTT; PAM sequence: TGCAGATT
aaggaatttcaataagtaac

SEQ ID NO: 51811 - DNA, 20 bp, Artificial Sequence
  Description of Artificial Sequence: Synthetic oligonucleotide
  Target: LAMA2; (+) strand; PAM type: NNNNGHTT; PAM sequence: ATTAGTTT
agtaactgcagatttgagaa

SEQ ID NO: 51812 - DNA, 20 bp, Artificial Sequence
  Description of Artificial Sequence: Synthetic oligonucleotide
  Target: LAMA2; (+) strand; PAM type: NNNNGHTT; PAM sequence: AGGTGCTT
tgccactatgtccttttaac

SEQ ID NO: 51813 - DNA, 20 bp, Artificial Sequence
  Description of Artificial Sequence: Synthetic oligonucleotide
  Target: LAMA2; (+) strand; PAM type: NNNNGHTT; PAM sequence: ATTTGATT
tgaccatcaatccaaccttt

SEQ ID NO: 51814 - DNA, 20 bp, Artificial Sequence
  Description of Artificial Sequence: Synthetic oligonucleotide
  Target: LAMA2; (+) strand; PAM type: NNNNGHTT; PAM sequence: AACAGTTT
gttaattggccatataaacg

SEQ ID NO: 51815 - DNA, 20 bp, Artificial Sequence
  Description of Artificial Sequence: Synthetic oligonucleotide
  Target: LAMA2; (+) strand; PAM type: NNNNGHTT; PAM sequence: AACTGATT
tataagcaagtgccacatta

SEQ ID NO: 51816 - DNA, 20 bp, Artificial Sequence
  Description of Artificial Sequence: Synthetic oligonucleotide
  Target: LAMA2; (+) strand; PAM type: NNNNGHTT; PAM sequence: TAATGCTT
cttcacccagaaaaaatttt

SEQ ID NO: 51817 - DNA, 20 bp, Artificial Sequence
  Description of Artificial Sequence: Synthetic oligonucleotide
  Target: LAMA2; (+) strand; PAM type: NNNNGHTT; PAM sequence: GCATGATT
ctttatatgcctattctatg

SEQ ID NO: 51818 - DNA, 20 bp, Artificial Sequence
  Description of Artificial Sequence: Synthetic oligonucleotide
  Target: LAMA2; (+) strand; PAM type: NNNNGHTT; PAM sequence: AGATGATT
ttgtgtcacatactagacaa

SEQ ID NO: 51819 - DNA, 20 bp, Artificial Sequence
  Description of Artificial Sequence: Synthetic oligonucleotide
  Target: LAMA2; (+) strand; PAM type: NNNNGHTT; PAM sequence: ATTTGTTT
tcacatactagacaaagatg

SEQ ID NO: 51820 - DNA, 20 bp, Artificial Sequence
  Description of Artificial Sequence: Synthetic oligonucleotide
  Target: LAMA2; (+) strand; PAM type: NNNNGHTT; PAM sequence: AATAGATT
acctccatctatgcacagcc

SEQ ID NO: 51821 - DNA, 20 bp, Artificial Sequence
  Description of Artificial Sequence: Synthetic oligonucleotide
  Target: LAMA2; (+) strand; PAM type: NNNNGHTT; PAM sequence: AAAGGTTT
ttacatttttgtgtgaccat

SEQ ID NO: 51822 - DNA, 20 bp, Artificial Sequence
  Description of Artificial Sequence: Synthetic oligonucleotide
  Target: LAMA2; (+) strand; PAM type: NNNNGHTT; PAM sequence: TGTTGATT
taaaggtttatattactaaa

SEQ ID NO: 51823 - DNA, 20 bp, Artificial Sequence
  Description of Artificial Sequence: Synthetic oligonucleotide
  Target: LAMA2; (+) strand; PAM type: NNNNGHTT; PAM sequence: GTATGATT
tactaaatgttgattatgat

SEQ ID NO: 51824 - DNA, 20 bp, Artificial Sequence
  Description of Artificial Sequence: Synthetic oligonucleotide
  Target: LAMA2; (+) strand; PAM type: NNNNGHTT; PAM sequence: TTCAGATT
tttgcattatcccaacactt

SEQ ID NO: 51825 - DNA, 20 bp, Artificial Sequence
  Description of Artificial Sequence: Synthetic oligonucleotide
  Target: LAMA2; (+) strand; PAM type: NNNNGHTT; PAM sequence: GATAGCTT
cctaaaatcctggacaaaat

SEQ ID NO: 51826 - DNA, 20 bp, Artificial Sequence
  Description of Artificial Sequence: Synthetic oligonucleotide
  Target: LAMA2; (+) strand; PAM type: NNNNGHTT; PAM sequence: ATTGGATT
taataccgcctcacaaaata

SEQ ID NO: 51827 - DNA, 20 bp, Artificial Sequence
  Description of Artificial Sequence: Synthetic oligonucleotide
  Target: LAMA2; (+) strand; PAM type: NNNNGHTT; PAM sequence: CCAAGCTT
gattttcaccaaactggggg

SEQ ID NO: 51828 - DNA, 20 bp, Artificial Sequence
  Description of Artificial Sequence: Synthetic oligonucleotide
  Target: LAMA2; (+) strand; PAM type: NNNNGHTT; PAM sequence: ATCTGCTT
cagtgacctctgcctcctat

SEQ ID NO: 51829 - DNA, 20 bp, Artificial Sequence
  Description of Artificial Sequence: Synthetic oligonucleotide
  Target: LAMA2; (+) strand; PAM type: NNNNGHTT; PAM sequence: CTGAGTTT
aaataggacaagcaactgaa

SEQ ID NO: 51830 - DNA, 20 bp, Artificial Sequence
  Description of Artificial Sequence: Synthetic oligonucleotide
  Target: LAMA2; (+) strand; PAM type: NNNNGHTT; PAM sequence: GAAAGCTT
gaactgagtttttcttctgg

SEQ ID NO: 51831 - DNA, 20 bp, Artificial Sequence
  Description of Artificial Sequence: Synthetic oligonucleotide
  Target: LAMA2; (+) strand; PAM type: NNNNGHTT; PAM sequence: TGGGGTTT
gagatattttaggagtcatt

SEQ ID NO: 51832 - DNA, 20 bp, Artificial Sequence
  Description of Artificial Sequence: Synthetic oligonucleotide
  Target: LAMA2; (+) strand; PAM type: NNNNGHTT; PAM sequence: TAAAGATT
ttggggtttccagaatgaga

SEQ ID NO: 51833 - DNA, 20 bp, Artificial Sequence
  Description of Artificial Sequence: Synthetic oligonucleotide
  Target: LAMA2; (+) strand; PAM type: NNNNGHTT; PAM sequence: AAAAGATT
caaagtatgttcaaacagaa

SEQ ID NO: 51834 - DNA, 20 bp, Artificial Sequence
  Description of Artificial Sequence: Synthetic oligonucleotide
  Target: LAMA2; (+) strand; PAM type: NNNNGHTT; PAM sequence: ATTAGATT
tatgttcaaacagaaaaaag

SEQ ID NO: 51835 - DNA, 20 bp, Artificial Sequence
  Description of Artificial Sequence: Synthetic oligonucleotide
  Target: LAMA2; (+) strand; PAM type: NNNNGHTT; PAM sequence: TATGGTTT
cacgtatgcaatccaactga

SEQ ID NO: 51836 - DNA, 20 bp, Artificial Sequence
  Description of Artificial Sequence: Synthetic oligonucleotide
  Target: LAMA2; (+) strand; PAM type: NNNNGHTT; PAM sequence: CAAAGTTT
attacaatactaaagtaata

SEQ ID NO: 51837 - DNA, 20 bp, Artificial Sequence
  Description of Artificial Sequence: Synthetic oligonucleotide
  Target: LAMA2; (+) strand; PAM type: NNNNGHTT; PAM sequence: TCTAGATT
aataaaaactaaagaaatga

SEQ ID NO: 51838 - DNA, 20 bp, Artificial Sequence
  Description of Artificial Sequence: Synthetic oligonucleotide
  Target: LAMA2; (+) strand; PAM type: NNNNGHTT; PAM sequence: GCAGGATT
tcctaaaaggtaaaatagga

SEQ ID NO: 51839 - DNA, 20 bp, Artificial Sequence
  Description of Artificial Sequence: Synthetic oligonucleotide
  Target: LAMA2; (+) strand; PAM type: NNNNGHTT; PAM sequence: TGTAGTTT
aaataggagcaggatttagc

SEQ ID NO: 51840 - DNA, 20 bp, Artificial Sequence
  Description of Artificial Sequence: Synthetic oligonucleotide
  Target: LAMA2; (+) strand; PAM type: NNNNGHTT; PAM sequence: CGCTGTTT
atcccttaattaatattttc

SEQ ID NO: 51841 - DNA, 20 bp, Artificial Sequence
  Description of Artificial Sequence: Synthetic oligonucleotide
  Target: LAMA2; (+) strand; PAM type: NNNNGHTT; PAM sequence: GCATGATT
aatgaatgaaatggacctga

SEQ ID NO: 51842 - DNA, 20 bp, Artificial Sequence
  Description of Artificial Sequence: Synthetic oligonucleotide
  Target: LAMA2; (+) strand; PAM type: NNNNGHTT; PAM sequence: GTAAGCTT
tgcccaaggtcacacagcta

SEQ ID NO: 51843 - DNA, 20 bp, Artificial Sequence
  Description of Artificial Sequence: Synthetic oligonucleotide
  Target: LAMA2; (+) strand; PAM type: NNNNGHTT; PAM sequence: ATTGGTTT
tctccatcaccaccctgtga

SEQ ID NO: 51844 - DNA, 20 bp, Artificial Sequence
  Description of Artificial Sequence: Synthetic oligonucleotide
  Target: LAMA2; (+) strand; PAM type: NNNNGHTT; PAM sequence: TCTAGCTT
acaccagaaagaggaaggcc

SEQ ID NO: 51845 - DNA, 20 bp, Artificial Sequence
  Description of Artificial Sequence: Synthetic oligonucleotide
  Target: LAMA2; (+) strand; PAM type: NNNNGHTT; PAM sequence: CAGAGATT
tttaaaattctaatcaagaa

SEQ ID NO: 51846 - DNA, 20 bp, Artificial Sequence
  Description of Artificial Sequence: Synthetic oligonucleotide
  Target: LAMA2; (+) strand; PAM type: NNNNGHTT; PAM sequence: AGAGGCTT
ctccttggacaatctttaac

SEQ ID NO: 51847 - DNA, 20 bp, Artificial Sequence
  Description of Artificial Sequence: Synthetic oligonucleotide
  Target: LAMA2; (+) strand; PAM type: NNNNGHTT; PAM sequence: GGCTGCTT
atatcatgttgctaagaaga

SEQ ID NO: 51848 - DNA, 20 bp, Artificial Sequence
  Description of Artificial Sequence: Synthetic oligonucleotide
  Target: LAMA2; (+) strand; PAM type: NNNNGHTT; PAM sequence: AGGGGCTT
ggggaaaaagagtgtagggg

SEQ ID NO: 51849 - DNA, 20 bp, Artificial Sequence
  Description of Artificial Sequence: Synthetic oligonucleotide
  Target: LAMA2; (+) strand; PAM type: NNNNGHTT; PAM sequence: AGTGGTTT
gtcacacatacccggaagtg

SEQ ID NO: 51850 - DNA, 20 bp, Artificial Sequence
  Description of Artificial Sequence: Synthetic oligonucleotide
  Target: LAMA2; (+) strand; PAM type: NNNNGHTT; PAM sequence: CTGGGTTT
tagcaaggaagctgaacctc

SEQ ID NO: 51851 - DNA, 20 bp, Artificial Sequence
  Description of Artificial Sequence: Synthetic oligonucleotide
  Target: LAMA2; (+) strand; PAM type: NNNNGHTT; PAM sequence: CATAGTTT
gttttgccaacacatttttc

SEQ ID NO: 51852 - DNA, 20 bp, Artificial Sequence
  Description of Artificial Sequence: Synthetic oligonucleotide
  Target: LAMA2; (+) strand; PAM type: NNNNGHTT; PAM sequence: TGACGTTT
cttcttcacccccttaacag

SEQ ID NO: 51853 - DNA, 20 bp, Artificial Sequence
  Description of Artificial Sequence: Synthetic oligonucleotide
  Target: LAMA2; (+) strand; PAM type: NNNNGHTT; PAM sequence: CCTGGCTT
ccaattcagagcatctttac

SEQ ID NO: 51854 - DNA, 20 bp, Artificial Sequence
  Description of Artificial Sequence: Synthetic oligonucleotide
  Target: LAMA2; (+) strand; PAM type: NNNNGHTT; PAM sequence: TATTGTTT
agagcatctttaccctggct

SEQ ID NO: 51855 - DNA, 20 bp, Artificial Sequence
  Description of Artificial Sequence: Synthetic oligonucleotide
  Target: LAMA2; (+) strand; PAM type: NNNNGHTT; PAM sequence: TGTGGTTT
ttgttttttccagttctaca

SEQ ID NO: 51856 - DNA, 20 bp, Artificial Sequence
  Description of Artificial Sequence: Synthetic oligonucleotide
  Target: LAMA2; (+) strand; PAM type: NNNNGHTT; PAM sequence: TGAGGTTT
gtaagagggtactttaggac

SEQ ID NO: 51857 - DNA, 20 bp, Artificial Sequence
  Description of Artificial Sequence: Synthetic oligonucleotide
  Target: LAMA2; (+) strand; PAM type: NNNNGHTT; PAM sequence: TCCGGTTT
tgaggtttccatccaagtac

SEQ ID NO: 51858 - DNA, 20 bp, Artificial Sequence
  Description of Artificial Sequence: Synthetic oligonucleotide
  Target: LAMA2; (+) strand; PAM type: NNNNGHTT; PAM sequence: GTAAGTTT
gttttctctccagatatgaa

SEQ ID NO: 51859 - DNA, 20 bp, Artificial Sequence
  Description of Artificial Sequence: Synthetic oligonucleotide
  Target: LAMA2; (+) strand; PAM type: NNNNGHTT; PAM sequence: TAATGCTT
atgatccccaggctagtgac

SEQ ID NO: 51860 - DNA, 20 bp, Artificial Sequence
  Description of Artificial Sequence: Synthetic oligonucleotide
  Target: LAMA2; (+) strand; PAM type: NNNNGHTT; PAM sequence: ACTTGCTT
tgttaagaccgaaactcaaa

SEQ ID NO: 51861 - DNA, 20 bp, Artificial Sequence
  Description of Artificial Sequence: Synthetic oligonucleotide
  Target: LAMA2; (+) strand; PAM type: NNNNGHTT; PAM sequence: TTCTGATT
catcagaactctttgtctcc

SEQ ID NO: 51862 - DNA, 20 bp, Artificial Sequence
  Description of Artificial Sequence: Synthetic oligonucleotide
  Target: LAMA2; (+) strand; PAM type: NNNNGHTT; PAM sequence: CAAGGATT
tgattcttggcccagggatc

SEQ ID NO: 51863 - DNA, 20 bp, Artificial Sequence
  Description of Artificial Sequence: Synthetic oligonucleotide
  Target: LAMA2; (+) strand; PAM type: NNNNGHTT; PAM sequence: AGGTGCTT
tcagctacattctttataaa

SEQ ID NO: 51864 - DNA, 20 bp, Artificial Sequence
  Description of Artificial Sequence: Synthetic oligonucleotide
  Target: LAMA2; (+) strand; PAM type: NNNNGHTT; PAM sequence: AAGTGTTT
ttctttataaaaggtgcttt

SEQ ID NO: 51865 - DNA, 20 bp, Artificial Sequence
  Description of Artificial Sequence: Synthetic oligonucleotide
  Target: LAMA2; (+) strand; PAM type: NNNNGHTT; PAM sequence: TGTTGATT
aaggtgctttaagtgtttgc

SEQ ID NO: 51866 - DNA, 20 bp, Artificial Sequence
  Description of Artificial Sequence: Synthetic oligonucleotide
  Target: LAMA2; (+) strand; PAM type: NNNNGHTT; PAM sequence: CATGGTTT
gcaatctaagctctcaggag

SEQ ID NO: 51867 - DNA, 20 bp, Artificial Sequence
  Description of Artificial Sequence: Synthetic oligonucleotide
  Target: LAMA2; (+) strand; PAM type: NNNNGHTT; PAM sequence: CCATGCTT
agcacaacccaaggaagacc

SEQ ID NO: 51868 - DNA, 20 bp, Artificial Sequence
  Description of Artificial Sequence: Synthetic oligonucleotide
  Target: LAMA2; (+) strand; PAM type: NNNNGHTT; PAM sequence: CCTGGTTT
aatgttgcagtgcgccatga

SEQ ID NO: 51869 - DNA, 20 bp, Artificial Sequence
  Description of Artificial Sequence: Synthetic oligonucleotide
  Target: LAMA2; (+) strand; PAM type: NNNNGHTT; PAM sequence: CAGCGTTT
atggaacgagatcctgagaa

SEQ ID NO: 51870 - DNA, 20 bp, Artificial Sequence
  Description of Artificial Sequence: Synthetic oligonucleotide
  Target: LAMA2; (+) strand; PAM type: NNNNGHTT; PAM sequence: GTTTGCTT
aacgagatcctgagaacagc

SEQ ID NO: 51871 - DNA, 20 bp, Artificial Sequence
  Description of Artificial Sequence: Synthetic oligonucleotide
  Target: LAMA2; (+) strand; PAM type: NNNNGHTT; PAM sequence: ATTTGATT
gtgaagggtggcaggaaaga

SEQ ID NO: 51872 - DNA, 20 bp, Artificial Sequence
  Description of Artificial Sequence: Synthetic oligonucleotide
  Target: LAMA2; (+) strand; PAM type: NNNNGHTT; PAM sequence: ACTTGTTT
ttgaatcagatgtgacttat

SEQ ID NO: 51873 - DNA, 20 bp, Artificial Sequence
  Description of Artificial Sequence: Synthetic oligonucleotide
  Target: LAMA2; (+) strand; PAM type: NNNNGHTT; PAM sequence: AAAAGCTT
tgaacagcctatcgaagtta

SEQ ID NO: 51874 - DNA, 20 bp, Artificial Sequence
  Description of Artificial Sequence: Synthetic oligonucleotide
  Target: LAMA2; (+) strand; PAM type: NNNNGHTT; PAM sequence: CGGGGATT
aatggacttaaaaaggcatg

SEQ ID NO: 51875 - DNA, 20 bp, Artificial Sequence
  Description of Artificial Sequence: Synthetic oligonucleotide
  Target: LAMA2; (+) strand; PAM type: NNNNGHTT; PAM sequence: TTGGGCTT
cttaaaaaggcatgcgggga

SEQ ID NO: 51876 - DNA, 20 bp, Artificial Sequence
  Description of Artificial Sequence: Synthetic oligonucleotide
  Target: LAMA2; (+) strand; PAM type: NNNNGHTT; PAM sequence: AAGTGTTT
accccagttctgacacatgt

SEQ ID NO: 51877 - DNA, 20 bp, Artificial Sequence
  Description of Artificial Sequence: Synthetic oligonucleotide
  Target: LAMA2; (+) strand; PAM type: NNNNGHTT; PAM sequence: CATTGCTT
gtaagtgtttatattatccc

SEQ ID NO: 51878 - DNA, 20 bp, Artificial Sequence
  Description of Artificial Sequence: Synthetic oligonucleotide
  Target: LAMA2; (+) strand; PAM type: NNNNGHTT; PAM sequence: GGAAGATT
tattctgagtcatttcagaa

SEQ ID NO: 51879 - DNA, 20 bp, Artificial Sequence
  Description of Artificial Sequence: Synthetic oligonucleotide
  Target: LAMA2; (+) strand; PAM type: NNNNGHTT; PAM sequence: TTTTGTTT
acctatatttccatcttcaa

SEQ ID NO: 51880 - DNA, 20 bp, Artificial Sequence
  Description of Artificial Sequence: Synthetic oligonucleotide
  Target: LAMA2; (+) strand; PAM type: NNNNGHTT; PAM sequence: GTTGGTTT
accatgacagaggcaaccat

SEQ ID NO: 51881 - DNA, 20 bp, Artificial Sequence
  Description of Artificial Sequence: Synthetic oligonucleotide
  Target: LAMA2; (+) strand; PAM type: NNNNGHTT; PAM sequence: TCCTGTTT
accttgtatacaatttggtg

SEQ ID NO: 51882 - DNA, 20 bp, Artificial Sequence
  Description of Artificial Sequence: Synthetic oligonucleotide
  Target: LAMA2; (+) strand; PAM type: NNNNGHTT; PAM sequence: AACTGTTT
aactagtaatacaccactaa

SEQ ID NO: 51883 - DNA, 20 bp, Artificial Sequence
  Description of Artificial Sequence: Synthetic oligonucleotide
  Target: LAMA2; (+) strand; PAM type: NNNNGHTT; PAM sequence: GGCAGATT
cactttgggaggccaaggca

SEQ ID NO: 51884 - DNA, 20 bp, Artificial Sequence
  Description of Artificial Sequence: Synthetic oligonucleotide
  Target: LAMA2; (+) strand; PAM type: NNNNGHTT; PAM sequence: AATCGCTT
tcagtaggctgaggcaggag

SEQ ID NO: 51885 - DNA, 20 bp, Artificial Sequence
  Description of Artificial Sequence: Synthetic oligonucleotide
  Target: LAMA2; (+) strand; PAM type: NNNNGHTT; PAM sequence: ATATGATT
catataaatgtgtatgtcta

SEQ ID NO: 51886 - DNA, 20 bp, Artificial Sequence
  Description of Artificial Sequence: Synthetic oligonucleotide
  Target: LAMA2; (+) strand; PAM type: NNNNGHTT; PAM sequence: CCTTGATT
tagtattggaggtcatatag

SEQ ID NO: 51887 - DNA, 20 bp, Artificial Sequence
  Description of Artificial Sequence: Synthetic oligonucleotide
  Target: LAMA2; (+) strand; PAM type: NNNNGHTT; PAM sequence: CTCAGTTT
gctacctgtccaatctattt

SEQ ID NO: 51888 - DNA, 20 bp, Artificial Sequence
  Description of Artificial Sequence: Synthetic oligonucleotide
  Target: LAMA2; (+) strand; PAM type: NNNNGHTT; PAM sequence: CCCTGCTT
caagtactaaccgggcccaa

SEQ ID NO: 51889 - DNA, 20 bp, Artificial Sequence
  Description of Artificial Sequence: Synthetic oligonucleotide
  Target: LAMA2; (+) strand; PAM type: NNNNGHTT; PAM sequence: CTTAGCTT
actaaccgggcccaaccctg

SEQ ID NO: 51890 - DNA, 20 bp, Artificial Sequence
  Description of Artificial Sequence: Synthetic oligonucleotide
  Target: LAMA2; (+) strand; PAM type: NNNNGHTT; PAM sequence: GGATGCTT
ttttgagatcagaaaagatc

SEQ ID NO: 51891 - DNA, 20 bp, Artificial Sequence
  Description of Artificial Sequence: Synthetic oligonucleotide
  Target: LAMA2; (+) strand; PAM type: NNNNGHTT; PAM sequence: GGGTGATT
gaaaagatcggatgctttca

SEQ ID NO: 51892 - DNA, 20 bp, Artificial Sequence
  Description of Artificial Sequence: Synthetic oligonucleotide
  Target: LAMA2; (+) strand; PAM type: NNNNGHTT; PAM sequence: TTCTGTTT
gtgatttggccatagactat

SEQ ID NO: 51893 - DNA, 20 bp, Artificial Sequence
  Description of Artificial Sequence: Synthetic oligonucleotide
  Target: LAMA2; (+) strand; PAM type: NNNNGHTT; PAM sequence: CAGAGTTT
agacatcaaagactttgtat

SEQ ID NO: 51894 - DNA, 20 bp, Artificial Sequence
  Description of Artificial Sequence: Synthetic oligonucleotide
  Target: LAMA2; (+) strand; PAM type: NNNNGHTT; PAM sequence: TAATGTTT
tgtatcagagttttaaaaga

SEQ ID NO: 51895 - DNA, 20 bp, Artificial Sequence
  Description of Artificial Sequence: Synthetic oligonucleotide
  Target: LAMA2; (+) strand; PAM type: NNNNGHTT; PAM sequence: GAACGTTT
ttcaatgactcacatatact

SEQ ID NO: 51896 - DNA, 20 bp, Artificial Sequence
  Description of Artificial Sequence: Synthetic oligonucleotide
  Target: LAMA2; (+) strand; PAM type: NNNNGHTT; PAM sequence: GAGTGTTT
agaccatggtaggctattga

SEQ ID NO: 51897 - DNA, 20 bp, Artificial Sequence
  Description of Artificial Sequence: Synthetic oligonucleotide
  Target: LAMA2; (+) strand; PAM type: NNNNGHTT; PAM sequence: TCCAGTTT
ggtaggctattgagagtgtt

SEQ ID NO: 51898 - DNA, 20 bp, Artificial Sequence
  Description of Artificial Sequence: Synthetic oligonucleotide
  Target: LAMA2; (+) strand; PAM type: NNNNGHTT; PAM sequence: TCAAGCTT
ctgatgagctcctctatgca

SEQ ID NO: 51899 - DNA, 20 bp, Artificial Sequence
  Description of Artificial Sequence: Synthetic oligonucleotide
  Target: LAMA2; (+) strand; PAM type: NNNNGHTT; PAM sequence: TAAGGTTT
ggccaaaagatgaatatgtc

SEQ ID NO: 51900 - DNA, 20 bp, Artificial Sequence
  Description of Artificial Sequence: Synthetic oligonucleotide
  Target: LAMA2; (+) strand; PAM type: NNNNGHTT; PAM sequence: AATTGTTT
gttttcaatacacatacctg

SEQ ID NO: 51901 - DNA, 20 bp, Artificial Sequence
  Description of Artificial Sequence: Synthetic oligonucleotide
  Target: LAMA2; (+) strand; PAM type: NNNNGHTT; PAM sequence: TATTGTTT
atttcattttattcccaccc

SEQ ID NO: 51902 - DNA, 20 bp, Artificial Sequence
  Description of Artificial Sequence: Synthetic oligonucleotide
  Target: LAMA2; (+) strand; PAM type: NNNNGHTT; PAM sequence: AGTTGATT
catggggggttagttccagg

SEQ ID NO: 51903 - DNA, 20 bp, Artificial Sequence
  Description of Artificial Sequence: Synthetic oligonucleotide
  Target: LAMA2; (+) strand; PAM type: NNNNGHTT; PAM sequence: CATGGATT
agcattcctgagatctgcca

SEQ ID NO: 51904 - DNA, 20 bp, Artificial Sequence
  Description of Artificial Sequence: Synthetic oligonucleotide
  Target: LAMA2; (+) strand; PAM type: NNNNGHTT; PAM sequence: GAATGTTT
gatctgccacatggatttca

SEQ ID NO: 51905 - DNA, 20 bp, Artificial Sequence
  Description of Artificial Sequence: Synthetic oligonucleotide
  Target: LAMA2; (+) strand; PAM type: NNNNGHTT; PAM sequence: CTTTGCTT
aattcagccacaggttagat

SEQ ID NO: 51906 - DNA, 20 bp, Artificial Sequence
  Description of Artificial Sequence: Synthetic oligonucleotide
  Target: LAMA2; (+) strand; PAM type: NNNNGHTT; PAM sequence: ATGTGTTT
ccctcatatacctgaaaatc

SEQ ID NO: 51907 - DNA, 20 bp, Artificial Sequence
  Description of Artificial Sequence: Synthetic oligonucleotide
  Target: LAMA2; (+) strand; PAM type: NNNNGHTT; PAM sequence: ACATGTTT
tgtgtttctcagactcataa

SEQ ID NO: 51908 - DNA, 20 bp, Artificial Sequence
  Description of Artificial Sequence: Synthetic oligonucleotide
  Target: LAMA2; (+) strand; PAM type: NNNNGHTT; PAM sequence: AAATGTTT
atcctaatgtccacttataa

SEQ ID NO: 51909 - DNA, 20 bp, Artificial Sequence
  Description of Artificial Sequence: Synthetic oligonucleotide
  Target: LAMA2; (+) strand; PAM type: NNNNGHTT; PAM sequence: CTTTGCTT
ttttacatgatacttacagc

SEQ ID NO: 51910 - DNA, 20 bp, Artificial Sequence
  Description of Artificial Sequence: Synthetic oligonucleotide
  Target: LAMA2; (+) strand; PAM type: NNNNGHTT; PAM sequence: ACAAGATT
tttgcttgaacatttcattg

SEQ ID NO: 51911 - DNA, 20 bp, Artificial Sequence
  Description of Artificial Sequence: Synthetic oligonucleotide
  Target: LAMA2; (+) strand; PAM type: NNNNGHTT; PAM sequence: TAATGATT
gagtccctaaaacttctatg

SEQ ID NO: 51912 - DNA, 20 bp, Artificial Sequence
  Description of Artificial Sequence: Synthetic oligonucleotide
  Target: LAMA2; (+) strand; PAM type: NNNNGHTT; PAM sequence: CCTAGCTT
ttccctaggctaaccatttc

SEQ ID NO: 51913 - DNA, 20 bp, Artificial Sequence
  Description of Artificial Sequence: Synthetic oligonucleotide
  Target: LAMA2; (+) strand; PAM type: NNNNGHTT; PAM sequence: GAATGTTT
atttctattaatgcacctaa

SEQ ID NO: 51914 - DNA, 20 bp, Artificial Sequence
  Description of Artificial Sequence: Synthetic oligonucleotide
  Target: LAMA2; (+) strand; PAM type: NNNNGHTT; PAM sequence: TAATGTTT
taatgcacctaagaatgttt

SEQ ID NO: 51915 - DNA, 20 bp, Artificial Sequence
  Description of Artificial Sequence: Synthetic oligonucleotide
  Target: LAMA2; (+) strand; PAM type: NNNNGHTT; PAM sequence: GCTGGTTT
aggcaggtctctcagcctgt

SEQ ID NO: 51916 - DNA, 20 bp, Artificial Sequence
  Description of Artificial Sequence: Synthetic oligonucleotide
  Target: LAMA2; (+) strand; PAM type: NNNNGHTT; PAM sequence: TTTGGATT
ggtctctcagcctgtgctgg

SEQ ID NO: 51917 - DNA, 20 bp, Artificial Sequence
  Description of Artificial Sequence: Synthetic oligonucleotide
  Target: LAMA2; (+) strand; PAM type: NNNNGHTT; PAM sequence: TGGAGATT
gatacttgcccatctgggaa

SEQ ID NO: 51918 - DNA, 20 bp, Artificial Sequence
  Description of Artificial Sequence: Synthetic oligonucleotide
  Target: LAMA2; (+) strand; PAM type: NNNNGHTT; PAM sequence: TTTCGATT
tttataaccttctgttctaa

SEQ ID NO: 51919 - DNA, 20 bp, Artificial Sequence
  Description of Artificial Sequence: Synthetic oligonucleotide
  Target: LAMA2; (+) strand; PAM type: NNNNGHTT; PAM sequence: GTATGTTT
ttccatttcctctcagcagt

SEQ ID NO: 51920 - DNA, 20 bp, Artificial Sequence
  Description of Artificial Sequence: Synthetic oligonucleotide
  Target: LAMA2; (+) strand; PAM type: NNNNGHTT; PAM sequence: GTTGGTTT
ttgagtagcatgccaaattg

SEQ ID NO: 51921 - DNA, 20 bp, Artificial Sequence
  Description of Artificial Sequence: Synthetic oligonucleotide
  Target: LAMA2; (+) strand; PAM type: NNNNGHTT; PAM sequence: TAAAGATT
attagagctagaagacaccc

SEQ ID NO: 51922 - DNA, 20 bp, Artificial Sequence
  Description of Artificial Sequence: Synthetic oligonucleotide
  Target: LAMA2; (+) strand; PAM type: NNNNGHTT; PAM sequence: TTTTGTTT
caactgctatttcaccttct

SEQ ID NO: 51923 - DNA, 20 bp, Artificial Sequence
  Description of Artificial Sequence: Synthetic oligonucleotide
  Target: LAMA2; (+) strand; PAM type: NNNNGHTT; PAM sequence: GTTTGTTT
tgctatttcaccttcttttt

SEQ ID NO: 51924 - DNA, 20 bp, Artificial Sequence
  Description of Artificial Sequence: Synthetic oligonucleotide
  Target: LAMA2; (+) strand; PAM type: NNNNGHTT; PAM sequence: GTTTGTTT
atttcaccttctttttgttt

SEQ ID NO: 51925 - DNA, 20 bp, Artificial Sequence
  Description of Artificial Sequence: Synthetic oligonucleotide
  Target: LAMA2; (+) strand; PAM type: NNNNGHTT; PAM sequence: GTTTGTTT
caccttctttttgtttgttt

SEQ ID NO: 51926 - DNA, 20 bp, Artificial Sequence
  Description of Artificial Sequence: Synthetic oligonucleotide
  Target: LAMA2; (+) strand; PAM type: NNNNGHTT; PAM sequence: GTCTGTTT
ttttgtttgtttgtttgttt

SEQ ID NO: 51927 - DNA, 20 bp, Artificial Sequence
  Description of Artificial Sequence: Synthetic oligonucleotide
  Target: LAMA2; (+) strand; PAM type: NNNNGHTT; PAM sequence: TGGAGTTT
tgtttgtctgttttttgaga

SEQ ID NO: 51928 - DNA, 20 bp, Artificial Sequence
  Description of Artificial Sequence: Synthetic oligonucleotide
  Target: LAMA2; (+) strand; PAM type: NNNNGHTT; PAM sequence: TCCTGCTT
ctcctgggttcaagcaattc

SEQ ID NO: 51929 - DNA, 20 bp, Artificial Sequence
  Description of Artificial Sequence: Synthetic oligonucleotide
  Target: LAMA2; (+) strand; PAM type: NNNNGHTT; PAM sequence: CTGGGATT
tgcttcagcctcccgagtag

SEQ ID NO: 51930 - DNA, 20 bp, Artificial Sequence
  Description of Artificial Sequence: Synthetic oligonucleotide
  Target: LAMA2; (+) strand; PAM type: NNNNGHTT; PAM sequence: ACGGGATT
attttgtatttttagtagag

SEQ ID NO: 51931 - DNA, 20 bp, Artificial Sequence
  Description of Artificial Sequence: Synthetic oligonucleotide
  Target: LAMA2; (+) strand; PAM type: NNNNGHTT; PAM sequence: CTGGGATT
cacctcagcctcccaaagtg

SEQ ID NO: 51932 - DNA, 20 bp, Artificial Sequence
  Description of Artificial Sequence: Synthetic oligonucleotide
  Target: LAMA2; (+) strand; PAM type: NNNNGHTT; PAM sequence: ATTAGATT
gttatgactgtgtggtcaga

SEQ ID NO: 51933 - DNA, 20 bp, Artificial Sequence
  Description of Artificial Sequence: Synthetic oligonucleotide
  Target: LAMA2; (+) strand; PAM type: NNNNGHTT; PAM sequence: TTCTGTTT
atcatgaagccacacatatc

SEQ ID NO: 51934 - DNA, 20 bp, Artificial Sequence
  Description of Artificial Sequence: Synthetic oligonucleotide
  Target: LAMA2; (+) strand; PAM type: NNNNGHTT; PAM sequence: ATTTGTTT
cacacatatcttctgtttta

SEQ ID NO: 51935 - DNA, 20 bp, Artificial Sequence
  Description of Artificial Sequence: Synthetic oligonucleotide
  Target: LAMA2; (+) strand; PAM type: NNNNGHTT; PAM sequence: AAAAGTTT
tttaaaggttactaaaagtt

SEQ ID NO: 51936 - DNA, 20 bp, Artificial Sequence
  Description of Artificial Sequence: Synthetic oligonucleotide
  Target: LAMA2; (+) strand; PAM type: NNNNGHTT; PAM sequence: TACAGTTT
ttactaaaagttaaaagttt

SEQ ID NO: 51937 - DNA, 20 bp, Artificial Sequence
  Description of Artificial Sequence: Synthetic oligonucleotide
  Target: LAMA2; (+) strand; PAM type: NNNNGHTT; PAM sequence: AGTTGCTT
agtcagagaaaaagagggag

SEQ ID NO: 51938 - DNA, 20 bp, Artificial Sequence
  Description of Artificial Sequence: Synthetic oligonucleotide
  Target: LAMA2; (+) strand; PAM type: NNNNGHTT; PAM sequence: CTAGGATT
aggataataatatcttcctt

SEQ ID NO: 51939 - DNA, 20 bp, Artificial Sequence
  Description of Artificial Sequence: Synthetic oligonucleotide
  Target: LAMA2; (+) strand; PAM type: NNNNGHTT; PAM sequence: CCATGCTT
tttatgcaaagcacctagca

SEQ ID NO: 51940 - DNA, 20 bp, Artificial Sequence
  Description of Artificial Sequence: Synthetic oligonucleotide
  Target: LAMA2; (+) strand; PAM type: NNNNGHTT; PAM sequence: GTTAGTTT
atctctctatttattctttt

SEQ ID NO: 51941 - DNA, 20 bp, Artificial Sequence
  Description of Artificial Sequence: Synthetic oligonucleotide
  Target: LAMA2; (+) strand; PAM type: NNNNGHTT; PAM sequence: CTGTGTTT
tgttagtttaactttaactt

SEQ ID NO: 51942 - DNA, 20 bp, Artificial Sequence
  Description of Artificial Sequence: Synthetic oligonucleotide
  Target: LAMA2; (+) strand; PAM type: NNNNGHTT; PAM sequence: GTTAGTTT
tctttaacttaattattcta

SEQ ID NO: 51943 - DNA, 20 bp, Artificial Sequence
  Description of Artificial Sequence: Synthetic oligonucleotide
  Target: LAMA2; (+) strand; PAM type: NNNNGHTT; PAM sequence: ATTGGTTT
aagcaattccaaaccctttt

SEQ ID NO: 51944 - DNA, 20 bp, Artificial Sequence
  Description of Artificial Sequence: Synthetic oligonucleotide
  Target: LAMA2; (+) strand; PAM type: NNNNGHTT; PAM sequence: TTTAGATT
tttccatttttgtatcagaa

SEQ ID NO: 51945 - DNA, 20 bp, Artificial Sequence
  Description of Artificial Sequence: Synthetic oligonucleotide
  Target: LAMA2; (+) strand; PAM type: NNNNGHTT; PAM sequence: CATGGCTT
ctggtgtgcagtggcgcaat

SEQ ID NO: 51946 - DNA, 20 bp, Artificial Sequence
  Description of Artificial Sequence: Synthetic oligonucleotide
  Target: LAMA2; (+) strand; PAM type: NNNNGHTT; PAM sequence: ATGGGATT
tttttgtatttttaatagag

SEQ ID NO: 51947 - DNA, 20 bp, Artificial Sequence
  Description of Artificial Sequence: Synthetic oligonucleotide
  Target: LAMA2; (+) strand; PAM type: NNNNGHTT; PAM sequence: TTGAGATT
tgcctcagcctgccaaagtg

SEQ ID NO: 51948 - DNA, 20 bp, Artificial Sequence
  Description of Artificial Sequence: Synthetic oligonucleotide
  Target: LAMA2; (+) strand; PAM type: NNNNGHTT; PAM sequence: TTTAGCTT
ccaccacgcctggcccagaa

SEQ ID NO: 51949 - DNA, 20 bp, Artificial Sequence
  Description of Artificial Sequence: Synthetic oligonucleotide
  Target: LAMA2; (+) strand; PAM type: NNNNGHTT; PAM sequence: AATGGATT
gagaaagccctgccttgtga

SEQ ID NO: 51950 - DNA, 20 bp, Artificial Sequence
  Description of Artificial Sequence: Synthetic oligonucleotide
  Target: LAMA2; (+) strand; PAM type: NNNNGHTT; PAM sequence: TTATGATT
tgaaatggattatgtcaatc

SEQ ID NO: 51951 - DNA, 20 bp, Artificial Sequence
  Description of Artificial Sequence: Synthetic oligonucleotide
  Target: LAMA2; (+) strand; PAM type: NNNNGHTT; PAM sequence: GCTAGATT
gattaattcatgttgaacac

SEQ ID NO: 51952 - DNA, 20 bp, Artificial Sequence
  Description of Artificial Sequence: Synthetic oligonucleotide
  Target: LAMA2; (+) strand; PAM type: NNNNGHTT; PAM sequence: GGTAGCTT
attatctcatttgatattat

SEQ ID NO: 51953 - DNA, 20 bp, Artificial Sequence
  Description of Artificial Sequence: Synthetic oligonucleotide
  Target: LAMA2; (+) strand; PAM type: NNNNGHTT; PAM sequence: CACTGTTT
aagttctctgcaagtatgtg

SEQ ID NO: 51954 - DNA, 20 bp, Artificial Sequence
  Description of Artificial Sequence: Synthetic oligonucleotide
  Target: LAMA2; (+) strand; PAM type: NNNNGHTT; PAM sequence: TGTGGATT
tttttaacaaggatagcctg

SEQ ID NO: 51955 - DNA, 20 bp, Artificial Sequence
  Description of Artificial Sequence: Synthetic oligonucleotide
  Target: LAMA2; (+) strand; PAM type: NNNNGHTT; PAM sequence: CACAGTTT
aagagttcagccgtaaacct

SEQ ID NO: 51956 - DNA, 20 bp, Artificial Sequence
  Description of Artificial Sequence: Synthetic oligonucleotide
  Target: LAMA2; (+) strand; PAM type: NNNNGHTT; PAM sequence: TTGGGATT
cctgtactgatgagctctct

SEQ ID NO: 51957 - DNA, 20 bp, Artificial Sequence
  Description of Artificial Sequence: Synthetic oligonucleotide
  Target: LAMA2; (+) strand; PAM type: NNNNGHTT; PAM sequence: AAGCGATT
ggaaagaatagaggaaagga

SEQ ID NO: 51958 - DNA, 20 bp, Artificial Sequence
  Description of Artificial Sequence: Synthetic oligonucleotide
  Target: LAMA2; (+) strand; PAM type: NNNNGHTT; PAM sequence: AGCAGCTT
gaaaggaaagcgatttccct

SEQ ID NO: 51959 - DNA, 20 bp, Artificial Sequence
  Description of Artificial Sequence: Synthetic oligonucleotide
  Target: LAMA2; (+) strand; PAM type: NNNNGHTT; PAM sequence: AACTGATT
acagtcaaggccaaaggata

SEQ ID NO: 51960 - DNA, 20 bp, Artificial Sequence
  Description of Artificial Sequence: Synthetic oligonucleotide
  Target: LAMA2; (+) strand; PAM type: NNNNGHTT; PAM sequence: CCTTGTTT
ttttccacttatcaaggaat

SEQ ID NO: 51961 - DNA, 20 bp, Artificial Sequence
  Description of Artificial Sequence: Synthetic oligonucleotide
  Target: LAMA2; (+) strand; PAM type: NNNNGHTT; PAM sequence: AAGAGCTT
aaatgcccaagacccaccaa

SEQ ID NO: 51962 - DNA, 20 bp, Artificial Sequence
  Description of Artificial Sequence: Synthetic oligonucleotide
  Target: LAMA2; (+) strand; PAM type: NNNNGHTT; PAM sequence: TTCAGTTT
aagtgcagtgttaacaataa

SEQ ID NO: 51963 - DNA, 20 bp, Artificial Sequence
  Description of Artificial Sequence: Synthetic oligonucleotide
  Target: LAMA2; (+) strand; PAM type: NNNNGHTT; PAM sequence: TAGGGCTT
ttctcaataaacatcttgag

SEQ ID NO: 51964 - DNA, 20 bp, Artificial Sequence
  Description of Artificial Sequence: Synthetic oligonucleotide
  Target: LAMA2; (+) strand; PAM type: NNNNGHTT; PAM sequence: AGAAGATT
tagggcttttatattttaga

SEQ ID NO: 51965 - DNA, 20 bp, Artificial Sequence
  Description of Artificial Sequence: Synthetic oligonucleotide
  Target: LAMA2; (+) strand; PAM type: NNNNGHTT; PAM sequence: ATGTGATT
tcatgacaaataagcaccag

SEQ ID NO: 51966 - DNA, 20 bp, Artificial Sequence
  Description of Artificial Sequence: Synthetic oligonucleotide
  Target: LAMA2; (+) strand; PAM type: NNNNGHTT; PAM sequence: TGATGATT
agaaaattatgcaatttcta

SEQ ID NO: 51967 - DNA, 20 bp, Artificial Sequence
  Description of Artificial Sequence: Synthetic oligonucleotide
  Target: LAMA2; (+) strand; PAM type: NNNNGHTT; PAM sequence: CATTGTTT
atgcaatttctatgatgatt

SEQ ID NO: 51968 - DNA, 20 bp, Artificial Sequence
  Description of Artificial Sequence: Synthetic oligonucleotide
  Target: LAMA2; (+) strand; PAM type: NNNNGHTT; PAM sequence: TGGTGCTT
ttctatgatgattcattgtt

SEQ ID NO: 51969 - DNA, 20 bp, Artificial Sequence
  Description of Artificial Sequence: Synthetic oligonucleotide
  Target: LAMA2; (+) strand; PAM type: NNNNGHTT; PAM sequence: GCCAGTTT
gtgctttcaagaacaaagat

SEQ ID NO: 51970 - DNA, 20 bp, Artificial Sequence
  Description of Artificial Sequence: Synthetic oligonucleotide
  Target: LAMA2; (+) strand; PAM type: NNNNGHTT; PAM sequence: AGATGCTT
caggacccaggaaattcaag

SEQ ID NO: 51971 - DNA, 20 bp, Artificial Sequence
  Description of Artificial Sequence: Synthetic oligonucleotide
  Target: LAMA2; (+) strand; PAM type: NNNNGHTT; PAM sequence: CATTGCTT
tgcagttagttagaaaagac

SEQ ID NO: 51972 - DNA, 20 bp, Artificial Sequence
  Description of Artificial Sequence: Synthetic oligonucleotide
  Target: LAMA2; (+) strand; PAM type: NNNNGHTT; PAM sequence: AAACGTTT
gagtgacagtgtgggggtga

SEQ ID NO: 51973 - DNA, 20 bp, Artificial Sequence
  Description of Artificial Sequence: Synthetic oligonucleotide
  Target: LAMA2; (+) strand; PAM type: NNNNGHTT; PAM sequence: CAAGGCTT
gcactatctacttccctaaa

SEQ ID NO: 51974 - DNA, 20 bp, Artificial Sequence
  Description of Artificial Sequence: Synthetic oligonucleotide
  Target: LAMA2; (+) strand; PAM type: NNNNGHTT; PAM sequence: CATGGCTT
cctaaacaaggctttgggag

SEQ ID NO: 51975 - DNA, 20 bp, Artificial Sequence
  Description of Artificial Sequence: Synthetic oligonucleotide
  Target: LAMA2; (+) strand; PAM type: NNNNGHTT; PAM sequence: TTGAGATT
ggtggcagaattgtaacacg

SEQ ID NO: 51976 - DNA, 20 bp, Artificial Sequence
  Description of Artificial Sequence: Synthetic oligonucleotide
  Target: LAMA2; (+) strand; PAM type: NNNNGHTT; PAM sequence: TGTTGTTT
atttttttttttattattat

SEQ ID NO: 51977 - DNA, 20 bp, Artificial Sequence
  Description of Artificial Sequence: Synthetic oligonucleotide
  Target: LAMA2; (+) strand; PAM type: NNNNGHTT; PAM sequence: GAGAGATT
attgttgttttaacacattt

SEQ ID NO: 51978 - DNA, 20 bp, Artificial Sequence
  Description of Artificial Sequence: Synthetic oligonucleotide
  Target: LAMA2; (+) strand; PAM type: NNNNGHTT; PAM sequence: ACTAGCTT
gaggacgccttcaagtatac

SEQ ID NO: 51979 - DNA, 20 bp, Artificial Sequence
  Description of Artificial Sequence: Synthetic oligonucleotide
  Target: LAMA2; (+) strand; PAM type: NNNNGHTT; PAM sequence: GGATGATT
gtatacactagcttagaaaa

SEQ ID NO: 51980 - DNA, 20 bp, Artificial Sequence
  Description of Artificial Sequence: Synthetic oligonucleotide
  Target: LAMA2; (+) strand; PAM type: NNNNGHTT; PAM sequence: CTTAGCTT
cttttctcttaccctttttt

SEQ ID NO: 51981 - DNA, 20 bp, Artificial Sequence
  Description of Artificial Sequence: Synthetic oligonucleotide
  Target: LAMA2; (+) strand; PAM type: NNNNGHTT; PAM sequence: CTTAGATT
ctcttacccttttttcttag

SEQ ID NO: 51982 - DNA, 20 bp, Artificial Sequence
  Description of Artificial Sequence: Synthetic oligonucleotide
  Target: LAMA2; (+) strand; PAM type: NNNNGHTT; PAM sequence: GGCAGTTT
tatttctgagcaaagcacag

SEQ ID NO: 51983 - DNA, 20 bp, Artificial Sequence
  Description of Artificial Sequence: Synthetic oligonucleotide
  Target: LAMA2; (+) strand; PAM type: NNNNGHTT; PAM sequence: AGAAGCTT
taaaatgctagaaggaaaaa

SEQ ID NO: 51984 - DNA, 20 bp, Artificial Sequence
  Description of Artificial Sequence: Synthetic oligonucleotide
  Target: LAMA2; (+) strand; PAM type: NNNNGHTT; PAM sequence: TCATGTTT
ctggtgctgccctgaacaca

SEQ ID NO: 51985 - DNA, 20 bp, Artificial Sequence
  Description of Artificial Sequence: Synthetic oligonucleotide
  Target: LAMA2; (+) strand; PAM type: NNNNGHTT; PAM sequence: AAGTGATT
aaccttgaactcctaggctc

SEQ ID NO: 51986 - DNA, 20 bp, Artificial Sequence
  Description of Artificial Sequence: Synthetic oligonucleotide
  Target: LAMA2; (+) strand; PAM type: NNNNGHTT; PAM sequence: TGGGGCTT
gccttggcctcccgagtagc

SEQ ID NO: 51987 - DNA, 20 bp, Artificial Sequence
  Description of Artificial Sequence: Synthetic oligonucleotide
  Target: LAMA2; (+) strand; PAM type: NNNNGHTT; PAM sequence: CTCGGCTT
gcctcaagcgatcttcctgc

SEQ ID NO: 51988 - DNA, 20 bp, Artificial Sequence
  Description of Artificial Sequence: Synthetic oligonucleotide
  Target: LAMA2; (+) strand; PAM type: NNNNGHTT; PAM sequence: CTGGGATT
ctgcctcggctttccaaatg

SEQ ID NO: 51989 - DNA, 20 bp, Artificial Sequence
  Description of Artificial Sequence: Synthetic oligonucleotide
  Target: LAMA2; (+) strand; PAM type: NNNNGHTT; PAM sequence: CTTGGTTT
catcccttacacccatcaga

SEQ ID NO: 51990 - DNA, 20 bp, Artificial Sequence
  Description of Artificial Sequence: Synthetic oligonucleotide
  Target: LAMA2; (+) strand; PAM type: NNNNGHTT; PAM sequence: TTCAGTTT
ttacacccatcagacttggt

SEQ ID NO: 51991 - DNA, 20 bp, Artificial Sequence
  Description of Artificial Sequence: Synthetic oligonucleotide
  Target: LAMA2; (+) strand; PAM type: NNNNGHTT; PAM sequence: TCGAGATT
ttaaccaagcaagggggagg

SEQ ID NO: 51992 - DNA, 20 bp, Artificial Sequence
  Description of Artificial Sequence: Synthetic oligonucleotide
  Target: LAMA2; (+) strand; PAM type: NNNNGHTT; PAM sequence: GCCAGTTT
ttctcagtccttttccaact

SEQ ID NO: 51993 - DNA, 20 bp, Artificial Sequence
  Description of Artificial Sequence: Synthetic oligonucleotide
  Target: LAMA2; (+) strand; PAM type: NNNNGHTT; PAM sequence: AGAAGTTT
gtttaataaaggaaggtgat

SEQ ID NO: 51994 - DNA, 20 bp, Artificial Sequence
  Description of Artificial Sequence: Synthetic oligonucleotide
  Target: LAMA2; (+) strand; PAM type: NNNNGHTT; PAM sequence: CAATGATT
gtatccatcctgttgcaaat

SEQ ID NO: 51995 - DNA, 20 bp, Artificial Sequence
  Description of Artificial Sequence: Synthetic oligonucleotide
  Target: LAMA2; (+) strand; PAM type: NNNNGHTT; PAM sequence: AATGGCTT
aacaaaggactatacaccat

SEQ ID NO: 51996 - DNA, 20 bp, Artificial Sequence
  Description of Artificial Sequence: Synthetic oligonucleotide
  Target: LAMA2; (+) strand; PAM type: NNNNGHTT; PAM sequence: ATCAGTTT
tgaggttacatgttagagtg

SEQ ID NO: 51997 - DNA, 20 bp, Artificial Sequence
  Description of Artificial Sequence: Synthetic oligonucleotide
  Target: LAMA2; (+) strand; PAM type: NNNNGHTT; PAM sequence: TACCGTTT
aacattggctcatctgagaa

SEQ ID NO: 51998 - DNA, 20 bp, Artificial Sequence
  Description of Artificial Sequence: Synthetic oligonucleotide
  Target: LAMA2; (+) strand; PAM type: NNNNGHTT; PAM sequence: CACTGCTT
gagaataccgttttattaag

SEQ ID NO: 51999 - DNA, 20 bp, Artificial Sequence
  Description of Artificial Sequence: Synthetic oligonucleotide
  Target: LAMA2; (+) strand; PAM type: NNNNGHTT; PAM sequence: GCCTGCTT
ttttattaagcactgcttct

SEQ ID NO: 52000 - DNA, 20 bp, Artificial Sequence
  Description of Artificial Sequence: Synthetic oligonucleotide
  Target: LAMA2; (+) strand; PAM type: NNNNGHTT; PAM sequence: TAATGATT
tttcaagtggatgtaacctg

SEQ ID NO: 52001 - DNA, 20 bp, Artificial Sequence
  Description of Artificial Sequence: Synthetic oligonucleotide
  Target: LAMA2; (+) strand; PAM type: NNNNGHTT; PAM sequence: AAAGGTTT
gtccctgtccttttctggtc

SEQ ID NO: 52002 - DNA, 20 bp, Artificial Sequence
  Description of Artificial Sequence: Synthetic oligonucleotide
  Target: LAMA2; (+) strand; PAM type: NNNNGHTT; PAM sequence: AATGGCTT
ggtcaaaggtttttttctaa

SEQ ID NO: 52003 - DNA, 20 bp, Artificial Sequence
  Description of Artificial Sequence: Synthetic oligonucleotide
  Target: LAMA2; (+) strand; PAM type: NNNNGHTT; PAM sequence: TGCTGCTT
ataaaaacaaaccaaaaaac

SEQ ID NO: 52004 - DNA, 20 bp, Artificial Sequence
  Description of Artificial Sequence: Synthetic oligonucleotide
  Target: LAMA2; (+) strand; PAM type: NNNNGHTT; PAM sequence: ACCAGTTT
aaactgctgcttagctcagg

SEQ ID NO: 52005 - DNA, 20 bp, Artificial Sequence
  Description of Artificial Sequence: Synthetic oligonucleotide
  Target: LAMA2; (+) strand; PAM type: NNNNGHTT; PAM sequence: AATTGTTT
ttctcttttaagctacatgt

SEQ ID NO: 52006 - DNA, 20 bp, Artificial Sequence
  Description of Artificial Sequence: Synthetic oligonucleotide
  Target: LAMA2; (+) strand; PAM type: NNNNGHTT; PAM sequence: AGATGTTT
tttcagagctgagggtgtaa

SEQ ID NO: 52007 - DNA, 20 bp, Artificial Sequence
  Description of Artificial Sequence: Synthetic oligonucleotide
  Target: LAMA2; (+) strand; PAM type: NNNNGHTT; PAM sequence: ATAGGATT
ccccagtggactcacagcag

SEQ ID NO: 52008 - DNA, 20 bp, Artificial Sequence
  Description of Artificial Sequence: Synthetic oligonucleotide
  Target: LAMA2; (+) strand; PAM type: NNNNGHTT; PAM sequence: TAGTGATT
cacagcagataggattatct

SEQ ID NO: 52009 - DNA, 20 bp, Artificial Sequence
  Description of Artificial Sequence: Synthetic oligonucleotide
  Target: LAMA2; (+) strand; PAM type: NNNNGHTT; PAM sequence: GTGTGTTT
tgaggaagactgcaagctgc

SEQ ID NO: 52010 - DNA, 20 bp, Artificial Sequence
  Description of Artificial Sequence: Synthetic oligonucleotide
  Target: LAMA2; (+) strand; PAM type: NNNNGHTT; PAM sequence: CGGGGTTT
gcattttcctgtcctaccca

SEQ ID NO: 52011 - DNA, 20 bp, Artificial Sequence
  Description of Artificial Sequence: Synthetic oligonucleotide
  Target: LAMA2; (+) strand; PAM type: NNNNGHTT; PAM sequence: GAGTGCTT
gccttttacctgctgtggca

SEQ ID NO: 52012 - DNA, 20 bp, Artificial Sequence
  Description of Artificial Sequence: Synthetic oligonucleotide
  Target: LAMA2; (+) strand; PAM type: NNNNGHTT; PAM sequence: CTTCGTTT
ttacctgctgtggcagagtg

SEQ ID NO: 52013 - DNA, 20 bp, Artificial Sequence
  Description of Artificial Sequence: Synthetic oligonucleotide
  Target: LAMA2; (+) strand; PAM type: NNNNGHTT; PAM sequence: CAAGGCTT
aagatcaagagaaaagagaa

SEQ ID NO: 52014 - DNA, 20 bp, Artificial Sequence
  Description of Artificial Sequence: Synthetic oligonucleotide
  Target: LAMA2; (+) strand; PAM type: NNNNGHTT; PAM sequence: GGCTGCTT
tgcatcaaaagcctgccttg

SEQ ID NO: 52015 - DNA, 20 bp, Artificial Sequence
  Description of Artificial Sequence: Synthetic oligonucleotide
  Target: LAMA2; (+) strand; PAM type: NNNNGHTT; PAM sequence: TGTGGCTT
tagagaacagggaaaggaat

SEQ ID NO: 52016 - DNA, 20 bp, Artificial Sequence
  Description of Artificial Sequence: Synthetic oligonucleotide
  Target: LAMA2; (+) strand; PAM type: NNNNGHTT; PAM sequence: CCTTGATT
ggctttggtaatttaaggag

SEQ ID NO: 52017 - DNA, 20 bp, Artificial Sequence
  Description of Artificial Sequence: Synthetic oligonucleotide
  Target: LAMA2; (+) strand; PAM type: NNNNGHTT; PAM sequence: GTATGCTT
tctactcagccaggactgct

SEQ ID NO: 52018 - DNA, 20 bp, Artificial Sequence
  Description of Artificial Sequence: Synthetic oligonucleotide
  Target: LAMA2; (+) strand; PAM type: NNNNGHTT; PAM sequence: GCAGGTTT
gggcctgaatgggctgacgt

SEQ ID NO: 52019 - DNA, 20 bp, Artificial Sequence
  Description of Artificial Sequence: Synthetic oligonucleotide
  Target: LAMA2; (+) strand; PAM type: NNNNGHTT; PAM sequence: GCTAGCTT
ctactcttataacccaagtg

SEQ ID NO: 52020 - DNA, 20 bp, Artificial Sequence
  Description of Artificial Sequence: Synthetic oligonucleotide
  Target: LAMA2; (+) strand; PAM type: NNNNGHTT; PAM sequence: TCCAGTTT
aggaaaaatgaaagggaaat

SEQ ID NO: 52021 - DNA, 20 bp, Artificial Sequence
  Description of Artificial Sequence: Synthetic oligonucleotide
  Target: LAMA2; (+) strand; PAM type: NNNNGHTT; PAM sequence: AACTGATT
tccagggtgtgatatgagaa

SEQ ID NO: 52022 - DNA, 20 bp, Artificial Sequence
  Description of Artificial Sequence: Synthetic oligonucleotide
  Target: LAMA2; (+) strand; PAM type: NNNNGHTT; PAM sequence: TGTAGTTT
tagactacagagatgaataa

SEQ ID NO: 52023 - DNA, 20 bp, Artificial Sequence
  Description of Artificial Sequence: Synthetic oligonucleotide
  Target: LAMA2; (+) strand; PAM type: NNNNGHTT; PAM sequence: TCCTGTTT
ttaaagaacagtccataatc

SEQ ID NO: 52024 - DNA, 20 bp, Artificial Sequence
  Description of Artificial Sequence: Synthetic oligonucleotide
  Target: LAMA2; (+) strand; PAM type: NNNNGHTT; PAM sequence: TCGGGCTT
tttgatagggagcaagcagt

SEQ ID NO: 52025 - DNA, 20 bp, Artificial Sequence
  Description of Artificial Sequence: Synthetic oligonucleotide
  Target: LAMA2; (+) strand; PAM type: NNNNGHTT; PAM sequence: TTGTGTTT
ataaatgaagaactgagtat

SEQ ID NO: 52026 - DNA, 20 bp, Artificial Sequence
  Description of Artificial Sequence: Synthetic oligonucleotide
  Target: LAMA2; (+) strand; PAM type: NNNNGHTT; PAM sequence: GTTAGCTT
tacacttattaattaatgaa

SEQ ID NO: 52027 - DNA, 20 bp, Artificial Sequence
  Description of Artificial Sequence: Synthetic oligonucleotide
  Target: LAMA2; (+) strand; PAM type: NNNNGHTT; PAM sequence: GAAGGTTT
gataaagtcctcatctctga

SEQ ID NO: 52028 - DNA, 20 bp, Artificial Sequence
  Description of Artificial Sequence: Synthetic oligonucleotide
  Target: LAMA2; (+) strand; PAM type: NNNNGHTT; PAM sequence: TTCTGTTT
gcatgagaatgctgttattt

SEQ ID NO: 52029 - DNA, 20 bp, Artificial Sequence
  Description of Artificial Sequence: Synthetic oligonucleotide
  Target: LAMA2; (+) strand; PAM type: NNNNGHTT; PAM sequence: GCATGCTT
ttatttttctgtttgacttt

SEQ ID NO: 52030 - DNA, 20 bp, Artificial Sequence
  Description of Artificial Sequence: Synthetic oligonucleotide
  Target: LAMA2; (+) strand; PAM type: NNNNGHTT; PAM sequence: TTTTGTTT
ttctgtttgactttgcatgc

SEQ ID NO: 52031 - DNA, 20 bp, Artificial Sequence
  Description of Artificial Sequence: Synthetic oligonucleotide
  Target: LAMA2; (+) strand; PAM type: NNNNGHTT; PAM sequence: TCCGGCTT
aagtaagaaccgaagctgaa

SEQ ID NO: 52032 - DNA, 20 bp, Artificial Sequence
  Description of Artificial Sequence: Synthetic oligonucleotide
  Target: LAMA2; (+) strand; PAM type: NNNNGHTT; PAM sequence: GCTTGCTT
aagaaccgaagctgaatccg

SEQ ID NO: 52033 - DNA, 20 bp, Artificial Sequence
  Description of Artificial Sequence: Synthetic oligonucleotide
  Target: LAMA2; (+) strand; PAM type: NNNNGHTT; PAM sequence: TGCTGATT
tacatggctcgcatcaatca

SEQ ID NO: 52034 - DNA, 20 bp, Artificial Sequence
  Description of Artificial Sequence: Synthetic oligonucleotide
  Target: LAMA2; (+) strand; PAM type: NNNNGHTT; PAM sequence: AATGGATT
ttgcaacagttcagctgaga

SEQ ID NO: 52035 - DNA, 20 bp, Artificial Sequence
  Description of Artificial Sequence: Synthetic oligonucleotide
  Target: LAMA2; (+) strand; PAM type: NNNNGHTT; PAM sequence: GTAGGTTT
gaaaatgtgctcagacctgt

SEQ ID NO: 52036 - DNA, 20 bp, Artificial Sequence
  Description of Artificial Sequence: Synthetic oligonucleotide
  Target: LAMA2; (+) strand; PAM type: NNNNGHTT; PAM sequence: TGTGGTTT
ttccatcactgctatatggc

SEQ ID NO: 52037 - DNA, 20 bp, Artificial Sequence
  Description of Artificial Sequence: Synthetic oligonucleotide
  Target: LAMA2; (+) strand; PAM type: NNNNGHTT; PAM sequence: CTGAGATT
tttaaggaataatatttatt

SEQ ID NO: 52038 - DNA, 20 bp, Artificial Sequence
  Description of Artificial Sequence: Synthetic oligonucleotide
  Target: LAMA2; (+) strand; PAM type: NNNNGHTT; PAM sequence: TCGTGTTT
atccaggaatctctggttga

SEQ ID NO: 52039 - DNA, 20 bp, Artificial Sequence
  Description of Artificial Sequence: Synthetic oligonucleotide
  Target: LAMA2; (+) strand; PAM type: NNNNGHTT; PAM sequence: GCCAGCTT
tgggcacagaaggctcattt

SEQ ID NO: 52040 - DNA, 20 bp, Artificial Sequence
  Description of Artificial Sequence: Synthetic oligonucleotide
  Target: LAMA2; (+) strand; PAM type: NNNNGHTT; PAM sequence: GCCTGATT
ctgcaaatagataatatact

SEQ ID NO: 52041 - DNA, 20 bp, Artificial Sequence
  Description of Artificial Sequence: Synthetic oligonucleotide
  Target: LAMA2; (+) strand; PAM type: NNNNGHTT; PAM sequence: CAAAGCTT
cctgcgatagcctattaaag

SEQ ID NO: 52042 - DNA, 20 bp, Artificial Sequence
  Description of Artificial Sequence: Synthetic oligonucleotide
  Target: LAMA2; (+) strand; PAM type: NNNNGHTT; PAM sequence: GTTAGATT
agagtacgatattattagat

SEQ ID NO: 52043 - DNA, 20 bp, Artificial Sequence
  Description of Artificial Sequence: Synthetic oligonucleotide
  Target: LAMA2; (+) strand; PAM type: NNNNGHTT; PAM sequence: GGGAGCTT
aaggaatcttcatttttgct

SEQ ID NO: 52044 - DNA, 20 bp, Artificial Sequence
  Description of Artificial Sequence: Synthetic oligonucleotide
  Target: LAMA2; (+) strand; PAM type: NNNNGHTT; PAM sequence: CTGGGATT
attgttgaaccacaatgagg

SEQ ID NO: 52045 - DNA, 20 bp, Artificial Sequence
  Description of Artificial Sequence: Synthetic oligonucleotide
  Target: LAMA2; (+) strand; PAM type: NNNNGHTT; PAM sequence: AACGGATT
ctataattagtcaaattaat

SEQ ID NO: 52046 - DNA, 20 bp, Artificial Sequence
  Description of Artificial Sequence: Synthetic oligonucleotide
  Target: LAMA2; (+) strand; PAM type: NNNNGHTT; PAM sequence: GATGGTTT
taataacggattttattttt

SEQ ID NO: 52047 - DNA, 20 bp, Artificial Sequence
  Description of Artificial Sequence: Synthetic oligonucleotide
  Target: LAMA2; (+) strand; PAM type: NNNNGHTT; PAM sequence: ACAGGCTT
tcatggtactttagcatttc

SEQ ID NO: 52048 - DNA, 20 bp, Artificial Sequence
  Description of Artificial Sequence: Synthetic oligonucleotide
  Target: LAMA2; (+) strand; PAM type: NNNNGHTT; PAM sequence: CAAGGTTT
cctttacctaaattcagact

SEQ ID NO: 52049 - DNA, 20 bp, Artificial Sequence
  Description of Artificial Sequence: Synthetic oligonucleotide
  Target: LAMA2; (+) strand; PAM type: NNNNGHTT; PAM sequence: TGCAGCTT
tcaggttctgcagaaagtag

SEQ ID NO: 52050 - DNA, 20 bp, Artificial Sequence
  Description of Artificial Sequence: Synthetic oligonucleotide
  Target: LAMA2; (+) strand; PAM type: NNNNGHTT; PAM sequence: ATGGGTTT
aatttgagatattctgtaaa

SEQ ID NO: 52051 - DNA, 20 bp, Artificial Sequence
  Description of Artificial Sequence: Synthetic oligonucleotide
  Target: LAMA2; (+) strand; PAM type: NNNNGHTT; PAM sequence: ATGGGCTT
gtttaactttcccatatata

SEQ ID NO: 52052 - DNA, 20 bp, Artificial Sequence
  Description of Artificial Sequence: Synthetic oligonucleotide
  Target: LAMA2; (+) strand; PAM type: NNNNGHTT; PAM sequence: CATTGTTT
cgcatactaagcactgtgta

SEQ ID NO: 52053 - DNA, 20 bp, Artificial Sequence
  Description of Artificial Sequence: Synthetic oligonucleotide
  Target: LAMA2; (+) strand; PAM type: NNNNGHTT; PAM sequence: TCAGGATT
tctgcatatgtgaaatttgt

SEQ ID NO: 52054 - DNA, 20 bp, Artificial Sequence
  Description of Artificial Sequence: Synthetic oligonucleotide
  Target: LAMA2; (+) strand; PAM type: NNNNGHTT; PAM sequence: TGTAGATT
ttaatgactcctttcttttt

SEQ ID NO: 52055 - DNA, 20 bp, Artificial Sequence
  Description of Artificial Sequence: Synthetic oligonucleotide
  Target: LAMA2; (+) strand; PAM type: NNNNGHTT; PAM sequence: TGGGGCTT
gaaggaattctttatgtaga

SEQ ID NO: 52056 - DNA, 20 bp, Artificial Sequence
  Description of Artificial Sequence: Synthetic oligonucleotide
  Target: LAMA2; (+) strand; PAM type: NNNNGHTT; PAM sequence: ATCTGATT
gaagaattggtccagtaaat

SEQ ID NO: 52057 - DNA, 20 bp, Artificial Sequence
  Description of Artificial Sequence: Synthetic oligonucleotide
  Target: LAMA2; (+) strand; PAM type: NNNNGHTT; PAM sequence: GGCTGATT
tctttattacttaaatatat

SEQ ID NO: 52058 - DNA, 20 bp, Artificial Sequence
  Description of Artificial Sequence: Synthetic oligonucleotide
  Target: LAMA2; (+) strand; PAM type: NNNNGHTT; PAM sequence: AAGGGTTT
tcttttctgataagggacag

SEQ ID NO: 52059 - DNA, 20 bp, Artificial Sequence
  Description of Artificial Sequence: Synthetic oligonucleotide
  Target: LAMA2; (+) strand; PAM type: NNNNGHTT; PAM sequence: TGTTGTTT
tgataagggacagaagggtt

SEQ ID NO: 52060 - DNA, 20 bp, Artificial Sequence
  Description of Artificial Sequence: Synthetic oligonucleotide
  Target: LAMA2; (+) strand; PAM type: NNNNGHTT; PAM sequence: ATTTGTTT
gacagaagggtttgttgttt

SEQ ID NO: 52061 - DNA, 20 bp, Artificial Sequence
  Description of Artificial Sequence: Synthetic oligonucleotide
  Target: LAMA2; (+) strand; PAM type: NNNNGHTT; PAM sequence: GTTTGTTT
gaagggtttgttgtttattt

SEQ ID NO: 52062 - DNA, 20 bp, Artificial Sequence
  Description of Artificial Sequence: Synthetic oligonucleotide
  Target: LAMA2; (+) strand; PAM type: NNNNGHTT; PAM sequence: GTTTGTTT
ggtttgttgtttatttgttt

SEQ ID NO: 52063 - DNA, 20 bp, Artificial Sequence
  Description of Artificial Sequence: Synthetic oligonucleotide
  Target: LAMA2; (+) strand; PAM type: NNNNGHTT; PAM sequence: GTTTGTTT
tgttgtttatttgtttgttt

SEQ ID NO: 52064 - DNA, 20 bp, Artificial Sequence
  Description of Artificial Sequence: Synthetic oligonucleotide
  Target: LAMA2; (+) strand; PAM type: NNNNGHTT; PAM sequence: GGGGGTTT
gtgtacttttaatagagacg

SEQ ID NO: 52065 - DNA, 20 bp, Artificial Sequence
  Description of Artificial Sequence: Synthetic oligonucleotide
  Target: LAMA2; (+) strand; PAM type: NNNNGHTT; PAM sequence: CTGGGATT
tgcctcggcctcccaaagtg

SEQ ID NO: 52066 - DNA, 20 bp, Artificial Sequence
  Description of Artificial Sequence: Synthetic oligonucleotide
  Target: LAMA2; (+) strand; PAM type: NNNNGHTT; PAM sequence: GAAGGTTT
gccacctcgcccagctgaca

SEQ ID NO: 52067 - DNA, 20 bp, Artificial Sequence
  Description of Artificial Sequence: Synthetic oligonucleotide
  Target: LAMA2; (+) strand; PAM type: NNNNGHTT; PAM sequence: GATAGATT
agctgacagaaggtttttta

SEQ ID NO: 52068 - DNA, 20 bp, Artificial Sequence
  Description of Artificial Sequence: Synthetic oligonucleotide
  Target: LAMA2; (+) strand; PAM type: NNNNGHTT; PAM sequence: ATTAGATT
acagaaggttttttagatag

SEQ ID NO: 52069 - DNA, 20 bp, Artificial Sequence
  Description of Artificial Sequence: Synthetic oligonucleotide
  Target: LAMA2; (+) strand; PAM type: NNNNGHTT; PAM sequence: CTTGGTTT
ggaacctggagccaaactgt

SEQ ID NO: 52070 - DNA, 20 bp, Artificial Sequence
  Description of Artificial Sequence: Synthetic oligonucleotide
  Target: LAMA2; (+) strand; PAM type: NNNNGHTT; PAM sequence: GTGTGTTT
tatttaactattgactagct

SEQ ID NO: 52071 - DNA, 20 bp, Artificial Sequence
  Description of Artificial Sequence: Synthetic oligonucleotide
  Target: LAMA2; (+) strand; PAM type: NNNNGHTT; PAM sequence: CAAAGATT
agcaagttaatcttttttaa

SEQ ID NO: 52072 - DNA, 20 bp, Artificial Sequence
  Description of Artificial Sequence: Synthetic oligonucleotide
  Target: LAMA2; (+) strand; PAM type: NNNNGHTT; PAM sequence: AAAGGATT
gtaatgataatactaaacaa

SEQ ID NO: 52073 - DNA, 20 bp, Artificial Sequence
  Description of Artificial Sequence: Synthetic oligonucleotide
  Target: LAMA2; (+) strand; PAM type: NNNNGHTT; PAM sequence: TAAAGATT
actaaacaaaaaggattgca

SEQ ID NO: 52074 - DNA, 20 bp, Artificial Sequence
  Description of Artificial Sequence: Synthetic oligonucleotide
  Target: LAMA2; (+) strand; PAM type: NNNNGHTT; PAM sequence: AAGTGATT
taaatgaggtaatttattta

SEQ ID NO: 52075 - DNA, 20 bp, Artificial Sequence
  Description of Artificial Sequence: Synthetic oligonucleotide
  Target: LAMA2; (+) strand; PAM type: NNNNGHTT; PAM sequence: AAGTGATT
aataaataaaaataaaaata

SEQ ID NO: 52076 - DNA, 20 bp, Artificial Sequence
  Description of Artificial Sequence: Synthetic oligonucleotide
  Target: LAMA2; (+) strand; PAM type: NNNNGHTT; PAM sequence: TGGTGTTT
aaaatgatggtatgtattca

SEQ ID NO: 52077 - DNA, 20 bp, Artificial Sequence
  Description of Artificial Sequence: Synthetic oligonucleotide
  Target: LAMA2; (+) strand; PAM type: NNNNGHTT; PAM sequence: TAGAGATT
tattcatggtgtttcaggca

SEQ ID NO: 52078 - DNA, 20 bp, Artificial Sequence
  Description of Artificial Sequence: Synthetic oligonucleotide
  Target: LAMA2; (+) strand; PAM type: NNNNGHTT; PAM sequence: TTTGGATT
ttacagtacagttatccaat

SEQ ID NO: 52079 - DNA, 20 bp, Artificial Sequence
  Description of Artificial Sequence: Synthetic oligonucleotide
  Target: LAMA2; (+) strand; PAM type: NNNNGHTT; PAM sequence: CACAGTTT
gattcagaatttaaagccct

SEQ ID NO: 52080 - DNA, 20 bp, Artificial Sequence
  Description of Artificial Sequence: Synthetic oligonucleotide
  Target: LAMA2; (+) strand; PAM type: NNNNGHTT; PAM sequence: CCTAGTTT
ttttttattagaccgtgtat

SEQ ID NO: 52081 - DNA, 20 bp, Artificial Sequence
  Description of Artificial Sequence: Synthetic oligonucleotide
  Target: LAMA2; (+) strand; PAM type: NNNNGHTT; PAM sequence: GTTTGCTT
ttattagaccgtgtatccta

SEQ ID NO: 52082 - DNA, 20 bp, Artificial Sequence
  Description of Artificial Sequence: Synthetic oligonucleotide
  Target: LAMA2; (+) strand; PAM type: NNNNGHTT; PAM sequence: GGGGGATT
tgttactctgagagaagcac

SEQ ID NO: 52083 - DNA, 20 bp, Artificial Sequence
  Description of Artificial Sequence: Synthetic oligonucleotide
  Target: LAMA2; (+) strand; PAM type: NNNNGHTT; PAM sequence: GATTGATT
actctgagagaagcacgggg

SEQ ID NO: 52084 - DNA, 20 bp, Artificial Sequence
  Description of Artificial Sequence: Synthetic oligonucleotide
  Target: LAMA2; (+) strand; PAM type: NNNNGHTT; PAM sequence: TGGTGCTT
gagaagcacgggggattgat

SEQ ID NO: 52085 - DNA, 20 bp, Artificial Sequence
  Description of Artificial Sequence: Synthetic oligonucleotide
  Target: LAMA2; (+) strand; PAM type: NNNNGHTT; PAM sequence: TGTAGATT
caaattagaacacatgataa

SEQ ID NO: 52086 - DNA, 20 bp, Artificial Sequence
  Description of Artificial Sequence: Synthetic oligonucleotide
  Target: LAMA2; (+) strand; PAM type: NNNNGHTT; PAM sequence: TTTGGCTT
tatagttgtaattctcagta

SEQ ID NO: 52087 - DNA, 20 bp, Artificial Sequence
  Description of Artificial Sequence: Synthetic oligonucleotide
  Target: LAMA2; (+) strand; PAM type: NNNNGHTT; PAM sequence: ATATGCTT
ttttctttcataggtattgg

SEQ ID NO: 52088 - DNA, 20 bp, Artificial Sequence
  Description of Artificial Sequence: Synthetic oligonucleotide
  Target: LAMA2; (+) strand; PAM type: NNNNGHTT; PAM sequence: GTGTGATT
ataaaatataatggaccaga

SEQ ID NO: 52089 - DNA, 20 bp, Artificial Sequence
  Description of Artificial Sequence: Synthetic oligonucleotide
  Target: LAMA2; (+) strand; PAM type: NNNNGHTT; PAM sequence: CAATGTTT
ttctaaattccttgaacccc

SEQ ID NO: 52090 - DNA, 20 bp, Artificial Sequence
  Description of Artificial Sequence: Synthetic oligonucleotide
  Target: LAMA2; (+) strand; PAM type: NNNNGHTT; PAM sequence: TCAAGTTT
ccaatgtttcatgcaaactt

SEQ ID NO: 52091 - DNA, 20 bp, Artificial Sequence
  Description of Artificial Sequence: Synthetic oligonucleotide
  Target: LAMA2; (+) strand; PAM type: NNNNGHTT; PAM sequence: TGCTGCTT
cattttcttaggggagggtc

SEQ ID NO: 52092 - DNA, 20 bp, Artificial Sequence
  Description of Artificial Sequence: Synthetic oligonucleotide
  Target: LAMA2; (+) strand; PAM type: NNNNGHTT; PAM sequence: ACAGGATT
tccaagttgagaagcacaac

SEQ ID NO: 52093 - DNA, 20 bp, Artificial Sequence
  Description of Artificial Sequence: Synthetic oligonucleotide
  Target: LAMA2; (+) strand; PAM type: NNNNGHTT; PAM sequence: GGCAGCTT
tggtggtaacagagaaccca

SEQ ID NO: 52094 - DNA, 20 bp, Artificial Sequence
  Description of Artificial Sequence: Synthetic oligonucleotide
  Target: LAMA2; (+) strand; PAM type: NNNNGHTT; PAM sequence: ATTTGTTT
aagttctgctaaaacctgac

SEQ ID NO: 52095 - DNA, 20 bp, Artificial Sequence
  Description of Artificial Sequence: Synthetic oligonucleotide
  Target: LAMA2; (+) strand; PAM type: NNNNGHTT; PAM sequence: GAATGTTT
acatttgtttcttctgatct

SEQ ID NO: 52096 - DNA, 20 bp, Artificial Sequence
  Description of Artificial Sequence: Synthetic oligonucleotide
  Target: LAMA2; (+) strand; PAM type: NNNNGHTT; PAM sequence: TCCAGCTT
ccgatctggaacaacccacc

SEQ ID NO: 52097 - DNA, 20 bp, Artificial Sequence
  Description of Artificial Sequence: Synthetic oligonucleotide
  Target: LAMA2; (+) strand; PAM type: NNNNGHTT; PAM sequence: ACATGTTT
cctccagcttccatgttggg

SEQ ID NO: 52098 - DNA, 20 bp, Artificial Sequence
  Description of Artificial Sequence: Synthetic oligonucleotide
  Target: LAMA2; (+) strand; PAM type: NNNNGHTT; PAM sequence: ACCGGTTT
ggggaacatattttgacgga

SEQ ID NO: 52099 - DNA, 20 bp, Artificial Sequence
  Description of Artificial Sequence: Synthetic oligonucleotide
  Target: LAMA2; (+) strand; PAM type: NNNNGHTT; PAM sequence: TGTTGATT
aggctctttcatttccttcc

SEQ ID NO: 52100 - DNA, 20 bp, Artificial Sequence
  Description of Artificial Sequence: Synthetic oligonucleotide
  Target: LAMA2; (+) strand; PAM type: NNNNGHTT; PAM sequence: ATATGTTT
ataattttgcaagaacactc

SEQ ID NO: 52101 - DNA, 20 bp, Artificial Sequence
  Description of Artificial Sequence: Synthetic oligonucleotide
  Target: LAMA2; (+) strand; PAM type: NNNNGHTT; PAM sequence: TGTTGTTT
acactcatatgtttatacta

SEQ ID NO: 52102 - DNA, 20 bp, Artificial Sequence
  Description of Artificial Sequence: Synthetic oligonucleotide
  Target: LAMA2; (+) strand; PAM type: NNNNGHTT; PAM sequence: TCCAGTTT
actatgttgtttttctacct

SEQ ID NO: 52103 - DNA, 20 bp, Artificial Sequence
  Description of Artificial Sequence: Synthetic oligonucleotide
  Target: LAMA2; (+) strand; PAM type: NNNNGHTT; PAM sequence: ATATGATT
ttccagtttctggagatgag

SEQ ID NO: 52104 - DNA, 20 bp, Artificial Sequence
  Description of Artificial Sequence: Synthetic oligonucleotide
  Target: LAMA2; (+) strand; PAM type: NNNNGHTT; PAM sequence: GTCTGTTT
tacacacaatgcacacccat

SEQ ID NO: 52105 - DNA, 20 bp, Artificial Sequence
  Description of Artificial Sequence: Synthetic oligonucleotide
  Target: LAMA2; (+) strand; PAM type: NNNNGHTT; PAM sequence: CCTGGCTT
tgacaatgactggcatcttt

SEQ ID NO: 52106 - DNA, 20 bp, Artificial Sequence
  Description of Artificial Sequence: Synthetic oligonucleotide
  Target: LAMA2; (+) strand; PAM type: NNNNGHTT; PAM sequence: CTCCGTTT
atctttcctggctttctcca

SEQ ID NO: 52107 - DNA, 20 bp, Artificial Sequence
  Description of Artificial Sequence: Synthetic oligonucleotide
  Target: LAMA2; (+) strand; PAM type: NNNNGHTT; PAM sequence: TATGGTTT
tttctaatgaacatttccag

SEQ ID NO: 52108 - DNA, 20 bp, Artificial Sequence
  Description of Artificial Sequence: Synthetic oligonucleotide
  Target: LAMA2; (+) strand; PAM type: NNNNGHTT; PAM sequence: TTATGTTT
tcacctcaaacatgtatcct

SEQ ID NO: 52109 - DNA, 20 bp, Artificial Sequence
  Description of Artificial Sequence: Synthetic oligonucleotide
  Target: LAMA2; (+) strand; PAM type: NNNNGHTT; PAM sequence: ATCTGATT
tatcctttatgtttcaaaca

SEQ ID NO: 52110 - DNA, 20 bp, Artificial Sequence
  Description of Artificial Sequence: Synthetic oligonucleotide
  Target: LAMA2; (+) strand; PAM type: NNNNGHTT; PAM sequence: AATTGCTT
ctatctatctccatgagttg

SEQ ID NO: 52111 - DNA, 20 bp, Artificial Sequence
  Description of Artificial Sequence: Synthetic oligonucleotide
  Target: LAMA2; (+) strand; PAM type: NNNNGHTT; PAM sequence: TGATGTTT
cacagataagtgagaacatg

SEQ ID NO: 52112 - DNA, 20 bp, Artificial Sequence
  Description of Artificial Sequence: Synthetic oligonucleotide
  Target: LAMA2; (+) strand; PAM type: NNNNGHTT; PAM sequence: CCTGGCTT
gtgatgtttgcctttgtgtg

SEQ ID NO: 52113 - DNA, 20 bp, Artificial Sequence
  Description of Artificial Sequence: Synthetic oligonucleotide
  Target: LAMA2; (+) strand; PAM type: NNNNGHTT; PAM sequence: TATGGCTT
gataggatctcattcttttt

SEQ ID NO: 52114 - DNA, 20 bp, Artificial Sequence
  Description of Artificial Sequence: Synthetic oligonucleotide
  Target: LAMA2; (+) strand; PAM type: NNNNGHTT; PAM sequence: GGTGGCTT
catctgctgatggacactta

SEQ ID NO: 52115 - DNA, 20 bp, Artificial Sequence
  Description of Artificial Sequence: Synthetic oligonucleotide
  Target: LAMA2; (+) strand; PAM type: NNNNGHTT; PAM sequence: TGGTGTTT
tcatatggtagctctatttt

SEQ ID NO: 52116 - DNA, 20 bp, Artificial Sequence
  Description of Artificial Sequence: Synthetic oligonucleotide
  Target: LAMA2; (+) strand; PAM type: NNNNGHTT; PAM sequence: ACTAGTTT
ctgttctgcatagcagttgc

SEQ ID NO: 52117 - DNA, 20 bp, Artificial Sequence
  Description of Artificial Sequence: Synthetic oligonucleotide
  Target: LAMA2; (+) strand; PAM type: NNNNGHTT; PAM sequence: TGTAGTTT
tgggtgagatgatagctcat

SEQ ID NO: 52118 - DNA, 20 bp, Artificial Sequence
  Description of Artificial Sequence: Synthetic oligonucleotide
  Target: LAMA2; (+) strand; PAM type: NNNNGHTT; PAM sequence: TTTTGATT
gagatgatagctcattgtag

SEQ ID NO: 52119 - DNA, 20 bp, Artificial Sequence
  Description of Artificial Sequence: Synthetic oligonucleotide
  Target: LAMA2; (+) strand; PAM type: NNNNGHTT; PAM sequence: ACCTGTTT
tgttgagccccttttgatat

SEQ ID NO: 52120 - DNA, 20 bp, Artificial Sequence
  Description of Artificial Sequence: Synthetic oligonucleotide
  Target: LAMA2; (+) strand; PAM type: NNNNGHTT; PAM sequence: ATAGGATT
aatcttgtacccatttttaa

SEQ ID NO: 52121 - DNA, 20 bp, Artificial Sequence
  Description of Artificial Sequence: Synthetic oligonucleotide
  Target: LAMA2; (+) strand; PAM type: NNNNGHTT; PAM sequence: ATTAGATT
acccatttttaaataggatt

SEQ ID NO: 52122 - DNA, 20 bp, Artificial Sequence
  Description of Artificial Sequence: Synthetic oligonucleotide
  Target: LAMA2; (+) strand; PAM type: NNNNGHTT; PAM sequence: AATTGTTT
attagatttttttcctatag

SEQ ID NO: 52123 - DNA, 20 bp, Artificial Sequence
  Description of Artificial Sequence: Synthetic oligonucleotide
  Target: LAMA2; (+) strand; PAM type: NNNNGHTT; PAM sequence: GGTAGTTT
tattaatcccttctcagatg

SEQ ID NO: 52124 - DNA, 20 bp, Artificial Sequence
  Description of Artificial Sequence: Synthetic oligonucleotide
  Target: LAMA2; (+) strand; PAM type: NNNNGHTT; PAM sequence: TGTTGATT
tgtgggttgtcacttcactt

SEQ ID NO: 52125 - DNA, 20 bp, Artificial Sequence
  Description of Artificial Sequence: Synthetic oligonucleotide
  Target: LAMA2; (+) strand; PAM type: NNNNGHTT; PAM sequence: GATTGTTT
ggttgtcacttcactttgtt

SEQ ID NO: 52126 - DNA, 20 bp, Artificial Sequence
  Description of Artificial Sequence: Synthetic oligonucleotide
  Target: LAMA2; (+) strand; PAM type: NNNNGHTT; PAM sequence: AGAAGCTT
gattgtttactttgctgtgc

SEQ ID NO: 52127 - DNA, 20 bp, Artificial Sequence
  Description of Artificial Sequence: Synthetic oligonucleotide
  Target: LAMA2; (+) strand; PAM type: NNNNGHTT; PAM sequence: CTGTGCTT
tctatttttactttggttgc

SEQ ID NO: 52128 - DNA, 20 bp, Artificial Sequence
  Description of Artificial Sequence: Synthetic oligonucleotide
  Target: LAMA2; (+) strand; PAM type: NNNNGHTT; PAM sequence: CAATGTTT
aatgtcctggagaatttccc

SEQ ID NO: 52129 - DNA, 20 bp, Artificial Sequence
  Description of Artificial Sequence: Synthetic oligonucleotide
  Target: LAMA2; (+) strand; PAM type: NNNNGHTT; PAM sequence: AATAGTTT
tttccccaatgttttattgt

SEQ ID NO: 52130 - DNA, 20 bp, Artificial Sequence
  Description of Artificial Sequence: Synthetic oligonucleotide
  Target: LAMA2; (+) strand; PAM type: NNNNGHTT; PAM sequence: CTTAGATT
atagtttcatagttggatct

SEQ ID NO: 52131 - DNA, 20 bp, Artificial Sequence
  Description of Artificial Sequence: Synthetic oligonucleotide
  Target: LAMA2; (+) strand; PAM type: NNNNGHTT; PAM sequence: CTTTGATT
agattcaagtctctaatcca

SEQ ID NO: 52132 - DNA, 20 bp, Artificial Sequence
  Description of Artificial Sequence: Synthetic oligonucleotide
  Target: LAMA2; (+) strand; PAM type: NNNNGHTT; PAM sequence: ATTTGATT
caagtctctaatccactttg

SEQ ID NO: 52133 - DNA, 20 bp, Artificial Sequence
  Description of Artificial Sequence: Synthetic oligonucleotide
  Target: LAMA2; (+) strand; PAM type: NNNNGHTT; PAM sequence: TCTAGTTT
tatatggcgagagataggga

SEQ ID NO: 52134 - DNA, 20 bp, Artificial Sequence
  Description of Artificial Sequence: Synthetic oligonucleotide
  Target: LAMA2; (+) strand; PAM type: NNNNGHTT; PAM sequence: TCCAGTTT
cattcttccgcatatgaata

SEQ ID NO: 52135 - DNA, 20 bp, Artificial Sequence
  Description of Artificial Sequence: Synthetic oligonucleotide
  Target: LAMA2; (+) strand; PAM type: NNNNGHTT; PAM sequence: TATGGATT
aaatgagttcactgtagatg

SEQ ID NO: 52136 - DNA, 20 bp, Artificial Sequence
  Description of Artificial Sequence: Synthetic oligonucleotide
  Target: LAMA2; (+) strand; PAM type: NNNNGHTT; PAM sequence: TCTGGCTT
tgtagatgtatggatttatt

SEQ ID NO: 52137 - DNA, 20 bp, Artificial Sequence
  Description of Artificial Sequence: Synthetic oligonucleotide
  Target: LAMA2; (+) strand; PAM type: NNNNGHTT; PAM sequence: TGCCGTTT
ctatttttatgccagtacta

SEQ ID NO: 52138 - DNA, 20 bp, Artificial Sequence
  Description of Artificial Sequence: Synthetic oligonucleotide
  Target: LAMA2; (+) strand; PAM type: NNNNGHTT; PAM sequence: TTTGGCTT
tttatgccagtactatgccg

SEQ ID NO: 52139 - DNA, 20 bp, Artificial Sequence
  Description of Artificial Sequence: Synthetic oligonucleotide
  Target: LAMA2; (+) strand; PAM type: NNNNGHTT; PAM sequence: CTGGGTTT
ataggatagctgtggctatt

SEQ ID NO: 52140 - DNA, 20 bp, Artificial Sequence
  Description of Artificial Sequence: Synthetic oligonucleotide
  Target: LAMA2; (+) strand; PAM type: NNNNGHTT; PAM sequence: TAGGGATT
gaatctcattggtattttaa

SEQ ID NO: 52141 - DNA, 20 bp, Artificial Sequence
  Description of Artificial Sequence: Synthetic oligonucleotide
  Target: LAMA2; (+) strand; PAM type: NNNNGHTT; PAM sequence: TGCAGATT
aatagggattatattaaatc

SEQ ID NO: 52142 - DNA, 20 bp, Artificial Sequence
  Description of Artificial Sequence: Synthetic oligonucleotide
  Target: LAMA2; (+) strand; PAM type: NNNNGHTT; PAM sequence: TATTGATT
tagtatggacattttaacaa

SEQ ID NO: 52143 - DNA, 20 bp, Artificial Sequence
  Description of Artificial Sequence: Synthetic oligonucleotide
  Target: LAMA2; (+) strand; PAM type: NNNNGHTT; PAM sequence: CATTGTTT
ccctcttgaatttcttgcat

SEQ ID NO: 52144 - DNA, 20 bp, Artificial Sequence
  Description of Artificial Sequence: Synthetic oligonucleotide
  Target: LAMA2; (+) strand; PAM type: NNNNGHTT; PAM sequence: TATAGTTT
aatttcttgcatcattgttt

SEQ ID NO: 52145 - DNA, 20 bp, Artificial Sequence
  Description of Artificial Sequence: Synthetic oligonucleotide
  Target: LAMA2; (+) strand; PAM type: NNNNGHTT; PAM sequence: CCTTGTTT
caaggaagaagtcaaattat

SEQ ID NO: 52146 - DNA, 20 bp, Artificial Sequence
  Description of Artificial Sequence: Synthetic oligonucleotide
  Target: LAMA2; (+) strand; PAM type: NNNNGHTT; PAM sequence: ATATGATT
attatccttgtttgcaaatg

SEQ ID NO: 52147 - DNA, 20 bp, Artificial Sequence
  Description of Artificial Sequence: Synthetic oligonucleotide
  Target: LAMA2; (+) strand; PAM type: NNNNGHTT; PAM sequence: TGGAGATT
actaataagcacataatatg

SEQ ID NO: 52148 - DNA, 20 bp, Artificial Sequence
  Description of Artificial Sequence: Synthetic oligonucleotide
  Target: LAMA2; (+) strand; PAM type: NNNNGHTT; PAM sequence: AAATGATT
aattgaaagaaggcaagtaa

SEQ ID NO: 52149 - DNA, 20 bp, Artificial Sequence
  Description of Artificial Sequence: Synthetic oligonucleotide
  Target: LAMA2; (+) strand; PAM type: NNNNGHTT; PAM sequence: AAAAGATT
gttctgtagatacttagaaa

SEQ ID NO: 52150 - DNA, 20 bp, Artificial Sequence
  Description of Artificial Sequence: Synthetic oligonucleotide
  Target: LAMA2; (+) strand; PAM type: NNNNGHTT; PAM sequence: TTTTGTTT
tacttagaaaaaaagattaa

SEQ ID NO: 52151 - DNA, 20 bp, Artificial Sequence
  Description of Artificial Sequence: Synthetic oligonucleotide
  Target: LAMA2; (+) strand; PAM type: NNNNGHTT; PAM sequence: AAACGTTT
tttgtttgggggatatcagg

SEQ ID NO: 52152 - DNA, 20 bp, Artificial Sequence
  Description of Artificial Sequence: Synthetic oligonucleotide
  Target: LAMA2; (+) strand; PAM type: NNNNGHTT; PAM sequence: CAAGGCTT
tggaggaatcagcatttgag

SEQ ID NO: 52153 - DNA, 20 bp, Artificial Sequence
  Description of Artificial Sequence: Synthetic oligonucleotide
  Target: LAMA2; (+) strand; PAM type: NNNNGHTT; PAM sequence: AGGTGATT
cagcatttgagcaaggcttc

SEQ ID NO: 52154 - DNA, 20 bp, Artificial Sequence
  Description of Artificial Sequence: Synthetic oligonucleotide
  Target: LAMA2; (+) strand; PAM type: NNNNGHTT; PAM sequence: AAAAGCTT
tccatgtgctatgaaagtct

SEQ ID NO: 52155 - DNA, 20 bp, Artificial Sequence
  Description of Artificial Sequence: Synthetic oligonucleotide
  Target: LAMA2; (+) strand; PAM type: NNNNGHTT; PAM sequence: CCAAGATT
tgaaagtctaaaagcttccc

SEQ ID NO: 52156 - DNA, 20 bp, Artificial Sequence
  Description of Artificial Sequence: Synthetic oligonucleotide
  Target: LAMA2; (+) strand; PAM type: NNNNGHTT; PAM sequence: ACAAGTTT
tctcttagtcaaattttatg

SEQ ID NO: 52157 - DNA, 20 bp, Artificial Sequence
  Description of Artificial Sequence: Synthetic oligonucleotide
  Target: LAMA2; (+) strand; PAM type: NNNNGHTT; PAM sequence: TTCAGCTT
agtcaaattttatgacaagt

SEQ ID NO: 52158 - DNA, 20 bp, Artificial Sequence
  Description of Artificial Sequence: Synthetic oligonucleotide
  Target: LAMA2; (+) strand; PAM type: NNNNGHTT; PAM sequence: TTCAGCTT
attttatgacaagtttcagc

SEQ ID NO: 52159 - DNA, 20 bp, Artificial Sequence
  Description of Artificial Sequence: Synthetic oligonucleotide
  Target: LAMA2; (+) strand; PAM type: NNNNGHTT; PAM sequence: AATGGATT
cagcttcagcttttgcactt

SEQ ID NO: 52160 - DNA, 20 bp, Artificial Sequence
  Description of Artificial Sequence: Synthetic oligonucleotide
  Target: LAMA2; (+) strand; PAM type: NNNNGHTT; PAM sequence: CTCTGTTT
accagaaaattactcacttc

SEQ ID NO: 52161 - DNA, 20 bp, Artificial Sequence
  Description of Artificial Sequence: Synthetic oligonucleotide
  Target: LAMA2; (+) strand; PAM type: NNNNGHTT; PAM sequence: AAAAGTTT
cctttgacatctttgttctt

SEQ ID NO: 52162 - DNA, 20 bp, Artificial Sequence
  Description of Artificial Sequence: Synthetic oligonucleotide
  Target: LAMA2; (+) strand; PAM type: NNNNGHTT; PAM sequence: TGGGGCTT
ttttccagcgacccaatcac

SEQ ID NO: 52163 - DNA, 20 bp, Artificial Sequence
  Description of Artificial Sequence: Synthetic oligonucleotide
  Target: LAMA2; (+) strand; PAM type: NNNNGHTT; PAM sequence: TTCTGTTT
tcttctccttacttctccct

SEQ ID NO: 52164 - DNA, 20 bp, Artificial Sequence
  Description of Artificial Sequence: Synthetic oligonucleotide
  Target: LAMA2; (+) strand; PAM type: NNNNGHTT; PAM sequence: TTCAGCTT
tgttttattttgcagagcaa

SEQ ID NO: 52165 - DNA, 20 bp, Artificial Sequence
  Description of Artificial Sequence: Synthetic oligonucleotide
  Target: LAMA2; (+) strand; PAM type: NNNNGHTT; PAM sequence: TTTCGTTT
ttctaccctttactttattt

SEQ ID NO: 52166 - DNA, 20 bp, Artificial Sequence
  Description of Artificial Sequence: Synthetic oligonucleotide
  Target: LAMA2; (+) strand; PAM type: NNNNGHTT; PAM sequence: GCTAGCTT
atgttgcccaggcgcaactg

SEQ ID NO: 52167 - DNA, 20 bp, Artificial Sequence
  Description of Artificial Sequence: Synthetic oligonucleotide
  Target: LAMA2; (+) strand; PAM type: NNNNGHTT; PAM sequence: CAAAGATT
atctatcttaaatacttgct

SEQ ID NO: 52168 - DNA, 20 bp, Artificial Sequence
  Description of Artificial Sequence: Synthetic oligonucleotide
  Target: LAMA2; (+) strand; PAM type: NNNNGHTT; PAM sequence: AGAAGCTT
gataagtctatttatgtccc

SEQ ID NO: 52169 - DNA, 20 bp, Artificial Sequence
  Description of Artificial Sequence: Synthetic oligonucleotide
  Target: LAMA2; (+) strand; PAM type: NNNNGHTT; PAM sequence: TACAGTTT
cttcccatcaacattgtact

SEQ ID NO: 52170 - DNA, 20 bp, Artificial Sequence
  Description of Artificial Sequence: Synthetic oligonucleotide
  Target: LAMA2; (+) strand; PAM type: NNNNGHTT; PAM sequence: AGATGATT
ggcaacttttgaaacctttc

SEQ ID NO: 52171 - DNA, 20 bp, Artificial Sequence
  Description of Artificial Sequence: Synthetic oligonucleotide
  Target: LAMA2; (+) strand; PAM type: NNNNGHTT; PAM sequence: AAATGTTT
actttactgaaaaataactg

SEQ ID NO: 52172 - DNA, 20 bp, Artificial Sequence
  Description of Artificial Sequence: Synthetic oligonucleotide
  Target: LAMA2; (+) strand; PAM type: NNNNGHTT; PAM sequence: GTGAGATT
taagataataatacctgaca

SEQ ID NO: 52173 - DNA, 20 bp, Artificial Sequence
  Description of Artificial Sequence: Synthetic oligonucleotide
  Target: LAMA2; (+) strand; PAM type: NNNNGHTT; PAM sequence: ACACGTTT
aataaaaagtcatgcattgt

SEQ ID NO: 52174 - DNA, 20 bp, Artificial Sequence
  Description of Artificial Sequence: Synthetic oligonucleotide
  Target: LAMA2; (+) strand; PAM type: NNNNGHTT; PAM sequence: GGTGGATT
aaaatcttcattttacagtt

SEQ ID NO: 52175 - DNA, 20 bp, Artificial Sequence
  Description of Artificial Sequence: Synthetic oligonucleotide
  Target: LAMA2; (+) strand; PAM type: NNNNGHTT; PAM sequence: GTGGGATT
ttacagttggtggattcaaa

SEQ ID NO: 52176 - DNA, 20 bp, Artificial Sequence
  Description of Artificial Sequence: Synthetic oligonucleotide
  Target: LAMA2; (+) strand; PAM type: NNNNGHTT; PAM sequence: AAATGATT
aatggatggaatgggtattg

SEQ ID NO: 52177 - DNA, 20 bp, Artificial Sequence
  Description of Artificial Sequence: Synthetic oligonucleotide
  Target: LAMA2; (+) strand; PAM type: NNNNGHTT; PAM sequence: TTCTGATT
agtgtcagcaatgcaaacat

SEQ ID NO: 52178 - DNA, 20 bp, Artificial Sequence
  Description of Artificial Sequence: Synthetic oligonucleotide
  Target: LAMA2; (+) strand; PAM type: NNNNGHTT; PAM sequence: GTATGTTT
tgttgggagaaagctaaatt

SEQ ID NO: 52179 - DNA, 20 bp, Artificial Sequence
  Description of Artificial Sequence: Synthetic oligonucleotide
  Target: LAMA2; (+) strand; PAM type: NNNNGHTT; PAM sequence: TCTGGATT
aaattgtatgttttcatcct

SEQ ID NO: 52180 - DNA, 20 bp, Artificial Sequence
  Description of Artificial Sequence: Synthetic oligonucleotide
  Target: LAMA2; (+) strand; PAM type: NNNNGHTT; PAM sequence: GTATGTTT
tctggattacttcaatttgt

SEQ ID NO: 52181 - DNA, 20 bp, Artificial Sequence
  Description of Artificial Sequence: Synthetic oligonucleotide
  Target: LAMA2; (+) strand; PAM type: NNNNGHTT; PAM sequence: AATAGTTT
tgttgactaataatgaacca

SEQ ID NO: 52182 - DNA, 20 bp, Artificial Sequence
  Description of Artificial Sequence: Synthetic oligonucleotide
  Target: LAMA2; (+) strand; PAM type: NNNNGHTT; PAM sequence: ATCAGTTT
ccaaggtagccaactgacgc

SEQ ID NO: 52183 - DNA, 20 bp, Artificial Sequence
  Description of Artificial Sequence: Synthetic oligonucleotide
  Target: LAMA2; (+) strand; PAM type: NNNNGHTT; PAM sequence: ATTTGTTT
actgacgcatcagtttctca

SEQ ID NO: 52184 - DNA, 20 bp, Artificial Sequence
  Description of Artificial Sequence: Synthetic oligonucleotide
  Target: LAMA2; (+) strand; PAM type: NNNNGHTT; PAM sequence: GTCAGTTT
caaatttataaaagtagtgt

SEQ ID NO: 52185 - DNA, 20 bp, Artificial Sequence
  Description of Artificial Sequence: Synthetic oligonucleotide
  Target: LAMA2; (+) strand; PAM type: NNNNGHTT; PAM sequence: ACAAGTTT
aagggaaaacaagaaatttc

SEQ ID NO: 52186 - DNA, 20 bp, Artificial Sequence
  Description of Artificial Sequence: Synthetic oligonucleotide
  Target: LAMA2; (+) strand; PAM type: NNNNGHTT; PAM sequence: TCACGTTT
gaatcgtacttcaactcagt

SEQ ID NO: 52187 - DNA, 20 bp, Artificial Sequence
  Description of Artificial Sequence: Synthetic oligonucleotide
  Target: LAMA2; (+) strand; PAM type: NNNNGHTT; PAM sequence: AATAGTTT
aaaatcacacagtgacctaa

SEQ ID NO: 52188 - DNA, 20 bp, Artificial Sequence
  Description of Artificial Sequence: Synthetic oligonucleotide
  Target: LAMA2; (+) strand; PAM type: NNNNGHTT; PAM sequence: TCTTGCTT
agtgacctaaaatagttttt

SEQ ID NO: 52189 - DNA, 20 bp, Artificial Sequence
  Description of Artificial Sequence: Synthetic oligonucleotide
  Target: LAMA2; (+) strand; PAM type: NNNNGHTT; PAM sequence: ACCAGCTT
taatataggaaaaaagatcc

SEQ ID NO: 52190 - DNA, 20 bp, Artificial Sequence
  Description of Artificial Sequence: Synthetic oligonucleotide
  Target: LAMA2; (+) strand; PAM type: NNNNGHTT; PAM sequence: AATAGTTT
tgaacaaataagtaacactc

SEQ ID NO: 52191 - DNA, 20 bp, Artificial Sequence
  Description of Artificial Sequence: Synthetic oligonucleotide
  Target: LAMA2; (+) strand; PAM type: NNNNGHTT; PAM sequence: GTGCGTTT
catcgatatgtcactatcat

SEQ ID NO: 52192 - DNA, 20 bp, Artificial Sequence
  Description of Artificial Sequence: Synthetic oligonucleotide
  Target: LAMA2; (+) strand; PAM type: NNNNGHTT; PAM sequence: TAGAGTTT
ttcattaataattacatcaa

SEQ ID NO: 52193 - DNA, 20 bp, Artificial Sequence
  Description of Artificial Sequence: Synthetic oligonucleotide
  Target: LAMA2; (+) strand; PAM type: NNNNGHTT; PAM sequence: TAATGTTT
gaatgtcttgccaaactgac

SEQ ID NO: 52194 - DNA, 20 bp, Artificial Sequence
  Description of Artificial Sequence: Synthetic oligonucleotide
  Target: LAMA2; (+) strand; PAM type: NNNNGHTT; PAM sequence: TAGTGTTT
gccaaactgactaatgtttt

SEQ ID NO: 52195 - DNA, 20 bp, Artificial Sequence
  Description of Artificial Sequence: Synthetic oligonucleotide
  Target: LAMA2; (+) strand; PAM type: NNNNGHTT; PAM sequence: ATATGTTT
ctaatgtttttagtgtttca

SEQ ID NO: 52196 - DNA, 20 bp, Artificial Sequence
  Description of Artificial Sequence: Synthetic oligonucleotide
  Target: LAMA2; (+) strand; PAM type: NNNNGHTT; PAM sequence: TTTCGTTT
gtttttagtgtttcaatatg

SEQ ID NO: 52197 - DNA, 20 bp, Artificial Sequence
  Description of Artificial Sequence: Synthetic oligonucleotide
  Target: LAMA2; (+) strand; PAM type: NNNNGHTT; PAM sequence: ACCAGCTT
tcaatatgtttcgtttcttc

SEQ ID NO: 52198 - DNA, 20 bp, Artificial Sequence
  Description of Artificial Sequence: Synthetic oligonucleotide
  Target: LAMA2; (+) strand; PAM type: NNNNGHTT; PAM sequence: AGGGGCTT
attctgtcatctcaaatttc

SEQ ID NO: 52199 - DNA, 20 bp, Artificial Sequence
  Description of Artificial Sequence: Synthetic oligonucleotide
  Target: LAMA2; (+) strand; PAM type: NNNNGHTT; PAM sequence: AACAGATT
ggcttttccacattactaaa

SEQ ID NO: 52200 - DNA, 20 bp, Artificial Sequence
  Description of Artificial Sequence: Synthetic oligonucleotide
  Target: LAMA2; (+) strand; PAM type: NNNNGHTT; PAM sequence: AAAAGTTT
aaaaatataattaaaacatc

SEQ ID NO: 52201 - DNA, 20 bp, Artificial Sequence
  Description of Artificial Sequence: Synthetic oligonucleotide
  Target: LAMA2; (+) strand; PAM type: NNNNGHTT; PAM sequence: ACCAGCTT
tttctgaaagcagaattatt

SEQ ID NO: 52202 - DNA, 20 bp, Artificial Sequence
  Description of Artificial Sequence: Synthetic oligonucleotide
  Target: LAMA2; (+) strand; PAM type: NNNNGHTT; PAM sequence: TGGTGATT
agagcataatttgtggctcc

SEQ ID NO: 52203 - DNA, 20 bp, Artificial Sequence
  Description of Artificial Sequence: Synthetic oligonucleotide
  Target: LAMA2; (+) strand; PAM type: NNNNGHTT; PAM sequence: ATTAGATT
ataatttgtggctcctggtg

SEQ ID NO: 52204 - DNA, 20 bp, Artificial Sequence
  Description of Artificial Sequence: Synthetic oligonucleotide
  Target: LAMA2; (+) strand; PAM type: NNNNGHTT; PAM sequence: TCAAGTTT
tagatttatactttaatttg

SEQ ID NO: 52205 - DNA, 20 bp, Artificial Sequence
  Description of Artificial Sequence: Synthetic oligonucleotide
  Target: LAMA2; (+) strand; PAM type: NNNNGHTT; PAM sequence: AAATGATT
tgcccagttacatccatttc

SEQ ID NO: 52206 - DNA, 20 bp, Artificial Sequence
  Description of Artificial Sequence: Synthetic oligonucleotide
  Target: LAMA2; (+) strand; PAM type: NNNNGHTT; PAM sequence: TGATGTTT
tctatttcctactttccagt

SEQ ID NO: 52207 - DNA, 20 bp, Artificial Sequence
  Description of Artificial Sequence: Synthetic oligonucleotide
  Target: LAMA2; (+) strand; PAM type: NNNNGHTT; PAM sequence: GGCAGATT
ttcatgtggacaatggtgcg

SEQ ID NO: 52208 - DNA, 20 bp, Artificial Sequence
  Description of Artificial Sequence: Synthetic oligonucleotide
  Target: LAMA2; (+) strand; PAM type: NNNNGHTT; PAM sequence: CTGTGTTT
atcagctgacacaaatgacc

SEQ ID NO: 52209 - DNA, 20 bp, Artificial Sequence
  Description of Artificial Sequence: Synthetic oligonucleotide
  Target: LAMA2; (+) strand; PAM type: NNNNGHTT; PAM sequence: GGAGGCTT
caaatgaccctgtgtttgtt

SEQ ID NO: 52210 - DNA, 20 bp, Artificial Sequence
  Description of Artificial Sequence: Synthetic oligonucleotide
  Target: LAMA2; (+) strand; PAM type: NNNNGHTT; PAM sequence: ACTGGTTT
tttctttgctctcttatgtt

SEQ ID NO: 52211 - DNA, 20 bp, Artificial Sequence
  Description of Artificial Sequence: Synthetic oligonucleotide
  Target: LAMA2; (+) strand; PAM type: NNNNGHTT; PAM sequence: GTGTGCTT
atttacgtgtgtctaagaat

SEQ ID NO: 52212 - DNA, 20 bp, Artificial Sequence
  Description of Artificial Sequence: Synthetic oligonucleotide
  Target: LAMA2; (+) strand; PAM type: NNNNGHTT; PAM sequence: ACTTGCTT
aagaatgtgtgcttatgtgt

SEQ ID NO: 52213 - DNA, 20 bp, Artificial Sequence
  Description of Artificial Sequence: Synthetic oligonucleotide
  Target: LAMA2; (+) strand; PAM type: NNNNGHTT; PAM sequence: CCTAGCTT
gtgcttatgtgtacttgctt

SEQ ID NO: 52214 - DNA, 20 bp, Artificial Sequence
  Description of Artificial Sequence: Synthetic oligonucleotide
  Target: LAMA2; (+) strand; PAM type: NNNNGHTT; PAM sequence: ATCTGCTT
acttgcttcctagctttaga

SEQ ID NO: 52215 - DNA, 20 bp, Artificial Sequence
  Description of Artificial Sequence: Synthetic oligonucleotide
  Target: LAMA2; (+) strand; PAM type: NNNNGHTT; PAM sequence: CAAAGTTT
gaacttttcatgagagcccc

SEQ ID NO: 52216 - DNA, 20 bp, Artificial Sequence
  Description of Artificial Sequence: Synthetic oligonucleotide
  Target: LAMA2; (+) strand; PAM type: NNNNGHTT; PAM sequence: GAGAGATT
cccccaaagtttccttcgtg

SEQ ID NO: 52217 - DNA, 20 bp, Artificial Sequence
  Description of Artificial Sequence: Synthetic oligonucleotide
  Target: LAMA2; (+) strand; PAM type: NNNNGHTT; PAM sequence: TTTGGCTT
ttgaagctggaggaaatgaa

SEQ ID NO: 52218 - DNA, 20 bp, Artificial Sequence
  Description of Artificial Sequence: Synthetic oligonucleotide
  Target: LAMA2; (+) strand; PAM type: NNNNGHTT; PAM sequence: TTCTGATT
ggagccaaacttggtgttct

SEQ ID NO: 52219 - DNA, 20 bp, Artificial Sequence
  Description of Artificial Sequence: Synthetic oligonucleotide
  Target: LAMA2; (+) strand; PAM type: NNNNGHTT; PAM sequence: TAGAGTTT
atttcccccttatgttatta

SEQ ID NO: 52220 - DNA, 20 bp, Artificial Sequence
  Description of Artificial Sequence: Synthetic oligonucleotide
  Target: LAMA2; (+) strand; PAM type: NNNNGHTT; PAM sequence: TAGAGATT
taaatatagcatgtgaactg

SEQ ID NO: 52221 - DNA, 20 bp, Artificial Sequence
  Description of Artificial Sequence: Synthetic oligonucleotide
  Target: LAMA2; (+) strand; PAM type: NNNNGHTT; PAM sequence: CCCTGTTT
ttgtcaagaggaacttttat

SEQ ID NO: 52222 - DNA, 20 bp, Artificial Sequence
  Description of Artificial Sequence: Synthetic oligonucleotide
  Target: LAMA2; (+) strand; PAM type: NNNNGHTT; PAM sequence: AGTGGCTT
acgacagctcctctttccaa

SEQ ID NO: 52223 - DNA, 20 bp, Artificial Sequence
  Description of Artificial Sequence: Synthetic oligonucleotide
  Target: LAMA2; (+) strand; PAM type: NNNNGHTT; PAM sequence: CTGTGTTT
tcctctttccaaagtggctt

SEQ ID NO: 52224 - DNA, 20 bp, Artificial Sequence
  Description of Artificial Sequence: Synthetic oligonucleotide
  Target: LAMA2; (+) strand; PAM type: NNNNGHTT; PAM sequence: TTTTGCTT
ttctgtgttttaaaaagatc

SEQ ID NO: 52225 - DNA, 20 bp, Artificial Sequence
  Description of Artificial Sequence: Synthetic oligonucleotide
  Target: LAMA2; (+) strand; PAM type: NNNNGHTT; PAM sequence: GGAAGATT
caagcacctctataataaga

SEQ ID NO: 52226 - DNA, 20 bp, Artificial Sequence
  Description of Artificial Sequence: Synthetic oligonucleotide
  Target: LAMA2; (+) strand; PAM type: NNNNGHTT; PAM sequence: TAGGGATT
tatccaacctacttaacctt

SEQ ID NO: 52227 - DNA, 20 bp, Artificial Sequence
  Description of Artificial Sequence: Synthetic oligonucleotide
  Target: LAMA2; (+) strand; PAM type: NNNNGHTT; PAM sequence: AATTGCTT
gtacttaaaagtatttgatc

SEQ ID NO: 52228 - DNA, 20 bp, Artificial Sequence
  Description of Artificial Sequence: Synthetic oligonucleotide
  Target: LAMA2; (+) strand; PAM type: NNNNGHTT; PAM sequence: CTTTGTTT
taaaagtatttgatcaattg

SEQ ID NO: 52229 - DNA, 20 bp, Artificial Sequence
  Description of Artificial Sequence: Synthetic oligonucleotide
  Target: LAMA2; (+) strand; PAM type: NNNNGHTT; PAM sequence: AGATGTTT
gtcttaagatgtataattct

SEQ ID NO: 52230 - DNA, 20 bp, Artificial Sequence
  Description of Artificial Sequence: Synthetic oligonucleotide
  Target: LAMA2; (+) strand; PAM type: NNNNGHTT; PAM sequence: GATCGCTT
gggcaacacggcgaagggag

SEQ ID NO: 52231 - DNA, 20 bp, Artificial Sequence
  Description of Artificial Sequence: Synthetic oligonucleotide
  Target: LAMA2; (+) strand; PAM type: NNNNGHTT; PAM sequence: CCTTGATT
gaggttgaggctgcagtaag

SEQ ID NO: 52232 - DNA, 20 bp, Artificial Sequence
  Description of Artificial Sequence: Synthetic oligonucleotide
  Target: LAMA2; (+) strand; PAM type: NNNNGHTT; PAM sequence: AGCAGTTT
gcctttttcagatgacctca

SEQ ID NO: 52233 - DNA, 20 bp, Artificial Sequence
  Description of Artificial Sequence: Synthetic oligonucleotide
  Target: LAMA2; (+) strand; PAM type: NNNNGHTT; PAM sequence: AACTGATT
caagtctataaataatatta

SEQ ID NO: 52234 - DNA, 20 bp, Artificial Sequence
  Description of Artificial Sequence: Synthetic oligonucleotide
  Target: LAMA2; (+) strand; PAM type: NNNNGHTT; PAM sequence: GCCTGTTT
ttatttcattctaaataatt

SEQ ID NO: 52235 - DNA, 20 bp, Artificial Sequence
  Description of Artificial Sequence: Synthetic oligonucleotide
  Target: LAMA2; (+) strand; PAM type: NNNNGHTT; PAM sequence: GTGTGATT
tctaaataattgcctgtttt

SEQ ID NO: 52236 - DNA, 20 bp, Artificial Sequence
  Description of Artificial Sequence: Synthetic oligonucleotide
  Target: LAMA2; (+) strand; PAM type: NNNNGHTT; PAM sequence: TTGAGTTT
aggtaactggccataaattg

SEQ ID NO: 52237 - DNA, 20 bp, Artificial Sequence
  Description of Artificial Sequence: Synthetic oligonucleotide
  Target: LAMA2; (+) strand; PAM type: NNNNGHTT; PAM sequence: GACAGCTT
tatcatcctttaccatgtat

SEQ ID NO: 52238 - DNA, 20 bp, Artificial Sequence
  Description of Artificial Sequence: Synthetic oligonucleotide
  Target: LAMA2; (+) strand; PAM type: NNNNGHTT; PAM sequence: GTGTGATT
acagcaagtgaatttggcat

SEQ ID NO: 52239 - DNA, 20 bp, Artificial Sequence
  Description of Artificial Sequence: Synthetic oligonucleotide
  Target: LAMA2; (+) strand; PAM type: NNNNGHTT; PAM sequence: GAGAGTTT
ctgacccaagttcattatta

SEQ ID NO: 52240 - DNA, 20 bp, Artificial Sequence
  Description of Artificial Sequence: Synthetic oligonucleotide
  Target: LAMA2; (+) strand; PAM type: NNNNGHTT; PAM sequence: AATAGCTT
tttaactagccgtatgagtg

SEQ ID NO: 52241 - DNA, 20 bp, Artificial Sequence
  Description of Artificial Sequence: Synthetic oligonucleotide
  Target: LAMA2; (+) strand; PAM type: NNNNGHTT; PAM sequence: ACCAGATT
gctgaaggtagagggtatag

SEQ ID NO: 52242 - DNA, 20 bp, Artificial Sequence
  Description of Artificial Sequence: Synthetic oligonucleotide
  Target: LAMA2; (+) strand; PAM type: NNNNGHTT; PAM sequence: GAAAGCTT
tatagaccagattcaggcca

SEQ ID NO: 52243 - DNA, 20 bp, Artificial Sequence
  Description of Artificial Sequence: Synthetic oligonucleotide
  Target: LAMA2; (+) strand; PAM type: NNNNGHTT; PAM sequence: ACTTGATT
tcaggccagaaagcttaatt

SEQ ID NO: 52244 - DNA, 20 bp, Artificial Sequence
  Description of Artificial Sequence: Synthetic oligonucleotide
  Target: LAMA2; (+) strand; PAM type: NNNNGHTT; PAM sequence: TAATGATT
tacttgattttcttatttga

SEQ ID NO: 52245 - DNA, 20 bp, Artificial Sequence
  Description of Artificial Sequence: Synthetic oligonucleotide
  Target: LAMA2; (+) strand; PAM type: NNNNGHTT; PAM sequence: ATGGGCTT
ttcttatttgataatgattt

SEQ ID NO: 52246 - DNA, 20 bp, Artificial Sequence
  Description of Artificial Sequence: Synthetic oligonucleotide
  Target: LAMA2; (+) strand; PAM type: NNNNGHTT; PAM sequence: CCAAGCTT
gctttggggagatgccaaaa

SEQ ID NO: 52247 - DNA, 20 bp, Artificial Sequence
  Description of Artificial Sequence: Synthetic oligonucleotide
  Target: LAMA2; (+) strand; PAM type: NNNNGHTT; PAM sequence: GAAAGATT
atttgatactacagtactaa

SEQ ID NO: 52248 - DNA, 20 bp, Artificial Sequence
  Description of Artificial Sequence: Synthetic oligonucleotide
  Target: LAMA2; (+) strand; PAM type: NNNNGHTT; PAM sequence: CTGTGTTT
attcattttctataaacgtt

SEQ ID NO: 52249 - DNA, 20 bp, Artificial Sequence
  Description of Artificial Sequence: Synthetic oligonucleotide
  Target: LAMA2; (+) strand; PAM type: NNNNGHTT; PAM sequence: CCATGATT
gtgttttgttctcctttaac

SEQ ID NO: 52250 - DNA, 20 bp, Artificial Sequence
  Description of Artificial Sequence: Synthetic oligonucleotide
  Target: LAMA2; (+) strand; PAM type: NNNNGHTT; PAM sequence: CCTTGATT
gagctctgtgagaagactgg

SEQ ID NO: 52251 - DNA, 20 bp, Artificial Sequence
  Description of Artificial Sequence: Synthetic oligonucleotide
  Target: LAMA2; (+) strand; PAM type: NNNNGHTT; PAM sequence: ACCAGCTT
gactggccttgattttattc

SEQ ID NO: 52252 - DNA, 20 bp, Artificial Sequence
  Description of Artificial Sequence: Synthetic oligonucleotide
  Target: LAMA2; (+) strand; PAM type: NNNNGHTT; PAM sequence: AAACGTTT
tattcaccagcttaaaaagg

SEQ ID NO: 52253 - DNA, 20 bp, Artificial Sequence
  Description of Artificial Sequence: Synthetic oligonucleotide
  Target: LAMA2; (+) strand; PAM type: NNNNGHTT; PAM sequence: TGCTGTTT
atccactaggggaaggaagg

SEQ ID NO: 52254 - DNA, 20 bp, Artificial Sequence
  Description of Artificial Sequence: Synthetic oligonucleotide
  Target: LAMA2; (+) strand; PAM type: NNNNGHTT; PAM sequence: TGTTGCTT
tcactatttcaccaccgtcc

SEQ ID NO: 52255 - DNA, 20 bp, Artificial Sequence
  Description of Artificial Sequence: Synthetic oligonucleotide
  Target: LAMA2; (+) strand; PAM type: NNNNGHTT; PAM sequence: TCAAGCTT
ttattctacagaagcaattc

SEQ ID NO: 52256 - DNA, 20 bp, Artificial Sequence
  Description of Artificial Sequence: Synthetic oligonucleotide
  Target: LAMA2; (+) strand; PAM type: NNNNGHTT; PAM sequence: CAGTGTTT
agcaattctcaagcttagct

SEQ ID NO: 52257 - DNA, 20 bp, Artificial Sequence
  Description of Artificial Sequence: Synthetic oligonucleotide
  Target: LAMA2; (+) strand; PAM type: NNNNGHTT; PAM sequence: CTATGCTT
cagtgtttttaaaaaactgc

SEQ ID NO: 52258 - DNA, 20 bp, Artificial Sequence
  Description of Artificial Sequence: Synthetic oligonucleotide
  Target: LAMA2; (+) strand; PAM type: NNNNGHTT; PAM sequence: GGGAGTTT
atgctttagaaaagtgccta

SEQ ID NO: 52259 - DNA, 20 bp, Artificial Sequence
  Description of Artificial Sequence: Synthetic oligonucleotide
  Target: LAMA2; (+) strand; PAM type: NNNNGHTT; PAM sequence: CAGTGATT
taaaaatctagtacctggtc

SEQ ID NO: 52260 - DNA, 20 bp, Artificial Sequence
  Description of Artificial Sequence: Synthetic oligonucleotide
  Target: LAMA2; (+) strand; PAM type: NNNNGHTT; PAM sequence: TTCTGATT
tctagtacctggtccagtga

SEQ ID NO: 52261 - DNA, 20 bp, Artificial Sequence
  Description of Artificial Sequence: Synthetic oligonucleotide
  Target: LAMA2; (+) strand; PAM type: NNNNGHTT; PAM sequence: TAATGATT
tctaggacatagccagagca

SEQ ID NO: 52262 - DNA, 20 bp, Artificial Sequence
  Description of Artificial Sequence: Synthetic oligonucleotide
  Target: LAMA2; (+) strand; PAM type: NNNNGHTT; PAM sequence: ATGGGTTT
tttttatatttttagtagag

SEQ ID NO: 52263 - DNA, 20 bp, Artificial Sequence
  Description of Artificial Sequence: Synthetic oligonucleotide
  Target: LAMA2; (+) strand; PAM type: NNNNGHTT; PAM sequence: CTAGGATT
tgcctcagcctcccaaagtg

SEQ ID NO: 52264 - DNA, 20 bp, Artificial Sequence
  Description of Artificial Sequence: Synthetic oligonucleotide
  Target: LAMA2; (+) strand; PAM type: NNNNGHTT; PAM sequence: TGAGGATT
ccactgtgcccagtcaagca

SEQ ID NO: 52265 - DNA, 20 bp, Artificial Sequence
  Description of Artificial Sequence: Synthetic oligonucleotide
  Target: LAMA2; (+) strand; PAM type: NNNNGHTT; PAM sequence: AAAGGATT
aagaaaaataagcaataggg

SEQ ID NO: 52266 - DNA, 20 bp, Artificial Sequence
  Description of Artificial Sequence: Synthetic oligonucleotide
  Target: LAMA2; (+) strand; PAM type: NNNNGHTT; PAM sequence: GATGGATT
ttatacaaaaattaattcaa

SEQ ID NO: 52267 - DNA, 20 bp, Artificial Sequence
  Description of Artificial Sequence: Synthetic oligonucleotide
  Target: LAMA2; (+) strand; PAM type: NNNNGHTT; PAM sequence: AAGAGCTT
aatgggatctaattaaacta

SEQ ID NO: 52268 - DNA, 20 bp, Artificial Sequence
  Description of Artificial Sequence: Synthetic oligonucleotide
  Target: LAMA2; (+) strand; PAM type: NNNNGHTT; PAM sequence: GTATGTTT
ctataaagacacatgcacat

SEQ ID NO: 52269 - DNA, 20 bp, Artificial Sequence
  Description of Artificial Sequence: Synthetic oligonucleotide
  Target: LAMA2; (+) strand; PAM type: NNNNGHTT; PAM sequence: ACTGGATT
caaatgtccaacaatgatag

SEQ ID NO: 52270 - DNA, 20 bp, Artificial Sequence
  Description of Artificial Sequence: Synthetic oligonucleotide
  Target: LAMA2; (+) strand; PAM type: NNNNGHTT; PAM sequence: GACTGTTT
ggggaacatcacactctggg

SEQ ID NO: 52271 - DNA, 20 bp, Artificial Sequence
  Description of Artificial Sequence: Synthetic oligonucleotide
  Target: LAMA2; (+) strand; PAM type: NNNNGHTT; PAM sequence: AAGAGTTT
cattatcctccatgccaaca

SEQ ID NO: 52272 - DNA, 20 bp, Artificial Sequence
  Description of Artificial Sequence: Synthetic oligonucleotide
  Target: LAMA2; (+) strand; PAM type: NNNNGHTT; PAM sequence: ATTAGCTT
agtcatttgagaattctact

SEQ ID NO: 52273 - DNA, 20 bp, Artificial Sequence
  Description of Artificial Sequence: Synthetic oligonucleotide
  Target: LAMA2; (+) strand; PAM type: NNNNGHTT; PAM sequence: AGGAGTTT
caggaggatcagtggaaccc

SEQ ID NO: 52274 - DNA, 20 bp, Artificial Sequence
  Description of Artificial Sequence: Synthetic oligonucleotide
  Target: LAMA2; (+) strand; PAM type: NNNNGHTT; PAM sequence: GGAAGATT
tactccaggaggttgatgca

SEQ ID NO: 52275 - DNA, 20 bp, Artificial Sequence
  Description of Artificial Sequence: Synthetic oligonucleotide
  Target: LAMA2; (+) strand; PAM type: NNNNGHTT; PAM sequence: GATTGCTT
ccaggaggttgatgcaggaa

SEQ ID NO: 52276 - DNA, 20 bp, Artificial Sequence
  Description of Artificial Sequence: Synthetic oligonucleotide
  Target: LAMA2; (+) strand; PAM type: NNNNGHTT; PAM sequence: TGATGATT
aggtcaaagctccagtgagc

SEQ ID NO: 52277 - DNA, 20 bp, Artificial Sequence
  Description of Artificial Sequence: Synthetic oligonucleotide
  Target: LAMA2; (+) strand; PAM type: NNNNGHTT; PAM sequence: ATGTGTTT
ataaaactttttgaaaacca

SEQ ID NO: 52278 - DNA, 20 bp, Artificial Sequence
  Description of Artificial Sequence: Synthetic oligonucleotide
  Target: LAMA2; (+) strand; PAM type: NNNNGHTT; PAM sequence: TTGGGCTT
ctaaacgctgacatgacttt

SEQ ID NO: 52279 - DNA, 20 bp, Artificial Sequence
  Description of Artificial Sequence: Synthetic oligonucleotide
  Target: LAMA2; (+) strand; PAM type: NNNNGHTT; PAM sequence: CTTAGATT
ggaataaagatgttgggttc

SEQ ID NO: 52280 - DNA, 20 bp, Artificial Sequence
  Description of Artificial Sequence: Synthetic oligonucleotide
  Target: LAMA2; (+) strand; PAM type: NNNNGHTT; PAM sequence: CAGTGATT
tgaattgagatcagcgaata

SEQ ID NO: 52281 - DNA, 20 bp, Artificial Sequence
  Description of Artificial Sequence: Synthetic oligonucleotide
  Target: LAMA2; (+) strand; PAM type: NNNNGHTT; PAM sequence: AGATGTTT
agtgattctcaagtctagct

SEQ ID NO: 52282 - DNA, 20 bp, Artificial Sequence
  Description of Artificial Sequence: Synthetic oligonucleotide
  Target: LAMA2; (+) strand; PAM type: NNNNGHTT; PAM sequence: AAGTGCTT
caagtctagctagatgttta

SEQ ID NO: 52283 - DNA, 20 bp, Artificial Sequence
  Description of Artificial Sequence: Synthetic oligonucleotide
  Target: LAMA2; (+) strand; PAM type: NNNNGHTT; PAM sequence: GGGTGCTT
ctagatgtttaaagtgcttt

SEQ ID NO: 52284 - DNA, 20 bp, Artificial Sequence
  Description of Artificial Sequence: Synthetic oligonucleotide
  Target: LAMA2; (+) strand; PAM type: NNNNGHTT; PAM sequence: AGGAGTTT
caggaggatcacttaagccc

SEQ ID NO: 52285 - DNA, 20 bp, Artificial Sequence
  Description of Artificial Sequence: Synthetic oligonucleotide
  Target: LAMA2; (+) strand; PAM type: NNNNGHTT; PAM sequence: ACTTGATT
ggcattttttaaaaatcccc

SEQ ID NO: 52286 - DNA, 20 bp, Artificial Sequence
  Description of Artificial Sequence: Synthetic oligonucleotide
  Target: LAMA2; (+) strand; PAM type: NNNNGHTT; PAM sequence: TAAAGTTT
tgctcaaagtcccaccttag

SEQ ID NO: 52287 - DNA, 20 bp, Artificial Sequence
  Description of Artificial Sequence: Synthetic oligonucleotide
  Target: LAMA2; (+) strand; PAM type: NNNNGHTT; PAM sequence: TTAGGTTT
tccaagcagaattcactgaa

SEQ ID NO: 52288 - DNA, 20 bp, Artificial Sequence
  Description of Artificial Sequence: Synthetic oligonucleotide
  Target: LAMA2; (+) strand; PAM type: NNNNGHTT; PAM sequence: AATCGCTT
tcgggaggctgaggcaggag

SEQ ID NO: 52289 - DNA, 20 bp, Artificial Sequence
  Description of Artificial Sequence: Synthetic oligonucleotide
  Target: LAMA2; (+) strand; PAM type: NNNNGHTT; PAM sequence: GGACGTTT
aataaataaataataaataa

SEQ ID NO: 52290 - DNA, 20 bp, Artificial Sequence
  Description of Artificial Sequence: Synthetic oligonucleotide
  Target: LAMA2; (+) strand; PAM type: NNNNGHTT; PAM sequence: AAAAGTTT
aaggacgttttatgaaaggg

SEQ ID NO: 52291 - DNA, 20 bp, Artificial Sequence
  Description of Artificial Sequence: Synthetic oligonucleotide
  Target: LAMA2; (+) strand; PAM type: NNNNGHTT; PAM sequence: CAATGATT
tctacccaaccttgtcccct

SEQ ID NO: 52292 - DNA, 20 bp, Artificial Sequence
  Description of Artificial Sequence: Synthetic oligonucleotide
  Target: LAMA2; (+) strand; PAM type: NNNNGHTT; PAM sequence: AGGTGCTT
gtcagccttcttctttaaaa

SEQ ID NO: 52293 - DNA, 20 bp, Artificial Sequence
  Description of Artificial Sequence: Synthetic oligonucleotide
  Target: LAMA2; (-) strand; PAM type: NRG; PAM sequence: GGG
tttgaatgtacatgtctttt

SEQ ID NO: 52294 - DNA, 20 bp, Artificial Sequence
  Description of Artificial Sequence: Synthetic oligonucleotide
  Target: LAMA2; (-) strand; PAM type: NRG; PAM sequence: TGG
ttttgaatgtacatgtcttt

SEQ ID NO: 52295 - DNA, 20 bp, Artificial Sequence
  Description of Artificial Sequence: Synthetic oligonucleotide
  Target: LAMA2; (-) strand; PAM type: NRG; PAM sequence: TAG
atattctaagcagtgcctta

SEQ ID NO: 52296 - DNA, 20 bp, Artificial Sequence
  Description of Artificial Sequence: Synthetic oligonucleotide
  Target: LAMA2; (-) strand; PAM type: NRG; PAM sequence: CAG
tacatgtttaatattctaag

SEQ ID NO: 52297 - DNA, 20 bp, Artificial Sequence
  Description of Artificial Sequence: Synthetic oligonucleotide
  Target: LAMA2; (-) strand; PAM type: NRG; PAM sequence: AAG
atttacatgtttaatattct

SEQ ID NO: 52298 - DNA, 20 bp, Artificial Sequence
  Description of Artificial Sequence: Synthetic oligonucleotide
  Target: LAMA2; (-) strand; PAM type: NRG; PAM sequence: TAG
tagacttccattcacaaata

SEQ ID NO: 52299 - DNA, 20 bp, Artificial Sequence
  Description of Artificial Sequence: Synthetic oligonucleotide
  Target: LAMA2; (-) strand; PAM type: NRG; PAM sequence: TAG
attgatatcttagcaatatt

SEQ ID NO: 52300 - DNA, 20 bp, Artificial Sequence
  Description of Artificial Sequence: Synthetic oligonucleotide
  Target: LAMA2; (-) strand; PAM type: NRG; PAM sequence: TAG
ttgtgggataattgatatct

SEQ ID NO: 52301 - DNA, 20 bp, Artificial Sequence
  Description of Artificial Sequence: Synthetic oligonucleotide
  Target: LAMA2; (-) strand; PAM type: NRG; PAM sequence: GGG
tggacctacagataaattgt

SEQ ID NO: 52302 - DNA, 20 bp, Artificial Sequence
  Description of Artificial Sequence: Synthetic oligonucleotide
  Target: LAMA2; (-) strand; PAM type: NRG; PAM sequence: TGG
ttggacctacagataaattg

SEQ ID NO: 52303 - DNA, 20 bp, Artificial Sequence
  Description of Artificial Sequence: Synthetic oligonucleotide
  Target: LAMA2; (-) strand; PAM type: NRG; PAM sequence: CAG
ttgtaatgaggttggaccta

SEQ ID NO: 52304 - DNA, 20 bp, Artificial Sequence
  Description of Artificial Sequence: Synthetic oligonucleotide
  Target: LAMA2; (-) strand; PAM type: NRG; PAM sequence: TGG
gaacatgattgtaatgaggt

SEQ ID NO: 52305 - DNA, 20 bp, Artificial Sequence
  Description of Artificial Sequence: Synthetic oligonucleotide
  Target: LAMA2; (-) strand; PAM type: NRG; PAM sequence: AGG
tagggaacatgattgtaatg

SEQ ID NO: 52306 - DNA, 20 bp, Artificial Sequence
  Description of Artificial Sequence: Synthetic oligonucleotide
  Target: LAMA2; (-) strand; PAM type: NRG; PAM sequence: GAG
gtagggaacatgattgtaat

SEQ ID NO: 52307 - DNA, 20 bp, Artificial Sequence
  Description of Artificial Sequence: Synthetic oligonucleotide
  Target: LAMA2; (-) strand; PAM type: NRG; PAM sequence: GGG
ctacccaaaaaaggagagta

SEQ ID NO: 52308 - DNA, 20 bp, Artificial Sequence
  Description of Artificial Sequence: Synthetic oligonucleotide
  Target: LAMA2; (-) strand; PAM type: NRG; PAM sequence: AGG
tctacccaaaaaaggagagt

SEQ ID NO: 52309 - DNA, 20 bp, Artificial Sequence
  Description of Artificial Sequence: Synthetic oligonucleotide
  Target: LAMA2; (-) strand; PAM type: NRG; PAM sequence: TAG
ttctacccaaaaaaggagag

SEQ ID NO: 52310 - DNA, 20 bp, Artificial Sequence
  Description of Artificial Sequence: Synthetic oligonucleotide
  Target: LAMA2; (-) strand; PAM type: NRG; PAM sequence: GAG
aatttctacccaaaaaagga

SEQ ID NO: 52311 - DNA, 20 bp, Artificial Sequence
  Description of Artificial Sequence: Synthetic oligonucleotide
  Target: LAMA2; (-) strand; PAM type: NRG; PAM sequence: GAG
ttaatttctacccaaaaaag

SEQ ID NO: 52312 - DNA, 20 bp, Artificial Sequence
  Description of Artificial Sequence: Synthetic oligonucleotide
  Target: LAMA2; (-) strand; PAM type: NRG; PAM sequence: AGG
tattaatttctacccaaaaa

SEQ ID NO: 52313 - DNA, 20 bp, Artificial Sequence
  Description of Artificial Sequence: Synthetic oligonucleotide
  Target: LAMA2; (-) strand; PAM type: NRG; PAM sequence: AAG
ttattaatttctacccaaaa

SEQ ID NO: 52314 - DNA, 20 bp, Artificial Sequence
  Description of Artificial Sequence: Synthetic oligonucleotide
  Target: LAMA2; (-) strand; PAM type: NRG; PAM sequence: CAG
gtccatataattttaaatat

SEQ ID NO: 52315 - DNA, 20 bp, Artificial Sequence
  Description of Artificial Sequence: Synthetic oligonucleotide
  Target: LAMA2; (-) strand; PAM type: NRG; PAM sequence: AAG
agaatatgtttagttttctt

SEQ ID NO: 52316 - DNA, 20 bp, Artificial Sequence
  Description of Artificial Sequence: Synthetic oligonucleotide
  Target: LAMA2; (-) strand; PAM type: NRG; PAM sequence: TAG
tcatatggtaagaatatgtt

SEQ ID NO: 52317 - DNA, 20 bp, Artificial Sequence
  Description of Artificial Sequence: Synthetic oligonucleotide
  Target: LAMA2; (-) strand; PAM type: NRG; PAM sequence: AAG
aattgcctggatcatatggt

SEQ ID NO: 52318 - DNA, 20 bp, Artificial Sequence
  Description of Artificial Sequence: Synthetic oligonucleotide
  Target: LAMA2; (-) strand; PAM type: NRG; PAM sequence: TGG
gcacaattgcctggatcata

SEQ ID NO: 52319 - DNA, 20 bp, Artificial Sequence
  Description of Artificial Sequence: Synthetic oligonucleotide
  Target: LAMA2; (-) strand; PAM type: NRG; PAM sequence: TGG
tacccagaagcacaattgcc

SEQ ID NO: 52320 - DNA, 20 bp, Artificial Sequence
  Description of Artificial Sequence: Synthetic oligonucleotide
  Target: LAMA2; (-) strand; PAM type: NRG; PAM sequence: AAG
tcctttgagtaaatacccag

SEQ ID NO: 52321 - DNA, 20 bp, Artificial Sequence
  Description of Artificial Sequence: Synthetic oligonucleotide
  Target: LAMA2; (-) strand; PAM type: NRG; PAM sequence: CAG
aactcctttgagtaaatacc

SEQ ID NO: 52322 - DNA, 20 bp, Artificial Sequence
  Description of Artificial Sequence: Synthetic oligonucleotide
  Target: LAMA2; (-) strand; PAM type: NRG; PAM sequence: GAG
cacaagtttccaactccttt

SEQ ID NO: 52323 - DNA, 20 bp, Artificial Sequence
  Description of Artificial Sequence: Synthetic oligonucleotide
  Target: LAMA2; (-) strand; PAM type: NRG; PAM sequence: AAG
gaaggtttttgtgtggacac

SEQ ID NO: 52324 - DNA, 20 bp, Artificial Sequence
  Description of Artificial Sequence: Synthetic oligonucleotide
  Target: LAMA2; (-) strand; PAM type: NRG; PAM sequence: TGG
cacatgtgaaggtttttgtg

SEQ ID NO: 52325 - DNA, 20 bp, Artificial Sequence
  Description of Artificial Sequence: Synthetic oligonucleotide
  Target: LAMA2; (-) strand; PAM type: NRG; PAM sequence: AGG
ttctcatatttcacatgtga

SEQ ID NO: 52326 - DNA, 20 bp, Artificial Sequence
  Description of Artificial Sequence: Synthetic oligonucleotide
  Target: LAMA2; (-) strand; PAM type: NRG; PAM sequence: AAG
attctcatatttcacatgtg

SEQ ID NO: 52327 - DNA, 20 bp, Artificial Sequence
  Description of Artificial Sequence: Synthetic oligonucleotide
  Target: LAMA2; (-) strand; PAM type: NRG; PAM sequence: TAG
ctgatctaattttgtcacta

SEQ ID NO: 52328 - DNA, 20 bp, Artificial Sequence
  Description of Artificial Sequence: Synthetic oligonucleotide
  Target: LAMA2; (-) strand; PAM type: NRG; PAM sequence: AGG
caacctccattcccagaaaa

SEQ ID NO: 52329 - DNA, 20 bp, Artificial Sequence
  Description of Artificial Sequence: Synthetic oligonucleotide
  Target: LAMA2; (-) strand; PAM type: NRG; PAM sequence: AAG
ccaacctccattcccagaaa

SEQ ID NO: 52330 - DNA, 20 bp, Artificial Sequence
  Description of Artificial Sequence: Synthetic oligonucleotide
  Target: LAMA2; (-) strand; PAM type: NRG; PAM sequence: CAG
aatcccccaacctccattcc

SEQ ID NO: 52331 - DNA, 20 bp, Artificial Sequence
  Description of Artificial Sequence: Synthetic oligonucleotide
  Target: LAMA2; (-) strand; PAM type: NRG; PAM sequence: CAG
attattgatacaactgctat

SEQ ID NO: 52332 - DNA, 20 bp, Artificial Sequence
  Description of Artificial Sequence: Synthetic oligonucleotide
  Target: LAMA2; (-) strand; PAM type: NRG; PAM sequence: AAG
aaaacaccttggttggttcc

SEQ ID NO: 52333 - DNA, 20 bp, Artificial Sequence
  Description of Artificial Sequence: Synthetic oligonucleotide
  Target: LAMA2; (-) strand; PAM type: NRG; PAM sequence: TGG
ctaatgaaaaacaccttggt

SEQ ID NO: 52334 - DNA, 20 bp, Artificial Sequence
  Description of Artificial Sequence: Synthetic oligonucleotide
  Target: LAMA2; (-) strand; PAM type: NRG; PAM sequence: TGG
tcatctaatgaaaaacacct

SEQ ID NO: 52335 - DNA, 20 bp, Artificial Sequence
  Description of Artificial Sequence: Synthetic oligonucleotide
  Target: LAMA2; (-) strand; PAM type: NRG; PAM sequence: CAG
ttcgttatcttgaagtacca

SEQ ID NO: 52336 - DNA, 20 bp, Artificial Sequence
  Description of Artificial Sequence: Synthetic oligonucleotide
  Target: LAMA2; (-) strand; PAM type: NRG; PAM sequence: AAG
aaaaatatttcgttatcttg

SEQ ID NO: 52337 - DNA, 20 bp, Artificial Sequence
  Description of Artificial Sequence: Synthetic oligonucleotide
  Target: LAMA2; (-) strand; PAM type: NRG; PAM sequence: TAG
cttgatagctcatttctttt

SEQ ID NO: 52338 - DNA, 20 bp, Artificial Sequence
  Description of Artificial Sequence: Synthetic oligonucleotide
  Target: LAMA2; (-) strand; PAM type: NRG; PAM sequence: TAG
ttcctcttttcatggcttga

SEQ ID NO: 52339 - DNA, 20 bp, Artificial Sequence
  Description of Artificial Sequence: Synthetic oligonucleotide
  Target: LAMA2; (-) strand; PAM type: NRG; PAM sequence: TGG
atttaagtttcctcttttca

SEQ ID NO: 52340 - DNA, 20 bp, Artificial Sequence
  Description of Artificial Sequence: Synthetic oligonucleotide
  Target: LAMA2; (-) strand; PAM type: NRG; PAM sequence: AAG
tcacttagtaatatgcattt

SEQ ID NO: 52341 - DNA, 20 bp, Artificial Sequence
  Description of Artificial Sequence: Synthetic oligonucleotide
  Target: LAMA2; (-) strand; PAM type: NRG; PAM sequence: TAG
tcagataagtttctttcact

SEQ ID NO: 52342 - DNA, 20 bp, Artificial Sequence
  Description of Artificial Sequence: Synthetic oligonucleotide
  Target: LAMA2; (-) strand; PAM type: NRG; PAM sequence: AAG
caatatatagcctttcagat

SEQ ID NO: 52343 - DNA, 20 bp, Artificial Sequence
  Description of Artificial Sequence: Synthetic oligonucleotide
  Target: LAMA2; (-) strand; PAM type: NRG; PAM sequence: CAG
tcatacaatatatagccttt

SEQ ID NO: 52344 - DNA, 20 bp, Artificial Sequence
  Description of Artificial Sequence: Synthetic oligonucleotide
  Target: LAMA2; (-) strand; PAM type: NRG; PAM sequence: TAG
atttggaatcatacaatata

SEQ ID NO: 52345 - DNA, 20 bp, Artificial Sequence
  Description of Artificial Sequence: Synthetic oligonucleotide
  Target: LAMA2; (-) strand; PAM type: NRG; PAM sequence: TGG
tttccaaaaggtcatatatt

SEQ ID NO: 52346 - DNA, 20 bp, Artificial Sequence
  Description of Artificial Sequence: Synthetic oligonucleotide
  Target: LAMA2; (-) strand; PAM type: NRG; PAM sequence: AGG
ttagttttaccttttccaaa

SEQ ID NO: 52347 - DNA, 20 bp, Artificial Sequence
  Description of Artificial Sequence: Synthetic oligonucleotide
  Target: LAMA2; (-) strand; PAM type: NRG; PAM sequence: AAG
cttagttttaccttttccaa

SEQ ID NO: 52348 - DNA, 20 bp, Artificial Sequence
  Description of Artificial Sequence: Synthetic oligonucleotide
  Target: LAMA2; (-) strand; PAM type: NRG; PAM sequence: TAG
tgatctttttactgtcccct

SEQ ID NO: 52349 - DNA, 20 bp, Artificial Sequence
  Description of Artificial Sequence: Synthetic oligonucleotide
  Target: LAMA2; (-) strand; PAM type: NRG; PAM sequence: TGG
ctgtccccacctccaaacac

SEQ ID NO: 52350 - DNA, 20 bp, Artificial Sequence
  Description of Artificial Sequence: Synthetic oligonucleotide
  Target: LAMA2; (-) strand; PAM type: NRG; PAM sequence: GAG
tagagtaattttactgccct

SEQ ID NO: 52351 - DNA, 20 bp, Artificial Sequence
  Description of Artificial Sequence: Synthetic oligonucleotide
  Target: LAMA2; (-) strand; PAM type: NRG; PAM sequence: GAG
caacattacactatcatata

SEQ ID NO: 52352 - DNA, 20 bp, Artificial Sequence
  Description of Artificial Sequence: Synthetic oligonucleotide
  Target: LAMA2; (-) strand; PAM type: NRG; PAM sequence: TAG
tccaacattacactatcata

SEQ ID NO: 52353 - DNA, 20 bp, Artificial Sequence
  Description of Artificial Sequence: Synthetic oligonucleotide
  Target: LAMA2; (-) strand; PAM type: NRG; PAM sequence: AGG
ccgatttcatagtttacatt

SEQ ID NO: 52354 - DNA, 20 bp, Artificial Sequence
  Description of Artificial Sequence: Synthetic oligonucleotide
  Target: LAMA2; (-) strand; PAM type: NRG; PAM sequence: TAG
tccgatttcatagtttacat

SEQ ID NO: 52355 - DNA, 20 bp, Artificial Sequence
  Description of Artificial Sequence: Synthetic oligonucleotide
  Target: LAMA2; (-) strand; PAM type: NRG; PAM sequence: TAG
tcattatcactccgatttca

SEQ ID NO: 52356 - DNA, 20 bp, Artificial Sequence
  Description of Artificial Sequence: Synthetic oligonucleotide
  Target: LAMA2; (-) strand; PAM type: NRG; PAM sequence: GAG
tttatcaacatgccccatca

SEQ ID NO: 52357 - DNA, 20 bp, Artificial Sequence
  Description of Artificial Sequence: Synthetic oligonucleotide
  Target: LAMA2; (-) strand; PAM type: NRG; PAM sequence: CAG
cctttatcaacatgccccat

SEQ ID NO: 52358 - DNA, 20 bp, Artificial Sequence
  Description of Artificial Sequence: Synthetic oligonucleotide
  Target: LAMA2; (-) strand; PAM type: NRG; PAM sequence: TAG
cctctgacccaacacattca

SEQ ID NO: 52359 - DNA, 20 bp, Artificial Sequence
  Description of Artificial Sequence: Synthetic oligonucleotide
  Target: LAMA2; (-) strand; PAM type: NRG; PAM sequence: GAG
aaagttgagcagaaggtaca

SEQ ID NO: 52360 - DNA, 20 bp, Artificial Sequence
  Description of Artificial Sequence: Synthetic oligonucleotide
  Target: LAMA2; (-) strand; PAM type: NRG; PAM sequence: CAG
acaaagttgagcagaaggta

SEQ ID NO: 52361 - DNA, 20 bp, Artificial Sequence
  Description of Artificial Sequence: Synthetic oligonucleotide
  Target: LAMA2; (-) strand; PAM type: NRG; PAM sequence: AGG
tcacaacaaagttgagcaga

SEQ ID NO: 52362 - DNA, 20 bp, Artificial Sequence
  Description of Artificial Sequence: Synthetic oligonucleotide
  Target: LAMA2; (-) strand; PAM type: NRG; PAM sequence: AAG
ttcacaacaaagttgagcag

SEQ ID NO: 52363 - DNA, 20 bp, Artificial Sequence
  Description of Artificial Sequence: Synthetic oligonucleotide
  Target: LAMA2; (-) strand; PAM type: NRG; PAM sequence: CAG
agattcacaacaaagttgag

SEQ ID NO: 52364 - DNA, 20 bp, Artificial Sequence
  Description of Artificial Sequence: Synthetic oligonucleotide
  Target: LAMA2; (-) strand; PAM type: NRG; PAM sequence: GAG
tttagattcacaacaaagtt

SEQ ID NO: 52365 - DNA, 20 bp, Artificial Sequence
  Description of Artificial Sequence: Synthetic oligonucleotide
  Target: LAMA2; (-) strand; PAM type: NRG; PAM sequence: AAG
gctgttttagattcacaaca

SEQ ID NO: 52366 - DNA, 20 bp, Artificial Sequence
  Description of Artificial Sequence: Synthetic oligonucleotide
  Target: LAMA2; (-) strand; PAM type: NRG; PAM sequence: TAG
actattgtttagagctgttt

SEQ ID NO: 52367 - DNA, 20 bp, Artificial Sequence
  Description of Artificial Sequence: Synthetic oligonucleotide
  Target: LAMA2; (-) strand; PAM type: NRG; PAM sequence: GAG
ttttaatagactattgttta

SEQ ID NO: 52368 - DNA, 20 bp, Artificial Sequence
  Description of Artificial Sequence: Synthetic oligonucleotide
  Target: LAMA2; (-) strand; PAM type: NRG; PAM sequence: TAG
aattttaatagactattgtt

SEQ ID NO: 52369 - DNA, 20 bp, Artificial Sequence
  Description of Artificial Sequence: Synthetic oligonucleotide
  Target: LAMA2; (-) strand; PAM type: NRG; PAM sequence: TAG
attttattttttaattttaa

SEQ ID NO: 52370 - DNA, 20 bp, Artificial Sequence
  Description of Artificial Sequence: Synthetic oligonucleotide
  Target: LAMA2; (-) strand; PAM type: NRG; PAM sequence: AAG
taaaaatctattcattggtg

SEQ ID NO: 52371 - DNA, 20 bp, Artificial Sequence
  Description of Artificial Sequence: Synthetic oligonucleotide
  Target: LAMA2; (-) strand; PAM type: NRG; PAM sequence: TGG
ttaggtaaaaatctattcat

SEQ ID NO: 52372 - DNA, 20 bp, Artificial Sequence
  Description of Artificial Sequence: Synthetic oligonucleotide
  Target: LAMA2; (-) strand; PAM type: NRG; PAM sequence: AGG
tcacatattatgtaatattt

SEQ ID NO: 52373 - DNA, 20 bp, Artificial Sequence
  Description of Artificial Sequence: Synthetic oligonucleotide
  Target: LAMA2; (-) strand; PAM type: NRG; PAM sequence: TAG
ttcacatattatgtaatatt

SEQ ID NO: 52374 - DNA, 20 bp, Artificial Sequence
  Description of Artificial Sequence: Synthetic oligonucleotide
  Target: LAMA2; (-) strand; PAM type: NRG; PAM sequence: AGG
aaaattatctttactatttt

SEQ ID NO: 52375 - DNA, 20 bp, Artificial Sequence
  Description of Artificial Sequence: Synthetic oligonucleotide
  Target: LAMA2; (-) strand; PAM type: NRG; PAM sequence: TAG
caaaattatctttactattt

SEQ ID NO: 52376 - DNA, 20 bp, Artificial Sequence
  Description of Artificial Sequence: Synthetic oligonucleotide
  Target: LAMA2; (-) strand; PAM type: NRG; PAM sequence: AGG
gtgagcctcaaagttaggta

SEQ ID NO: 52377 - DNA, 20 bp, Artificial Sequence
  Description of Artificial Sequence: Synthetic oligonucleotide
  Target: LAMA2; (-) strand; PAM type: NRG; PAM sequence: AAG
agtgagcctcaaagttaggt

SEQ ID NO: 52378 - DNA, 20 bp, Artificial Sequence
  Description of Artificial Sequence: Synthetic oligonucleotide
  Target: LAMA2; (-) strand; PAM type: NRG; PAM sequence: AGG
ttacagtgagcctcaaagtt

SEQ ID NO: 52379 - DNA, 20 bp, Artificial Sequence
  Description of Artificial Sequence: Synthetic oligonucleotide
  Target: LAMA2; (-) strand; PAM type: NRG; PAM sequence: TAG
tttacagtgagcctcaaagt

SEQ ID NO: 52380 - DNA, 20 bp, Artificial Sequence
  Description of Artificial Sequence: Synthetic oligonucleotide
  Target: LAMA2; (-) strand; PAM type: NRG; PAM sequence: AAG
tagctttacagtgagcctca

SEQ ID NO: 52381 - DNA, 20 bp, Artificial Sequence
  Description of Artificial Sequence: Synthetic oligonucleotide
  Target: LAMA2; (-) strand; PAM type: NRG; PAM sequence: GAG
tattactgtagctttacagt

SEQ ID NO: 52382 - DNA, 20 bp, Artificial Sequence
  Description of Artificial Sequence: Synthetic oligonucleotide
  Target: LAMA2; (-) strand; PAM type: NRG; PAM sequence: CAG
tctctattactgtagcttta

SEQ ID NO: 52383 - DNA, 20 bp, Artificial Sequence
  Description of Artificial Sequence: Synthetic oligonucleotide
  Target: LAMA2; (-) strand; PAM type: NRG; PAM sequence: TAG
tatcacagtctctattactg

SEQ ID NO: 52384 - DNA, 20 bp, Artificial Sequence
  Description of Artificial Sequence: Synthetic oligonucleotide
  Target: LAMA2; (-) strand; PAM type: NRG; PAM sequence: CAG
atctccttattccactatca

SEQ ID NO: 52385 - DNA, 20 bp, Artificial Sequence
  Description of Artificial Sequence: Synthetic oligonucleotide
  Target: LAMA2; (-) strand; PAM type: NRG; PAM sequence: TGG
tggcatatatatatatataa

SEQ ID NO: 52386 - DNA, 20 bp, Artificial Sequence
  Description of Artificial Sequence: Synthetic oligonucleotide
  Target: LAMA2; (-) strand; PAM type: NRG; PAM sequence: TGG
aatggcatatatatatataa

SEQ ID NO: 52387 - DNA, 20 bp, Artificial Sequence
  Description of Artificial Sequence: Synthetic oligonucleotide
  Target: LAMA2; (-) strand; PAM type: NRG; PAM sequence: TGG
aatggcatatatatatataa

SEQ ID NO: 52388 - DNA, 20 bp, Artificial Sequence
  Description of Artificial Sequence: Synthetic oligonucleotide
  Target: LAMA2; (-) strand; PAM type: NRG; PAM sequence: TGG
aatggcatatatatatataa

SEQ ID NO: 52389 - DNA, 20 bp, Artificial Sequence
  Description of Artificial Sequence: Synthetic oligonucleotide
  Target: LAMA2; (-) strand; PAM type: NRG; PAM sequence: TGG
atatatatatatatataaaa

SEQ ID NO: 52390 - DNA, 20 bp, Artificial Sequence
  Description of Artificial Sequence: Synthetic oligonucleotide
  Target: LAMA2; (-) strand; PAM type: NRG; PAM sequence: TGG
tttttggactctcttttcat

SEQ ID NO: 52391 - DNA, 20 bp, Artificial Sequence
  Description of Artificial Sequence: Synthetic oligonucleotide
  Target: LAMA2; (-) strand; PAM type: NRG; PAM sequence: TGG
accacgtgtgggtctatttt

SEQ ID NO: 52392 - DNA, 20 bp, Artificial Sequence
  Description of Artificial Sequence: Synthetic oligonucleotide
  Target: LAMA2; (-) strand; PAM type: NRG; PAM sequence: GGG
aaagtcaattgaccacgtgt

SEQ ID NO: 52393 - DNA, 20 bp, Artificial Sequence
  Description of Artificial Sequence: Synthetic oligonucleotide
  Target: LAMA2; (-) strand; PAM type: NRG; PAM sequence: TGG
aaaagtcaattgaccacgtg

SEQ ID NO: 52394 - DNA, 20 bp, Artificial Sequence
  Description of Artificial Sequence: Synthetic oligonucleotide
  Target: LAMA2; (-) strand; PAM type: NRG; PAM sequence: AAG
taccttggatcttttttcaa

SEQ ID NO: 52395 - DNA, 20 bp, Artificial Sequence
  Description of Artificial Sequence: Synthetic oligonucleotide
  Target: LAMA2; (-) strand; PAM type: NRG; PAM sequence: TGG
atttcctcgtctaattacct

SEQ ID NO: 52396 - DNA, 20 bp, Artificial Sequence
  Description of Artificial Sequence: Synthetic oligonucleotide
  Target: LAMA2; (-) strand; PAM type: NRG; PAM sequence: AAG
ttcatcatcatttgttgaga

SEQ ID NO: 52397 - DNA, 20 bp, Artificial Sequence
  Description of Artificial Sequence: Synthetic oligonucleotide
  Target: LAMA2; (-) strand; PAM type: NRG; PAM sequence: GAG
tcacttcatcatcatttgtt

SEQ ID NO: 52398 - DNA, 20 bp, Artificial Sequence
  Description of Artificial Sequence: Synthetic oligonucleotide
  Target: LAMA2; (-) strand; PAM type: NRG; PAM sequence: TAG
aagggctttctttttccatg

SEQ ID NO: 52399 - DNA, 20 bp, Artificial Sequence
  Description of Artificial Sequence: Synthetic oligonucleotide
  Target: LAMA2; (-) strand; PAM type: NRG; PAM sequence: GGG
tgaagtagaggcttaggtaa

SEQ ID NO: 52400 - DNA, 20 bp, Artificial Sequence
  Description of Artificial Sequence: Synthetic oligonucleotide
  Target: LAMA2; (-) strand; PAM type: NRG; PAM sequence: AGG
gtgaagtagaggcttaggta

SEQ ID NO: 52401 - DNA, 20 bp, Artificial Sequence
  Description of Artificial Sequence: Synthetic oligonucleotide
  Target: LAMA2; (-) strand; PAM type: NRG; PAM sequence: AAG
tgtgaagtagaggcttaggt

SEQ ID NO: 52402 - DNA, 20 bp, Artificial Sequence
  Description of Artificial Sequence: Synthetic oligonucleotide
  Target: LAMA2; (-) strand; PAM type: NRG; PAM sequence: AGG
ttgctgtgaagtagaggctt

SEQ ID NO: 52403 - DNA, 20 bp, Artificial Sequence
  Description of Artificial Sequence: Synthetic oligonucleotide
  Target: LAMA2; (-) strand; PAM type: NRG; PAM sequence: TAG
tttgctgtgaagtagaggct

SEQ ID NO: 52404 - DNA, 20 bp, Artificial Sequence
  Description of Artificial Sequence: Synthetic oligonucleotide
  Target: LAMA2; (-) strand; PAM type: NRG; PAM sequence: AGG
tggtgtttgctgtgaagtag

SEQ ID NO: 52405 - DNA, 20 bp, Artificial Sequence
  Description of Artificial Sequence: Synthetic oligonucleotide
  Target: LAMA2; (-) strand; PAM type: NRG; PAM sequence: GAG
ttggtgtttgctgtgaagta

SEQ ID NO: 52406 - DNA, 20 bp, Artificial Sequence
  Description of Artificial Sequence: Synthetic oligonucleotide
  Target: LAMA2; (-) strand; PAM type: NRG; PAM sequence: TAG
ttttggtgtttgctgtgaag

SEQ ID NO: 52407 - DNA, 20 bp, Artificial Sequence
  Description of Artificial Sequence: Synthetic oligonucleotide
  Target: LAMA2; (-) strand; PAM type: NRG; PAM sequence: AAG
aaattttggtgtttgctgtg

SEQ ID NO: 52408 - DNA, 20 bp, Artificial Sequence
  Description of Artificial Sequence: Synthetic oligonucleotide
  Target: LAMA2; (-) strand; PAM type: NRG; PAM sequence: TGG
gatttatttccagcaaattt

SEQ ID NO: 52409 - DNA, 20 bp, Artificial Sequence
  Description of Artificial Sequence: Synthetic oligonucleotide
  Target: LAMA2; (-) strand; PAM type: NRG; PAM sequence: CAG
ttgggtctatgatttatttc

SEQ ID NO: 52410 - DNA, 20 bp, Artificial Sequence
  Description of Artificial Sequence: Synthetic oligonucleotide
  Target: LAMA2; (-) strand; PAM type: NRG; PAM sequence: GGG
tagtcttagcttctacagtt

SEQ ID NO: 52411 - DNA, 20 bp, Artificial Sequence
  Description of Artificial Sequence: Synthetic oligonucleotide
  Target: LAMA2; (-) strand; PAM type: NRG; PAM sequence: TGG
atagtcttagcttctacagt

SEQ ID NO: 52412 - DNA, 20 bp, Artificial Sequence
  Description of Artificial Sequence: Synthetic oligonucleotide
  Target: LAMA2; (-) strand; PAM type: NRG; PAM sequence: CAG
ttttatagtcttagcttcta

SEQ ID NO: 52413 - DNA, 20 bp, Artificial Sequence
  Description of Artificial Sequence: Synthetic oligonucleotide
  Target: LAMA2; (-) strand; PAM type: NRG; PAM sequence: TAG
ttctagagattttatagtct

SEQ ID NO: 52414 - DNA, 20 bp, Artificial Sequence
  Description of Artificial Sequence: Synthetic oligonucleotide
  Target: LAMA2; (-) strand; PAM type: NRG; PAM sequence: TAG
ttttttttctagagatttta

SEQ ID NO: 52415 - DNA, 20 bp, Artificial Sequence
  Description of Artificial Sequence: Synthetic oligonucleotide
  Target: LAMA2; (-) strand; PAM type: NRG; PAM sequence: GAG
tcttctttattttttttcta

SEQ ID NO: 52416 - DNA, 20 bp, Artificial Sequence
  Description of Artificial Sequence: Synthetic oligonucleotide
  Target: LAMA2; (-) strand; PAM type: NRG; PAM sequence: TAG
tatcttctttattttttttc

SEQ ID NO: 52417 - DNA, 20 bp, Artificial Sequence
  Description of Artificial Sequence: Synthetic oligonucleotide
  Target: LAMA2; (-) strand; PAM type: NRG; PAM sequence: AAG
agaaatcattgcctacacca

SEQ ID NO: 52418 - DNA, 20 bp, Artificial Sequence
  Description of Artificial Sequence: Synthetic oligonucleotide
  Target: LAMA2; (-) strand; PAM type: NRG; PAM sequence: CAG
ttaatattttttgtcccttt

SEQ ID NO: 52419 - DNA, 20 bp, Artificial Sequence
  Description of Artificial Sequence: Synthetic oligonucleotide
  Target: LAMA2; (-) strand; PAM type: NRG; PAM sequence: AAG
ggagtgctttcaaagagcag

SEQ ID NO: 52420 - DNA, 20 bp, Artificial Sequence
  Description of Artificial Sequence: Synthetic oligonucleotide
  Target: LAMA2; (-) strand; PAM type: NRG; PAM sequence: CAG
tttggagtgctttcaaagag

SEQ ID NO: 52421 - DNA, 20 bp, Artificial Sequence
  Description of Artificial Sequence: Synthetic oligonucleotide
  Target: LAMA2; (-) strand; PAM type: NRG; PAM sequence: GAG
gcatttggagtgctttcaaa

SEQ ID NO: 52422 - DNA, 20 bp, Artificial Sequence
  Description of Artificial Sequence: Synthetic oligonucleotide
  Target: LAMA2; (-) strand; PAM type: NRG; PAM sequence: AAG
ttgcatttggagtgctttca

SEQ ID NO: 52423 - DNA, 20 bp, Artificial Sequence
  Description of Artificial Sequence: Synthetic oligonucleotide
  Target: LAMA2; (-) strand; PAM type: NRG; PAM sequence: GAG
gtggcttgactttgcatttg

SEQ ID NO: 52424 - DNA, 20 bp, Artificial Sequence
  Description of Artificial Sequence: Synthetic oligonucleotide
  Target: LAMA2; (-) strand; PAM type: NRG; PAM sequence: TGG
ctgtggcttgactttgcatt

SEQ ID NO: 52425 - DNA, 20 bp, Artificial Sequence
  Description of Artificial Sequence: Synthetic oligonucleotide
  Target: LAMA2; (-) strand; PAM type: NRG; PAM sequence: TGG
tatgtattgttctcaatctg

SEQ ID NO: 52426 - DNA, 20 bp, Artificial Sequence
  Description of Artificial Sequence: Synthetic oligonucleotide
  Target: LAMA2; (-) strand; PAM type: NRG; PAM sequence: AAG
ctagagaaaagacctttgtc

SEQ ID NO: 52427 - DNA, 20 bp, Artificial Sequence
  Description of Artificial Sequence: Synthetic oligonucleotide
  Target: LAMA2; (-) strand; PAM type: NRG; PAM sequence: AAG
taaatacatattctagagaa

SEQ ID NO: 52428 - DNA, 20 bp, Artificial Sequence
  Description of Artificial Sequence: Synthetic oligonucleotide
  Target: LAMA2; (-) strand; PAM type: NRG; PAM sequence: GAG
agatttaaatacatattcta

SEQ ID NO: 52429 - DNA, 20 bp, Artificial Sequence
  Description of Artificial Sequence: Synthetic oligonucleotide
  Target: LAMA2; (-) strand; PAM type: NRG; PAM sequence: TAG
taagatttaaatacatattc

SEQ ID NO: 52430 - DNA, 20 bp, Artificial Sequence
  Description of Artificial Sequence: Synthetic oligonucleotide
  Target: LAMA2; (-) strand; PAM type: NRG; PAM sequence: AAG
ttgtttgccagattattaat

SEQ ID NO: 52431 - DNA, 20 bp, Artificial Sequence
  Description of Artificial Sequence: Synthetic oligonucleotide
  Target: LAMA2; (-) strand; PAM type: NRG; PAM sequence: CAG
gctcattttgctttgtttgc

SEQ ID NO: 52432 - DNA, 20 bp, Artificial Sequence
  Description of Artificial Sequence: Synthetic oligonucleotide
  Target: LAMA2; (-) strand; PAM type: NRG; PAM sequence: TGG
gtgtggtgatacctcattgg

SEQ ID NO: 52433 - DNA, 20 bp, Artificial Sequence
  Description of Artificial Sequence: Synthetic oligonucleotide
  Target: LAMA2; (-) strand; PAM type: NRG; PAM sequence: TGG
cttgtgtggtgatacctcat

SEQ ID NO: 52434 - DNA, 20 bp, Artificial Sequence
  Description of Artificial Sequence: Synthetic oligonucleotide
  Target: LAMA2; (-) strand; PAM type: NRG; PAM sequence: TGG
tagccattctagtgcttgtg

SEQ ID NO: 52435 - DNA, 20 bp, Artificial Sequence
  Description of Artificial Sequence: Synthetic oligonucleotide
  Target: LAMA2; (-) strand; PAM type: NRG; PAM sequence: TAG
ttgttacattttagccattc

SEQ ID NO: 52436 - DNA, 20 bp, Artificial Sequence
  Description of Artificial Sequence: Synthetic oligonucleotide
  Target: LAMA2; (-) strand; PAM type: NRG; PAM sequence: TAG
catctaatattgttacattt

SEQ ID NO: 52437 - DNA, 20 bp, Artificial Sequence
  Description of Artificial Sequence: Synthetic oligonucleotide
  Target: LAMA2; (-) strand; PAM type: NRG; PAM sequence: TGG
taggagttccagatgctcta

SEQ ID NO: 52438 - DNA, 20 bp, Artificial Sequence
  Description of Artificial Sequence: Synthetic oligonucleotide
  Target: LAMA2; (-) strand; PAM type: NRG; PAM sequence: CAG
acagcaatatataggagttc

SEQ ID NO: 52439 - DNA, 20 bp, Artificial Sequence
  Description of Artificial Sequence: Synthetic oligonucleotide
  Target: LAMA2; (-) strand; PAM type: NRG; PAM sequence: GAG
cctcccacagcaatatatag

SEQ ID NO: 52440 - DNA, 20 bp, Artificial Sequence
  Description of Artificial Sequence: Synthetic oligonucleotide
  Target: LAMA2; (-) strand; PAM type: NRG; PAM sequence: AGG
ttcctcccacagcaatatat

SEQ ID NO: 52441 - DNA, 20 bp, Artificial Sequence
  Description of Artificial Sequence: Synthetic oligonucleotide
  Target: LAMA2; (-) strand; PAM type: NRG; PAM sequence: TAG
attcctcccacagcaatata

SEQ ID NO: 52442 - DNA, 20 bp, Artificial Sequence
  Description of Artificial Sequence: Synthetic oligonucleotide
  Target: LAMA2; (-) strand; PAM type: NRG; PAM sequence: CAG
ataattttacattcctccca

SEQ ID NO: 52443 - DNA, 20 bp, Artificial Sequence
  Description of Artificial Sequence: Synthetic oligonucleotide
  Target: LAMA2; (-) strand; PAM type: NRG; PAM sequence: TAG
tatattatcaggtatgtaat

SEQ ID NO: 52444 - DNA, 20 bp, Artificial Sequence
  Description of Artificial Sequence: Synthetic oligonucleotide
  Target: LAMA2; (-) strand; PAM type: NRG; PAM sequence: AGG
gtcttaggagttatattatc

SEQ ID NO: 52445 - DNA, 20 bp, Artificial Sequence
  Description of Artificial Sequence: Synthetic oligonucleotide
  Target: LAMA2; (-) strand; PAM type: NRG; PAM sequence: CAG
agtcttaggagttatattat

SEQ ID NO: 52446 - DNA, 20 bp, Artificial Sequence
  Description of Artificial Sequence: Synthetic oligonucleotide
  Target: LAMA2; (-) strand; PAM type: NRG; PAM sequence: GAG
ctattcctatcaagtcttag

SEQ ID NO: 52447 - DNA, 20 bp, Artificial Sequence
  Description of Artificial Sequence: Synthetic oligonucleotide
  Target: LAMA2; (-) strand; PAM type: NRG; PAM sequence: AGG
ctctattcctatcaagtctt

SEQ ID NO: 52448 - DNA, 20 bp, Artificial Sequence
  Description of Artificial Sequence: Synthetic oligonucleotide
  Target: LAMA2; (-) strand; PAM type: NRG; PAM sequence: TAG
tctctattcctatcaagtct

SEQ ID NO: 52449 - DNA, 20 bp, Artificial Sequence
  Description of Artificial Sequence: Synthetic oligonucleotide
  Target: LAMA2; (-) strand; PAM type: NRG; PAM sequence: AAG
tatatttctctattcctatc

SEQ ID NO: 52450 - DNA, 20 bp, Artificial Sequence
  Description of Artificial Sequence: Synthetic oligonucleotide
  Target: LAMA2; (-) strand; PAM type: NRG; PAM sequence: TGG
atttaaacacagtgttcgca

SEQ ID NO: 52451 - DNA, 20 bp, Artificial Sequence
  Description of Artificial Sequence: Synthetic oligonucleotide
  Target: LAMA2; (-) strand; PAM type: NRG; PAM sequence: CAG
ttgctatgattatttaaaca

SEQ ID NO: 52452 - DNA, 20 bp, Artificial Sequence
  Description of Artificial Sequence: Synthetic oligonucleotide
  Target: LAMA2; (-) strand; PAM type: NRG; PAM sequence: AAG
tgttccagtttggggctatg

SEQ ID NO: 52453 - DNA, 20 bp, Artificial Sequence
  Description of Artificial Sequence: Synthetic oligonucleotide
  Target: LAMA2; (-) strand; PAM type: NRG; PAM sequence: GGG
atttgggttgttccagtttg

SEQ ID NO: 52454 - DNA, 20 bp, Artificial Sequence
  Description of Artificial Sequence: Synthetic oligonucleotide
  Target: LAMA2; (-) strand; PAM type: NRG; PAM sequence: GGG
catttgggttgttccagttt

SEQ ID NO: 52455 - DNA, 20 bp, Artificial Sequence
  Description of Artificial Sequence: Synthetic oligonucleotide
  Target: LAMA2; (-) strand; PAM type: NRG; PAM sequence: TGG
acatttgggttgttccagtt

SEQ ID NO: 52456 - DNA, 20 bp, Artificial Sequence
  Description of Artificial Sequence: Synthetic oligonucleotide
  Target: LAMA2; (-) strand; PAM type: NRG; PAM sequence: CAG
aaagtacatttgggttgttc

SEQ ID NO: 52457 - DNA, 20 bp, Artificial Sequence
  Description of Artificial Sequence: Synthetic oligonucleotide
  Target: LAMA2; (-) strand; PAM type: NRG; PAM sequence: GGG
tcaactattaaagtacattt

SEQ ID NO: 52458 - DNA, 20 bp, Artificial Sequence
  Description of Artificial Sequence: Synthetic oligonucleotide
  Target: LAMA2; (-) strand; PAM type: NRG; PAM sequence: TGG
ttcaactattaaagtacatt

SEQ ID NO: 52459 - DNA, 20 bp, Artificial Sequence
  Description of Artificial Sequence: Synthetic oligonucleotide
  Target: LAMA2; (-) strand; PAM type: NRG; PAM sequence: AAG
tttaatacattcaactatta

SEQ ID NO: 52460 - DNA, 20 bp, Artificial Sequence
  Description of Artificial Sequence: Synthetic oligonucleotide
  Target: LAMA2; (-) strand; PAM type: NRG; PAM sequence: TGG
atctatcattctatatcgta

SEQ ID NO: 52461 - DNA, 20 bp, Artificial Sequence
  Description of Artificial Sequence: Synthetic oligonucleotide
  Target: LAMA2; (-) strand; PAM type: NRG; PAM sequence: TAG
ataatattctatcattctaa

SEQ ID NO: 52462 - DNA, 20 bp, Artificial Sequence
  Description of Artificial Sequence: Synthetic oligonucleotide
  Target: LAMA2; (-) strand; PAM type: NRG; PAM sequence: CAG
tatagtcatgttgcttatat

SEQ ID NO: 52463 - DNA, 20 bp, Artificial Sequence
  Description of Artificial Sequence: Synthetic oligonucleotide
  Target: LAMA2; (-) strand; PAM type: NRG; PAM sequence: TAG
tgcaacatgttttggaggta

SEQ ID NO: 52464 - DNA, 20 bp, Artificial Sequence
  Description of Artificial Sequence: Synthetic oligonucleotide
  Target: LAMA2; (-) strand; PAM type: NRG; PAM sequence: AGG
cactttgcaacatgttttgg

SEQ ID NO: 52465 - DNA, 20 bp, Artificial Sequence
  Description of Artificial Sequence: Synthetic oligonucleotide
  Target: LAMA2; (-) strand; PAM type: NRG; PAM sequence: GAG
tcactttgcaacatgttttg

SEQ ID NO: 52466 - DNA, 20 bp, Artificial Sequence
  Description of Artificial Sequence: Synthetic oligonucleotide
  Target: LAMA2; (-) strand; PAM type: NRG; PAM sequence: TGG
tttcactttgcaacatgttt

SEQ ID NO: 52467 - DNA, 20 bp, Artificial Sequence
  Description of Artificial Sequence: Synthetic oligonucleotide
  Target: LAMA2; (-) strand; PAM type: NRG; PAM sequence: TGG
aaatagtaatcttttgtgtc

SEQ ID NO: 52468 - DNA, 20 bp, Artificial Sequence
  Description of Artificial Sequence: Synthetic oligonucleotide
  Target: LAMA2; (-) strand; PAM type: NRG; PAM sequence: TAG
atgtaaatacaataataaaa

SEQ ID NO: 52469 - DNA, 20 bp, Artificial Sequence
  Description of Artificial Sequence: Synthetic oligonucleotide
  Target: LAMA2; (-) strand; PAM type: NRG; PAM sequence: TAG
ctgatctaattttgtcacta

SEQ ID NO: 52470 - DNA, 20 bp, Artificial Sequence
  Description of Artificial Sequence: Synthetic oligonucleotide
  Target: LAMA2; (-) strand; PAM type: NRG; PAM sequence: AGG
caacctccattcccagaaaa

SEQ ID NO: 52471 - DNA, 20 bp, Artificial Sequence
  Description of Artificial Sequence: Synthetic oligonucleotide
  Target: LAMA2; (-) strand; PAM type: NRG; PAM sequence: AAG
ccaacctccattcccagaaa

SEQ ID NO: 52472 - DNA, 20 bp, Artificial Sequence
  Description of Artificial Sequence: Synthetic oligonucleotide
  Target: LAMA2; (-) strand; PAM type: NRG; PAM sequence: CAG
aatcccccaacctccattcc

SEQ ID NO: 52473 - DNA, 20 bp, Artificial Sequence
  Description of Artificial Sequence: Synthetic oligonucleotide
  Target: LAMA2; (-) strand; PAM type: NRG; PAM sequence: AAG
tctatttctataatctcaaa

SEQ ID NO: 52474 - DNA, 20 bp, Artificial Sequence
  Description of Artificial Sequence: Synthetic oligonucleotide
  Target: LAMA2; (-) strand; PAM type: NRG; PAM sequence: TAG
ctgacaaagtacccaataca

SEQ ID NO: 52475 - DNA, 20 bp, Artificial Sequence
  Description of Artificial Sequence: Synthetic oligonucleotide
  Target: LAMA2; (-) strand; PAM type: NRG; PAM sequence: AAG
atgtaaatactcatctgaca

SEQ ID NO: 52476 - DNA, 20 bp, Artificial Sequence
  Description of Artificial Sequence: Synthetic oligonucleotide
  Target: LAMA2; (-) strand; PAM type: NRG; PAM sequence: TAG
tgctcatttgaaacattttt

SEQ ID NO: 52477 - DNA, 20 bp, Artificial Sequence
  Description of Artificial Sequence: Synthetic oligonucleotide
  Target: LAMA2; (-) strand; PAM type: NRG; PAM sequence: AGG
tttccaaataaacctaaata

SEQ ID NO: 52478 - DNA, 20 bp, Artificial Sequence
  Description of Artificial Sequence: Synthetic oligonucleotide
  Target: LAMA2; (-) strand; PAM type: NRG; PAM sequence: AAG
ttttccaaataaacctaaat

SEQ ID NO: 52479 - DNA, 20 bp, Artificial Sequence
  Description of Artificial Sequence: Synthetic oligonucleotide
  Target: LAMA2; (-) strand; PAM type: NRG; PAM sequence: GAG
aaaatgaaccagtatattta

SEQ ID NO: 52480 - DNA, 20 bp, Artificial Sequence
  Description of Artificial Sequence: Synthetic oligonucleotide
  Target: LAMA2; (-) strand; PAM type: NRG; PAM sequence: TAG
ttaaaatgaaccagtatatt

SEQ ID NO: 52481 - DNA, 20 bp, Artificial Sequence
  Description of Artificial Sequence: Synthetic oligonucleotide
  Target: LAMA2; (-) strand; PAM type: NRG; PAM sequence: CAG
taacccaaattaaaatgaac

SEQ ID NO: 52482 - DNA, 20 bp, Artificial Sequence
  Description of Artificial Sequence: Synthetic oligonucleotide
  Target: LAMA2; (-) strand; PAM type: NRG; PAM sequence: TGG
tacttgtttgattcagcaca

SEQ ID NO: 52483 - DNA, 20 bp, Artificial Sequence
  Description of Artificial Sequence: Synthetic oligonucleotide
  Target: LAMA2; (-) strand; PAM type: NRG; PAM sequence: CAG
tcaactctacttgtttgatt

SEQ ID NO: 52484 - DNA, 20 bp, Artificial Sequence
  Description of Artificial Sequence: Synthetic oligonucleotide
  Target: LAMA2; (-) strand; PAM type: NRG; PAM sequence: AAG
catgaaaatgccttgagaat

SEQ ID NO: 52485 - DNA, 20 bp, Artificial Sequence
  Description of Artificial Sequence: Synthetic oligonucleotide
  Target: LAMA2; (-) strand; PAM type: NRG; PAM sequence: GAG
attttacatgaaaatgcctt

SEQ ID NO: 52486 - DNA, 20 bp, Artificial Sequence
  Description of Artificial Sequence: Synthetic oligonucleotide
  Target: LAMA2; (-) strand; PAM type: NRG; PAM sequence: GAG
tgcagttactgcagttacct

SEQ ID NO: 52487 - DNA, 20 bp, Artificial Sequence
  Description of Artificial Sequence: Synthetic oligonucleotide
  Target: LAMA2; (-) strand; PAM type: NRG; PAM sequence: CAG
ctgcttttctgcagttactg

SEQ ID NO: 52488 - DNA, 20 bp, Artificial Sequence
  Description of Artificial Sequence: Synthetic oligonucleotide
  Target: LAMA2; (-) strand; PAM type: NRG; PAM sequence: CAG
tatttgtacctgcttttctg

SEQ ID NO: 52489 - DNA, 20 bp, Artificial Sequence
  Description of Artificial Sequence: Synthetic oligonucleotide
  Target: LAMA2; (-) strand; PAM type: NRG; PAM sequence: AGG
cttcctctttacattttccc

SEQ ID NO: 52490 - DNA, 20 bp, Artificial Sequence
  Description of Artificial Sequence: Synthetic oligonucleotide
  Target: LAMA2; (-) strand; PAM type: NRG; PAM sequence: CAG
ccttcctctttacattttcc

SEQ ID NO: 52491 - DNA, 20 bp, Artificial Sequence
  Description of Artificial Sequence: Synthetic oligonucleotide
  Target: LAMA2; (-) strand; PAM type: NRG; PAM sequence: TGG
gcagctgctaactctaattg

SEQ ID NO: 52492 - DNA, 20 bp, Artificial Sequence
  Description of Artificial Sequence: Synthetic oligonucleotide
  Target: LAMA2; (-) strand; PAM type: NRG; PAM sequence: CAG
aaaggaaaatcagaatgatg

SEQ ID NO: 52493 - DNA, 20 bp, Artificial Sequence
  Description of Artificial Sequence: Synthetic oligonucleotide
  Target: LAMA2; (-) strand; PAM type: NRG; PAM sequence: CAG
atatttataaaaaggaaaat

SEQ ID NO: 52494 - DNA, 20 bp, Artificial Sequence
  Description of Artificial Sequence: Synthetic oligonucleotide
  Target: LAMA2; (-) strand; PAM type: NRG; PAM sequence: AGG
aataaaaaatatttataaaa

SEQ ID NO: 52495 - DNA, 20 bp, Artificial Sequence
  Description of Artificial Sequence: Synthetic oligonucleotide
  Target: LAMA2; (-) strand; PAM type: NRG; PAM sequence: AAG
taataaaaaatatttataaa

SEQ ID NO: 52496 - DNA, 20 bp, Artificial Sequence
  Description of Artificial Sequence: Synthetic oligonucleotide
  Target: LAMA2; (-) strand; PAM type: NRG; PAM sequence: TAG
gttgtggcctcaactcaaat

SEQ ID NO: 52497 - DNA, 20 bp, Artificial Sequence
  Description of Artificial Sequence: Synthetic oligonucleotide
  Target: LAMA2; (-) strand; PAM type: NRG; PAM sequence: TGG
atttttactcaaccatgttg

SEQ ID NO: 52498 - DNA, 20 bp, Artificial Sequence
  Description of Artificial Sequence: Synthetic oligonucleotide
  Target: LAMA2; (-) strand; PAM type: NRG; PAM sequence: AGG
tttattgaatatttataaaa

SEQ ID NO: 52499 - DNA, 20 bp, Artificial Sequence
  Description of Artificial Sequence: Synthetic oligonucleotide
  Target: LAMA2; (-) strand; PAM type: NRG; PAM sequence: AAG
ttttattgaatatttataaa

SEQ ID NO: 52500 - DNA, 20 bp, Artificial Sequence
  Description of Artificial Sequence: Synthetic oligonucleotide
  Target: LAMA2; (-) strand; PAM type: NRG; PAM sequence: AAG
aaaatatttataaaaaggaa

SEQ ID NO: 52501 - DNA, 20 bp, Artificial Sequence
  Description of Artificial Sequence: Synthetic oligonucleotide
  Target: LAMA2; (-) strand; PAM type: NRG; PAM sequence: AGG
aataaaaaatatttataaaa

SEQ ID NO: 52502 - DNA, 20 bp, Artificial Sequence
  Description of Artificial Sequence: Synthetic oligonucleotide
  Target: LAMA2; (-) strand; PAM type: NRG; PAM sequence: AAG
taataaaaaatatttataaa

SEQ ID NO: 52503 - DNA, 20 bp, Artificial Sequence
  Description of Artificial Sequence: Synthetic oligonucleotide
  Target: LAMA2; (-) strand; PAM type: NRG; PAM sequence: TAG
gttgtggcctcaactcaaat

SEQ ID NO: 52504 - DNA, 20 bp, Artificial Sequence
  Description of Artificial Sequence: Synthetic oligonucleotide
  Target: LAMA2; (-) strand; PAM type: NRG; PAM sequence: TGG
atttttactcaaccacgttg

SEQ ID NO: 52505 - DNA, 20 bp, Artificial Sequence
  Description of Artificial Sequence: Synthetic oligonucleotide
  Target: LAMA2; (-) strand; PAM type: NRG; PAM sequence: CAG
tctaaacctattgctattct

SEQ ID NO: 52506 - DNA, 20 bp, Artificial Sequence
  Description of Artificial Sequence: Synthetic oligonucleotide
  Target: LAMA2; (-) strand; PAM type: NRG; PAM sequence: AGG
aggtacatctaatagcagag

SEQ ID NO: 52507 - DNA, 20 bp, Artificial Sequence
  Description of Artificial Sequence: Synthetic oligonucleotide
  Target: LAMA2; (-) strand; PAM type: NRG; PAM sequence: GAG
caggtacatctaatagcaga

SEQ ID NO: 52508 - DNA, 20 bp, Artificial Sequence
  Description of Artificial Sequence: Synthetic oligonucleotide
  Target: LAMA2; (-) strand; PAM type: NRG; PAM sequence: GAG
ttcaggtacatctaatagca

SEQ ID NO: 52509 - DNA, 20 bp, Artificial Sequence
  Description of Artificial Sequence: Synthetic oligonucleotide
  Target: LAMA2; (-) strand; PAM type: NRG; PAM sequence: CAG
ttttcaggtacatctaatag

SEQ ID NO: 52510 - DNA, 20 bp, Artificial Sequence
  Description of Artificial Sequence: Synthetic oligonucleotide
  Target: LAMA2; (-) strand; PAM type: NRG; PAM sequence: TAG
tgtttttcaggtacatctaa

SEQ ID NO: 52511 - DNA, 20 bp, Artificial Sequence
  Description of Artificial Sequence: Synthetic oligonucleotide
  Target: LAMA2; (-) strand; PAM type: NRG; PAM sequence: AGG
tttgcctagaagtgtttttc

SEQ ID NO: 52512 - DNA, 20 bp, Artificial Sequence
  Description of Artificial Sequence: Synthetic oligonucleotide
  Target: LAMA2; (-) strand; PAM type: NRG; PAM sequence: CAG
ttttgcctagaagtgttttt

SEQ ID NO: 52513 - DNA, 20 bp, Artificial Sequence
  Description of Artificial Sequence: Synthetic oligonucleotide
  Target: LAMA2; (-) strand; PAM type: NRG; PAM sequence: AAG
tttggtctaattttgcctag

SEQ ID NO: 52514 - DNA, 20 bp, Artificial Sequence
  Description of Artificial Sequence: Synthetic oligonucleotide
  Target: LAMA2; (-) strand; PAM type: NRG; PAM sequence: TAG
taatttggtctaattttgcc

SEQ ID NO: 52515 - DNA, 20 bp, Artificial Sequence
  Description of Artificial Sequence: Synthetic oligonucleotide
  Target: LAMA2; (-) strand; PAM type: NRG; PAM sequence: TGG
aagccccagtgtttttaatt

SEQ ID NO: 52516 - DNA, 20 bp, Artificial Sequence
  Description of Artificial Sequence: Synthetic oligonucleotide
  Target: LAMA2; (-) strand; PAM type: NRG; PAM sequence: CAG
gtttattataattgaagccc

SEQ ID NO: 52517 - DNA, 20 bp, Artificial Sequence
  Description of Artificial Sequence: Synthetic oligonucleotide
  Target: LAMA2; (-) strand; PAM type: NRG; PAM sequence: AAG
ttgagagtttattataattg

SEQ ID NO: 52518 - DNA, 20 bp, Artificial Sequence
  Description of Artificial Sequence: Synthetic oligonucleotide
  Target: LAMA2; (-) strand; PAM type: NRG; PAM sequence: GAG
ataataaaacttatatttga

SEQ ID NO: 52519 - DNA, 20 bp, Artificial Sequence
  Description of Artificial Sequence: Synthetic oligonucleotide
  Target: LAMA2; (-) strand; PAM type: NRG; PAM sequence: GAG
caataataaaacttatattt

SEQ ID NO: 52520 - DNA, 20 bp, Artificial Sequence
  Description of Artificial Sequence: Synthetic oligonucleotide
  Target: LAMA2; (-) strand; PAM type: NRG; PAM sequence: TAG
ctgtggaaatttgcaaaatg

SEQ ID NO: 52521 - DNA, 20 bp, Artificial Sequence
  Description of Artificial Sequence: Synthetic oligonucleotide
  Target: LAMA2; (-) strand; PAM type: NRG; PAM sequence: TGG
gtaatccttttaccttactg

SEQ ID NO: 52522 - DNA, 20 bp, Artificial Sequence
  Description of Artificial Sequence: Synthetic oligonucleotide
  Target: LAMA2; (-) strand; PAM type: NRG; PAM sequence: AAG
tctgttaatattataccaga

SEQ ID NO: 52523 - DNA, 20 bp, Artificial Sequence
  Description of Artificial Sequence: Synthetic oligonucleotide
  Target: LAMA2; (-) strand; PAM type: NRG; PAM sequence: CAG
tagttctgttaatattatac

SEQ ID NO: 52524 - DNA, 20 bp, Artificial Sequence
  Description of Artificial Sequence: Synthetic oligonucleotide
  Target: LAMA2; (-) strand; PAM type: NRG; PAM sequence: TAG
ttaatattattcatgtcttt

SEQ ID NO: 52525 - DNA, 20 bp, Artificial Sequence
  Description of Artificial Sequence: Synthetic oligonucleotide
  Target: LAMA2; (-) strand; PAM type: NRG; PAM sequence: AAG
tgattgaaaatcactagcca

SEQ ID NO: 52526 - DNA, 20 bp, Artificial Sequence
  Description of Artificial Sequence: Synthetic oligonucleotide
  Target: LAMA2; (-) strand; PAM type: NRG; PAM sequence: TAG
gagaattgattgaaaatcac

SEQ ID NO: 52527 - DNA, 20 bp, Artificial Sequence
  Description of Artificial Sequence: Synthetic oligonucleotide
  Target: LAMA2; (-) strand; PAM type: NRG; PAM sequence: GAG
taagagagtattgctttgaa

SEQ ID NO: 52528 - DNA, 20 bp, Artificial Sequence
  Description of Artificial Sequence: Synthetic oligonucleotide
  Target: LAMA2; (-) strand; PAM type: NRG; PAM sequence: AAG
attaagagagtattgctttg

SEQ ID NO: 52529 - DNA, 20 bp, Artificial Sequence
  Description of Artificial Sequence: Synthetic oligonucleotide
  Target: LAMA2; (-) strand; PAM type: NRG; PAM sequence: GAG
ttctttcagtaaaattaaga

SEQ ID NO: 52530 - DNA, 20 bp, Artificial Sequence
  Description of Artificial Sequence: Synthetic oligonucleotide
  Target: LAMA2; (-) strand; PAM type: NRG; PAM sequence: GAG
ttttctttcagtaaaattaa

SEQ ID NO: 52531 - DNA, 20 bp, Artificial Sequence
  Description of Artificial Sequence: Synthetic oligonucleotide
  Target: LAMA2; (-) strand; PAM type: NRG; PAM sequence: AAG
aattttctttcagtaaaatt

SEQ ID NO: 52532 - DNA, 20 bp, Artificial Sequence
  Description of Artificial Sequence: Synthetic oligonucleotide
  Target: LAMA2; (-) strand; PAM type: NRG; PAM sequence: CAG
attaaagttgaattttcttt

SEQ ID NO: 52533 - DNA, 20 bp, Artificial Sequence
  Description of Artificial Sequence: Synthetic oligonucleotide
  Target: LAMA2; (-) strand; PAM type: NRG; PAM sequence: AAG
tttatctaaatattatatta

SEQ ID NO: 52534 - DNA, 20 bp, Artificial Sequence
  Description of Artificial Sequence: Synthetic oligonucleotide
  Target: LAMA2; (-) strand; PAM type: NRG; PAM sequence: AAG
tagttttcttttttatagtt

SEQ ID NO: 52535 - DNA, 20 bp, Artificial Sequence
  Description of Artificial Sequence: Synthetic oligonucleotide
  Target: LAMA2; (-) strand; PAM type: NRG; PAM sequence: TAG
atagatagttttctttttta

SEQ ID NO: 52536 - DNA, 20 bp, Artificial Sequence
  Description of Artificial Sequence: Synthetic oligonucleotide
  Target: LAMA2; (-) strand; PAM type: NRG; PAM sequence: TAG
tacatattgtcttatataga

SEQ ID NO: 52537 - DNA, 20 bp, Artificial Sequence
  Description of Artificial Sequence: Synthetic oligonucleotide
  Target: LAMA2; (-) strand; PAM type: NRG; PAM sequence: TAG
gaaatacatattgtcttata

SEQ ID NO: 52538 - DNA, 20 bp, Artificial Sequence
  Description of Artificial Sequence: Synthetic oligonucleotide
  Target: LAMA2; (-) strand; PAM type: NRG; PAM sequence: AAG
ctcctaaggaagttttaccc

SEQ ID NO: 52539 - DNA, 20 bp, Artificial Sequence
  Description of Artificial Sequence: Synthetic oligonucleotide
  Target: LAMA2; (-) strand; PAM type: NRG; PAM sequence: AAG
ttttattttgcctcctaagg

SEQ ID NO: 52540 - DNA, 20 bp, Artificial Sequence
  Description of Artificial Sequence: Synthetic oligonucleotide
  Target: LAMA2; (-) strand; PAM type: NRG; PAM sequence: AGG
ttattttattttgcctccta

SEQ ID NO: 52541 - DNA, 20 bp, Artificial Sequence
  Description of Artificial Sequence: Synthetic oligonucleotide
  Target: LAMA2; (-) strand; PAM type: NRG; PAM sequence: AAG
tttattttattttgcctcct

SEQ ID NO: 52542 - DNA, 20 bp, Artificial Sequence
  Description of Artificial Sequence: Synthetic oligonucleotide
  Target: LAMA2; (-) strand; PAM type: NRG; PAM sequence: AGG
cactggggtcatctaagaat

SEQ ID NO: 52543 - DNA, 20 bp, Artificial Sequence
  Description of Artificial Sequence: Synthetic oligonucleotide
  Target: LAMA2; (-) strand; PAM type: NRG; PAM sequence: TAG
acactggggtcatctaagaa

SEQ ID NO: 52544 - DNA, 20 bp, Artificial Sequence
  Description of Artificial Sequence: Synthetic oligonucleotide
  Target: LAMA2; (-) strand; PAM type: NRG; PAM sequence: AAG
cgattacactggggtcatct

SEQ ID NO: 52545 - DNA, 20 bp, Artificial Sequence
  Description of Artificial Sequence: Synthetic oligonucleotide
  Target: LAMA2; (-) strand; PAM type: NRG; PAM sequence: GGG
acatcccatcgattacactg

SEQ ID NO: 52546 - DNA, 20 bp, Artificial Sequence
  Description of Artificial Sequence: Synthetic oligonucleotide
  Target: LAMA2; (-) strand; PAM type: NRG; PAM sequence: GGG
aacatcccatcgattacact

SEQ ID NO: 52547 - DNA, 20 bp, Artificial Sequence
  Description of Artificial Sequence: Synthetic oligonucleotide
  Target: LAMA2; (-) strand; PAM type: NRG; PAM sequence: TGG
caacatcccatcgattacac

SEQ ID NO: 52548 - DNA, 20 bp, Artificial Sequence
  Description of Artificial Sequence: Synthetic oligonucleotide
  Target: LAMA2; (-) strand; PAM type: NRG; PAM sequence: CAG
gcccatggtacttgagtcac

SEQ ID NO: 52549 - DNA, 20 bp, Artificial Sequence
  Description of Artificial Sequence: Synthetic oligonucleotide
  Target: LAMA2; (-) strand; PAM type: NRG; PAM sequence: GAG
caaccttgcccatggtactt

SEQ ID NO: 52550 - DNA, 20 bp, Artificial Sequence
  Description of Artificial Sequence: Synthetic oligonucleotide
  Target: LAMA2; (-) strand; PAM type: NRG; PAM sequence: TGG
actgataacaaccttgccca

SEQ ID NO: 52551 - DNA, 20 bp, Artificial Sequence
  Description of Artificial Sequence: Synthetic oligonucleotide
  Target: LAMA2; (-) strand; PAM type: NRG; PAM sequence: AAG
gtaaagatgtactttcagag

SEQ ID NO: 52552 - DNA, 20 bp, Artificial Sequence
  Description of Artificial Sequence: Synthetic oligonucleotide
  Target: LAMA2; (-) strand; PAM type: NRG; PAM sequence: GAG
ggtgtaaagatgtactttca

SEQ ID NO: 52553 - DNA, 20 bp, Artificial Sequence
  Description of Artificial Sequence: Synthetic oligonucleotide
  Target: LAMA2; (-) strand; PAM type: NRG; PAM sequence: CAG
tgggtgtaaagatgtacttt

SEQ ID NO: 52554 - DNA, 20 bp, Artificial Sequence
  Description of Artificial Sequence: Synthetic oligonucleotide
  Target: LAMA2; (-) strand; PAM type: NRG; PAM sequence: AAG
cccatttgtcaatgggtgta

SEQ ID NO: 52555 - DNA, 20 bp, Artificial Sequence
  Description of Artificial Sequence: Synthetic oligonucleotide
  Target: LAMA2; (-) strand; PAM type: NRG; PAM sequence: GGG
ttttacacccatttgtcaat

SEQ ID NO: 52556 - DNA, 20 bp, Artificial Sequence
  Description of Artificial Sequence: Synthetic oligonucleotide
  Target: LAMA2; (-) strand; PAM type: NRG; PAM sequence: TGG
attttacacccatttgtcaa

SEQ ID NO: 52557 - DNA, 20 bp, Artificial Sequence
  Description of Artificial Sequence: Synthetic oligonucleotide
  Target: LAMA2; (-) strand; PAM type: NRG; PAM sequence: TGG
gataatttactttgtgtttt

SEQ ID NO: 52558 - DNA, 20 bp, Artificial Sequence
  Description of Artificial Sequence: Synthetic oligonucleotide
  Target: LAMA2; (-) strand; PAM type: NRG; PAM sequence: AAG
catctactatatacattgag

SEQ ID NO: 52559 - DNA, 20 bp, Artificial Sequence
  Description of Artificial Sequence: Synthetic oligonucleotide
  Target: LAMA2; (-) strand; PAM type: NRG; PAM sequence: GAG
atgcatctactatatacatt

SEQ ID NO: 52560 - DNA, 20 bp, Artificial Sequence
  Description of Artificial Sequence: Synthetic oligonucleotide
  Target: LAMA2; (-) strand; PAM type: NRG; PAM sequence: AGG
ttgtttgtttgtttttttct

SEQ ID NO: 52561 - DNA, 20 bp, Artificial Sequence
  Description of Artificial Sequence: Synthetic oligonucleotide
  Target: LAMA2; (-) strand; PAM type: NRG; PAM sequence: TAG
tttgtttgtttgtttttttc

SEQ ID NO: 52562 - DNA, 20 bp, Artificial Sequence
  Description of Artificial Sequence: Synthetic oligonucleotide
  Target: LAMA2; (-) strand; PAM type: NRG; PAM sequence: AAG
ttatatttgaaacctaattt

SEQ ID NO: 52563 - DNA, 20 bp, Artificial Sequence
  Description of Artificial Sequence: Synthetic oligonucleotide
  Target: LAMA2; (-) strand; PAM type: NRG; PAM sequence: GAG
ccactggtcatttatgtagt

SEQ ID NO: 52564 - DNA, 20 bp, Artificial Sequence
  Description of Artificial Sequence: Synthetic oligonucleotide
  Target: LAMA2; (-) strand; PAM type: NRG; PAM sequence: TAG
tgggccactggtcatttatg

SEQ ID NO: 52565 - DNA, 20 bp, Artificial Sequence
  Description of Artificial Sequence: Synthetic oligonucleotide
  Target: LAMA2; (-) strand; PAM type: NRG; PAM sequence: TGG
tagacttctgaatgggccac

SEQ ID NO: 52566 - DNA, 20 bp, Artificial Sequence
  Description of Artificial Sequence: Synthetic oligonucleotide
  Target: LAMA2; (-) strand; PAM type: NRG; PAM sequence: GGG
ttgtccttagacttctgaat

SEQ ID NO: 52567 - DNA, 20 bp, Artificial Sequence
  Description of Artificial Sequence: Synthetic oligonucleotide
  Target: LAMA2; (-) strand; PAM type: NRG; PAM sequence: TGG
tttgtccttagacttctgaa

SEQ ID NO: 52568 - DNA, 20 bp, Artificial Sequence
  Description of Artificial Sequence: Synthetic oligonucleotide
  Target: LAMA2; (-) strand; PAM type: NRG; PAM sequence: TAG
cctacaacatattttgtcct

SEQ ID NO: 52569 - DNA, 20 bp, Artificial Sequence
  Description of Artificial Sequence: Synthetic oligonucleotide
  Target: LAMA2; (-) strand; PAM type: NRG; PAM sequence: CAG
ctgtccctcagtggtcagga

SEQ ID NO: 52570 - DNA, 20 bp, Artificial Sequence
  Description of Artificial Sequence: Synthetic oligonucleotide
  Target: LAMA2; (-) strand; PAM type: NRG; PAM sequence: AGG
tgagctgtccctcagtggtc

SEQ ID NO: 52571 - DNA, 20 bp, Artificial Sequence
  Description of Artificial Sequence: Synthetic oligonucleotide
  Target: LAMA2; (-) strand; PAM type: NRG; PAM sequence: CAG
gtgagctgtccctcagtggt

SEQ ID NO: 52572 - DNA, 20 bp, Artificial Sequence
  Description of Artificial Sequence: Synthetic oligonucleotide
  Target: LAMA2; (-) strand; PAM type: NRG; PAM sequence: TGG
gggtgtgagctgtccctcag

SEQ ID NO: 52573 - DNA, 20 bp, Artificial Sequence
  Description of Artificial Sequence: Synthetic oligonucleotide
  Target: LAMA2; (-) strand; PAM type: NRG; PAM sequence: CAG
tcagggtgtgagctgtccct

SEQ ID NO: 52574 - DNA, 20 bp, Artificial Sequence
  Description of Artificial Sequence: Synthetic oligonucleotide
  Target: LAMA2; (-) strand; PAM type: NRG; PAM sequence: GAG
gtactgttgggtcagggtgt

SEQ ID NO: 52575 - DNA, 20 bp, Artificial Sequence
  Description of Artificial Sequence: Synthetic oligonucleotide
  Target: LAMA2; (-) strand; PAM type: NRG; PAM sequence: GGG
attagtgtactgttgggtca

SEQ ID NO: 52576 - DNA, 20 bp, Artificial Sequence
  Description of Artificial Sequence: Synthetic oligonucleotide
  Target: LAMA2; (-) strand; PAM type: NRG; PAM sequence: AGG
cattagtgtactgttgggtc

SEQ ID NO: 52577 - DNA, 20 bp, Artificial Sequence
  Description of Artificial Sequence: Synthetic oligonucleotide
  Target: LAMA2; (-) strand; PAM type: NRG; PAM sequence: CAG
gcattagtgtactgttgggt

SEQ ID NO: 52578 - DNA, 20 bp, Artificial Sequence
  Description of Artificial Sequence: Synthetic oligonucleotide
  Target: LAMA2; (-) strand; PAM type: NRG; PAM sequence: GGG
gcaggcattagtgtactgtt

SEQ ID NO: 52579 - DNA, 20 bp, Artificial Sequence
  Description of Artificial Sequence: Synthetic oligonucleotide
  Target: LAMA2; (-) strand; PAM type: NRG; PAM sequence: TGG
tgcaggcattagtgtactgt

SEQ ID NO: 52580 - DNA, 20 bp, Artificial Sequence
  Description of Artificial Sequence: Synthetic oligonucleotide
  Target: LAMA2; (-) strand; PAM type: NRG; PAM sequence: TAG
acggtgggtactgcaggcat

SEQ ID NO: 52581 - DNA, 20 bp, Artificial Sequence
  Description of Artificial Sequence: Synthetic oligonucleotide
  Target: LAMA2; (-) strand; PAM type: NRG; PAM sequence: AGG
ccgggaacggtgggtactgc

SEQ ID NO: 52582 - DNA, 20 bp, Artificial Sequence
  Description of Artificial Sequence: Synthetic oligonucleotide
  Target: LAMA2; (-) strand; PAM type: NRG; PAM sequence: CAG
tccgggaacggtgggtactg

SEQ ID NO: 52583 - DNA, 20 bp, Artificial Sequence
  Description of Artificial Sequence: Synthetic oligonucleotide
  Target: LAMA2; (-) strand; PAM type: NRG; PAM sequence: GGG
tggtttactccgggaacggt

SEQ ID NO: 52584 - DNA, 20 bp, Artificial Sequence
  Description of Artificial Sequence: Synthetic oligonucleotide
  Target: LAMA2; (-) strand; PAM type: NRG; PAM sequence: TGG
ttggtttactccgggaacgg

SEQ ID NO: 52585 - DNA, 20 bp, Artificial Sequence
  Description of Artificial Sequence: Synthetic oligonucleotide
  Target: LAMA2; (-) strand; PAM type: NRG; PAM sequence: CGG
cttttggtttactccgggaa

SEQ ID NO: 52586 - DNA, 20 bp, Artificial Sequence
  Description of Artificial Sequence: Synthetic oligonucleotide
  Target: LAMA2; (-) strand; PAM type: NRG; PAM sequence: GGG
gatgtcttttggtttactcc

SEQ ID NO: 52587 - DNA, 20 bp, Artificial Sequence
  Description of Artificial Sequence: Synthetic oligonucleotide
  Target: LAMA2; (-) strand; PAM type: NRG; PAM sequence: CGG
ggatgtcttttggtttactc

SEQ ID NO: 52588 - DNA, 20 bp, Artificial Sequence
  Description of Artificial Sequence: Synthetic oligonucleotide
  Target: LAMA2; (-) strand; PAM type: NRG; PAM sequence: TGG
gtgagtcgcaggatgtcttt

SEQ ID NO: 52589 - DNA, 20 bp, Artificial Sequence
  Description of Artificial Sequence: Synthetic oligonucleotide
  Target: LAMA2; (-) strand; PAM type: NRG; PAM sequence: AGG
taatggattttgtgagtcgc

SEQ ID NO: 52590 - DNA, 20 bp, Artificial Sequence
  Description of Artificial Sequence: Synthetic oligonucleotide
  Target: LAMA2; (-) strand; PAM type: NRG; PAM sequence: CAG
ataatggattttgtgagtcg

SEQ ID NO: 52591 - DNA, 20 bp, Artificial Sequence
  Description of Artificial Sequence: Synthetic oligonucleotide
  Target: LAMA2; (-) strand; PAM type: NRG; PAM sequence: GAG
aactccataatggattttgt

SEQ ID NO: 52592 - DNA, 20 bp, Artificial Sequence
  Description of Artificial Sequence: Synthetic oligonucleotide
  Target: LAMA2; (-) strand; PAM type: NRG; PAM sequence: TGG
ggtttaaaacaactccataa

SEQ ID NO: 52593 - DNA, 20 bp, Artificial Sequence
  Description of Artificial Sequence: Synthetic oligonucleotide
  Target: LAMA2; (-) strand; PAM type: NRG; PAM sequence: AGG
ctaggtcagtggttctcata

SEQ ID NO: 52594 - DNA, 20 bp, Artificial Sequence
  Description of Artificial Sequence: Synthetic oligonucleotide
  Target: LAMA2; (-) strand; PAM type: NRG; PAM sequence: AAG
cctaggtcagtggttctcat

SEQ ID NO: 52595 - DNA, 20 bp, Artificial Sequence
  Description of Artificial Sequence: Synthetic oligonucleotide
  Target: LAMA2; (-) strand; PAM type: NRG; PAM sequence: TGG
ttttttatggcctaggtcag

SEQ ID NO: 52596 - DNA, 20 bp, Artificial Sequence
  Description of Artificial Sequence: Synthetic oligonucleotide
  Target: LAMA2; (-) strand; PAM type: NRG; PAM sequence: CAG
ttgttttttatggcctaggt

SEQ ID NO: 52597 - DNA, 20 bp, Artificial Sequence
  Description of Artificial Sequence: Synthetic oligonucleotide
  Target: LAMA2; (-) strand; PAM type: NRG; PAM sequence: AGG
tcatttgttttttatggcct

SEQ ID NO: 52598 - DNA, 20 bp, Artificial Sequence
  Description of Artificial Sequence: Synthetic oligonucleotide
  Target: LAMA2; (-) strand; PAM type: NRG; PAM sequence: TAG
ttcatttgttttttatggcc

SEQ ID NO: 52599 - DNA, 20 bp, Artificial Sequence
  Description of Artificial Sequence: Synthetic oligonucleotide
  Target: LAMA2; (-) strand; PAM type: NRG; PAM sequence: TGG
gttttttcatttgtttttta

SEQ ID NO: 52600 - DNA, 20 bp, Artificial Sequence
  Description of Artificial Sequence: Synthetic oligonucleotide
  Target: LAMA2; (-) strand; PAM type: NRG; PAM sequence: TAG
aacagaactactgccattcc

SEQ ID NO: 52601 - DNA, 20 bp, Artificial Sequence
  Description of Artificial Sequence: Synthetic oligonucleotide
  Target: LAMA2; (-) strand; PAM type: NRG; PAM sequence: CAG
ctttctcctctttaactcaa

SEQ ID NO: 52602 - DNA, 20 bp, Artificial Sequence
  Description of Artificial Sequence: Synthetic oligonucleotide
  Target: LAMA2; (-) strand; PAM type: NRG; PAM sequence: TGG
aatttcatctcttccagtcc

SEQ ID NO: 52603 - DNA, 20 bp, Artificial Sequence
  Description of Artificial Sequence: Synthetic oligonucleotide
  Target: LAMA2; (-) strand; PAM type: NRG; PAM sequence: CAG
actcacaatttcatctcttc

SEQ ID NO: 52604 - DNA, 20 bp, Artificial Sequence
  Description of Artificial Sequence: Synthetic oligonucleotide
  Target: LAMA2; (-) strand; PAM type: NRG; PAM sequence: CAG
cctttgcaatagtttccttc

SEQ ID NO: 52605 - DNA, 20 bp, Artificial Sequence
  Description of Artificial Sequence: Synthetic oligonucleotide
  Target: LAMA2; (-) strand; PAM type: NRG; PAM sequence: TAG
ggtaataaaggcctttgcaa

SEQ ID NO: 52606 - DNA, 20 bp, Artificial Sequence
  Description of Artificial Sequence: Synthetic oligonucleotide
  Target: LAMA2; (-) strand; PAM type: NRG; PAM sequence: AGG
catttacttaaaggtaataa

SEQ ID NO: 52607 - DNA, 20 bp, Artificial Sequence
  Description of Artificial Sequence: Synthetic oligonucleotide
  Target: LAMA2; (-) strand; PAM type: NRG; PAM sequence: AAG
acatttacttaaaggtaata

SEQ ID NO: 52608 - DNA, 20 bp, Artificial Sequence
  Description of Artificial Sequence: Synthetic oligonucleotide
  Target: LAMA2; (-) strand; PAM type: NRG; PAM sequence: AGG
gttaggagacatttacttaa

SEQ ID NO: 52609 - DNA, 20 bp, Artificial Sequence
  Description of Artificial Sequence: Synthetic oligonucleotide
  Target: LAMA2; (-) strand; PAM type: NRG; PAM sequence: AAG
agttaggagacatttactta

SEQ ID NO: 52610 - DNA, 20 bp, Artificial Sequence
  Description of Artificial Sequence: Synthetic oligonucleotide
  Target: LAMA2; (-) strand; PAM type: NRG; PAM sequence: GAG
aaggctttcagttcagttag

SEQ ID NO: 52611 - DNA, 20 bp, Artificial Sequence
  Description of Artificial Sequence: Synthetic oligonucleotide
  Target: LAMA2; (-) strand; PAM type: NRG; PAM sequence: AGG
tgaaggctttcagttcagtt

SEQ ID NO: 52612 - DNA, 20 bp, Artificial Sequence
  Description of Artificial Sequence: Synthetic oligonucleotide
  Target: LAMA2; (-) strand; PAM type: NRG; PAM sequence: TAG
atgaaggctttcagttcagt

SEQ ID NO: 52613 - DNA, 20 bp, Artificial Sequence
  Description of Artificial Sequence: Synthetic oligonucleotide
  Target: LAMA2; (-) strand; PAM type: NRG; PAM sequence: CAG
tagaatgaaggctttcagtt

SEQ ID NO: 52614 - DNA, 20 bp, Artificial Sequence
  Description of Artificial Sequence: Synthetic oligonucleotide
  Target: LAMA2; (-) strand; PAM type: NRG; PAM sequence: CAG
atggttagaatgaaggcttt

SEQ ID NO: 52615 - DNA, 20 bp, Artificial Sequence
  Description of Artificial Sequence: Synthetic oligonucleotide
  Target: LAMA2; (-) strand; PAM type: NRG; PAM sequence: AGG
caaactaatggttagaatga

SEQ ID NO: 52616 - DNA, 20 bp, Artificial Sequence
  Description of Artificial Sequence: Synthetic oligonucleotide
  Target: LAMA2; (-) strand; PAM type: NRG; PAM sequence: AAG
ccaaactaatggttagaatg

SEQ ID NO: 52617 - DNA, 20 bp, Artificial Sequence
  Description of Artificial Sequence: Synthetic oligonucleotide
  Target: LAMA2; (-) strand; PAM type: NRG; PAM sequence: TAG
ttcctgaccaaactaatggt

SEQ ID NO: 52618 - DNA, 20 bp, Artificial Sequence
  Description of Artificial Sequence: Synthetic oligonucleotide
  Target: LAMA2; (-) strand; PAM type: NRG; PAM sequence: TGG
aatgttcctgaccaaactaa

SEQ ID NO: 52619 - DNA, 20 bp, Artificial Sequence
  Description of Artificial Sequence: Synthetic oligonucleotide
  Target: LAMA2; (-) strand; PAM type: NRG; PAM sequence: TGG
gcaaaataaaacagccaccc

SEQ ID NO: 52620 - DNA, 20 bp, Artificial Sequence
  Description of Artificial Sequence: Synthetic oligonucleotide
  Target: LAMA2; (-) strand; PAM type: NRG; PAM sequence: CAG
aaaggaagtgcaaaataaaa

SEQ ID NO: 52621 - DNA, 20 bp, Artificial Sequence
  Description of Artificial Sequence: Synthetic oligonucleotide
  Target: LAMA2; (-) strand; PAM type: NRG; PAM sequence: AAG
tgctgggagggcagtaaagg

SEQ ID NO: 52622 - DNA, 20 bp, Artificial Sequence
  Description of Artificial Sequence: Synthetic oligonucleotide
  Target: LAMA2; (-) strand; PAM type: NRG; PAM sequence: AGG
ggctgctgggagggcagtaa

SEQ ID NO: 52623 - DNA, 20 bp, Artificial Sequence
  Description of Artificial Sequence: Synthetic oligonucleotide
  Target: LAMA2; (-) strand; PAM type: NRG; PAM sequence: AAG
aggctgctgggagggcagta

SEQ ID NO: 52624 - DNA, 20 bp, Artificial Sequence
  Description of Artificial Sequence: Synthetic oligonucleotide
  Target: LAMA2; (-) strand; PAM type: NRG; PAM sequence: CAG
taggtaggctgctgggaggg

SEQ ID NO: 52625 - DNA, 20 bp, Artificial Sequence
  Description of Artificial Sequence: Synthetic oligonucleotide
  Target: LAMA2; (-) strand; PAM type: NRG; PAM sequence: GGG
tgctaggtaggctgctggga

SEQ ID NO: 52626 - DNA, 20 bp, Artificial Sequence
  Description of Artificial Sequence: Synthetic oligonucleotide
  Target: LAMA2; (-) strand; PAM type: NRG; PAM sequence: AGG
ctgctaggtaggctgctggg

SEQ ID NO: 52627 - DNA, 20 bp, Artificial Sequence
  Description of Artificial Sequence: Synthetic oligonucleotide
  Target: LAMA2; (-) strand; PAM type: NRG; PAM sequence: GAG
actgctaggtaggctgctgg

SEQ ID NO: 52628 - DNA, 20 bp, Artificial Sequence
  Description of Artificial Sequence: Synthetic oligonucleotide
  Target: LAMA2; (-) strand; PAM type: NRG; PAM sequence: GGG
ttactgctaggtaggctgct

SEQ ID NO: 52629 - DNA, 20 bp, Artificial Sequence
  Description of Artificial Sequence: Synthetic oligonucleotide
  Target: LAMA2; (-) strand; PAM type: NRG; PAM sequence: TGG
cttactgctaggtaggctgc

SEQ ID NO: 52630 - DNA, 20 bp, Artificial Sequence
  Description of Artificial Sequence: Synthetic oligonucleotide
  Target: LAMA2; (-) strand; PAM type: NRG; PAM sequence: AGG
tggggaacttactgctaggt

SEQ ID NO: 52631 - DNA, 20 bp, Artificial Sequence
  Description of Artificial Sequence: Synthetic oligonucleotide
  Target: LAMA2; (-) strand; PAM type: NRG; PAM sequence: TAG
ctggggaacttactgctagg

SEQ ID NO: 52632 - DNA, 20 bp, Artificial Sequence
  Description of Artificial Sequence: Synthetic oligonucleotide
  Target: LAMA2; (-) strand; PAM type: NRG; PAM sequence: AGG
aggctggggaacttactgct

SEQ ID NO: 52633 - DNA, 20 bp, Artificial Sequence
  Description of Artificial Sequence: Synthetic oligonucleotide
  Target: LAMA2; (-) strand; PAM type: NRG; PAM sequence: TAG
caggctggggaacttactgc

SEQ ID NO: 52634 - DNA, 20 bp, Artificial Sequence
  Description of Artificial Sequence: Synthetic oligonucleotide
  Target: LAMA2; (-) strand; PAM type: NRG; PAM sequence: GGG
tctggggacactgcaggctg

SEQ ID NO: 52635 - DNA, 20 bp, Artificial Sequence
  Description of Artificial Sequence: Synthetic oligonucleotide
  Target: LAMA2; (-) strand; PAM type: NRG; PAM sequence: GGG
ctctggggacactgcaggct

SEQ ID NO: 52636 - DNA, 20 bp, Artificial Sequence
  Description of Artificial Sequence: Synthetic oligonucleotide
  Target: LAMA2; (-) strand; PAM type: NRG; PAM sequence: TGG
cctctggggacactgcaggc

SEQ ID NO: 52637 - DNA, 20 bp, Artificial Sequence
  Description of Artificial Sequence: Synthetic oligonucleotide
  Target: LAMA2; (-) strand; PAM type: NRG; PAM sequence: AGG
gtgccctctggggacactgc

SEQ ID NO: 52638 - DNA, 20 bp, Artificial Sequence
  Description of Artificial Sequence: Synthetic oligonucleotide
  Target: LAMA2; (-) strand; PAM type: NRG; PAM sequence: CAG
ggtgccctctggggacactg

SEQ ID NO: 52639 - DNA, 20 bp, Artificial Sequence
  Description of Artificial Sequence: Synthetic oligonucleotide
  Target: LAMA2; (-) strand; PAM type: NRG; PAM sequence: GGG
ccgagggaaggtgccctctg

SEQ ID NO: 52640 - DNA, 20 bp, Artificial Sequence
  Description of Artificial Sequence: Synthetic oligonucleotide
  Target: LAMA2; (-) strand; PAM type: NRG; PAM sequence: GGG
gccgagggaaggtgccctct

SEQ ID NO: 52641 - DNA, 20 bp, Artificial Sequence
  Description of Artificial Sequence: Synthetic oligonucleotide
  Target: LAMA2; (-) strand; PAM type: NRG; PAM sequence: TGG
agccgagggaaggtgccctc

SEQ ID NO: 52642 - DNA, 20 bp, Artificial Sequence
  Description of Artificial Sequence: Synthetic oligonucleotide
  Target: LAMA2; (-) strand; PAM type: NRG; PAM sequence: AGG
agaagttactagccgaggga

SEQ ID NO: 52643 - DNA, 20 bp, Artificial Sequence
  Description of Artificial Sequence: Synthetic oligonucleotide
  Target: LAMA2; (-) strand; PAM type: NRG; PAM sequence: AAG
gagaagttactagccgaggg

SEQ ID NO: 52644 - DNA, 20 bp, Artificial Sequence
  Description of Artificial Sequence: Synthetic oligonucleotide
  Target: LAMA2; (-) strand; PAM type: NRG; PAM sequence: GGG
tctgagaagttactagccga

SEQ ID NO: 52645 - DNA, 20 bp, Artificial Sequence
  Description of Artificial Sequence: Synthetic oligonucleotide
  Target: LAMA2; (-) strand; PAM type: NRG; PAM sequence: AGG
gtctgagaagttactagccg

SEQ ID NO: 52646 - DNA, 20 bp, Artificial Sequence
  Description of Artificial Sequence: Synthetic oligonucleotide
  Target: LAMA2; (-) strand; PAM type: NRG; PAM sequence: GAG
tgtctgagaagttactagcc

SEQ ID NO: 52647 - DNA, 20 bp, Artificial Sequence
  Description of Artificial Sequence: Synthetic oligonucleotide
  Target: LAMA2; (-) strand; PAM type: NRG; PAM sequence: TAG
cagagtgtctgagaagttac

SEQ ID NO: 52648 - DNA, 20 bp, Artificial Sequence
  Description of Artificial Sequence: Synthetic oligonucleotide
  Target: LAMA2; (-) strand; PAM type: NRG; PAM sequence: AAG
ccaaggccagagtgtctgag

SEQ ID NO: 52649 - DNA, 20 bp, Artificial Sequence
  Description of Artificial Sequence: Synthetic oligonucleotide
  Target: LAMA2; (-) strand; PAM type: NRG; PAM sequence: GAG
tccccaaggccagagtgtct

SEQ ID NO: 52650 - DNA, 20 bp, Artificial Sequence
  Description of Artificial Sequence: Synthetic oligonucleotide
  Target: LAMA2; (-) strand; PAM type: NRG; PAM sequence: GAG
ccaagacatccccaaggcca

SEQ ID NO: 52651 - DNA, 20 bp, Artificial Sequence
  Description of Artificial Sequence: Synthetic oligonucleotide
  Target: LAMA2; (-) strand; PAM type: NRG; PAM sequence: CAG
atccaagacatccccaaggc

SEQ ID NO: 52652 - DNA, 20 bp, Artificial Sequence
  Description of Artificial Sequence: Synthetic oligonucleotide
  Target: LAMA2; (-) strand; PAM type: NRG; PAM sequence: AGG
gaagatccaagacatcccca

SEQ ID NO: 52653 - DNA, 20 bp, Artificial Sequence
  Description of Artificial Sequence: Synthetic oligonucleotide
  Target: LAMA2; (-) strand; PAM type: NRG; PAM sequence: AAG
agaagatccaagacatcccc

SEQ ID NO: 52654 - DNA, 20 bp, Artificial Sequence
  Description of Artificial Sequence: Synthetic oligonucleotide
  Target: LAMA2; (-) strand; PAM type: NRG; PAM sequence: AAG
actgtgtacctagaagatcc

SEQ ID NO: 52655 - DNA, 20 bp, Artificial Sequence
  Description of Artificial Sequence: Synthetic oligonucleotide
  Target: LAMA2; (-) strand; PAM type: NRG; PAM sequence: AAG
tgcagccactgtgtacctag

SEQ ID NO: 52656 - DNA, 20 bp, Artificial Sequence
  Description of Artificial Sequence: Synthetic oligonucleotide
  Target: LAMA2; (-) strand; PAM type: NRG; PAM sequence: TAG
gtgtgcagccactgtgtacc

SEQ ID NO: 52657 - DNA, 20 bp, Artificial Sequence
  Description of Artificial Sequence: Synthetic oligonucleotide
  Target: LAMA2; (-) strand; PAM type: NRG; PAM sequence: CAG
aggcctggcaaaactgtgtg

SEQ ID NO: 52658 - DNA, 20 bp, Artificial Sequence
  Description of Artificial Sequence: Synthetic oligonucleotide
  Target: LAMA2; (-) strand; PAM type: NRG; PAM sequence: TGG
tttacctcttgagaaaggcc

SEQ ID NO: 52659 - DNA, 20 bp, Artificial Sequence
  Description of Artificial Sequence: Synthetic oligonucleotide
  Target: LAMA2; (-) strand; PAM type: NRG; PAM sequence: AGG
gaacttttacctcttgagaa

SEQ ID NO: 52660 - DNA, 20 bp, Artificial Sequence
  Description of Artificial Sequence: Synthetic oligonucleotide
  Target: LAMA2; (-) strand; PAM type: NRG; PAM sequence: AAG
ggaacttttacctcttgaga

SEQ ID NO: 52661 - DNA, 20 bp, Artificial Sequence
  Description of Artificial Sequence: Synthetic oligonucleotide
  Target: LAMA2; (-) strand; PAM type: NRG; PAM sequence: GAG
gctaggaacttttacctctt

SEQ ID NO: 52662 - DNA, 20 bp, Artificial Sequence
  Description of Artificial Sequence: Synthetic oligonucleotide
  Target: LAMA2; (-) strand; PAM type: NRG; PAM sequence: AGG
tctgggaaatgcaaacagct

SEQ ID NO: 52663 - DNA, 20 bp, Artificial Sequence
  Description of Artificial Sequence: Synthetic oligonucleotide
  Target: LAMA2; (-) strand; PAM type: NRG; PAM sequence: TAG
ttctgggaaatgcaaacagc

SEQ ID NO: 52664 - DNA, 20 bp, Artificial Sequence
  Description of Artificial Sequence: Synthetic oligonucleotide
  Target: LAMA2; (-) strand; PAM type: NRG; PAM sequence: CAG
ttatttctgggaaatgcaaa

SEQ ID NO: 52665 - DNA, 20 bp, Artificial Sequence
  Description of Artificial Sequence: Synthetic oligonucleotide
  Target: LAMA2; (-) strand; PAM type: NRG; PAM sequence: GGG
acatggaaaacattatttct

SEQ ID NO: 52666 - DNA, 20 bp, Artificial Sequence
  Description of Artificial Sequence: Synthetic oligonucleotide
  Target: LAMA2; (-) strand; PAM type: NRG; PAM sequence: TGG
cacatggaaaacattatttc

SEQ ID NO: 52667 - DNA, 20 bp, Artificial Sequence
  Description of Artificial Sequence: Synthetic oligonucleotide
  Target: LAMA2; (-) strand; PAM type: NRG; PAM sequence: TGG
atctgtaaaatccctacaca

SEQ ID NO: 52668 - DNA, 20 bp, Artificial Sequence
  Description of Artificial Sequence: Synthetic oligonucleotide
  Target: LAMA2; (-) strand; PAM type: NRG; PAM sequence: AAG
aaagaaagtaattgacatga

SEQ ID NO: 52669 - DNA, 20 bp, Artificial Sequence
  Description of Artificial Sequence: Synthetic oligonucleotide
  Target: LAMA2; (-) strand; PAM type: NRG; PAM sequence: AAG
aacttcttttaaattaaaga

SEQ ID NO: 52670 - DNA, 20 bp, Artificial Sequence
  Description of Artificial Sequence: Synthetic oligonucleotide
  Target: LAMA2; (-) strand; PAM type: NRG; PAM sequence: AAG
tctgaacttcttttaaatta

SEQ ID NO: 52671 - DNA, 20 bp, Artificial Sequence
  Description of Artificial Sequence: Synthetic oligonucleotide
  Target: LAMA2; (-) strand; PAM type: NRG; PAM sequence: TGG
ggatcattcctagcttgacc

SEQ ID NO: 52672 - DNA, 20 bp, Artificial Sequence
  Description of Artificial Sequence: Synthetic oligonucleotide
  Target: LAMA2; (-) strand; PAM type: NRG; PAM sequence: TAG
ctctgagaccggatcattcc

SEQ ID NO: 52673 - DNA, 20 bp, Artificial Sequence
  Description of Artificial Sequence: Synthetic oligonucleotide
  Target: LAMA2; (-) strand; PAM type: NRG; PAM sequence: CGG
gcgctccttccctctgagac

SEQ ID NO: 52674 - DNA, 20 bp, Artificial Sequence
  Description of Artificial Sequence: Synthetic oligonucleotide
  Target: LAMA2; (-) strand; PAM type: NRG; PAM sequence: GAG
ctagagcgctccttccctct

SEQ ID NO: 52675 - DNA, 20 bp, Artificial Sequence
  Description of Artificial Sequence: Synthetic oligonucleotide
  Target: LAMA2; (-) strand; PAM type: NRG; PAM sequence: GAG
taaaggatcctcctttccta

SEQ ID NO: 52676 - DNA, 20 bp, Artificial Sequence
  Description of Artificial Sequence: Synthetic oligonucleotide
  Target: LAMA2; (-) strand; PAM type: NRG; PAM sequence: TAG
attaaaggatcctcctttcc

SEQ ID NO: 52677 - DNA, 20 bp, Artificial Sequence
  Description of Artificial Sequence: Synthetic oligonucleotide
  Target: LAMA2; (-) strand; PAM type: NRG; PAM sequence: AGG
ccaggacggccctctattaa

SEQ ID NO: 52678 - DNA, 20 bp, Artificial Sequence
  Description of Artificial Sequence: Synthetic oligonucleotide
  Target: LAMA2; (-) strand; PAM type: NRG; PAM sequence: AAG
cccaggacggccctctatta

SEQ ID NO: 52679 - DNA, 20 bp, Artificial Sequence
  Description of Artificial Sequence: Synthetic oligonucleotide
  Target: LAMA2; (-) strand; PAM type: NRG; PAM sequence: CGG
atgggcacgcggccccagga

SEQ ID NO: 52680 - DNA, 20 bp, Artificial Sequence
  Description of Artificial Sequence: Synthetic oligonucleotide
  Target: LAMA2; (-) strand; PAM type: NRG; PAM sequence: AGG
ttccatgggcacgcggcccc

SEQ ID NO: 52681 - DNA, 20 bp, Artificial Sequence
  Description of Artificial Sequence: Synthetic oligonucleotide
  Target: LAMA2; (-) strand; PAM type: NRG; PAM sequence: CAG
cttccatgggcacgcggccc

SEQ ID NO: 52682 - DNA, 20 bp, Artificial Sequence
  Description of Artificial Sequence: Synthetic oligonucleotide
  Target: LAMA2; (-) strand; PAM type: NRG; PAM sequence: CGG
tctcgccttccatgggcacg

SEQ ID NO: 52683 - DNA, 20 bp, Artificial Sequence
  Description of Artificial Sequence: Synthetic oligonucleotide
  Target: LAMA2; (-) strand; PAM type: NRG; PAM sequence: GGG
cctccactctcgccttccat

SEQ ID NO: 52684 - DNA, 20 bp, Artificial Sequence
  Description of Artificial Sequence: Synthetic oligonucleotide
  Target: LAMA2; (-) strand; PAM type: NRG; PAM sequence: TGG
tcctccactctcgccttcca

SEQ ID NO: 52685 - DNA, 20 bp, Artificial Sequence
  Description of Artificial Sequence: Synthetic oligonucleotide
  Target: LAMA2; (-) strand; PAM type: NRG; PAM sequence: AGG
cctgagggtgggggagaaag

SEQ ID NO: 52686 - DNA, 20 bp, Artificial Sequence
  Description of Artificial Sequence: Synthetic oligonucleotide
  Target: LAMA2; (-) strand; PAM type: NRG; PAM sequence: GAG
gcctgagggtgggggagaaa

SEQ ID NO: 52687 - DNA, 20 bp, Artificial Sequence
  Description of Artificial Sequence: Synthetic oligonucleotide
  Target: LAMA2; (-) strand; PAM type: NRG; PAM sequence: AAG
ccgcctgagggtgggggaga

SEQ ID NO: 52688 - DNA, 20 bp, Artificial Sequence
  Description of Artificial Sequence: Synthetic oligonucleotide
  Target: LAMA2; (-) strand; PAM type: NRG; PAM sequence: GAG
gccgccgcctgagggtgggg

SEQ ID NO: 52689 - DNA, 20 bp, Artificial Sequence
  Description of Artificial Sequence: Synthetic oligonucleotide
  Target: LAMA2; (-) strand; PAM type: NRG; PAM sequence: GGG
gggccgccgcctgagggtgg

SEQ ID NO: 52690 - DNA, 20 bp, Artificial Sequence
  Description of Artificial Sequence: Synthetic oligonucleotide
  Target: LAMA2; (-) strand; PAM type: NRG; PAM sequence: GGG
cgggccgccgcctgagggtg

SEQ ID NO: 52691 - DNA, 20 bp, Artificial Sequence
  Description of Artificial Sequence: Synthetic oligonucleotide
  Target: LAMA2; (-) strand; PAM type: NRG; PAM sequence: GGG
ccgggccgccgcctgagggt

SEQ ID NO: 52692 - DNA, 20 bp, Artificial Sequence
  Description of Artificial Sequence: Synthetic oligonucleotide
  Target: LAMA2; (-) strand; PAM type: NRG; PAM sequence: TGG
gccgggccgccgcctgaggg

SEQ ID NO: 52693 - DNA, 20 bp, Artificial Sequence
  Description of Artificial Sequence: Synthetic oligonucleotide
  Target: LAMA2; (-) strand; PAM type: NRG; PAM sequence: GGG
ttggccgggccgccgcctga

SEQ ID NO: 52694 - DNA, 20 bp, Artificial Sequence
  Description of Artificial Sequence: Synthetic oligonucleotide
  Target: LAMA2; (-) strand; PAM type: NRG; PAM sequence: AGG
tttggccgggccgccgcctg

SEQ ID NO: 52695 - DNA, 20 bp, Artificial Sequence
  Description of Artificial Sequence: Synthetic oligonucleotide
  Target: LAMA2; (-) strand; PAM type: NRG; PAM sequence: GAG
ctttggccgggccgccgcct

SEQ ID NO: 52696 - DNA, 20 bp, Artificial Sequence
  Description of Artificial Sequence: Synthetic oligonucleotide
  Target: LAMA2; (-) strand; PAM type: NRG; PAM sequence: GGG
agccccctctggctttggcc

SEQ ID NO: 52697 - DNA, 20 bp, Artificial Sequence
  Description of Artificial Sequence: Synthetic oligonucleotide
  Target: LAMA2; (-) strand; PAM type: NRG; PAM sequence: CGG
cagccccctctggctttggc

SEQ ID NO: 52698 - DNA, 20 bp, Artificial Sequence
  Description of Artificial Sequence: Synthetic oligonucleotide
  Target: LAMA2; (-) strand; PAM type: NRG; PAM sequence: TGG
gagacagccccctctggctt

SEQ ID NO: 52699 - DNA, 20 bp, Artificial Sequence
  Description of Artificial Sequence: Synthetic oligonucleotide
  Target: LAMA2; (-) strand; PAM type: NRG; PAM sequence: TGG
gaggaggagacagccccctc

SEQ ID NO: 52700 - DNA, 20 bp, Artificial Sequence
  Description of Artificial Sequence: Synthetic oligonucleotide
  Target: LAMA2; (-) strand; PAM type: NRG; PAM sequence: CAG
tgctggggaagaggaggaga

SEQ ID NO: 52701 - DNA, 20 bp, Artificial Sequence
  Description of Artificial Sequence: Synthetic oligonucleotide
  Target: LAMA2; (-) strand; PAM type: NRG; PAM sequence: GAG
cagctgctggggaagaggag

SEQ ID NO: 52702 - DNA, 20 bp, Artificial Sequence
  Description of Artificial Sequence: Synthetic oligonucleotide
  Target: LAMA2; (-) strand; PAM type: NRG; PAM sequence: AGG
agcagctgctggggaagagg

SEQ ID NO: 52703 - DNA, 20 bp, Artificial Sequence
  Description of Artificial Sequence: Synthetic oligonucleotide
  Target: LAMA2; (-) strand; PAM type: NRG; PAM sequence: GAG
cagcagctgctggggaagag

SEQ ID NO: 52704 - DNA, 20 bp, Artificial Sequence
  Description of Artificial Sequence: Synthetic oligonucleotide
  Target: LAMA2; (-) strand; PAM type: NRG; PAM sequence: AGG
agcagcagctgctggggaag

SEQ ID NO: 52705 - DNA, 20 bp, Artificial Sequence
  Description of Artificial Sequence: Synthetic oligonucleotide
  Target: LAMA2; (-) strand; PAM type: NRG; PAM sequence: GAG
gagcagcagctgctggggaa

SEQ ID NO: 52706 - DNA, 20 bp, Artificial Sequence
  Description of Artificial Sequence: Synthetic oligonucleotide
  Target: LAMA2; (-) strand; PAM type: NRG; PAM sequence: AAG
gcgagcagcagctgctgggg

SEQ ID NO: 52707 - DNA, 20 bp, Artificial Sequence
  Description of Artificial Sequence: Synthetic oligonucleotide
  Target: LAMA2; (-) strand; PAM type: NRG; PAM sequence: GGG
tgagcgagcagcagctgctg

SEQ ID NO: 52708 - DNA, 20 bp, Artificial Sequence
  Description of Artificial Sequence: Synthetic oligonucleotide
  Target: LAMA2; (-) strand; PAM type: NRG; PAM sequence: GGG
ctgagcgagcagcagctgct

SEQ ID NO: 52709 - DNA, 20 bp, Artificial Sequence
  Description of Artificial Sequence: Synthetic oligonucleotide
  Target: LAMA2; (-) strand; PAM type: NRG; PAM sequence: TGG
gctgagcgagcagcagctgc

SEQ ID NO: 52710 - DNA, 20 bp, Artificial Sequence
  Description of Artificial Sequence: Synthetic oligonucleotide
  Target: LAMA2; (-) strand; PAM type: NRG; PAM sequence: CAG
cttgtgagctgagcgagcag

SEQ ID NO: 52711 - DNA, 20 bp, Artificial Sequence
  Description of Artificial Sequence: Synthetic oligonucleotide
  Target: LAMA2; (-) strand; PAM type: NRG; PAM sequence: CAG
tggcttgtgagctgagcgag

SEQ ID NO: 52712 - DNA, 20 bp, Artificial Sequence
  Description of Artificial Sequence: Synthetic oligonucleotide
  Target: LAMA2; (-) strand; PAM type: NRG; PAM sequence: GAG
ccttggcttgtgagctgagc

SEQ ID NO: 52713 - DNA, 20 bp, Artificial Sequence
  Description of Artificial Sequence: Synthetic oligonucleotide
  Target: LAMA2; (-) strand; PAM type: NRG; PAM sequence: GAG
ctggccttggcttgtgagct

SEQ ID NO: 52714 - DNA, 20 bp, Artificial Sequence
  Description of Artificial Sequence: Synthetic oligonucleotide
  Target: LAMA2; (-) strand; PAM type: NRG; PAM sequence: GAG
gtcccctggccttggcttgt

SEQ ID NO: 52715 - DNA, 20 bp, Artificial Sequence
  Description of Artificial Sequence: Synthetic oligonucleotide
  Target: LAMA2; (-) strand; PAM type: NRG; PAM sequence: TGG
gccgccctgtcccctggcct

SEQ ID NO: 52716 - DNA, 20 bp, Artificial Sequence
  Description of Artificial Sequence: Synthetic oligonucleotide
  Target: LAMA2; (-) strand; PAM type: NRG; PAM sequence: TGG
gtcgctgccgccctgtcccc

SEQ ID NO: 52717 - DNA, 20 bp, Artificial Sequence
  Description of Artificial Sequence: Synthetic oligonucleotide
  Target: LAMA2; (-) strand; PAM type: NRG; PAM sequence: GAG
ccacttctcgggagccagag

SEQ ID NO: 52718 - DNA, 20 bp, Artificial Sequence
  Description of Artificial Sequence: Synthetic oligonucleotide
  Target: LAMA2; (-) strand; PAM type: NRG; PAM sequence: AGG
atccacttctcgggagccag

SEQ ID NO: 52719 - DNA, 20 bp, Artificial Sequence
  Description of Artificial Sequence: Synthetic oligonucleotide
  Target: LAMA2; (-) strand; PAM type: NRG; PAM sequence: GAG
gatccacttctcgggagcca

SEQ ID NO: 52720 - DNA, 20 bp, Artificial Sequence
  Description of Artificial Sequence: Synthetic oligonucleotide
  Target: LAMA2; (-) strand; PAM type: NRG; PAM sequence: CAG
cggatccacttctcgggagc

SEQ ID NO: 52721 - DNA, 20 bp, Artificial Sequence
  Description of Artificial Sequence: Synthetic oligonucleotide
  Target: LAMA2; (-) strand; PAM type: NRG; PAM sequence: GAG
cgaccggatccacttctcgg

SEQ ID NO: 52722 - DNA, 20 bp, Artificial Sequence
  Description of Artificial Sequence: Synthetic oligonucleotide
  Target: LAMA2; (-) strand; PAM type: NRG; PAM sequence: GGG
cgcgaccggatccacttctc

SEQ ID NO: 52723 - DNA, 20 bp, Artificial Sequence
  Description of Artificial Sequence: Synthetic oligonucleotide
  Target: LAMA2; (-) strand; PAM type: NRG; PAM sequence: CGG
ccgcgaccggatccacttct

SEQ ID NO: 52724 - DNA, 20 bp, Artificial Sequence
  Description of Artificial Sequence: Synthetic oligonucleotide
  Target: LAMA2; (-) strand; PAM type: NRG; PAM sequence: CGG
ggcatcgtagtggccgcgac

SEQ ID NO: 52725 - DNA, 20 bp, Artificial Sequence
  Description of Artificial Sequence: Synthetic oligonucleotide
  Target: LAMA2; (-) strand; PAM type: NRG; PAM sequence: TGG
ggcggctcccggcatcgtag

SEQ ID NO: 52726 - DNA, 20 bp, Artificial Sequence
  Description of Artificial Sequence: Synthetic oligonucleotide
  Target: LAMA2; (-) strand; PAM type: NRG; PAM sequence: TAG
cccggcggctcccggcatcg

SEQ ID NO: 52727 - DNA, 20 bp, Artificial Sequence
  Description of Artificial Sequence: Synthetic oligonucleotide
  Target: LAMA2; (-) strand; PAM type: NRG; PAM sequence: CGG
aggaggaccccggcggctcc

SEQ ID NO: 52728 - DNA, 20 bp, Artificial Sequence
  Description of Artificial Sequence: Synthetic oligonucleotide
  Target: LAMA2; (-) strand; PAM type: NRG; PAM sequence: CGG
cagaaggaggaggaccccgg

SEQ ID NO: 52729 - DNA, 20 bp, Artificial Sequence
  Description of Artificial Sequence: Synthetic oligonucleotide
  Target: LAMA2; (-) strand; PAM type: NRG; PAM sequence: CGG
cagcagaaggaggaggaccc

SEQ ID NO: 52730 - DNA, 20 bp, Artificial Sequence
  Description of Artificial Sequence: Synthetic oligonucleotide
  Target: LAMA2; (-) strand; PAM type: NRG; PAM sequence: AGG
cggagagcagcagaaggagg

SEQ ID NO: 52731 - DNA, 20 bp, Artificial Sequence
  Description of Artificial Sequence: Synthetic oligonucleotide
  Target: LAMA2; (-) strand; PAM type: NRG; PAM sequence: GAG
ccggagagcagcagaaggag

SEQ ID NO: 52732 - DNA, 20 bp, Artificial Sequence
  Description of Artificial Sequence: Synthetic oligonucleotide
  Target: LAMA2; (-) strand; PAM type: NRG; PAM sequence: AGG
ctccggagagcagcagaagg

SEQ ID NO: 52733 - DNA, 20 bp, Artificial Sequence
  Description of Artificial Sequence: Synthetic oligonucleotide
  Target: LAMA2; (-) strand; PAM type: NRG; PAM sequence: GAG
cctccggagagcagcagaag

SEQ ID NO: 52734 - DNA, 20 bp, Artificial Sequence
  Description of Artificial Sequence: Synthetic oligonucleotide
  Target: LAMA2; (-) strand; PAM type: NRG; PAM sequence: AGG
ggcctccggagagcagcaga

SEQ ID NO: 52735 - DNA, 20 bp, Artificial Sequence
  Description of Artificial Sequence: Synthetic oligonucleotide
  Target: LAMA2; (-) strand; PAM type: NRG; PAM sequence: AAG
aggcctccggagagcagcag

SEQ ID NO: 52736 - DNA, 20 bp, Artificial Sequence
  Description of Artificial Sequence: Synthetic oligonucleotide
  Target: LAMA2; (-) strand; PAM type: NRG; PAM sequence: CAG
ccgaggcctccggagagcag

SEQ ID NO: 52737 - DNA, 20 bp, Artificial Sequence
  Description of Artificial Sequence: Synthetic oligonucleotide
  Target: LAMA2; (-) strand; PAM type: NRG; PAM sequence: CAG
cccccgaggcctccggagag

SEQ ID NO: 52738 - DNA, 20 bp, Artificial Sequence
  Description of Artificial Sequence: Synthetic oligonucleotide
  Target: LAMA2; (-) strand; PAM type: NRG; PAM sequence: GAG
acgcccccgaggcctccgga

SEQ ID NO: 52739 - DNA, 20 bp, Artificial Sequence
  Description of Artificial Sequence: Synthetic oligonucleotide
  Target: LAMA2; (-) strand; PAM type: NRG; PAM sequence: GAG
gtacgcccccgaggcctccg

SEQ ID NO: 52740 - DNA, 20 bp, Artificial Sequence
  Description of Artificial Sequence: Synthetic oligonucleotide
  Target: LAMA2; (-) strand; PAM type: NRG; PAM sequence: CGG
ctgtacgcccccgaggcctc

SEQ ID NO: 52741 - DNA, 20 bp, Artificial Sequence
  Description of Artificial Sequence: Synthetic oligonucleotide
  Target: LAMA2; (-) strand; PAM type: NRG; PAM sequence: AGG
gctgcgcctgtacgcccccg

SEQ ID NO: 52742 - DNA, 20 bp, Artificial Sequence
  Description of Artificial Sequence: Synthetic oligonucleotide
  Target: LAMA2; (-) strand; PAM type: NRG; PAM sequence: GAG
cgctgcgcctgtacgccccc

SEQ ID NO: 52743 - DNA, 20 bp, Artificial Sequence
  Description of Artificial Sequence: Synthetic oligonucleotide
  Target: LAMA2; (-) strand; PAM type: NRG; PAM sequence: CGG
tgtgactgccgctgctgctg

SEQ ID NO: 52744 - DNA, 20 bp, Artificial Sequence
  Description of Artificial Sequence: Synthetic oligonucleotide
  Target: LAMA2; (-) strand; PAM type: NRG; PAM sequence: AAG
cccggcaaaggatgcaaccc

SEQ ID NO: 52745 - DNA, 20 bp, Artificial Sequence
  Description of Artificial Sequence: Synthetic oligonucleotide
  Target: LAMA2; (-) strand; PAM type: NRG; PAM sequence: AGG
aggaatctcggtcccggcaa

SEQ ID NO: 52746 - DNA, 20 bp, Artificial Sequence
  Description of Artificial Sequence: Synthetic oligonucleotide
  Target: LAMA2; (-) strand; PAM type: NRG; PAM sequence: AAG
gaggaatctcggtcccggca

SEQ ID NO: 52747 - DNA, 20 bp, Artificial Sequence
  Description of Artificial Sequence: Synthetic oligonucleotide
  Target: LAMA2; (-) strand; PAM type: NRG; PAM sequence: CGG
gaagtgaggaatctcggtcc

SEQ ID NO: 52748 - DNA, 20 bp, Artificial Sequence
  Description of Artificial Sequence: Synthetic oligonucleotide
  Target: LAMA2; (-) strand; PAM type: NRG; PAM sequence: CGG
gtggaagaagtgaggaatct

SEQ ID NO: 52749 - DNA, 20 bp, Artificial Sequence
  Description of Artificial Sequence: Synthetic oligonucleotide
  Target: LAMA2; (-) strand; PAM type: NRG; PAM sequence: AGG
tcggaagagtggaagaagtg

SEQ ID NO: 52750 - DNA, 20 bp, Artificial Sequence
  Description of Artificial Sequence: Synthetic oligonucleotide
  Target: LAMA2; (-) strand; PAM type: NRG; PAM sequence: GAG
ctcggaagagtggaagaagt

SEQ ID NO: 52751 - DNA, 20 bp, Artificial Sequence
  Description of Artificial Sequence: Synthetic oligonucleotide
  Target: LAMA2; (-) strand; PAM type: NRG; PAM sequence: AAG
aactctcggaagagtggaag

SEQ ID NO: 52752 - DNA, 20 bp, Artificial Sequence
  Description of Artificial Sequence: Synthetic oligonucleotide
  Target: LAMA2; (-) strand; PAM type: NRG; PAM sequence: AAG
agcaactctcggaagagtgg

SEQ ID NO: 52753 - DNA, 20 bp, Artificial Sequence
  Description of Artificial Sequence: Synthetic oligonucleotide
  Target: LAMA2; (-) strand; PAM type: NRG; PAM sequence: TGG
gacagcaactctcggaagag

SEQ ID NO: 52754 - DNA, 20 bp, Artificial Sequence
  Description of Artificial Sequence: Synthetic oligonucleotide
  Target: LAMA2; (-) strand; PAM type: NRG; PAM sequence: GAG
acagacagcaactctcggaa

SEQ ID NO: 52755 - DNA, 20 bp, Artificial Sequence
  Description of Artificial Sequence: Synthetic oligonucleotide
  Target: LAMA2; (-) strand; PAM type: NRG; PAM sequence: AAG
ccacagacagcaactctcgg

SEQ ID NO: 52756 - DNA, 20 bp, Artificial Sequence
  Description of Artificial Sequence: Synthetic oligonucleotide
  Target: LAMA2; (-) strand; PAM type: NRG; PAM sequence: CGG
agtccacagacagcaactct

SEQ ID NO: 52757 - DNA, 20 bp, Artificial Sequence
  Description of Artificial Sequence: Synthetic oligonucleotide
  Target: LAMA2; (-) strand; PAM type: NRG; PAM sequence: CAG
gcaagacggcagtccacaga

SEQ ID NO: 52758 - DNA, 20 bp, Artificial Sequence
  Description of Artificial Sequence: Synthetic oligonucleotide
  Target: LAMA2; (-) strand; PAM type: NRG; PAM sequence: CAG
cgaagcaagacggcagtcca

SEQ ID NO: 52759 - DNA, 20 bp, Artificial Sequence
  Description of Artificial Sequence: Synthetic oligonucleotide
  Target: LAMA2; (-) strand; PAM type: NRG; PAM sequence: CAG
ctgaaggcgaagcaagacgg

SEQ ID NO: 52760 - DNA, 20 bp, Artificial Sequence
  Description of Artificial Sequence: Synthetic oligonucleotide
  Target: LAMA2; (-) strand; PAM type: NRG; PAM sequence: CGG
tctctgaaggcgaagcaaga

SEQ ID NO: 52761 - DNA, 20 bp, Artificial Sequence
  Description of Artificial Sequence: Synthetic oligonucleotide
  Target: LAMA2; (-) strand; PAM type: NRG; PAM sequence: AAG
gcactctctgaaggcgaagc

SEQ ID NO: 52762 - DNA, 20 bp, Artificial Sequence
  Description of Artificial Sequence: Synthetic oligonucleotide
  Target: LAMA2; (-) strand; PAM type: NRG; PAM sequence: AAG
gagcgcactctctgaaggcg

SEQ ID NO: 52763 - DNA, 20 bp, Artificial Sequence
  Description of Artificial Sequence: Synthetic oligonucleotide
  Target: LAMA2; (-) strand; PAM type: NRG; PAM sequence: AGG
ccccagagcgcactctctga

SEQ ID NO: 52764 - DNA, 20 bp, Artificial Sequence
  Description of Artificial Sequence: Synthetic oligonucleotide
  Target: LAMA2; (-) strand; PAM type: NRG; PAM sequence: AAG
gccccagagcgcactctctg

SEQ ID NO: 52765 - DNA, 20 bp, Artificial Sequence
  Description of Artificial Sequence: Synthetic oligonucleotide
  Target: LAMA2; (-) strand; PAM type: NRG; PAM sequence: GAG
ttcaagttcctcttgcccca

SEQ ID NO: 52766 - DNA, 20 bp, Artificial Sequence
  Description of Artificial Sequence: Synthetic oligonucleotide
  Target: LAMA2; (-) strand; PAM type: NRG; PAM sequence: CAG
gcttcaagttcctcttgccc

SEQ ID NO: 52767 - DNA, 20 bp, Artificial Sequence
  Description of Artificial Sequence: Synthetic oligonucleotide
  Target: LAMA2; (-) strand; PAM type: NRG; PAM sequence: AAG
attgaacttgaacttgcttc

SEQ ID NO: 52768 - DNA, 20 bp, Artificial Sequence
  Description of Artificial Sequence: Synthetic oligonucleotide
  Target: LAMA2; (-) strand; PAM type: NRG; PAM sequence: TGG
ccccctacactacgctctca

SEQ ID NO: 52769 - DNA, 20 bp, Artificial Sequence
  Description of Artificial Sequence: Synthetic oligonucleotide
  Target: LAMA2; (-) strand; PAM type: NRG; PAM sequence: AGG
ccgttccttttgcaggactt

SEQ ID NO: 52770 - DNA, 20 bp, Artificial Sequence
  Description of Artificial Sequence: Synthetic oligonucleotide
  Target: LAMA2; (-) strand; PAM type: NRG; PAM sequence: TAG
cccgttccttttgcaggact

SEQ ID NO: 52771 - DNA, 20 bp, Artificial Sequence
  Description of Artificial Sequence: Synthetic oligonucleotide
  Target: LAMA2; (-) strand; PAM type: NRG; PAM sequence: AGG
gcactccccgttccttttgc

SEQ ID NO: 52772 - DNA, 20 bp, Artificial Sequence
  Description of Artificial Sequence: Synthetic oligonucleotide
  Target: LAMA2; (-) strand; PAM type: NRG; PAM sequence: CAG
agcactccccgttccttttg

SEQ ID NO: 52773 - DNA, 20 bp, Artificial Sequence
  Description of Artificial Sequence: Synthetic oligonucleotide
  Target: LAMA2; (-) strand; PAM type: NRG; PAM sequence: AAG
cgaaactaaagaacaatgaa

SEQ ID NO: 52774 - DNA, 20 bp, Artificial Sequence
  Description of Artificial Sequence: Synthetic oligonucleotide
  Target: LAMA2; (-) strand; PAM type: NRG; PAM sequence: AAG
gcaagacctcttcgaaacta

SEQ ID NO: 52775 - DNA, 20 bp, Artificial Sequence
  Description of Artificial Sequence: Synthetic oligonucleotide
  Target: LAMA2; (-) strand; PAM type: NRG; PAM sequence: AAG
acgggatgtatcgtgatagc

SEQ ID NO: 52776 - DNA, 20 bp, Artificial Sequence
  Description of Artificial Sequence: Synthetic oligonucleotide
  Target: LAMA2; (-) strand; PAM type: NRG; PAM sequence: TAG
atttacgggatgtatcgtga

SEQ ID NO: 52777 - DNA, 20 bp, Artificial Sequence
  Description of Artificial Sequence: Synthetic oligonucleotide
  Target: LAMA2; (-) strand; PAM type: NRG; PAM sequence: GGG
gatttcagaaatcaatttac

SEQ ID NO: 52778 - DNA, 20 bp, Artificial Sequence
  Description of Artificial Sequence: Synthetic oligonucleotide
  Target: LAMA2; (-) strand; PAM type: NRG; PAM sequence: CGG
agatttcagaaatcaattta

SEQ ID NO: 52779 - DNA, 20 bp, Artificial Sequence
  Description of Artificial Sequence: Synthetic oligonucleotide
  Target: LAMA2; (-) strand; PAM type: NRG; PAM sequence: CAG
ttttcctcttggaaagattt

SEQ ID NO: 52780 - DNA, 20 bp, Artificial Sequence
  Description of Artificial Sequence: Synthetic oligonucleotide
  Target: LAMA2; (-) strand; PAM type: NRG; PAM sequence: AAG
gaaaaagttttcctcttgga

SEQ ID NO: 52781 - DNA, 20 bp, Artificial Sequence
  Description of Artificial Sequence: Synthetic oligonucleotide
  Target: LAMA2; (-) strand; PAM type: NRG; PAM sequence: TGG
attggaaaaagttttcctct

SEQ ID NO: 52782 - DNA, 20 bp, Artificial Sequence
  Description of Artificial Sequence: Synthetic oligonucleotide
  Target: LAMA2; (-) strand; PAM type: NRG; PAM sequence: AAG
cttttttttccaattggaaa

SEQ ID NO: 52783 - DNA, 20 bp, Artificial Sequence
  Description of Artificial Sequence: Synthetic oligonucleotide
  Target: LAMA2; (-) strand; PAM type: NRG; PAM sequence: TGG
gaaattcttttttttccaat

SEQ ID NO: 52784 - DNA, 20 bp, Artificial Sequence
  Description of Artificial Sequence: Synthetic oligonucleotide
  Target: LAMA2; (-) strand; PAM type: NRG; PAM sequence: AAG
gcaggatgggctctgatttg

SEQ ID NO: 52785 - DNA, 20 bp, Artificial Sequence
  Description of Artificial Sequence: Synthetic oligonucleotide
  Target: LAMA2; (-) strand; PAM type: NRG; PAM sequence: GGG
gaagcctttctctgcaggat

SEQ ID NO: 52786 - DNA, 20 bp, Artificial Sequence
  Description of Artificial Sequence: Synthetic oligonucleotide
  Target: LAMA2; (-) strand; PAM type: NRG; PAM sequence: TGG
ggaagcctttctctgcagga

SEQ ID NO: 52787 - DNA, 20 bp, Artificial Sequence
  Description of Artificial Sequence: Synthetic oligonucleotide
  Target: LAMA2; (-) strand; PAM type: NRG; PAM sequence: AGG
cttgggaagcctttctctgc

SEQ ID NO: 52788 - DNA, 20 bp, Artificial Sequence
  Description of Artificial Sequence: Synthetic oligonucleotide
  Target: LAMA2; (-) strand; PAM type: NRG; PAM sequence: CAG
gcttgggaagcctttctctg

SEQ ID NO: 52789 - DNA, 20 bp, Artificial Sequence
  Description of Artificial Sequence: Synthetic oligonucleotide
  Target: LAMA2; (-) strand; PAM type: NRG; PAM sequence: AAG
gatgaaccacacagcttggg

SEQ ID NO: 52790 - DNA, 20 bp, Artificial Sequence
  Description of Artificial Sequence: Synthetic oligonucleotide
  Target: LAMA2; (-) strand; PAM type: NRG; PAM sequence: GGG
caggatgaaccacacagctt

SEQ ID NO: 52791 - DNA, 20 bp, Artificial Sequence
  Description of Artificial Sequence: Synthetic oligonucleotide
  Target: LAMA2; (-) strand; PAM type: NRG; PAM sequence: TGG
ccaggatgaaccacacagct

SEQ ID NO: 52792 - DNA, 20 bp, Artificial Sequence
  Description of Artificial Sequence: Synthetic oligonucleotide
  Target: LAMA2; (-) strand; PAM type: NRG; PAM sequence: CAG
aagtcccaggatgaaccaca

SEQ ID NO: 52793 - DNA, 20 bp, Artificial Sequence
  Description of Artificial Sequence: Synthetic oligonucleotide
  Target: LAMA2; (-) strand; PAM type: NRG; PAM sequence: AGG
gctaccctccataaagtccc

SEQ ID NO: 52794 - DNA, 20 bp, Artificial Sequence
  Description of Artificial Sequence: Synthetic oligonucleotide
  Target: LAMA2; (-) strand; PAM type: NRG; PAM sequence: CAG
agctaccctccataaagtcc

SEQ ID NO: 52795 - DNA, 20 bp, Artificial Sequence
  Description of Artificial Sequence: Synthetic oligonucleotide
  Target: LAMA2; (-) strand; PAM type: NRG; PAM sequence: AAG
tgcatcagctaccctccata

SEQ ID NO: 52796 - DNA, 20 bp, Artificial Sequence
  Description of Artificial Sequence: Synthetic oligonucleotide
  Target: LAMA2; (-) strand; PAM type: NRG; PAM sequence: CAG
ataatttttttttgatgcat

SEQ ID NO: 52797 - DNA, 20 bp, Artificial Sequence
  Description of Artificial Sequence: Synthetic oligonucleotide
  Target: LAMA2; (-) strand; PAM type: NRG; PAM sequence: AAG
tgttttaaaagttgaaaaca

SEQ ID NO: 52798 - DNA, 20 bp, Artificial Sequence
  Description of Artificial Sequence: Synthetic oligonucleotide
  Target: LAMA2; (-) strand; PAM type: NRG; PAM sequence: AAG
ctttagaaatcctgttttaa

SEQ ID NO: 52799 - DNA, 20 bp, Artificial Sequence
  Description of Artificial Sequence: Synthetic oligonucleotide
  Target: LAMA2; (-) strand; PAM type: NRG; PAM sequence: TAG
aaaaaaccacataacttctt

SEQ ID NO: 52800 - DNA, 20 bp, Artificial Sequence
  Description of Artificial Sequence: Synthetic oligonucleotide
  Target: LAMA2; (-) strand; PAM type: NRG; PAM sequence: AAG
tggaggcgccattgccatga

SEQ ID NO: 52801 - DNA, 20 bp, Artificial Sequence
  Description of Artificial Sequence: Synthetic oligonucleotide
  Target: LAMA2; (-) strand; PAM type: NRG; PAM sequence: AGG
tttgaaaaaggtgaggctgg

SEQ ID NO: 52802 - DNA, 20 bp, Artificial Sequence
  Description of Artificial Sequence: Synthetic oligonucleotide
  Target: LAMA2; (-) strand; PAM type: NRG; PAM sequence: GAG
gtttgaaaaaggtgaggctg

SEQ ID NO: 52803 - DNA, 20 bp, Artificial Sequence
  Description of Artificial Sequence: Synthetic oligonucleotide
  Target: LAMA2; (-) strand; PAM type: NRG; PAM sequence: TGG
gggtttgaaaaaggtgaggc

SEQ ID NO: 52804 - DNA, 20 bp, Artificial Sequence
  Description of Artificial Sequence: Synthetic oligonucleotide
  Target: LAMA2; (-) strand; PAM type: NRG; PAM sequence: AGG
atgtgggtttgaaaaaggtg

SEQ ID NO: 52805 - DNA, 20 bp, Artificial Sequence
  Description of Artificial Sequence: Synthetic oligonucleotide
  Target: LAMA2; (-) strand; PAM type: NRG; PAM sequence: GAG
gatgtgggtttgaaaaaggt

SEQ ID NO: 52806 - DNA, 20 bp, Artificial Sequence
  Description of Artificial Sequence: Synthetic oligonucleotide
  Target: LAMA2; (-) strand; PAM type: NRG; PAM sequence: AGG
ataagatgtgggtttgaaaa

SEQ ID NO: 52807 - DNA, 20 bp, Artificial Sequence
  Description of Artificial Sequence: Synthetic oligonucleotide
  Target: LAMA2; (-) strand; PAM type: NRG; PAM sequence: AAG
gataagatgtgggtttgaaa

SEQ ID NO: 52808 - DNA, 20 bp, Artificial Sequence
  Description of Artificial Sequence: Synthetic oligonucleotide
  Target: LAMA2; (-) strand; PAM type: NRG; PAM sequence: GGG
aggatatgaagataagatgt

SEQ ID NO: 52809 - DNA, 20 bp, Artificial Sequence
  Description of Artificial Sequence: Synthetic oligonucleotide
  Target: LAMA2; (-) strand; PAM type: NRG; PAM sequence: TGG
taggatatgaagataagatg

SEQ ID NO: 52810 - DNA, 20 bp, Artificial Sequence
  Description of Artificial Sequence: Synthetic oligonucleotide
  Target: LAMA2; (-) strand; PAM type: NRG; PAM sequence: AAG
ataaaataggatatgaagat

SEQ ID NO: 52811 - DNA, 20 bp, Artificial Sequence
  Description of Artificial Sequence: Synthetic oligonucleotide
  Target: LAMA2; (-) strand; PAM type: NRG; PAM sequence: AAG
ctacaataaaataggatatg

SEQ ID NO: 52812 - DNA, 20 bp, Artificial Sequence
  Description of Artificial Sequence: Synthetic oligonucleotide
  Target: LAMA2; (-) strand; PAM type: NRG; PAM sequence: AGG
cgatttcactacaataaaat

SEQ ID NO: 52813 - DNA, 20 bp, Artificial Sequence
  Description of Artificial Sequence: Synthetic oligonucleotide
  Target: LAMA2; (-) strand; PAM type: NRG; PAM sequence: TAG
acgatttcactacaataaaa

SEQ ID NO: 52814 - DNA, 20 bp, Artificial Sequence
  Description of Artificial Sequence: Synthetic oligonucleotide
  Target: LAMA2; (-) strand; PAM type: NRG; PAM sequence: GAG
cctctgtatttaagcaaaag

SEQ ID NO: 52815 - DNA, 20 bp, Artificial Sequence
  Description of Artificial Sequence: Synthetic oligonucleotide
  Target: LAMA2; (-) strand; PAM type: NRG; PAM sequence: AGG
ctcctctgtatttaagcaaa

SEQ ID NO: 52816 - DNA, 20 bp, Artificial Sequence
  Description of Artificial Sequence: Synthetic oligonucleotide
  Target: LAMA2; (-) strand; PAM type: NRG; PAM sequence: AAG
tctcctctgtatttaagcaa

SEQ ID NO: 52817 - DNA, 20 bp, Artificial Sequence
  Description of Artificial Sequence: Synthetic oligonucleotide
  Target: LAMA2; (-) strand; PAM type: NRG; PAM sequence: AAG
tagaagtctcctctgtattt

SEQ ID NO: 52818 - DNA, 20 bp, Artificial Sequence
  Description of Artificial Sequence: Synthetic oligonucleotide
  Target: LAMA2; (-) strand; PAM type: NRG; PAM sequence: AAG
ttaaagtacacatgacatag

SEQ ID NO: 52819 - DNA, 20 bp, Artificial Sequence
  Description of Artificial Sequence: Synthetic oligonucleotide
  Target: LAMA2; (-) strand; PAM type: NRG; PAM sequence: TAG
gccttaaagtacacatgaca

SEQ ID NO: 52820 - DNA, 20 bp, Artificial Sequence
  Description of Artificial Sequence: Synthetic oligonucleotide
  Target: LAMA2; (-) strand; PAM type: NRG; PAM sequence: AAG
atctagtcactgtggcctta

SEQ ID NO: 52821 - DNA, 20 bp, Artificial Sequence
  Description of Artificial Sequence: Synthetic oligonucleotide
  Target: LAMA2; (-) strand; PAM type: NRG; PAM sequence: TGG
aagtgtatatctagtcactg

SEQ ID NO: 52822 - DNA, 20 bp, Artificial Sequence
  Description of Artificial Sequence: Synthetic oligonucleotide
  Target: LAMA2; (-) strand; PAM type: NRG; PAM sequence: TAG
agtcctccaaagtgtatatc

SEQ ID NO: 52823 - DNA, 20 bp, Artificial Sequence
  Description of Artificial Sequence: Synthetic oligonucleotide
  Target: LAMA2; (-) strand; PAM type: NRG; PAM sequence: AAG
ccatcttccaaagtcctcca

SEQ ID NO: 52824 - DNA, 20 bp, Artificial Sequence
  Description of Artificial Sequence: Synthetic oligonucleotide
  Target: LAMA2; (-) strand; PAM type: NRG; PAM sequence: AAG
ttaaatacagccatcttcca

SEQ ID NO: 52825 - DNA, 20 bp, Artificial Sequence
  Description of Artificial Sequence: Synthetic oligonucleotide
  Target: LAMA2; (-) strand; PAM type: NRG; PAM sequence: CAG
tatttaagttacattaaata

SEQ ID NO: 52826 - DNA, 20 bp, Artificial Sequence
  Description of Artificial Sequence: Synthetic oligonucleotide
  Target: LAMA2; (-) strand; PAM type: NRG; PAM sequence: AAG
ctgaggagaataagttattt

SEQ ID NO: 52827 - DNA, 20 bp, Artificial Sequence
  Description of Artificial Sequence: Synthetic oligonucleotide
  Target: LAMA2; (-) strand; PAM type: NRG; PAM sequence: AAG
taagaggctctgaggagaat

SEQ ID NO: 52828 - DNA, 20 bp, Artificial Sequence
  Description of Artificial Sequence: Synthetic oligonucleotide
  Target: LAMA2; (-) strand; PAM type: NRG; PAM sequence: GAG
aaacactaagaggctctgag

SEQ ID NO: 52829 - DNA, 20 bp, Artificial Sequence
  Description of Artificial Sequence: Synthetic oligonucleotide
  Target: LAMA2; (-) strand; PAM type: NRG; PAM sequence: AGG
ataaacactaagaggctctg

SEQ ID NO: 52830 - DNA, 20 bp, Artificial Sequence
  Description of Artificial Sequence: Synthetic oligonucleotide
  Target: LAMA2; (-) strand; PAM type: NRG; PAM sequence: GAG
cataaacactaagaggctct

SEQ ID NO: 52831 - DNA, 20 bp, Artificial Sequence
  Description of Artificial Sequence: Synthetic oligonucleotide
  Target: LAMA2; (-) strand; PAM type: NRG; PAM sequence: AGG
atatatacataaacactaag

SEQ ID NO: 52832 - DNA, 20 bp, Artificial Sequence
  Description of Artificial Sequence: Synthetic oligonucleotide
  Target: LAMA2; (-) strand; PAM type: NRG; PAM sequence: GAG
tatatatacataaacactaa

SEQ ID NO: 52833 - DNA, 20 bp, Artificial Sequence
  Description of Artificial Sequence: Synthetic oligonucleotide
  Target: LAMA2; (-) strand; PAM type: NRG; PAM sequence: AAG
gctatatatacataaacact

SEQ ID NO: 52834 - DNA, 20 bp, Artificial Sequence
  Description of Artificial Sequence: Synthetic oligonucleotide
  Target: LAMA2; (-) strand; PAM type: NRG; PAM sequence: GAG
ccccaaagtttcagaaatga

SEQ ID NO: 52835 - DNA, 20 bp, Artificial Sequence
  Description of Artificial Sequence: Synthetic oligonucleotide
  Target: LAMA2; (-) strand; PAM type: NRG; PAM sequence: GAG
ctccccaaagtttcagaaat

SEQ ID NO: 52836 - DNA, 20 bp, Artificial Sequence
  Description of Artificial Sequence: Synthetic oligonucleotide
  Target: LAMA2; (-) strand; PAM type: NRG; PAM sequence: CAG
tcaaagactccccaaagttt

SEQ ID NO: 52837 - DNA, 20 bp, Artificial Sequence
  Description of Artificial Sequence: Synthetic oligonucleotide
  Target: LAMA2; (-) strand; PAM type: NRG; PAM sequence: AAG
aactcttcaaagactcccca

SEQ ID NO: 52838 - DNA, 20 bp, Artificial Sequence
  Description of Artificial Sequence: Synthetic oligonucleotide
  Target: LAMA2; (-) strand; PAM type: NRG; PAM sequence: AAG
gataataaaataactcttca

SEQ ID NO: 52839 - DNA, 20 bp, Artificial Sequence
  Description of Artificial Sequence: Synthetic oligonucleotide
  Target: LAMA2; (-) strand; PAM type: NRG; PAM sequence: AAG
tgctgaaataatgtgttaca

SEQ ID NO: 52840 - DNA, 20 bp, Artificial Sequence
  Description of Artificial Sequence: Synthetic oligonucleotide
  Target: LAMA2; (-) strand; PAM type: NRG; PAM sequence: AAG
gatacaggttttccaactta

SEQ ID NO: 52841 - DNA, 20 bp, Artificial Sequence
  Description of Artificial Sequence: Synthetic oligonucleotide
  Target: LAMA2; (-) strand; PAM type: NRG; PAM sequence: AGG
ttttttttttactttgatac

SEQ ID NO: 52842 - DNA, 20 bp, Artificial Sequence
  Description of Artificial Sequence: Synthetic oligonucleotide
  Target: LAMA2; (-) strand; PAM type: NRG; PAM sequence: CAG
cttttttttttactttgata

SEQ ID NO: 52843 - DNA, 20 bp, Artificial Sequence
  Description of Artificial Sequence: Synthetic oligonucleotide
  Target: LAMA2; (-) strand; PAM type: NRG; PAM sequence: AGG
cctacagattttgtactctt

SEQ ID NO: 52844 - DNA, 20 bp, Artificial Sequence
  Description of Artificial Sequence: Synthetic oligonucleotide
  Target: LAMA2; (-) strand; PAM type: NRG; PAM sequence: TAG
acctacagattttgtactct

SEQ ID NO: 52845 - DNA, 20 bp, Artificial Sequence
  Description of Artificial Sequence: Synthetic oligonucleotide
  Target: LAMA2; (-) strand; PAM type: NRG; PAM sequence: CAG
ttttaaaagcttctaaccta

SEQ ID NO: 52846 - DNA, 20 bp, Artificial Sequence
  Description of Artificial Sequence: Synthetic oligonucleotide
  Target: LAMA2; (-) strand; PAM type: NRG; PAM sequence: AAG
agcctcattaaaacttttaa

SEQ ID NO: 52847 - DNA, 20 bp, Artificial Sequence
  Description of Artificial Sequence: Synthetic oligonucleotide
  Target: LAMA2; (-) strand; PAM type: NRG; PAM sequence: CAG
cttcaaaacttaagcagatt

SEQ ID NO: 52848 - DNA, 20 bp, Artificial Sequence
  Description of Artificial Sequence: Synthetic oligonucleotide
  Target: LAMA2; (-) strand; PAM type: NRG; PAM sequence: CAG
agtatacttcaaaacttaag

SEQ ID NO: 52849 - DNA, 20 bp, Artificial Sequence
  Description of Artificial Sequence: Synthetic oligonucleotide
  Target: LAMA2; (-) strand; PAM type: NRG; PAM sequence: AAG
ataagtatacttcaaaactt

SEQ ID NO: 52850 - DNA, 20 bp, Artificial Sequence
  Description of Artificial Sequence: Synthetic oligonucleotide
  Target: LAMA2; (-) strand; PAM type: NRG; PAM sequence: AAG
aagttaactggaagaaggat

SEQ ID NO: 52851 - DNA, 20 bp, Artificial Sequence
  Description of Artificial Sequence: Synthetic oligonucleotide
  Target: LAMA2; (-) strand; PAM type: NRG; PAM sequence: AGG
gctagaagttaactggaaga

SEQ ID NO: 52852 - DNA, 20 bp, Artificial Sequence
  Description of Artificial Sequence: Synthetic oligonucleotide
  Target: LAMA2; (-) strand; PAM type: NRG; PAM sequence: AAG
ggctagaagttaactggaag

SEQ ID NO: 52853 - DNA, 20 bp, Artificial Sequence
  Description of Artificial Sequence: Synthetic oligonucleotide
  Target: LAMA2; (-) strand; PAM type: NRG; PAM sequence: AAG
cttggctagaagttaactgg

SEQ ID NO: 52854 - DNA, 20 bp, Artificial Sequence
  Description of Artificial Sequence: Synthetic oligonucleotide
  Target: LAMA2; (-) strand; PAM type: NRG; PAM sequence: TGG
tgacttggctagaagttaac

SEQ ID NO: 52855 - DNA, 20 bp, Artificial Sequence
  Description of Artificial Sequence: Synthetic oligonucleotide
  Target: LAMA2; (-) strand; PAM type: NRG; PAM sequence: AAG
agaactattgacttggctag

SEQ ID NO: 52856 - DNA, 20 bp, Artificial Sequence
  Description of Artificial Sequence: Synthetic oligonucleotide
  Target: LAMA2; (-) strand; PAM type: NRG; PAM sequence: TAG
atcagaactattgacttggc

SEQ ID NO: 52857 - DNA, 20 bp, Artificial Sequence
  Description of Artificial Sequence: Synthetic oligonucleotide
  Target: LAMA2; (-) strand; PAM type: NRG; PAM sequence: TGG
aaatatcagaactattgact

SEQ ID NO: 52858 - DNA, 20 bp, Artificial Sequence
  Description of Artificial Sequence: Synthetic oligonucleotide
  Target: LAMA2; (-) strand; PAM type: NRG; PAM sequence: CAG
tagattataagaacaaatat

SEQ ID NO: 52859 - DNA, 20 bp, Artificial Sequence
  Description of Artificial Sequence: Synthetic oligonucleotide
  Target: LAMA2; (-) strand; PAM type: NRG; PAM sequence: AAG
tgctaaaaatgctagattat

SEQ ID NO: 52860 - DNA, 20 bp, Artificial Sequence
  Description of Artificial Sequence: Synthetic oligonucleotide
  Target: LAMA2; (-) strand; PAM type: NRG; PAM sequence: TAG
aatagtactgctaaaaatgc

SEQ ID NO: 52861 - DNA, 20 bp, Artificial Sequence
  Description of Artificial Sequence: Synthetic oligonucleotide
  Target: LAMA2; (-) strand; PAM type: NRG; PAM sequence: TAG
tctctttactccttaaaaaa

SEQ ID NO: 52862 - DNA, 20 bp, Artificial Sequence
  Description of Artificial Sequence: Synthetic oligonucleotide
  Target: LAMA2; (-) strand; PAM type: NRG; PAM sequence: GGG
tattattatagaaagagctt

SEQ ID NO: 52863 - DNA, 20 bp, Artificial Sequence
  Description of Artificial Sequence: Synthetic oligonucleotide
  Target: LAMA2; (-) strand; PAM type: NRG; PAM sequence: TGG
ttattattatagaaagagct

SEQ ID NO: 52864 - DNA, 20 bp, Artificial Sequence
  Description of Artificial Sequence: Synthetic oligonucleotide
  Target: LAMA2; (-) strand; PAM type: NRG; PAM sequence: GAG
gggagttattattatagaaa

SEQ ID NO: 52865 - DNA, 20 bp, Artificial Sequence
  Description of Artificial Sequence: Synthetic oligonucleotide
  Target: LAMA2; (-) strand; PAM type: NRG; PAM sequence: AAG
cagggagttattattataga

SEQ ID NO: 52866 - DNA, 20 bp, Artificial Sequence
  Description of Artificial Sequence: Synthetic oligonucleotide
  Target: LAMA2; (-) strand; PAM type: NRG; PAM sequence: TAG
taatcagggagttattatta

SEQ ID NO: 52867 - DNA, 20 bp, Artificial Sequence
  Description of Artificial Sequence: Synthetic oligonucleotide
  Target: LAMA2; (-) strand; PAM type: NRG; PAM sequence: GAG
ttccaagaattttaatcagg

SEQ ID NO: 52868 - DNA, 20 bp, Artificial Sequence
  Description of Artificial Sequence: Synthetic oligonucleotide
  Target: LAMA2; (-) strand; PAM type: NRG; PAM sequence: GGG
tattccaagaattttaatca

SEQ ID NO: 52869 - DNA, 20 bp, Artificial Sequence
  Description of Artificial Sequence: Synthetic oligonucleotide
  Target: LAMA2; (-) strand; PAM type: NRG; PAM sequence: AGG
ttattccaagaattttaatc

SEQ ID NO: 52870 - DNA, 20 bp, Artificial Sequence
  Description of Artificial Sequence: Synthetic oligonucleotide
  Target: LAMA2; (-) strand; PAM type: NRG; PAM sequence: CAG
tttattccaagaattttaat

SEQ ID NO: 52871 - DNA, 20 bp, Artificial Sequence
  Description of Artificial Sequence: Synthetic oligonucleotide
  Target: LAMA2; (-) strand; PAM type: NRG; PAM sequence: AAG
tgcaaggtcatttttattcc

SEQ ID NO: 52872 - DNA, 20 bp, Artificial Sequence
  Description of Artificial Sequence: Synthetic oligonucleotide
  Target: LAMA2; (-) strand; PAM type: NRG; PAM sequence: AGG
aaagttatatagtgaatgca

SEQ ID NO: 52873 - DNA, 20 bp, Artificial Sequence
  Description of Artificial Sequence: Synthetic oligonucleotide
  Target: LAMA2; (-) strand; PAM type: NRG; PAM sequence: AAG
aaaagttatatagtgaatgc

SEQ ID NO: 52874 - DNA, 20 bp, Artificial Sequence
  Description of Artificial Sequence: Synthetic oligonucleotide
  Target: LAMA2; (-) strand; PAM type: NRG; PAM sequence: TAG
atagaaggaaaaaagttata

SEQ ID NO: 52875 - DNA, 20 bp, Artificial Sequence
  Description of Artificial Sequence: Synthetic oligonucleotide
  Target: LAMA2; (-) strand; PAM type: NRG; PAM sequence: AAG
aagcaaaaatagaaggaaaa

SEQ ID NO: 52876 - DNA, 20 bp, Artificial Sequence
  Description of Artificial Sequence: Synthetic oligonucleotide
  Target: LAMA2; (-) strand; PAM type: NRG; PAM sequence: AGG
gaagcaaaagcaaaaataga

SEQ ID NO: 52877 - DNA, 20 bp, Artificial Sequence
  Description of Artificial Sequence: Synthetic oligonucleotide
  Target: LAMA2; (-) strand; PAM type: NRG; PAM sequence: AAG
agaagcaaaagcaaaaatag

SEQ ID NO: 52878 - DNA, 20 bp, Artificial Sequence
  Description of Artificial Sequence: Synthetic oligonucleotide
  Target: LAMA2; (-) strand; PAM type: NRG; PAM sequence: TAG
cagagaagcaaaagcaaaaa

SEQ ID NO: 52879 - DNA, 20 bp, Artificial Sequence
  Description of Artificial Sequence: Synthetic oligonucleotide
  Target: LAMA2; (-) strand; PAM type: NRG; PAM sequence: AAG
tttacctctcagagaagcaa

SEQ ID NO: 52880 - DNA, 20 bp, Artificial Sequence
  Description of Artificial Sequence: Synthetic oligonucleotide
  Target: LAMA2; (-) strand; PAM type: NRG; PAM sequence: AAG
ccccattttacctctcagag

SEQ ID NO: 52881 - DNA, 20 bp, Artificial Sequence
  Description of Artificial Sequence: Synthetic oligonucleotide
  Target: LAMA2; (-) strand; PAM type: NRG; PAM sequence: GAG
tggccccattttacctctca

SEQ ID NO: 52882 - DNA, 20 bp, Artificial Sequence
  Description of Artificial Sequence: Synthetic oligonucleotide
  Target: LAMA2; (-) strand; PAM type: NRG; PAM sequence: CAG
attggccccattttacctct

SEQ ID NO: 52883 - DNA, 20 bp, Artificial Sequence
  Description of Artificial Sequence: Synthetic oligonucleotide
  Target: LAMA2; (-) strand; PAM type: NRG; PAM sequence: TGG
ttatattaattaagtcatat

SEQ ID NO: 52884 - DNA, 20 bp, Artificial Sequence
  Description of Artificial Sequence: Synthetic oligonucleotide
  Target: LAMA2; (-) strand; PAM type: NRG; PAM sequence: AAG
tctcgtaaattatattaatt

SEQ ID NO: 52885 - DNA, 20 bp, Artificial Sequence
  Description of Artificial Sequence: Synthetic oligonucleotide
  Target: LAMA2; (-) strand; PAM type: NRG; PAM sequence: GAG
tttttaaaaataagtggcca

SEQ ID NO: 52886 - DNA, 20 bp, Artificial Sequence
  Description of Artificial Sequence: Synthetic oligonucleotide
  Target: LAMA2; (-) strand; PAM type: NRG; PAM sequence: CAG
aatttttaaaaataagtggc

SEQ ID NO: 52887 - DNA, 20 bp, Artificial Sequence
  Description of Artificial Sequence: Synthetic oligonucleotide
  Target: LAMA2; (-) strand; PAM type: NRG; PAM sequence: TGG
gtagaatttttaaaaataag

SEQ ID NO: 52888 - DNA, 20 bp, Artificial Sequence
  Description of Artificial Sequence: Synthetic oligonucleotide
  Target: LAMA2; (-) strand; PAM type: NRG; PAM sequence: AAG
aaagtagaatttttaaaaat

SEQ ID NO: 52889 - DNA, 20 bp, Artificial Sequence
  Description of Artificial Sequence: Synthetic oligonucleotide
  Target: LAMA2; (-) strand; PAM type: NRG; PAM sequence: TAG
caaagtttaatagttaaaag

SEQ ID NO: 52890 - DNA, 20 bp, Artificial Sequence
  Description of Artificial Sequence: Synthetic oligonucleotide
  Target: LAMA2; (-) strand; PAM type: NRG; PAM sequence: AAG
gagcaaagtttaatagttaa

SEQ ID NO: 52891 - DNA, 20 bp, Artificial Sequence
  Description of Artificial Sequence: Synthetic oligonucleotide
  Target: LAMA2; (-) strand; PAM type: NRG; PAM sequence: TAG
tgtaattgagcaaagtttaa

SEQ ID NO: 52892 - DNA, 20 bp, Artificial Sequence
  Description of Artificial Sequence: Synthetic oligonucleotide
  Target: LAMA2; (-) strand; PAM type: NRG; PAM sequence: AAG
acacaccttgtaattgagca

SEQ ID NO: 52893 - DNA, 20 bp, Artificial Sequence
  Description of Artificial Sequence: Synthetic oligonucleotide
  Target: LAMA2; (-) strand; PAM type: NRG; PAM sequence: GAG
tttaaacacaccttgtaatt

SEQ ID NO: 52894 - DNA, 20 bp, Artificial Sequence
  Description of Artificial Sequence: Synthetic oligonucleotide
  Target: LAMA2; (-) strand; PAM type: NRG; PAM sequence: AAG
ccagctgcctaacattatta

SEQ ID NO: 52895 - DNA, 20 bp, Artificial Sequence
  Description of Artificial Sequence: Synthetic oligonucleotide
  Target: LAMA2; (-) strand; PAM type: NRG; PAM sequence: CAG
ccctggcccctcatttctcc

SEQ ID NO: 52896 - DNA, 20 bp, Artificial Sequence
  Description of Artificial Sequence: Synthetic oligonucleotide
  Target: LAMA2; (-) strand; PAM type: NRG; PAM sequence: TGG
gacataaggattggtgcccc

SEQ ID NO: 52897 - DNA, 20 bp, Artificial Sequence
  Description of Artificial Sequence: Synthetic oligonucleotide
  Target: LAMA2; (-) strand; PAM type: NRG; PAM sequence: TGG
ttccaagtggacataaggat

SEQ ID NO: 52898 - DNA, 20 bp, Artificial Sequence
  Description of Artificial Sequence: Synthetic oligonucleotide
  Target: LAMA2; (-) strand; PAM type: NRG; PAM sequence: AGG
ccccattccaagtggacata

SEQ ID NO: 52899 - DNA, 20 bp, Artificial Sequence
  Description of Artificial Sequence: Synthetic oligonucleotide
  Target: LAMA2; (-) strand; PAM type: NRG; PAM sequence: AAG
gccccattccaagtggacat

SEQ ID NO: 52900 - DNA, 20 bp, Artificial Sequence
  Description of Artificial Sequence: Synthetic oligonucleotide
  Target: LAMA2; (-) strand; PAM type: NRG; PAM sequence: TGG
agtttctgccccattccaag

SEQ ID NO: 52901 - DNA, 20 bp, Artificial Sequence
  Description of Artificial Sequence: Synthetic oligonucleotide
  Target: LAMA2; (-) strand; PAM type: NRG; PAM sequence: AAG
ttgagtttctgccccattcc

SEQ ID NO: 52902 - DNA, 20 bp, Artificial Sequence
  Description of Artificial Sequence: Synthetic oligonucleotide
  Target: LAMA2; (-) strand; PAM type: NRG; PAM sequence: GAG
atccttactctgcatgcttt

SEQ ID NO: 52903 - DNA, 20 bp, Artificial Sequence
  Description of Artificial Sequence: Synthetic oligonucleotide
  Target: LAMA2; (-) strand; PAM type: NRG; PAM sequence: TAG
tgtgtgttcaggataattct

SEQ ID NO: 52904 - DNA, 20 bp, Artificial Sequence
  Description of Artificial Sequence: Synthetic oligonucleotide
  Target: LAMA2; (-) strand; PAM type: NRG; PAM sequence: AGG
gagaaatcctgtgtgtgttc

SEQ ID NO: 52905 - DNA, 20 bp, Artificial Sequence
  Description of Artificial Sequence: Synthetic oligonucleotide
  Target: LAMA2; (-) strand; PAM type: NRG; PAM sequence: CAG
agagaaatcctgtgtgtgtt

SEQ ID NO: 52906 - DNA, 20 bp, Artificial Sequence
  Description of Artificial Sequence: Synthetic oligonucleotide
  Target: LAMA2; (-) strand; PAM type: NRG; PAM sequence: GAG
taagaagggagaggaaaaaa

SEQ ID NO: 52907 - DNA, 20 bp, Artificial Sequence
  Description of Artificial Sequence: Synthetic oligonucleotide
  Target: LAMA2; (-) strand; PAM type: NRG; PAM sequence: AAG
aataagaagggagaggaaaa

SEQ ID NO: 52908 - DNA, 20 bp, Artificial Sequence
  Description of Artificial Sequence: Synthetic oligonucleotide
  Target: LAMA2; (-) strand; PAM type: NRG; PAM sequence: AGG
gagagtaaataagaagggag

SEQ ID NO: 52909 - DNA, 20 bp, Artificial Sequence
  Description of Artificial Sequence: Synthetic oligonucleotide
  Target: LAMA2; (-) strand; PAM type: NRG; PAM sequence: GAG
agagagtaaataagaaggga

SEQ ID NO: 52910 - DNA, 20 bp, Artificial Sequence
  Description of Artificial Sequence: Synthetic oligonucleotide
  Target: LAMA2; (-) strand; PAM type: NRG; PAM sequence: GAG
aaagagagtaaataagaagg

SEQ ID NO: 52911 - DNA, 20 bp, Artificial Sequence
  Description of Artificial Sequence: Synthetic oligonucleotide
  Target: LAMA2; (-) strand; PAM type: NRG; PAM sequence: GGG
gaaaagagagtaaataagaa

SEQ ID NO: 52912 - DNA, 20 bp, Artificial Sequence
  Description of Artificial Sequence: Synthetic oligonucleotide
  Target: LAMA2; (-) strand; PAM type: NRG; PAM sequence: AGG
tgaaaagagagtaaataaga

SEQ ID NO: 52913 - DNA, 20 bp, Artificial Sequence
  Description of Artificial Sequence: Synthetic oligonucleotide
  Target: LAMA2; (-) strand; PAM type: NRG; PAM sequence: AAG
ttgaaaagagagtaaataag

SEQ ID NO: 52914 - DNA, 20 bp, Artificial Sequence
  Description of Artificial Sequence: Synthetic oligonucleotide
  Target: LAMA2; (-) strand; PAM type: NRG; PAM sequence: AAG
tatttgaaaagagagtaaat

SEQ ID NO: 52915 - DNA, 20 bp, Artificial Sequence
  Description of Artificial Sequence: Synthetic oligonucleotide
  Target: LAMA2; (-) strand; PAM type: NRG; PAM sequence: GAG
tattaccttatttgaaaaga

SEQ ID NO: 52916 - DNA, 20 bp, Artificial Sequence
  Description of Artificial Sequence: Synthetic oligonucleotide
  Target: LAMA2; (-) strand; PAM type: NRG; PAM sequence: GAG
aatattaccttatttgaaaa

SEQ ID NO: 52917 - DNA, 20 bp, Artificial Sequence
  Description of Artificial Sequence: Synthetic oligonucleotide
  Target: LAMA2; (-) strand; PAM type: NRG; PAM sequence: AAG
ttaatattaccttatttgaa

SEQ ID NO: 52918 - DNA, 20 bp, Artificial Sequence
  Description of Artificial Sequence: Synthetic oligonucleotide
  Target: LAMA2; (-) strand; PAM type: NRG; PAM sequence: GAG
tgcctgggtcatagaaatca

SEQ ID NO: 52919 - DNA, 20 bp, Artificial Sequence
  Description of Artificial Sequence: Synthetic oligonucleotide
  Target: LAMA2; (-) strand; PAM type: NRG; PAM sequence: CAG
tgtgcctgggtcatagaaat

SEQ ID NO: 52920 - DNA, 20 bp, Artificial Sequence
  Description of Artificial Sequence: Synthetic oligonucleotide
  Target: LAMA2; (-) strand; PAM type: NRG; PAM sequence: TAG
ttcatcttgtgcctgggtca

SEQ ID NO: 52921 - DNA, 20 bp, Artificial Sequence
  Description of Artificial Sequence: Synthetic oligonucleotide
  Target: LAMA2; (-) strand; PAM type: NRG; PAM sequence: GGG
attcacttcatcttgtgcct

SEQ ID NO: 52922 - DNA, 20 bp, Artificial Sequence
  Description of Artificial Sequence: Synthetic oligonucleotide
  Target: LAMA2; (-) strand; PAM type: NRG; PAM sequence: TGG
aattcacttcatcttgtgcc

SEQ ID NO: 52923 - DNA, 20 bp, Artificial Sequence
  Description of Artificial Sequence: Synthetic oligonucleotide
  Target: LAMA2; (-) strand; PAM type: NRG; PAM sequence: TAG
gtggtatcttgacagaatgg

SEQ ID NO: 52924 - DNA, 20 bp, Artificial Sequence
  Description of Artificial Sequence: Synthetic oligonucleotide
  Target: LAMA2; (-) strand; PAM type: NRG; PAM sequence: TGG
taagtggtatcttgacagaa

SEQ ID NO: 52925 - DNA, 20 bp, Artificial Sequence
  Description of Artificial Sequence: Synthetic oligonucleotide
  Target: LAMA2; (-) strand; PAM type: NRG; PAM sequence: CAG
gcatttaagtggtatcttga

SEQ ID NO: 52926 - DNA, 20 bp, Artificial Sequence
  Description of Artificial Sequence: Synthetic oligonucleotide
  Target: LAMA2; (-) strand; PAM type: NRG; PAM sequence: TGG
tattgtatgtagcatttaag

SEQ ID NO: 52927 - DNA, 20 bp, Artificial Sequence
  Description of Artificial Sequence: Synthetic oligonucleotide
  Target: LAMA2; (-) strand; PAM type: NRG; PAM sequence: AAG
ccttattgtatgtagcattt

SEQ ID NO: 52928 - DNA, 20 bp, Artificial Sequence
  Description of Artificial Sequence: Synthetic oligonucleotide
  Target: LAMA2; (-) strand; PAM type: NRG; PAM sequence: TAG
ataaaattccttattgtatg

SEQ ID NO: 52929 - DNA, 20 bp, Artificial Sequence
  Description of Artificial Sequence: Synthetic oligonucleotide
  Target: LAMA2; (-) strand; PAM type: NRG; PAM sequence: TAG
ctatagtagattgtatgttg

SEQ ID NO: 52930 - DNA, 20 bp, Artificial Sequence
  Description of Artificial Sequence: Synthetic oligonucleotide
  Target: LAMA2; (-) strand; PAM type: NRG; PAM sequence: TAG
cagattatagcagcctatag

SEQ ID NO: 52931 - DNA, 20 bp, Artificial Sequence
  Description of Artificial Sequence: Synthetic oligonucleotide
  Target: LAMA2; (-) strand; PAM type: NRG; PAM sequence: TAG
atgcagattatagcagccta

SEQ ID NO: 52932 - DNA, 20 bp, Artificial Sequence
  Description of Artificial Sequence: Synthetic oligonucleotide
  Target: LAMA2; (-) strand; PAM type: NRG; PAM sequence: CAG
tactagaatgcagattatag

SEQ ID NO: 52933 - DNA, 20 bp, Artificial Sequence
  Description of Artificial Sequence: Synthetic oligonucleotide
  Target: LAMA2; (-) strand; PAM type: NRG; PAM sequence: TAG
atatactagaatgcagatta

SEQ ID NO: 52934 - DNA, 20 bp, Artificial Sequence
  Description of Artificial Sequence: Synthetic oligonucleotide
  Target: LAMA2; (-) strand; PAM type: NRG; PAM sequence: CAG
caataatatatactagaatg

SEQ ID NO: 52935 - DNA, 20 bp, Artificial Sequence
  Description of Artificial Sequence: Synthetic oligonucleotide
  Target: LAMA2; (-) strand; PAM type: NRG; PAM sequence: TAG
acaaagacaataatatatac

SEQ ID NO: 52936 - DNA, 20 bp, Artificial Sequence
  Description of Artificial Sequence: Synthetic oligonucleotide
  Target: LAMA2; (-) strand; PAM type: NRG; PAM sequence: AAG
attgtaaatggtctatgaca

SEQ ID NO: 52937 - DNA, 20 bp, Artificial Sequence
  Description of Artificial Sequence: Synthetic oligonucleotide
  Target: LAMA2; (-) strand; PAM type: NRG; PAM sequence: TGG
acctccagatatattgtaaa

SEQ ID NO: 52938 - DNA, 20 bp, Artificial Sequence
  Description of Artificial Sequence: Synthetic oligonucleotide
  Target: LAMA2; (-) strand; PAM type: NRG; PAM sequence: CAG
tttatccttgagccaacctc

SEQ ID NO: 52939 - DNA, 20 bp, Artificial Sequence
  Description of Artificial Sequence: Synthetic oligonucleotide
  Target: LAMA2; (-) strand; PAM type: NRG; PAM sequence: GAG
ggtttaagtcatttatcctt

SEQ ID NO: 52940 - DNA, 20 bp, Artificial Sequence
  Description of Artificial Sequence: Synthetic oligonucleotide
  Target: LAMA2; (-) strand; PAM type: NRG; PAM sequence: AAG
ctttcaacattaacaggttt

SEQ ID NO: 52941 - DNA, 20 bp, Artificial Sequence
  Description of Artificial Sequence: Synthetic oligonucleotide
  Target: LAMA2; (-) strand; PAM type: NRG; PAM sequence: AGG
tacatactttcaacattaac

SEQ ID NO: 52942 - DNA, 20 bp, Artificial Sequence
  Description of Artificial Sequence: Synthetic oligonucleotide
  Target: LAMA2; (-) strand; PAM type: NRG; PAM sequence: CAG
ttacatactttcaacattaa

SEQ ID NO: 52943 - DNA, 20 bp, Artificial Sequence
  Description of Artificial Sequence: Synthetic oligonucleotide
  Target: LAMA2; (-) strand; PAM type: NRG; PAM sequence: AAG
taaatcactatccaatttta

SEQ ID NO: 52944 - DNA, 20 bp, Artificial Sequence
  Description of Artificial Sequence: Synthetic oligonucleotide
  Target: LAMA2; (-) strand; PAM type: NRG; PAM sequence: AGG
gaataaagatcgtgtacata

SEQ ID NO: 52945 - DNA, 20 bp, Artificial Sequence
  Description of Artificial Sequence: Synthetic oligonucleotide
  Target: LAMA2; (-) strand; PAM type: NRG; PAM sequence: AAG
tgaataaagatcgtgtacat

SEQ ID NO: 52946 - DNA, 20 bp, Artificial Sequence
  Description of Artificial Sequence: Synthetic oligonucleotide
  Target: LAMA2; (-) strand; PAM type: NRG; PAM sequence: AAG
ataatatctgaaggtgaata

SEQ ID NO: 52947 - DNA, 20 bp, Artificial Sequence
  Description of Artificial Sequence: Synthetic oligonucleotide
  Target: LAMA2; (-) strand; PAM type: NRG; PAM sequence: AGG
ttgagaataataatatctga

SEQ ID NO: 52948 - DNA, 20 bp, Artificial Sequence
  Description of Artificial Sequence: Synthetic oligonucleotide
  Target: LAMA2; (-) strand; PAM type: NRG; PAM sequence: AAG
tttgagaataataatatctg

SEQ ID NO: 52949 - DNA, 20 bp, Artificial Sequence
  Description of Artificial Sequence: Synthetic oligonucleotide
  Target: LAMA2; (-) strand; PAM type: NRG; PAM sequence: GAG
aagttctaaatttgtccttt

SEQ ID NO: 52950 - DNA, 20 bp, Artificial Sequence
  Description of Artificial Sequence: Synthetic oligonucleotide
  Target: LAMA2; (-) strand; PAM type: NRG; PAM sequence: AAG
attacaactactggaagcct

SEQ ID NO: 52951 - DNA, 20 bp, Artificial Sequence
  Description of Artificial Sequence: Synthetic oligonucleotide
  Target: LAMA2; (-) strand; PAM type: NRG; PAM sequence: AAG
acttaaattacaactactgg

SEQ ID NO: 52952 - DNA, 20 bp, Artificial Sequence
  Description of Artificial Sequence: Synthetic oligonucleotide
  Target: LAMA2; (-) strand; PAM type: NRG; PAM sequence: TGG
taaacttaaattacaactac

SEQ ID NO: 52953 - DNA, 20 bp, Artificial Sequence
  Description of Artificial Sequence: Synthetic oligonucleotide
  Target: LAMA2; (-) strand; PAM type: NRG; PAM sequence: AAG
gtgttttagttgttgaaata

SEQ ID NO: 52954 - DNA, 20 bp, Artificial Sequence
  Description of Artificial Sequence: Synthetic oligonucleotide
  Target: LAMA2; (-) strand; PAM type: NRG; PAM sequence: TAG
aaacaataccggaagtgttt

SEQ ID NO: 52955 - DNA, 20 bp, Artificial Sequence
  Description of Artificial Sequence: Synthetic oligonucleotide
  Target: LAMA2; (-) strand; PAM type: NRG; PAM sequence: AAG
ttcagcacaaacaataccgg

SEQ ID NO: 52956 - DNA, 20 bp, Artificial Sequence
  Description of Artificial Sequence: Synthetic oligonucleotide
  Target: LAMA2; (-) strand; PAM type: NRG; PAM sequence: CGG
gaattcagcacaaacaatac

SEQ ID NO: 52957 - DNA, 20 bp, Artificial Sequence
  Description of Artificial Sequence: Synthetic oligonucleotide
  Target: LAMA2; (-) strand; PAM type: NRG; PAM sequence: CAG
gaaccataaaaaagggaatt

SEQ ID NO: 52958 - DNA, 20 bp, Artificial Sequence
  Description of Artificial Sequence: Synthetic oligonucleotide
  Target: LAMA2; (-) strand; PAM type: NRG; PAM sequence: GGG
aaccttggaaccataaaaaa

SEQ ID NO: 52959 - DNA, 20 bp, Artificial Sequence
  Description of Artificial Sequence: Synthetic oligonucleotide
  Target: LAMA2; (-) strand; PAM type: NRG; PAM sequence: AGG
aaaccttggaaccataaaaa

SEQ ID NO: 52960 - DNA, 20 bp, Artificial Sequence
  Description of Artificial Sequence: Synthetic oligonucleotide
  Target: LAMA2; (-) strand; PAM type: NRG; PAM sequence: AAG
gaaaccttggaaccataaaa

SEQ ID NO: 52961 - DNA, 20 bp, Artificial Sequence
  Description of Artificial Sequence: Synthetic oligonucleotide
  Target: LAMA2; (-) strand; PAM type: NRG; PAM sequence: TGG
caattaatggaaagaaacct

SEQ ID NO: 52962 - DNA, 20 bp, Artificial Sequence
  Description of Artificial Sequence: Synthetic oligonucleotide
  Target: LAMA2; (-) strand; PAM type: NRG; PAM sequence: AAG
tggcctaaacaattaatgga

SEQ ID NO: 52963 - DNA, 20 bp, Artificial Sequence
  Description of Artificial Sequence: Synthetic oligonucleotide
  Target: LAMA2; (-) strand; PAM type: NRG; PAM sequence: TGG
aacatggcctaaacaattaa

SEQ ID NO: 52964 - DNA, 20 bp, Artificial Sequence
  Description of Artificial Sequence: Synthetic oligonucleotide
  Target: LAMA2; (-) strand; PAM type: NRG; PAM sequence: TGG
acaacactaaaaagaaaaca

SEQ ID NO: 52965 - DNA, 20 bp, Artificial Sequence
  Description of Artificial Sequence: Synthetic oligonucleotide
  Target: LAMA2; (-) strand; PAM type: NRG; PAM sequence: AAG
ttcaatggaacaacactaaa

SEQ ID NO: 52966 - DNA, 20 bp, Artificial Sequence
  Description of Artificial Sequence: Synthetic oligonucleotide
  Target: LAMA2; (-) strand; PAM type: NRG; PAM sequence: TGG
tcacagagggcttgcttcaa

SEQ ID NO: 52967 - DNA, 20 bp, Artificial Sequence
  Description of Artificial Sequence: Synthetic oligonucleotide
  Target: LAMA2; (-) strand; PAM type: NRG; PAM sequence: GGG
tatcccgtgattttcacaga

SEQ ID NO: 52968 - DNA, 20 bp, Artificial Sequence
  Description of Artificial Sequence: Synthetic oligonucleotide
  Target: LAMA2; (-) strand; PAM type: NRG; PAM sequence: AGG
atatcccgtgattttcacag

SEQ ID NO: 52969 - DNA, 20 bp, Artificial Sequence
  Description of Artificial Sequence: Synthetic oligonucleotide
  Target: LAMA2; (-) strand; PAM type: NRG; PAM sequence: GAG
catatcccgtgattttcaca

SEQ ID NO: 52970 - DNA, 20 bp, Artificial Sequence
  Description of Artificial Sequence: Synthetic oligonucleotide
  Target: LAMA2; (-) strand; PAM type: NRG; PAM sequence: CAG
ctcatatcccgtgattttca

SEQ ID NO: 52971 - DNA, 20 bp, Artificial Sequence
  Description of Artificial Sequence: Synthetic oligonucleotide
  Target: LAMA2; (-) strand; PAM type: NRG; PAM sequence: CAG
tagccaggaaaacccttctc

SEQ ID NO: 52972 - DNA, 20 bp, Artificial Sequence
  Description of Artificial Sequence: Synthetic oligonucleotide
  Target: LAMA2; (-) strand; PAM type: NRG; PAM sequence: AGG
cagaaaagttgatcatagcc

SEQ ID NO: 52973 - DNA, 20 bp, Artificial Sequence
  Description of Artificial Sequence: Synthetic oligonucleotide
  Target: LAMA2; (-) strand; PAM type: NRG; PAM sequence: CAG
acagaaaagttgatcatagc

SEQ ID NO: 52974 - DNA, 20 bp, Artificial Sequence
  Description of Artificial Sequence: Synthetic oligonucleotide
  Target: LAMA2; (-) strand; PAM type: NRG; PAM sequence: TAG
gaaaacagaaaagttgatca

SEQ ID NO: 52975 - DNA, 20 bp, Artificial Sequence
  Description of Artificial Sequence: Synthetic oligonucleotide
  Target: LAMA2; (-) strand; PAM type: NRG; PAM sequence: AAG
tagtataatcgaaaacagaa

SEQ ID NO: 52976 - DNA, 20 bp, Artificial Sequence
  Description of Artificial Sequence: Synthetic oligonucleotide
  Target: LAMA2; (-) strand; PAM type: NRG; PAM sequence: CAG
agtgctagtataatcgaaaa

SEQ ID NO: 52977 - DNA, 20 bp, Artificial Sequence
  Description of Artificial Sequence: Synthetic oligonucleotide
  Target: LAMA2; (-) strand; PAM type: NRG; PAM sequence: TAG
ttgcctagaaaggtcagtgc

SEQ ID NO: 52978 - DNA, 20 bp, Artificial Sequence
  Description of Artificial Sequence: Synthetic oligonucleotide
  Target: LAMA2; (-) strand; PAM type: NRG; PAM sequence: CAG
tagcgcttgcctagaaaggt

SEQ ID NO: 52979 - DNA, 20 bp, Artificial Sequence
  Description of Artificial Sequence: Synthetic oligonucleotide
  Target: LAMA2; (-) strand; PAM type: NRG; PAM sequence: AGG
caattagcgcttgcctagaa

SEQ ID NO: 52980 - DNA, 20 bp, Artificial Sequence
  Description of Artificial Sequence: Synthetic oligonucleotide
  Target: LAMA2; (-) strand; PAM type: NRG; PAM sequence: AAG
acaattagcgcttgcctaga

SEQ ID NO: 52981 - DNA, 20 bp, Artificial Sequence
  Description of Artificial Sequence: Synthetic oligonucleotide
  Target: LAMA2; (-) strand; PAM type: NRG; PAM sequence: TAG
ctacacaattagcgcttgcc

SEQ ID NO: 52982 - DNA, 20 bp, Artificial Sequence
  Description of Artificial Sequence: Synthetic oligonucleotide
  Target: LAMA2; (-) strand; PAM type: NRG; PAM sequence: TAG
aaatagaacttctacacaat

SEQ ID NO: 52983 - DNA, 20 bp, Artificial Sequence
  Description of Artificial Sequence: Synthetic oligonucleotide
  Target: LAMA2; (-) strand; PAM type: NRG; PAM sequence: TAG
tatcgaattataaggggaaa

SEQ ID NO: 52984 - DNA, 20 bp, Artificial Sequence
  Description of Artificial Sequence: Synthetic oligonucleotide
  Target: LAMA2; (-) strand; PAM type: NRG; PAM sequence: GGG
aagtggtatcgaattataag

SEQ ID NO: 52985 - DNA, 20 bp, Artificial Sequence
  Description of Artificial Sequence: Synthetic oligonucleotide
  Target: LAMA2; (-) strand; PAM type: NRG; PAM sequence: GGG
aaagtggtatcgaattataa

SEQ ID NO: 52986 - DNA, 20 bp, Artificial Sequence
  Description of Artificial Sequence: Synthetic oligonucleotide
  Target: LAMA2; (-) strand; PAM type: NRG; PAM sequence: AGG
taaagtggtatcgaattata

SEQ ID NO: 52987 - DNA, 20 bp, Artificial Sequence
  Description of Artificial Sequence: Synthetic oligonucleotide
  Target: LAMA2; (-) strand; PAM type: NRG; PAM sequence: AAG
ataaagtggtatcgaattat

SEQ ID NO: 52988 - DNA, 20 bp, Artificial Sequence
  Description of Artificial Sequence: Synthetic oligonucleotide
  Target: LAMA2; (-) strand; PAM type: NRG; PAM sequence: TGG
gtcaaaaattcttaataaag

SEQ ID NO: 52989 - DNA, 20 bp, Artificial Sequence
  Description of Artificial Sequence: Synthetic oligonucleotide
  Target: LAMA2; (-) strand; PAM type: NRG; PAM sequence: AAG
catgtcaaaaattcttaata

SEQ ID NO: 52990 - DNA, 20 bp, Artificial Sequence
  Description of Artificial Sequence: Synthetic oligonucleotide
  Target: LAMA2; (-) strand; PAM type: NRG; PAM sequence: TGG
tcaactgcaacatctaaaaa

SEQ ID NO: 52991 - DNA, 20 bp, Artificial Sequence
  Description of Artificial Sequence: Synthetic oligonucleotide
  Target: LAMA2; (-) strand; PAM type: NRG; PAM sequence: TGG
aaagtaaaaaacaaaaagtc

SEQ ID NO: 52992 - DNA, 20 bp, Artificial Sequence
  Description of Artificial Sequence: Synthetic oligonucleotide
  Target: LAMA2; (-) strand; PAM type: NRG; PAM sequence: AAG
aagaaaaagtaaaaaacaaa

SEQ ID NO: 52993 - DNA, 20 bp, Artificial Sequence
  Description of Artificial Sequence: Synthetic oligonucleotide
  Target: LAMA2; (-) strand; PAM type: NRG; PAM sequence: AAG
cacataagatttcaaagaaa

SEQ ID NO: 52994 - DNA, 20 bp, Artificial Sequence
  Description of Artificial Sequence: Synthetic oligonucleotide
  Target: LAMA2; (-) strand; PAM type: NRG; PAM sequence: AAG
agaaaccacataagatttca

SEQ ID NO: 52995 - DNA, 20 bp, Artificial Sequence
  Description of Artificial Sequence: Synthetic oligonucleotide
  Target: LAMA2; (-) strand; PAM type: NRG; PAM sequence: AAG
gtatgctatagaaaccacat

SEQ ID NO: 52996 - DNA, 20 bp, Artificial Sequence
  Description of Artificial Sequence: Synthetic oligonucleotide
  Target: LAMA2; (-) strand; PAM type: NRG; PAM sequence: TAG
tactacaatcgagtatgcta

SEQ ID NO: 52997 - DNA, 20 bp, Artificial Sequence
  Description of Artificial Sequence: Synthetic oligonucleotide
  Target: LAMA2; (-) strand; PAM type: NRG; PAM sequence: GAG
atgctattcatactacaatc

SEQ ID NO: 52998 - DNA, 20 bp, Artificial Sequence
  Description of Artificial Sequence: Synthetic oligonucleotide
  Target: LAMA2; (-) strand; PAM type: NRG; PAM sequence: TGG
atatagctaaagaatttcct

SEQ ID NO: 52999 - DNA, 20 bp, Artificial Sequence
  Description of Artificial Sequence: Synthetic oligonucleotide
  Target: LAMA2; (-) strand; PAM type: NRG; PAM sequence: AAG
gtcaattttaaatatagcta

SEQ ID NO: 53000 - DNA, 20 bp, Artificial Sequence
  Description of Artificial Sequence: Synthetic oligonucleotide
  Target: LAMA2; (-) strand; PAM type: NRG; PAM sequence: TAG
tatttcgtcaattttaaata

SEQ ID NO: 53001 - DNA, 20 bp, Artificial Sequence
  Description of Artificial Sequence: Synthetic oligonucleotide
  Target: LAMA2; (-) strand; PAM type: NRG; PAM sequence: CAG
gacactgccttgctgaaatg

SEQ ID NO: 53002 - DNA, 20 bp, Artificial Sequence
  Description of Artificial Sequence: Synthetic oligonucleotide
  Target: LAMA2; (-) strand; PAM type: NRG; PAM sequence: TAG
aagaatatcagaaaacattt

SEQ ID NO: 53003 - DNA, 20 bp, Artificial Sequence
  Description of Artificial Sequence: Synthetic oligonucleotide
  Target: LAMA2; (-) strand; PAM type: NRG; PAM sequence: CAG
catattattcacaagaatat

SEQ ID NO: 53004 - DNA, 20 bp, Artificial Sequence
  Description of Artificial Sequence: Synthetic oligonucleotide
  Target: LAMA2; (-) strand; PAM type: NRG; PAM sequence: AAG
agtttccacatattattcac

SEQ ID NO: 53005 - DNA, 20 bp, Artificial Sequence
  Description of Artificial Sequence: Synthetic oligonucleotide
  Target: LAMA2; (-) strand; PAM type: NRG; PAM sequence: CAG
atttacctgccattatgctt

SEQ ID NO: 53006 - DNA, 20 bp, Artificial Sequence
  Description of Artificial Sequence: Synthetic oligonucleotide
  Target: LAMA2; (-) strand; PAM type: NRG; PAM sequence: CAG
tttgtgaactatttttcaat

SEQ ID NO: 53007 - DNA, 20 bp, Artificial Sequence
  Description of Artificial Sequence: Synthetic oligonucleotide
  Target: LAMA2; (-) strand; PAM type: NRG; PAM sequence: CGG
cactgctagagacttctttc

SEQ ID NO: 53008 - DNA, 20 bp, Artificial Sequence
  Description of Artificial Sequence: Synthetic oligonucleotide
  Target: LAMA2; (-) strand; PAM type: NRG; PAM sequence: GAG
aaacctctgttgcactgcta

SEQ ID NO: 53009 - DNA, 20 bp, Artificial Sequence
  Description of Artificial Sequence: Synthetic oligonucleotide
  Target: LAMA2; (-) strand; PAM type: NRG; PAM sequence: TAG
gaaaacctctgttgcactgc

SEQ ID NO: 53010 - DNA, 20 bp, Artificial Sequence
  Description of Artificial Sequence: Synthetic oligonucleotide
  Target: LAMA2; (-) strand; PAM type: NRG; PAM sequence: AAG
ttaccaagatagttgagtat

SEQ ID NO: 53011 - DNA, 20 bp, Artificial Sequence
  Description of Artificial Sequence: Synthetic oligonucleotide
  Target: LAMA2; (-) strand; PAM type: NRG; PAM sequence: GAG
aagccattaccaagatagtt

SEQ ID NO: 53012 - DNA, 20 bp, Artificial Sequence
  Description of Artificial Sequence: Synthetic oligonucleotide
  Target: LAMA2; (-) strand; PAM type: NRG; PAM sequence: TAG
ccatcaagccattaccaaga

SEQ ID NO: 53013 - DNA, 20 bp, Artificial Sequence
  Description of Artificial Sequence: Synthetic oligonucleotide
  Target: LAMA2; (-) strand; PAM type: NRG; PAM sequence: AAG
ttttccatcaagccattacc

SEQ ID NO: 53014 - DNA, 20 bp, Artificial Sequence
  Description of Artificial Sequence: Synthetic oligonucleotide
  Target: LAMA2; (-) strand; PAM type: NRG; PAM sequence: AAG
tggattttacattttccatc

SEQ ID NO: 53015 - DNA, 20 bp, Artificial Sequence
  Description of Artificial Sequence: Synthetic oligonucleotide
  Target: LAMA2; (-) strand; PAM type: NRG; PAM sequence: TGG
acatgcagttctgataagct

SEQ ID NO: 53016 - DNA, 20 bp, Artificial Sequence
  Description of Artificial Sequence: Synthetic oligonucleotide
  Target: LAMA2; (-) strand; PAM type: NRG; PAM sequence: AAG
ggaccacatgcagttctgat

SEQ ID NO: 53017 - DNA, 20 bp, Artificial Sequence
  Description of Artificial Sequence: Synthetic oligonucleotide
  Target: LAMA2; (-) strand; PAM type: NRG; PAM sequence: CAG
tatcaattttggaccacatg

SEQ ID NO: 53018 - DNA, 20 bp, Artificial Sequence
  Description of Artificial Sequence: Synthetic oligonucleotide
  Target: LAMA2; (-) strand; PAM type: NRG; PAM sequence: TGG
ttagccacctctatcaattt

SEQ ID NO: 53019 - DNA, 20 bp, Artificial Sequence
  Description of Artificial Sequence: Synthetic oligonucleotide
  Target: LAMA2; (-) strand; PAM type: NRG; PAM sequence: TAG
gaacttgttagtaaccagct

SEQ ID NO: 53020 - DNA, 20 bp, Artificial Sequence
  Description of Artificial Sequence: Synthetic oligonucleotide
  Target: LAMA2; (-) strand; PAM type: NRG; PAM sequence: CAG
tttctgaacttgttagtaac

SEQ ID NO: 53021 - DNA, 20 bp, Artificial Sequence
  Description of Artificial Sequence: Synthetic oligonucleotide
  Target: LAMA2; (-) strand; PAM type: NRG; PAM sequence: TAG
tttaaaatttctgaacttgt

SEQ ID NO: 53022 - DNA, 20 bp, Artificial Sequence
  Description of Artificial Sequence: Synthetic oligonucleotide
  Target: LAMA2; (-) strand; PAM type: NRG; PAM sequence: GAG
cattcatggtcaaggctata

SEQ ID NO: 53023 - DNA, 20 bp, Artificial Sequence
  Description of Artificial Sequence: Synthetic oligonucleotide
  Target: LAMA2; (-) strand; PAM type: NRG; PAM sequence: TAG
gccattcatggtcaaggcta

SEQ ID NO: 53024 - DNA, 20 bp, Artificial Sequence
  Description of Artificial Sequence: Synthetic oligonucleotide
  Target: LAMA2; (-) strand; PAM type: NRG; PAM sequence: AGG
gtaggtgccattcatggtca

SEQ ID NO: 53025 - DNA, 20 bp, Artificial Sequence
  Description of Artificial Sequence: Synthetic oligonucleotide
  Target: LAMA2; (-) strand; PAM type: NRG; PAM sequence: AAG
tgtaggtgccattcatggtc

SEQ ID NO: 53026 - DNA, 20 bp, Artificial Sequence
  Description of Artificial Sequence: Synthetic oligonucleotide
  Target: LAMA2; (-) strand; PAM type: NRG; PAM sequence: TGG
cttcatgtaggtgccattca

SEQ ID NO: 53027 - DNA, 20 bp, Artificial Sequence
  Description of Artificial Sequence: Synthetic oligonucleotide
  Target: LAMA2; (-) strand; PAM type: NRG; PAM sequence: AGG
taataaaagcaacttcatgt

SEQ ID NO: 53028 - DNA, 20 bp, Artificial Sequence
  Description of Artificial Sequence: Synthetic oligonucleotide
  Target: LAMA2; (-) strand; PAM type: NRG; PAM sequence: TAG
ataataaaagcaacttcatg

SEQ ID NO: 53029 - DNA, 20 bp, Artificial Sequence
  Description of Artificial Sequence: Synthetic oligonucleotide
  Target: LAMA2; (-) strand; PAM type: NRG; PAM sequence: AAG
catgtggatatgaataataa

SEQ ID NO: 53030 - DNA, 20 bp, Artificial Sequence
  Description of Artificial Sequence: Synthetic oligonucleotide
  Target: LAMA2; (-) strand; PAM type: NRG; PAM sequence: TGG
gactttttttttttaacatg

SEQ ID NO: 53031 - DNA, 20 bp, Artificial Sequence
  Description of Artificial Sequence: Synthetic oligonucleotide
  Target: LAMA2; (-) strand; PAM type: NRG; PAM sequence: TGG
aatttccagaagagcacaaa

SEQ ID NO: 53032 - DNA, 20 bp, Artificial Sequence
  Description of Artificial Sequence: Synthetic oligonucleotide
  Target: LAMA2; (-) strand; PAM type: NRG; PAM sequence: GAG
aatgtaactaatttccagaa

SEQ ID NO: 53033 - DNA, 20 bp, Artificial Sequence
  Description of Artificial Sequence: Synthetic oligonucleotide
  Target: LAMA2; (-) strand; PAM type: NRG; PAM sequence: AAG
acaatgtaactaatttccag

SEQ ID NO: 53034 - DNA, 20 bp, Artificial Sequence
  Description of Artificial Sequence: Synthetic oligonucleotide
  Target: LAMA2; (-) strand; PAM type: NRG; PAM sequence: CAG
taaacaatgtaactaatttc

SEQ ID NO: 53035 - DNA, 20 bp, Artificial Sequence
  Description of Artificial Sequence: Synthetic oligonucleotide
  Target: LAMA2; (-) strand; PAM type: NRG; PAM sequence: TGG
gaacttgctgcaattcagag

SEQ ID NO: 53036 - DNA, 20 bp, Artificial Sequence
  Description of Artificial Sequence: Synthetic oligonucleotide
  Target: LAMA2; (-) strand; PAM type: NRG; PAM sequence: GAG
atcgaacttgctgcaattca

SEQ ID NO: 53037 - DNA, 20 bp, Artificial Sequence
  Description of Artificial Sequence: Synthetic oligonucleotide
  Target: LAMA2; (-) strand; PAM type: NRG; PAM sequence: CAG
atatcgaacttgctgcaatt

SEQ ID NO: 53038 - DNA, 20 bp, Artificial Sequence
  Description of Artificial Sequence: Synthetic oligonucleotide
  Target: LAMA2; (-) strand; PAM type: NRG; PAM sequence: GAG
tatgagttttgtgtaaaagt

SEQ ID NO: 53039 - DNA, 20 bp, Artificial Sequence
  Description of Artificial Sequence: Synthetic oligonucleotide
  Target: LAMA2; (-) strand; PAM type: NRG; PAM sequence: AAG
cttctatgagttttgtgtaa

SEQ ID NO: 53040 - DNA, 20 bp, Artificial Sequence
  Description of Artificial Sequence: Synthetic oligonucleotide
  Target: LAMA2; (-) strand; PAM type: NRG; PAM sequence: GAG
acagacctatgtgcttctat

SEQ ID NO: 53041 - DNA, 20 bp, Artificial Sequence
  Description of Artificial Sequence: Synthetic oligonucleotide
  Target: LAMA2; (-) strand; PAM type: NRG; PAM sequence: CAG
cccaaatgtgtgttaagcaa

SEQ ID NO: 53042 - DNA, 20 bp, Artificial Sequence
  Description of Artificial Sequence: Synthetic oligonucleotide
  Target: LAMA2; (-) strand; PAM type: NRG; PAM sequence: AAG
gaaatacccaaatgtgtgtt

SEQ ID NO: 53043 - DNA, 20 bp, Artificial Sequence
  Description of Artificial Sequence: Synthetic oligonucleotide
  Target: LAMA2; (-) strand; PAM type: NRG; PAM sequence: CAG
tcctcttctgaaaatcttct

SEQ ID NO: 53044 - DNA, 20 bp, Artificial Sequence
  Description of Artificial Sequence: Synthetic oligonucleotide
  Target: LAMA2; (-) strand; PAM type: NRG; PAM sequence: GGG
cagatggaaagattttactt

SEQ ID NO: 53045 - DNA, 20 bp, Artificial Sequence
  Description of Artificial Sequence: Synthetic oligonucleotide
  Target: LAMA2; (-) strand; PAM type: NRG; PAM sequence: TGG
tcagatggaaagattttact

SEQ ID NO: 53046 - DNA, 20 bp, Artificial Sequence
  Description of Artificial Sequence: Synthetic oligonucleotide
  Target: LAMA2; (-) strand; PAM type: NRG; PAM sequence: AAG
tctttccttgttcagatgga

SEQ ID NO: 53047 - DNA, 20 bp, Artificial Sequence
  Description of Artificial Sequence: Synthetic oligonucleotide
  Target: LAMA2; (-) strand; PAM type: NRG; PAM sequence: TGG
taaatctttccttgttcaga

SEQ ID NO: 53048 - DNA, 20 bp, Artificial Sequence
  Description of Artificial Sequence: Synthetic oligonucleotide
  Target: LAMA2; (-) strand; PAM type: NRG; PAM sequence: CAG
tccctaaatctttccttgtt

SEQ ID NO: 53049 - DNA, 20 bp, Artificial Sequence
  Description of Artificial Sequence: Synthetic oligonucleotide
  Target: LAMA2; (-) strand; PAM type: NRG; PAM sequence: CAG
ctcttctgaaaatttgagga

SEQ ID NO: 53050 - DNA, 20 bp, Artificial Sequence
  Description of Artificial Sequence: Synthetic oligonucleotide
  Target: LAMA2; (-) strand; PAM type: NRG; PAM sequence: AGG
acgactcttctgaaaatttg

SEQ ID NO: 53051 - DNA, 20 bp, Artificial Sequence
  Description of Artificial Sequence: Synthetic oligonucleotide
  Target: LAMA2; (-) strand; PAM type: NRG; PAM sequence: GAG
aacgactcttctgaaaattt

SEQ ID NO: 53052 - DNA, 20 bp, Artificial Sequence
  Description of Artificial Sequence: Synthetic oligonucleotide
  Target: LAMA2; (-) strand; PAM type: NRG; PAM sequence: TAG
tccaccttcagcctttagaa

SEQ ID NO: 53053 - DNA, 20 bp, Artificial Sequence
  Description of Artificial Sequence: Synthetic oligonucleotide
  Target: LAMA2; (-) strand; PAM type: NRG; PAM sequence: TAG
atggatccaccttcagcctt

SEQ ID NO: 53054 - DNA, 20 bp, Artificial Sequence
  Description of Artificial Sequence: Synthetic oligonucleotide
  Target: LAMA2; (-) strand; PAM type: NRG; PAM sequence: CAG
ttcttctatggatccacctt

SEQ ID NO: 53055 - DNA, 20 bp, Artificial Sequence
  Description of Artificial Sequence: Synthetic oligonucleotide
  Target: LAMA2; (-) strand; PAM type: NRG; PAM sequence: TGG
ttgtttgtcatgttcttcta

SEQ ID NO: 53056 - DNA, 20 bp, Artificial Sequence
  Description of Artificial Sequence: Synthetic oligonucleotide
  Target: LAMA2; (-) strand; PAM type: NRG; PAM sequence: TGG
catattataaaattcaaacc

SEQ ID NO: 53057 - DNA, 20 bp, Artificial Sequence
  Description of Artificial Sequence: Synthetic oligonucleotide
  Target: LAMA2; (-) strand; PAM type: NRG; PAM sequence: GAG
tggggaggaagtgaggagag

SEQ ID NO: 53058 - DNA, 20 bp, Artificial Sequence
  Description of Artificial Sequence: Synthetic oligonucleotide
  Target: LAMA2; (-) strand; PAM type: NRG; PAM sequence: AGG
catggggaggaagtgaggag

SEQ ID NO: 53059 - DNA, 20 bp, Artificial Sequence
  Description of Artificial Sequence: Synthetic oligonucleotide
  Target: LAMA2; (-) strand; PAM type: NRG; PAM sequence: GAG
gcatggggaggaagtgagga

SEQ ID NO: 53060 - DNA, 20 bp, Artificial Sequence
  Description of Artificial Sequence: Synthetic oligonucleotide
  Target: LAMA2; (-) strand; PAM type: NRG; PAM sequence: GAG
tggcatggggaggaagtgag

SEQ ID NO: 53061 - DNA, 20 bp, Artificial Sequence
  Description of Artificial Sequence: Synthetic oligonucleotide
  Target: LAMA2; (-) strand; PAM type: NRG; PAM sequence: AGG
aatggcatggggaggaagtg

SEQ ID NO: 53062 - DNA, 20 bp, Artificial Sequence
  Description of Artificial Sequence: Synthetic oligonucleotide
  Target: LAMA2; (-) strand; PAM type: NRG; PAM sequence: GAG
aaatggcatggggaggaagt

SEQ ID NO: 53063 - DNA, 20 bp, Artificial Sequence
  Description of Artificial Sequence: Synthetic oligonucleotide
  Target: LAMA2; (-) strand; PAM type: NRG; PAM sequence: AAG
ctcaaaatggcatggggagg

SEQ ID NO: 53064 - DNA, 20 bp, Artificial Sequence
  Description of Artificial Sequence: Synthetic oligonucleotide
  Target: LAMA2; (-) strand; PAM type: NRG; PAM sequence: AGG
caactcaaaatggcatgggg

SEQ ID NO: 53065 - DNA, 20 bp, Artificial Sequence
  Description of Artificial Sequence: Synthetic oligonucleotide
  Target: LAMA2; (-) strand; PAM type: NRG; PAM sequence: GAG
acaactcaaaatggcatggg

SEQ ID NO: 53066 - DNA, 20 bp, Artificial Sequence
  Description of Artificial Sequence: Synthetic oligonucleotide
  Target: LAMA2; (-) strand; PAM type: NRG; PAM sequence: GGG
gaacaactcaaaatggcatg

SEQ ID NO: 53067 - DNA, 20 bp, Artificial Sequence
  Description of Artificial Sequence: Synthetic oligonucleotide
  Target: LAMA2; (-) strand; PAM type: NRG; PAM sequence: GGG
tgaacaactcaaaatggcat

SEQ ID NO: 53068 - DNA, 20 bp, Artificial Sequence
  Description of Artificial Sequence: Synthetic oligonucleotide
  Target: LAMA2; (-) strand; PAM type: NRG; PAM sequence: TGG
ctgaacaactcaaaatggca

SEQ ID NO: 53069 - DNA, 20 bp, Artificial Sequence
  Description of Artificial Sequence: Synthetic oligonucleotide
  Target: LAMA2; (-) strand; PAM type: NRG; PAM sequence: TGG
tatttctgaacaactcaaaa

SEQ ID NO: 53070 - DNA, 20 bp, Artificial Sequence
  Description of Artificial Sequence: Synthetic oligonucleotide
  Target: LAMA2; (-) strand; PAM type: NRG; PAM sequence: CAG
caagttgctcaaacacaatt

SEQ ID NO: 53071 - DNA, 20 bp, Artificial Sequence
  Description of Artificial Sequence: Synthetic oligonucleotide
  Target: LAMA2; (-) strand; PAM type: NRG; PAM sequence: AAG
gcatggtcatttccagaagc

SEQ ID NO: 53072 - DNA, 20 bp, Artificial Sequence
  Description of Artificial Sequence: Synthetic oligonucleotide
  Target: LAMA2; (-) strand; PAM type: NRG; PAM sequence: AAG
cactgcatggtcatttccag

SEQ ID NO: 53073 - DNA, 20 bp, Artificial Sequence
  Description of Artificial Sequence: Synthetic oligonucleotide
  Target: LAMA2; (-) strand; PAM type: NRG; PAM sequence: CAG
gatcactgcatggtcatttc

SEQ ID NO: 53074 - DNA, 20 bp, Artificial Sequence
  Description of Artificial Sequence: Synthetic oligonucleotide
  Target: LAMA2; (-) strand; PAM type: NRG; PAM sequence: TGG
ctgtacatctgatcactgca

SEQ ID NO: 53075 - DNA, 20 bp, Artificial Sequence
  Description of Artificial Sequence: Synthetic oligonucleotide
  Target: LAMA2; (-) strand; PAM type: NRG; PAM sequence: AAG
agtagaggcattccctcata

SEQ ID NO: 53076 - DNA, 20 bp, Artificial Sequence
  Description of Artificial Sequence: Synthetic oligonucleotide
  Target: LAMA2; (-) strand; PAM type: NRG; PAM sequence: AGG
tcttaacttcctctcagtag

SEQ ID NO: 53077 - DNA, 20 bp, Artificial Sequence
  Description of Artificial Sequence: Synthetic oligonucleotide
  Target: LAMA2; (-) strand; PAM type: NRG; PAM sequence: GAG
gtcttaacttcctctcagta

SEQ ID NO: 53078 - DNA, 20 bp, Artificial Sequence
  Description of Artificial Sequence: Synthetic oligonucleotide
  Target: LAMA2; (-) strand; PAM type: NRG; PAM sequence: TAG
gagtcttaacttcctctcag

SEQ ID NO: 53079 - DNA, 20 bp, Artificial Sequence
  Description of Artificial Sequence: Synthetic oligonucleotide
  Target: LAMA2; (-) strand; PAM type: NRG; PAM sequence: CAG
gatgagtcttaacttcctct

SEQ ID NO: 53080 - DNA, 20 bp, Artificial Sequence
  Description of Artificial Sequence: Synthetic oligonucleotide
  Target: LAMA2; (-) strand; PAM type: NRG; PAM sequence: GAG
caaatggctagacagttgat

SEQ ID NO: 53081 - DNA, 20 bp, Artificial Sequence
  Description of Artificial Sequence: Synthetic oligonucleotide
  Target: LAMA2; (-) strand; PAM type: NRG; PAM sequence: CAG
agaactgacaaatggctaga

SEQ ID NO: 53082 - DNA, 20 bp, Artificial Sequence
  Description of Artificial Sequence: Synthetic oligonucleotide
  Target: LAMA2; (-) strand; PAM type: NRG; PAM sequence: TAG
tcttagaactgacaaatggc

SEQ ID NO: 53083 - DNA, 20 bp, Artificial Sequence
  Description of Artificial Sequence: Synthetic oligonucleotide
  Target: LAMA2; (-) strand; PAM type: NRG; PAM sequence: TGG
agaatcttagaactgacaaa

SEQ ID NO: 53084 - DNA, 20 bp, Artificial Sequence
  Description of Artificial Sequence: Synthetic oligonucleotide
  Target: LAMA2; (-) strand; PAM type: NRG; PAM sequence: TAG
agactataatattagaatct

SEQ ID NO: 53085 - DNA, 20 bp, Artificial Sequence
  Description of Artificial Sequence: Synthetic oligonucleotide
  Target: LAMA2; (-) strand; PAM type: NRG; PAM sequence: TAG
aaagcaatagactataatat

SEQ ID NO: 53086 - DNA, 20 bp, Artificial Sequence
  Description of Artificial Sequence: Synthetic oligonucleotide
  Target: LAMA2; (-) strand; PAM type: NRG; PAM sequence: TAG
agtatgcactctaaaagcaa

SEQ ID NO: 53087 - DNA, 20 bp, Artificial Sequence
  Description of Artificial Sequence: Synthetic oligonucleotide
  Target: LAMA2; (-) strand; PAM type: NRG; PAM sequence: AAG
aatgcaagtatgcactctaa

SEQ ID NO: 53088 - DNA, 20 bp, Artificial Sequence
  Description of Artificial Sequence: Synthetic oligonucleotide
  Target: LAMA2; (-) strand; PAM type: NRG; PAM sequence: AAG
gaattcagaaatttaaatgc

SEQ ID NO: 53089 - DNA, 20 bp, Artificial Sequence
  Description of Artificial Sequence: Synthetic oligonucleotide
  Target: LAMA2; (-) strand; PAM type: NRG; PAM sequence: CAG
ttcttgacattttaagaatt

SEQ ID NO: 53090 - DNA, 20 bp, Artificial Sequence
  Description of Artificial Sequence: Synthetic oligonucleotide
  Target: LAMA2; (-) strand; PAM type: NRG; PAM sequence: AAG
taacattttcttgacatttt

SEQ ID NO: 53091 - DNA, 20 bp, Artificial Sequence
  Description of Artificial Sequence: Synthetic oligonucleotide
  Target: LAMA2; (-) strand; PAM type: NRG; PAM sequence: GGG
ttttattttaaatcccagaa

SEQ ID NO: 53092 - DNA, 20 bp, Artificial Sequence
  Description of Artificial Sequence: Synthetic oligonucleotide
  Target: LAMA2; (-) strand; PAM type: NRG; PAM sequence: AGG
tttttattttaaatcccaga

SEQ ID NO: 53093 - DNA, 20 bp, Artificial Sequence
  Description of Artificial Sequence: Synthetic oligonucleotide
  Target: LAMA2; (-) strand; PAM type: NRG; PAM sequence: AAG
gtttttattttaaatcccag

SEQ ID NO: 53094 - DNA, 20 bp, Artificial Sequence
  Description of Artificial Sequence: Synthetic oligonucleotide
  Target: LAMA2; (-) strand; PAM type: NRG; PAM sequence: CAG
catgtttttattttaaatcc

SEQ ID NO: 53095 - DNA, 20 bp, Artificial Sequence
  Description of Artificial Sequence: Synthetic oligonucleotide
  Target: LAMA2; (-) strand; PAM type: NRG; PAM sequence: AGG
attcttgccaaaaatgtgtg

SEQ ID NO: 53096 - DNA, 20 bp, Artificial Sequence
  Description of Artificial Sequence: Synthetic oligonucleotide
  Target: LAMA2; (-) strand; PAM type: NRG; PAM sequence: GAG
tattcttgccaaaaatgtgt

SEQ ID NO: 53097 - DNA, 20 bp, Artificial Sequence
  Description of Artificial Sequence: Synthetic oligonucleotide
  Target: LAMA2; (-) strand; PAM type: NRG; PAM sequence: AAG
aaaatccatgctaaatatct

SEQ ID NO: 53098 - DNA, 20 bp, Artificial Sequence
  Description of Artificial Sequence: Synthetic oligonucleotide
  Target: LAMA2; (-) strand; PAM type: NRG; PAM sequence: TGG
ctgtgcaattgacgatgatg

SEQ ID NO: 53099 - DNA, 20 bp, Artificial Sequence
  Description of Artificial Sequence: Synthetic oligonucleotide
  Target: LAMA2; (-) strand; PAM type: NRG; PAM sequence: TAG
tgttataacacaagatgttt

SEQ ID NO: 53100 - DNA, 20 bp, Artificial Sequence
  Description of Artificial Sequence: Synthetic oligonucleotide
  Target: LAMA2; (-) strand; PAM type: NRG; PAM sequence: AAG
attcttgcgtgttataacac

SEQ ID NO: 53101 - DNA, 20 bp, Artificial Sequence
  Description of Artificial Sequence: Synthetic oligonucleotide
  Target: LAMA2; (-) strand; PAM type: NRG; PAM sequence: AAG
aatttctcaggtaatttata

SEQ ID NO: 53102 - DNA, 20 bp, Artificial Sequence
  Description of Artificial Sequence: Synthetic oligonucleotide
  Target: LAMA2; (-) strand; PAM type: NRG; PAM sequence: AGG
gaatcccctgaaaatttctc

SEQ ID NO: 53103 - DNA, 20 bp, Artificial Sequence
  Description of Artificial Sequence: Synthetic oligonucleotide
  Target: LAMA2; (-) strand; PAM type: NRG; PAM sequence: CAG
tgaatcccctgaaaatttct

SEQ ID NO: 53104 - DNA, 20 bp, Artificial Sequence
  Description of Artificial Sequence: Synthetic oligonucleotide
  Target: LAMA2; (-) strand; PAM type: NRG; PAM sequence: TGG
aaaaattaattccaggttta

SEQ ID NO: 53105 - DNA, 20 bp, Artificial Sequence
  Description of Artificial Sequence: Synthetic oligonucleotide
  Target: LAMA2; (-) strand; PAM type: NRG; PAM sequence: AGG
tatttaaaaaaattaattcc

SEQ ID NO: 53106 - DNA, 20 bp, Artificial Sequence
  Description of Artificial Sequence: Synthetic oligonucleotide
  Target: LAMA2; (-) strand; PAM type: NRG; PAM sequence: CAG
atatttaaaaaaattaattc

SEQ ID NO: 53107 - DNA, 20 bp, Artificial Sequence
  Description of Artificial Sequence: Synthetic oligonucleotide
  Target: LAMA2; (-) strand; PAM type: NRG; PAM sequence: AAG
aaaagttaacatatgcagca

SEQ ID NO: 53108 - DNA, 20 bp, Artificial Sequence
  Description of Artificial Sequence: Synthetic oligonucleotide
  Target: LAMA2; (-) strand; PAM type: NRG; PAM sequence: CAG
agccaaaaagttaacatatg

SEQ ID NO: 53109 - DNA, 20 bp, Artificial Sequence
  Description of Artificial Sequence: Synthetic oligonucleotide
  Target: LAMA2; (-) strand; PAM type: NRG; PAM sequence: AAG
tatatggcaaacaagccaaa

SEQ ID NO: 53110 - DNA, 20 bp, Artificial Sequence
  Description of Artificial Sequence: Synthetic oligonucleotide
  Target: LAMA2; (-) strand; PAM type: NRG; PAM sequence: AAG
taggtcagtatatggcaaac

SEQ ID NO: 53111 - DNA, 20 bp, Artificial Sequence
  Description of Artificial Sequence: Synthetic oligonucleotide
  Target: LAMA2; (-) strand; PAM type: NRG; PAM sequence: TGG
taaatgattaggtcagtata

SEQ ID NO: 53112 - DNA, 20 bp, Artificial Sequence
  Description of Artificial Sequence: Synthetic oligonucleotide
  Target: LAMA2; (-) strand; PAM type: NRG; PAM sequence: CAG
tttttactaaatgattaggt

SEQ ID NO: 53113 - DNA, 20 bp, Artificial Sequence
  Description of Artificial Sequence: Synthetic oligonucleotide
  Target: LAMA2; (-) strand; PAM type: NRG; PAM sequence: AGG
atcatttttactaaatgatt

SEQ ID NO: 53114 - DNA, 20 bp, Artificial Sequence
  Description of Artificial Sequence: Synthetic oligonucleotide
  Target: LAMA2; (-) strand; PAM type: NRG; PAM sequence: TAG
aatcatttttactaaatgat

SEQ ID NO: 53115 - DNA, 20 bp, Artificial Sequence
  Description of Artificial Sequence: Synthetic oligonucleotide
  Target: LAMA2; (-) strand; PAM type: NRG; PAM sequence: CAG
tctatcacatctataatatt

SEQ ID NO: 53116 - DNA, 20 bp, Artificial Sequence
  Description of Artificial Sequence: Synthetic oligonucleotide
  Target: LAMA2; (-) strand; PAM type: NRG; PAM sequence: CAG
agaaaaatcttaagatagac

SEQ ID NO: 53117 - DNA, 20 bp, Artificial Sequence
  Description of Artificial Sequence: Synthetic oligonucleotide
  Target: LAMA2; (-) strand; PAM type: NRG; PAM sequence: TAG
agggtagaaaaatcttaaga

SEQ ID NO: 53118 - DNA, 20 bp, Artificial Sequence
  Description of Artificial Sequence: Synthetic oligonucleotide
  Target: LAMA2; (-) strand; PAM type: NRG; PAM sequence: AAG
tcctagggtagaaaaatctt

SEQ ID NO: 53119 - DNA, 20 bp, Artificial Sequence
  Description of Artificial Sequence: Synthetic oligonucleotide
  Target: LAMA2; (-) strand; PAM type: NRG; PAM sequence: TAG
gtttgcatgaaatcctaggg

SEQ ID NO: 53120 - DNA, 20 bp, Artificial Sequence
  Description of Artificial Sequence: Synthetic oligonucleotide
  Target: LAMA2; (-) strand; PAM type: NRG; PAM sequence: GGG
ttagtttgcatgaaatccta

SEQ ID NO: 53121 - DNA, 20 bp, Artificial Sequence
  Description of Artificial Sequence: Synthetic oligonucleotide
  Target: LAMA2; (-) strand; PAM type: NRG; PAM sequence: AGG
attagtttgcatgaaatcct

SEQ ID NO: 53122 - DNA, 20 bp, Artificial Sequence
  Description of Artificial Sequence: Synthetic oligonucleotide
  Target: LAMA2; (-) strand; PAM type: NRG; PAM sequence: TAG
cattagtttgcatgaaatcc

SEQ ID NO: 53123 - DNA, 20 bp, Artificial Sequence
  Description of Artificial Sequence: Synthetic oligonucleotide
  Target: LAMA2; (-) strand; PAM type: NRG; PAM sequence: TAG
ttgatatagattcagttcat

SEQ ID NO: 53124 - DNA, 20 bp, Artificial Sequence
  Description of Artificial Sequence: Synthetic oligonucleotide
  Target: LAMA2; (-) strand; PAM type: NRG; PAM sequence: CAG
agcatcccttgatatagatt

SEQ ID NO: 53125 - DNA, 20 bp, Artificial Sequence
  Description of Artificial Sequence: Synthetic oligonucleotide
  Target: LAMA2; (-) strand; PAM type: NRG; PAM sequence: TAG
gcccccagcatcccttgata

SEQ ID NO: 53126 - DNA, 20 bp, Artificial Sequence
  Description of Artificial Sequence: Synthetic oligonucleotide
  Target: LAMA2; (-) strand; PAM type: NRG; PAM sequence: CAG
gagccaccttgcccagcccc

SEQ ID NO: 53127 - DNA, 20 bp, Artificial Sequence
  Description of Artificial Sequence: Synthetic oligonucleotide
  Target: LAMA2; (-) strand; PAM type: NRG; PAM sequence: CAG
caggagtgagccaccttgcc

SEQ ID NO: 53128 - DNA, 20 bp, Artificial Sequence
  Description of Artificial Sequence: Synthetic oligonucleotide
  Target: LAMA2; (-) strand; PAM type: NRG; PAM sequence: GAG
agtgctgcgattacaggagt

SEQ ID NO: 53129 - DNA, 20 bp, Artificial Sequence
  Description of Artificial Sequence: Synthetic oligonucleotide
  Target: LAMA2; (-) strand; PAM type: NRG; PAM sequence: GAG
ccaaagtgctgcgattacag

SEQ ID NO: 53130 - DNA, 20 bp, Artificial Sequence
  Description of Artificial Sequence: Synthetic oligonucleotide
  Target: LAMA2; (-) strand; PAM type: NRG; PAM sequence: AGG
tcccaaagtgctgcgattac

SEQ ID NO: 53131 - DNA, 20 bp, Artificial Sequence
  Description of Artificial Sequence: Synthetic oligonucleotide
  Target: LAMA2; (-) strand; PAM type: NRG; PAM sequence: CAG
ctcccaaagtgctgcgatta

SEQ ID NO: 53132 - DNA, 20 bp, Artificial Sequence
  Description of Artificial Sequence: Synthetic oligonucleotide
  Target: LAMA2; (-) strand; PAM type: NRG; PAM sequence: AAG
ccacccacctaggcctccca

SEQ ID NO: 53133 - DNA, 20 bp, Artificial Sequence
  Description of Artificial Sequence: Synthetic oligonucleotide
  Target: LAMA2; (-) strand; PAM type: NRG; PAM sequence: AGG
ctaaggtgatccacccacct

SEQ ID NO: 53134 - DNA, 20 bp, Artificial Sequence
  Description of Artificial Sequence: Synthetic oligonucleotide
  Target: LAMA2; (-) strand; PAM type: NRG; PAM sequence: TAG
cctaaggtgatccacccacc

SEQ ID NO: 53135 - DNA, 20 bp, Artificial Sequence
  Description of Artificial Sequence: Synthetic oligonucleotide
  Target: LAMA2; (-) strand; PAM type: NRG; PAM sequence: AGG
ggtcttgaactcctgaccta

SEQ ID NO: 53136 - DNA, 20 bp, Artificial Sequence
  Description of Artificial Sequence: Synthetic oligonucleotide
  Target: LAMA2; (-) strand; PAM type: NRG; PAM sequence: AAG
tggtcttgaactcctgacct

SEQ ID NO: 53137 - DNA, 20 bp, Artificial Sequence
  Description of Artificial Sequence: Synthetic oligonucleotide
  Target: LAMA2; (-) strand; PAM type: NRG; PAM sequence: TGG
ttccgttatgttggtcaggc

SEQ ID NO: 53138 - DNA, 20 bp, Artificial Sequence
  Description of Artificial Sequence: Synthetic oligonucleotide
  Target: LAMA2; (-) strand; PAM type: NRG; PAM sequence: AGG
cggtttccgttatgttggtc

SEQ ID NO: 53139 - DNA, 20 bp, Artificial Sequence
  Description of Artificial Sequence: Synthetic oligonucleotide
  Target: LAMA2; (-) strand; PAM type: NRG; PAM sequence: CAG
acggtttccgttatgttggt

SEQ ID NO: 53140 - DNA, 20 bp, Artificial Sequence
  Description of Artificial Sequence: Synthetic oligonucleotide
  Target: LAMA2; (-) strand; PAM type: NRG; PAM sequence: TGG
agacacggtttccgttatgt

SEQ ID NO: 53141 - DNA, 20 bp, Artificial Sequence
  Description of Artificial Sequence: Synthetic oligonucleotide
  Target: LAMA2; (-) strand; PAM type: NRG; PAM sequence: CGG
ttgtatttttagtagagaca

SEQ ID NO: 53142 - DNA, 20 bp, Artificial Sequence
  Description of Artificial Sequence: Synthetic oligonucleotide
  Target: LAMA2; (-) strand; PAM type: NRG; PAM sequence: GAG
taatttttgtatttttagta

SEQ ID NO: 53143 - DNA, 20 bp, Artificial Sequence
  Description of Artificial Sequence: Synthetic oligonucleotide
  Target: LAMA2; (-) strand; PAM type: NRG; PAM sequence: TAG
gctaatttttgtatttttag

SEQ ID NO: 53144 - DNA, 20 bp, Artificial Sequence
  Description of Artificial Sequence: Synthetic oligonucleotide
  Target: LAMA2; (-) strand; PAM type: NRG; PAM sequence: TAG
ctggctaatttttgtatttt

SEQ ID NO: 53145 - DNA, 20 bp, Artificial Sequence
  Description of Artificial Sequence: Synthetic oligonucleotide
  Target: LAMA2; (-) strand; PAM type: NRG; PAM sequence: TGG
caggcacatgccaccacgcc

SEQ ID NO: 53146 - DNA, 20 bp, Artificial Sequence
  Description of Artificial Sequence: Synthetic oligonucleotide
  Target: LAMA2; (-) strand; PAM type: NRG; PAM sequence: AGG
tcctgagtagctgggattac

SEQ ID NO: 53147 - DNA, 20 bp, Artificial Sequence
  Description of Artificial Sequence: Synthetic oligonucleotide
  Target: LAMA2; (-) strand; PAM type: NRG; PAM sequence: CAG
ctcctgagtagctgggatta

SEQ ID NO: 53148 - DNA, 20 bp, Artificial Sequence
  Description of Artificial Sequence: Synthetic oligonucleotide
  Target: LAMA2; (-) strand; PAM type: NRG; PAM sequence: GGG
cctcagcctcctgagtagct

SEQ ID NO: 53149 - DNA, 20 bp, Artificial Sequence
  Description of Artificial Sequence: Synthetic oligonucleotide
  Target: LAMA2; (-) strand; PAM type: NRG; PAM sequence: TGG
gcctcagcctcctgagtagc

SEQ ID NO: 53150 - DNA, 20 bp, Artificial Sequence
  Description of Artificial Sequence: Synthetic oligonucleotide
  Target: LAMA2; (-) strand; PAM type: NRG; PAM sequence: TAG
tcctgcctcagcctcctgag

SEQ ID NO: 53151 - DNA, 20 bp, Artificial Sequence
  Description of Artificial Sequence: Synthetic oligonucleotide
  Target: LAMA2; (-) strand; PAM type: NRG; PAM sequence: GAG
ttctcctgcctcagcctcct

SEQ ID NO: 53152 - DNA, 20 bp, Artificial Sequence
  Description of Artificial Sequence: Synthetic oligonucleotide
  Target: LAMA2; (-) strand; PAM type: NRG; PAM sequence: CAG
ttcaagtgattctcctgcct

SEQ ID NO: 53153 - DNA, 20 bp, Artificial Sequence
  Description of Artificial Sequence: Synthetic oligonucleotide
  Target: LAMA2; (-) strand; PAM type: NRG; PAM sequence: AAG
aacctctgcctccagggttc

SEQ ID NO: 53154 - DNA, 20 bp, Artificial Sequence
  Description of Artificial Sequence: Synthetic oligonucleotide
  Target: LAMA2; (-) strand; PAM type: NRG; PAM sequence: GGG
cactgcaacctctgcctcca

SEQ ID NO: 53155 - DNA, 20 bp, Artificial Sequence
  Description of Artificial Sequence: Synthetic oligonucleotide
  Target: LAMA2; (-) strand; PAM type: NRG; PAM sequence: AGG
tcactgcaacctctgcctcc

SEQ ID NO: 53156 - DNA, 20 bp, Artificial Sequence
  Description of Artificial Sequence: Synthetic oligonucleotide
  Target: LAMA2; (-) strand; PAM type: NRG; PAM sequence: CAG
ctcactgcaacctctgcctc

SEQ ID NO: 53157 - DNA, 20 bp, Artificial Sequence
  Description of Artificial Sequence: Synthetic oligonucleotide
  Target: LAMA2; (-) strand; PAM type: NRG; PAM sequence: CGG
ggagtgcaatgacacgatct

SEQ ID NO: 53158 - DNA, 20 bp, Artificial Sequence
  Description of Artificial Sequence: Synthetic oligonucleotide
  Target: LAMA2; (-) strand; PAM type: NRG; PAM sequence: GAG
tccctctgttgcccaggctg

SEQ ID NO: 53159 - DNA, 20 bp, Artificial Sequence
  Description of Artificial Sequence: Synthetic oligonucleotide
  Target: LAMA2; (-) strand; PAM type: NRG; PAM sequence: TGG
tctccctctgttgcccaggc

SEQ ID NO: 53160 - DNA, 20 bp, Artificial Sequence
  Description of Artificial Sequence: Synthetic oligonucleotide
  Target: LAMA2; (-) strand; PAM type: NRG; PAM sequence: AGG
agagtctccctctgttgccc

SEQ ID NO: 53161 - DNA, 20 bp, Artificial Sequence
  Description of Artificial Sequence: Synthetic oligonucleotide
  Target: LAMA2; (-) strand; PAM type: NRG; PAM sequence: CAG
tagagtctccctctgttgcc

SEQ ID NO: 53162 - DNA, 20 bp, Artificial Sequence
  Description of Artificial Sequence: Synthetic oligonucleotide
  Target: LAMA2; (-) strand; PAM type: NRG; PAM sequence: GAG
gttttgttttgtttgagata

SEQ ID NO: 53163 - DNA, 20 bp, Artificial Sequence
  Description of Artificial Sequence: Synthetic oligonucleotide
  Target: LAMA2; (-) strand; PAM type: NRG; PAM sequence: TAG
ttgttttgttttgtttgaga

SEQ ID NO: 53164 - DNA, 20 bp, Artificial Sequence
  Description of Artificial Sequence: Synthetic oligonucleotide
  Target: LAMA2; (-) strand; PAM type: NRG; PAM sequence: GAG
tgttttgttttgttttgttt

SEQ ID NO: 53165 - DNA, 20 bp, Artificial Sequence
  Description of Artificial Sequence: Synthetic oligonucleotide
  Target: LAMA2; (-) strand; PAM type: NRG; PAM sequence: AAG
ctgcaaactggatagatgat

SEQ ID NO: 53166 - DNA, 20 bp, Artificial Sequence
  Description of Artificial Sequence: Synthetic oligonucleotide
  Target: LAMA2; (-) strand; PAM type: NRG; PAM sequence: TAG
aggccctactgcaaactgga

SEQ ID NO: 53167 - DNA, 20 bp, Artificial Sequence
  Description of Artificial Sequence: Synthetic oligonucleotide
  Target: LAMA2; (-) strand; PAM type: NRG; PAM sequence: TGG
aataaggccctactgcaaac

SEQ ID NO: 53168 - DNA, 20 bp, Artificial Sequence
  Description of Artificial Sequence: Synthetic oligonucleotide
  Target: LAMA2; (-) strand; PAM type: NRG; PAM sequence: AGG
tggtttctagatgctaaata

SEQ ID NO: 53169 - DNA, 20 bp, Artificial Sequence
  Description of Artificial Sequence: Synthetic oligonucleotide
  Target: LAMA2; (-) strand; PAM type: NRG; PAM sequence: AAG
atggtttctagatgctaaat

SEQ ID NO: 53170 - DNA, 20 bp, Artificial Sequence
  Description of Artificial Sequence: Synthetic oligonucleotide
  Target: LAMA2; (-) strand; PAM type: NRG; PAM sequence: TAG
gatctttttcacatggtttc

SEQ ID NO: 53171 - DNA, 20 bp, Artificial Sequence
  Description of Artificial Sequence: Synthetic oligonucleotide
  Target: LAMA2; (-) strand; PAM type: NRG; PAM sequence: TGG
tcttcctgatctttttcaca

SEQ ID NO: 53172 - DNA, 20 bp, Artificial Sequence
  Description of Artificial Sequence: Synthetic oligonucleotide
  Target: LAMA2; (-) strand; PAM type: NRG; PAM sequence: AAG
acccgaatcttctagattag

SEQ ID NO: 53173 - DNA, 20 bp, Artificial Sequence
  Description of Artificial Sequence: Synthetic oligonucleotide
  Target: LAMA2; (-) strand; PAM type: NRG; PAM sequence: TAG
taaacccgaatcttctagat

SEQ ID NO: 53174 - DNA, 20 bp, Artificial Sequence
  Description of Artificial Sequence: Synthetic oligonucleotide
  Target: LAMA2; (-) strand; PAM type: NRG; PAM sequence: TAG
aatcctaaacccgaatcttc

SEQ ID NO: 53175 - DNA, 20 bp, Artificial Sequence
  Description of Artificial Sequence: Synthetic oligonucleotide
  Target: LAMA2; (-) strand; PAM type: NRG; PAM sequence: AAG
ctgtttagctatcgaggctc

SEQ ID NO: 53176 - DNA, 20 bp, Artificial Sequence
  Description of Artificial Sequence: Synthetic oligonucleotide
  Target: LAMA2; (-) strand; PAM type: NRG; PAM sequence: AGG
aaattcctgtttagctatcg

SEQ ID NO: 53177 - DNA, 20 bp, Artificial Sequence
  Description of Artificial Sequence: Synthetic oligonucleotide
  Target: LAMA2; (-) strand; PAM type: NRG; PAM sequence: GAG
taaattcctgtttagctatc

SEQ ID NO: 53178 - DNA, 20 bp, Artificial Sequence
  Description of Artificial Sequence: Synthetic oligonucleotide
  Target: LAMA2; (-) strand; PAM type: NRG; PAM sequence: TAG
cttctgcctaaattcctgtt

SEQ ID NO: 53179 - DNA, 20 bp, Artificial Sequence
  Description of Artificial Sequence: Synthetic oligonucleotide
  Target: LAMA2; (-) strand; PAM type: NRG; PAM sequence: GAG
ttttctcatttactgaaacg

SEQ ID NO: 53180 - DNA, 20 bp, Artificial Sequence
  Description of Artificial Sequence: Synthetic oligonucleotide
  Target: LAMA2; (-) strand; PAM type: NRG; PAM sequence: CGG
tgttttctcatttactgaaa

SEQ ID NO: 53181 - DNA, 20 bp, Artificial Sequence
  Description of Artificial Sequence: Synthetic oligonucleotide
  Target: LAMA2; (-) strand; PAM type: NRG; PAM sequence: TGG
tgcttggtatatactaagcc

SEQ ID NO: 53182 - DNA, 20 bp, Artificial Sequence
  Description of Artificial Sequence: Synthetic oligonucleotide
  Target: LAMA2; (-) strand; PAM type: NRG; PAM sequence: AAG
ctatctgcttggtatatact

SEQ ID NO: 53183 - DNA, 20 bp, Artificial Sequence
  Description of Artificial Sequence: Synthetic oligonucleotide
  Target: LAMA2; (-) strand; PAM type: NRG; PAM sequence: TGG
tagttttatttctatctgct

SEQ ID NO: 53184 - DNA, 20 bp, Artificial Sequence
  Description of Artificial Sequence: Synthetic oligonucleotide
  Target: LAMA2; (-) strand; PAM type: NRG; PAM sequence: TAG
caatggggaaagcctagaat

SEQ ID NO: 53185 - DNA, 20 bp, Artificial Sequence
  Description of Artificial Sequence: Synthetic oligonucleotide
  Target: LAMA2; (-) strand; PAM type: NRG; PAM sequence: TAG
tcttaccaatggggaaagcc

SEQ ID NO: 53186 - DNA, 20 bp, Artificial Sequence
  Description of Artificial Sequence: Synthetic oligonucleotide
  Target: LAMA2; (-) strand; PAM type: NRG; PAM sequence: AAG
ttcagtcttaccaatgggga

SEQ ID NO: 53187 - DNA, 20 bp, Artificial Sequence
  Description of Artificial Sequence: Synthetic oligonucleotide
  Target: LAMA2; (-) strand; PAM type: NRG; PAM sequence: GGG
taaattcagtcttaccaatg

SEQ ID NO: 53188 - DNA, 20 bp, Artificial Sequence
  Description of Artificial Sequence: Synthetic oligonucleotide
  Target: LAMA2; (-) strand; PAM type: NRG; PAM sequence: GGG
ctaaattcagtcttaccaat

SEQ ID NO: 53189 - DNA, 20 bp, Artificial Sequence
  Description of Artificial Sequence: Synthetic oligonucleotide
  Target: LAMA2; (-) strand; PAM type: NRG; PAM sequence: TGG
tctaaattcagtcttaccaa

SEQ ID NO: 53190 - DNA, 20 bp, Artificial Sequence
  Description of Artificial Sequence: Synthetic oligonucleotide
  Target: LAMA2; (-) strand; PAM type: NRG; PAM sequence: CAG
caacttctgacctctaaatt

SEQ ID NO: 53191 - DNA, 20 bp, Artificial Sequence
  Description of Artificial Sequence: Synthetic oligonucleotide
  Target: LAMA2; (-) strand; PAM type: NRG; PAM sequence: AGG
taccacattccaatgcatat

SEQ ID NO: 53192 - DNA, 20 bp, Artificial Sequence
  Description of Artificial Sequence: Synthetic oligonucleotide
  Target: LAMA2; (-) strand; PAM type: NRG; PAM sequence: TAG
ttaccacattccaatgcata

SEQ ID NO: 53193 - DNA, 20 bp, Artificial Sequence
  Description of Artificial Sequence: Synthetic oligonucleotide
  Target: LAMA2; (-) strand; PAM type: NRG; PAM sequence: AGG
aatattagttccacaagagc

SEQ ID NO: 53194 - DNA, 20 bp, Artificial Sequence
  Description of Artificial Sequence: Synthetic oligonucleotide
  Target: LAMA2; (-) strand; PAM type: NRG; PAM sequence: CAG
aaatattagttccacaagag

SEQ ID NO: 53195 - DNA, 20 bp, Artificial Sequence
  Description of Artificial Sequence: Synthetic oligonucleotide
  Target: LAMA2; (-) strand; PAM type: NRG; PAM sequence: GAG
actaaatattagttccacaa

SEQ ID NO: 53196 - DNA, 20 bp, Artificial Sequence
  Description of Artificial Sequence: Synthetic oligonucleotide
  Target: LAMA2; (-) strand; PAM type: NRG; PAM sequence: AAG
caactaaatattagttccac

SEQ ID NO: 53197 - DNA, 20 bp, Artificial Sequence
  Description of Artificial Sequence: Synthetic oligonucleotide
  Target: LAMA2; (-) strand; PAM type: NRG; PAM sequence: TAG
tctccatcccaactaaatat

SEQ ID NO: 53198 - DNA, 20 bp, Artificial Sequence
  Description of Artificial Sequence: Synthetic oligonucleotide
  Target: LAMA2; (-) strand; PAM type: NRG; PAM sequence: TAG
gcttcatcatatattcatca

SEQ ID NO: 53199 - DNA, 20 bp, Artificial Sequence
  Description of Artificial Sequence: Synthetic oligonucleotide
  Target: LAMA2; (-) strand; PAM type: NRG; PAM sequence: AGG
aactacattttatacaatat

SEQ ID NO: 53200 - DNA, 20 bp, Artificial Sequence
  Description of Artificial Sequence: Synthetic oligonucleotide
  Target: LAMA2; (-) strand; PAM type: NRG; PAM sequence: TAG
caactacattttatacaata

SEQ ID NO: 53201 - DNA, 20 bp, Artificial Sequence
  Description of Artificial Sequence: Synthetic oligonucleotide
  Target: LAMA2; (-) strand; PAM type: NRG; PAM sequence: AGG
cccgttgtatttgtttgtcc

SEQ ID NO: 53202 - DNA, 20 bp, Artificial Sequence
  Description of Artificial Sequence: Synthetic oligonucleotide
  Target: LAMA2; (-) strand; PAM type: NRG; PAM sequence: CAG
ccccgttgtatttgtttgtc

SEQ ID NO: 53203 - DNA, 20 bp, Artificial Sequence
  Description of Artificial Sequence: Synthetic oligonucleotide
  Target: LAMA2; (-) strand; PAM type: NRG; PAM sequence: TAG
catcaacctccctccattcc

SEQ ID NO: 53204 - DNA, 20 bp, Artificial Sequence
  Description of Artificial Sequence: Synthetic oligonucleotide
  Target: LAMA2; (-) strand; PAM type: NRG; PAM sequence: TAG
accaacctttaccaacaaaa

SEQ ID NO: 53205 - DNA, 20 bp, Artificial Sequence
  Description of Artificial Sequence: Synthetic oligonucleotide
  Target: LAMA2; (-) strand; PAM type: NRG; PAM sequence: AGG
aaagtgagatcctctcaaag

SEQ ID NO: 53206 - DNA, 20 bp, Artificial Sequence
  Description of Artificial Sequence: Synthetic oligonucleotide
  Target: LAMA2; (-) strand; PAM type: NRG; PAM sequence: GAG
caaagtgagatcctctcaaa

SEQ ID NO: 53207 - DNA, 20 bp, Artificial Sequence
  Description of Artificial Sequence: Synthetic oligonucleotide
  Target: LAMA2; (-) strand; PAM type: NRG; PAM sequence: AAG
gccaaagtgagatcctctca

SEQ ID NO: 53208 - DNA, 20 bp, Artificial Sequence
  Description of Artificial Sequence: Synthetic oligonucleotide
  Target: LAMA2; (-) strand; PAM type: NRG; PAM sequence: GAG
cttcaagtgtttgccaaagt

SEQ ID NO: 53209 - DNA, 20 bp, Artificial Sequence
  Description of Artificial Sequence: Synthetic oligonucleotide
  Target: LAMA2; (-) strand; PAM type: NRG; PAM sequence: AAG
tcatcttcaagtgtttgcca

SEQ ID NO: 53210 - DNA, 20 bp, Artificial Sequence
  Description of Artificial Sequence: Synthetic oligonucleotide
  Target: LAMA2; (-) strand; PAM type: NRG; PAM sequence: AAG
atcactcccacgtcatcttc

SEQ ID NO: 53211 - DNA, 20 bp, Artificial Sequence
  Description of Artificial Sequence: Synthetic oligonucleotide
  Target: LAMA2; (-) strand; PAM type: NRG; PAM sequence: GAG
aggcctgctccctgtacaga

SEQ ID NO: 53212 - DNA, 20 bp, Artificial Sequence
  Description of Artificial Sequence: Synthetic oligonucleotide
  Target: LAMA2; (-) strand; PAM type: NRG; PAM sequence: GAG
ataggcctgctccctgtaca

SEQ ID NO: 53213 - DNA, 20 bp, Artificial Sequence
  Description of Artificial Sequence: Synthetic oligonucleotide
  Target: LAMA2; (-) strand; PAM type: NRG; PAM sequence: CAG
tcataggcctgctccctgta

SEQ ID NO: 53214 - DNA, 20 bp, Artificial Sequence
  Description of Artificial Sequence: Synthetic oligonucleotide
  Target: LAMA2; (-) strand; PAM type: NRG; PAM sequence: AGG
ctccaagcttagatcctcat

SEQ ID NO: 53215 - DNA, 20 bp, Artificial Sequence
  Description of Artificial Sequence: Synthetic oligonucleotide
  Target: LAMA2; (-) strand; PAM type: NRG; PAM sequence: TAG
gctccaagcttagatcctca

SEQ ID NO: 53216 - DNA, 20 bp, Artificial Sequence
  Description of Artificial Sequence: Synthetic oligonucleotide
  Target: LAMA2; (-) strand; PAM type: NRG; PAM sequence: TAG
ttctcaccatgctccaagct

SEQ ID NO: 53217 - DNA, 20 bp, Artificial Sequence
  Description of Artificial Sequence: Synthetic oligonucleotide
  Target: LAMA2; (-) strand; PAM type: NRG; PAM sequence: AAG
gagccttctcaccatgctcc

SEQ ID NO: 53218 - DNA, 20 bp, Artificial Sequence
  Description of Artificial Sequence: Synthetic oligonucleotide
  Target: LAMA2; (-) strand; PAM type: NRG; PAM sequence: GAG
cagtttcccatttctcctct

SEQ ID NO: 53219 - DNA, 20 bp, Artificial Sequence
  Description of Artificial Sequence: Synthetic oligonucleotide
  Target: LAMA2; (-) strand; PAM type: NRG; PAM sequence: CAG
gtcaacaatgctatgtgttc

SEQ ID NO: 53220 - DNA, 20 bp, Artificial Sequence
  Description of Artificial Sequence: Synthetic oligonucleotide
  Target: LAMA2; (-) strand; PAM type: NRG; PAM sequence: AGG
aggcaaaatctttaaaatta

SEQ ID NO: 53221 - DNA, 20 bp, Artificial Sequence
  Description of Artificial Sequence: Synthetic oligonucleotide
  Target: LAMA2; (-) strand; PAM type: NRG; PAM sequence: AAG
aaggcaaaatctttaaaatt

SEQ ID NO: 53222 - DNA, 20 bp, Artificial Sequence
  Description of Artificial Sequence: Synthetic oligonucleotide
  Target: LAMA2; (-) strand; PAM type: NRG; PAM sequence: AGG
ctcatctcactcagacaaaa

SEQ ID NO: 53223 - DNA, 20 bp, Artificial Sequence
  Description of Artificial Sequence: Synthetic oligonucleotide
  Target: LAMA2; (-) strand; PAM type: NRG; PAM sequence: AAG
cctcatctcactcagacaaa

SEQ ID NO: 53224 - DNA, 20 bp, Artificial Sequence
  Description of Artificial Sequence: Synthetic oligonucleotide
  Target: LAMA2; (-) strand; PAM type: NRG; PAM sequence: CAG
cgatgcctcctcatctcact

SEQ ID NO: 53225 - DNA, 20 bp, Artificial Sequence
  Description of Artificial Sequence: Synthetic oligonucleotide
  Target: LAMA2; (-) strand; PAM type: NRG; PAM sequence: GAG
ccatggattagtgcgtattt

SEQ ID NO: 53226 - DNA, 20 bp, Artificial Sequence
  Description of Artificial Sequence: Synthetic oligonucleotide
  Target: LAMA2; (-) strand; PAM type: NRG; PAM sequence: TAG
gttggtctagtcccatggat

SEQ ID NO: 53227 - DNA, 20 bp, Artificial Sequence
  Description of Artificial Sequence: Synthetic oligonucleotide
  Target: LAMA2; (-) strand; PAM type: NRG; PAM sequence: TGG
ggactgttggtctagtccca

SEQ ID NO: 53228 - DNA, 20 bp, Artificial Sequence
  Description of Artificial Sequence: Synthetic oligonucleotide
  Target: LAMA2; (-) strand; PAM type: NRG; PAM sequence: TAG
ctatgcttggactgttggtc

SEQ ID NO: 53229 - DNA, 20 bp, Artificial Sequence
  Description of Artificial Sequence: Synthetic oligonucleotide
  Target: LAMA2; (-) strand; PAM type: NRG; PAM sequence: TGG
taattctatgcttggactgt

SEQ ID NO: 53230 - DNA, 20 bp, Artificial Sequence
  Description of Artificial Sequence: Synthetic oligonucleotide
  Target: LAMA2; (-) strand; PAM type: NRG; PAM sequence: TGG
atctaaaataattctatgct

SEQ ID NO: 53231 - DNA, 20 bp, Artificial Sequence
  Description of Artificial Sequence: Synthetic oligonucleotide
  Target: LAMA2; (-) strand; PAM type: NRG; PAM sequence: GAG
cagtggagtgtttgggacaa

SEQ ID NO: 53232 - DNA, 20 bp, Artificial Sequence
  Description of Artificial Sequence: Synthetic oligonucleotide
  Target: LAMA2; (-) strand; PAM type: NRG; PAM sequence: AAG
atcagtggagtgtttgggac

SEQ ID NO: 53233 - DNA, 20 bp, Artificial Sequence
  Description of Artificial Sequence: Synthetic oligonucleotide
  Target: LAMA2; (-) strand; PAM type: NRG; PAM sequence: GGG
gttctatcagtggagtgttt

SEQ ID NO: 53234 - DNA, 20 bp, Artificial Sequence
  Description of Artificial Sequence: Synthetic oligonucleotide
  Target: LAMA2; (-) strand; PAM type: NRG; PAM sequence: TGG
tgttctatcagtggagtgtt

SEQ ID NO: 53235 - DNA, 20 bp, Artificial Sequence
  Description of Artificial Sequence: Synthetic oligonucleotide
  Target: LAMA2; (-) strand; PAM type: NRG; PAM sequence: GAG
ttaaatgtgttctatcagtg

SEQ ID NO: 53236 - DNA, 20 bp, Artificial Sequence
  Description of Artificial Sequence: Synthetic oligonucleotide
  Target: LAMA2; (-) strand; PAM type: NRG; PAM sequence: TGG
acttaaatgtgttctatcag

SEQ ID NO: 53237 - DNA, 20 bp, Artificial Sequence
  Description of Artificial Sequence: Synthetic oligonucleotide
  Target: LAMA2; (-) strand; PAM type: NRG; PAM sequence: CAG
atcacttaaatgtgttctat

SEQ ID NO: 53238 - DNA, 20 bp, Artificial Sequence
  Description of Artificial Sequence: Synthetic oligonucleotide
  Target: LAMA2; (-) strand; PAM type: NRG; PAM sequence: TAG
aagtggaatgctcttgaatg

SEQ ID NO: 53239 - DNA, 20 bp, Artificial Sequence
  Description of Artificial Sequence: Synthetic oligonucleotide
  Target: LAMA2; (-) strand; PAM type: NRG; PAM sequence: TGG
ccatgataagatggttgaag

SEQ ID NO: 53240 - DNA, 20 bp, Artificial Sequence
  Description of Artificial Sequence: Synthetic oligonucleotide
  Target: LAMA2; (-) strand; PAM type: NRG; PAM sequence: AAG
tcaccatgataagatggttg

SEQ ID NO: 53241 - DNA, 20 bp, Artificial Sequence
  Description of Artificial Sequence: Synthetic oligonucleotide
  Target: LAMA2; (-) strand; PAM type: NRG; PAM sequence: TGG
tgagcttcaccatgataaga

SEQ ID NO: 53242 - DNA, 20 bp, Artificial Sequence
  Description of Artificial Sequence: Synthetic oligonucleotide
  Target: LAMA2; (-) strand; PAM type: NRG; PAM sequence: AAG
catctgagcttcaccatgat

SEQ ID NO: 53243 - DNA, 20 bp, Artificial Sequence
  Description of Artificial Sequence: Synthetic oligonucleotide
  Target: LAMA2; (-) strand; PAM type: NRG; PAM sequence: GAG
agtgttacaaagacacatct

SEQ ID NO: 53244 - DNA, 20 bp, Artificial Sequence
  Description of Artificial Sequence: Synthetic oligonucleotide
  Target: LAMA2; (-) strand; PAM type: NRG; PAM sequence: AAG
gggaagaaaagagtgttaca

SEQ ID NO: 53245 - DNA, 20 bp, Artificial Sequence
  Description of Artificial Sequence: Synthetic oligonucleotide
  Target: LAMA2; (-) strand; PAM type: NRG; PAM sequence: GAG
agttgccaaagggaagaaaa

SEQ ID NO: 53246 - DNA, 20 bp, Artificial Sequence
  Description of Artificial Sequence: Synthetic oligonucleotide
  Target: LAMA2; (-) strand; PAM type: NRG; PAM sequence: AAG
tgagttgccaaagggaagaa

SEQ ID NO: 53247 - DNA, 20 bp, Artificial Sequence
  Description of Artificial Sequence: Synthetic oligonucleotide
  Target: LAMA2; (-) strand; PAM type: NRG; PAM sequence: AAG
agcactgagttgccaaaggg

SEQ ID NO: 53248 - DNA, 20 bp, Artificial Sequence
  Description of Artificial Sequence: Synthetic oligonucleotide
  Target: LAMA2; (-) strand; PAM type: NRG; PAM sequence: GGG
aatagcactgagttgccaaa

SEQ ID NO: 53249 - DNA, 20 bp, Artificial Sequence
  Description of Artificial Sequence: Synthetic oligonucleotide
  Target: LAMA2; (-) strand; PAM type: NRG; PAM sequence: AGG
gaatagcactgagttgccaa

SEQ ID NO: 53250 - DNA, 20 bp, Artificial Sequence
  Description of Artificial Sequence: Synthetic oligonucleotide
  Target: LAMA2; (-) strand; PAM type: NRG; PAM sequence: AAG
ggaatagcactgagttgcca

SEQ ID NO: 53251 - DNA, 20 bp, Artificial Sequence
  Description of Artificial Sequence: Synthetic oligonucleotide
  Target: LAMA2; (-) strand; PAM type: NRG; PAM sequence: GAG
ttgaataatggaatagcact

SEQ ID NO: 53252 - DNA, 20 bp, Artificial Sequence
  Description of Artificial Sequence: Synthetic oligonucleotide
  Target: LAMA2; (-) strand; PAM type: NRG; PAM sequence: TAG
atatattttgaataatggaa

SEQ ID NO: 53253 - DNA, 20 bp, Artificial Sequence
  Description of Artificial Sequence: Synthetic oligonucleotide
  Target: LAMA2; (-) strand; PAM type: NRG; PAM sequence: TGG
tactgatatattttgaataa

SEQ ID NO: 53254 - DNA, 20 bp, Artificial Sequence
  Description of Artificial Sequence: Synthetic oligonucleotide
  Target: LAMA2; (-) strand; PAM type: NRG; PAM sequence: AGG
ctgcacacaaattgtttctg

SEQ ID NO: 53255 - DNA, 20 bp, Artificial Sequence
  Description of Artificial Sequence: Synthetic oligonucleotide
  Target: LAMA2; (-) strand; PAM type: NRG; PAM sequence: GAG
cctgcacacaaattgtttct

SEQ ID NO: 53256 - DNA, 20 bp, Artificial Sequence
  Description of Artificial Sequence: Synthetic oligonucleotide
  Target: LAMA2; (-) strand; PAM type: NRG; PAM sequence: AAG
aaaatttttaaaagctgcgg

SEQ ID NO: 53257 - DNA, 20 bp, Artificial Sequence
  Description of Artificial Sequence: Synthetic oligonucleotide
  Target: LAMA2; (-) strand; PAM type: NRG; PAM sequence: CGG
agcaaaatttttaaaagctg

SEQ ID NO: 53258 - DNA, 20 bp, Artificial Sequence
  Description of Artificial Sequence: Synthetic oligonucleotide
  Target: LAMA2; (-) strand; PAM type: NRG; PAM sequence: AAG
cactggagcaaaatttttaa

SEQ ID NO: 53259 - DNA, 20 bp, Artificial Sequence
  Description of Artificial Sequence: Synthetic oligonucleotide
  Target: LAMA2; (-) strand; PAM type: NRG; PAM sequence: GAG
tcatatttctaactacactg

SEQ ID NO: 53260 - DNA, 20 bp, Artificial Sequence
  Description of Artificial Sequence: Synthetic oligonucleotide
  Target: LAMA2; (-) strand; PAM type: NRG; PAM sequence: TGG
tgtcatatttctaactacac

SEQ ID NO: 53261 - DNA, 20 bp, Artificial Sequence
  Description of Artificial Sequence: Synthetic oligonucleotide
  Target: LAMA2; (-) strand; PAM type: NRG; PAM sequence: AAG
aataattcatttttgtttta

SEQ ID NO: 53262 - DNA, 20 bp, Artificial Sequence
  Description of Artificial Sequence: Synthetic oligonucleotide
  Target: LAMA2; (-) strand; PAM type: NRG; PAM sequence: GGG
aagtacctatatgtccatgt

SEQ ID NO: 53263 - DNA, 20 bp, Artificial Sequence
  Description of Artificial Sequence: Synthetic oligonucleotide
  Target: LAMA2; (-) strand; PAM type: NRG; PAM sequence: TGG
aaagtacctatatgtccatg

SEQ ID NO: 53264 - DNA, 20 bp, Artificial Sequence
  Description of Artificial Sequence: Synthetic oligonucleotide
  Target: LAMA2; (-) strand; PAM type: NRG; PAM sequence: AAG
taataaaaaagggaactcca

SEQ ID NO: 53265 - DNA, 20 bp, Artificial Sequence
  Description of Artificial Sequence: Synthetic oligonucleotide
  Target: LAMA2; (-) strand; PAM type: NRG; PAM sequence: GGG
ttgaaatagataataaaaaa

SEQ ID NO: 53266 - DNA, 20 bp, Artificial Sequence
  Description of Artificial Sequence: Synthetic oligonucleotide
  Target: LAMA2; (-) strand; PAM type: NRG; PAM sequence: AGG
attgaaatagataataaaaa

SEQ ID NO: 53267 - DNA, 20 bp, Artificial Sequence
  Description of Artificial Sequence: Synthetic oligonucleotide
  Target: LAMA2; (-) strand; PAM type: NRG; PAM sequence: AAG
gattgaaatagataataaaa

SEQ ID NO: 53268 - DNA, 20 bp, Artificial Sequence
  Description of Artificial Sequence: Synthetic oligonucleotide
  Target: LAMA2; (-) strand; PAM type: NRG; PAM sequence: TAG
tttagcgtctgagattgaaa

SEQ ID NO: 53269 - DNA, 20 bp, Artificial Sequence
  Description of Artificial Sequence: Synthetic oligonucleotide
  Target: LAMA2; (-) strand; PAM type: NRG; PAM sequence: GAG
gtgtctaaactttagcgtct

SEQ ID NO: 53270 - DNA, 20 bp, Artificial Sequence
  Description of Artificial Sequence: Synthetic oligonucleotide
  Target: LAMA2; (-) strand; PAM type: NRG; PAM sequence: TAG
caacaattgtgtctaaactt

SEQ ID NO: 53271 - DNA, 20 bp, Artificial Sequence
  Description of Artificial Sequence: Synthetic oligonucleotide
  Target: LAMA2; (-) strand; PAM type: NRG; PAM sequence: CAG
catatcataaaagaaatcat

SEQ ID NO: 53272 - DNA, 20 bp, Artificial Sequence
  Description of Artificial Sequence: Synthetic oligonucleotide
  Target: LAMA2; (-) strand; PAM type: NRG; PAM sequence: AAG
tttcaaatttcatatcataa

SEQ ID NO: 53273 - DNA, 20 bp, Artificial Sequence
  Description of Artificial Sequence: Synthetic oligonucleotide
  Target: LAMA2; (-) strand; PAM type: NRG; PAM sequence: TAG
gtttctgaatgtaaaacagg

SEQ ID NO: 53274 - DNA, 20 bp, Artificial Sequence
  Description of Artificial Sequence: Synthetic oligonucleotide
  Target: LAMA2; (-) strand; PAM type: NRG; PAM sequence: AGG
taagtttctgaatgtaaaac

SEQ ID NO: 53275 - DNA, 20 bp, Artificial Sequence
  Description of Artificial Sequence: Synthetic oligonucleotide
  Target: LAMA2; (-) strand; PAM type: NRG; PAM sequence: CAG
ataagtttctgaatgtaaaa

SEQ ID NO: 53276 - DNA, 20 bp, Artificial Sequence
  Description of Artificial Sequence: Synthetic oligonucleotide
  Target: LAMA2; (-) strand; PAM type: NRG; PAM sequence: AAG
atggaaacagaacatagaat

SEQ ID NO: 53277 - DNA, 20 bp, Artificial Sequence
  Description of Artificial Sequence: Synthetic oligonucleotide
  Target: LAMA2; (-) strand; PAM type: NRG; PAM sequence: TAG
acaaaaatggaaacagaaca

SEQ ID NO: 53278 - DNA, 20 bp, Artificial Sequence
  Description of Artificial Sequence: Synthetic oligonucleotide
  Target: LAMA2; (-) strand; PAM type: NRG; PAM sequence: CAG
aacagtaacaaaaatggaaa

SEQ ID NO: 53279 - DNA, 20 bp, Artificial Sequence
  Description of Artificial Sequence: Synthetic oligonucleotide
  Target: LAMA2; (-) strand; PAM type: NRG; PAM sequence: TGG
tcttaaaacagtaacaaaaa

SEQ ID NO: 53280 - DNA, 20 bp, Artificial Sequence
  Description of Artificial Sequence: Synthetic oligonucleotide
  Target: LAMA2; (-) strand; PAM type: NRG; PAM sequence: CAG
cttacaagtgattcttaaaa

SEQ ID NO: 53281 - DNA, 20 bp, Artificial Sequence
  Description of Artificial Sequence: Synthetic oligonucleotide
  Target: LAMA2; (-) strand; PAM type: NRG; PAM sequence: AAG
acgttattgttaaagcttac

SEQ ID NO: 53282 - DNA, 20 bp, Artificial Sequence
  Description of Artificial Sequence: Synthetic oligonucleotide
  Target: LAMA2; (-) strand; PAM type: NRG; PAM sequence: AAG
agtccaaaacgttattgtta

SEQ ID NO: 53283 - DNA, 20 bp, Artificial Sequence
  Description of Artificial Sequence: Synthetic oligonucleotide
  Target: LAMA2; (-) strand; PAM type: NRG; PAM sequence: TAG
aggccaaaattgcattacta

SEQ ID NO: 53284 - DNA, 20 bp, Artificial Sequence
  Description of Artificial Sequence: Synthetic oligonucleotide
  Target: LAMA2; (-) strand; PAM type: NRG; PAM sequence: AGG
ctaaatgacagaattaaatt

SEQ ID NO: 53285 - DNA, 20 bp, Artificial Sequence
  Description of Artificial Sequence: Synthetic oligonucleotide
  Target: LAMA2; (-) strand; PAM type: NRG; PAM sequence: TAG
tctaaatgacagaattaaat

SEQ ID NO: 53286 - DNA, 20 bp, Artificial Sequence
  Description of Artificial Sequence: Synthetic oligonucleotide
  Target: LAMA2; (-) strand; PAM type: NRG; PAM sequence: CAG
accttttttgttctaaatga

SEQ ID NO: 53287 - DNA, 20 bp, Artificial Sequence
  Description of Artificial Sequence: Synthetic oligonucleotide
  Target: LAMA2; (-) strand; PAM type: NRG; PAM sequence: AAG
agagagggagagagaaggaa

SEQ ID NO: 53288 - DNA, 20 bp, Artificial Sequence
  Description of Artificial Sequence: Synthetic oligonucleotide
  Target: LAMA2; (-) strand; PAM type: NRG; PAM sequence: AGG
agagaagagagggagagaga

SEQ ID NO: 53289 - DNA, 20 bp, Artificial Sequence
  Description of Artificial Sequence: Synthetic oligonucleotide
  Target: LAMA2; (-) strand; PAM type: NRG; PAM sequence: AAG
aagagaagagagggagagag

SEQ ID NO: 53290 - DNA, 20 bp, Artificial Sequence
  Description of Artificial Sequence: Synthetic oligonucleotide
  Target: LAMA2; (-) strand; PAM type: NRG; PAM sequence: GAG
agaaagagaagagagggaga

SEQ ID NO: 53291 - DNA, 20 bp, Artificial Sequence
  Description of Artificial Sequence: Synthetic oligonucleotide
  Target: LAMA2; (-) strand; PAM type: NRG; PAM sequence: GAG
ggagaaagagaagagaggga

SEQ ID NO: 53292 - DNA, 20 bp, Artificial Sequence
  Description of Artificial Sequence: Synthetic oligonucleotide
  Target: LAMA2; (-) strand; PAM type: NRG; PAM sequence: GAG
agggagaaagagaagagagg

SEQ ID NO: 53293 - DNA, 20 bp, Artificial Sequence
  Description of Artificial Sequence: Synthetic oligonucleotide
  Target: LAMA2; (-) strand; PAM type: NRG; PAM sequence: GGG
gaagggagaaagagaagaga

SEQ ID NO: 53294 - DNA, 20 bp, Artificial Sequence
  Description of Artificial Sequence: Synthetic oligonucleotide
  Target: LAMA2; (-) strand; PAM type: NRG; PAM sequence: AGG
ggaagggagaaagagaagag

SEQ ID NO: 53295 - DNA, 20 bp, Artificial Sequence
  Description of Artificial Sequence: Synthetic oligonucleotide
  Target: LAMA2; (-) strand; PAM type: NRG; PAM sequence: GAG
aggaagggagaaagagaaga

SEQ ID NO: 53296 - DNA, 20 bp, Artificial Sequence
  Description of Artificial Sequence: Synthetic oligonucleotide
  Target: LAMA2; (-) strand; PAM type: NRG; PAM sequence: GAG
aaaggaagggagaaagagaa

SEQ ID NO: 53297 - DNA, 20 bp, Artificial Sequence
  Description of Artificial Sequence: Synthetic oligonucleotide
  Target: LAMA2; (-) strand; PAM type: NRG; PAM sequence: AAG
agaaaggaagggagaaagag

SEQ ID NO: 53298 - DNA, 20 bp, Artificial Sequence
  Description of Artificial Sequence: Synthetic oligonucleotide
  Target: LAMA2; (-) strand; PAM type: NRG; PAM sequence: GAG
ggaagaaaggaagggagaaa

SEQ ID NO: 53299 - DNA, 20 bp, Artificial Sequence
  Description of Artificial Sequence: Synthetic oligonucleotide
  Target: LAMA2; (-) strand; PAM type: NRG; PAM sequence: AAG
aaggaagaaaggaagggaga

SEQ ID NO: 53300 - DNA, 20 bp, Artificial Sequence
  Description of Artificial Sequence: Synthetic oligonucleotide
  Target: LAMA2; (-) strand; PAM type: NRG; PAM sequence: GAG
gaggaaggaagaaaggaagg

SEQ ID NO: 53301 - DNA, 20 bp, Artificial Sequence
  Description of Artificial Sequence: Synthetic oligonucleotide
  Target: LAMA2; (-) strand; PAM type: NRG; PAM sequence: GGG
gggaggaaggaagaaaggaa

SEQ ID NO: 53302 - DNA, 20 bp, Artificial Sequence
  Description of Artificial Sequence: Synthetic oligonucleotide
  Target: LAMA2; (-) strand; PAM type: NRG; PAM sequence: AGG
agggaggaaggaagaaagga

SEQ ID NO: 53303 - DNA, 20 bp, Artificial Sequence
  Description of Artificial Sequence: Synthetic oligonucleotide
  Target: LAMA2; (-) strand; PAM type: NRG; PAM sequence: AAG
aagggaggaaggaagaaagg

SEQ ID NO: 53304 - DNA, 20 bp, Artificial Sequence
  Description of Artificial Sequence: Synthetic oligonucleotide
  Target: LAMA2; (-) strand; PAM type: NRG; PAM sequence: AGG
agaaagggaggaaggaagaa

SEQ ID NO: 53305 - DNA, 20 bp, Artificial Sequence
  Description of Artificial Sequence: Synthetic oligonucleotide
  Target: LAMA2; (-) strand; PAM type: NRG; PAM sequence: AAG
aagaaagggaggaaggaaga

SEQ ID NO: 53306 - DNA, 20 bp, Artificial Sequence
  Description of Artificial Sequence: Synthetic oligonucleotide
  Target: LAMA2; (-) strand; PAM type: NRG; PAM sequence: AAG
aataaagaaagggaggaagg

SEQ ID NO: 53307 - DNA, 20 bp, Artificial Sequence
  Description of Artificial Sequence: Synthetic oligonucleotide
  Target: LAMA2; (-) strand; PAM type: NRG; PAM sequence: AGG
gaaaataaagaaagggagga

SEQ ID NO: 53308 - DNA, 20 bp, Artificial Sequence
  Description of Artificial Sequence: Synthetic oligonucleotide
  Target: LAMA2; (-) strand; PAM type: NRG; PAM sequence: AAG
ggaaaataaagaaagggagg

SEQ ID NO: 53309 - DNA, 20 bp, Artificial Sequence
  Description of Artificial Sequence: Synthetic oligonucleotide
  Target: LAMA2; (-) strand; PAM type: NRG; PAM sequence: AGG
aaaggaaaataaagaaaggg

SEQ ID NO: 53310 - DNA, 20 bp, Artificial Sequence
  Description of Artificial Sequence: Synthetic oligonucleotide
  Target: LAMA2; (-) strand; PAM type: NRG; PAM sequence: GAG
aaaaggaaaataaagaaagg

SEQ ID NO: 53311 - DNA, 20 bp, Artificial Sequence
  Description of Artificial Sequence: Synthetic oligonucleotide
  Target: LAMA2; (-) strand; PAM type: NRG; PAM sequence: GGG
ggaaaaggaaaataaagaaa

SEQ ID NO: 53312 - DNA, 20 bp, Artificial Sequence
  Description of Artificial Sequence: Synthetic oligonucleotide
  Target: LAMA2; (-) strand; PAM type: NRG; PAM sequence: AGG
gggaaaaggaaaataaagaa

SEQ ID NO: 53313 - DNA, 20 bp, Artificial Sequence
  Description of Artificial Sequence: Synthetic oligonucleotide
  Target: LAMA2; (-) strand; PAM type: NRG; PAM sequence: AAG
agggaaaaggaaaataaaga

SEQ ID NO: 53314 - DNA, 20 bp, Artificial Sequence
  Description of Artificial Sequence: Synthetic oligonucleotide
  Target: LAMA2; (-) strand; PAM type: NRG; PAM sequence: AAG
actaagggaaaaggaaaata

SEQ ID NO: 53315 - DNA, 20 bp, Artificial Sequence
  Description of Artificial Sequence: Synthetic oligonucleotide
  Target: LAMA2; (-) strand; PAM type: NRG; PAM sequence: AGG
aggaagaatactaagggaaa

SEQ ID NO: 53316 - DNA, 20 bp, Artificial Sequence
  Description of Artificial Sequence: Synthetic oligonucleotide
  Target: LAMA2; (-) strand; PAM type: NRG; PAM sequence: AAG
caggaagaatactaagggaa

SEQ ID NO: 53317 - DNA, 20 bp, Artificial Sequence
  Description of Artificial Sequence: Synthetic oligonucleotide
  Target: LAMA2; (-) strand; PAM type: NRG; PAM sequence: GGG
attcacaggaagaatactaa

SEQ ID NO: 53318 - DNA, 20 bp, Artificial Sequence
  Description of Artificial Sequence: Synthetic oligonucleotide
  Target: LAMA2; (-) strand; PAM type: NRG; PAM sequence: AGG
tattcacaggaagaatacta

SEQ ID NO: 53319 - DNA, 20 bp, Artificial Sequence
  Description of Artificial Sequence: Synthetic oligonucleotide
  Target: LAMA2; (-) strand; PAM type: NRG; PAM sequence: AAG
ttattcacaggaagaatact

SEQ ID NO: 53320 - DNA, 20 bp, Artificial Sequence
  Description of Artificial Sequence: Synthetic oligonucleotide
  Target: LAMA2; (-) strand; PAM type: NRG; PAM sequence: AAG
taccttattttattcacagg

SEQ ID NO: 53321 - DNA, 20 bp, Artificial Sequence
  Description of Artificial Sequence: Synthetic oligonucleotide
  Target: LAMA2; (-) strand; PAM type: NRG; PAM sequence: AGG
aattaccttattttattcac

SEQ ID NO: 53322 - DNA, 20 bp, Artificial Sequence
  Description of Artificial Sequence: Synthetic oligonucleotide
  Target: LAMA2; (-) strand; PAM type: NRG; PAM sequence: CAG
taattaccttattttattca

SEQ ID NO: 53323 - DNA, 20 bp, Artificial Sequence
  Description of Artificial Sequence: Synthetic oligonucleotide
  Target: LAMA2; (-) strand; PAM type: NRG; PAM sequence: TAG
ttcctaaatgttatatttgt

SEQ ID NO: 53324 - DNA, 20 bp, Artificial Sequence
  Description of Artificial Sequence: Synthetic oligonucleotide
  Target: LAMA2; (-) strand; PAM type: NRG; PAM sequence: AAG
taataaggaagatttaagta

SEQ ID NO: 53325 - DNA, 20 bp, Artificial Sequence
  Description of Artificial Sequence: Synthetic oligonucleotide
  Target: LAMA2; (-) strand; PAM type: NRG; PAM sequence: AAG
gcttttaataaggaagattt

SEQ ID NO: 53326 - DNA, 20 bp, Artificial Sequence
  Description of Artificial Sequence: Synthetic oligonucleotide
  Target: LAMA2; (-) strand; PAM type: NRG; PAM sequence: AAG
acctgtggcttttaataagg

SEQ ID NO: 53327 - DNA, 20 bp, Artificial Sequence
  Description of Artificial Sequence: Synthetic oligonucleotide
  Target: LAMA2; (-) strand; PAM type: NRG; PAM sequence: AGG
attacctgtggcttttaata

SEQ ID NO: 53328 - DNA, 20 bp, Artificial Sequence
  Description of Artificial Sequence: Synthetic oligonucleotide
  Target: LAMA2; (-) strand; PAM type: NRG; PAM sequence: AAG
aattacctgtggcttttaat

SEQ ID NO: 53329 - DNA, 20 bp, Artificial Sequence
  Description of Artificial Sequence: Synthetic oligonucleotide
  Target: LAMA2; (-) strand; PAM type: NRG; PAM sequence: TGG
ctttagatagtaattacctg

SEQ ID NO: 53330 - DNA, 20 bp, Artificial Sequence
  Description of Artificial Sequence: Synthetic oligonucleotide
  Target: LAMA2; (-) strand; PAM type: NRG; PAM sequence: TAG
tgtctcaaactatctttaga

SEQ ID NO: 53331 - DNA, 20 bp, Artificial Sequence
  Description of Artificial Sequence: Synthetic oligonucleotide
  Target: LAMA2; (-) strand; PAM type: NRG; PAM sequence: TAG
aatatgtctcaaactatctt

SEQ ID NO: 53332 - DNA, 20 bp, Artificial Sequence
  Description of Artificial Sequence: Synthetic oligonucleotide
  Target: LAMA2; (-) strand; PAM type: NRG; PAM sequence: TAG
ctttgacaagcaaatgtctt

SEQ ID NO: 53333 - DNA, 20 bp, Artificial Sequence
  Description of Artificial Sequence: Synthetic oligonucleotide
  Target: LAMA2; (-) strand; PAM type: NRG; PAM sequence: AAG
ccatattatacatctttgac

SEQ ID NO: 53334 - DNA, 20 bp, Artificial Sequence
  Description of Artificial Sequence: Synthetic oligonucleotide
  Target: LAMA2; (-) strand; PAM type: NRG; PAM sequence: GAG
ccacactcaagattacttag

SEQ ID NO: 53335 - DNA, 20 bp, Artificial Sequence
  Description of Artificial Sequence: Synthetic oligonucleotide
  Target: LAMA2; (-) strand; PAM type: NRG; PAM sequence: AGG
atccacactcaagattactt

SEQ ID NO: 53336 - DNA, 20 bp, Artificial Sequence
  Description of Artificial Sequence: Synthetic oligonucleotide
  Target: LAMA2; (-) strand; PAM type: NRG; PAM sequence: TAG
gatccacactcaagattact

SEQ ID NO: 53337 - DNA, 20 bp, Artificial Sequence
  Description of Artificial Sequence: Synthetic oligonucleotide
  Target: LAMA2; (-) strand; PAM type: NRG; PAM sequence: AAG
ccatattaagatccacactc

SEQ ID NO: 53338 - DNA, 20 bp, Artificial Sequence
  Description of Artificial Sequence: Synthetic oligonucleotide
  Target: LAMA2; (-) strand; PAM type: NRG; PAM sequence: AAG
tagcataaagttcccatatt

SEQ ID NO: 53339 - DNA, 20 bp, Artificial Sequence
  Description of Artificial Sequence: Synthetic oligonucleotide
  Target: LAMA2; (-) strand; PAM type: NRG; PAM sequence: AAG
aataaaatccaaatagcata

SEQ ID NO: 53340 - DNA, 20 bp, Artificial Sequence
  Description of Artificial Sequence: Synthetic oligonucleotide
  Target: LAMA2; (-) strand; PAM type: NRG; PAM sequence: TAG
gtgtccaaataaaatccaaa

SEQ ID NO: 53341 - DNA, 20 bp, Artificial Sequence
  Description of Artificial Sequence: Synthetic oligonucleotide
  Target: LAMA2; (-) strand; PAM type: NRG; PAM sequence: AGG
atgaataataacccattaat

SEQ ID NO: 53342 - DNA, 20 bp, Artificial Sequence
  Description of Artificial Sequence: Synthetic oligonucleotide
  Target: LAMA2; (-) strand; PAM type: NRG; PAM sequence: TAG
tatgaataataacccattaa

SEQ ID NO: 53343 - DNA, 20 bp, Artificial Sequence
  Description of Artificial Sequence: Synthetic oligonucleotide
  Target: LAMA2; (-) strand; PAM type: NRG; PAM sequence: AGG
ctagattaggcatgtcacag

SEQ ID NO: 53344 - DNA, 20 bp, Artificial Sequence
  Description of Artificial Sequence: Synthetic oligonucleotide
  Target: LAMA2; (-) strand; PAM type: NRG; PAM sequence: GAG
actagattaggcatgtcaca

SEQ ID NO: 53345 - DNA, 20 bp, Artificial Sequence
  Description of Artificial Sequence: Synthetic oligonucleotide
  Target: LAMA2; (-) strand; PAM type: NRG; PAM sequence: CAG
gaactagattaggcatgtca

SEQ ID NO: 53346 - DNA, 20 bp, Artificial Sequence
  Description of Artificial Sequence: Synthetic oligonucleotide
  Target: LAMA2; (-) strand; PAM type: NRG; PAM sequence: AGG
cttgttgtttgaactagatt

SEQ ID NO: 53347 - DNA, 20 bp, Artificial Sequence
  Description of Artificial Sequence: Synthetic oligonucleotide
  Target: LAMA2; (-) strand; PAM type: NRG; PAM sequence: TAG
acttgttgtttgaactagat

SEQ ID NO: 53348 - DNA, 20 bp, Artificial Sequence
  Description of Artificial Sequence: Synthetic oligonucleotide
  Target: LAMA2; (-) strand; PAM type: NRG; PAM sequence: TAG
gattaacttgttgtttgaac

SEQ ID NO: 53349 - DNA, 20 bp, Artificial Sequence
  Description of Artificial Sequence: Synthetic oligonucleotide
  Target: LAMA2; (-) strand; PAM type: NRG; PAM sequence: TAG
ttcatcatcaggaatttgca

SEQ ID NO: 53350 - DNA, 20 bp, Artificial Sequence
  Description of Artificial Sequence: Synthetic oligonucleotide
  Target: LAMA2; (-) strand; PAM type: NRG; PAM sequence: AGG
ctcctgaggttttcatcatc

SEQ ID NO: 53351 - DNA, 20 bp, Artificial Sequence
  Description of Artificial Sequence: Synthetic oligonucleotide
  Target: LAMA2; (-) strand; PAM type: NRG; PAM sequence: CAG
gctcctgaggttttcatcat

SEQ ID NO: 53352 - DNA, 20 bp, Artificial Sequence
  Description of Artificial Sequence: Synthetic oligonucleotide
  Target: LAMA2; (-) strand; PAM type: NRG; PAM sequence: AGG
caggcactaaatagctcctg

SEQ ID NO: 53353 - DNA, 20 bp, Artificial Sequence
  Description of Artificial Sequence: Synthetic oligonucleotide
  Target: LAMA2; (-) strand; PAM type: NRG; PAM sequence: GAG
ccaggcactaaatagctcct

SEQ ID NO: 53354 - DNA, 20 bp, Artificial Sequence
  Description of Artificial Sequence: Synthetic oligonucleotide
  Target: LAMA2; (-) strand; PAM type: NRG; PAM sequence: TAG
cctaagtgccaggcactaaa

SEQ ID NO: 53355 - DNA, 20 bp, Artificial Sequence
  Description of Artificial Sequence: Synthetic oligonucleotide
  Target: LAMA2; (-) strand; PAM type: NRG; PAM sequence: AGG
aggtacatttcctaagtgcc

SEQ ID NO: 53356 - DNA, 20 bp, Artificial Sequence
  Description of Artificial Sequence: Synthetic oligonucleotide
  Target: LAMA2; (-) strand; PAM type: NRG; PAM sequence: CAG
aaggtacatttcctaagtgc

SEQ ID NO: 53357 - DNA, 20 bp, Artificial Sequence
  Description of Artificial Sequence: Synthetic oligonucleotide
  Target: LAMA2; (-) strand; PAM type: NRG; PAM sequence: AAG
ttgcacaaggtacatttcct

SEQ ID NO: 53358 - DNA, 20 bp, Artificial Sequence
  Description of Artificial Sequence: Synthetic oligonucleotide
  Target: LAMA2; (-) strand; PAM type: NRG; PAM sequence: AGG
gacatacttaacattgcaca

SEQ ID NO: 53359 - DNA, 20 bp, Artificial Sequence
  Description of Artificial Sequence: Synthetic oligonucleotide
  Target: LAMA2; (-) strand; PAM type: NRG; PAM sequence: AAG
agacatacttaacattgcac

SEQ ID NO: 53360 - DNA, 20 bp, Artificial Sequence
  Description of Artificial Sequence: Synthetic oligonucleotide
  Target: LAMA2; (-) strand; PAM type: NRG; PAM sequence: GAG
ttgagtggactacacataca

SEQ ID NO: 53361 - DNA, 20 bp, Artificial Sequence
  Description of Artificial Sequence: Synthetic oligonucleotide
  Target: LAMA2; (-) strand; PAM type: NRG; PAM sequence: CAG
agttgagtggactacacata

SEQ ID NO: 53362 - DNA, 20 bp, Artificial Sequence
  Description of Artificial Sequence: Synthetic oligonucleotide
  Target: LAMA2; (-) strand; PAM type: NRG; PAM sequence: TGG
cagttcgggggtcagttgag

SEQ ID NO: 53363 - DNA, 20 bp, Artificial Sequence
  Description of Artificial Sequence: Synthetic oligonucleotide
  Target: LAMA2; (-) strand; PAM type: NRG; PAM sequence: GAG
acacagttcgggggtcagtt

SEQ ID NO: 53364 - DNA, 20 bp, Artificial Sequence
  Description of Artificial Sequence: Synthetic oligonucleotide
  Target: LAMA2; (-) strand; PAM type: NRG; PAM sequence: CAG
gaggtacacagttcgggggt

SEQ ID NO: 53365 - DNA, 20 bp, Artificial Sequence
  Description of Artificial Sequence: Synthetic oligonucleotide
  Target: LAMA2; (-) strand; PAM type: NRG; PAM sequence: GGG
tggggaggtacacagttcgg

SEQ ID NO: 53366 - DNA, 20 bp, Artificial Sequence
  Description of Artificial Sequence: Synthetic oligonucleotide
  Target: LAMA2; (-) strand; PAM type: NRG; PAM sequence: GGG
ttggggaggtacacagttcg

SEQ ID NO: 53367 - DNA, 20 bp, Artificial Sequence
  Description of Artificial Sequence: Synthetic oligonucleotide
  Target: LAMA2; (-) strand; PAM type: NRG; PAM sequence: GGG
cttggggaggtacacagttc

SEQ ID NO: 53368 - DNA, 20 bp, Artificial Sequence
  Description of Artificial Sequence: Synthetic oligonucleotide
  Target: LAMA2; (-) strand; PAM type: NRG; PAM sequence: CGG
ccttggggaggtacacagtt

SEQ ID NO: 53369 - DNA, 20 bp, Artificial Sequence
  Description of Artificial Sequence: Synthetic oligonucleotide
  Target: LAMA2; (-) strand; PAM type: NRG; PAM sequence: CAG
aagagccttggggaggtaca

SEQ ID NO: 53370 - DNA, 20 bp, Artificial Sequence
  Description of Artificial Sequence: Synthetic oligonucleotide
  Target: LAMA2; (-) strand; PAM type: NRG; PAM sequence: AGG
ctaaatgaagagccttgggg

SEQ ID NO: 53371 - DNA, 20 bp, Artificial Sequence
  Description of Artificial Sequence: Synthetic oligonucleotide
  Target: LAMA2; (-) strand; PAM type: NRG; PAM sequence: GAG
gctaaatgaagagccttggg

SEQ ID NO: 53372 - DNA, 20 bp, Artificial Sequence
  Description of Artificial Sequence: Synthetic oligonucleotide
  Target: LAMA2; (-) strand; PAM type: NRG; PAM sequence: GGG
cagctaaatgaagagccttg

SEQ ID NO: 53373 - DNA, 20 bp, Artificial Sequence
  Description of Artificial Sequence: Synthetic oligonucleotide
  Target: LAMA2; (-) strand; PAM type: NRG; PAM sequence: GGG
gcagctaaatgaagagcctt

SEQ ID NO: 53374 - DNA, 20 bp, Artificial Sequence
  Description of Artificial Sequence: Synthetic oligonucleotide
  Target: LAMA2; (-) strand; PAM type: NRG; PAM sequence: TGG
cgcagctaaatgaagagcct

SEQ ID NO: 53375 - DNA, 20 bp, Artificial Sequence
  Description of Artificial Sequence: Synthetic oligonucleotide
  Target: LAMA2; (-) strand; PAM type: NRG; PAM sequence: GAG
tcaagacgcagctaaatgaa

SEQ ID NO: 53376 - DNA, 20 bp, Artificial Sequence
  Description of Artificial Sequence: Synthetic oligonucleotide
  Target: LAMA2; (-) strand; PAM type: NRG; PAM sequence: AAG
actcaagacgcagctaaatg

SEQ ID NO: 53377 - DNA, 20 bp, Artificial Sequence
  Description of Artificial Sequence: Synthetic oligonucleotide
  Target: LAMA2; (-) strand; PAM type: NRG; PAM sequence: CAG
accatctggcactcaagacg

SEQ ID NO: 53378 - DNA, 20 bp, Artificial Sequence
  Description of Artificial Sequence: Synthetic oligonucleotide
  Target: LAMA2; (-) strand; PAM type: NRG; PAM sequence: AAG
atctaaaccatctggcactc

SEQ ID NO: 53379 - DNA, 20 bp, Artificial Sequence
  Description of Artificial Sequence: Synthetic oligonucleotide
  Target: LAMA2; (-) strand; PAM type: NRG; PAM sequence: TGG
ttataccaatctaaaccatc

SEQ ID NO: 53380 - DNA, 20 bp, Artificial Sequence
  Description of Artificial Sequence: Synthetic oligonucleotide
  Target: LAMA2; (-) strand; PAM type: NRG; PAM sequence: AAG
actaaacagctctgctacgt

SEQ ID NO: 53381 - DNA, 20 bp, Artificial Sequence
  Description of Artificial Sequence: Synthetic oligonucleotide
  Target: LAMA2; (-) strand; PAM type: NRG; PAM sequence: CAG
aattatattaatctactaaa

SEQ ID NO: 53382 - DNA, 20 bp, Artificial Sequence
  Description of Artificial Sequence: Synthetic oligonucleotide
  Target: LAMA2; (-) strand; PAM type: NRG; PAM sequence: AGG
tattttccttctacaaactg

SEQ ID NO: 53383 - DNA, 20 bp, Artificial Sequence
  Description of Artificial Sequence: Synthetic oligonucleotide
  Target: LAMA2; (-) strand; PAM type: NRG; PAM sequence: GAG
atattttccttctacaaact

SEQ ID NO: 53384 - DNA, 20 bp, Artificial Sequence
  Description of Artificial Sequence: Synthetic oligonucleotide
  Target: LAMA2; (-) strand; PAM type: NRG; PAM sequence: GGG
tttgtccttgacaagttgct

SEQ ID NO: 53385 - DNA, 20 bp, Artificial Sequence
  Description of Artificial Sequence: Synthetic oligonucleotide
  Target: LAMA2; (-) strand; PAM type: NRG; PAM sequence: TGG
gtttgtccttgacaagttgc

SEQ ID NO: 53386 - DNA, 20 bp, Artificial Sequence
  Description of Artificial Sequence: Synthetic oligonucleotide
  Target: LAMA2; (-) strand; PAM type: NRG; PAM sequence: AAG
aatttttgtttgtccttgac

SEQ ID NO: 53387 - DNA, 20 bp, Artificial Sequence
  Description of Artificial Sequence: Synthetic oligonucleotide
  Target: LAMA2; (-) strand; PAM type: NRG; PAM sequence: TGG
tctaattctaaaataagcat

SEQ ID NO: 53388 - DNA, 20 bp, Artificial Sequence
  Description of Artificial Sequence: Synthetic oligonucleotide
  Target: LAMA2; (-) strand; PAM type: NRG; PAM sequence: AAG
ttaatttctaattctaaaat

SEQ ID NO: 53389 - DNA, 20 bp, Artificial Sequence
  Description of Artificial Sequence: Synthetic oligonucleotide
  Target: LAMA2; (-) strand; PAM type: NRG; PAM sequence: AGG
gcatctacaaagtcaagagc

SEQ ID NO: 53390 - DNA, 20 bp, Artificial Sequence
  Description of Artificial Sequence: Synthetic oligonucleotide
  Target: LAMA2; (-) strand; PAM type: NRG; PAM sequence: CAG
agcatctacaaagtcaagag

SEQ ID NO: 53391 - DNA, 20 bp, Artificial Sequence
  Description of Artificial Sequence: Synthetic oligonucleotide
  Target: LAMA2; (-) strand; PAM type: NRG; PAM sequence: GAG
gttagcatctacaaagtcaa

SEQ ID NO: 53392 - DNA, 20 bp, Artificial Sequence
  Description of Artificial Sequence: Synthetic oligonucleotide
  Target: LAMA2; (-) strand; PAM type: NRG; PAM sequence: AAG
tagttagcatctacaaagtc

SEQ ID NO: 53393 - DNA, 20 bp, Artificial Sequence
  Description of Artificial Sequence: Synthetic oligonucleotide
  Target: LAMA2; (-) strand; PAM type: NRG; PAM sequence: AAG
ggtgatagttagcatctaca

SEQ ID NO: 53394 - DNA, 20 bp, Artificial Sequence
  Description of Artificial Sequence: Synthetic oligonucleotide
  Target: LAMA2; (-) strand; PAM type: NRG; PAM sequence: TAG
agtccaaaagaggtgatagt

SEQ ID NO: 53395 - DNA, 20 bp, Artificial Sequence
  Description of Artificial Sequence: Synthetic oligonucleotide
  Target: LAMA2; (-) strand; PAM type: NRG; PAM sequence: TAG
taaaagtccaaaagaggtga

SEQ ID NO: 53396 - DNA, 20 bp, Artificial Sequence
  Description of Artificial Sequence: Synthetic oligonucleotide
  Target: LAMA2; (-) strand; PAM type: NRG; PAM sequence: AGG
aatatataaaagtccaaaag

SEQ ID NO: 53397 - DNA, 20 bp, Artificial Sequence
  Description of Artificial Sequence: Synthetic oligonucleotide
  Target: LAMA2; (-) strand; PAM type: NRG; PAM sequence: GAG
aaatatataaaagtccaaaa

SEQ ID NO: 53398 - DNA, 20 bp, Artificial Sequence
  Description of Artificial Sequence: Synthetic oligonucleotide
  Target: LAMA2; (-) strand; PAM type: NRG; PAM sequence: AAG
ataaatatataaaagtccaa

SEQ ID NO: 53399 - DNA, 20 bp, Artificial Sequence
  Description of Artificial Sequence: Synthetic oligonucleotide
  Target: LAMA2; (-) strand; PAM type: NRG; PAM sequence: AAG
tatgaaagataaatatataa

SEQ ID NO: 53400 - DNA, 20 bp, Artificial Sequence
  Description of Artificial Sequence: Synthetic oligonucleotide
  Target: LAMA2; (-) strand; PAM type: NRG; PAM sequence: AAG
ttcctcagggtattttatga

SEQ ID NO: 53401 - DNA, 20 bp, Artificial Sequence
  Description of Artificial Sequence: Synthetic oligonucleotide
  Target: LAMA2; (-) strand; PAM type: NRG; PAM sequence: GGG
aatggatttttttttcctca

SEQ ID NO: 53402 - DNA, 20 bp, Artificial Sequence
  Description of Artificial Sequence: Synthetic oligonucleotide
  Target: LAMA2; (-) strand; PAM type: NRG; PAM sequence: AGG
aaatggatttttttttcctc

SEQ ID NO: 53403 - DNA, 20 bp, Artificial Sequence
  Description of Artificial Sequence: Synthetic oligonucleotide
  Target: LAMA2; (-) strand; PAM type: NRG; PAM sequence: CAG
gaaatggatttttttttcct

SEQ ID NO: 53404 - DNA, 20 bp, Artificial Sequence
  Description of Artificial Sequence: Synthetic oligonucleotide
  Target: LAMA2; (-) strand; PAM type: NRG; PAM sequence: TGG
agactaacataacttagaaa

SEQ ID NO: 53405 - DNA, 20 bp, Artificial Sequence
  Description of Artificial Sequence: Synthetic oligonucleotide
  Target: LAMA2; (-) strand; PAM type: NRG; PAM sequence: TAG
tatgatagactaacataact

SEQ ID NO: 53406 - DNA, 20 bp, Artificial Sequence
  Description of Artificial Sequence: Synthetic oligonucleotide
  Target: LAMA2; (-) strand; PAM type: NRG; PAM sequence: TAG
aaatgaatctctggatatga

SEQ ID NO: 53407 - DNA, 20 bp, Artificial Sequence
  Description of Artificial Sequence: Synthetic oligonucleotide
  Target: LAMA2; (-) strand; PAM type: NRG; PAM sequence: TGG
cataataccaaatgaatctc

SEQ ID NO: 53408 - DNA, 20 bp, Artificial Sequence
  Description of Artificial Sequence: Synthetic oligonucleotide
  Target: LAMA2; (-) strand; PAM type: NRG; PAM sequence: AAG
ttaaatgaaaaagacccttc

SEQ ID NO: 53409 - DNA, 20 bp, Artificial Sequence
  Description of Artificial Sequence: Synthetic oligonucleotide
  Target: LAMA2; (-) strand; PAM type: NRG; PAM sequence: AAG
gtgtgtgtatttaaatgaaa

SEQ ID NO: 53410 - DNA, 20 bp, Artificial Sequence
  Description of Artificial Sequence: Synthetic oligonucleotide
  Target: LAMA2; (-) strand; PAM type: NRG; PAM sequence: CAG
tatgtctacatagtaataag

SEQ ID NO: 53411 - DNA, 20 bp, Artificial Sequence
  Description of Artificial Sequence: Synthetic oligonucleotide
  Target: LAMA2; (-) strand; PAM type: NRG; PAM sequence: AAG
gtatatgtctacatagtaat

SEQ ID NO: 53412 - DNA, 20 bp, Artificial Sequence
  Description of Artificial Sequence: Synthetic oligonucleotide
  Target: LAMA2; (-) strand; PAM type: NRG; PAM sequence: TAG
catgtgtgtatatgtctaca

SEQ ID NO: 53413 - DNA, 20 bp, Artificial Sequence
  Description of Artificial Sequence: Synthetic oligonucleotide
  Target: LAMA2; (-) strand; PAM type: NRG; PAM sequence: AAG
ttgaattaatgcatagtttt

SEQ ID NO: 53414 - DNA, 20 bp, Artificial Sequence
  Description of Artificial Sequence: Synthetic oligonucleotide
  Target: LAMA2; (-) strand; PAM type: NRG; PAM sequence: TAG
aatgcatttgaattaatgca

SEQ ID NO: 53415 - DNA, 20 bp, Artificial Sequence
  Description of Artificial Sequence: Synthetic oligonucleotide
  Target: LAMA2; (-) strand; PAM type: NRG; PAM sequence: AAG
tgtccagtaatcaaagttcc

SEQ ID NO: 53416 - DNA, 20 bp, Artificial Sequence
  Description of Artificial Sequence: Synthetic oligonucleotide
  Target: LAMA2; (-) strand; PAM type: NRG; PAM sequence: AAG
agcctagtgtccagtaatca

SEQ ID NO: 53417 - DNA, 20 bp, Artificial Sequence
  Description of Artificial Sequence: Synthetic oligonucleotide
  Target: LAMA2; (-) strand; PAM type: NRG; PAM sequence: CAG
ttttcttatagcctagtgtc

SEQ ID NO: 53418 - DNA, 20 bp, Artificial Sequence
  Description of Artificial Sequence: Synthetic oligonucleotide
  Target: LAMA2; (-) strand; PAM type: NRG; PAM sequence: TAG
attaatattttcttatagcc

SEQ ID NO: 53419 - DNA, 20 bp, Artificial Sequence
  Description of Artificial Sequence: Synthetic oligonucleotide
  Target: LAMA2; (-) strand; PAM type: NRG; PAM sequence: TAG
aatcaattaatattttctta

SEQ ID NO: 53420 - DNA, 20 bp, Artificial Sequence
  Description of Artificial Sequence: Synthetic oligonucleotide
  Target: LAMA2; (-) strand; PAM type: NRG; PAM sequence: AAG
ttacttcagaaaagccaata

SEQ ID NO: 53421 - DNA, 20 bp, Artificial Sequence
  Description of Artificial Sequence: Synthetic oligonucleotide
  Target: LAMA2; (-) strand; PAM type: NRG; PAM sequence: AAG
tctgtaaagttacttcagaa

SEQ ID NO: 53422 - DNA, 20 bp, Artificial Sequence
  Description of Artificial Sequence: Synthetic oligonucleotide
  Target: LAMA2; (-) strand; PAM type: NRG; PAM sequence: CAG
taacttctgtaaagttactt

SEQ ID NO: 53423 - DNA, 20 bp, Artificial Sequence
  Description of Artificial Sequence: Synthetic oligonucleotide
  Target: LAMA2; (-) strand; PAM type: NRG; PAM sequence: AAG
ttgctgaagtaacttctgta

SEQ ID NO: 53424 - DNA, 20 bp, Artificial Sequence
  Description of Artificial Sequence: Synthetic oligonucleotide
  Target: LAMA2; (-) strand; PAM type: NRG; PAM sequence: AAG
ccgttgtttctagcttgctg

SEQ ID NO: 53425 - DNA, 20 bp, Artificial Sequence
  Description of Artificial Sequence: Synthetic oligonucleotide
  Target: LAMA2; (-) strand; PAM type: NRG; PAM sequence: TAG
ataataaataccgttgtttc

SEQ ID NO: 53426 - DNA, 20 bp, Artificial Sequence
  Description of Artificial Sequence: Synthetic oligonucleotide
  Target: LAMA2; (-) strand; PAM type: NRG; PAM sequence: CAG
ttcttaaagggttcattata

SEQ ID NO: 53427 - DNA, 20 bp, Artificial Sequence
  Description of Artificial Sequence: Synthetic oligonucleotide
  Target: LAMA2; (-) strand; PAM type: NRG; PAM sequence: GGG
acacattgactattcttaaa

SEQ ID NO: 53428 - DNA, 20 bp, Artificial Sequence
  Description of Artificial Sequence: Synthetic oligonucleotide
  Target: LAMA2; (-) strand; PAM type: NRG; PAM sequence: AGG
tacacattgactattcttaa

SEQ ID NO: 53429 - DNA, 20 bp, Artificial Sequence
  Description of Artificial Sequence: Synthetic oligonucleotide
  Target: LAMA2; (-) strand; PAM type: NRG; PAM sequence: AAG
ttacacattgactattctta

SEQ ID NO: 53430 - DNA, 20 bp, Artificial Sequence
  Description of Artificial Sequence: Synthetic oligonucleotide
  Target: LAMA2; (-) strand; PAM type: NRG; PAM sequence: TGG
gattcttaggtatatctgtt

SEQ ID NO: 53431 - DNA, 20 bp, Artificial Sequence
  Description of Artificial Sequence: Synthetic oligonucleotide
  Target: LAMA2; (-) strand; PAM type: NRG; PAM sequence: AGG
ttaatcttgctctgattctt

SEQ ID NO: 53432 - DNA, 20 bp, Artificial Sequence
  Description of Artificial Sequence: Synthetic oligonucleotide
  Target: LAMA2; (-) strand; PAM type: NRG; PAM sequence: TAG
attaatcttgctctgattct

SEQ ID NO: 53433 - DNA, 20 bp, Artificial Sequence
  Description of Artificial Sequence: Synthetic oligonucleotide
  Target: LAMA2; (-) strand; PAM type: NRG; PAM sequence: GAG
atcttttcagaaggaatttt

SEQ ID NO: 53434 - DNA, 20 bp, Artificial Sequence
  Description of Artificial Sequence: Synthetic oligonucleotide
  Target: LAMA2; (-) strand; PAM type: NRG; PAM sequence: AGG
aggtttttcatcttttcaga

SEQ ID NO: 53435 - DNA, 20 bp, Artificial Sequence
  Description of Artificial Sequence: Synthetic oligonucleotide
  Target: LAMA2; (-) strand; PAM type: NRG; PAM sequence: AAG
aaggtttttcatcttttcag

SEQ ID NO: 53436 - DNA, 20 bp, Artificial Sequence
  Description of Artificial Sequence: Synthetic oligonucleotide
  Target: LAMA2; (-) strand; PAM type: NRG; PAM sequence: CAG
gtcaaggtttttcatctttt

SEQ ID NO: 53437 - DNA, 20 bp, Artificial Sequence
  Description of Artificial Sequence: Synthetic oligonucleotide
  Target: LAMA2; (-) strand; PAM type: NRG; PAM sequence: AGG
atgtttttatgaagatgtca

SEQ ID NO: 53438 - DNA, 20 bp, Artificial Sequence
  Description of Artificial Sequence: Synthetic oligonucleotide
  Target: LAMA2; (-) strand; PAM type: NRG; PAM sequence: AAG
aatgtttttatgaagatgtc

SEQ ID NO: 53439 - DNA, 20 bp, Artificial Sequence
  Description of Artificial Sequence: Synthetic oligonucleotide
  Target: LAMA2; (-) strand; PAM type: NRG; PAM sequence: AAG
agtctttaaatgtttttatg

SEQ ID NO: 53440 - DNA, 20 bp, Artificial Sequence
  Description of Artificial Sequence: Synthetic oligonucleotide
  Target: LAMA2; (-) strand; PAM type: NRG; PAM sequence: AAG
ctgagttcaacttcaaatga

SEQ ID NO: 53441 - DNA, 20 bp, Artificial Sequence
  Description of Artificial Sequence: Synthetic oligonucleotide
  Target: LAMA2; (-) strand; PAM type: NRG; PAM sequence: GAG
ggaagacttttgtcttaact

SEQ ID NO: 53442 - DNA, 20 bp, Artificial Sequence
  Description of Artificial Sequence: Synthetic oligonucleotide
  Target: LAMA2; (-) strand; PAM type: NRG; PAM sequence: AAG
ctcaaaatctgggagattgg

SEQ ID NO: 53443 - DNA, 20 bp, Artificial Sequence
  Description of Artificial Sequence: Synthetic oligonucleotide
  Target: LAMA2; (-) strand; PAM type: NRG; PAM sequence: TGG
cctctcaaaatctgggagat

SEQ ID NO: 53444 - DNA, 20 bp, Artificial Sequence
  Description of Artificial Sequence: Synthetic oligonucleotide
  Target: LAMA2; (-) strand; PAM type: NRG; PAM sequence: GAG
tacaccctctcaaaatctgg

SEQ ID NO: 53445 - DNA, 20 bp, Artificial Sequence
  Description of Artificial Sequence: Synthetic oligonucleotide
  Target: LAMA2; (-) strand; PAM type: NRG; PAM sequence: GGG
aatacaccctctcaaaatct

SEQ ID NO: 53446 - DNA, 20 bp, Artificial Sequence
  Description of Artificial Sequence: Synthetic oligonucleotide
  Target: LAMA2; (-) strand; PAM type: NRG; PAM sequence: TGG
aaatacaccctctcaaaatc

SEQ ID NO: 53447 - DNA, 20 bp, Artificial Sequence
  Description of Artificial Sequence: Synthetic oligonucleotide
  Target: LAMA2; (-) strand; PAM type: NRG; PAM sequence: TGG
tgtaaatggtacatgtgcac

SEQ ID NO: 53448 - DNA, 20 bp, Artificial Sequence
  Description of Artificial Sequence: Synthetic oligonucleotide
  Target: LAMA2; (-) strand; PAM type: NRG; PAM sequence: TGG
tgtgagtgctaggctgtaaa

SEQ ID NO: 53449 - DNA, 20 bp, Artificial Sequence
  Description of Artificial Sequence: Synthetic oligonucleotide
  Target: LAMA2; (-) strand; PAM type: NRG; PAM sequence: AGG
aattaggtcctgtgagtgct

SEQ ID NO: 53450 - DNA, 20 bp, Artificial Sequence
  Description of Artificial Sequence: Synthetic oligonucleotide
  Target: LAMA2; (-) strand; PAM type: NRG; PAM sequence: TAG
aaattaggtcctgtgagtgc

SEQ ID NO: 53451 - DNA, 20 bp, Artificial Sequence
  Description of Artificial Sequence: Synthetic oligonucleotide
  Target: LAMA2; (-) strand; PAM type: NRG; PAM sequence: GAG
atatacaaattaggtcctgt

SEQ ID NO: 53452 - DNA, 20 bp, Artificial Sequence
  Description of Artificial Sequence: Synthetic oligonucleotide
  Target: LAMA2; (-) strand; PAM type: NRG; PAM sequence: AGG
acatactaaatatacaaatt

SEQ ID NO: 53453 - DNA, 20 bp, Artificial Sequence
  Description of Artificial Sequence: Synthetic oligonucleotide
  Target: LAMA2; (-) strand; PAM type: NRG; PAM sequence: TAG
aacatactaaatatacaaat

SEQ ID NO: 53454 - DNA, 20 bp, Artificial Sequence
  Description of Artificial Sequence: Synthetic oligonucleotide
  Target: LAMA2; (-) strand; PAM type: NRG; PAM sequence: CAG
ttaagacaacaaaaatcaaa

SEQ ID NO: 53455 - DNA, 20 bp, Artificial Sequence
  Description of Artificial Sequence: Synthetic oligonucleotide
  Target: LAMA2; (-) strand; PAM type: NRG; PAM sequence: AAG
taaacaaaatctaatacctt

SEQ ID NO: 53456 - DNA, 20 bp, Artificial Sequence
  Description of Artificial Sequence: Synthetic oligonucleotide
  Target: LAMA2; (-) strand; PAM type: NRG; PAM sequence: AAG
tttttagattttcttattca

SEQ ID NO: 53457 - DNA, 20 bp, Artificial Sequence
  Description of Artificial Sequence: Synthetic oligonucleotide
  Target: LAMA2; (-) strand; PAM type: NRG; PAM sequence: TAG
ttttctagaaattcaatttt

SEQ ID NO: 53458 - DNA, 20 bp, Artificial Sequence
  Description of Artificial Sequence: Synthetic oligonucleotide
  Target: LAMA2; (-) strand; PAM type: NRG; PAM sequence: TAG
tcaaggcaactagagttttc

SEQ ID NO: 53459 - DNA, 20 bp, Artificial Sequence
  Description of Artificial Sequence: Synthetic oligonucleotide
  Target: LAMA2; (-) strand; PAM type: NRG; PAM sequence: GAG
atcatttgtcaaggcaacta

SEQ ID NO: 53460 - DNA, 20 bp, Artificial Sequence
  Description of Artificial Sequence: Synthetic oligonucleotide
  Target: LAMA2; (-) strand; PAM type: NRG; PAM sequence: TAG
taatcatttgtcaaggcaac

SEQ ID NO: 53461 - DNA, 20 bp, Artificial Sequence
  Description of Artificial Sequence: Synthetic oligonucleotide
  Target: LAMA2; (-) strand; PAM type: NRG; PAM sequence: AGG
tggtccataatcatttgtca

SEQ ID NO: 53462 - DNA, 20 bp, Artificial Sequence
  Description of Artificial Sequence: Synthetic oligonucleotide
  Target: LAMA2; (-) strand; PAM type: NRG; PAM sequence: AAG
ttggtccataatcatttgtc

SEQ ID NO: 53463 - DNA, 20 bp, Artificial Sequence
  Description of Artificial Sequence: Synthetic oligonucleotide
  Target: LAMA2; (-) strand; PAM type: NRG; PAM sequence: TGG
ctcatttataatttattctt

SEQ ID NO: 53464 - DNA, 20 bp, Artificial Sequence
  Description of Artificial Sequence: Synthetic oligonucleotide
  Target: LAMA2; (-) strand; PAM type: NRG; PAM sequence: TGG
ttaacagtatagctactgga

SEQ ID NO: 53465 - DNA, 20 bp, Artificial Sequence
  Description of Artificial Sequence: Synthetic oligonucleotide
  Target: LAMA2; (-) strand; PAM type: NRG; PAM sequence: TGG
aattttaacagtatagctac

SEQ ID NO: 53466 - DNA, 20 bp, Artificial Sequence
  Description of Artificial Sequence: Synthetic oligonucleotide
  Target: LAMA2; (-) strand; PAM type: NRG; PAM sequence: TAG
accttggaattttaacagta

SEQ ID NO: 53467 - DNA, 20 bp, Artificial Sequence
  Description of Artificial Sequence: Synthetic oligonucleotide
  Target: LAMA2; (-) strand; PAM type: NRG; PAM sequence: CAG
attataccttggaattttaa

SEQ ID NO: 53468 - DNA, 20 bp, Artificial Sequence
  Description of Artificial Sequence: Synthetic oligonucleotide
  Target: LAMA2; (-) strand; PAM type: NRG; PAM sequence: TGG
actcgaaagggattatacct

SEQ ID NO: 53469 - DNA, 20 bp, Artificial Sequence
  Description of Artificial Sequence: Synthetic oligonucleotide
  Target: LAMA2; (-) strand; PAM type: NRG; PAM sequence: GGG
aagttacaagcaactcgaaa

SEQ ID NO: 53470 - DNA, 20 bp, Artificial Sequence
  Description of Artificial Sequence: Synthetic oligonucleotide
  Target: LAMA2; (-) strand; PAM type: NRG; PAM sequence: AGG
taagttacaagcaactcgaa

SEQ ID NO: 53471 - DNA, 20 bp, Artificial Sequence
  Description of Artificial Sequence: Synthetic oligonucleotide
  Target: LAMA2; (-) strand; PAM type: NRG; PAM sequence: AAG
ctaagttacaagcaactcga

SEQ ID NO: 53472 - DNA, 20 bp, Artificial Sequence
  Description of Artificial Sequence: Synthetic oligonucleotide
  Target: LAMA2; (-) strand; PAM type: NRG; PAM sequence: AAG
aataggaccttctaagttac

SEQ ID NO: 53473 - DNA, 20 bp, Artificial Sequence
  Description of Artificial Sequence: Synthetic oligonucleotide
  Target: LAMA2; (-) strand; PAM type: NRG; PAM sequence: AAG
tctatagaataggaccttct

SEQ ID NO: 53474 - DNA, 20 bp, Artificial Sequence
  Description of Artificial Sequence: Synthetic oligonucleotide
  Target: LAMA2; (-) strand; PAM type: NRG; PAM sequence: AGG
ctctatttcttctatagaat

SEQ ID NO: 53475 - DNA, 20 bp, Artificial Sequence
  Description of Artificial Sequence: Synthetic oligonucleotide
  Target: LAMA2; (-) strand; PAM type: NRG; PAM sequence: TAG
actctatttcttctatagaa

SEQ ID NO: 53476 - DNA, 20 bp, Artificial Sequence
  Description of Artificial Sequence: Synthetic oligonucleotide
  Target: LAMA2; (-) strand; PAM type: NRG; PAM sequence: TAG
tactaactctatttcttcta

SEQ ID NO: 53477 - DNA, 20 bp, Artificial Sequence
  Description of Artificial Sequence: Synthetic oligonucleotide
  Target: LAMA2; (-) strand; PAM type: NRG; PAM sequence: CAG
ttgaaaaaatatatttgatg

SEQ ID NO: 53478 - DNA, 20 bp, Artificial Sequence
  Description of Artificial Sequence: Synthetic oligonucleotide
  Target: LAMA2; (-) strand; PAM type: NRG; PAM sequence: AGG
ttgtgtcaactataatatgt

SEQ ID NO: 53479 - DNA, 20 bp, Artificial Sequence
  Description of Artificial Sequence: Synthetic oligonucleotide
  Target: LAMA2; (-) strand; PAM type: NRG; PAM sequence: TAG
attgtgtcaactataatatg

SEQ ID NO: 53480 - DNA, 20 bp, Artificial Sequence
  Description of Artificial Sequence: Synthetic oligonucleotide
  Target: LAMA2; (-) strand; PAM type: NRG; PAM sequence: AGG
gcacagaaggcaataaagcc

SEQ ID NO: 53481 - DNA, 20 bp, Artificial Sequence
  Description of Artificial Sequence: Synthetic oligonucleotide
  Target: LAMA2; (-) strand; PAM type: NRG; PAM sequence: CAG
tgcacagaaggcaataaagc

SEQ ID NO: 53482 - DNA, 20 bp, Artificial Sequence
  Description of Artificial Sequence: Synthetic oligonucleotide
  Target: LAMA2; (-) strand; PAM type: NRG; PAM sequence: AAG
aaattgcacagaaggcaata

SEQ ID NO: 53483 - DNA, 20 bp, Artificial Sequence
  Description of Artificial Sequence: Synthetic oligonucleotide
  Target: LAMA2; (-) strand; PAM type: NRG; PAM sequence: AGG
ataattgaaaattgcacaga

SEQ ID NO: 53484 - DNA, 20 bp, Artificial Sequence
  Description of Artificial Sequence: Synthetic oligonucleotide
  Target: LAMA2; (-) strand; PAM type: NRG; PAM sequence: AAG
aataattgaaaattgcacag

SEQ ID NO: 53485 - DNA, 20 bp, Artificial Sequence
  Description of Artificial Sequence: Synthetic oligonucleotide
  Target: LAMA2; (-) strand; PAM type: NRG; PAM sequence: CAG
tccaataattgaaaattgca

SEQ ID NO: 53486 - DNA, 20 bp, Artificial Sequence
  Description of Artificial Sequence: Synthetic oligonucleotide
  Target: LAMA2; (-) strand; PAM type: NRG; PAM sequence: CAG
catattctctttcaaacttt

SEQ ID NO: 53487 - DNA, 20 bp, Artificial Sequence
  Description of Artificial Sequence: Synthetic oligonucleotide
  Target: LAMA2; (-) strand; PAM type: NRG; PAM sequence: TAG
gacaaaccaatgagatgagg

SEQ ID NO: 53488 - DNA, 20 bp, Artificial Sequence
  Description of Artificial Sequence: Synthetic oligonucleotide
  Target: LAMA2; (-) strand; PAM type: NRG; PAM sequence: AGG
cacgacaaaccaatgagatg

SEQ ID NO: 53489 - DNA, 20 bp, Artificial Sequence
  Description of Artificial Sequence: Synthetic oligonucleotide
  Target: LAMA2; (-) strand; PAM type: NRG; PAM sequence: GAG
ccacgacaaaccaatgagat

SEQ ID NO: 53490 - DNA, 20 bp, Artificial Sequence
  Description of Artificial Sequence: Synthetic oligonucleotide
  Target: LAMA2; (-) strand; PAM type: NRG; PAM sequence: GAG
atgtaccacgacaaaccaat

SEQ ID NO: 53491 - DNA, 20 bp, Artificial Sequence
  Description of Artificial Sequence: Synthetic oligonucleotide
  Target: LAMA2; (-) strand; PAM type: NRG; PAM sequence: CAG
gatgtttcatgttttatatt

SEQ ID NO: 53492 - DNA, 20 bp, Artificial Sequence
  Description of Artificial Sequence: Synthetic oligonucleotide
  Target: LAMA2; (-) strand; PAM type: NRG; PAM sequence: TAG
aacatttattgaggccttac

SEQ ID NO: 53493 - DNA, 20 bp, Artificial Sequence
  Description of Artificial Sequence: Synthetic oligonucleotide
  Target: LAMA2; (-) strand; PAM type: NRG; PAM sequence: AGG
ttgaaaatgaacatttattg

SEQ ID NO: 53494 - DNA, 20 bp, Artificial Sequence
  Description of Artificial Sequence: Synthetic oligonucleotide
  Target: LAMA2; (-) strand; PAM type: NRG; PAM sequence: GAG
tttgaaaatgaacatttatt

SEQ ID NO: 53495 - DNA, 20 bp, Artificial Sequence
  Description of Artificial Sequence: Synthetic oligonucleotide
  Target: LAMA2; (-) strand; PAM type: NRG; PAM sequence: AGG
taggtttaattcattttttg

SEQ ID NO: 53496 - DNA, 20 bp, Artificial Sequence
  Description of Artificial Sequence: Synthetic oligonucleotide
  Target: LAMA2; (-) strand; PAM type: NRG; PAM sequence: GAG
ttaggtttaattcatttttt

SEQ ID NO: 53497 - DNA, 20 bp, Artificial Sequence
  Description of Artificial Sequence: Synthetic oligonucleotide
  Target: LAMA2; (-) strand; PAM type: NRG; PAM sequence: AGG
gaatgtcatgttaggttgtt

SEQ ID NO: 53498 - DNA, 20 bp, Artificial Sequence
  Description of Artificial Sequence: Synthetic oligonucleotide
  Target: LAMA2; (-) strand; PAM type: NRG; PAM sequence: TAG
agaatgtcatgttaggttgt

SEQ ID NO: 53499 - DNA, 20 bp, Artificial Sequence
  Description of Artificial Sequence: Synthetic oligonucleotide
  Target: LAMA2; (-) strand; PAM type: NRG; PAM sequence: AGG
cagccagagaatgtcatgtt

SEQ ID NO: 53500 - DNA, 20 bp, Artificial Sequence
  Description of Artificial Sequence: Synthetic oligonucleotide
  Target: LAMA2; (-) strand; PAM type: NRG; PAM sequence: TAG
tcagccagagaatgtcatgt

SEQ ID NO: 53501 - DNA, 20 bp, Artificial Sequence
  Description of Artificial Sequence: Synthetic oligonucleotide
  Target: LAMA2; (-) strand; PAM type: NRG; PAM sequence: GAG
aagagtgtttctttcagcca

SEQ ID NO: 53502 - DNA, 20 bp, Artificial Sequence
  Description of Artificial Sequence: Synthetic oligonucleotide
  Target: LAMA2; (-) strand; PAM type: NRG; PAM sequence: CAG
agaagagtgtttctttcagc

SEQ ID NO: 53503 - DNA, 20 bp, Artificial Sequence
  Description of Artificial Sequence: Synthetic oligonucleotide
  Target: LAMA2; (-) strand; PAM type: NRG; PAM sequence: CAG
ttggagaagagtgtttcttt

SEQ ID NO: 53504 - DNA, 20 bp, Artificial Sequence
  Description of Artificial Sequence: Synthetic oligonucleotide
  Target: LAMA2; (-) strand; PAM type: NRG; PAM sequence: GAG
taccacatgatgttggagaa

SEQ ID NO: 53505 - DNA, 20 bp, Artificial Sequence
  Description of Artificial Sequence: Synthetic oligonucleotide
  Target: LAMA2; (-) strand; PAM type: NRG; PAM sequence: AAG
tataccacatgatgttggag

SEQ ID NO: 53506 - DNA, 20 bp, Artificial Sequence
  Description of Artificial Sequence: Synthetic oligonucleotide
  Target: LAMA2; (-) strand; PAM type: NRG; PAM sequence: GAG
tggtataccacatgatgttg

SEQ ID NO: 53507 - DNA, 20 bp, Artificial Sequence
  Description of Artificial Sequence: Synthetic oligonucleotide
  Target: LAMA2; (-) strand; PAM type: NRG; PAM sequence: TGG
tttggtataccacatgatgt

SEQ ID NO: 53508 - DNA, 20 bp, Artificial Sequence
  Description of Artificial Sequence: Synthetic oligonucleotide
  Target: LAMA2; (-) strand; PAM type: NRG; PAM sequence: TGG
caaacagtctcaactgaatt

SEQ ID NO: 53509 - DNA, 20 bp, Artificial Sequence
  Description of Artificial Sequence: Synthetic oligonucleotide
  Target: LAMA2; (-) strand; PAM type: NRG; PAM sequence: CAG
caaattccttccttcacaaa

SEQ ID NO: 53510 - DNA, 20 bp, Artificial Sequence
  Description of Artificial Sequence: Synthetic oligonucleotide
  Target: LAMA2; (-) strand; PAM type: NRG; PAM sequence: AAG
acttgtgtgtttaagtatat

SEQ ID NO: 53511 - DNA, 20 bp, Artificial Sequence
  Description of Artificial Sequence: Synthetic oligonucleotide
  Target: LAMA2; (-) strand; PAM type: NRG; PAM sequence: AAG
attcaaatacttgtgtgttt

SEQ ID NO: 53512 - DNA, 20 bp, Artificial Sequence
  Description of Artificial Sequence: Synthetic oligonucleotide
  Target: LAMA2; (-) strand; PAM type: NRG; PAM sequence: TAG
actgcagcacaaattctaat

SEQ ID NO: 53513 - DNA, 20 bp, Artificial Sequence
  Description of Artificial Sequence: Synthetic oligonucleotide
  Target: LAMA2; (-) strand; PAM type: NRG; PAM sequence: CAG
ttgagaataaagaaatactg

SEQ ID NO: 53514 - DNA, 20 bp, Artificial Sequence
  Description of Artificial Sequence: Synthetic oligonucleotide
  Target: LAMA2; (-) strand; PAM type: NRG; PAM sequence: AAG
aagctataaagttgagaata

SEQ ID NO: 53515 - DNA, 20 bp, Artificial Sequence
  Description of Artificial Sequence: Synthetic oligonucleotide
  Target: LAMA2; (-) strand; PAM type: NRG; PAM sequence: GAG
gtaggctaagctataaagtt

SEQ ID NO: 53516 - DNA, 20 bp, Artificial Sequence
  Description of Artificial Sequence: Synthetic oligonucleotide
  Target: LAMA2; (-) strand; PAM type: NRG; PAM sequence: AAG
ttattgtaggctaagctata

SEQ ID NO: 53517 - DNA, 20 bp, Artificial Sequence
  Description of Artificial Sequence: Synthetic oligonucleotide
  Target: LAMA2; (-) strand; PAM type: NRG; PAM sequence: AAG
aagagtttttattgtaggct

SEQ ID NO: 53518 - DNA, 20 bp, Artificial Sequence
  Description of Artificial Sequence: Synthetic oligonucleotide
  Target: LAMA2; (-) strand; PAM type: NRG; PAM sequence: AGG
ttgataagagtttttattgt

SEQ ID NO: 53519 - DNA, 20 bp, Artificial Sequence
  Description of Artificial Sequence: Synthetic oligonucleotide
  Target: LAMA2; (-) strand; PAM type: NRG; PAM sequence: TAG
attgataagagtttttattg

SEQ ID NO: 53520 - DNA, 20 bp, Artificial Sequence
  Description of Artificial Sequence: Synthetic oligonucleotide
  Target: LAMA2; (-) strand; PAM type: NRG; PAM sequence: GAG
aaagaggtacgtattgataa

SEQ ID NO: 53521 - DNA, 20 bp, Artificial Sequence
  Description of Artificial Sequence: Synthetic oligonucleotide
  Target: LAMA2; (-) strand; PAM type: NRG; PAM sequence: AAG
ataaagaggtacgtattgat

SEQ ID NO: 53522 - DNA, 20 bp, Artificial Sequence
  Description of Artificial Sequence: Synthetic oligonucleotide
  Target: LAMA2; (-) strand; PAM type: NRG; PAM sequence: AGG
tggaaactaaaggtataaag

SEQ ID NO: 53523 - DNA, 20 bp, Artificial Sequence
  Description of Artificial Sequence: Synthetic oligonucleotide
  Target: LAMA2; (-) strand; PAM type: NRG; PAM sequence: GAG
gtggaaactaaaggtataaa

SEQ ID NO: 53524 - DNA, 20 bp, Artificial Sequence
  Description of Artificial Sequence: Synthetic oligonucleotide
  Target: LAMA2; (-) strand; PAM type: NRG; PAM sequence: AAG
atgtggaaactaaaggtata

SEQ ID NO: 53525 - DNA, 20 bp, Artificial Sequence
  Description of Artificial Sequence: Synthetic oligonucleotide
  Target: LAMA2; (-) strand; PAM type: NRG; PAM sequence: AGG
gtactgtatgtggaaactaa

SEQ ID NO: 53526 - DNA, 20 bp, Artificial Sequence
  Description of Artificial Sequence: Synthetic oligonucleotide
  Target: LAMA2; (-) strand; PAM type: NRG; PAM sequence: AAG
agtactgtatgtggaaacta

SEQ ID NO: 53527 - DNA, 20 bp, Artificial Sequence
  Description of Artificial Sequence: Synthetic oligonucleotide
  Target: LAMA2; (-) strand; PAM type: NRG; PAM sequence: TGG
ccaaagaagagtactgtatg

SEQ ID NO: 53528 - DNA, 20 bp, Artificial Sequence
  Description of Artificial Sequence: Synthetic oligonucleotide
  Target: LAMA2; (-) strand; PAM type: NRG; PAM sequence: GAG
attcagttacctccaaagaa

SEQ ID NO: 53529 - DNA, 20 bp, Artificial Sequence
  Description of Artificial Sequence: Synthetic oligonucleotide
  Target: LAMA2; (-) strand; PAM type: NRG; PAM sequence: AAG
cgattcagttacctccaaag

SEQ ID NO: 53530 - DNA, 20 bp, Artificial Sequence
  Description of Artificial Sequence: Synthetic oligonucleotide
  Target: LAMA2; (-) strand; PAM type: NRG; PAM sequence: AAG
ctacgattcagttacctcca

SEQ ID NO: 53531 - DNA, 20 bp, Artificial Sequence
  Description of Artificial Sequence: Synthetic oligonucleotide
  Target: LAMA2; (-) strand; PAM type: NRG; PAM sequence: CAG
tccatacgttttctacgatt

SEQ ID NO: 53532 - DNA, 20 bp, Artificial Sequence
  Description of Artificial Sequence: Synthetic oligonucleotide
  Target: LAMA2; (-) strand; PAM type: NRG; PAM sequence: AAG
tccgagtctagccttctcct

SEQ ID NO: 53533 - DNA, 20 bp, Artificial Sequence
  Description of Artificial Sequence: Synthetic oligonucleotide
  Target: LAMA2; (-) strand; PAM type: NRG; PAM sequence: TAG
cttggctatggatccgagtc

SEQ ID NO: 53534 - DNA, 20 bp, Artificial Sequence
  Description of Artificial Sequence: Synthetic oligonucleotide
  Target: LAMA2; (-) strand; PAM type: NRG; PAM sequence: GAG
ggtgacttggctatggatcc

SEQ ID NO: 53535 - DNA, 20 bp, Artificial Sequence
  Description of Artificial Sequence: Synthetic oligonucleotide
  Target: LAMA2; (-) strand; PAM type: NRG; PAM sequence: TGG
gtaaagtggtgacttggcta

SEQ ID NO: 53536 - DNA, 20 bp, Artificial Sequence
  Description of Artificial Sequence: Synthetic oligonucleotide
  Target: LAMA2; (-) strand; PAM type: NRG; PAM sequence: TGG
atcttagtaaagtggtgact

SEQ ID NO: 53537 - DNA, 20 bp, Artificial Sequence
  Description of Artificial Sequence: Synthetic oligonucleotide
  Target: LAMA2; (-) strand; PAM type: NRG; PAM sequence: TGG
ggcttttgatcttagtaaag

SEQ ID NO: 53538 - DNA, 20 bp, Artificial Sequence
  Description of Artificial Sequence: Synthetic oligonucleotide
  Target: LAMA2; (-) strand; PAM type: NRG; PAM sequence: AAG
tcaggcttttgatcttagta

SEQ ID NO: 53539 - DNA, 20 bp, Artificial Sequence
  Description of Artificial Sequence: Synthetic oligonucleotide
  Target: LAMA2; (-) strand; PAM type: NRG; PAM sequence: TAG
ttgactcaggcttttgatct

SEQ ID NO: 53540 - DNA, 20 bp, Artificial Sequence
  Description of Artificial Sequence: Synthetic oligonucleotide
  Target: LAMA2; (-) strand; PAM type: NRG; PAM sequence: AGG
aaatttaactccgttgactc

SEQ ID NO: 53541 - DNA, 20 bp, Artificial Sequence
  Description of Artificial Sequence: Synthetic oligonucleotide
  Target: LAMA2; (-) strand; PAM type: NRG; PAM sequence: CAG
aaaatttaactccgttgact

SEQ ID NO: 53542 - DNA, 20 bp, Artificial Sequence
  Description of Artificial Sequence: Synthetic oligonucleotide
  Target: LAMA2; (-) strand; PAM type: NRG; PAM sequence: TAG
acctaaacctatcttacgaa

SEQ ID NO: 53543 - DNA, 20 bp, Artificial Sequence
  Description of Artificial Sequence: Synthetic oligonucleotide
  Target: LAMA2; (-) strand; PAM type: NRG; PAM sequence: AAG
gtatttactgattagctggc

SEQ ID NO: 53544 - DNA, 20 bp, Artificial Sequence
  Description of Artificial Sequence: Synthetic oligonucleotide
  Target: LAMA2; (-) strand; PAM type: NRG; PAM sequence: TGG
gctagtatttactgattagc

SEQ ID NO: 53545 - DNA, 20 bp, Artificial Sequence
  Description of Artificial Sequence: Synthetic oligonucleotide
  Target: LAMA2; (-) strand; PAM type: NRG; PAM sequence: TAG
aagagctagtatttactgat

SEQ ID NO: 53546 - DNA, 20 bp, Artificial Sequence
  Description of Artificial Sequence: Synthetic oligonucleotide
  Target: LAMA2; (-) strand; PAM type: NRG; PAM sequence: TAG
aaaataaagaagaaaagagc

SEQ ID NO: 53547 - DNA, 20 bp, Artificial Sequence
  Description of Artificial Sequence: Synthetic oligonucleotide
  Target: LAMA2; (-) strand; PAM type: NRG; PAM sequence: GAG
tcataaaataaagaagaaaa

SEQ ID NO: 53548 - DNA, 20 bp, Artificial Sequence
  Description of Artificial Sequence: Synthetic oligonucleotide
  Target: LAMA2; (-) strand; PAM type: NRG; PAM sequence: AAG
gctcataaaataaagaagaa

SEQ ID NO: 53549 - DNA, 20 bp, Artificial Sequence
  Description of Artificial Sequence: Synthetic oligonucleotide
  Target: LAMA2; (-) strand; PAM type: NRG; PAM sequence: AAG
tttatgctcataaaataaag

SEQ ID NO: 53550 - DNA, 20 bp, Artificial Sequence
  Description of Artificial Sequence: Synthetic oligonucleotide
  Target: LAMA2; (-) strand; PAM type: NRG; PAM sequence: AAG
agttttatgctcataaaata

SEQ ID NO: 53551 - DNA, 20 bp, Artificial Sequence
  Description of Artificial Sequence: Synthetic oligonucleotide
  Target: LAMA2; (-) strand; PAM type: NRG; PAM sequence: TAG
gcaaagcaaatctttttttt

SEQ ID NO: 53552 - DNA, 20 bp, Artificial Sequence
  Description of Artificial Sequence: Synthetic oligonucleotide
  Target: LAMA2; (-) strand; PAM type: NRG; PAM sequence: AAG
aaaaggatatgctatatgca

SEQ ID NO: 53553 - DNA, 20 bp, Artificial Sequence
  Description of Artificial Sequence: Synthetic oligonucleotide
  Target: LAMA2; (-) strand; PAM type: NRG; PAM sequence: AGG
tttgctgttcttaagcaaaa

SEQ ID NO: 53554 - DNA, 20 bp, Artificial Sequence
  Description of Artificial Sequence: Synthetic oligonucleotide
  Target: LAMA2; (-) strand; PAM type: NRG; PAM sequence: AAG
ttttgctgttcttaagcaaa

SEQ ID NO: 53555 - DNA, 20 bp, Artificial Sequence
  Description of Artificial Sequence: Synthetic oligonucleotide
  Target: LAMA2; (-) strand; PAM type: NRG; PAM sequence: AAG
tagaatattttgctgttctt

SEQ ID NO: 53556 - DNA, 20 bp, Artificial Sequence
  Description of Artificial Sequence: Synthetic oligonucleotide
  Target: LAMA2; (-) strand; PAM type: NRG; PAM sequence: TAG
ggtctcctcaaagaaatttt

SEQ ID NO: 53557 - DNA, 20 bp, Artificial Sequence
  Description of Artificial Sequence: Synthetic oligonucleotide
  Target: LAMA2; (-) strand; PAM type: NRG; PAM sequence: AAG
agtctcttagggtctcctca

SEQ ID NO: 53558 - DNA, 20 bp, Artificial Sequence
  Description of Artificial Sequence: Synthetic oligonucleotide
  Target: LAMA2; (-) strand; PAM type: NRG; PAM sequence: GGG
ttgccatctatagtctctta

SEQ ID NO: 53559 - DNA, 20 bp, Artificial Sequence
  Description of Artificial Sequence: Synthetic oligonucleotide
  Target: LAMA2; (-) strand; PAM type: NRG; PAM sequence: AGG
tttgccatctatagtctctt

SEQ ID NO: 53560 - DNA, 20 bp, Artificial Sequence
  Description of Artificial Sequence: Synthetic oligonucleotide
  Target: LAMA2; (-) strand; PAM type: NRG; PAM sequence: TAG
gtttgccatctatagtctct

SEQ ID NO: 53561 - DNA, 20 bp, Artificial Sequence
  Description of Artificial Sequence: Synthetic oligonucleotide
  Target: LAMA2; (-) strand; PAM type: NRG; PAM sequence: TAG
gataaatagtttgccatcta

SEQ ID NO: 53562 - DNA, 20 bp, Artificial Sequence
  Description of Artificial Sequence: Synthetic oligonucleotide
  Target: LAMA2; (-) strand; PAM type: NRG; PAM sequence: TAG
tctcttggcaatgagataaa

SEQ ID NO: 53563 - DNA, 20 bp, Artificial Sequence
  Description of Artificial Sequence: Synthetic oligonucleotide
  Target: LAMA2; (-) strand; PAM type: NRG; PAM sequence: GAG
ttattcaatctcttggcaat

SEQ ID NO: 53564 - DNA, 20 bp, Artificial Sequence
  Description of Artificial Sequence: Synthetic oligonucleotide
  Target: LAMA2; (-) strand; PAM type: NRG; PAM sequence: TGG
gacagaattattcaatctct

SEQ ID NO: 53565 - DNA, 20 bp, Artificial Sequence
  Description of Artificial Sequence: Synthetic oligonucleotide
  Target: LAMA2; (-) strand; PAM type: NRG; PAM sequence: CAG
gacttgctgtgtaacctcga

SEQ ID NO: 53566 - DNA, 20 bp, Artificial Sequence
  Description of Artificial Sequence: Synthetic oligonucleotide
  Target: LAMA2; (-) strand; PAM type: NRG; PAM sequence: AGG
cataactgttagctaattat

SEQ ID NO: 53567 - DNA, 20 bp, Artificial Sequence
  Description of Artificial Sequence: Synthetic oligonucleotide
  Target: LAMA2; (-) strand; PAM type: NRG; PAM sequence: TAG
acataactgttagctaatta

SEQ ID NO: 53568 - DNA, 20 bp, Artificial Sequence
  Description of Artificial Sequence: Synthetic oligonucleotide
  Target: LAMA2; (-) strand; PAM type: NRG; PAM sequence: TAG
agagctactaacataactgt

SEQ ID NO: 53569 - DNA, 20 bp, Artificial Sequence
  Description of Artificial Sequence: Synthetic oligonucleotide
  Target: LAMA2; (-) strand; PAM type: NRG; PAM sequence: GAG
tttaaatcacttctcacaca

SEQ ID NO: 53570 - DNA, 20 bp, Artificial Sequence
  Description of Artificial Sequence: Synthetic oligonucleotide
  Target: LAMA2; (-) strand; PAM type: NRG; PAM sequence: CAG
gttttaaatcacttctcaca

SEQ ID NO: 53571 - DNA, 20 bp, Artificial Sequence
  Description of Artificial Sequence: Synthetic oligonucleotide
  Target: LAMA2; (-) strand; PAM type: NRG; PAM sequence: AAG
cgtttattgtaccacatttg

SEQ ID NO: 53572 - DNA, 20 bp, Artificial Sequence
  Description of Artificial Sequence: Synthetic oligonucleotide
  Target: LAMA2; (-) strand; PAM type: NRG; PAM sequence: TAG
atattcaacaatgagattcc

SEQ ID NO: 53573 - DNA, 20 bp, Artificial Sequence
  Description of Artificial Sequence: Synthetic oligonucleotide
  Target: LAMA2; (-) strand; PAM type: NRG; PAM sequence: GAG
ataaatacatattcaacaat

SEQ ID NO: 53574 - DNA, 20 bp, Artificial Sequence
  Description of Artificial Sequence: Synthetic oligonucleotide
  Target: LAMA2; (-) strand; PAM type: NRG; PAM sequence: TAG
ttaaagaagtttttaaaaaa

SEQ ID NO: 53575 - DNA, 20 bp, Artificial Sequence
  Description of Artificial Sequence: Synthetic oligonucleotide
  Target: LAMA2; (-) strand; PAM type: NRG; PAM sequence: AAG
acatattataagtattaaag

SEQ ID NO: 53576 - DNA, 20 bp, Artificial Sequence
  Description of Artificial Sequence: Synthetic oligonucleotide
  Target: LAMA2; (-) strand; PAM type: NRG; PAM sequence: AAG
taaacatattataagtatta

SEQ ID NO: 53577 - DNA, 20 bp, Artificial Sequence
  Description of Artificial Sequence: Synthetic oligonucleotide
  Target: LAMA2; (-) strand; PAM type: NRG; PAM sequence: AAG
tatttatctaaacatattat

SEQ ID NO: 53578 - DNA, 20 bp, Artificial Sequence
  Description of Artificial Sequence: Synthetic oligonucleotide
  Target: LAMA2; (-) strand; PAM type: NRG; PAM sequence: AAG
aataataactaacctttatg

SEQ ID NO: 53579 - DNA, 20 bp, Artificial Sequence
  Description of Artificial Sequence: Synthetic oligonucleotide
  Target: LAMA2; (-) strand; PAM type: NRG; PAM sequence: AAG
aaacatatacttcatagact

SEQ ID NO: 53580 - DNA, 20 bp, Artificial Sequence
  Description of Artificial Sequence: Synthetic oligonucleotide
  Target: LAMA2; (-) strand; PAM type: NRG; PAM sequence: TAG
caatgaaaacatatacttca

SEQ ID NO: 53581 - DNA, 20 bp, Artificial Sequence
  Description of Artificial Sequence: Synthetic oligonucleotide
  Target: LAMA2; (-) strand; PAM type: NRG; PAM sequence: CAG
cattgtcatctctacccaag

SEQ ID NO: 53582 - DNA, 20 bp, Artificial Sequence
  Description of Artificial Sequence: Synthetic oligonucleotide
  Target: LAMA2; (-) strand; PAM type: NRG; PAM sequence: AAG
ccacattgtcatctctaccc

SEQ ID NO: 53583 - DNA, 20 bp, Artificial Sequence
  Description of Artificial Sequence: Synthetic oligonucleotide
  Target: LAMA2; (-) strand; PAM type: NRG; PAM sequence: AGG
ccaattagactttccactga

SEQ ID NO: 53584 - DNA, 20 bp, Artificial Sequence
  Description of Artificial Sequence: Synthetic oligonucleotide
  Target: LAMA2; (-) strand; PAM type: NRG; PAM sequence: AAG
tccaattagactttccactg

SEQ ID NO: 53585 - DNA, 20 bp, Artificial Sequence
  Description of Artificial Sequence: Synthetic oligonucleotide
  Target: LAMA2; (-) strand; PAM type: NRG; PAM sequence: TAG
gagattttctgcaatccaat

SEQ ID NO: 53586 - DNA, 20 bp, Artificial Sequence
  Description of Artificial Sequence: Synthetic oligonucleotide
  Target: LAMA2; (-) strand; PAM type: NRG; PAM sequence: GAG
ataaagacaatctatattga

SEQ ID NO: 53587 - DNA, 20 bp, Artificial Sequence
  Description of Artificial Sequence: Synthetic oligonucleotide
  Target: LAMA2; (-) strand; PAM type: NRG; PAM sequence: GAG
aaataaagacaatctatatt

SEQ ID NO: 53588 - DNA, 20 bp, Artificial Sequence
  Description of Artificial Sequence: Synthetic oligonucleotide
  Target: LAMA2; (-) strand; PAM type: NRG; PAM sequence: AAG
aattagggagagtccaaata

SEQ ID NO: 53589 - DNA, 20 bp, Artificial Sequence
  Description of Artificial Sequence: Synthetic oligonucleotide
  Target: LAMA2; (-) strand; PAM type: NRG; PAM sequence: GAG
tttactatagtaattaggga

SEQ ID NO: 53590 - DNA, 20 bp, Artificial Sequence
  Description of Artificial Sequence: Synthetic oligonucleotide
  Target: LAMA2; (-) strand; PAM type: NRG; PAM sequence: GAG
tttttactatagtaattagg

SEQ ID NO: 53591 - DNA, 20 bp, Artificial Sequence
  Description of Artificial Sequence: Synthetic oligonucleotide
  Target: LAMA2; (-) strand; PAM type: NRG; PAM sequence: GGG
tttttttactatagtaatta

SEQ ID NO: 53592 - DNA, 20 bp, Artificial Sequence
  Description of Artificial Sequence: Synthetic oligonucleotide
  Target: LAMA2; (-) strand; PAM type: NRG; PAM sequence: AGG
ttttttttactatagtaatt

SEQ ID NO: 53593 - DNA, 20 bp, Artificial Sequence
  Description of Artificial Sequence: Synthetic oligonucleotide
  Target: LAMA2; (-) strand; PAM type: NRG; PAM sequence: TAG
attttttttactatagtaat

SEQ ID NO: 53594 - DNA, 20 bp, Artificial Sequence
  Description of Artificial Sequence: Synthetic oligonucleotide
  Target: LAMA2; (-) strand; PAM type: NRG; PAM sequence: TAG
tccaagaattttttttacta

SEQ ID NO: 53595 - DNA, 20 bp, Artificial Sequence
  Description of Artificial Sequence: Synthetic oligonucleotide
  Target: LAMA2; (-) strand; PAM type: NRG; PAM sequence: AAG
tgtattaaataatgtattcc

SEQ ID NO: 53596 - DNA, 20 bp, Artificial Sequence
  Description of Artificial Sequence: Synthetic oligonucleotide
  Target: LAMA2; (-) strand; PAM type: NRG; PAM sequence: GAG
ctaagaatcctccctatcca

SEQ ID NO: 53597 - DNA, 20 bp, Artificial Sequence
  Description of Artificial Sequence: Synthetic oligonucleotide
  Target: LAMA2; (-) strand; PAM type: NRG; PAM sequence: CAG
cactaagaatcctccctatc

SEQ ID NO: 53598 - DNA, 20 bp, Artificial Sequence
  Description of Artificial Sequence: Synthetic oligonucleotide
  Target: LAMA2; (-) strand; PAM type: NRG; PAM sequence: AAG
aatacacaagtagacacact

SEQ ID NO: 53599 - DNA, 20 bp, Artificial Sequence
  Description of Artificial Sequence: Synthetic oligonucleotide
  Target: LAMA2; (-) strand; PAM type: NRG; PAM sequence: TAG
ctaaaaatttaatacacaag

SEQ ID NO: 53600 - DNA, 20 bp, Artificial Sequence
  Description of Artificial Sequence: Synthetic oligonucleotide
  Target: LAMA2; (-) strand; PAM type: NRG; PAM sequence: AAG
acactaaaaatttaatacac

SEQ ID NO: 53601 - DNA, 20 bp, Artificial Sequence
  Description of Artificial Sequence: Synthetic oligonucleotide
  Target: LAMA2; (-) strand; PAM type: NRG; PAM sequence: TAG
atagtagatttaatacaaaa

SEQ ID NO: 53602 - DNA, 20 bp, Artificial Sequence
  Description of Artificial Sequence: Synthetic oligonucleotide
  Target: LAMA2; (-) strand; PAM type: NRG; PAM sequence: TAG
tttggtggtttttttaatag

SEQ ID NO: 53603 - DNA, 20 bp, Artificial Sequence
  Description of Artificial Sequence: Synthetic oligonucleotide
  Target: LAMA2; (-) strand; PAM type: NRG; PAM sequence: TAG
ttttttggtggtttttttaa

SEQ ID NO: 53604 - DNA, 20 bp, Artificial Sequence
  Description of Artificial Sequence: Synthetic oligonucleotide
  Target: LAMA2; (-) strand; PAM type: NRG; PAM sequence: TGG
tttttggttttgttttttgg

SEQ ID NO: 53605 - DNA, 20 bp, Artificial Sequence
  Description of Artificial Sequence: Synthetic oligonucleotide
  Target: LAMA2; (-) strand; PAM type: NRG; PAM sequence: TGG
ggttttttggttttgttttt

SEQ ID NO: 53606 - DNA, 20 bp, Artificial Sequence
  Description of Artificial Sequence: Synthetic oligonucleotide
  Target: LAMA2; (-) strand; PAM type: NRG; PAM sequence: TGG
attttctgaagtaggttttt

SEQ ID NO: 53607 - DNA, 20 bp, Artificial Sequence
  Description of Artificial Sequence: Synthetic oligonucleotide
  Target: LAMA2; (-) strand; PAM type: NRG; PAM sequence: AGG
actatatgattttctgaagt

SEQ ID NO: 53608 - DNA, 20 bp, Artificial Sequence
  Description of Artificial Sequence: Synthetic oligonucleotide
  Target: LAMA2; (-) strand; PAM type: NRG; PAM sequence: TAG
tactatatgattttctgaag

SEQ ID NO: 53609 - DNA, 20 bp, Artificial Sequence
  Description of Artificial Sequence: Synthetic oligonucleotide
  Target: LAMA2; (-) strand; PAM type: NRG; PAM sequence: AAG
gagtactatatgattttctg

SEQ ID NO: 53610 - DNA, 20 bp, Artificial Sequence
  Description of Artificial Sequence: Synthetic oligonucleotide
  Target: LAMA2; (-) strand; PAM type: NRG; PAM sequence: GAG
ttttctctagagatttgtta

SEQ ID NO: 53611 - DNA, 20 bp, Artificial Sequence
  Description of Artificial Sequence: Synthetic oligonucleotide
  Target: LAMA2; (-) strand; PAM type: NRG; PAM sequence: TAG
agttttctctagagatttgt

SEQ ID NO: 53612 - DNA, 20 bp, Artificial Sequence
  Description of Artificial Sequence: Synthetic oligonucleotide
  Target: LAMA2; (-) strand; PAM type: NRG; PAM sequence: GAG
tagaaaagcagttttctcta

SEQ ID NO: 53613 - DNA, 20 bp, Artificial Sequence
  Description of Artificial Sequence: Synthetic oligonucleotide
  Target: LAMA2; (-) strand; PAM type: NRG; PAM sequence: TAG
tttagaaaagcagttttctc

SEQ ID NO: 53614 - DNA, 20 bp, Artificial Sequence
  Description of Artificial Sequence: Synthetic oligonucleotide
  Target: LAMA2; (-) strand; PAM type: NRG; PAM sequence: CAG
cgttcccaagtttagaaaag

SEQ ID NO: 53615 - DNA, 20 bp, Artificial Sequence
  Description of Artificial Sequence: Synthetic oligonucleotide
  Target: LAMA2; (-) strand; PAM type: NRG; PAM sequence: AAG
cagcgttcccaagtttagaa

SEQ ID NO: 53616 - DNA, 20 bp, Artificial Sequence
  Description of Artificial Sequence: Synthetic oligonucleotide
  Target: LAMA2; (-) strand; PAM type: NRG; PAM sequence: TAG
aaatccagcgttcccaagtt

SEQ ID NO: 53617 - DNA, 20 bp, Artificial Sequence
  Description of Artificial Sequence: Synthetic oligonucleotide
  Target: LAMA2; (-) strand; PAM type: NRG; PAM sequence: AAG
tttcaaaatccagcgttccc

SEQ ID NO: 53618 - DNA, 20 bp, Artificial Sequence
  Description of Artificial Sequence: Synthetic oligonucleotide
  Target: LAMA2; (-) strand; PAM type: NRG; PAM sequence: CAG
tctgaaatattttcaaaatc

SEQ ID NO: 53619 - DNA, 20 bp, Artificial Sequence
  Description of Artificial Sequence: Synthetic oligonucleotide
  Target: LAMA2; (-) strand; PAM type: NRG; PAM sequence: AAG
atggtaaacgggcctttaag

SEQ ID NO: 53620 - DNA, 20 bp, Artificial Sequence
  Description of Artificial Sequence: Synthetic oligonucleotide
  Target: LAMA2; (-) strand; PAM type: NRG; PAM sequence: AAG
ttgatggtaaacgggccttt

SEQ ID NO: 53621 - DNA, 20 bp, Artificial Sequence
  Description of Artificial Sequence: Synthetic oligonucleotide
  Target: LAMA2; (-) strand; PAM type: NRG; PAM sequence: GGG
gaaactttttgatggtaaac

SEQ ID NO: 53622 - DNA, 20 bp, Artificial Sequence
  Description of Artificial Sequence: Synthetic oligonucleotide
  Target: LAMA2; (-) strand; PAM type: NRG; PAM sequence: CGG
tgaaactttttgatggtaaa

SEQ ID NO: 53623 - DNA, 20 bp, Artificial Sequence
  Description of Artificial Sequence: Synthetic oligonucleotide
  Target: LAMA2; (-) strand; PAM type: NRG; PAM sequence: TGG
gcaagattgaaactttttga

SEQ ID NO: 53624 - DNA, 20 bp, Artificial Sequence
  Description of Artificial Sequence: Synthetic oligonucleotide
  Target: LAMA2; (-) strand; PAM type: NRG; PAM sequence: AAG
ttgcacattatgtgttaggc

SEQ ID NO: 53625 - DNA, 20 bp, Artificial Sequence
  Description of Artificial Sequence: Synthetic oligonucleotide
  Target: LAMA2; (-) strand; PAM type: NRG; PAM sequence: AGG
atatttgcacattatgtgtt

SEQ ID NO: 53626 - DNA, 20 bp, Artificial Sequence
  Description of Artificial Sequence: Synthetic oligonucleotide
  Target: LAMA2; (-) strand; PAM type: NRG; PAM sequence: TAG
aatatttgcacattatgtgt

SEQ ID NO: 53627 - DNA, 20 bp, Artificial Sequence
  Description of Artificial Sequence: Synthetic oligonucleotide
  Target: LAMA2; (-) strand; PAM type: NRG; PAM sequence: CAG
cagtgacttttctaatgtat

SEQ ID NO: 53628 - DNA, 20 bp, Artificial Sequence
  Description of Artificial Sequence: Synthetic oligonucleotide
  Target: LAMA2; (-) strand; PAM type: NRG; PAM sequence: CAG
tggaattccaattacaaatc

SEQ ID NO: 53629 - DNA, 20 bp, Artificial Sequence
  Description of Artificial Sequence: Synthetic oligonucleotide
  Target: LAMA2; (-) strand; PAM type: NRG; PAM sequence: TGG
tagagggaaaatttatattt

SEQ ID NO: 53630 - DNA, 20 bp, Artificial Sequence
  Description of Artificial Sequence: Synthetic oligonucleotide
  Target: LAMA2; (-) strand; PAM type: NRG; PAM sequence: GGG
tctctttaggaagagctaga

SEQ ID NO: 53631 - DNA, 20 bp, Artificial Sequence
  Description of Artificial Sequence: Synthetic oligonucleotide
  Target: LAMA2; (-) strand; PAM type: NRG; PAM sequence: AGG
atctctttaggaagagctag

SEQ ID NO: 53632 - DNA, 20 bp, Artificial Sequence
  Description of Artificial Sequence: Synthetic oligonucleotide
  Target: LAMA2; (-) strand; PAM type: NRG; PAM sequence: GAG
aatctctttaggaagagcta

SEQ ID NO: 53633 - DNA, 20 bp, Artificial Sequence
  Description of Artificial Sequence: Synthetic oligonucleotide
  Target: LAMA2; (-) strand; PAM type: NRG; PAM sequence: TAG
gtaatctctttaggaagagc

SEQ ID NO: 53634 - DNA, 20 bp, Artificial Sequence
  Description of Artificial Sequence: Synthetic oligonucleotide
  Target: LAMA2; (-) strand; PAM type: NRG; PAM sequence: GAG
taaggtaatctctttaggaa

SEQ ID NO: 53635 - DNA, 20 bp, Artificial Sequence
  Description of Artificial Sequence: Synthetic oligonucleotide
  Target: LAMA2; (-) strand; PAM type: NRG; PAM sequence: AAG
tttaaggtaatctctttagg

SEQ ID NO: 53636 - DNA, 20 bp, Artificial Sequence
  Description of Artificial Sequence: Synthetic oligonucleotide
  Target: LAMA2; (-) strand; PAM type: NRG; PAM sequence: AGG
atgtttaaggtaatctcttt

SEQ ID NO: 53637 - DNA, 20 bp, Artificial Sequence
  Description of Artificial Sequence: Synthetic oligonucleotide
  Target: LAMA2; (-) strand; PAM type: NRG; PAM sequence: TAG
catgtttaaggtaatctctt

SEQ ID NO: 53638 - DNA, 20 bp, Artificial Sequence
  Description of Artificial Sequence: Synthetic oligonucleotide
  Target: LAMA2; (-) strand; PAM type: NRG; PAM sequence: AGG
aagtgacttatccatgttta

SEQ ID NO: 53639 - DNA, 20 bp, Artificial Sequence
  Description of Artificial Sequence: Synthetic oligonucleotide
  Target: LAMA2; (-) strand; PAM type: NRG; PAM sequence: AAG
taagtgacttatccatgttt

SEQ ID NO: 53640 - DNA, 20 bp, Artificial Sequence
  Description of Artificial Sequence: Synthetic oligonucleotide
  Target: LAMA2; (-) strand; PAM type: NRG; PAM sequence: AAG
aattgaatttcagaatagtt

SEQ ID NO: 53641 - DNA, 20 bp, Artificial Sequence
  Description of Artificial Sequence: Synthetic oligonucleotide
  Target: LAMA2; (-) strand; PAM type: NRG; PAM sequence: TAG
tggaaaattgaatttcagaa

SEQ ID NO: 53642 - DNA, 20 bp, Artificial Sequence
  Description of Artificial Sequence: Synthetic oligonucleotide
  Target: LAMA2; (-) strand; PAM type: NRG; PAM sequence: CAG
ttagatggaaaattgaattt

SEQ ID NO: 53643 - DNA, 20 bp, Artificial Sequence
  Description of Artificial Sequence: Synthetic oligonucleotide
  Target: LAMA2; (-) strand; PAM type: NRG; PAM sequence: TGG
ttacattgtcattttttaga

SEQ ID NO: 53644 - DNA, 20 bp, Artificial Sequence
  Description of Artificial Sequence: Synthetic oligonucleotide
  Target: LAMA2; (-) strand; PAM type: NRG; PAM sequence: TAG
aacattacattgtcattttt

SEQ ID NO: 53645 - DNA, 20 bp, Artificial Sequence
  Description of Artificial Sequence: Synthetic oligonucleotide
  Target: LAMA2; (-) strand; PAM type: NRG; PAM sequence: TAG
cttataacaaccccatgaaa

SEQ ID NO: 53646 - DNA, 20 bp, Artificial Sequence
  Description of Artificial Sequence: Synthetic oligonucleotide
  Target: LAMA2; (-) strand; PAM type: NRG; PAM sequence: TGG
tattaataatggtatttgta

SEQ ID NO: 53647 - DNA, 20 bp, Artificial Sequence
  Description of Artificial Sequence: Synthetic oligonucleotide
  Target: LAMA2; (-) strand; PAM type: NRG; PAM sequence: TGG
ataacaaatagtattaataa

SEQ ID NO: 53648 - DNA, 20 bp, Artificial Sequence
  Description of Artificial Sequence: Synthetic oligonucleotide
  Target: LAMA2; (-) strand; PAM type: NRG; PAM sequence: TAG
tcatttattataataacaaa

SEQ ID NO: 53649 - DNA, 20 bp, Artificial Sequence
  Description of Artificial Sequence: Synthetic oligonucleotide
  Target: LAMA2; (-) strand; PAM type: NRG; PAM sequence: AAG
cttcataaccaatgatgcct

SEQ ID NO: 53650 - DNA, 20 bp, Artificial Sequence
  Description of Artificial Sequence: Synthetic oligonucleotide
  Target: LAMA2; (-) strand; PAM type: NRG; PAM sequence: GAG
aaaaacaaagaaagggggtg

SEQ ID NO: 53651 - DNA, 20 bp, Artificial Sequence
  Description of Artificial Sequence: Synthetic oligonucleotide
  Target: LAMA2; (-) strand; PAM type: NRG; PAM sequence: TGG
aaaaaaacaaagaaaggggg

SEQ ID NO: 53652 - DNA, 20 bp, Artificial Sequence
  Description of Artificial Sequence: Synthetic oligonucleotide
  Target: LAMA2; (-) strand; PAM type: NRG; PAM sequence: GGG
ggaaaaaaaacaaagaaagg

SEQ ID NO: 53653 - DNA, 20 bp, Artificial Sequence
  Description of Artificial Sequence: Synthetic oligonucleotide
  Target: LAMA2; (-) strand; PAM type: NRG; PAM sequence: GGG
gggaaaaaaaacaaagaaag

SEQ ID NO: 53654 - DNA, 20 bp, Artificial Sequence
  Description of Artificial Sequence: Synthetic oligonucleotide
  Target: LAMA2; (-) strand; PAM type: NRG; PAM sequence: GGG
ggggaaaaaaaacaaagaaa

SEQ ID NO: 53655 - DNA, 20 bp, Artificial Sequence
  Description of Artificial Sequence: Synthetic oligonucleotide
  Target: LAMA2; (-) strand; PAM type: NRG; PAM sequence: AGG
tggggaaaaaaaacaaagaa

SEQ ID NO: 53656 - DNA, 20 bp, Artificial Sequence
  Description of Artificial Sequence: Synthetic oligonucleotide
  Target: LAMA2; (-) strand; PAM type: NRG; PAM sequence: AAG
ctggggaaaaaaaacaaaga

SEQ ID NO: 53657 - DNA, 20 bp, Artificial Sequence
  Description of Artificial Sequence: Synthetic oligonucleotide
  Target: LAMA2; (-) strand; PAM type: NRG; PAM sequence: AAG
gccactggggaaaaaaaaca

SEQ ID NO: 53658 - DNA, 20 bp, Artificial Sequence
  Description of Artificial Sequence: Synthetic oligonucleotide
  Target: LAMA2; (-) strand; PAM type: NRG; PAM sequence: GGG
caaatggttaggagccactg

SEQ ID NO: 53659 - DNA, 20 bp, Artificial Sequence
  Description of Artificial Sequence: Synthetic oligonucleotide
  Target: LAMA2; (-) strand; PAM type: NRG; PAM sequence: GGG
acaaatggttaggagccact

SEQ ID NO: 53660 - DNA, 20 bp, Artificial Sequence
  Description of Artificial Sequence: Synthetic oligonucleotide
  Target: LAMA2; (-) strand; PAM type: NRG; PAM sequence: TGG
aacaaatggttaggagccac

SEQ ID NO: 53661 - DNA, 20 bp, Artificial Sequence
  Description of Artificial Sequence: Synthetic oligonucleotide
  Target: LAMA2; (-) strand; PAM type: NRG; PAM sequence: GAG
aattaataacaaatggttag

SEQ ID NO: 53662 - DNA, 20 bp, Artificial Sequence
  Description of Artificial Sequence: Synthetic oligonucleotide
  Target: LAMA2; (-) strand; PAM type: NRG; PAM sequence: AGG
ttaattaataacaaatggtt

SEQ ID NO: 53663 - DNA, 20 bp, Artificial Sequence
  Description of Artificial Sequence: Synthetic oligonucleotide
  Target: LAMA2; (-) strand; PAM type: NRG; PAM sequence: TAG
attaattaataacaaatggt

SEQ ID NO: 53664 - DNA, 20 bp, Artificial Sequence
  Description of Artificial Sequence: Synthetic oligonucleotide
  Target: LAMA2; (-) strand; PAM type: NRG; PAM sequence: TGG
cattattaattaataacaaa

SEQ ID NO: 53665 - DNA, 20 bp, Artificial Sequence
  Description of Artificial Sequence: Synthetic oligonucleotide
  Target: LAMA2; (-) strand; PAM type: NRG; PAM sequence: AAG
tccttgaaaacaggagaact

SEQ ID NO: 53666 - DNA, 20 bp, Artificial Sequence
  Description of Artificial Sequence: Synthetic oligonucleotide
  Target: LAMA2; (-) strand; PAM type: NRG; PAM sequence: GAG
tcatgggtccttgaaaacag

SEQ ID NO: 53667 - DNA, 20 bp, Artificial Sequence
  Description of Artificial Sequence: Synthetic oligonucleotide
  Target: LAMA2; (-) strand; PAM type: NRG; PAM sequence: AGG
tgtcatgggtccttgaaaac

SEQ ID NO: 53668 - DNA, 20 bp, Artificial Sequence
  Description of Artificial Sequence: Synthetic oligonucleotide
  Target: LAMA2; (-) strand; PAM type: NRG; PAM sequence: CAG
gtgtcatgggtccttgaaaa

SEQ ID NO: 53669 - DNA, 20 bp, Artificial Sequence
  Description of Artificial Sequence: Synthetic oligonucleotide
  Target: LAMA2; (-) strand; PAM type: NRG; PAM sequence: GGG
gtttgaaagctatgtgtcat

SEQ ID NO: 53670 - DNA, 20 bp, Artificial Sequence
  Description of Artificial Sequence: Synthetic oligonucleotide
  Target: LAMA2; (-) strand; PAM type: NRG; PAM sequence: TGG
tgtttgaaagctatgtgtca

SEQ ID NO: 53671 - DNA, 20 bp, Artificial Sequence
  Description of Artificial Sequence: Synthetic oligonucleotide
  Target: LAMA2; (-) strand; PAM type: NRG; PAM sequence: AAG
ataatttgtgccatgtttga

SEQ ID NO: 53672 - DNA, 20 bp, Artificial Sequence
  Description of Artificial Sequence: Synthetic oligonucleotide
  Target: LAMA2; (-) strand; PAM type: NRG; PAM sequence: TAG
catattttcttcttatgcag

SEQ ID NO: 53673 - DNA, 20 bp, Artificial Sequence
  Description of Artificial Sequence: Synthetic oligonucleotide
  Target: LAMA2; (-) strand; PAM type: NRG; PAM sequence: CAG
taccatattttcttcttatg

SEQ ID NO: 53674 - DNA, 20 bp, Artificial Sequence
  Description of Artificial Sequence: Synthetic oligonucleotide
  Target: LAMA2; (-) strand; PAM type: NRG; PAM sequence: CAG
aggaagctgatgtacacttt

SEQ ID NO: 53675 - DNA, 20 bp, Artificial Sequence
  Description of Artificial Sequence: Synthetic oligonucleotide
  Target: LAMA2; (-) strand; PAM type: NRG; PAM sequence: AAG
ctttgctacttgtttgtagg

SEQ ID NO: 53676 - DNA, 20 bp, Artificial Sequence
  Description of Artificial Sequence: Synthetic oligonucleotide
  Target: LAMA2; (-) strand; PAM type: NRG; PAM sequence: AGG
actctttgctacttgtttgt

SEQ ID NO: 53677 - DNA, 20 bp, Artificial Sequence
  Description of Artificial Sequence: Synthetic oligonucleotide
  Target: LAMA2; (-) strand; PAM type: NRG; PAM sequence: TAG
tactctttgctacttgtttg

SEQ ID NO: 53678 - DNA, 20 bp, Artificial Sequence
  Description of Artificial Sequence: Synthetic oligonucleotide
  Target: LAMA2; (-) strand; PAM type: NRG; PAM sequence: TAG
cccttaggctatttttatga

SEQ ID NO: 53679 - DNA, 20 bp, Artificial Sequence
  Description of Artificial Sequence: Synthetic oligonucleotide
  Target: LAMA2; (-) strand; PAM type: NRG; PAM sequence: AGG
tagaatgtttcagagccctt

SEQ ID NO: 53680 - DNA, 20 bp, Artificial Sequence
  Description of Artificial Sequence: Synthetic oligonucleotide
  Target: LAMA2; (-) strand; PAM type: NRG; PAM sequence: TAG
atagaatgtttcagagccct

SEQ ID NO: 53681 - DNA, 20 bp, Artificial Sequence
  Description of Artificial Sequence: Synthetic oligonucleotide
  Target: LAMA2; (-) strand; PAM type: NRG; PAM sequence: GAG
tcttgacatagaatgtttca

SEQ ID NO: 53682 - DNA, 20 bp, Artificial Sequence
  Description of Artificial Sequence: Synthetic oligonucleotide
  Target: LAMA2; (-) strand; PAM type: NRG; PAM sequence: CAG
aatcttgacatagaatgttt

SEQ ID NO: 53683 - DNA, 20 bp, Artificial Sequence
  Description of Artificial Sequence: Synthetic oligonucleotide
  Target: LAMA2; (-) strand; PAM type: NRG; PAM sequence: TAG
gataaaaaggaatcttgaca

SEQ ID NO: 53684 - DNA, 20 bp, Artificial Sequence
  Description of Artificial Sequence: Synthetic oligonucleotide
  Target: LAMA2; (-) strand; PAM type: NRG; PAM sequence: AGG
ttatttttaagaggataaaa

SEQ ID NO: 53685 - DNA, 20 bp, Artificial Sequence
  Description of Artificial Sequence: Synthetic oligonucleotide
  Target: LAMA2; (-) strand; PAM type: NRG; PAM sequence: AAG
attatttttaagaggataaa

SEQ ID NO: 53686 - DNA, 20 bp, Artificial Sequence
  Description of Artificial Sequence: Synthetic oligonucleotide
  Target: LAMA2; (-) strand; PAM type: NRG; PAM sequence: AGG
aagtttcaattatttttaag

SEQ ID NO: 53687 - DNA, 20 bp, Artificial Sequence
  Description of Artificial Sequence: Synthetic oligonucleotide
  Target: LAMA2; (-) strand; PAM type: NRG; PAM sequence: GAG
aaagtttcaattatttttaa

SEQ ID NO: 53688 - DNA, 20 bp, Artificial Sequence
  Description of Artificial Sequence: Synthetic oligonucleotide
  Target: LAMA2; (-) strand; PAM type: NRG; PAM sequence: AAG
tcaaagtttcaattattttt

SEQ ID NO: 53689 - DNA, 20 bp, Artificial Sequence
  Description of Artificial Sequence: Synthetic oligonucleotide
  Target: LAMA2; (-) strand; PAM type: NRG; PAM sequence: AAG
agtagatataccataaatca

SEQ ID NO: 53690 - DNA, 20 bp, Artificial Sequence
  Description of Artificial Sequence: Synthetic oligonucleotide
  Target: LAMA2; (-) strand; PAM type: NRG; PAM sequence: TAG
attttaatacaatcaaatag

SEQ ID NO: 53691 - DNA, 20 bp, Artificial Sequence
  Description of Artificial Sequence: Synthetic oligonucleotide
  Target: LAMA2; (-) strand; PAM type: NRG; PAM sequence: TAG
ttaattttaatacaatcaaa

SEQ ID NO: 53692 - DNA, 20 bp, Artificial Sequence
  Description of Artificial Sequence: Synthetic oligonucleotide
  Target: LAMA2; (-) strand; PAM type: NRG; PAM sequence: TAG
tactggtattttaaattaat

SEQ ID NO: 53693 - DNA, 20 bp, Artificial Sequence
  Description of Artificial Sequence: Synthetic oligonucleotide
  Target: LAMA2; (-) strand; PAM type: NRG; PAM sequence: TGG
acatgtaattgttttattac

SEQ ID NO: 53694 - DNA, 20 bp, Artificial Sequence
  Description of Artificial Sequence: Synthetic oligonucleotide
  Target: LAMA2; (-) strand; PAM type: NRG; PAM sequence: AAG
atataaaattatttttcata

SEQ ID NO: 53695 - DNA, 20 bp, Artificial Sequence
  Description of Artificial Sequence: Synthetic oligonucleotide
  Target: LAMA2; (-) strand; PAM type: NRG; PAM sequence: TGG
gacattgaagagttttattt

SEQ ID NO: 53696 - DNA, 20 bp, Artificial Sequence
  Description of Artificial Sequence: Synthetic oligonucleotide
  Target: LAMA2; (-) strand; PAM type: NRG; PAM sequence: GAG
ctattaagccagacattgaa

SEQ ID NO: 53697 - DNA, 20 bp, Artificial Sequence
  Description of Artificial Sequence: Synthetic oligonucleotide
  Target: LAMA2; (-) strand; PAM type: NRG; PAM sequence: AAG
ttctattaagccagacattg

SEQ ID NO: 53698 - DNA, 20 bp, Artificial Sequence
  Description of Artificial Sequence: Synthetic oligonucleotide
  Target: LAMA2; (-) strand; PAM type: NRG; PAM sequence: CAG
ccagttctcttctattaagc

SEQ ID NO: 53699 - DNA, 20 bp, Artificial Sequence
  Description of Artificial Sequence: Synthetic oligonucleotide
  Target: LAMA2; (-) strand; PAM type: NRG; PAM sequence: AAG
gaatccagttctcttctatt

SEQ ID NO: 53700 - DNA, 20 bp, Artificial Sequence
  Description of Artificial Sequence: Synthetic oligonucleotide
  Target: LAMA2; (-) strand; PAM type: NRG; PAM sequence: CAG
cagaggcagaaatgagaatc

SEQ ID NO: 53701 - DNA, 20 bp, Artificial Sequence
  Description of Artificial Sequence: Synthetic oligonucleotide
  Target: LAMA2; (-) strand; PAM type: NRG; PAM sequence: GAG
ttgaacgcagaggcagaaat

SEQ ID NO: 53702 - DNA, 20 bp, Artificial Sequence
  Description of Artificial Sequence: Synthetic oligonucleotide
  Target: LAMA2; (-) strand; PAM type: NRG; PAM sequence: CAG
taataatttgaacgcagagg

SEQ ID NO: 53703 - DNA, 20 bp, Artificial Sequence
  Description of Artificial Sequence: Synthetic oligonucleotide
  Target: LAMA2; (-) strand; PAM type: NRG; PAM sequence: AGG
atgtaataatttgaacgcag

SEQ ID NO: 53704 - DNA, 20 bp, Artificial Sequence
  Description of Artificial Sequence: Synthetic oligonucleotide
  Target: LAMA2; (-) strand; PAM type: NRG; PAM sequence: GAG
catgtaataatttgaacgca

SEQ ID NO: 53705 - DNA, 20 bp, Artificial Sequence
  Description of Artificial Sequence: Synthetic oligonucleotide
  Target: LAMA2; (-) strand; PAM type: NRG; PAM sequence: CAG
aacatgtaataatttgaacg

SEQ ID NO: 53706 - DNA, 20 bp, Artificial Sequence
  Description of Artificial Sequence: Synthetic oligonucleotide
  Target: LAMA2; (-) strand; PAM type: NRG; PAM sequence: TAG
cagactcctcttttttccaa

SEQ ID NO: 53707 - DNA, 20 bp, Artificial Sequence
  Description of Artificial Sequence: Synthetic oligonucleotide
  Target: LAMA2; (-) strand; PAM type: NRG; PAM sequence: CAG
gctatcttaaaaggcactga

SEQ ID NO: 53708 - DNA, 20 bp, Artificial Sequence
  Description of Artificial Sequence: Synthetic oligonucleotide
  Target: LAMA2; (-) strand; PAM type: NRG; PAM sequence: AGG
atatttacagctatcttaaa

SEQ ID NO: 53709 - DNA, 20 bp, Artificial Sequence
  Description of Artificial Sequence: Synthetic oligonucleotide
  Target: LAMA2; (-) strand; PAM type: NRG; PAM sequence: AAG
aatatttacagctatcttaa

SEQ ID NO: 53710 - DNA, 20 bp, Artificial Sequence
  Description of Artificial Sequence: Synthetic oligonucleotide
  Target: LAMA2; (-) strand; PAM type: NRG; PAM sequence: CAG
atagaatcaaagaatattta

SEQ ID NO: 53711 - DNA, 20 bp, Artificial Sequence
  Description of Artificial Sequence: Synthetic oligonucleotide
  Target: LAMA2; (-) strand; PAM type: NRG; PAM sequence: AAG
tgagttttggtatagaatca

SEQ ID NO: 53712 - DNA, 20 bp, Artificial Sequence
  Description of Artificial Sequence: Synthetic oligonucleotide
  Target: LAMA2; (-) strand; PAM type: NRG; PAM sequence: TAG
ccacttactgagttttggta

SEQ ID NO: 53713 - DNA, 20 bp, Artificial Sequence
  Description of Artificial Sequence: Synthetic oligonucleotide
  Target: LAMA2; (-) strand; PAM type: NRG; PAM sequence: TGG
aactaccacttactgagttt

SEQ ID NO: 53714 - DNA, 20 bp, Artificial Sequence
  Description of Artificial Sequence: Synthetic oligonucleotide
  Target: LAMA2; (-) strand; PAM type: NRG; PAM sequence: GAG
tttgaaaactaccacttact

SEQ ID NO: 53715 - DNA, 20 bp, Artificial Sequence
  Description of Artificial Sequence: Synthetic oligonucleotide
  Target: LAMA2; (-) strand; PAM type: NRG; PAM sequence: CAG
cagtttcagataccacactg

SEQ ID NO: 53716 - DNA, 20 bp, Artificial Sequence
  Description of Artificial Sequence: Synthetic oligonucleotide
  Target: LAMA2; (-) strand; PAM type: NRG; PAM sequence: CAG
aaatatcgttgatgcagttt

SEQ ID NO: 53717 - DNA, 20 bp, Artificial Sequence
  Description of Artificial Sequence: Synthetic oligonucleotide
  Target: LAMA2; (-) strand; PAM type: NRG; PAM sequence: CAG
gtacaaaaatatcgttgatg

SEQ ID NO: 53718 - DNA, 20 bp, Artificial Sequence
  Description of Artificial Sequence: Synthetic oligonucleotide
  Target: LAMA2; (-) strand; PAM type: NRG; PAM sequence: AAG
atccgtagattttaatataa

SEQ ID NO: 53719 - DNA, 20 bp, Artificial Sequence
  Description of Artificial Sequence: Synthetic oligonucleotide
  Target: LAMA2; (-) strand; PAM type: NRG; PAM sequence: TAG
ccaggtgtaagatagatccg

SEQ ID NO: 53720 - DNA, 20 bp, Artificial Sequence
  Description of Artificial Sequence: Synthetic oligonucleotide
  Target: LAMA2; (-) strand; PAM type: NRG; PAM sequence: TAG
aattctttccaggtgtaaga

SEQ ID NO: 53721 - DNA, 20 bp, Artificial Sequence
  Description of Artificial Sequence: Synthetic oligonucleotide
  Target: LAMA2; (-) strand; PAM type: NRG; PAM sequence: AAG
gtaaaattctttccaggtgt

SEQ ID NO: 53722 - DNA, 20 bp, Artificial Sequence
  Description of Artificial Sequence: Synthetic oligonucleotide
  Target: LAMA2; (-) strand; PAM type: NRG; PAM sequence: AGG
acatgggtaaaattctttcc

SEQ ID NO: 53723 - DNA, 20 bp, Artificial Sequence
  Description of Artificial Sequence: Synthetic oligonucleotide
  Target: LAMA2; (-) strand; PAM type: NRG; PAM sequence: CAG
cacatgggtaaaattctttc

SEQ ID NO: 53724 - DNA, 20 bp, Artificial Sequence
  Description of Artificial Sequence: Synthetic oligonucleotide
  Target: LAMA2; (-) strand; PAM type: NRG; PAM sequence: GGG
gatactataacatcacacat

SEQ ID NO: 53725 - DNA, 20 bp, Artificial Sequence
  Description of Artificial Sequence: Synthetic oligonucleotide
  Target: LAMA2; (-) strand; PAM type: NRG; PAM sequence: TGG
tgatactataacatcacaca

SEQ ID NO: 53726 - DNA, 20 bp, Artificial Sequence
  Description of Artificial Sequence: Synthetic oligonucleotide
  Target: LAMA2; (-) strand; PAM type: NRG; PAM sequence: CAG
gatctgcataactagtaaat

SEQ ID NO: 53727 - DNA, 20 bp, Artificial Sequence
  Description of Artificial Sequence: Synthetic oligonucleotide
  Target: LAMA2; (-) strand; PAM type: NRG; PAM sequence: TAG
ttgtggctgatctgcataac

SEQ ID NO: 53728 - DNA, 20 bp, Artificial Sequence
  Description of Artificial Sequence: Synthetic oligonucleotide
  Target: LAMA2; (-) strand; PAM type: NRG; PAM sequence: TGG
taagaaaatctgtcaagttg

SEQ ID NO: 53729 - DNA, 20 bp, Artificial Sequence
  Description of Artificial Sequence: Synthetic oligonucleotide
  Target: LAMA2; (-) strand; PAM type: NRG; PAM sequence: AAG
attttataagaaaatctgtc

SEQ ID NO: 53730 - DNA, 20 bp, Artificial Sequence
  Description of Artificial Sequence: Synthetic oligonucleotide
  Target: LAMA2; (-) strand; PAM type: NRG; PAM sequence: AAG
atgtaattaaaatattttat

SEQ ID NO: 53731 - DNA, 20 bp, Artificial Sequence
  Description of Artificial Sequence: Synthetic oligonucleotide
  Target: LAMA2; (-) strand; PAM type: NRG; PAM sequence: TAG
gacttttctggtgagatcaa

SEQ ID NO: 53732 - DNA, 20 bp, Artificial Sequence
  Description of Artificial Sequence: Synthetic oligonucleotide
  Target: LAMA2; (-) strand; PAM type: NRG; PAM sequence: GAG
tatttagggacttttctggt

SEQ ID NO: 53733 - DNA, 20 bp, Artificial Sequence
  Description of Artificial Sequence: Synthetic oligonucleotide
  Target: LAMA2; (-) strand; PAM type: NRG; PAM sequence: TGG
ctaatatttagggacttttc

SEQ ID NO: 53734 - DNA, 20 bp, Artificial Sequence
  Description of Artificial Sequence: Synthetic oligonucleotide
  Target: LAMA2; (-) strand; PAM type: NRG; PAM sequence: GGG
ttaacagcttctaatattta

SEQ ID NO: 53735 - DNA, 20 bp, Artificial Sequence
  Description of Artificial Sequence: Synthetic oligonucleotide
  Target: LAMA2; (-) strand; PAM type: NRG; PAM sequence: AGG
attaacagcttctaatattt

SEQ ID NO: 53736 - DNA, 20 bp, Artificial Sequence
  Description of Artificial Sequence: Synthetic oligonucleotide
  Target: LAMA2; (-) strand; PAM type: NRG; PAM sequence: TAG
gattaacagcttctaatatt

SEQ ID NO: 53737 - DNA, 20 bp, Artificial Sequence
  Description of Artificial Sequence: Synthetic oligonucleotide
  Target: LAMA2; (-) strand; PAM type: NRG; PAM sequence: CAG
ctctaccattgtgagattaa

SEQ ID NO: 53738 - DNA, 20 bp, Artificial Sequence
  Description of Artificial Sequence: Synthetic oligonucleotide
  Target: LAMA2; (-) strand; PAM type: NRG; PAM sequence: GAG
aaatttgtctctaccattgt

SEQ ID NO: 53739 - DNA, 20 bp, Artificial Sequence
  Description of Artificial Sequence: Synthetic oligonucleotide
  Target: LAMA2; (-) strand; PAM type: NRG; PAM sequence: CAG
acaaaatttgtcaataacta

SEQ ID NO: 53740 - DNA, 20 bp, Artificial Sequence
  Description of Artificial Sequence: Synthetic oligonucleotide
  Target: LAMA2; (-) strand; PAM type: NRG; PAM sequence: AAG
atgaataaagtaactatttc

SEQ ID NO: 53741 - DNA, 20 bp, Artificial Sequence
  Description of Artificial Sequence: Synthetic oligonucleotide
  Target: LAMA2; (-) strand; PAM type: NRG; PAM sequence: AAG
cattttcttaagaatgaata

SEQ ID NO: 53742 - DNA, 20 bp, Artificial Sequence
  Description of Artificial Sequence: Synthetic oligonucleotide
  Target: LAMA2; (-) strand; PAM type: NRG; PAM sequence: AAG
tgtttgataaacattttctt

SEQ ID NO: 53743 - DNA, 20 bp, Artificial Sequence
  Description of Artificial Sequence: Synthetic oligonucleotide
  Target: LAMA2; (-) strand; PAM type: NRG; PAM sequence: AAG
aggatctaactatggttttt

SEQ ID NO: 53744 - DNA, 20 bp, Artificial Sequence
  Description of Artificial Sequence: Synthetic oligonucleotide
  Target: LAMA2; (-) strand; PAM type: NRG; PAM sequence: TGG
ctacaaaaaggatctaacta

SEQ ID NO: 53745 - DNA, 20 bp, Artificial Sequence
  Description of Artificial Sequence: Synthetic oligonucleotide
  Target: LAMA2; (-) strand; PAM type: NRG; PAM sequence: AGG
ataccctatgtactacaaaa

SEQ ID NO: 53746 - DNA, 20 bp, Artificial Sequence
  Description of Artificial Sequence: Synthetic oligonucleotide
  Target: LAMA2; (-) strand; PAM type: NRG; PAM sequence: AAG
aataccctatgtactacaaa

SEQ ID NO: 53747 - DNA, 20 bp, Artificial Sequence
  Description of Artificial Sequence: Synthetic oligonucleotide
  Target: LAMA2; (-) strand; PAM type: NRG; PAM sequence: TGG
taaactagccacttttttcg

SEQ ID NO: 53748 - DNA, 20 bp, Artificial Sequence
  Description of Artificial Sequence: Synthetic oligonucleotide
  Target: LAMA2; (-) strand; PAM type: NRG; PAM sequence: TAG
ttttcagctgcaagctaaac

SEQ ID NO: 53749 - DNA, 20 bp, Artificial Sequence
  Description of Artificial Sequence: Synthetic oligonucleotide
  Target: LAMA2; (-) strand; PAM type: NRG; PAM sequence: AAG
gtacagttgttttcagctgc

SEQ ID NO: 53750 - DNA, 20 bp, Artificial Sequence
  Description of Artificial Sequence: Synthetic oligonucleotide
  Target: LAMA2; (-) strand; PAM type: NRG; PAM sequence: CAG
agcatttgtacagttgtttt

SEQ ID NO: 53751 - DNA, 20 bp, Artificial Sequence
  Description of Artificial Sequence: Synthetic oligonucleotide
  Target: LAMA2; (-) strand; PAM type: NRG; PAM sequence: CAG
tttgaggaaaagcatttgta

SEQ ID NO: 53752 - DNA, 20 bp, Artificial Sequence
  Description of Artificial Sequence: Synthetic oligonucleotide
  Target: LAMA2; (-) strand; PAM type: NRG; PAM sequence: AAG
atgatggttgatttgaggaa

SEQ ID NO: 53753 - DNA, 20 bp, Artificial Sequence
  Description of Artificial Sequence: Synthetic oligonucleotide
  Target: LAMA2; (-) strand; PAM type: NRG; PAM sequence: AGG
gaagcatgatggttgatttg

SEQ ID NO: 53754 - DNA, 20 bp, Artificial Sequence
  Description of Artificial Sequence: Synthetic oligonucleotide
  Target: LAMA2; (-) strand; PAM type: NRG; PAM sequence: GAG
tgaagcatgatggttgattt

SEQ ID NO: 53755 - DNA, 20 bp, Artificial Sequence
  Description of Artificial Sequence: Synthetic oligonucleotide
  Target: LAMA2; (-) strand; PAM type: NRG; PAM sequence: TGG
aactgtatactgaagcatga

SEQ ID NO: 53756 - DNA, 20 bp, Artificial Sequence
  Description of Artificial Sequence: Synthetic oligonucleotide
  Target: LAMA2; (-) strand; PAM type: NRG; PAM sequence: AAG
ttaacatcaactgtatactg

SEQ ID NO: 53757 - DNA, 20 bp, Artificial Sequence
  Description of Artificial Sequence: Synthetic oligonucleotide
  Target: LAMA2; (-) strand; PAM type: NRG; PAM sequence: GGG
gattaaatttattaaatctt

SEQ ID NO: 53758 - DNA, 20 bp, Artificial Sequence
  Description of Artificial Sequence: Synthetic oligonucleotide
  Target: LAMA2; (-) strand; PAM type: NRG; PAM sequence: TGG
tgattaaatttattaaatct

SEQ ID NO: 53759 - DNA, 20 bp, Artificial Sequence
  Description of Artificial Sequence: Synthetic oligonucleotide
  Target: LAMA2; (-) strand; PAM type: NRG; PAM sequence: TAG
gatgaatgtacttgatgaag

SEQ ID NO: 53760 - DNA, 20 bp, Artificial Sequence
  Description of Artificial Sequence: Synthetic oligonucleotide
  Target: LAMA2; (-) strand; PAM type: NRG; PAM sequence: AAG
acagatgaatgtacttgatg

SEQ ID NO: 53761 - DNA, 20 bp, Artificial Sequence
  Description of Artificial Sequence: Synthetic oligonucleotide
  Target: LAMA2; (-) strand; PAM type: NRG; PAM sequence: CAG
gaaaaaaacaactagtttca

SEQ ID NO: 53762 - DNA, 20 bp, Artificial Sequence
  Description of Artificial Sequence: Synthetic oligonucleotide
  Target: LAMA2; (-) strand; PAM type: NRG; PAM sequence: TAG
tcccagaagaaaaaaacaac

SEQ ID NO: 53763 - DNA, 20 bp, Artificial Sequence
  Description of Artificial Sequence: Synthetic oligonucleotide
  Target: LAMA2; (-) strand; PAM type: NRG; PAM sequence: AAG
tcaccaccacacactcccag

SEQ ID NO: 53764 - DNA, 20 bp, Artificial Sequence
  Description of Artificial Sequence: Synthetic oligonucleotide
  Target: LAMA2; (-) strand; PAM type: NRG; PAM sequence: CAG
ttttcaccaccacacactcc

SEQ ID NO: 53765 - DNA, 20 bp, Artificial Sequence
  Description of Artificial Sequence: Synthetic oligonucleotide
  Target: LAMA2; (-) strand; PAM type: NRG; PAM sequence: TAG
aaccatgctagtggtcagtt

SEQ ID NO: 53766 - DNA, 20 bp, Artificial Sequence
  Description of Artificial Sequence: Synthetic oligonucleotide
  Target: LAMA2; (-) strand; PAM type: NRG; PAM sequence: CAG
tactaaaccatgctagtggt

SEQ ID NO: 53767 - DNA, 20 bp, Artificial Sequence
  Description of Artificial Sequence: Synthetic oligonucleotide
  Target: LAMA2; (-) strand; PAM type: NRG; PAM sequence: TGG
ggggtactaaaccatgctag

SEQ ID NO: 53768 - DNA, 20 bp, Artificial Sequence
  Description of Artificial Sequence: Synthetic oligonucleotide
  Target: LAMA2; (-) strand; PAM type: NRG; PAM sequence: TAG
gcaggggtactaaaccatgc

SEQ ID NO: 53769 - DNA, 20 bp, Artificial Sequence
  Description of Artificial Sequence: Synthetic oligonucleotide
  Target: LAMA2; (-) strand; PAM type: NRG; PAM sequence: GGG
attagcacaaatcaaggcag

SEQ ID NO: 53770 - DNA, 20 bp, Artificial Sequence
  Description of Artificial Sequence: Synthetic oligonucleotide
  Target: LAMA2; (-) strand; PAM type: NRG; PAM sequence: GGG
cattagcacaaatcaaggca

SEQ ID NO: 53771 - DNA, 20 bp, Artificial Sequence
  Description of Artificial Sequence: Synthetic oligonucleotide
  Target: LAMA2; (-) strand; PAM type: NRG; PAM sequence: AGG
acattagcacaaatcaaggc

SEQ ID NO: 53772 - DNA, 20 bp, Artificial Sequence
  Description of Artificial Sequence: Synthetic oligonucleotide
  Target: LAMA2; (-) strand; PAM type: NRG; PAM sequence: CAG
tacattagcacaaatcaagg

SEQ ID NO: 53773 - DNA, 20 bp, Artificial Sequence
  Description of Artificial Sequence: Synthetic oligonucleotide
  Target: LAMA2; (-) strand; PAM type: NRG; PAM sequence: AGG
tggtacattagcacaaatca

SEQ ID NO: 53774 - DNA, 20 bp, Artificial Sequence
  Description of Artificial Sequence: Synthetic oligonucleotide
  Target: LAMA2; (-) strand; PAM type: NRG; PAM sequence: AAG
atggtacattagcacaaatc

SEQ ID NO: 53775 - DNA, 20 bp, Artificial Sequence
  Description of Artificial Sequence: Synthetic oligonucleotide
  Target: LAMA2; (-) strand; PAM type: NRG; PAM sequence: TAG
gggaaacactgatggtacat

SEQ ID NO: 53776 - DNA, 20 bp, Artificial Sequence
  Description of Artificial Sequence: Synthetic oligonucleotide
  Target: LAMA2; (-) strand; PAM type: NRG; PAM sequence: TGG
atagtggtgggaaacactga

SEQ ID NO: 53777 - DNA, 20 bp, Artificial Sequence
  Description of Artificial Sequence: Synthetic oligonucleotide
  Target: LAMA2; (-) strand; PAM type: NRG; PAM sequence: GGG
ggtgcaaaagcaatagtggt

SEQ ID NO: 53778 - DNA, 20 bp, Artificial Sequence
  Description of Artificial Sequence: Synthetic oligonucleotide
  Target: LAMA2; (-) strand; PAM type: NRG; PAM sequence: TGG
tggtgcaaaagcaatagtgg

SEQ ID NO: 53779 - DNA, 20 bp, Artificial Sequence
  Description of Artificial Sequence: Synthetic oligonucleotide
  Target: LAMA2; (-) strand; PAM type: NRG; PAM sequence: TGG
tgatggtgcaaaagcaatag

SEQ ID NO: 53780 - DNA, 20 bp, Artificial Sequence
  Description of Artificial Sequence: Synthetic oligonucleotide
  Target: LAMA2; (-) strand; PAM type: NRG; PAM sequence: TAG
cactgatggtgcaaaagcaa

SEQ ID NO: 53781 - DNA, 20 bp, Artificial Sequence
  Description of Artificial Sequence: Synthetic oligonucleotide
  Target: LAMA2; (-) strand; PAM type: NRG; PAM sequence: AAG
catgtgcactgatggtgcaa

SEQ ID NO: 53782 - DNA, 20 bp, Artificial Sequence
  Description of Artificial Sequence: Synthetic oligonucleotide
  Target: LAMA2; (-) strand; PAM type: NRG; PAM sequence: TGG
tgtgttgacatgtgcactga

SEQ ID NO: 53783 - DNA, 20 bp, Artificial Sequence
  Description of Artificial Sequence: Synthetic oligonucleotide
  Target: LAMA2; (-) strand; PAM type: NRG; PAM sequence: AAG
tcaaaaatccttttagtaac

SEQ ID NO: 53784 - DNA, 20 bp, Artificial Sequence
  Description of Artificial Sequence: Synthetic oligonucleotide
  Target: LAMA2; (-) strand; PAM type: NRG; PAM sequence: TAG
cacaagttcaaaaatccttt

SEQ ID NO: 53785 - DNA, 20 bp, Artificial Sequence
  Description of Artificial Sequence: Synthetic oligonucleotide
  Target: LAMA2; (-) strand; PAM type: NRG; PAM sequence: AAG
tacattatccataggtacac

SEQ ID NO: 53786 - DNA, 20 bp, Artificial Sequence
  Description of Artificial Sequence: Synthetic oligonucleotide
  Target: LAMA2; (-) strand; PAM type: NRG; PAM sequence: AGG
gtccacaatacattatccat

SEQ ID NO: 53787 - DNA, 20 bp, Artificial Sequence
  Description of Artificial Sequence: Synthetic oligonucleotide
  Target: LAMA2; (-) strand; PAM type: NRG; PAM sequence: TAG
agtccacaatacattatcca

SEQ ID NO: 53788 - DNA, 20 bp, Artificial Sequence
  Description of Artificial Sequence: Synthetic oligonucleotide
  Target: LAMA2; (-) strand; PAM type: NRG; PAM sequence: GAG
aaagatctgtgaatccctgg

SEQ ID NO: 53789 - DNA, 20 bp, Artificial Sequence
  Description of Artificial Sequence: Synthetic oligonucleotide
  Target: LAMA2; (-) strand; PAM type: NRG; PAM sequence: GGG
agaaagatctgtgaatccct

SEQ ID NO: 53790 - DNA, 20 bp, Artificial Sequence
  Description of Artificial Sequence: Synthetic oligonucleotide
  Target: LAMA2; (-) strand; PAM type: NRG; PAM sequence: TGG
aagaaagatctgtgaatccc

SEQ ID NO: 53791 - DNA, 20 bp, Artificial Sequence
  Description of Artificial Sequence: Synthetic oligonucleotide
  Target: LAMA2; (-) strand; PAM type: NRG; PAM sequence: AAG
aaccctgtagagctcaaaga

SEQ ID NO: 53792 - DNA, 20 bp, Artificial Sequence
  Description of Artificial Sequence: Synthetic oligonucleotide
  Target: LAMA2; (-) strand; PAM type: NRG; PAM sequence: AAG
gtccaaccctgtagagctca

SEQ ID NO: 53793 - DNA, 20 bp, Artificial Sequence
  Description of Artificial Sequence: Synthetic oligonucleotide
  Target: LAMA2; (-) strand; PAM type: NRG; PAM sequence: GAG
aactgtagtccaaccctgta

SEQ ID NO: 53794 - DNA, 20 bp, Artificial Sequence
  Description of Artificial Sequence: Synthetic oligonucleotide
  Target: LAMA2; (-) strand; PAM type: NRG; PAM sequence: TAG
ttaactgtagtccaaccctg

SEQ ID NO: 53795 - DNA, 20 bp, Artificial Sequence
  Description of Artificial Sequence: Synthetic oligonucleotide
  Target: LAMA2; (-) strand; PAM type: NRG; PAM sequence: TAG
ggcagtgaggaacttaactg

SEQ ID NO: 53796 - DNA, 20 bp, Artificial Sequence
  Description of Artificial Sequence: Synthetic oligonucleotide
  Target: LAMA2; (-) strand; PAM type: NRG; PAM sequence: AGG
tggtgaagaggcaggcagtg

SEQ ID NO: 53797 - DNA, 20 bp, Artificial Sequence
  Description of Artificial Sequence: Synthetic oligonucleotide
  Target: LAMA2; (-) strand; PAM type: NRG; PAM sequence: GAG
ttggtgaagaggcaggcagt

SEQ ID NO: 53798 - DNA, 20 bp, Artificial Sequence
  Description of Artificial Sequence: Synthetic oligonucleotide
  Target: LAMA2; (-) strand; PAM type: NRG; PAM sequence: CAG
agaattggtgaagaggcagg

SEQ ID NO: 53799 - DNA, 20 bp, Artificial Sequence
  Description of Artificial Sequence: Synthetic oligonucleotide
  Target: LAMA2; (-) strand; PAM type: NRG; PAM sequence: AGG
tgtagaattggtgaagaggc

SEQ ID NO: 53800 - DNA, 20 bp, Artificial Sequence
  Description of Artificial Sequence: Synthetic oligonucleotide
  Target: LAMA2; (-) strand; PAM type: NRG; PAM sequence: CAG
ttgtagaattggtgaagagg

SEQ ID NO: 53801 - DNA, 20 bp, Artificial Sequence
  Description of Artificial Sequence: Synthetic oligonucleotide
  Target: LAMA2; (-) strand; PAM type: NRG; PAM sequence: AGG
attttgtagaattggtgaag

SEQ ID NO: 53802 - DNA, 20 bp, Artificial Sequence
  Description of Artificial Sequence: Synthetic oligonucleotide
  Target: LAMA2; (-) strand; PAM type: NRG; PAM sequence: GAG
gattttgtagaattggtgaa

SEQ ID NO: 53803 - DNA, 20 bp, Artificial Sequence
  Description of Artificial Sequence: Synthetic oligonucleotide
  Target: LAMA2; (-) strand; PAM type: NRG; PAM sequence: AAG
tagattttgtagaattggtg

SEQ ID NO: 53804 - DNA, 20 bp, Artificial Sequence
  Description of Artificial Sequence: Synthetic oligonucleotide
  Target: LAMA2; (-) strand; PAM type: NRG; PAM sequence: TGG
ggctatagattttgtagaat

SEQ ID NO: 53805 - DNA, 20 bp, Artificial Sequence
  Description of Artificial Sequence: Synthetic oligonucleotide
  Target: LAMA2; (-) strand; PAM type: NRG; PAM sequence: TAG
tcatatggctatagattttg

SEQ ID NO: 53806 - DNA, 20 bp, Artificial Sequence
  Description of Artificial Sequence: Synthetic oligonucleotide
  Target: LAMA2; (-) strand; PAM type: NRG; PAM sequence: TAG
aatttaccttcatatggcta

SEQ ID NO: 53807 - DNA, 20 bp, Artificial Sequence
  Description of Artificial Sequence: Synthetic oligonucleotide
  Target: LAMA2; (-) strand; PAM type: NRG; PAM sequence: TGG
ttgcaaaatttaccttcata

SEQ ID NO: 53808 - DNA, 20 bp, Artificial Sequence
  Description of Artificial Sequence: Synthetic oligonucleotide
  Target: LAMA2; (-) strand; PAM type: NRG; PAM sequence: TGG
ggtaaaaactgaagtggttt

SEQ ID NO: 53809 - DNA, 20 bp, Artificial Sequence
  Description of Artificial Sequence: Synthetic oligonucleotide
  Target: LAMA2; (-) strand; PAM type: NRG; PAM sequence: TGG
acctgaggtaaaaactgaag

SEQ ID NO: 53810 - DNA, 20 bp, Artificial Sequence
  Description of Artificial Sequence: Synthetic oligonucleotide
  Target: LAMA2; (-) strand; PAM type: NRG; PAM sequence: AAG
tagacctgaggtaaaaactg

SEQ ID NO: 53811 - DNA, 20 bp, Artificial Sequence
  Description of Artificial Sequence: Synthetic oligonucleotide
  Target: LAMA2; (-) strand; PAM type: NRG; PAM sequence: AGG
actctcctagactagacctg

SEQ ID NO: 53812 - DNA, 20 bp, Artificial Sequence
  Description of Artificial Sequence: Synthetic oligonucleotide
  Target: LAMA2; (-) strand; PAM type: NRG; PAM sequence: GAG
cactctcctagactagacct

SEQ ID NO: 53813 - DNA, 20 bp, Artificial Sequence
  Description of Artificial Sequence: Synthetic oligonucleotide
  Target: LAMA2; (-) strand; PAM type: NRG; PAM sequence: TAG
atggtatcactctcctagac

SEQ ID NO: 53814 - DNA, 20 bp, Artificial Sequence
  Description of Artificial Sequence: Synthetic oligonucleotide
  Target: LAMA2; (-) strand; PAM type: NRG; PAM sequence: TAG
aagaaatggtatcactctcc

SEQ ID NO: 53815 - DNA, 20 bp, Artificial Sequence
  Description of Artificial Sequence: Synthetic oligonucleotide
  Target: LAMA2; (-) strand; PAM type: NRG; PAM sequence: TGG
tcttcccccttaaaaagaaa

SEQ ID NO: 53816 - DNA, 20 bp, Artificial Sequence
  Description of Artificial Sequence: Synthetic oligonucleotide
  Target: LAMA2; (-) strand; PAM type: NRG; PAM sequence: AAG
tggatttcttcccccttaaa

SEQ ID NO: 53817 - DNA, 20 bp, Artificial Sequence
  Description of Artificial Sequence: Synthetic oligonucleotide
  Target: LAMA2; (-) strand; PAM type: NRG; PAM sequence: TGG
ttccacagaagaagcttttc

SEQ ID NO: 53818 - DNA, 20 bp, Artificial Sequence
  Description of Artificial Sequence: Synthetic oligonucleotide
  Target: LAMA2; (-) strand; PAM type: NRG; PAM sequence: AAG
tcctgctttttccacagaag

SEQ ID NO: 53819 - DNA, 20 bp, Artificial Sequence
  Description of Artificial Sequence: Synthetic oligonucleotide
  Target: LAMA2; (-) strand; PAM type: NRG; PAM sequence: AAG
acttcctgctttttccacag

SEQ ID NO: 53820 - DNA, 20 bp, Artificial Sequence
  Description of Artificial Sequence: Synthetic oligonucleotide
  Target: LAMA2; (-) strand; PAM type: NRG; PAM sequence: CAG
aacacttcctgctttttcca

SEQ ID NO: 53821 - DNA, 20 bp, Artificial Sequence
  Description of Artificial Sequence: Synthetic oligonucleotide
  Target: LAMA2; (-) strand; PAM type: NRG; PAM sequence: TGG
tttctatatgtatgtctggc

SEQ ID NO: 53822 - DNA, 20 bp, Artificial Sequence
  Description of Artificial Sequence: Synthetic oligonucleotide
  Target: LAMA2; (-) strand; PAM type: NRG; PAM sequence: TGG
ttgatttctatatgtatgtc

SEQ ID NO: 53823 - DNA, 20 bp, Artificial Sequence
  Description of Artificial Sequence: Synthetic oligonucleotide
  Target: LAMA2; (-) strand; PAM type: NRG; PAM sequence: GAG
gaagggcagatgatatggca

SEQ ID NO: 53824 - DNA, 20 bp, Artificial Sequence
  Description of Artificial Sequence: Synthetic oligonucleotide
  Target: LAMA2; (-) strand; PAM type: NRG; PAM sequence: CAG
aagaagggcagatgatatgg

SEQ ID NO: 53825 - DNA, 20 bp, Artificial Sequence
  Description of Artificial Sequence: Synthetic oligonucleotide
  Target: LAMA2; (-) strand; PAM type: NRG; PAM sequence: TGG
attaagaagggcagatgata

SEQ ID NO: 53826 - DNA, 20 bp, Artificial Sequence
  Description of Artificial Sequence: Synthetic oligonucleotide
  Target: LAMA2; (-) strand; PAM type: NRG; PAM sequence: CAG
tgaaaggaaattaagaaggg

SEQ ID NO: 53827 - DNA, 20 bp, Artificial Sequence
  Description of Artificial Sequence: Synthetic oligonucleotide
  Target: LAMA2; (-) strand; PAM type: NRG; PAM sequence: GGG
aagtgaaaggaaattaagaa

SEQ ID NO: 53828 - DNA, 20 bp, Artificial Sequence
  Description of Artificial Sequence: Synthetic oligonucleotide
  Target: LAMA2; (-) strand; PAM type: NRG; PAM sequence: AGG
caagtgaaaggaaattaaga

SEQ ID NO: 53829 - DNA, 20 bp, Artificial Sequence
  Description of Artificial Sequence: Synthetic oligonucleotide
  Target: LAMA2; (-) strand; PAM type: NRG; PAM sequence: AAG
gcaagtgaaaggaaattaag

SEQ ID NO: 53830 - DNA, 20 bp, Artificial Sequence
  Description of Artificial Sequence: Synthetic oligonucleotide
  Target: LAMA2; (-) strand; PAM type: NRG; PAM sequence: AAG
tgggcaagtgaaaggaaatt

SEQ ID NO: 53831 - DNA, 20 bp, Artificial Sequence
  Description of Artificial Sequence: Synthetic oligonucleotide
  Target: LAMA2; (-) strand; PAM type: NRG; PAM sequence: AGG
ctatagtttgggcaagtgaa

SEQ ID NO: 53832 - DNA, 20 bp, Artificial Sequence
  Description of Artificial Sequence: Synthetic oligonucleotide
  Target: LAMA2; (-) strand; PAM type: NRG; PAM sequence: AAG
actatagtttgggcaagtga

SEQ ID NO: 53833 - DNA, 20 bp, Artificial Sequence
  Description of Artificial Sequence: Synthetic oligonucleotide
  Target: LAMA2; (-) strand; PAM type: NRG; PAM sequence: AAG
atctctactatagtttgggc

SEQ ID NO: 53834 - DNA, 20 bp, Artificial Sequence
  Description of Artificial Sequence: Synthetic oligonucleotide
  Target: LAMA2; (-) strand; PAM type: NRG; PAM sequence: GGG
cactatctctactatagttt

SEQ ID NO: 53835 - DNA, 20 bp, Artificial Sequence
  Description of Artificial Sequence: Synthetic oligonucleotide
  Target: LAMA2; (-) strand; PAM type: NRG; PAM sequence: TGG
acactatctctactatagtt

SEQ ID NO: 53836 - DNA, 20 bp, Artificial Sequence
  Description of Artificial Sequence: Synthetic oligonucleotide
  Target: LAMA2; (-) strand; PAM type: NRG; PAM sequence: TAG
taagtacactatctctacta

SEQ ID NO: 53837 - DNA, 20 bp, Artificial Sequence
  Description of Artificial Sequence: Synthetic oligonucleotide
  Target: LAMA2; (-) strand; PAM type: NRG; PAM sequence: AAG
tcatatgtccaactgtgggt

SEQ ID NO: 53838 - DNA, 20 bp, Artificial Sequence
  Description of Artificial Sequence: Synthetic oligonucleotide
  Target: LAMA2; (-) strand; PAM type: NRG; PAM sequence: GGG
aacatcatatgtccaactgt

SEQ ID NO: 53839 - DNA, 20 bp, Artificial Sequence
  Description of Artificial Sequence: Synthetic oligonucleotide
  Target: LAMA2; (-) strand; PAM type: NRG; PAM sequence: TGG
taacatcatatgtccaactg

SEQ ID NO: 53840 - DNA, 20 bp, Artificial Sequence
  Description of Artificial Sequence: Synthetic oligonucleotide
  Target: LAMA2; (-) strand; PAM type: NRG; PAM sequence: AGG
gttcactttttaagtctatt

SEQ ID NO: 53841 - DNA, 20 bp, Artificial Sequence
  Description of Artificial Sequence: Synthetic oligonucleotide
  Target: LAMA2; (-) strand; PAM type: NRG; PAM sequence: TAG
agttcactttttaagtctat

SEQ ID NO: 53842 - DNA, 20 bp, Artificial Sequence
  Description of Artificial Sequence: Synthetic oligonucleotide
  Target: LAMA2; (-) strand; PAM type: NRG; PAM sequence: AAG
ccgccatgagttcacttttt

SEQ ID NO: 53843 - DNA, 20 bp, Artificial Sequence
  Description of Artificial Sequence: Synthetic oligonucleotide
  Target: LAMA2; (-) strand; PAM type: NRG; PAM sequence: GAG
gagccaccgcgccccgccat

SEQ ID NO: 53844 - DNA, 20 bp, Artificial Sequence
  Description of Artificial Sequence: Synthetic oligonucleotide
  Target: LAMA2; (-) strand; PAM type: NRG; PAM sequence: GAG
agtgctgggattacaggcgt

SEQ ID NO: 53845 - DNA, 20 bp, Artificial Sequence
  Description of Artificial Sequence: Synthetic oligonucleotide
  Target: LAMA2; (-) strand; PAM type: NRG; PAM sequence: AGG
tcccaaagtgctgggattac

SEQ ID NO: 53846 - DNA, 20 bp, Artificial Sequence
  Description of Artificial Sequence: Synthetic oligonucleotide
  Target: LAMA2; (-) strand; PAM type: NRG; PAM sequence: CAG
ctcccaaagtgctgggatta

SEQ ID NO: 53847 - DNA, 20 bp, Artificial Sequence
  Description of Artificial Sequence: Synthetic oligonucleotide
  Target: LAMA2; (-) strand; PAM type: NRG; PAM sequence: GGG
ccccggcctcccaaagtgct

SEQ ID NO: 53848 - DNA, 20 bp, Artificial Sequence
  Description of Artificial Sequence: Synthetic oligonucleotide
  Target: LAMA2; (-) strand; PAM type: NRG; PAM sequence: TGG
gccccggcctcccaaagtgc

SEQ ID NO: 53849 - DNA, 20 bp, Artificial Sequence
  Description of Artificial Sequence: Synthetic oligonucleotide
  Target: LAMA2; (-) strand; PAM type: NRG; PAM sequence: AAG
ccacccgccccggcctccca

SEQ ID NO: 53850 - DNA, 20 bp, Artificial Sequence
  Description of Artificial Sequence: Synthetic oligonucleotide
  Target: LAMA2; (-) strand; PAM type: NRG; PAM sequence: CGG
acctcgtgatccacccgccc

SEQ ID NO: 53851 - DNA, 20 bp, Artificial Sequence
  Description of Artificial Sequence: Synthetic oligonucleotide
  Target: LAMA2; (-) strand; PAM type: NRG; PAM sequence: TGG
tttcaccatgttagccagga

SEQ ID NO: 53852 - DNA, 20 bp, Artificial Sequence
  Description of Artificial Sequence: Synthetic oligonucleotide
  Target: LAMA2; (-) strand; PAM type: NRG; PAM sequence: AGG
agggtttcaccatgttagcc

SEQ ID NO: 53853 - DNA, 20 bp, Artificial Sequence
  Description of Artificial Sequence: Synthetic oligonucleotide
  Target: LAMA2; (-) strand; PAM type: NRG; PAM sequence: CAG
cagggtttcaccatgttagc

SEQ ID NO: 53854 - DNA, 20 bp, Artificial Sequence
  Description of Artificial Sequence: Synthetic oligonucleotide
  Target: LAMA2; (-) strand; PAM type: NRG; PAM sequence: TAG
gagacagggtttcaccatgt

SEQ ID NO: 53855 - DNA, 20 bp, Artificial Sequence
  Description of Artificial Sequence: Synthetic oligonucleotide
  Target: LAMA2; (-) strand; PAM type: NRG; PAM sequence: GGG
ttttttttttagtagagaca

SEQ ID NO: 53856 - DNA, 20 bp, Artificial Sequence
  Description of Artificial Sequence: Synthetic oligonucleotide
  Target: LAMA2; (-) strand; PAM type: NRG; PAM sequence: AGG
tttttttttttagtagagac

SEQ ID NO: 53857 - DNA, 20 bp, Artificial Sequence
  Description of Artificial Sequence: Synthetic oligonucleotide
  Target: LAMA2; (-) strand; PAM type: NRG; PAM sequence: CAG
ttttttttttttagtagaga

SEQ ID NO: 53858 - DNA, 20 bp, Artificial Sequence
  Description of Artificial Sequence: Synthetic oligonucleotide
  Target: LAMA2; (-) strand; PAM type: NRG; PAM sequence: GAG
ttttttttttttttttagta

SEQ ID NO: 53859 - DNA, 20 bp, Artificial Sequence
  Description of Artificial Sequence: Synthetic oligonucleotide
  Target: LAMA2; (-) strand; PAM type: NRG; PAM sequence: TAG
ttttttttttttttttttag

SEQ ID NO: 53860 - DNA, 20 bp, Artificial Sequence
  Description of Artificial Sequence: Synthetic oligonucleotide
  Target: LAMA2; (-) strand; PAM type: NRG; PAM sequence: TAG
tttttttttttttttttttt

SEQ ID NO: 53861 - DNA, 20 bp, Artificial Sequence
  Description of Artificial Sequence: Synthetic oligonucleotide
  Target: LAMA2; (-) strand; PAM type: NRG; PAM sequence: CGG
caagcgcccgccaccacgcc

SEQ ID NO: 53862 - DNA, 20 bp, Artificial Sequence
  Description of Artificial Sequence: Synthetic oligonucleotide
  Target: LAMA2; (-) strand; PAM type: NRG; PAM sequence: AAG
tccagagtacctggcactac

SEQ ID NO: 53863 - DNA, 20 bp, Artificial Sequence
  Description of Artificial Sequence: Synthetic oligonucleotide
  Target: LAMA2; (-) strand; PAM type: NRG; PAM sequence: TGG
gcctcagcctccagagtacc

SEQ ID NO: 53864 - DNA, 20 bp, Artificial Sequence
  Description of Artificial Sequence: Synthetic oligonucleotide
  Target: LAMA2; (-) strand; PAM type: NRG; PAM sequence: GAG
ttctcctgcctcagcctcca

SEQ ID NO: 53865 - DNA, 20 bp, Artificial Sequence
  Description of Artificial Sequence: Synthetic oligonucleotide
  Target: LAMA2; (-) strand; PAM type: NRG; PAM sequence: CAG
cattctcctgcctcagcctc

SEQ ID NO: 53866 - DNA, 20 bp, Artificial Sequence
  Description of Artificial Sequence: Synthetic oligonucleotide
  Target: LAMA2; (-) strand; PAM type: NRG; PAM sequence: CAG
ttcacgccattctcctgcct

SEQ ID NO: 53867 - DNA, 20 bp, Artificial Sequence
  Description of Artificial Sequence: Synthetic oligonucleotide
  Target: LAMA2; (-) strand; PAM type: NRG; PAM sequence: CGG
tcactgcaagctcctcctcc

SEQ ID NO: 53868 - DNA, 20 bp, Artificial Sequence
  Description of Artificial Sequence: Synthetic oligonucleotide
  Target: LAMA2; (-) strand; PAM type: NRG; PAM sequence: AAG
gcgcaatctcggctcactgc

SEQ ID NO: 53869 - DNA, 20 bp, Artificial Sequence
  Description of Artificial Sequence: Synthetic oligonucleotide
  Target: LAMA2; (-) strand; PAM type: NRG; PAM sequence: CGG
ggagtgcagtggcgcaatct

SEQ ID NO: 53870 - DNA, 20 bp, Artificial Sequence
  Description of Artificial Sequence: Synthetic oligonucleotide
  Target: LAMA2; (-) strand; PAM type: NRG; PAM sequence: TGG
ttgcccaagctggagtgcag

SEQ ID NO: 53871 - DNA, 20 bp, Artificial Sequence
  Description of Artificial Sequence: Synthetic oligonucleotide
  Target: LAMA2; (-) strand; PAM type: NRG; PAM sequence: CAG
ctgttgcccaagctggagtg

SEQ ID NO: 53872 - DNA, 20 bp, Artificial Sequence
  Description of Artificial Sequence: Synthetic oligonucleotide
  Target: LAMA2; (-) strand; PAM type: NRG; PAM sequence: GAG
tcgctctgttgcccaagctg

SEQ ID NO: 53873 - DNA, 20 bp, Artificial Sequence
  Description of Artificial Sequence: Synthetic oligonucleotide
  Target: LAMA2; (-) strand; PAM type: NRG; PAM sequence: TGG
tctcgctctgttgcccaagc

SEQ ID NO: 53874 - DNA, 20 bp, Artificial Sequence
  Description of Artificial Sequence: Synthetic oligonucleotide
  Target: LAMA2; (-) strand; PAM type: NRG; PAM sequence: AAG
ggagtctcgctctgttgccc

SEQ ID NO: 53875 - DNA, 20 bp, Artificial Sequence
  Description of Artificial Sequence: Synthetic oligonucleotide
  Target: LAMA2; (-) strand; PAM type: NRG; PAM sequence: GAG
accttgctcatgagttcacg

SEQ ID NO: 53876 - DNA, 20 bp, Artificial Sequence
  Description of Artificial Sequence: Synthetic oligonucleotide
  Target: LAMA2; (-) strand; PAM type: NRG; PAM sequence: CGG
aaaccttgctcatgagttca

SEQ ID NO: 53877 - DNA, 20 bp, Artificial Sequence
  Description of Artificial Sequence: Synthetic oligonucleotide
  Target: LAMA2; (-) strand; PAM type: NRG; PAM sequence: GAG
ttgtactaaaccttgctcat

SEQ ID NO: 53878 - DNA, 20 bp, Artificial Sequence
  Description of Artificial Sequence: Synthetic oligonucleotide
  Target: LAMA2; (-) strand; PAM type: NRG; PAM sequence: TAG
atattcagaattacagatat

SEQ ID NO: 53879 - DNA, 20 bp, Artificial Sequence
  Description of Artificial Sequence: Synthetic oligonucleotide
  Target: LAMA2; (-) strand; PAM type: NRG; PAM sequence: CAG
tctgctaatattcagaatta

SEQ ID NO: 53880 - DNA, 20 bp, Artificial Sequence
  Description of Artificial Sequence: Synthetic oligonucleotide
  Target: LAMA2; (-) strand; PAM type: NRG; PAM sequence: CAG
aaatctcttctgctaatatt

SEQ ID NO: 53881 - DNA, 20 bp, Artificial Sequence
  Description of Artificial Sequence: Synthetic oligonucleotide
  Target: LAMA2; (-) strand; PAM type: NRG; PAM sequence: AGG
gtgagttcaggagctcagca

SEQ ID NO: 53882 - DNA, 20 bp, Artificial Sequence
  Description of Artificial Sequence: Synthetic oligonucleotide
  Target: LAMA2; (-) strand; PAM type: NRG; PAM sequence: AAG
tgtgagttcaggagctcagc

SEQ ID NO: 53883 - DNA, 20 bp, Artificial Sequence
  Description of Artificial Sequence: Synthetic oligonucleotide
  Target: LAMA2; (-) strand; PAM type: NRG; PAM sequence: CAG
ctgatgtgagttcaggagct

SEQ ID NO: 53884 - DNA, 20 bp, Artificial Sequence
  Description of Artificial Sequence: Synthetic oligonucleotide
  Target: LAMA2; (-) strand; PAM type: NRG; PAM sequence: GAG
ccctcctgatgtgagttcag

SEQ ID NO: 53885 - DNA, 20 bp, Artificial Sequence
  Description of Artificial Sequence: Synthetic oligonucleotide
  Target: LAMA2; (-) strand; PAM type: NRG; PAM sequence: AGG
acccctcctgatgtgagttc

SEQ ID NO: 53886 - DNA, 20 bp, Artificial Sequence
  Description of Artificial Sequence: Synthetic oligonucleotide
  Target: LAMA2; (-) strand; PAM type: NRG; PAM sequence: CAG
gacccctcctgatgtgagtt

SEQ ID NO: 53887 - DNA, 20 bp, Artificial Sequence
  Description of Artificial Sequence: Synthetic oligonucleotide
  Target: LAMA2; (-) strand; PAM type: NRG; PAM sequence: GAG
caaaggacccctcctgatgt

SEQ ID NO: 53888 - DNA, 20 bp, Artificial Sequence
  Description of Artificial Sequence: Synthetic oligonucleotide
  Target: LAMA2; (-) strand; PAM type: NRG; PAM sequence: AGG
tctttctatgaaaagaacaa

SEQ ID NO: 53889 - DNA, 20 bp, Artificial Sequence
  Description of Artificial Sequence: Synthetic oligonucleotide
  Target: LAMA2; (-) strand; PAM type: NRG; PAM sequence: AAG
ttctttctatgaaaagaaca

SEQ ID NO: 53890 - DNA, 20 bp, Artificial Sequence
  Description of Artificial Sequence: Synthetic oligonucleotide
  Target: LAMA2; (-) strand; PAM type: NRG; PAM sequence: AAG
acaggaattctttctatgaa

SEQ ID NO: 53891 - DNA, 20 bp, Artificial Sequence
  Description of Artificial Sequence: Synthetic oligonucleotide
  Target: LAMA2; (-) strand; PAM type: NRG; PAM sequence: AGG
cgatatccagtgcttccaac

SEQ ID NO: 53892 - DNA, 20 bp, Artificial Sequence
  Description of Artificial Sequence: Synthetic oligonucleotide
  Target: LAMA2; (-) strand; PAM type: NRG; PAM sequence: CAG
acgatatccagtgcttccaa

SEQ ID NO: 53893 - DNA, 20 bp, Artificial Sequence
  Description of Artificial Sequence: Synthetic oligonucleotide
  Target: LAMA2; (-) strand; PAM type: NRG; PAM sequence: CAG
attttgagaaatacgatatc

SEQ ID NO: 53894 - DNA, 20 bp, Artificial Sequence
  Description of Artificial Sequence: Synthetic oligonucleotide
  Target: LAMA2; (-) strand; PAM type: NRG; PAM sequence: GAG
tgaaggaaattccatatttt

SEQ ID NO: 53895 - DNA, 20 bp, Artificial Sequence
  Description of Artificial Sequence: Synthetic oligonucleotide
  Target: LAMA2; (-) strand; PAM type: NRG; PAM sequence: AGG
caaaggctagaaataaatga

SEQ ID NO: 53896 - DNA, 20 bp, Artificial Sequence
  Description of Artificial Sequence: Synthetic oligonucleotide
  Target: LAMA2; (-) strand; PAM type: NRG; PAM sequence: AAG
tcaaaggctagaaataaatg

SEQ ID NO: 53897 - DNA, 20 bp, Artificial Sequence
  Description of Artificial Sequence: Synthetic oligonucleotide
  Target: LAMA2; (-) strand; PAM type: NRG; PAM sequence: TAG
aatcacaaaacttcaaaggc

SEQ ID NO: 53898 - DNA, 20 bp, Artificial Sequence
  Description of Artificial Sequence: Synthetic oligonucleotide
  Target: LAMA2; (-) strand; PAM type: NRG; PAM sequence: AGG
tagaaatcacaaaacttcaa

SEQ ID NO: 53899 - DNA, 20 bp, Artificial Sequence
  Description of Artificial Sequence: Synthetic oligonucleotide
  Target: LAMA2; (-) strand; PAM type: NRG; PAM sequence: AAG
ttagaaatcacaaaacttca

SEQ ID NO: 53900 - DNA, 20 bp, Artificial Sequence
  Description of Artificial Sequence: Synthetic oligonucleotide
  Target: LAMA2; (-) strand; PAM type: NRG; PAM sequence: TAG
acaaaaccttttaaatgctt

SEQ ID NO: 53901 - DNA, 20 bp, Artificial Sequence
  Description of Artificial Sequence: Synthetic oligonucleotide
  Target: LAMA2; (-) strand; PAM type: NRG; PAM sequence: AGG
agagaaaagaatcacgtttt

SEQ ID NO: 53902 - DNA, 20 bp, Artificial Sequence
  Description of Artificial Sequence: Synthetic oligonucleotide
  Target: LAMA2; (-) strand; PAM type: NRG; PAM sequence: TAG
cagagaaaagaatcacgttt

SEQ ID NO: 53903 - DNA, 20 bp, Artificial Sequence
  Description of Artificial Sequence: Synthetic oligonucleotide
  Target: LAMA2; (-) strand; PAM type: NRG; PAM sequence: AAG
tatgagatgggcacagagaa

SEQ ID NO: 53904 - DNA, 20 bp, Artificial Sequence
  Description of Artificial Sequence: Synthetic oligonucleotide
  Target: LAMA2; (-) strand; PAM type: NRG; PAM sequence: GAG
aatggtatgagatgggcaca

SEQ ID NO: 53905 - DNA, 20 bp, Artificial Sequence
  Description of Artificial Sequence: Synthetic oligonucleotide
  Target: LAMA2; (-) strand; PAM type: NRG; PAM sequence: CAG
acaatggtatgagatgggca

SEQ ID NO: 53906 - DNA, 20 bp, Artificial Sequence
  Description of Artificial Sequence: Synthetic oligonucleotide
  Target: LAMA2; (-) strand; PAM type: NRG; PAM sequence: GGG
cacatacaatggtatgagat

SEQ ID NO: 53907 - DNA, 20 bp, Artificial Sequence
  Description of Artificial Sequence: Synthetic oligonucleotide
  Target: LAMA2; (-) strand; PAM type: NRG; PAM sequence: TGG
acacatacaatggtatgaga

SEQ ID NO: 53908 - DNA, 20 bp, Artificial Sequence
  Description of Artificial Sequence: Synthetic oligonucleotide
  Target: LAMA2; (-) strand; PAM type: NRG; PAM sequence: GAG
tgacacacatacaatggtat

SEQ ID NO: 53909 - DNA, 20 bp, Artificial Sequence
  Description of Artificial Sequence: Synthetic oligonucleotide
  Target: LAMA2; (-) strand; PAM type: NRG; PAM sequence: TGG
atcatatgacacacatacaa

SEQ ID NO: 53910 - DNA, 20 bp, Artificial Sequence
  Description of Artificial Sequence: Synthetic oligonucleotide
  Target: LAMA2; (-) strand; PAM type: NRG; PAM sequence: CAG
aacaaataagaaaaagaaac

SEQ ID NO: 53911 - DNA, 20 bp, Artificial Sequence
  Description of Artificial Sequence: Synthetic oligonucleotide
  Target: LAMA2; (-) strand; PAM type: NRG; PAM sequence: AAG
atctcccaacaaataagaaa

SEQ ID NO: 53912 - DNA, 20 bp, Artificial Sequence
  Description of Artificial Sequence: Synthetic oligonucleotide
  Target: LAMA2; (-) strand; PAM type: NRG; PAM sequence: AAG
ctggacatctcccaacaaat

SEQ ID NO: 53913 - DNA, 20 bp, Artificial Sequence
  Description of Artificial Sequence: Synthetic oligonucleotide
  Target: LAMA2; (-) strand; PAM type: NRG; PAM sequence: TGG
aggatagatccttgagtctc

SEQ ID NO: 53914 - DNA, 20 bp, Artificial Sequence
  Description of Artificial Sequence: Synthetic oligonucleotide
  Target: LAMA2; (-) strand; PAM type: NRG; PAM sequence: GAG
tggtcaaaggatagatcctt

SEQ ID NO: 53915 - DNA, 20 bp, Artificial Sequence
  Description of Artificial Sequence: Synthetic oligonucleotide
  Target: LAMA2; (-) strand; PAM type: NRG; PAM sequence: TAG
tgaaaaatttggtcaaagga

SEQ ID NO: 53916 - DNA, 20 bp, Artificial Sequence
  Description of Artificial Sequence: Synthetic oligonucleotide
  Target: LAMA2; (-) strand; PAM type: NRG; PAM sequence: AGG
agagtgaaaaatttggtcaa

SEQ ID NO: 53917 - DNA, 20 bp, Artificial Sequence
  Description of Artificial Sequence: Synthetic oligonucleotide
  Target: LAMA2; (-) strand; PAM type: NRG; PAM sequence: AAG
aagagtgaaaaatttggtca

SEQ ID NO: 53918 - DNA, 20 bp, Artificial Sequence
  Description of Artificial Sequence: Synthetic oligonucleotide
  Target: LAMA2; (-) strand; PAM type: NRG; PAM sequence: TGG
cccttgaagagtgaaaaatt

SEQ ID NO: 53919 - DNA, 20 bp, Artificial Sequence
  Description of Artificial Sequence: Synthetic oligonucleotide
  Target: LAMA2; (-) strand; PAM type: NRG; PAM sequence: GAG
agcagtatgaggcccttgaa

SEQ ID NO: 53920 - DNA, 20 bp, Artificial Sequence
  Description of Artificial Sequence: Synthetic oligonucleotide
  Target: LAMA2; (-) strand; PAM type: NRG; PAM sequence: AAG
agagcagtatgaggcccttg

SEQ ID NO: 53921 - DNA, 20 bp, Artificial Sequence
  Description of Artificial Sequence: Synthetic oligonucleotide
  Target: LAMA2; (-) strand; PAM type: NRG; PAM sequence: AGG
tctgaaatcagagcagtatg

SEQ ID NO: 53922 - DNA, 20 bp, Artificial Sequence
  Description of Artificial Sequence: Synthetic oligonucleotide
  Target: LAMA2; (-) strand; PAM type: NRG; PAM sequence: GAG
atctgaaatcagagcagtat

SEQ ID NO: 53923 - DNA, 20 bp, Artificial Sequence
  Description of Artificial Sequence: Synthetic oligonucleotide
  Target: LAMA2; (-) strand; PAM type: NRG; PAM sequence: CAG
ctatacatctgaaatcagag

SEQ ID NO: 53924 - DNA, 20 bp, Artificial Sequence
  Description of Artificial Sequence: Synthetic oligonucleotide
  Target: LAMA2; (-) strand; PAM type: NRG; PAM sequence: GAG
tatctatacatctgaaatca

SEQ ID NO: 53925 - DNA, 20 bp, Artificial Sequence
  Description of Artificial Sequence: Synthetic oligonucleotide
  Target: LAMA2; (-) strand; PAM type: NRG; PAM sequence: CAG
tatatctatacatctgaaat

SEQ ID NO: 53926 - DNA, 20 bp, Artificial Sequence
  Description of Artificial Sequence: Synthetic oligonucleotide
  Target: LAMA2; (-) strand; PAM type: NRG; PAM sequence: AAG
cagacccatcagtgtttgat

SEQ ID NO: 53927 - DNA, 20 bp, Artificial Sequence
  Description of Artificial Sequence: Synthetic oligonucleotide
  Target: LAMA2; (-) strand; PAM type: NRG; PAM sequence: CAG
ccactcatgttcagacccat

SEQ ID NO: 53928 - DNA, 20 bp, Artificial Sequence
  Description of Artificial Sequence: Synthetic oligonucleotide
  Target: LAMA2; (-) strand; PAM type: NRG; PAM sequence: CAG
atcttactaccactcatgtt

SEQ ID NO: 53929 - DNA, 20 bp, Artificial Sequence
  Description of Artificial Sequence: Synthetic oligonucleotide
  Target: LAMA2; (-) strand; PAM type: NRG; PAM sequence: TGG
cacaatttgtctacttaatc

SEQ ID NO: 53930 - DNA, 20 bp, Artificial Sequence
  Description of Artificial Sequence: Synthetic oligonucleotide
  Target: LAMA2; (-) strand; PAM type: NRG; PAM sequence: AAG
atttaaatagtgatactaaa

SEQ ID NO: 53931 - DNA, 20 bp, Artificial Sequence
  Description of Artificial Sequence: Synthetic oligonucleotide
  Target: LAMA2; (-) strand; PAM type: NRG; PAM sequence: TAG
caaaaatttagtcatttaaa

SEQ ID NO: 53932 - DNA, 20 bp, Artificial Sequence
  Description of Artificial Sequence: Synthetic oligonucleotide
  Target: LAMA2; (-) strand; PAM type: NRG; PAM sequence: TAG
acacataaacctcaaaaatt

SEQ ID NO: 53933 - DNA, 20 bp, Artificial Sequence
  Description of Artificial Sequence: Synthetic oligonucleotide
  Target: LAMA2; (-) strand; PAM type: NRG; PAM sequence: TGG
aaggagaggacatattgggc

SEQ ID NO: 53934 - DNA, 20 bp, Artificial Sequence
  Description of Artificial Sequence: Synthetic oligonucleotide
  Target: LAMA2; (-) strand; PAM type: NRG; PAM sequence: GGG
agataaggagaggacatatt

SEQ ID NO: 53935 - DNA, 20 bp, Artificial Sequence
  Description of Artificial Sequence: Synthetic oligonucleotide
  Target: LAMA2; (-) strand; PAM type: NRG; PAM sequence: TGG
tagataaggagaggacatat

SEQ ID NO: 53936 - DNA, 20 bp, Artificial Sequence
  Description of Artificial Sequence: Synthetic oligonucleotide
  Target: LAMA2; (-) strand; PAM type: NRG; PAM sequence: AGG
aaattatactagataaggag

SEQ ID NO: 53937 - DNA, 20 bp, Artificial Sequence
  Description of Artificial Sequence: Synthetic oligonucleotide
  Target: LAMA2; (-) strand; PAM type: NRG; PAM sequence: GAG
taaattatactagataagga

SEQ ID NO: 53938 - DNA, 20 bp, Artificial Sequence
  Description of Artificial Sequence: Synthetic oligonucleotide
  Target: LAMA2; (-) strand; PAM type: NRG; PAM sequence: GAG
gataaattatactagataag

SEQ ID NO: 53939 - DNA, 20 bp, Artificial Sequence
  Description of Artificial Sequence: Synthetic oligonucleotide
  Target: LAMA2; (-) strand; PAM type: NRG; PAM sequence: AGG
aagataaattatactagata

SEQ ID NO: 53940 - DNA, 20 bp, Artificial Sequence
  Description of Artificial Sequence: Synthetic oligonucleotide
  Target: LAMA2; (-) strand; PAM type: NRG; PAM sequence: AAG
aaagataaattatactagat

SEQ ID NO: 53941 - DNA, 20 bp, Artificial Sequence
  Description of Artificial Sequence: Synthetic oligonucleotide
  Target: LAMA2; (-) strand; PAM type: NRG; PAM sequence: TAG
tttttaaagataaattatac

SEQ ID NO: 53942 - DNA, 20 bp, Artificial Sequence
  Description of Artificial Sequence: Synthetic oligonucleotide
  Target: LAMA2; (-) strand; PAM type: NRG; PAM sequence: AAG
ccaagccagtctaattttta

SEQ ID NO: 53943 - DNA, 20 bp, Artificial Sequence
  Description of Artificial Sequence: Synthetic oligonucleotide
  Target: LAMA2; (-) strand; PAM type: NRG; PAM sequence: CAG
aaatctgacatatgccaagc

SEQ ID NO: 53944 - DNA, 20 bp, Artificial Sequence
  Description of Artificial Sequence: Synthetic oligonucleotide
  Target: LAMA2; (-) strand; PAM type: NRG; PAM sequence: AAG
tacaaaatctgacatatgcc

SEQ ID NO: 53945 - DNA, 20 bp, Artificial Sequence
  Description of Artificial Sequence: Synthetic oligonucleotide
  Target: LAMA2; (-) strand; PAM type: NRG; PAM sequence: AAG
ctaacaaagaaatatataaa

SEQ ID NO: 53946 - DNA, 20 bp, Artificial Sequence
  Description of Artificial Sequence: Synthetic oligonucleotide
  Target: LAMA2; (-) strand; PAM type: NRG; PAM sequence: AAG
acattgaacacctcctaaca

SEQ ID NO: 53947 - DNA, 20 bp, Artificial Sequence
  Description of Artificial Sequence: Synthetic oligonucleotide
  Target: LAMA2; (-) strand; PAM type: NRG; PAM sequence: AAG
ggaccaggacatggattcca

SEQ ID NO: 53948 - DNA, 20 bp, Artificial Sequence
  Description of Artificial Sequence: Synthetic oligonucleotide
  Target: LAMA2; (-) strand; PAM type: NRG; PAM sequence: TGG
tattcagcaggaccaggaca

SEQ ID NO: 53949 - DNA, 20 bp, Artificial Sequence
  Description of Artificial Sequence: Synthetic oligonucleotide
  Target: LAMA2; (-) strand; PAM type: NRG; PAM sequence: AGG
acatgttattcagcaggacc

SEQ ID NO: 53950 - DNA, 20 bp, Artificial Sequence
  Description of Artificial Sequence: Synthetic oligonucleotide
  Target: LAMA2; (-) strand; PAM type: NRG; PAM sequence: CAG
gacatgttattcagcaggac

SEQ ID NO: 53951 - DNA, 20 bp, Artificial Sequence
  Description of Artificial Sequence: Synthetic oligonucleotide
  Target: LAMA2; (-) strand; PAM type: NRG; PAM sequence: AGG
gtgaggacatgttattcagc

SEQ ID NO: 53952 - DNA, 20 bp, Artificial Sequence
  Description of Artificial Sequence: Synthetic oligonucleotide
  Target: LAMA2; (-) strand; PAM type: NRG; PAM sequence: CAG
ggtgaggacatgttattcag

SEQ ID NO: 53953 - DNA, 20 bp, Artificial Sequence
  Description of Artificial Sequence: Synthetic oligonucleotide
  Target: LAMA2; (-) strand; PAM type: NRG; PAM sequence: CAG
gagggtgaggacatgttatt

SEQ ID NO: 53954 - DNA, 20 bp, Artificial Sequence
  Description of Artificial Sequence: Synthetic oligonucleotide
  Target: LAMA2; (-) strand; PAM type: NRG; PAM sequence: AGG
aaaaaaatggaaggagggtg

SEQ ID NO: 53955 - DNA, 20 bp, Artificial Sequence
  Description of Artificial Sequence: Synthetic oligonucleotide
  Target: LAMA2; (-) strand; PAM type: NRG; PAM sequence: GAG
aaaaaaaatggaaggagggt

SEQ ID NO: 53956 - DNA, 20 bp, Artificial Sequence
  Description of Artificial Sequence: Synthetic oligonucleotide
  Target: LAMA2; (-) strand; PAM type: NRG; PAM sequence: GGG
aaaaaaaaaaaatggaagga

SEQ ID NO: 53957 - DNA, 20 bp, Artificial Sequence
  Description of Artificial Sequence: Synthetic oligonucleotide
  Target: LAMA2; (-) strand; PAM type: NRG; PAM sequence: AGG
aaaaaaaaaaaaatggaagg

SEQ ID NO: 53958 - DNA, 20 bp, Artificial Sequence
  Description of Artificial Sequence: Synthetic oligonucleotide
  Target: LAMA2; (-) strand; PAM type: NRG; PAM sequence: GAG
gaaaaaaaaaaaaatggaag

SEQ ID NO: 53959 - DNA, 20 bp, Artificial Sequence
  Description of Artificial Sequence: Synthetic oligonucleotide
  Target: LAMA2; (-) strand; PAM type: NRG; PAM sequence: AGG
cagaaaaaaaaaaaaatgga

SEQ ID NO: 53960 - DNA, 20 bp, Artificial Sequence
  Description of Artificial Sequence: Synthetic oligonucleotide
  Target: LAMA2; (-) strand; PAM type: NRG; PAM sequence: AAG
gcagaaaaaaaaaaaaatgg

SEQ ID NO: 53961 - DNA, 20 bp, Artificial Sequence
  Description of Artificial Sequence: Synthetic oligonucleotide
  Target: LAMA2; (-) strand; PAM type: NRG; PAM sequence: TGG
atggcagaaaaaaaaaaaaa

SEQ ID NO: 53962 - DNA, 20 bp, Artificial Sequence
  Description of Artificial Sequence: Synthetic oligonucleotide
  Target: LAMA2; (-) strand; PAM type: NRG; PAM sequence: CAG
tgttactggaatgtgtatgg

SEQ ID NO: 53963 - DNA, 20 bp, Artificial Sequence
  Description of Artificial Sequence: Synthetic oligonucleotide
  Target: LAMA2; (-) strand; PAM type: NRG; PAM sequence: TGG
cagtgttactggaatgtgta

SEQ ID NO: 53964 - DNA, 20 bp, Artificial Sequence
  Description of Artificial Sequence: Synthetic oligonucleotide
  Target: LAMA2; (-) strand; PAM type: NRG; PAM sequence: TGG
attaactctttcagtgttac

SEQ ID NO: 53965 - DNA, 20 bp, Artificial Sequence
  Description of Artificial Sequence: Synthetic oligonucleotide
  Target: LAMA2; (-) strand; PAM type: NRG; PAM sequence: CAG
gacacatcaattaactcttt

SEQ ID NO: 53966 - DNA, 20 bp, Artificial Sequence
  Description of Artificial Sequence: Synthetic oligonucleotide
  Target: LAMA2; (-) strand; PAM type: NRG; PAM sequence: GGG
tttacaaaagcaataaagat

SEQ ID NO: 53967 - DNA, 20 bp, Artificial Sequence
  Description of Artificial Sequence: Synthetic oligonucleotide
  Target: LAMA2; (-) strand; PAM type: NRG; PAM sequence: TGG
atttacaaaagcaataaaga

SEQ ID NO: 53968 - DNA, 20 bp, Artificial Sequence
  Description of Artificial Sequence: Synthetic oligonucleotide
  Target: LAMA2; (-) strand; PAM type: NRG; PAM sequence: AAG
agctatttacaaaagcaata

SEQ ID NO: 53969 - DNA, 20 bp, Artificial Sequence
  Description of Artificial Sequence: Synthetic oligonucleotide
  Target: LAMA2; (-) strand; PAM type: NRG; PAM sequence: AAG
gtatctatagctatttacaa

SEQ ID NO: 53970 - DNA, 20 bp, Artificial Sequence
  Description of Artificial Sequence: Synthetic oligonucleotide
  Target: LAMA2; (-) strand; PAM type: NRG; PAM sequence: TAG
ctacatataaagtgtatcta

SEQ ID NO: 53971 - DNA, 20 bp, Artificial Sequence
  Description of Artificial Sequence: Synthetic oligonucleotide
  Target: LAMA2; (-) strand; PAM type: NRG; PAM sequence: AAG
cataccattatctacatata

SEQ ID NO: 53972 - DNA, 20 bp, Artificial Sequence
  Description of Artificial Sequence: Synthetic oligonucleotide
  Target: LAMA2; (-) strand; PAM type: NRG; PAM sequence: CAG
gaattgaaaagctatttttg

SEQ ID NO: 53973 - DNA, 20 bp, Artificial Sequence
  Description of Artificial Sequence: Synthetic oligonucleotide
  Target: LAMA2; (-) strand; PAM type: NRG; PAM sequence: AAG
agagaataaagagaattgaa

SEQ ID NO: 53974 - DNA, 20 bp, Artificial Sequence
  Description of Artificial Sequence: Synthetic oligonucleotide
  Target: LAMA2; (-) strand; PAM type: NRG; PAM sequence: GAG
agcttgagaaagagaataaa

SEQ ID NO: 53975 - DNA, 20 bp, Artificial Sequence
  Description of Artificial Sequence: Synthetic oligonucleotide
  Target: LAMA2; (-) strand; PAM type: NRG; PAM sequence: AAG
aaagcttgagaaagagaata

SEQ ID NO: 53976 - DNA, 20 bp, Artificial Sequence
  Description of Artificial Sequence: Synthetic oligonucleotide
  Target: LAMA2; (-) strand; PAM type: NRG; PAM sequence: GAG
ttttatcaaagcttgagaaa

SEQ ID NO: 53977 - DNA, 20 bp, Artificial Sequence
  Description of Artificial Sequence: Synthetic oligonucleotide
  Target: LAMA2; (-) strand; PAM type: NRG; PAM sequence: AAG
tattttatcaaagcttgaga

SEQ ID NO: 53978 - DNA, 20 bp, Artificial Sequence
  Description of Artificial Sequence: Synthetic oligonucleotide
  Target: LAMA2; (-) strand; PAM type: NRG; PAM sequence: GAG
aaaatattttatcaaagctt

SEQ ID NO: 53979 - DNA, 20 bp, Artificial Sequence
  Description of Artificial Sequence: Synthetic oligonucleotide
  Target: LAMA2; (-) strand; PAM type: NRG; PAM sequence: AAG
gaatgaaaaatattttatca

SEQ ID NO: 53980 - DNA, 20 bp, Artificial Sequence
  Description of Artificial Sequence: Synthetic oligonucleotide
  Target: LAMA2; (-) strand; PAM type: NRG; PAM sequence: AAG
tggagaaaatcagtccctaa

SEQ ID NO: 53981 - DNA, 20 bp, Artificial Sequence
  Description of Artificial Sequence: Synthetic oligonucleotide
  Target: LAMA2; (-) strand; PAM type: NRG; PAM sequence: CAG
aggaactctatggagaaaat

SEQ ID NO: 53982 - DNA, 20 bp, Artificial Sequence
  Description of Artificial Sequence: Synthetic oligonucleotide
  Target: LAMA2; (-) strand; PAM type: NRG; PAM sequence: GAG
accacatcaggaactctatg

SEQ ID NO: 53983 - DNA, 20 bp, Artificial Sequence
  Description of Artificial Sequence: Synthetic oligonucleotide
  Target: LAMA2; (-) strand; PAM type: NRG; PAM sequence: TGG
gcaccacatcaggaactcta

SEQ ID NO: 53984 - DNA, 20 bp, Artificial Sequence
  Description of Artificial Sequence: Synthetic oligonucleotide
  Target: LAMA2; (-) strand; PAM type: NRG; PAM sequence: AGG
cactccagtagcaccacatc

SEQ ID NO: 53985 - DNA, 20 bp, Artificial Sequence
  Description of Artificial Sequence: Synthetic oligonucleotide
  Target: LAMA2; (-) strand; PAM type: NRG; PAM sequence: CAG
tcactccagtagcaccacat

SEQ ID NO: 53986 - DNA, 20 bp, Artificial Sequence
  Description of Artificial Sequence: Synthetic oligonucleotide
  Target: LAMA2; (-) strand; PAM type: NRG; PAM sequence: TAG
ttttctcagcatcactccag

SEQ ID NO: 53987 - DNA, 20 bp, Artificial Sequence
  Description of Artificial Sequence: Synthetic oligonucleotide
  Target: LAMA2; (-) strand; PAM type: NRG; PAM sequence: CAG
atgttttctcagcatcactc

SEQ ID NO: 53988 - DNA, 20 bp, Artificial Sequence
  Description of Artificial Sequence: Synthetic oligonucleotide
  Target: LAMA2; (-) strand; PAM type: NRG; PAM sequence: CAG
catttagaataatgttttct

SEQ ID NO: 53989 - DNA, 20 bp, Artificial Sequence
  Description of Artificial Sequence: Synthetic oligonucleotide
  Target: LAMA2; (-) strand; PAM type: NRG; PAM sequence: TAG
aaatgtttctaaaaaacatt

SEQ ID NO: 53990 - DNA, 20 bp, Artificial Sequence
  Description of Artificial Sequence: Synthetic oligonucleotide
  Target: LAMA2; (-) strand; PAM type: NRG; PAM sequence: GGG
aagataaaatttcagattct

SEQ ID NO: 53991 - DNA, 20 bp, Artificial Sequence
  Description of Artificial Sequence: Synthetic oligonucleotide
  Target: LAMA2; (-) strand; PAM type: NRG; PAM sequence: TGG
aaagataaaatttcagattc

SEQ ID NO: 53992 - DNA, 20 bp, Artificial Sequence
  Description of Artificial Sequence: Synthetic oligonucleotide
  Target: LAMA2; (-) strand; PAM type: NRG; PAM sequence: CAG
aataaataaagataaaattt

SEQ ID NO: 53993 - DNA, 20 bp, Artificial Sequence
  Description of Artificial Sequence: Synthetic oligonucleotide
  Target: LAMA2; (-) strand; PAM type: NRG; PAM sequence: AAG
tccaaaggaataaataaata

SEQ ID NO: 53994 - DNA, 20 bp, Artificial Sequence
  Description of Artificial Sequence: Synthetic oligonucleotide
  Target: LAMA2; (-) strand; PAM type: NRG; PAM sequence: AGG
gagggcaatgttttatccaa

SEQ ID NO: 53995 - DNA, 20 bp, Artificial Sequence
  Description of Artificial Sequence: Synthetic oligonucleotide
  Target: LAMA2; (-) strand; PAM type: NRG; PAM sequence: AAG
tgagggcaatgttttatcca

SEQ ID NO: 53996 - DNA, 20 bp, Artificial Sequence
  Description of Artificial Sequence: Synthetic oligonucleotide
  Target: LAMA2; (-) strand; PAM type: NRG; PAM sequence: GGG
tagaaaagaatagcctgtga

SEQ ID NO: 53997 - DNA, 20 bp, Artificial Sequence
  Description of Artificial Sequence: Synthetic oligonucleotide
  Target: LAMA2; (-) strand; PAM type: NRG; PAM sequence: AGG
ttagaaaagaatagcctgtg

SEQ ID NO: 53998 - DNA, 20 bp, Artificial Sequence
  Description of Artificial Sequence: Synthetic oligonucleotide
  Target: LAMA2; (-) strand; PAM type: NRG; PAM sequence: GAG
tttagaaaagaatagcctgt

SEQ ID NO: 53999 - DNA, 20 bp, Artificial Sequence
  Description of Artificial Sequence: Synthetic oligonucleotide
  Target: LAMA2; (-) strand; PAM type: NRG; PAM sequence: TAG
gcaaacattttagaaaagaa

SEQ ID NO: 54000 - DNA, 20 bp, Artificial Sequence
  Description of Artificial Sequence: Synthetic oligonucleotide
  Target: LAMA2; (-) strand; PAM type: NRG; PAM sequence: AAG
gcacagcaaacattttagaa

SEQ ID NO: 54001 - DNA, 20 bp, Artificial Sequence
  Description of Artificial Sequence: Synthetic oligonucleotide
  Target: LAMA2; (-) strand; PAM type: NRG; PAM sequence: TAG
taacagcacagcaaacattt

SEQ ID NO: 54002 - DNA, 20 bp, Artificial Sequence
  Description of Artificial Sequence: Synthetic oligonucleotide
  Target: LAMA2; (-) strand; PAM type: NRG; PAM sequence: CAG
taaagtgaataataacagca

SEQ ID NO: 54003 - DNA, 20 bp, Artificial Sequence
  Description of Artificial Sequence: Synthetic oligonucleotide
  Target: LAMA2; (-) strand; PAM type: NRG; PAM sequence: CAG
tccattaaagtgaataataa

SEQ ID NO: 54004 - DNA, 20 bp, Artificial Sequence
  Description of Artificial Sequence: Synthetic oligonucleotide
  Target: LAMA2; (-) strand; PAM type: NRG; PAM sequence: AAG
agataaattaatttccatta

SEQ ID NO: 54005 - DNA, 20 bp, Artificial Sequence
  Description of Artificial Sequence: Synthetic oligonucleotide
  Target: LAMA2; (-) strand; PAM type: NRG; PAM sequence: CAG
actgtcaaaaaggaggtcag

SEQ ID NO: 54006 - DNA, 20 bp, Artificial Sequence
  Description of Artificial Sequence: Synthetic oligonucleotide
  Target: LAMA2; (-) strand; PAM type: NRG; PAM sequence: CAG
taaactgtcaaaaaggaggt

SEQ ID NO: 54007 - DNA, 20 bp, Artificial Sequence
  Description of Artificial Sequence: Synthetic oligonucleotide
  Target: LAMA2; (-) strand; PAM type: NRG; PAM sequence: AGG
gtcctaaactgtcaaaaagg

SEQ ID NO: 54008 - DNA, 20 bp, Artificial Sequence
  Description of Artificial Sequence: Synthetic oligonucleotide
  Target: LAMA2; (-) strand; PAM type: NRG; PAM sequence: GAG
agtcctaaactgtcaaaaag

SEQ ID NO: 54009 - DNA, 20 bp, Artificial Sequence
  Description of Artificial Sequence: Synthetic oligonucleotide
  Target: LAMA2; (-) strand; PAM type: NRG; PAM sequence: AGG
acagtcctaaactgtcaaaa

SEQ ID NO: 54010 - DNA, 20 bp, Artificial Sequence
  Description of Artificial Sequence: Synthetic oligonucleotide
  Target: LAMA2; (-) strand; PAM type: NRG; PAM sequence: AAG
tacagtcctaaactgtcaaa

SEQ ID NO: 54011 - DNA, 20 bp, Artificial Sequence
  Description of Artificial Sequence: Synthetic oligonucleotide
  Target: LAMA2; (-) strand; PAM type: NRG; PAM sequence: CAG
gcagatctgaaaacttaata

SEQ ID NO: 54012 - DNA, 20 bp, Artificial Sequence
  Description of Artificial Sequence: Synthetic oligonucleotide
  Target: LAMA2; (-) strand; PAM type: NRG; PAM sequence: CAG
tttcactatttctcaccgag

SEQ ID NO: 54013 - DNA, 20 bp, Artificial Sequence
  Description of Artificial Sequence: Synthetic oligonucleotide
  Target: LAMA2; (-) strand; PAM type: NRG; PAM sequence: GAG
ttatttcactatttctcacc

SEQ ID NO: 54014 - DNA, 20 bp, Artificial Sequence
  Description of Artificial Sequence: Synthetic oligonucleotide
  Target: LAMA2; (-) strand; PAM type: NRG; PAM sequence: TAG
ggtattccatagatgttaac

SEQ ID NO: 54015 - DNA, 20 bp, Artificial Sequence
  Description of Artificial Sequence: Synthetic oligonucleotide
  Target: LAMA2; (-) strand; PAM type: NRG; PAM sequence: TAG
gcccatagttaggtattcca

SEQ ID NO: 54016 - DNA, 20 bp, Artificial Sequence
  Description of Artificial Sequence: Synthetic oligonucleotide
  Target: LAMA2; (-) strand; PAM type: NRG; PAM sequence: AGG
agcagtgctggcccatagtt

SEQ ID NO: 54017 - DNA, 20 bp, Artificial Sequence
  Description of Artificial Sequence: Synthetic oligonucleotide
  Target: LAMA2; (-) strand; PAM type: NRG; PAM sequence: TAG
cagcagtgctggcccatagt

SEQ ID NO: 54018 - DNA, 20 bp, Artificial Sequence
  Description of Artificial Sequence: Synthetic oligonucleotide
  Target: LAMA2; (-) strand; PAM type: NRG; PAM sequence: TAG
cttacagcagtgctggccca

SEQ ID NO: 54019 - DNA, 20 bp, Artificial Sequence
  Description of Artificial Sequence: Synthetic oligonucleotide
  Target: LAMA2; (-) strand; PAM type: NRG; PAM sequence: TGG
agacatgcttacagcagtgc

SEQ ID NO: 54020 - DNA, 20 bp, Artificial Sequence
  Description of Artificial Sequence: Synthetic oligonucleotide
  Target: LAMA2; (-) strand; PAM type: NRG; PAM sequence: CAG
ggcatgagacatgcttacag

SEQ ID NO: 54021 - DNA, 20 bp, Artificial Sequence
  Description of Artificial Sequence: Synthetic oligonucleotide
  Target: LAMA2; (-) strand; PAM type: NRG; PAM sequence: CAG
taaggcatgagacatgctta

SEQ ID NO: 54022 - DNA, 20 bp, Artificial Sequence
  Description of Artificial Sequence: Synthetic oligonucleotide
  Target: LAMA2; (-) strand; PAM type: NRG; PAM sequence: GAG
cctttgataaattaaggcat

SEQ ID NO: 54023 - DNA, 20 bp, Artificial Sequence
  Description of Artificial Sequence: Synthetic oligonucleotide
  Target: LAMA2; (-) strand; PAM type: NRG; PAM sequence: AGG
catctacctttgataaatta

SEQ ID NO: 54024 - DNA, 20 bp, Artificial Sequence
  Description of Artificial Sequence: Synthetic oligonucleotide
  Target: LAMA2; (-) strand; PAM type: NRG; PAM sequence: AAG
gcatctacctttgataaatt

SEQ ID NO: 54025 - DNA, 20 bp, Artificial Sequence
  Description of Artificial Sequence: Synthetic oligonucleotide
  Target: LAMA2; (-) strand; PAM type: NRG; PAM sequence: TAG
cttctgttaaatgagattaa

SEQ ID NO: 54026 - DNA, 20 bp, Artificial Sequence
  Description of Artificial Sequence: Synthetic oligonucleotide
  Target: LAMA2; (-) strand; PAM type: NRG; PAM sequence: GAG
agttttctcttctgttaaat

SEQ ID NO: 54027 - DNA, 20 bp, Artificial Sequence
  Description of Artificial Sequence: Synthetic oligonucleotide
  Target: LAMA2; (-) strand; PAM type: NRG; PAM sequence: CAG
ttacttaacattttgcattt

SEQ ID NO: 54028 - DNA, 20 bp, Artificial Sequence
  Description of Artificial Sequence: Synthetic oligonucleotide
  Target: LAMA2; (-) strand; PAM type: NRG; PAM sequence: AAG
ctggttgttttacttttgga

SEQ ID NO: 54029 - DNA, 20 bp, Artificial Sequence
  Description of Artificial Sequence: Synthetic oligonucleotide
  Target: LAMA2; (-) strand; PAM type: NRG; PAM sequence: TGG
ttcactggttgttttacttt

SEQ ID NO: 54030 - DNA, 20 bp, Artificial Sequence
  Description of Artificial Sequence: Synthetic oligonucleotide
  Target: LAMA2; (-) strand; PAM type: NRG; PAM sequence: TGG
cttggtctctaccagttcac

SEQ ID NO: 54031 - DNA, 20 bp, Artificial Sequence
  Description of Artificial Sequence: Synthetic oligonucleotide
  Target: LAMA2; (-) strand; PAM type: NRG; PAM sequence: CAG
gtccaaatcttggtctctac

SEQ ID NO: 54032 - DNA, 20 bp, Artificial Sequence
  Description of Artificial Sequence: Synthetic oligonucleotide
  Target: LAMA2; (-) strand; PAM type: NRG; PAM sequence: TGG
aactacctaggtccaaatct

SEQ ID NO: 54033 - DNA, 20 bp, Artificial Sequence
  Description of Artificial Sequence: Synthetic oligonucleotide
  Target: LAMA2; (-) strand; PAM type: NRG; PAM sequence: AGG
gccacaaagtagaactacct

SEQ ID NO: 54034 - DNA, 20 bp, Artificial Sequence
  Description of Artificial Sequence: Synthetic oligonucleotide
  Target: LAMA2; (-) strand; PAM type: NRG; PAM sequence: TAG
ggccacaaagtagaactacc

SEQ ID NO: 54035 - DNA, 20 bp, Artificial Sequence
  Description of Artificial Sequence: Synthetic oligonucleotide
  Target: LAMA2; (-) strand; PAM type: NRG; PAM sequence: TAG
taggtgaatgggccacaaag

SEQ ID NO: 54036 - DNA, 20 bp, Artificial Sequence
  Description of Artificial Sequence: Synthetic oligonucleotide
  Target: LAMA2; (-) strand; PAM type: NRG; PAM sequence: AAG
gggtaggtgaatgggccaca

SEQ ID NO: 54037 - DNA, 20 bp, Artificial Sequence
  Description of Artificial Sequence: Synthetic oligonucleotide
  Target: LAMA2; (-) strand; PAM type: NRG; PAM sequence: GGG
gctgccatgggtaggtgaat

SEQ ID NO: 54038 - DNA, 20 bp, Artificial Sequence
  Description of Artificial Sequence: Synthetic oligonucleotide
  Target: LAMA2; (-) strand; PAM type: NRG; PAM sequence: TGG
cgctgccatgggtaggtgaa

SEQ ID NO: 54039 - DNA, 20 bp, Artificial Sequence
  Description of Artificial Sequence: Synthetic oligonucleotide
  Target: LAMA2; (-) strand; PAM type: NRG; PAM sequence: AGG
ggtcacacgctgccatgggt

SEQ ID NO: 54040 - DNA, 20 bp, Artificial Sequence
  Description of Artificial Sequence: Synthetic oligonucleotide
  Target: LAMA2; (-) strand; PAM type: NRG; PAM sequence: TAG
aggtcacacgctgccatggg

SEQ ID NO: 54041 - DNA, 20 bp, Artificial Sequence
  Description of Artificial Sequence: Synthetic oligonucleotide
  Target: LAMA2; (-) strand; PAM type: NRG; PAM sequence: GGG
ttgaggtcacacgctgccat

SEQ ID NO: 54042 - DNA, 20 bp, Artificial Sequence
  Description of Artificial Sequence: Synthetic oligonucleotide
  Target: LAMA2; (-) strand; PAM type: NRG; PAM sequence: TGG
gttgaggtcacacgctgcca

SEQ ID NO: 54043 - DNA, 20 bp, Artificial Sequence
  Description of Artificial Sequence: Synthetic oligonucleotide
  Target: LAMA2; (-) strand; PAM type: NRG; PAM sequence: AGG
tttgtactctttcagggttg

SEQ ID NO: 54044 - DNA, 20 bp, Artificial Sequence
  Description of Artificial Sequence: Synthetic oligonucleotide
  Target: LAMA2; (-) strand; PAM type: NRG; PAM sequence: GAG
atttgtactctttcagggtt

SEQ ID NO: 54045 - DNA, 20 bp, Artificial Sequence
  Description of Artificial Sequence: Synthetic oligonucleotide
  Target: LAMA2; (-) strand; PAM type: NRG; PAM sequence: GGG
tactaatttgtactctttca

SEQ ID NO: 54046 - DNA, 20 bp, Artificial Sequence
  Description of Artificial Sequence: Synthetic oligonucleotide
  Target: LAMA2; (-) strand; PAM type: NRG; PAM sequence: AGG
ttactaatttgtactctttc

SEQ ID NO: 54047 - DNA, 20 bp, Artificial Sequence
  Description of Artificial Sequence: Synthetic oligonucleotide
  Target: LAMA2; (-) strand; PAM type: NRG; PAM sequence: CAG
cttactaatttgtactcttt

SEQ ID NO: 54048 - DNA, 20 bp, Artificial Sequence
  Description of Artificial Sequence: Synthetic oligonucleotide
  Target: LAMA2; (-) strand; PAM type: NRG; PAM sequence: AAG
ctgaagtatgtcactaaagg

SEQ ID NO: 54049 - DNA, 20 bp, Artificial Sequence
  Description of Artificial Sequence: Synthetic oligonucleotide
  Target: LAMA2; (-) strand; PAM type: NRG; PAM sequence: AGG
cctctgaagtatgtcactaa

SEQ ID NO: 54050 - DNA, 20 bp, Artificial Sequence
  Description of Artificial Sequence: Synthetic oligonucleotide
  Target: LAMA2; (-) strand; PAM type: NRG; PAM sequence: AAG
acctctgaagtatgtcacta

SEQ ID NO: 54051 - DNA, 20 bp, Artificial Sequence
  Description of Artificial Sequence: Synthetic oligonucleotide
  Target: LAMA2; (-) strand; PAM type: NRG; PAM sequence: AAG
gggaaataaaatcacctctg

SEQ ID NO: 54052 - DNA, 20 bp, Artificial Sequence
  Description of Artificial Sequence: Synthetic oligonucleotide
  Target: LAMA2; (-) strand; PAM type: NRG; PAM sequence: GGG
ataggaaatctcacaaaaaa

SEQ ID NO: 54053 - DNA, 20 bp, Artificial Sequence
  Description of Artificial Sequence: Synthetic oligonucleotide
  Target: LAMA2; (-) strand; PAM type: NRG; PAM sequence: AGG
cataggaaatctcacaaaaa

SEQ ID NO: 54054 - DNA, 20 bp, Artificial Sequence
  Description of Artificial Sequence: Synthetic oligonucleotide
  Target: LAMA2; (-) strand; PAM type: NRG; PAM sequence: AAG
tcataggaaatctcacaaaa

SEQ ID NO: 54055 - DNA, 20 bp, Artificial Sequence
  Description of Artificial Sequence: Synthetic oligonucleotide
  Target: LAMA2; (-) strand; PAM type: NRG; PAM sequence: AGG
taaattgttaatcttttcat

SEQ ID NO: 54056 - DNA, 20 bp, Artificial Sequence
  Description of Artificial Sequence: Synthetic oligonucleotide
  Target: LAMA2; (-) strand; PAM type: NRG; PAM sequence: TAG
ttaaattgttaatcttttca

SEQ ID NO: 54057 - DNA, 20 bp, Artificial Sequence
  Description of Artificial Sequence: Synthetic oligonucleotide
  Target: LAMA2; (-) strand; PAM type: NRG; PAM sequence: TGG
gacatagtgctgaatctaaa

SEQ ID NO: 54058 - DNA, 20 bp, Artificial Sequence
  Description of Artificial Sequence: Synthetic oligonucleotide
  Target: LAMA2; (-) strand; PAM type: NRG; PAM sequence: TAG
tcttctgatatatcaggaca

SEQ ID NO: 54059 - DNA, 20 bp, Artificial Sequence
  Description of Artificial Sequence: Synthetic oligonucleotide
  Target: LAMA2; (-) strand; PAM type: NRG; PAM sequence: AGG
atagactcttctgatatatc

SEQ ID NO: 54060 - DNA, 20 bp, Artificial Sequence
  Description of Artificial Sequence: Synthetic oligonucleotide
  Target: LAMA2; (-) strand; PAM type: NRG; PAM sequence: CAG
catagactcttctgatatat

SEQ ID NO: 54061 - DNA, 20 bp, Artificial Sequence
  Description of Artificial Sequence: Synthetic oligonucleotide
  Target: LAMA2; (-) strand; PAM type: NRG; PAM sequence: TAG
ctttaaaaaaaaaaagttca

SEQ ID NO: 54062 - DNA, 20 bp, Artificial Sequence
  Description of Artificial Sequence: Synthetic oligonucleotide
  Target: LAMA2; (-) strand; PAM type: NRG; PAM sequence: AAG
aaggagtctttaaaaaaaaa

SEQ ID NO: 54063 - DNA, 20 bp, Artificial Sequence
  Description of Artificial Sequence: Synthetic oligonucleotide
  Target: LAMA2; (-) strand; PAM type: NRG; PAM sequence: GAG
cattcattgctatctccaag

SEQ ID NO: 54064 - DNA, 20 bp, Artificial Sequence
  Description of Artificial Sequence: Synthetic oligonucleotide
  Target: LAMA2; (-) strand; PAM type: NRG; PAM sequence: AGG
ttcattcattgctatctcca

SEQ ID NO: 54065 - DNA, 20 bp, Artificial Sequence
  Description of Artificial Sequence: Synthetic oligonucleotide
  Target: LAMA2; (-) strand; PAM type: NRG; PAM sequence: AAG
attcattcattgctatctcc

SEQ ID NO: 54066 - DNA, 20 bp, Artificial Sequence
  Description of Artificial Sequence: Synthetic oligonucleotide
  Target: LAMA2; (-) strand; PAM type: NRG; PAM sequence: AAG
caggcatgcctgacacagtt

SEQ ID NO: 54067 - DNA, 20 bp, Artificial Sequence
  Description of Artificial Sequence: Synthetic oligonucleotide
  Target: LAMA2; (-) strand; PAM type: NRG; PAM sequence: CAG
aaattcaggcatgcctgaca

SEQ ID NO: 54068 - DNA, 20 bp, Artificial Sequence
  Description of Artificial Sequence: Synthetic oligonucleotide
  Target: LAMA2; (-) strand; PAM type: NRG; PAM sequence: AGG
ttatatgactcaaaaaattc

SEQ ID NO: 54069 - DNA, 20 bp, Artificial Sequence
  Description of Artificial Sequence: Synthetic oligonucleotide
  Target: LAMA2; (-) strand; PAM type: NRG; PAM sequence: CAG
cttatatgactcaaaaaatt

SEQ ID NO: 54070 - DNA, 20 bp, Artificial Sequence
  Description of Artificial Sequence: Synthetic oligonucleotide
  Target: LAMA2; (-) strand; PAM type: NRG; PAM sequence: GAG
aattaagttaacaattctag

SEQ ID NO: 54071 - DNA, 20 bp, Artificial Sequence
  Description of Artificial Sequence: Synthetic oligonucleotide
  Target: LAMA2; (-) strand; PAM type: NRG; PAM sequence: AGG
ccaattaagttaacaattct

SEQ ID NO: 54072 - DNA, 20 bp, Artificial Sequence
  Description of Artificial Sequence: Synthetic oligonucleotide
  Target: LAMA2; (-) strand; PAM type: NRG; PAM sequence: TAG
accaattaagttaacaattc

SEQ ID NO: 54073 - DNA, 20 bp, Artificial Sequence
  Description of Artificial Sequence: Synthetic oligonucleotide
  Target: LAMA2; (-) strand; PAM type: NRG; PAM sequence: AAG
aaagcacattcttaccaatt

SEQ ID NO: 54074 - DNA, 20 bp, Artificial Sequence
  Description of Artificial Sequence: Synthetic oligonucleotide
  Target: LAMA2; (-) strand; PAM type: NRG; PAM sequence: AAG
tacaacaacaaagagaaaaa

SEQ ID NO: 54075 - DNA, 20 bp, Artificial Sequence
  Description of Artificial Sequence: Synthetic oligonucleotide
  Target: LAMA2; (-) strand; PAM type: NRG; PAM sequence: GAG
acacttcatacaacaacaaa

SEQ ID NO: 54076 - DNA, 20 bp, Artificial Sequence
  Description of Artificial Sequence: Synthetic oligonucleotide
  Target: LAMA2; (-) strand; PAM type: NRG; PAM sequence: AAG
taacacttcatacaacaaca

SEQ ID NO: 54077 - DNA, 20 bp, Artificial Sequence
  Description of Artificial Sequence: Synthetic oligonucleotide
  Target: LAMA2; (-) strand; PAM type: NRG; PAM sequence: TGG
ccctgggccttgattatttt

SEQ ID NO: 54078 - DNA, 20 bp, Artificial Sequence
  Description of Artificial Sequence: Synthetic oligonucleotide
  Target: LAMA2; (-) strand; PAM type: NRG; PAM sequence: GGG
aatggaccaggaaaagccct

SEQ ID NO: 54079 - DNA, 20 bp, Artificial Sequence
  Description of Artificial Sequence: Synthetic oligonucleotide
  Target: LAMA2; (-) strand; PAM type: NRG; PAM sequence: TGG
taatggaccaggaaaagccc

SEQ ID NO: 54080 - DNA, 20 bp, Artificial Sequence
  Description of Artificial Sequence: Synthetic oligonucleotide
  Target: LAMA2; (-) strand; PAM type: NRG; PAM sequence: AAG
atccattaatggaccaggaa

SEQ ID NO: 54081 - DNA, 20 bp, Artificial Sequence
  Description of Artificial Sequence: Synthetic oligonucleotide
  Target: LAMA2; (-) strand; PAM type: NRG; PAM sequence: AGG
catatatccattaatggacc

SEQ ID NO: 54082 - DNA, 20 bp, Artificial Sequence
  Description of Artificial Sequence: Synthetic oligonucleotide
  Target: LAMA2; (-) strand; PAM type: NRG; PAM sequence: CAG
tcatatatccattaatggac

SEQ ID NO: 54083 - DNA, 20 bp, Artificial Sequence
  Description of Artificial Sequence: Synthetic oligonucleotide
  Target: LAMA2; (-) strand; PAM type: NRG; PAM sequence: TGG
acttgtcatatatccattaa

SEQ ID NO: 54084 - DNA, 20 bp, Artificial Sequence
  Description of Artificial Sequence: Synthetic oligonucleotide
  Target: LAMA2; (-) strand; PAM type: NRG; PAM sequence: AAG
ccctgagccaattaatgatt

SEQ ID NO: 54085 - DNA, 20 bp, Artificial Sequence
  Description of Artificial Sequence: Synthetic oligonucleotide
  Target: LAMA2; (-) strand; PAM type: NRG; PAM sequence: GAG
tgcggttttggggataccct

SEQ ID NO: 54086 - DNA, 20 bp, Artificial Sequence
  Description of Artificial Sequence: Synthetic oligonucleotide
  Target: LAMA2; (-) strand; PAM type: NRG; PAM sequence: GGG
cagttccaactgcggttttg

SEQ ID NO: 54087 - DNA, 20 bp, Artificial Sequence
  Description of Artificial Sequence: Synthetic oligonucleotide
  Target: LAMA2; (-) strand; PAM type: NRG; PAM sequence: GGG
tcagttccaactgcggtttt

SEQ ID NO: 54088 - DNA, 20 bp, Artificial Sequence
  Description of Artificial Sequence: Synthetic oligonucleotide
  Target: LAMA2; (-) strand; PAM type: NRG; PAM sequence: TGG
ttcagttccaactgcggttt

SEQ ID NO: 54089 - DNA, 20 bp, Artificial Sequence
  Description of Artificial Sequence: Synthetic oligonucleotide
  Target: LAMA2; (-) strand; PAM type: NRG; PAM sequence: CGG
tagcacttcagttccaactg

SEQ ID NO: 54090 - DNA, 20 bp, Artificial Sequence
  Description of Artificial Sequence: Synthetic oligonucleotide
  Target: LAMA2; (-) strand; PAM type: NRG; PAM sequence: CAG
tggtcatttttgtagcactt

SEQ ID NO: 54091 - DNA, 20 bp, Artificial Sequence
  Description of Artificial Sequence: Synthetic oligonucleotide
  Target: LAMA2; (-) strand; PAM type: NRG; PAM sequence: TAG
caacaaaatggtcatttttg

SEQ ID NO: 54092 - DNA, 20 bp, Artificial Sequence
  Description of Artificial Sequence: Synthetic oligonucleotide
  Target: LAMA2; (-) strand; PAM type: NRG; PAM sequence: TGG
gaaaagctataacaacaaaa

SEQ ID NO: 54093 - DNA, 20 bp, Artificial Sequence
  Description of Artificial Sequence: Synthetic oligonucleotide
  Target: LAMA2; (-) strand; PAM type: NRG; PAM sequence: AAG
ttatttccttatgtgaagaa

SEQ ID NO: 54094 - DNA, 20 bp, Artificial Sequence
  Description of Artificial Sequence: Synthetic oligonucleotide
  Target: LAMA2; (-) strand; PAM type: NRG; PAM sequence: AAG
cttatttatttccttatgtg

SEQ ID NO: 54095 - DNA, 20 bp, Artificial Sequence
  Description of Artificial Sequence: Synthetic oligonucleotide
  Target: LAMA2; (-) strand; PAM type: NRG; PAM sequence: AAG
tctttgatcaacaaatagat

SEQ ID NO: 54096 - DNA, 20 bp, Artificial Sequence
  Description of Artificial Sequence: Synthetic oligonucleotide
  Target: LAMA2; (-) strand; PAM type: NRG; PAM sequence: TAG
caagatctttgatcaacaaa

SEQ ID NO: 54097 - DNA, 20 bp, Artificial Sequence
  Description of Artificial Sequence: Synthetic oligonucleotide
  Target: LAMA2; (-) strand; PAM type: NRG; PAM sequence: AAG
gttaccataagcagaattac

SEQ ID NO: 54098 - DNA, 20 bp, Artificial Sequence
  Description of Artificial Sequence: Synthetic oligonucleotide
  Target: LAMA2; (-) strand; PAM type: NRG; PAM sequence: CAG
actctgggagttaccataag

SEQ ID NO: 54099 - DNA, 20 bp, Artificial Sequence
  Description of Artificial Sequence: Synthetic oligonucleotide
  Target: LAMA2; (-) strand; PAM type: NRG; PAM sequence: AAG
tctactctgggagttaccat

SEQ ID NO: 54100 - DNA, 20 bp, Artificial Sequence
  Description of Artificial Sequence: Synthetic oligonucleotide
  Target: LAMA2; (-) strand; PAM type: NRG; PAM sequence: GAG
gatgatattctctactctgg

SEQ ID NO: 54101 - DNA, 20 bp, Artificial Sequence
  Description of Artificial Sequence: Synthetic oligonucleotide
  Target: LAMA2; (-) strand; PAM type: NRG; PAM sequence: GGG
tggatgatattctctactct

SEQ ID NO: 54102 - DNA, 20 bp, Artificial Sequence
  Description of Artificial Sequence: Synthetic oligonucleotide
  Target: LAMA2; (-) strand; PAM type: NRG; PAM sequence: TGG
ctggatgatattctctactc

SEQ ID NO: 54103 - DNA, 20 bp, Artificial Sequence
  Description of Artificial Sequence: Synthetic oligonucleotide
  Target: LAMA2; (-) strand; PAM type: NRG; PAM sequence: TGG
agttcataaagggggccaac

SEQ ID NO: 54104 - DNA, 20 bp, Artificial Sequence
  Description of Artificial Sequence: Synthetic oligonucleotide
  Target: LAMA2; (-) strand; PAM type: NRG; PAM sequence: GGG
gcaatccaagttcataaagg

SEQ ID NO: 54105 - DNA, 20 bp, Artificial Sequence
  Description of Artificial Sequence: Synthetic oligonucleotide
  Target: LAMA2; (-) strand; PAM type: NRG; PAM sequence: GGG
tgcaatccaagttcataaag

SEQ ID NO: 54106 - DNA, 20 bp, Artificial Sequence
  Description of Artificial Sequence: Synthetic oligonucleotide
  Target: LAMA2; (-) strand; PAM type: NRG; PAM sequence: GGG
ttgcaatccaagttcataaa

SEQ ID NO: 54107 - DNA, 20 bp, Artificial Sequence
  Description of Artificial Sequence: Synthetic oligonucleotide
  Target: LAMA2; (-) strand; PAM type: NRG; PAM sequence: AGG
attgcaatccaagttcataa

SEQ ID NO: 54108 - DNA, 20 bp, Artificial Sequence
  Description of Artificial Sequence: Synthetic oligonucleotide
  Target: LAMA2; (-) strand; PAM type: NRG; PAM sequence: AAG
cattgcaatccaagttcata

SEQ ID NO: 54109 - DNA, 20 bp, Artificial Sequence
  Description of Artificial Sequence: Synthetic oligonucleotide
  Target: LAMA2; (-) strand; PAM type: NRG; PAM sequence: AAG
taggacttccattgcaatcc

SEQ ID NO: 54110 - DNA, 20 bp, Artificial Sequence
  Description of Artificial Sequence: Synthetic oligonucleotide
  Target: LAMA2; (-) strand; PAM type: NRG; PAM sequence: AGG
taactagtaaactggccgat

SEQ ID NO: 54111 - DNA, 20 bp, Artificial Sequence
  Description of Artificial Sequence: Synthetic oligonucleotide
  Target: LAMA2; (-) strand; PAM type: NRG; PAM sequence: TAG
ttaactagtaaactggccga

SEQ ID NO: 54112 - DNA, 20 bp, Artificial Sequence
  Description of Artificial Sequence: Synthetic oligonucleotide
  Target: LAMA2; (-) strand; PAM type: NRG; PAM sequence: TGG
gctcctgttaactagtaaac

SEQ ID NO: 54113 - DNA, 20 bp, Artificial Sequence
  Description of Artificial Sequence: Synthetic oligonucleotide
  Target: LAMA2; (-) strand; PAM type: NRG; PAM sequence: TAG
gtactacagctcctgttaac

SEQ ID NO: 54114 - DNA, 20 bp, Artificial Sequence
  Description of Artificial Sequence: Synthetic oligonucleotide
  Target: LAMA2; (-) strand; PAM type: NRG; PAM sequence: CAG
cagtcatagctctagtacta

SEQ ID NO: 54115 - DNA, 20 bp, Artificial Sequence
  Description of Artificial Sequence: Synthetic oligonucleotide
  Target: LAMA2; (-) strand; PAM type: NRG; PAM sequence: TAG
ttctgatgcagtcatagctc

SEQ ID NO: 54116 - DNA, 20 bp, Artificial Sequence
  Description of Artificial Sequence: Synthetic oligonucleotide
  Target: LAMA2; (-) strand; PAM type: NRG; PAM sequence: TAG
ctggacttctgatgcagtca

SEQ ID NO: 54117 - DNA, 20 bp, Artificial Sequence
  Description of Artificial Sequence: Synthetic oligonucleotide
  Target: LAMA2; (-) strand; PAM type: NRG; PAM sequence: CAG
acactgctggacttctgatg

SEQ ID NO: 54118 - DNA, 20 bp, Artificial Sequence
  Description of Artificial Sequence: Synthetic oligonucleotide
  Target: LAMA2; (-) strand; PAM type: NRG; PAM sequence: TGG
ctgctttgtgcccacactgc

SEQ ID NO: 54119 - DNA, 20 bp, Artificial Sequence
  Description of Artificial Sequence: Synthetic oligonucleotide
  Target: LAMA2; (-) strand; PAM type: NRG; PAM sequence: AAG
ctctcgatgtctaacttcaa

SEQ ID NO: 54120 - DNA, 20 bp, Artificial Sequence
  Description of Artificial Sequence: Synthetic oligonucleotide
  Target: LAMA2; (-) strand; PAM type: NRG; PAM sequence: AGG
agccagcaaggtgtgaatct

SEQ ID NO: 54121 - DNA, 20 bp, Artificial Sequence
  Description of Artificial Sequence: Synthetic oligonucleotide
  Target: LAMA2; (-) strand; PAM type: NRG; PAM sequence: TAG
cagccagcaaggtgtgaatc

SEQ ID NO: 54122 - DNA, 20 bp, Artificial Sequence
  Description of Artificial Sequence: Synthetic oligonucleotide
  Target: LAMA2; (-) strand; PAM type: NRG; PAM sequence: AGG
gcaacagcactcagccagca

SEQ ID NO: 54123 - DNA, 20 bp, Artificial Sequence
  Description of Artificial Sequence: Synthetic oligonucleotide
  Target: LAMA2; (-) strand; PAM type: NRG; PAM sequence: AAG
tgcaacagcactcagccagc

SEQ ID NO: 54124 - DNA, 20 bp, Artificial Sequence
  Description of Artificial Sequence: Synthetic oligonucleotide
  Target: LAMA2; (-) strand; PAM type: NRG; PAM sequence: CAG
ctattgcaacagcactcagc

SEQ ID NO: 54125 - DNA, 20 bp, Artificial Sequence
  Description of Artificial Sequence: Synthetic oligonucleotide
  Target: LAMA2; (-) strand; PAM type: NRG; PAM sequence: CAG
agcactattgcaacagcact

SEQ ID NO: 54126 - DNA, 20 bp, Artificial Sequence
  Description of Artificial Sequence: Synthetic oligonucleotide
  Target: LAMA2; (-) strand; PAM type: NRG; PAM sequence: CAG
actcaacagcactattgcaa

SEQ ID NO: 54127 - DNA, 20 bp, Artificial Sequence
  Description of Artificial Sequence: Synthetic oligonucleotide
  Target: LAMA2; (-) strand; PAM type: NRG; PAM sequence: CAG
aagttaaataactcactcaa

SEQ ID NO: 54128 - DNA, 20 bp, Artificial Sequence
  Description of Artificial Sequence: Synthetic oligonucleotide
  Target: LAMA2; (-) strand; PAM type: NRG; PAM sequence: AAG
gaggatgatcaggtttaaag

SEQ ID NO: 54129 - DNA, 20 bp, Artificial Sequence
  Description of Artificial Sequence: Synthetic oligonucleotide
  Target: LAMA2; (-) strand; PAM type: NRG; PAM sequence: AAG
ggtgaggatgatcaggttta

SEQ ID NO: 54130 - DNA, 20 bp, Artificial Sequence
  Description of Artificial Sequence: Synthetic oligonucleotide
  Target: LAMA2; (-) strand; PAM type: NRG; PAM sequence: AGG
tcttaaaggtgaggatgatc

SEQ ID NO: 54131 - DNA, 20 bp, Artificial Sequence
  Description of Artificial Sequence: Synthetic oligonucleotide
  Target: LAMA2; (-) strand; PAM type: NRG; PAM sequence: CAG
ctcttaaaggtgaggatgat

SEQ ID NO: 54132 - DNA, 20 bp, Artificial Sequence
  Description of Artificial Sequence: Synthetic oligonucleotide
  Target: LAMA2; (-) strand; PAM type: NRG; PAM sequence: AGG
ttttcattctcttaaaggtg

SEQ ID NO: 54133 - DNA, 20 bp, Artificial Sequence
  Description of Artificial Sequence: Synthetic oligonucleotide
  Target: LAMA2; (-) strand; PAM type: NRG; PAM sequence: GAG
attttcattctcttaaaggt

SEQ ID NO: 54134 - DNA, 20 bp, Artificial Sequence
  Description of Artificial Sequence: Synthetic oligonucleotide
  Target: LAMA2; (-) strand; PAM type: NRG; PAM sequence: AGG
tactattttcattctcttaa

SEQ ID NO: 54135 - DNA, 20 bp, Artificial Sequence
  Description of Artificial Sequence: Synthetic oligonucleotide
  Target: LAMA2; (-) strand; PAM type: NRG; PAM sequence: AAG
ctactattttcattctctta

SEQ ID NO: 54136 - DNA, 20 bp, Artificial Sequence
  Description of Artificial Sequence: Synthetic oligonucleotide
  Target: LAMA2; (-) strand; PAM type: NRG; PAM sequence: AGG
attccatttaatccttaaaa

SEQ ID NO: 54137 - DNA, 20 bp, Artificial Sequence
  Description of Artificial Sequence: Synthetic oligonucleotide
  Target: LAMA2; (-) strand; PAM type: NRG; PAM sequence: AAG
aattccatttaatccttaaa

SEQ ID NO: 54138 - DNA, 20 bp, Artificial Sequence
  Description of Artificial Sequence: Synthetic oligonucleotide
  Target: LAMA2; (-) strand; PAM type: NRG; PAM sequence: AAG
tgaaaacaccactgattgta

SEQ ID NO: 54139 - DNA, 20 bp, Artificial Sequence
  Description of Artificial Sequence: Synthetic oligonucleotide
  Target: LAMA2; (-) strand; PAM type: NRG; PAM sequence: CAG
gatcttttaagttaaagctc

SEQ ID NO: 54140 - DNA, 20 bp, Artificial Sequence
  Description of Artificial Sequence: Synthetic oligonucleotide
  Target: LAMA2; (-) strand; PAM type: NRG; PAM sequence: AAG
tttctagatcttttaagtta

SEQ ID NO: 54141 - DNA, 20 bp, Artificial Sequence
  Description of Artificial Sequence: Synthetic oligonucleotide
  Target: LAMA2; (-) strand; PAM type: NRG; PAM sequence: AAG
gcccagtttctagatctttt

SEQ ID NO: 54142 - DNA, 20 bp, Artificial Sequence
  Description of Artificial Sequence: Synthetic oligonucleotide
  Target: LAMA2; (-) strand; PAM type: NRG; PAM sequence: TAG
tggccaacaagcccagtttc

SEQ ID NO: 54143 - DNA, 20 bp, Artificial Sequence
  Description of Artificial Sequence: Synthetic oligonucleotide
  Target: LAMA2; (-) strand; PAM type: NRG; PAM sequence: CAG
aaaactgtggccaacaagcc

SEQ ID NO: 54144 - DNA, 20 bp, Artificial Sequence
  Description of Artificial Sequence: Synthetic oligonucleotide
  Target: LAMA2; (-) strand; PAM type: NRG; PAM sequence: AAG
acactaaaactgtggccaac

SEQ ID NO: 54145 - DNA, 20 bp, Artificial Sequence
  Description of Artificial Sequence: Synthetic oligonucleotide
  Target: LAMA2; (-) strand; PAM type: NRG; PAM sequence: TGG
ctctaatcacactaaaactg

SEQ ID NO: 54146 - DNA, 20 bp, Artificial Sequence
  Description of Artificial Sequence: Synthetic oligonucleotide
  Target: LAMA2; (-) strand; PAM type: NRG; PAM sequence: TGG
accatccataaccaggatag

SEQ ID NO: 54147 - DNA, 20 bp, Artificial Sequence
  Description of Artificial Sequence: Synthetic oligonucleotide
  Target: LAMA2; (-) strand; PAM type: NRG; PAM sequence: TAG
attaccatccataaccagga

SEQ ID NO: 54148 - DNA, 20 bp, Artificial Sequence
  Description of Artificial Sequence: Synthetic oligonucleotide
  Target: LAMA2; (-) strand; PAM type: NRG; PAM sequence: AGG
ttctattaccatccataacc

SEQ ID NO: 54149 - DNA, 20 bp, Artificial Sequence
  Description of Artificial Sequence: Synthetic oligonucleotide
  Target: LAMA2; (-) strand; PAM type: NRG; PAM sequence: CAG
gttctattaccatccataac

SEQ ID NO: 54150 - DNA, 20 bp, Artificial Sequence
  Description of Artificial Sequence: Synthetic oligonucleotide
  Target: LAMA2; (-) strand; PAM type: NRG; PAM sequence: CAG
gaagacatcaaataaatagg

SEQ ID NO: 54151 - DNA, 20 bp, Artificial Sequence
  Description of Artificial Sequence: Synthetic oligonucleotide
  Target: LAMA2; (-) strand; PAM type: NRG; PAM sequence: AGG
agtgaagacatcaaataaat

SEQ ID NO: 54152 - DNA, 20 bp, Artificial Sequence
  Description of Artificial Sequence: Synthetic oligonucleotide
  Target: LAMA2; (-) strand; PAM type: NRG; PAM sequence: TAG
aagtgaagacatcaaataaa

SEQ ID NO: 54153 - DNA, 20 bp, Artificial Sequence
  Description of Artificial Sequence: Synthetic oligonucleotide
  Target: LAMA2; (-) strand; PAM type: NRG; PAM sequence: AAG
acctaggagacaactaagtg

SEQ ID NO: 54154 - DNA, 20 bp, Artificial Sequence
  Description of Artificial Sequence: Synthetic oligonucleotide
  Target: LAMA2; (-) strand; PAM type: NRG; PAM sequence: AAG
gaaggacctaggagacaact

SEQ ID NO: 54155 - DNA, 20 bp, Artificial Sequence
  Description of Artificial Sequence: Synthetic oligonucleotide
  Target: LAMA2; (-) strand; PAM type: NRG; PAM sequence: GAG
gttcgctgtgaaggacctag

SEQ ID NO: 54156 - DNA, 20 bp, Artificial Sequence
  Description of Artificial Sequence: Synthetic oligonucleotide
  Target: LAMA2; (-) strand; PAM type: NRG; PAM sequence: AGG
atgttcgctgtgaaggacct

SEQ ID NO: 54157 - DNA, 20 bp, Artificial Sequence
  Description of Artificial Sequence: Synthetic oligonucleotide
  Target: LAMA2; (-) strand; PAM type: NRG; PAM sequence: TAG
aatgttcgctgtgaaggacc

SEQ ID NO: 54158 - DNA, 20 bp, Artificial Sequence
  Description of Artificial Sequence: Synthetic oligonucleotide
  Target: LAMA2; (-) strand; PAM type: NRG; PAM sequence: AGG
ctggcaaatgttcgctgtga

SEQ ID NO: 54159 - DNA, 20 bp, Artificial Sequence
  Description of Artificial Sequence: Synthetic oligonucleotide
  Target: LAMA2; (-) strand; PAM type: NRG; PAM sequence: AAG
cctggcaaatgttcgctgtg

SEQ ID NO: 54160 - DNA, 20 bp, Artificial Sequence
  Description of Artificial Sequence: Synthetic oligonucleotide
  Target: LAMA2; (-) strand; PAM type: NRG; PAM sequence: TGG
agagtacctatgttcaatcc

SEQ ID NO: 54161 - DNA, 20 bp, Artificial Sequence
  Description of Artificial Sequence: Synthetic oligonucleotide
  Target: LAMA2; (-) strand; PAM type: NRG; PAM sequence: GAG
aaaagagttgaggaaatgca

SEQ ID NO: 54162 - DNA, 20 bp, Artificial Sequence
  Description of Artificial Sequence: Synthetic oligonucleotide
  Target: LAMA2; (-) strand; PAM type: NRG; PAM sequence: CAG
ggaaaagagttgaggaaatg

SEQ ID NO: 54163 - DNA, 20 bp, Artificial Sequence
  Description of Artificial Sequence: Synthetic oligonucleotide
  Target: LAMA2; (-) strand; PAM type: NRG; PAM sequence: AGG
agctgatgggaaaagagttg

SEQ ID NO: 54164 - DNA, 20 bp, Artificial Sequence
  Description of Artificial Sequence: Synthetic oligonucleotide
  Target: LAMA2; (-) strand; PAM type: NRG; PAM sequence: GAG
aagctgatgggaaaagagtt

SEQ ID NO: 54165 - DNA, 20 bp, Artificial Sequence
  Description of Artificial Sequence: Synthetic oligonucleotide
  Target: LAMA2; (-) strand; PAM type: NRG; PAM sequence: GAG
gggaaaagctgatgggaaaa

SEQ ID NO: 54166 - DNA, 20 bp, Artificial Sequence
  Description of Artificial Sequence: Synthetic oligonucleotide
  Target: LAMA2; (-) strand; PAM type: NRG; PAM sequence: AAG
ttgggaaaagctgatgggaa

SEQ ID NO: 54167 - DNA, 20 bp, Artificial Sequence
  Description of Artificial Sequence: Synthetic oligonucleotide
  Target: LAMA2; (-) strand; PAM type: NRG; PAM sequence: GGG
ctgagttgggaaaagctgat

SEQ ID NO: 54168 - DNA, 20 bp, Artificial Sequence
  Description of Artificial Sequence: Synthetic oligonucleotide
  Target: LAMA2; (-) strand; PAM type: NRG; PAM sequence: TGG
tctgagttgggaaaagctga

SEQ ID NO: 54169 - DNA, 20 bp, Artificial Sequence
  Description of Artificial Sequence: Synthetic oligonucleotide
  Target: LAMA2; (-) strand; PAM type: NRG; PAM sequence: AAG
accattttctgagttgggaa

SEQ ID NO: 54170 - DNA, 20 bp, Artificial Sequence
  Description of Artificial Sequence: Synthetic oligonucleotide
  Target: LAMA2; (-) strand; PAM type: NRG; PAM sequence: GGG
atggtaccattttctgagtt

SEQ ID NO: 54171 - DNA, 20 bp, Artificial Sequence
  Description of Artificial Sequence: Synthetic oligonucleotide
  Target: LAMA2; (-) strand; PAM type: NRG; PAM sequence: TGG
gatggtaccattttctgagt

SEQ ID NO: 54172 - DNA, 20 bp, Artificial Sequence
  Description of Artificial Sequence: Synthetic oligonucleotide
  Target: LAMA2; (-) strand; PAM type: NRG; PAM sequence: GAG
gaatgatggtaccattttct

SEQ ID NO: 54173 - DNA, 20 bp, Artificial Sequence
  Description of Artificial Sequence: Synthetic oligonucleotide
  Target: LAMA2; (-) strand; PAM type: NRG; PAM sequence: TGG
ttgattcaaggggtgaatga

SEQ ID NO: 54174 - DNA, 20 bp, Artificial Sequence
  Description of Artificial Sequence: Synthetic oligonucleotide
  Target: LAMA2; (-) strand; PAM type: NRG; PAM sequence: GGG
gatgtcaaatttgattcaag

SEQ ID NO: 54175 - DNA, 20 bp, Artificial Sequence
  Description of Artificial Sequence: Synthetic oligonucleotide
  Target: LAMA2; (-) strand; PAM type: NRG; PAM sequence: GGG
agatgtcaaatttgattcaa

SEQ ID NO: 54176 - DNA, 20 bp, Artificial Sequence
  Description of Artificial Sequence: Synthetic oligonucleotide
  Target: LAMA2; (-) strand; PAM type: NRG; PAM sequence: AGG
tagatgtcaaatttgattca

SEQ ID NO: 54177 - DNA, 20 bp, Artificial Sequence
  Description of Artificial Sequence: Synthetic oligonucleotide
  Target: LAMA2; (-) strand; PAM type: NRG; PAM sequence: AAG
ctagatgtcaaatttgattc

SEQ ID NO: 54178 - DNA, 20 bp, Artificial Sequence
  Description of Artificial Sequence: Synthetic oligonucleotide
  Target: LAMA2; (-) strand; PAM type: NRG; PAM sequence: TAG
gagaagttaatagtaacttc

SEQ ID NO: 54179 - DNA, 20 bp, Artificial Sequence
  Description of Artificial Sequence: Synthetic oligonucleotide
  Target: LAMA2; (-) strand; PAM type: NRG; PAM sequence: TAG
gaaggaaagagagaagttaa

SEQ ID NO: 54180 - DNA, 20 bp, Artificial Sequence
  Description of Artificial Sequence: Synthetic oligonucleotide
  Target: LAMA2; (-) strand; PAM type: NRG; PAM sequence: AAG
gggaggtgaaggaaagagag

SEQ ID NO: 54181 - DNA, 20 bp, Artificial Sequence
  Description of Artificial Sequence: Synthetic oligonucleotide
  Target: LAMA2; (-) strand; PAM type: NRG; PAM sequence: GAG
tctgggaggtgaaggaaaga

SEQ ID NO: 54182 - DNA, 20 bp, Artificial Sequence
  Description of Artificial Sequence: Synthetic oligonucleotide
  Target: LAMA2; (-) strand; PAM type: NRG; PAM sequence: GAG
aatctgggaggtgaaggaaa

SEQ ID NO: 54183 - DNA, 20 bp, Artificial Sequence
  Description of Artificial Sequence: Synthetic oligonucleotide
  Target: LAMA2; (-) strand; PAM type: NRG; PAM sequence: AAG
tcaatctgggaggtgaagga

SEQ ID NO: 54184 - DNA, 20 bp, Artificial Sequence
  Description of Artificial Sequence: Synthetic oligonucleotide
  Target: LAMA2; (-) strand; PAM type: NRG; PAM sequence: AGG
tatttcaatctgggaggtga

SEQ ID NO: 54185 - DNA, 20 bp, Artificial Sequence
  Description of Artificial Sequence: Synthetic oligonucleotide
  Target: LAMA2; (-) strand; PAM type: NRG; PAM sequence: AAG
ttatttcaatctgggaggtg

SEQ ID NO: 54186 - DNA, 20 bp, Artificial Sequence
  Description of Artificial Sequence: Synthetic oligonucleotide
  Target: LAMA2; (-) strand; PAM type: NRG; PAM sequence: AGG
gctgattatttcaatctggg

SEQ ID NO: 54187 - DNA, 20 bp, Artificial Sequence
  Description of Artificial Sequence: Synthetic oligonucleotide
  Target: LAMA2; (-) strand; PAM type: NRG; PAM sequence: GAG
tgctgattatttcaatctgg

SEQ ID NO: 54188 - DNA, 20 bp, Artificial Sequence
  Description of Artificial Sequence: Synthetic oligonucleotide
  Target: LAMA2; (-) strand; PAM type: NRG; PAM sequence: GGG
catgctgattatttcaatct

SEQ ID NO: 54189 - DNA, 20 bp, Artificial Sequence
  Description of Artificial Sequence: Synthetic oligonucleotide
  Target: LAMA2; (-) strand; PAM type: NRG; PAM sequence: TGG
acatgctgattatttcaatc

SEQ ID NO: 54190 - DNA, 20 bp, Artificial Sequence
  Description of Artificial Sequence: Synthetic oligonucleotide
  Target: LAMA2; (-) strand; PAM type: NRG; PAM sequence: CAG
aactctggtggtgtggatga

SEQ ID NO: 54191 - DNA, 20 bp, Artificial Sequence
  Description of Artificial Sequence: Synthetic oligonucleotide
  Target: LAMA2; (-) strand; PAM type: NRG; PAM sequence: TGG
tggaataaactctggtggtg

SEQ ID NO: 54192 - DNA, 20 bp, Artificial Sequence
  Description of Artificial Sequence: Synthetic oligonucleotide
  Target: LAMA2; (-) strand; PAM type: NRG; PAM sequence: TGG
atttatggaataaactctgg

SEQ ID NO: 54193 - DNA, 20 bp, Artificial Sequence
  Description of Artificial Sequence: Synthetic oligonucleotide
  Target: LAMA2; (-) strand; PAM type: NRG; PAM sequence: TGG
gatatttatggaataaactc

SEQ ID NO: 54194 - DNA, 20 bp, Artificial Sequence
  Description of Artificial Sequence: Synthetic oligonucleotide
  Target: LAMA2; (-) strand; PAM type: NRG; PAM sequence: TGG
caaaaagatgtggatattta

SEQ ID NO: 54195 - DNA, 20 bp, Artificial Sequence
  Description of Artificial Sequence: Synthetic oligonucleotide
  Target: LAMA2; (-) strand; PAM type: NRG; PAM sequence: TGG
gcaatagggacaaaaagatg

SEQ ID NO: 54196 - DNA, 20 bp, Artificial Sequence
  Description of Artificial Sequence: Synthetic oligonucleotide
  Target: LAMA2; (-) strand; PAM type: NRG; PAM sequence: AAG
tagaaggcaatagggacaaa

SEQ ID NO: 54197 - DNA, 20 bp, Artificial Sequence
  Description of Artificial Sequence: Synthetic oligonucleotide
  Target: LAMA2; (-) strand; PAM type: NRG; PAM sequence: GGG
ctgtggtctagaaggcaata

SEQ ID NO: 54198 - DNA, 20 bp, Artificial Sequence
  Description of Artificial Sequence: Synthetic oligonucleotide
  Target: LAMA2; (-) strand; PAM type: NRG; PAM sequence: AGG
gctgtggtctagaaggcaat

SEQ ID NO: 54199 - DNA, 20 bp, Artificial Sequence
  Description of Artificial Sequence: Synthetic oligonucleotide
  Target: LAMA2; (-) strand; PAM type: NRG; PAM sequence: TAG
tgctgtggtctagaaggcaa

SEQ ID NO: 54200 - DNA, 20 bp, Artificial Sequence
  Description of Artificial Sequence: Synthetic oligonucleotide
  Target: LAMA2; (-) strand; PAM type: NRG; PAM sequence: AGG
aaagagtgctgtggtctaga

SEQ ID NO: 54201 - DNA, 20 bp, Artificial Sequence
  Description of Artificial Sequence: Synthetic oligonucleotide
  Target: LAMA2; (-) strand; PAM type: NRG; PAM sequence: AAG
aaaagagtgctgtggtctag

SEQ ID NO: 54202 - DNA, 20 bp, Artificial Sequence
  Description of Artificial Sequence: Synthetic oligonucleotide
  Target: LAMA2; (-) strand; PAM type: NRG; PAM sequence: TAG
aaaaaaagagtgctgtggtc

SEQ ID NO: 54203 - DNA, 20 bp, Artificial Sequence
  Description of Artificial Sequence: Synthetic oligonucleotide
  Target: LAMA2; (-) strand; PAM type: NRG; PAM sequence: TGG
taggcaaaaaaagagtgctg

SEQ ID NO: 54204 - DNA, 20 bp, Artificial Sequence
  Description of Artificial Sequence: Synthetic oligonucleotide
  Target: LAMA2; (-) strand; PAM type: NRG; PAM sequence: GAG
aagttgcataggcaaaaaaa

SEQ ID NO: 54205 - DNA, 20 bp, Artificial Sequence
  Description of Artificial Sequence: Synthetic oligonucleotide
  Target: LAMA2; (-) strand; PAM type: NRG; PAM sequence: AAG
tgaagttgcataggcaaaaa

SEQ ID NO: 54206 - DNA, 20 bp, Artificial Sequence
  Description of Artificial Sequence: Synthetic oligonucleotide
  Target: LAMA2; (-) strand; PAM type: NRG; PAM sequence: AGG
ggaggctgctgaagttgcat

SEQ ID NO: 54207 - DNA, 20 bp, Artificial Sequence
  Description of Artificial Sequence: Synthetic oligonucleotide
  Target: LAMA2; (-) strand; PAM type: NRG; PAM sequence: TAG
gggaggctgctgaagttgca

SEQ ID NO: 54208 - DNA, 20 bp, Artificial Sequence
  Description of Artificial Sequence: Synthetic oligonucleotide
  Target: LAMA2; (-) strand; PAM type: NRG; PAM sequence: AAG
gagcagctgggaggctgctg

SEQ ID NO: 54209 - DNA, 20 bp, Artificial Sequence
  Description of Artificial Sequence: Synthetic oligonucleotide
  Target: LAMA2; (-) strand; PAM type: NRG; PAM sequence: AGG
aagaagggagagcagctggg

SEQ ID NO: 54210 - DNA, 20 bp, Artificial Sequence
  Description of Artificial Sequence: Synthetic oligonucleotide
  Target: LAMA2; (-) strand; PAM type: NRG; PAM sequence: GAG
aaagaagggagagcagctgg

SEQ ID NO: 54211 - DNA, 20 bp, Artificial Sequence
  Description of Artificial Sequence: Synthetic oligonucleotide
  Target: LAMA2; (-) strand; PAM type: NRG; PAM sequence: GGG
gaaaagaagggagagcagct

SEQ ID NO: 54212 - DNA, 20 bp, Artificial Sequence
  Description of Artificial Sequence: Synthetic oligonucleotide
  Target: LAMA2; (-) strand; PAM type: NRG; PAM sequence: TGG
agaaaagaagggagagcagc

SEQ ID NO: 54213 - DNA, 20 bp, Artificial Sequence
  Description of Artificial Sequence: Synthetic oligonucleotide
  Target: LAMA2; (-) strand; PAM type: NRG; PAM sequence: CAG
aaagagaaaagaagggagag

SEQ ID NO: 54214 - DNA, 20 bp, Artificial Sequence
  Description of Artificial Sequence: Synthetic oligonucleotide
  Target: LAMA2; (-) strand; PAM type: NRG; PAM sequence: GAG
ggaaaagagaaaagaaggga

SEQ ID NO: 54215 - DNA, 20 bp, Artificial Sequence
  Description of Artificial Sequence: Synthetic oligonucleotide
  Target: LAMA2; (-) strand; PAM type: NRG; PAM sequence: GAG
atggaaaagagaaaagaagg

SEQ ID NO: 54216 - DNA, 20 bp, Artificial Sequence
  Description of Artificial Sequence: Synthetic oligonucleotide
  Target: LAMA2; (-) strand; PAM type: NRG; PAM sequence: GGG
aaatggaaaagagaaaagaa

SEQ ID NO: 54217 - DNA, 20 bp, Artificial Sequence
  Description of Artificial Sequence: Synthetic oligonucleotide
  Target: LAMA2; (-) strand; PAM type: NRG; PAM sequence: AGG
aaaatggaaaagagaaaaga

SEQ ID NO: 54218 - DNA, 20 bp, Artificial Sequence
  Description of Artificial Sequence: Synthetic oligonucleotide
  Target: LAMA2; (-) strand; PAM type: NRG; PAM sequence: AAG
taaaatggaaaagagaaaag

SEQ ID NO: 54219 - DNA, 20 bp, Artificial Sequence
  Description of Artificial Sequence: Synthetic oligonucleotide
  Target: LAMA2; (-) strand; PAM type: NRG; PAM sequence: AAG
ttgtaaaatggaaaagagaa

SEQ ID NO: 54220 - DNA, 20 bp, Artificial Sequence
  Description of Artificial Sequence: Synthetic oligonucleotide
  Target: LAMA2; (-) strand; PAM type: NRG; PAM sequence: GAG
attgattgtaaaatggaaaa

SEQ ID NO: 54221 - DNA, 20 bp, Artificial Sequence
  Description of Artificial Sequence: Synthetic oligonucleotide
  Target: LAMA2; (-) strand; PAM type: NRG; PAM sequence: AAG
aaattgattgtaaaatggaa

SEQ ID NO: 54222 - DNA, 20 bp, Artificial Sequence
  Description of Artificial Sequence: Synthetic oligonucleotide
  Target: LAMA2; (-) strand; PAM type: NRG; PAM sequence: TGG
atggaaaattgattgtaaaa

SEQ ID NO: 54223 - DNA, 20 bp, Artificial Sequence
  Description of Artificial Sequence: Synthetic oligonucleotide
  Target: LAMA2; (-) strand; PAM type: NRG; PAM sequence: TGG
agttcactttgcctattgca

SEQ ID NO: 54224 - DNA, 20 bp, Artificial Sequence
  Description of Artificial Sequence: Synthetic oligonucleotide
  Target: LAMA2; (-) strand; PAM type: NRG; PAM sequence: GAG
aatctgatttactattttca

SEQ ID NO: 54225 - DNA, 20 bp, Artificial Sequence
  Description of Artificial Sequence: Synthetic oligonucleotide
  Target: LAMA2; (-) strand; PAM type: NRG; PAM sequence: CAG
ctaatctgatttactatttt

SEQ ID NO: 54226 - DNA, 20 bp, Artificial Sequence
  Description of Artificial Sequence: Synthetic oligonucleotide
  Target: LAMA2; (-) strand; PAM type: NRG; PAM sequence: AAG
gaaaggttttaagcagagga

SEQ ID NO: 54227 - DNA, 20 bp, Artificial Sequence
  Description of Artificial Sequence: Synthetic oligonucleotide
  Target: LAMA2; (-) strand; PAM type: NRG; PAM sequence: AGG
cattgaaaggttttaagcag

SEQ ID NO: 54228 - DNA, 20 bp, Artificial Sequence
  Description of Artificial Sequence: Synthetic oligonucleotide
  Target: LAMA2; (-) strand; PAM type: NRG; PAM sequence: GAG
gcattgaaaggttttaagca

SEQ ID NO: 54229 - DNA, 20 bp, Artificial Sequence
  Description of Artificial Sequence: Synthetic oligonucleotide
  Target: LAMA2; (-) strand; PAM type: NRG; PAM sequence: CAG
atgcattgaaaggttttaag

SEQ ID NO: 54230 - DNA, 20 bp, Artificial Sequence
  Description of Artificial Sequence: Synthetic oligonucleotide
  Target: LAMA2; (-) strand; PAM type: NRG; PAM sequence: AAG
gaaatgcattgaaaggtttt

SEQ ID NO: 54231 - DNA, 20 bp, Artificial Sequence
  Description of Artificial Sequence: Synthetic oligonucleotide
  Target: LAMA2; (-) strand; PAM type: NRG; PAM sequence: AGG
tataatagaaatgcattgaa

SEQ ID NO: 54232 - DNA, 20 bp, Artificial Sequence
  Description of Artificial Sequence: Synthetic oligonucleotide
  Target: LAMA2; (-) strand; PAM type: NRG; PAM sequence: AAG
ttataatagaaatgcattga

SEQ ID NO: 54233 - DNA, 20 bp, Artificial Sequence
  Description of Artificial Sequence: Synthetic oligonucleotide
  Target: LAMA2; (-) strand; PAM type: NRG; PAM sequence: TAG
tttagaatttattcttataa

SEQ ID NO: 54234 - DNA, 20 bp, Artificial Sequence
  Description of Artificial Sequence: Synthetic oligonucleotide
  Target: LAMA2; (-) strand; PAM type: NRG; PAM sequence: TAG
gacttaaaatctaatgaatt

SEQ ID NO: 54235 - DNA, 20 bp, Artificial Sequence
  Description of Artificial Sequence: Synthetic oligonucleotide
  Target: LAMA2; (-) strand; PAM type: NRG; PAM sequence: TAG
aatacaagagctgtcatgaa

SEQ ID NO: 54236 - DNA, 20 bp, Artificial Sequence
  Description of Artificial Sequence: Synthetic oligonucleotide
  Target: LAMA2; (-) strand; PAM type: NRG; PAM sequence: GAG
gaaatcagagaaaaatacaa

SEQ ID NO: 54237 - DNA, 20 bp, Artificial Sequence
  Description of Artificial Sequence: Synthetic oligonucleotide
  Target: LAMA2; (-) strand; PAM type: NRG; PAM sequence: AAG
ttgaaatcagagaaaaatac

SEQ ID NO: 54238 - DNA, 20 bp, Artificial Sequence
  Description of Artificial Sequence: Synthetic oligonucleotide
  Target: LAMA2; (-) strand; PAM type: NRG; PAM sequence: GAG
aagagaataatttgaaatca

SEQ ID NO: 54239 - DNA, 20 bp, Artificial Sequence
  Description of Artificial Sequence: Synthetic oligonucleotide
  Target: LAMA2; (-) strand; PAM type: NRG; PAM sequence: CAG
aaaagagaataatttgaaat

SEQ ID NO: 54240 - DNA, 20 bp, Artificial Sequence
  Description of Artificial Sequence: Synthetic oligonucleotide
  Target: LAMA2; (-) strand; PAM type: NRG; PAM sequence: GAG
gctggtaaataacagaaaaa

SEQ ID NO: 54241 - DNA, 20 bp, Artificial Sequence
  Description of Artificial Sequence: Synthetic oligonucleotide
  Target: LAMA2; (-) strand; PAM type: NRG; PAM sequence: AAG
ttgctggtaaataacagaaa

SEQ ID NO: 54242 - DNA, 20 bp, Artificial Sequence
  Description of Artificial Sequence: Synthetic oligonucleotide
  Target: LAMA2; (-) strand; PAM type: NRG; PAM sequence: CAG
ttactgttgctggtaaataa

SEQ ID NO: 54243 - DNA, 20 bp, Artificial Sequence
  Description of Artificial Sequence: Synthetic oligonucleotide
  Target: LAMA2; (-) strand; PAM type: NRG; PAM sequence: TGG
aaaaaagtctttactgttgc

SEQ ID NO: 54244 - DNA, 20 bp, Artificial Sequence
  Description of Artificial Sequence: Synthetic oligonucleotide
  Target: LAMA2; (-) strand; PAM type: NRG; PAM sequence: AAG
aaggccttgagacggaaaaa

SEQ ID NO: 54245 - DNA, 20 bp, Artificial Sequence
  Description of Artificial Sequence: Synthetic oligonucleotide
  Target: LAMA2; (-) strand; PAM type: NRG; PAM sequence: CGG
caaggacaaaggccttgaga

SEQ ID NO: 54246 - DNA, 20 bp, Artificial Sequence
  Description of Artificial Sequence: Synthetic oligonucleotide
  Target: LAMA2; (-) strand; PAM type: NRG; PAM sequence: GAG
acagcaaggacaaaggcctt

SEQ ID NO: 54247 - DNA, 20 bp, Artificial Sequence
  Description of Artificial Sequence: Synthetic oligonucleotide
  Target: LAMA2; (-) strand; PAM type: NRG; PAM sequence: AGG
cagaggaacagcaaggacaa

SEQ ID NO: 54248 - DNA, 20 bp, Artificial Sequence
  Description of Artificial Sequence: Synthetic oligonucleotide
  Target: LAMA2; (-) strand; PAM type: NRG; PAM sequence: AAG
acagaggaacagcaaggaca

SEQ ID NO: 54249 - DNA, 20 bp, Artificial Sequence
  Description of Artificial Sequence: Synthetic oligonucleotide
  Target: LAMA2; (-) strand; PAM type: NRG; PAM sequence: AGG
ctctggacagaggaacagca

SEQ ID NO: 54250 - DNA, 20 bp, Artificial Sequence
  Description of Artificial Sequence: Synthetic oligonucleotide
  Target: LAMA2; (-) strand; PAM type: NRG; PAM sequence: AAG
gctctggacagaggaacagc

SEQ ID NO: 54251 - DNA, 20 bp, Artificial Sequence
  Description of Artificial Sequence: Synthetic oligonucleotide
  Target: LAMA2; (-) strand; PAM type: NRG; PAM sequence: CAG
caatgctctggacagaggaa

SEQ ID NO: 54252 - DNA, 20 bp, Artificial Sequence
  Description of Artificial Sequence: Synthetic oligonucleotide
  Target: LAMA2; (-) strand; PAM type: NRG; PAM sequence: AGG
tggaacaatgctctggacag

SEQ ID NO: 54253 - DNA, 20 bp, Artificial Sequence
  Description of Artificial Sequence: Synthetic oligonucleotide
  Target: LAMA2; (-) strand; PAM type: NRG; PAM sequence: GAG
atggaacaatgctctggaca

SEQ ID NO: 54254 - DNA, 20 bp, Artificial Sequence
  Description of Artificial Sequence: Synthetic oligonucleotide
  Target: LAMA2; (-) strand; PAM type: NRG; PAM sequence: CAG
taatggaacaatgctctgga

SEQ ID NO: 54255 - DNA, 20 bp, Artificial Sequence
  Description of Artificial Sequence: Synthetic oligonucleotide
  Target: LAMA2; (-) strand; PAM type: NRG; PAM sequence: TGG
gatctaatggaacaatgctc

SEQ ID NO: 54256 - DNA, 20 bp, Artificial Sequence
  Description of Artificial Sequence: Synthetic oligonucleotide
  Target: LAMA2; (-) strand; PAM type: NRG; PAM sequence: TGG
gacagccatcagggatctaa

SEQ ID NO: 54257 - DNA, 20 bp, Artificial Sequence
  Description of Artificial Sequence: Synthetic oligonucleotide
  Target: LAMA2; (-) strand; PAM type: NRG; PAM sequence: GGG
tgagaaggagacagccatca

SEQ ID NO: 54258 - DNA, 20 bp, Artificial Sequence
  Description of Artificial Sequence: Synthetic oligonucleotide
  Target: LAMA2; (-) strand; PAM type: NRG; PAM sequence: AGG
ttgagaaggagacagccatc

SEQ ID NO: 54259 - DNA, 20 bp, Artificial Sequence
  Description of Artificial Sequence: Synthetic oligonucleotide
  Target: LAMA2; (-) strand; PAM type: NRG; PAM sequence: CAG
attgagaaggagacagccat

SEQ ID NO: 54260 - DNA, 20 bp, Artificial Sequence
  Description of Artificial Sequence: Synthetic oligonucleotide
  Target: LAMA2; (-) strand; PAM type: NRG; PAM sequence: CAG
ttggaatattgagaaggaga

SEQ ID NO: 54261 - DNA, 20 bp, Artificial Sequence
  Description of Artificial Sequence: Synthetic oligonucleotide
  Target: LAMA2; (-) strand; PAM type: NRG; PAM sequence: GAG
gagattggaatattgagaag

SEQ ID NO: 54262 - DNA, 20 bp, Artificial Sequence
  Description of Artificial Sequence: Synthetic oligonucleotide
  Target: LAMA2; (-) strand; PAM type: NRG; PAM sequence: AGG
atgagattggaatattgaga

SEQ ID NO: 54263 - DNA, 20 bp, Artificial Sequence
  Description of Artificial Sequence: Synthetic oligonucleotide
  Target: LAMA2; (-) strand; PAM type: NRG; PAM sequence: AAG
catgagattggaatattgag

SEQ ID NO: 54264 - DNA, 20 bp, Artificial Sequence
  Description of Artificial Sequence: Synthetic oligonucleotide
  Target: LAMA2; (-) strand; PAM type: NRG; PAM sequence: GAG
tgacatgagattggaatatt

SEQ ID NO: 54265 - DNA, 20 bp, Artificial Sequence
  Description of Artificial Sequence: Synthetic oligonucleotide
  Target: LAMA2; (-) strand; PAM type: NRG; PAM sequence: TGG
ggtgacatttgacatgagat

SEQ ID NO: 54266 - DNA, 20 bp, Artificial Sequence
  Description of Artificial Sequence: Synthetic oligonucleotide
  Target: LAMA2; (-) strand; PAM type: NRG; PAM sequence: GAG
taagaggtgacatttgacat

SEQ ID NO: 54267 - DNA, 20 bp, Artificial Sequence
  Description of Artificial Sequence: Synthetic oligonucleotide
  Target: LAMA2; (-) strand; PAM type: NRG; PAM sequence: AGG
tctggaaaggcctctgtaag

SEQ ID NO: 54268 - DNA, 20 bp, Artificial Sequence
  Description of Artificial Sequence: Synthetic oligonucleotide
  Target: LAMA2; (-) strand; PAM type: NRG; PAM sequence: GAG
ctctggaaaggcctctgtaa

SEQ ID NO: 54269 - DNA, 20 bp, Artificial Sequence
  Description of Artificial Sequence: Synthetic oligonucleotide
  Target: LAMA2; (-) strand; PAM type: NRG; PAM sequence: AAG
tcctctggaaaggcctctgt

SEQ ID NO: 54270 - DNA, 20 bp, Artificial Sequence
  Description of Artificial Sequence: Synthetic oligonucleotide
  Target: LAMA2; (-) strand; PAM type: NRG; PAM sequence: AGG
tttaaagtggtcctctggaa

SEQ ID NO: 54271 - DNA, 20 bp, Artificial Sequence
  Description of Artificial Sequence: Synthetic oligonucleotide
  Target: LAMA2; (-) strand; PAM type: NRG; PAM sequence: AAG
atttaaagtggtcctctgga

SEQ ID NO: 54272 - DNA, 20 bp, Artificial Sequence
  Description of Artificial Sequence: Synthetic oligonucleotide
  Target: LAMA2; (-) strand; PAM type: NRG; PAM sequence: TGG
gctaatttaaagtggtcctc

SEQ ID NO: 54273 - DNA, 20 bp, Artificial Sequence
  Description of Artificial Sequence: Synthetic oligonucleotide
  Target: LAMA2; (-) strand; PAM type: NRG; PAM sequence: TGG
tgacagaagctaatttaaag

SEQ ID NO: 54274 - DNA, 20 bp, Artificial Sequence
  Description of Artificial Sequence: Synthetic oligonucleotide
  Target: LAMA2; (-) strand; PAM type: NRG; PAM sequence: AAG
gcctgacagaagctaattta

SEQ ID NO: 54275 - DNA, 20 bp, Artificial Sequence
  Description of Artificial Sequence: Synthetic oligonucleotide
  Target: LAMA2; (-) strand; PAM type: NRG; PAM sequence: AAG
gggagatgagtgcctgacag

SEQ ID NO: 54276 - DNA, 20 bp, Artificial Sequence
  Description of Artificial Sequence: Synthetic oligonucleotide
  Target: LAMA2; (-) strand; PAM type: NRG; PAM sequence: CAG
acagggagatgagtgcctga

SEQ ID NO: 54277 - DNA, 20 bp, Artificial Sequence
  Description of Artificial Sequence: Synthetic oligonucleotide
  Target: LAMA2; (-) strand; PAM type: NRG; PAM sequence: GAG
agaaattacaacagggagat

SEQ ID NO: 54278 - DNA, 20 bp, Artificial Sequence
  Description of Artificial Sequence: Synthetic oligonucleotide
  Target: LAMA2; (-) strand; PAM type: NRG; PAM sequence: GAG
ttcaaagaaattacaacagg

SEQ ID NO: 54279 - DNA, 20 bp, Artificial Sequence
  Description of Artificial Sequence: Synthetic oligonucleotide
  Target: LAMA2; (-) strand; PAM type: NRG; PAM sequence: GGG
tgttcaaagaaattacaaca

SEQ ID NO: 54280 - DNA, 20 bp, Artificial Sequence
  Description of Artificial Sequence: Synthetic oligonucleotide
  Target: LAMA2; (-) strand; PAM type: NRG; PAM sequence: AGG
ttgttcaaagaaattacaac

SEQ ID NO: 54281 - DNA, 20 bp, Artificial Sequence
  Description of Artificial Sequence: Synthetic oligonucleotide
  Target: LAMA2; (-) strand; PAM type: NRG; PAM sequence: CAG
attgttcaaagaaattacaa

SEQ ID NO: 54282 - DNA, 20 bp, Artificial Sequence
  Description of Artificial Sequence: Synthetic oligonucleotide
  Target: LAMA2; (-) strand; PAM type: NRG; PAM sequence: AAG
gataaacatttaattgttca

SEQ ID NO: 54283 - DNA, 20 bp, Artificial Sequence
  Description of Artificial Sequence: Synthetic oligonucleotide
  Target: LAMA2; (-) strand; PAM type: NRG; PAM sequence: AAG
gtaaataaacaagggtattc

SEQ ID NO: 54284 - DNA, 20 bp, Artificial Sequence
  Description of Artificial Sequence: Synthetic oligonucleotide
  Target: LAMA2; (-) strand; PAM type: NRG; PAM sequence: GGG
gaagaaaagtaaataaacaa

SEQ ID NO: 54285 - DNA, 20 bp, Artificial Sequence
  Description of Artificial Sequence: Synthetic oligonucleotide
  Target: LAMA2; (-) strand; PAM type: NRG; PAM sequence: AGG
agaagaaaagtaaataaaca

SEQ ID NO: 54286 - DNA, 20 bp, Artificial Sequence
  Description of Artificial Sequence: Synthetic oligonucleotide
  Target: LAMA2; (-) strand; PAM type: NRG; PAM sequence: AAG
aagaagaaaagtaaataaac

SEQ ID NO: 54287 - DNA, 20 bp, Artificial Sequence
  Description of Artificial Sequence: Synthetic oligonucleotide
  Target: LAMA2; (-) strand; PAM type: NRG; PAM sequence: AAG
agacaaacaacaaagaagaa

SEQ ID NO: 54288 - DNA, 20 bp, Artificial Sequence
  Description of Artificial Sequence: Synthetic oligonucleotide
  Target: LAMA2; (-) strand; PAM type: NRG; PAM sequence: AAG
tggggagacaaacaacaaag

SEQ ID NO: 54289 - DNA, 20 bp, Artificial Sequence
  Description of Artificial Sequence: Synthetic oligonucleotide
  Target: LAMA2; (-) strand; PAM type: NRG; PAM sequence: AAG
gtctggggagacaaacaaca

SEQ ID NO: 54290 - DNA, 20 bp, Artificial Sequence
  Description of Artificial Sequence: Synthetic oligonucleotide
  Target: LAMA2; (-) strand; PAM type: NRG; PAM sequence: GAG
ttatattccaacagtctggg

SEQ ID NO: 54291 - DNA, 20 bp, Artificial Sequence
  Description of Artificial Sequence: Synthetic oligonucleotide
  Target: LAMA2; (-) strand; PAM type: NRG; PAM sequence: GGG
atttatattccaacagtctg

SEQ ID NO: 54292 - DNA, 20 bp, Artificial Sequence
  Description of Artificial Sequence: Synthetic oligonucleotide
  Target: LAMA2; (-) strand; PAM type: NRG; PAM sequence: GGG
aatttatattccaacagtct

SEQ ID NO: 54293 - DNA, 20 bp, Artificial Sequence
  Description of Artificial Sequence: Synthetic oligonucleotide
  Target: LAMA2; (-) strand; PAM type: NRG; PAM sequence: TGG
aaatttatattccaacagtc

SEQ ID NO: 54294 - DNA, 20 bp, Artificial Sequence
  Description of Artificial Sequence: Synthetic oligonucleotide
  Target: LAMA2; (-) strand; PAM type: NRG; PAM sequence: CAG
taacaaaatttatattccaa

SEQ ID NO: 54295 - DNA, 20 bp, Artificial Sequence
  Description of Artificial Sequence: Synthetic oligonucleotide
  Target: LAMA2; (-) strand; PAM type: NRG; PAM sequence: AGG
ctcctcagctctggagatga

SEQ ID NO: 54296 - DNA, 20 bp, Artificial Sequence
  Description of Artificial Sequence: Synthetic oligonucleotide
  Target: LAMA2; (-) strand; PAM type: NRG; PAM sequence: AAG
tctcctcagctctggagatg

SEQ ID NO: 54297 - DNA, 20 bp, Artificial Sequence
  Description of Artificial Sequence: Synthetic oligonucleotide
  Target: LAMA2; (-) strand; PAM type: NRG; PAM sequence: GAG
tatgtatctcctcagctctg

SEQ ID NO: 54298 - DNA, 20 bp, Artificial Sequence
  Description of Artificial Sequence: Synthetic oligonucleotide
  Target: LAMA2; (-) strand; PAM type: NRG; PAM sequence: TGG
tttatgtatctcctcagctc

SEQ ID NO: 54299 - DNA, 20 bp, Artificial Sequence
  Description of Artificial Sequence: Synthetic oligonucleotide
  Target: LAMA2; (-) strand; PAM type: NRG; PAM sequence: CAG
aaaatatttatgtatctcct

SEQ ID NO: 54300 - DNA, 20 bp, Artificial Sequence
  Description of Artificial Sequence: Synthetic oligonucleotide
  Target: LAMA2; (-) strand; PAM type: NRG; PAM sequence: CAG
cattcagaagagcctgaaca

SEQ ID NO: 54301 - DNA, 20 bp, Artificial Sequence
  Description of Artificial Sequence: Synthetic oligonucleotide
  Target: LAMA2; (-) strand; PAM type: NRG; PAM sequence: GAG
ccatggaattacattcagaa

SEQ ID NO: 54302 - DNA, 20 bp, Artificial Sequence
  Description of Artificial Sequence: Synthetic oligonucleotide
  Target: LAMA2; (-) strand; PAM type: NRG; PAM sequence: AAG
ctccatggaattacattcag

SEQ ID NO: 54303 - DNA, 20 bp, Artificial Sequence
  Description of Artificial Sequence: Synthetic oligonucleotide
  Target: LAMA2; (-) strand; PAM type: NRG; PAM sequence: CAG
ctcctccatggaattacatt

SEQ ID NO: 54304 - DNA, 20 bp, Artificial Sequence
  Description of Artificial Sequence: Synthetic oligonucleotide
  Target: LAMA2; (-) strand; PAM type: NRG; PAM sequence: TGG
tccaattttgacctcctcca

SEQ ID NO: 54305 - DNA, 20 bp, Artificial Sequence
  Description of Artificial Sequence: Synthetic oligonucleotide
  Target: LAMA2; (-) strand; PAM type: NRG; PAM sequence: AGG
gggacagattcactacatac

SEQ ID NO: 54306 - DNA, 20 bp, Artificial Sequence
  Description of Artificial Sequence: Synthetic oligonucleotide
  Target: LAMA2; (-) strand; PAM type: NRG; PAM sequence: CAG
cgggacagattcactacata

SEQ ID NO: 54307 - DNA, 20 bp, Artificial Sequence
  Description of Artificial Sequence: Synthetic oligonucleotide
  Target: LAMA2; (-) strand; PAM type: NRG; PAM sequence: CAG
actgaaaatcataaacggga

SEQ ID NO: 54308 - DNA, 20 bp, Artificial Sequence
  Description of Artificial Sequence: Synthetic oligonucleotide
  Target: LAMA2; (-) strand; PAM type: NRG; PAM sequence: GGG
tataactgaaaatcataaac

SEQ ID NO: 54309 - DNA, 20 bp, Artificial Sequence
  Description of Artificial Sequence: Synthetic oligonucleotide
  Target: LAMA2; (-) strand; PAM type: NRG; PAM sequence: CGG
atataactgaaaatcataaa

SEQ ID NO: 54310 - DNA, 20 bp, Artificial Sequence
  Description of Artificial Sequence: Synthetic oligonucleotide
  Target: LAMA2; (-) strand; PAM type: NRG; PAM sequence: TGG
tatctgaaatatgattggat

SEQ ID NO: 54311 - DNA, 20 bp, Artificial Sequence
  Description of Artificial Sequence: Synthetic oligonucleotide
  Target: LAMA2; (-) strand; PAM type: NRG; PAM sequence: TGG
aggtttatctgaaatatgat

SEQ ID NO: 54312 - DNA, 20 bp, Artificial Sequence
  Description of Artificial Sequence: Synthetic oligonucleotide
  Target: LAMA2; (-) strand; PAM type: NRG; PAM sequence: AGG
tgccatagcaattgctcttg

SEQ ID NO: 54313 - DNA, 20 bp, Artificial Sequence
  Description of Artificial Sequence: Synthetic oligonucleotide
  Target: LAMA2; (-) strand; PAM type: NRG; PAM sequence: GAG
ctgccatagcaattgctctt

SEQ ID NO: 54314 - DNA, 20 bp, Artificial Sequence
  Description of Artificial Sequence: Synthetic oligonucleotide
  Target: LAMA2; (-) strand; PAM type: NRG; PAM sequence: TAG
acccttctagttctctgcca

SEQ ID NO: 54315 - DNA, 20 bp, Artificial Sequence
  Description of Artificial Sequence: Synthetic oligonucleotide
  Target: LAMA2; (-) strand; PAM type: NRG; PAM sequence: TAG
tagttgattaaatacccttc

SEQ ID NO: 54316 - DNA, 20 bp, Artificial Sequence
  Description of Artificial Sequence: Synthetic oligonucleotide
  Target: LAMA2; (-) strand; PAM type: NRG; PAM sequence: TAG
aaagatcttggaaaaggaac

SEQ ID NO: 54317 - DNA, 20 bp, Artificial Sequence
  Description of Artificial Sequence: Synthetic oligonucleotide
  Target: LAMA2; (-) strand; PAM type: NRG; PAM sequence: AGG
agagctaaagatcttggaaa

SEQ ID NO: 54318 - DNA, 20 bp, Artificial Sequence
  Description of Artificial Sequence: Synthetic oligonucleotide
  Target: LAMA2; (-) strand; PAM type: NRG; PAM sequence: AAG
aagagctaaagatcttggaa

SEQ ID NO: 54319 - DNA, 20 bp, Artificial Sequence
  Description of Artificial Sequence: Synthetic oligonucleotide
  Target: LAMA2; (-) strand; PAM type: NRG; PAM sequence: TGG
tgttaaagagctaaagatct

SEQ ID NO: 54320 - DNA, 20 bp, Artificial Sequence
  Description of Artificial Sequence: Synthetic oligonucleotide
  Target: LAMA2; (-) strand; PAM type: NRG; PAM sequence: AAG
ttataactgttaaagagcta

SEQ ID NO: 54321 - DNA, 20 bp, Artificial Sequence
  Description of Artificial Sequence: Synthetic oligonucleotide
  Target: LAMA2; (-) strand; PAM type: NRG; PAM sequence: GAG
attaatttataactgttaaa

SEQ ID NO: 54322 - DNA, 20 bp, Artificial Sequence
  Description of Artificial Sequence: Synthetic oligonucleotide
  Target: LAMA2; (-) strand; PAM type: NRG; PAM sequence: AAG
ttattaatttataactgtta

SEQ ID NO: 54323 - DNA, 20 bp, Artificial Sequence
  Description of Artificial Sequence: Synthetic oligonucleotide
  Target: LAMA2; (-) strand; PAM type: NRG; PAM sequence: TAG
caatgaaagacaaaaagtcc

SEQ ID NO: 54324 - DNA, 20 bp, Artificial Sequence
  Description of Artificial Sequence: Synthetic oligonucleotide
  Target: LAMA2; (-) strand; PAM type: NRG; PAM sequence: AAG
cagaaacaatgaaagacaaa

SEQ ID NO: 54325 - DNA, 20 bp, Artificial Sequence
  Description of Artificial Sequence: Synthetic oligonucleotide
  Target: LAMA2; (-) strand; PAM type: NRG; PAM sequence: AAG
taaagcaacagaaacaatga

SEQ ID NO: 54326 - DNA, 20 bp, Artificial Sequence
  Description of Artificial Sequence: Synthetic oligonucleotide
  Target: LAMA2; (-) strand; PAM type: NRG; PAM sequence: CAG
agaagctggagataaagcaa

SEQ ID NO: 54327 - DNA, 20 bp, Artificial Sequence
  Description of Artificial Sequence: Synthetic oligonucleotide
  Target: LAMA2; (-) strand; PAM type: NRG; PAM sequence: AAG
cagactagaagctggagata

SEQ ID NO: 54328 - DNA, 20 bp, Artificial Sequence
  Description of Artificial Sequence: Synthetic oligonucleotide
  Target: LAMA2; (-) strand; PAM type: NRG; PAM sequence: GAG
atatgtcagactagaagctg

SEQ ID NO: 54329 - DNA, 20 bp, Artificial Sequence
  Description of Artificial Sequence: Synthetic oligonucleotide
  Target: LAMA2; (-) strand; PAM type: NRG; PAM sequence: TGG
ccatatgtcagactagaagc

SEQ ID NO: 54330 - DNA, 20 bp, Artificial Sequence
  Description of Artificial Sequence: Synthetic oligonucleotide
  Target: LAMA2; (-) strand; PAM type: NRG; PAM sequence: AAG
cctaccatatgtcagactag

SEQ ID NO: 54331 - DNA, 20 bp, Artificial Sequence
  Description of Artificial Sequence: Synthetic oligonucleotide
  Target: LAMA2; (-) strand; PAM type: NRG; PAM sequence: TAG
gtgcctaccatatgtcagac

SEQ ID NO: 54332 - DNA, 20 bp, Artificial Sequence
  Description of Artificial Sequence: Synthetic oligonucleotide
  Target: LAMA2; (-) strand; PAM type: NRG; PAM sequence: CAG
tttgagtgcctaccatatgt

SEQ ID NO: 54333 - DNA, 20 bp, Artificial Sequence
  Description of Artificial Sequence: Synthetic oligonucleotide
  Target: LAMA2; (-) strand; PAM type: NRG; PAM sequence: GAG
tgcttcttcatccaattttt

SEQ ID NO: 54334 - DNA, 20 bp, Artificial Sequence
  Description of Artificial Sequence: Synthetic oligonucleotide
  Target: LAMA2; (-) strand; PAM type: NRG; PAM sequence: GAG
actcttggtctgtccaaaaa

SEQ ID NO: 54335 - DNA, 20 bp, Artificial Sequence
  Description of Artificial Sequence: Synthetic oligonucleotide
  Target: LAMA2; (-) strand; PAM type: NRG; PAM sequence: AAG
acactcttggtctgtccaaa

SEQ ID NO: 54336 - DNA, 20 bp, Artificial Sequence
  Description of Artificial Sequence: Synthetic oligonucleotide
  Target: LAMA2; (-) strand; PAM type: NRG; PAM sequence: TGG
gttttaaaaggcaacactct

SEQ ID NO: 54337 - DNA, 20 bp, Artificial Sequence
  Description of Artificial Sequence: Synthetic oligonucleotide
  Target: LAMA2; (-) strand; PAM type: NRG; PAM sequence: AGG
tacacataaaatgttttaaa

SEQ ID NO: 54338 - DNA, 20 bp, Artificial Sequence
  Description of Artificial Sequence: Synthetic oligonucleotide
  Target: LAMA2; (-) strand; PAM type: NRG; PAM sequence: AAG
gtacacataaaatgttttaa

SEQ ID NO: 54339 - DNA, 20 bp, Artificial Sequence
  Description of Artificial Sequence: Synthetic oligonucleotide
  Target: LAMA2; (-) strand; PAM type: NRG; PAM sequence: AAG
ataaaaggatcagggggaaa

SEQ ID NO: 54340 - DNA, 20 bp, Artificial Sequence
  Description of Artificial Sequence: Synthetic oligonucleotide
  Target: LAMA2; (-) strand; PAM type: NRG; PAM sequence: GGG
catactataaaaggatcagg

SEQ ID NO: 54341 - DNA, 20 bp, Artificial Sequence
  Description of Artificial Sequence: Synthetic oligonucleotide
  Target: LAMA2; (-) strand; PAM type: NRG; PAM sequence: GGG
tcatactataaaaggatcag

SEQ ID NO: 54342 - DNA, 20 bp, Artificial Sequence
  Description of Artificial Sequence: Synthetic oligonucleotide
  Target: LAMA2; (-) strand; PAM type: NRG; PAM sequence: GGG
ttcatactataaaaggatca

SEQ ID NO: 54343 - DNA, 20 bp, Artificial Sequence
  Description of Artificial Sequence: Synthetic oligonucleotide
  Target: LAMA2; (-) strand; PAM type: NRG; PAM sequence: AGG
attcatactataaaaggatc

SEQ ID NO: 54344 - DNA, 20 bp, Artificial Sequence
  Description of Artificial Sequence: Synthetic oligonucleotide
  Target: LAMA2; (-) strand; PAM type: NRG; PAM sequence: CAG
cattcatactataaaaggat

SEQ ID NO: 54345 - DNA, 20 bp, Artificial Sequence
  Description of Artificial Sequence: Synthetic oligonucleotide
  Target: LAMA2; (-) strand; PAM type: NRG; PAM sequence: AGG
acattcattcatactataaa

SEQ ID NO: 54346 - DNA, 20 bp, Artificial Sequence
  Description of Artificial Sequence: Synthetic oligonucleotide
  Target: LAMA2; (-) strand; PAM type: NRG; PAM sequence: AAG
aacattcattcatactataa

SEQ ID NO: 54347 - DNA, 20 bp, Artificial Sequence
  Description of Artificial Sequence: Synthetic oligonucleotide
  Target: LAMA2; (-) strand; PAM type: NRG; PAM sequence: TAG
atactgtgtttcagtatttg

SEQ ID NO: 54348 - DNA, 20 bp, Artificial Sequence
  Description of Artificial Sequence: Synthetic oligonucleotide
  Target: LAMA2; (-) strand; PAM type: NRG; PAM sequence: CAG
tatctgtccatactgtgttt

SEQ ID NO: 54349 - DNA, 20 bp, Artificial Sequence
  Description of Artificial Sequence: Synthetic oligonucleotide
  Target: LAMA2; (-) strand; PAM type: NRG; PAM sequence: AGG
aaatattttatctattatct

SEQ ID NO: 54350 - DNA, 20 bp, Artificial Sequence
  Description of Artificial Sequence: Synthetic oligonucleotide
  Target: LAMA2; (-) strand; PAM type: NRG; PAM sequence: TAG
aaaatattttatctattatc

SEQ ID NO: 54351 - DNA, 20 bp, Artificial Sequence
  Description of Artificial Sequence: Synthetic oligonucleotide
  Target: LAMA2; (-) strand; PAM type: NRG; PAM sequence: TAG
agaagcaagataatttaagg

SEQ ID NO: 54352 - DNA, 20 bp, Artificial Sequence
  Description of Artificial Sequence: Synthetic oligonucleotide
  Target: LAMA2; (-) strand; PAM type: NRG; PAM sequence: AGG
tcaagaagcaagataattta

SEQ ID NO: 54353 - DNA, 20 bp, Artificial Sequence
  Description of Artificial Sequence: Synthetic oligonucleotide
  Target: LAMA2; (-) strand; PAM type: NRG; PAM sequence: AAG
ctcaagaagcaagataattt

SEQ ID NO: 54354 - DNA, 20 bp, Artificial Sequence
  Description of Artificial Sequence: Synthetic oligonucleotide
  Target: LAMA2; (-) strand; PAM type: NRG; PAM sequence: AAG
aaaaaaaaaactcaagaagc

SEQ ID NO: 54355 - DNA, 20 bp, Artificial Sequence
  Description of Artificial Sequence: Synthetic oligonucleotide
  Target: LAMA2; (-) strand; PAM type: NRG; PAM sequence: AAG
ggggaaaaaaaaaactcaag

SEQ ID NO: 54356 - DNA, 20 bp, Artificial Sequence
  Description of Artificial Sequence: Synthetic oligonucleotide
  Target: LAMA2; (-) strand; PAM type: NRG; PAM sequence: AAG
agaggggaaaaaaaaaactc

SEQ ID NO: 54357 - DNA, 20 bp, Artificial Sequence
  Description of Artificial Sequence: Synthetic oligonucleotide
  Target: LAMA2; (-) strand; PAM type: NRG; PAM sequence: GGG
ttactggaatatccttagag

SEQ ID NO: 54358 - DNA, 20 bp, Artificial Sequence
  Description of Artificial Sequence: Synthetic oligonucleotide
  Target: LAMA2; (-) strand; PAM type: NRG; PAM sequence: GGG
cttactggaatatccttaga

SEQ ID NO: 54359 - DNA, 20 bp, Artificial Sequence
  Description of Artificial Sequence: Synthetic oligonucleotide
  Target: LAMA2; (-) strand; PAM type: NRG; PAM sequence: AGG
tcttactggaatatccttag

SEQ ID NO: 54360 - DNA, 20 bp, Artificial Sequence
  Description of Artificial Sequence: Synthetic oligonucleotide
  Target: LAMA2; (-) strand; PAM type: NRG; PAM sequence: GAG
ctcttactggaatatcctta

SEQ ID NO: 54361 - DNA, 20 bp, Artificial Sequence
  Description of Artificial Sequence: Synthetic oligonucleotide
  Target: LAMA2; (-) strand; PAM type: NRG; PAM sequence: TAG
aactcttactggaatatcct

SEQ ID NO: 54362 - DNA, 20 bp, Artificial Sequence
  Description of Artificial Sequence: Synthetic oligonucleotide
  Target: LAMA2; (-) strand; PAM type: NRG; PAM sequence: TGG
aaatactgctcaactcttac

SEQ ID NO: 54363 - DNA, 20 bp, Artificial Sequence
  Description of Artificial Sequence: Synthetic oligonucleotide
  Target: LAMA2; (-) strand; PAM type: NRG; PAM sequence: AAG
aaatatgcattccttatcca

SEQ ID NO: 54364 - DNA, 20 bp, Artificial Sequence
  Description of Artificial Sequence: Synthetic oligonucleotide
  Target: LAMA2; (-) strand; PAM type: NRG; PAM sequence: AAG
agaaaagttctgactaagcc

SEQ ID NO: 54365 - DNA, 20 bp, Artificial Sequence
  Description of Artificial Sequence: Synthetic oligonucleotide
  Target: LAMA2; (-) strand; PAM type: NRG; PAM sequence: AAG
catccagaaaagttctgact

SEQ ID NO: 54366 - DNA, 20 bp, Artificial Sequence
  Description of Artificial Sequence: Synthetic oligonucleotide
  Target: LAMA2; (-) strand; PAM type: NRG; PAM sequence: AAG
aaaagaccttccatccagaa

SEQ ID NO: 54367 - DNA, 20 bp, Artificial Sequence
  Description of Artificial Sequence: Synthetic oligonucleotide
  Target: LAMA2; (-) strand; PAM type: NRG; PAM sequence: CAG
atccaaaaagaccttccatc

SEQ ID NO: 54368 - DNA, 20 bp, Artificial Sequence
  Description of Artificial Sequence: Synthetic oligonucleotide
  Target: LAMA2; (-) strand; PAM type: NRG; PAM sequence: AAG
tagtataattctcatccaaa

SEQ ID NO: 54369 - DNA, 20 bp, Artificial Sequence
  Description of Artificial Sequence: Synthetic oligonucleotide
  Target: LAMA2; (-) strand; PAM type: NRG; PAM sequence: TAG
atgggcattttaatcttatg

SEQ ID NO: 54370 - DNA, 20 bp, Artificial Sequence
  Description of Artificial Sequence: Synthetic oligonucleotide
  Target: LAMA2; (-) strand; PAM type: NRG; PAM sequence: GGG
ctataatttacatcttaaat

SEQ ID NO: 54371 - DNA, 20 bp, Artificial Sequence
  Description of Artificial Sequence: Synthetic oligonucleotide
  Target: LAMA2; (-) strand; PAM type: NRG; PAM sequence: TGG
cctataatttacatcttaaa

SEQ ID NO: 54372 - DNA, 20 bp, Artificial Sequence
  Description of Artificial Sequence: Synthetic oligonucleotide
  Target: LAMA2; (-) strand; PAM type: NRG; PAM sequence: GAG
ccaatcaaatcaccccatgt

SEQ ID NO: 54373 - DNA, 20 bp, Artificial Sequence
  Description of Artificial Sequence: Synthetic oligonucleotide
  Target: LAMA2; (-) strand; PAM type: NRG; PAM sequence: CAG
gaaacaaagaaaaatgaaaa

SEQ ID NO: 54374 - DNA, 20 bp, Artificial Sequence
  Description of Artificial Sequence: Synthetic oligonucleotide
  Target: LAMA2; (-) strand; PAM type: NRG; PAM sequence: AAG
gtggtatctaaaaagaaaca

SEQ ID NO: 54375 - DNA, 20 bp, Artificial Sequence
  Description of Artificial Sequence: Synthetic oligonucleotide
  Target: LAMA2; (-) strand; PAM type: NRG; PAM sequence: AAG
ggactttggtggtatctaaa

SEQ ID NO: 54376 - DNA, 20 bp, Artificial Sequence
  Description of Artificial Sequence: Synthetic oligonucleotide
  Target: LAMA2; (-) strand; PAM type: NRG; PAM sequence: TGG
tgaaataggaaggactttgg

SEQ ID NO: 54377 - DNA, 20 bp, Artificial Sequence
  Description of Artificial Sequence: Synthetic oligonucleotide
  Target: LAMA2; (-) strand; PAM type: NRG; PAM sequence: TGG
gcctgaaataggaaggactt

SEQ ID NO: 54378 - DNA, 20 bp, Artificial Sequence
  Description of Artificial Sequence: Synthetic oligonucleotide
  Target: LAMA2; (-) strand; PAM type: NRG; PAM sequence: AGG
tctttttgcctgaaatagga

SEQ ID NO: 54379 - DNA, 20 bp, Artificial Sequence
  Description of Artificial Sequence: Synthetic oligonucleotide
  Target: LAMA2; (-) strand; PAM type: NRG; PAM sequence: AAG
atctttttgcctgaaatagg

SEQ ID NO: 54380 - DNA, 20 bp, Artificial Sequence
  Description of Artificial Sequence: Synthetic oligonucleotide
  Target: LAMA2; (-) strand; PAM type: NRG; PAM sequence: AGG
catatctttttgcctgaaat

SEQ ID NO: 54381 - DNA, 20 bp, Artificial Sequence
  Description of Artificial Sequence: Synthetic oligonucleotide
  Target: LAMA2; (-) strand; PAM type: NRG; PAM sequence: TAG
acatatctttttgcctgaaa

SEQ ID NO: 54382 - DNA, 20 bp, Artificial Sequence
  Description of Artificial Sequence: Synthetic oligonucleotide
  Target: LAMA2; (-) strand; PAM type: NRG; PAM sequence: TGG
tattgtagaggccttgtgag

SEQ ID NO: 54383 - DNA, 20 bp, Artificial Sequence
  Description of Artificial Sequence: Synthetic oligonucleotide
  Target: LAMA2; (-) strand; PAM type: NRG; PAM sequence: GAG
acatattgtagaggccttgt

SEQ ID NO: 54384 - DNA, 20 bp, Artificial Sequence
  Description of Artificial Sequence: Synthetic oligonucleotide
  Target: LAMA2; (-) strand; PAM type: NRG; PAM sequence: AGG
cattatctgacatattgtag

SEQ ID NO: 54385 - DNA, 20 bp, Artificial Sequence
  Description of Artificial Sequence: Synthetic oligonucleotide
  Target: LAMA2; (-) strand; PAM type: NRG; PAM sequence: GAG
gcattatctgacatattgta

SEQ ID NO: 54386 - DNA, 20 bp, Artificial Sequence
  Description of Artificial Sequence: Synthetic oligonucleotide
  Target: LAMA2; (-) strand; PAM type: NRG; PAM sequence: TAG
atgcattatctgacatattg

SEQ ID NO: 54387 - DNA, 20 bp, Artificial Sequence
  Description of Artificial Sequence: Synthetic oligonucleotide
  Target: LAMA2; (-) strand; PAM type: NRG; PAM sequence: AGG
caagagaccatacacatcca

SEQ ID NO: 54388 - DNA, 20 bp, Artificial Sequence
  Description of Artificial Sequence: Synthetic oligonucleotide
  Target: LAMA2; (-) strand; PAM type: NRG; PAM sequence: AAG
gcaagagaccatacacatcc

SEQ ID NO: 54389 - DNA, 20 bp, Artificial Sequence
  Description of Artificial Sequence: Synthetic oligonucleotide
  Target: LAMA2; (-) strand; PAM type: NRG; PAM sequence: GAG
tggctgataacttcaagcaa

SEQ ID NO: 54390 - DNA, 20 bp, Artificial Sequence
  Description of Artificial Sequence: Synthetic oligonucleotide
  Target: LAMA2; (-) strand; PAM type: NRG; PAM sequence: AAG
gctggctgataacttcaagc

SEQ ID NO: 54391 - DNA, 20 bp, Artificial Sequence
  Description of Artificial Sequence: Synthetic oligonucleotide
  Target: LAMA2; (-) strand; PAM type: NRG; PAM sequence: AAG
ttttgctggctgataacttc

SEQ ID NO: 54392 - DNA, 20 bp, Artificial Sequence
  Description of Artificial Sequence: Synthetic oligonucleotide
  Target: LAMA2; (-) strand; PAM type: NRG; PAM sequence: TGG
taagtatttcaccattttgc

SEQ ID NO: 54393 - DNA, 20 bp, Artificial Sequence
  Description of Artificial Sequence: Synthetic oligonucleotide
  Target: LAMA2; (-) strand; PAM type: NRG; PAM sequence: AAG
ccagatgtttgattaattct

SEQ ID NO: 54394 - DNA, 20 bp, Artificial Sequence
  Description of Artificial Sequence: Synthetic oligonucleotide
  Target: LAMA2; (-) strand; PAM type: NRG; PAM sequence: CAG
gtactgcgtttcttgacctc

SEQ ID NO: 54395 - DNA, 20 bp, Artificial Sequence
  Description of Artificial Sequence: Synthetic oligonucleotide
  Target: LAMA2; (-) strand; PAM type: NRG; PAM sequence: AGG
taaagtaaggagaagaatat

SEQ ID NO: 54396 - DNA, 20 bp, Artificial Sequence
  Description of Artificial Sequence: Synthetic oligonucleotide
  Target: LAMA2; (-) strand; PAM type: NRG; PAM sequence: TAG
ttaaagtaaggagaagaata

SEQ ID NO: 54397 - DNA, 20 bp, Artificial Sequence
  Description of Artificial Sequence: Synthetic oligonucleotide
  Target: LAMA2; (-) strand; PAM type: NRG; PAM sequence: AAG
ttcattcttaaagtaaggag

SEQ ID NO: 54398 - DNA, 20 bp, Artificial Sequence
  Description of Artificial Sequence: Synthetic oligonucleotide
  Target: LAMA2; (-) strand; PAM type: NRG; PAM sequence: GAG
agtttcattcttaaagtaag

SEQ ID NO: 54399 - DNA, 20 bp, Artificial Sequence
  Description of Artificial Sequence: Synthetic oligonucleotide
  Target: LAMA2; (-) strand; PAM type: NRG; PAM sequence: AGG
ttagtttcattcttaaagta

SEQ ID NO: 54400 - DNA, 20 bp, Artificial Sequence
  Description of Artificial Sequence: Synthetic oligonucleotide
  Target: LAMA2; (-) strand; PAM type: NRG; PAM sequence: AAG
attagtttcattcttaaagt

SEQ ID NO: 54401 - DNA, 20 bp, Artificial Sequence
  Description of Artificial Sequence: Synthetic oligonucleotide
  Target: LAMA2; (-) strand; PAM type: NRG; PAM sequence: AAG
ttttattagtttcattctta

SEQ ID NO: 54402 - DNA, 20 bp, Artificial Sequence
  Description of Artificial Sequence: Synthetic oligonucleotide
  Target: LAMA2; (-) strand; PAM type: NRG; PAM sequence: TAG
agctccgccttattttttat

SEQ ID NO: 54403 - DNA, 20 bp, Artificial Sequence
  Description of Artificial Sequence: Synthetic oligonucleotide
  Target: LAMA2; (-) strand; PAM type: NRG; PAM sequence: CAG
tccctcctttgctgaagggc

SEQ ID NO: 54404 - DNA, 20 bp, Artificial Sequence
  Description of Artificial Sequence: Synthetic oligonucleotide
  Target: LAMA2; (-) strand; PAM type: NRG; PAM sequence: GGG
aaaatccctcctttgctgaa

SEQ ID NO: 54405 - DNA, 20 bp, Artificial Sequence
  Description of Artificial Sequence: Synthetic oligonucleotide
  Target: LAMA2; (-) strand; PAM type: NRG; PAM sequence: AGG
aaaaatccctcctttgctga

SEQ ID NO: 54406 - DNA, 20 bp, Artificial Sequence
  Description of Artificial Sequence: Synthetic oligonucleotide
  Target: LAMA2; (-) strand; PAM type: NRG; PAM sequence: AAG
taaaaatccctcctttgctg

SEQ ID NO: 54407 - DNA, 20 bp, Artificial Sequence
  Description of Artificial Sequence: Synthetic oligonucleotide
  Target: LAMA2; (-) strand; PAM type: NRG; PAM sequence: AGG
gacctgggccctgatctcaa

SEQ ID NO: 54408 - DNA, 20 bp, Artificial Sequence
  Description of Artificial Sequence: Synthetic oligonucleotide
  Target: LAMA2; (-) strand; PAM type: NRG; PAM sequence: AAG
agacctgggccctgatctca

SEQ ID NO: 54409 - DNA, 20 bp, Artificial Sequence
  Description of Artificial Sequence: Synthetic oligonucleotide
  Target: LAMA2; (-) strand; PAM type: NRG; PAM sequence: GGG
agtagtaacaaaacagacct

SEQ ID NO: 54410 - DNA, 20 bp, Artificial Sequence
  Description of Artificial Sequence: Synthetic oligonucleotide
  Target: LAMA2; (-) strand; PAM type: NRG; PAM sequence: TGG
cagtagtaacaaaacagacc

SEQ ID NO: 54411 - DNA, 20 bp, Artificial Sequence
  Description of Artificial Sequence: Synthetic oligonucleotide
  Target: LAMA2; (-) strand; PAM type: NRG; PAM sequence: CAG
aggatacagtagtaacaaaa

SEQ ID NO: 54412 - DNA, 20 bp, Artificial Sequence
  Description of Artificial Sequence: Synthetic oligonucleotide
  Target: LAMA2; (-) strand; PAM type: NRG; PAM sequence: TAG
gctatgcagtaaggatacag

SEQ ID NO: 54413 - DNA, 20 bp, Artificial Sequence
  Description of Artificial Sequence: Synthetic oligonucleotide
  Target: LAMA2; (-) strand; PAM type: NRG; PAM sequence: CAG
tgtgctatgcagtaaggata

SEQ ID NO: 54414 - DNA, 20 bp, Artificial Sequence
  Description of Artificial Sequence: Synthetic oligonucleotide
  Target: LAMA2; (-) strand; PAM type: NRG; PAM sequence: AGG
aggcactgtgctatgcagta

SEQ ID NO: 54415 - DNA, 20 bp, Artificial Sequence
  Description of Artificial Sequence: Synthetic oligonucleotide
  Target: LAMA2; (-) strand; PAM type: NRG; PAM sequence: AAG
caggcactgtgctatgcagt

SEQ ID NO: 54416 - DNA, 20 bp, Artificial Sequence
  Description of Artificial Sequence: Synthetic oligonucleotide
  Target: LAMA2; (-) strand; PAM type: NRG; PAM sequence: CAG
gtgccaggcactgtgctatg

SEQ ID NO: 54417 - DNA, 20 bp, Artificial Sequence
  Description of Artificial Sequence: Synthetic oligonucleotide
  Target: LAMA2; (-) strand; PAM type: NRG; PAM sequence: AGG
ctgtgaccatgctaggtgcc

SEQ ID NO: 54418 - DNA, 20 bp, Artificial Sequence
  Description of Artificial Sequence: Synthetic oligonucleotide
  Target: LAMA2; (-) strand; PAM type: NRG; PAM sequence: CAG
actgtgaccatgctaggtgc

SEQ ID NO: 54419 - DNA, 20 bp, Artificial Sequence
  Description of Artificial Sequence: Synthetic oligonucleotide
  Target: LAMA2; (-) strand; PAM type: NRG; PAM sequence: AGG
atctttactgtgaccatgct

SEQ ID NO: 54420 - DNA, 20 bp, Artificial Sequence
  Description of Artificial Sequence: Synthetic oligonucleotide
  Target: LAMA2; (-) strand; PAM type: NRG; PAM sequence: TAG
aatctttactgtgaccatgc

SEQ ID NO: 54421 - DNA, 20 bp, Artificial Sequence
  Description of Artificial Sequence: Synthetic oligonucleotide
  Target: LAMA2; (-) strand; PAM type: NRG; PAM sequence: TAG
aagtgttccttcctaaaagt

SEQ ID NO: 54422 - DNA, 20 bp, Artificial Sequence
  Description of Artificial Sequence: Synthetic oligonucleotide
  Target: LAMA2; (-) strand; PAM type: NRG; PAM sequence: AAG
aagtaagtgttccttcctaa

SEQ ID NO: 54423 - DNA, 20 bp, Artificial Sequence
  Description of Artificial Sequence: Synthetic oligonucleotide
  Target: LAMA2; (-) strand; PAM type: NRG; PAM sequence: AAG
aataactgtaagtgggaagt

SEQ ID NO: 54424 - DNA, 20 bp, Artificial Sequence
  Description of Artificial Sequence: Synthetic oligonucleotide
  Target: LAMA2; (-) strand; PAM type: NRG; PAM sequence: AAG
tttcaataactgtaagtggg

SEQ ID NO: 54425 - DNA, 20 bp, Artificial Sequence
  Description of Artificial Sequence: Synthetic oligonucleotide
  Target: LAMA2; (-) strand; PAM type: NRG; PAM sequence: GGG
ttttttcaataactgtaagt

SEQ ID NO: 54426 - DNA, 20 bp, Artificial Sequence
  Description of Artificial Sequence: Synthetic oligonucleotide
  Target: LAMA2; (-) strand; PAM type: NRG; PAM sequence: TGG
gttttttcaataactgtaag

SEQ ID NO: 54427 - DNA, 20 bp, Artificial Sequence
  Description of Artificial Sequence: Synthetic oligonucleotide
  Target: LAMA2; (-) strand; PAM type: NRG; PAM sequence: AAG
atagttttttcaataactgt

SEQ ID NO: 54428 - DNA, 20 bp, Artificial Sequence
  Description of Artificial Sequence: Synthetic oligonucleotide
  Target: LAMA2; (-) strand; PAM type: NRG; PAM sequence: TAG
catgatgttaaccatcttca

SEQ ID NO: 54429 - DNA, 20 bp, Artificial Sequence
  Description of Artificial Sequence: Synthetic oligonucleotide
  Target: LAMA2; (-) strand; PAM type: NRG; PAM sequence: CAG
ttgtaactgcctacatccga

SEQ ID NO: 54430 - DNA, 20 bp, Artificial Sequence
  Description of Artificial Sequence: Synthetic oligonucleotide
  Target: LAMA2; (-) strand; PAM type: NRG; PAM sequence: TAG
ttcttttttctatcgttgag

SEQ ID NO: 54431 - DNA, 20 bp, Artificial Sequence
  Description of Artificial Sequence: Synthetic oligonucleotide
  Target: LAMA2; (-) strand; PAM type: NRG; PAM sequence: GAG
tagttcttttttctatcgtt

SEQ ID NO: 54432 - DNA, 20 bp, Artificial Sequence
  Description of Artificial Sequence: Synthetic oligonucleotide
  Target: LAMA2; (-) strand; PAM type: NRG; PAM sequence: TAG
atgtcctggtaaattctctt

SEQ ID NO: 54433 - DNA, 20 bp, Artificial Sequence
  Description of Artificial Sequence: Synthetic oligonucleotide
  Target: LAMA2; (-) strand; PAM type: NRG; PAM sequence: TGG
tacacctttctttcatgtcc

SEQ ID NO: 54434 - DNA, 20 bp, Artificial Sequence
  Description of Artificial Sequence: Synthetic oligonucleotide
  Target: LAMA2; (-) strand; PAM type: NRG; PAM sequence: AGG
taattggaacatcctgtttc

SEQ ID NO: 54435 - DNA, 20 bp, Artificial Sequence
  Description of Artificial Sequence: Synthetic oligonucleotide
  Target: LAMA2; (-) strand; PAM type: NRG; PAM sequence: CAG
ttaattggaacatcctgttt

SEQ ID NO: 54436 - DNA, 20 bp, Artificial Sequence
  Description of Artificial Sequence: Synthetic oligonucleotide
  Target: LAMA2; (-) strand; PAM type: NRG; PAM sequence: TGG
cttaaatttaaatatttaat

SEQ ID NO: 54437 - DNA, 20 bp, Artificial Sequence
  Description of Artificial Sequence: Synthetic oligonucleotide
  Target: LAMA2; (-) strand; PAM type: NRG; PAM sequence: TAG
gcagcagggcgtattttaaa

SEQ ID NO: 54438 - DNA, 20 bp, Artificial Sequence
  Description of Artificial Sequence: Synthetic oligonucleotide
  Target: LAMA2; (-) strand; PAM type: NRG; PAM sequence: GGG
acctaggaaggaaagcagca

SEQ ID NO: 54439 - DNA, 20 bp, Artificial Sequence
  Description of Artificial Sequence: Synthetic oligonucleotide
  Target: LAMA2; (-) strand; PAM type: NRG; PAM sequence: AGG
aacctaggaaggaaagcagc

SEQ ID NO: 54440 - DNA, 20 bp, Artificial Sequence
  Description of Artificial Sequence: Synthetic oligonucleotide
  Target: LAMA2; (-) strand; PAM type: NRG; PAM sequence: CAG
gaacctaggaaggaaagcag

SEQ ID NO: 54441 - DNA, 20 bp, Artificial Sequence
  Description of Artificial Sequence: Synthetic oligonucleotide
  Target: LAMA2; (-) strand; PAM type: NRG; PAM sequence: CAG
ggagaacctaggaaggaaag

SEQ ID NO: 54442 - DNA, 20 bp, Artificial Sequence
  Description of Artificial Sequence: Synthetic oligonucleotide
  Target: LAMA2; (-) strand; PAM type: NRG; PAM sequence: AAG
tgtggagaacctaggaagga

SEQ ID NO: 54443 - DNA, 20 bp, Artificial Sequence
  Description of Artificial Sequence: Synthetic oligonucleotide
  Target: LAMA2; (-) strand; PAM type: NRG; PAM sequence: AGG
aaggtgtggagaacctagga

SEQ ID NO: 54444 - DNA, 20 bp, Artificial Sequence
  Description of Artificial Sequence: Synthetic oligonucleotide
  Target: LAMA2; (-) strand; PAM type: NRG; PAM sequence: AAG
gaaggtgtggagaacctagg

SEQ ID NO: 54445 - DNA, 20 bp, Artificial Sequence
  Description of Artificial Sequence: Synthetic oligonucleotide
  Target: LAMA2; (-) strand; PAM type: NRG; PAM sequence: AGG
tttgaaggtgtggagaacct

SEQ ID NO: 54446 - DNA, 20 bp, Artificial Sequence
  Description of Artificial Sequence: Synthetic oligonucleotide
  Target: LAMA2; (-) strand; PAM type: NRG; PAM sequence: TAG
ctttgaaggtgtggagaacc

SEQ ID NO: 54447 - DNA, 20 bp, Artificial Sequence
  Description of Artificial Sequence: Synthetic oligonucleotide
  Target: LAMA2; (-) strand; PAM type: NRG; PAM sequence: GAG
tgatgagctttgaaggtgtg

SEQ ID NO: 54448 - DNA, 20 bp, Artificial Sequence
  Description of Artificial Sequence: Synthetic oligonucleotide
  Target: LAMA2; (-) strand; PAM type: NRG; PAM sequence: TGG
agtgatgagctttgaaggtg

SEQ ID NO: 54449 - DNA, 20 bp, Artificial Sequence
  Description of Artificial Sequence: Synthetic oligonucleotide
  Target: LAMA2; (-) strand; PAM type: NRG; PAM sequence: AGG
atccaagtgatgagctttga

SEQ ID NO: 54450 - DNA, 20 bp, Artificial Sequence
  Description of Artificial Sequence: Synthetic oligonucleotide
  Target: LAMA2; (-) strand; PAM type: NRG; PAM sequence: AAG
tatccaagtgatgagctttg

SEQ ID NO: 54451 - DNA, 20 bp, Artificial Sequence
  Description of Artificial Sequence: Synthetic oligonucleotide
  Target: LAMA2; (-) strand; PAM type: NRG; PAM sequence: GAG
ggcaatcttatccaagtgat

SEQ ID NO: 54452 - DNA, 20 bp, Artificial Sequence
  Description of Artificial Sequence: Synthetic oligonucleotide
  Target: LAMA2; (-) strand; PAM type: NRG; PAM sequence: AAG
gtaaagaggcaatcttatcc

SEQ ID NO: 54453 - DNA, 20 bp, Artificial Sequence
  Description of Artificial Sequence: Synthetic oligonucleotide
  Target: LAMA2; (-) strand; PAM type: NRG; PAM sequence: AGG
ttgatttggaaaaagtaaag

SEQ ID NO: 54454 - DNA, 20 bp, Artificial Sequence
  Description of Artificial Sequence: Synthetic oligonucleotide
  Target: LAMA2; (-) strand; PAM type: NRG; PAM sequence: GAG
attgatttggaaaaagtaaa

SEQ ID NO: 54455 - DNA, 20 bp, Artificial Sequence
  Description of Artificial Sequence: Synthetic oligonucleotide
  Target: LAMA2; (-) strand; PAM type: NRG; PAM sequence: AAG
agattgatttggaaaaagta

SEQ ID NO: 54456 - DNA, 20 bp, Artificial Sequence
  Description of Artificial Sequence: Synthetic oligonucleotide
  Target: LAMA2; (-) strand; PAM type: NRG; PAM sequence: AAG
gaaccagattgatttggaaa

SEQ ID NO: 54457 - DNA, 20 bp, Artificial Sequence
  Description of Artificial Sequence: Synthetic oligonucleotide
  Target: LAMA2; (-) strand; PAM type: NRG; PAM sequence: TGG
atggatgaaccagattgatt

SEQ ID NO: 54458 - DNA, 20 bp, Artificial Sequence
  Description of Artificial Sequence: Synthetic oligonucleotide
  Target: LAMA2; (-) strand; PAM type: NRG; PAM sequence: CAG
tttgcaaaaaatggatgaac

SEQ ID NO: 54459 - DNA, 20 bp, Artificial Sequence
  Description of Artificial Sequence: Synthetic oligonucleotide
  Target: LAMA2; (-) strand; PAM type: NRG; PAM sequence: TGG
gttttcatttttgcaaaaaa

SEQ ID NO: 54460 - DNA, 20 bp, Artificial Sequence
  Description of Artificial Sequence: Synthetic oligonucleotide
  Target: LAMA2; (-) strand; PAM type: NRG; PAM sequence: GAG
aataccttagtgaaagaggg

SEQ ID NO: 54461 - DNA, 20 bp, Artificial Sequence
  Description of Artificial Sequence: Synthetic oligonucleotide
  Target: LAMA2; (-) strand; PAM type: NRG; PAM sequence: GGG
caaataccttagtgaaagag

SEQ ID NO: 54462 - DNA, 20 bp, Artificial Sequence
  Description of Artificial Sequence: Synthetic oligonucleotide
  Target: LAMA2; (-) strand; PAM type: NRG; PAM sequence: GGG
tcaaataccttagtgaaaga

SEQ ID NO: 54463 - DNA, 20 bp, Artificial Sequence
  Description of Artificial Sequence: Synthetic oligonucleotide
  Target: LAMA2; (-) strand; PAM type: NRG; PAM sequence: AGG
ctcaaataccttagtgaaag

SEQ ID NO: 54464 - DNA, 20 bp, Artificial Sequence
  Description of Artificial Sequence: Synthetic oligonucleotide
  Target: LAMA2; (-) strand; PAM type: NRG; PAM sequence: GAG
gctcaaataccttagtgaaa

SEQ ID NO: 54465 - DNA, 20 bp, Artificial Sequence
  Description of Artificial Sequence: Synthetic oligonucleotide
  Target: LAMA2; (-) strand; PAM type: NRG; PAM sequence: AAG
tggctcaaataccttagtga

SEQ ID NO: 54466 - DNA, 20 bp, Artificial Sequence
  Description of Artificial Sequence: Synthetic oligonucleotide
  Target: LAMA2; (-) strand; PAM type: NRG; PAM sequence: TAG
tcttgatggctcaaatacct

SEQ ID NO: 54467 - DNA, 20 bp, Artificial Sequence
  Description of Artificial Sequence: Synthetic oligonucleotide
  Target: LAMA2; (-) strand; PAM type: NRG; PAM sequence: TGG
agacaggagggtgttcttga

SEQ ID NO: 54468 - DNA, 20 bp, Artificial Sequence
  Description of Artificial Sequence: Synthetic oligonucleotide
  Target: LAMA2; (-) strand; PAM type: NRG; PAM sequence: GGG
gccaccatgcctagacagga

SEQ ID NO: 54469 - DNA, 20 bp, Artificial Sequence
  Description of Artificial Sequence: Synthetic oligonucleotide
  Target: LAMA2; (-) strand; PAM type: NRG; PAM sequence: AGG
agccaccatgcctagacagg

SEQ ID NO: 54470 - DNA, 20 bp, Artificial Sequence
  Description of Artificial Sequence: Synthetic oligonucleotide
  Target: LAMA2; (-) strand; PAM type: NRG; PAM sequence: GAG
gagccaccatgcctagacag

SEQ ID NO: 54471 - DNA, 20 bp, Artificial Sequence
  Description of Artificial Sequence: Synthetic oligonucleotide
  Target: LAMA2; (-) strand; PAM type: NRG; PAM sequence: AGG
gtgagccaccatgcctagac

SEQ ID NO: 54472 - DNA, 20 bp, Artificial Sequence
  Description of Artificial Sequence: Synthetic oligonucleotide
  Target: LAMA2; (-) strand; PAM type: NRG; PAM sequence: CAG
tgtgagccaccatgcctaga

SEQ ID NO: 54473 - DNA, 20 bp, Artificial Sequence
  Description of Artificial Sequence: Synthetic oligonucleotide
  Target: LAMA2; (-) strand; PAM type: NRG; PAM sequence: TAG
tagctgtgagccaccatgcc

SEQ ID NO: 54474 - DNA, 20 bp, Artificial Sequence
  Description of Artificial Sequence: Synthetic oligonucleotide
  Target: LAMA2; (-) strand; PAM type: NRG; PAM sequence: GAG
agagctgggattatagctgt

SEQ ID NO: 54475 - DNA, 20 bp, Artificial Sequence
  Description of Artificial Sequence: Synthetic oligonucleotide
  Target: LAMA2; (-) strand; PAM type: NRG; PAM sequence: TAG
cttccaaagagctgggatta

SEQ ID NO: 54476 - DNA, 20 bp, Artificial Sequence
  Description of Artificial Sequence: Synthetic oligonucleotide
  Target: LAMA2; (-) strand; PAM type: NRG; PAM sequence: GGG
ccttggccttccaaagagct

SEQ ID NO: 54477 - DNA, 20 bp, Artificial Sequence
  Description of Artificial Sequence: Synthetic oligonucleotide
  Target: LAMA2; (-) strand; PAM type: NRG; PAM sequence: TGG
gccttggccttccaaagagc

SEQ ID NO: 54478 - DNA, 20 bp, Artificial Sequence
  Description of Artificial Sequence: Synthetic oligonucleotide
  Target: LAMA2; (-) strand; PAM type: NRG; PAM sequence: GAG
tcctgccttggccttccaaa

SEQ ID NO: 54479 - DNA, 20 bp, Artificial Sequence
  Description of Artificial Sequence: Synthetic oligonucleotide
  Target: LAMA2; (-) strand; PAM type: NRG; PAM sequence: AAG
cctcctgccttggccttcca

SEQ ID NO: 54480 - DNA, 20 bp, Artificial Sequence
  Description of Artificial Sequence: Synthetic oligonucleotide
  Target: LAMA2; (-) strand; PAM type: NRG; PAM sequence: TGG
ctcaagccatcctcctgcct

SEQ ID NO: 54481 - DNA, 20 bp, Artificial Sequence
  Description of Artificial Sequence: Synthetic oligonucleotide
  Target: LAMA2; (-) strand; PAM type: NRG; PAM sequence: AAG
ggtcttgaactcctggcctc

SEQ ID NO: 54482 - DNA, 20 bp, Artificial Sequence
  Description of Artificial Sequence: Synthetic oligonucleotide
  Target: LAMA2; (-) strand; PAM type: NRG; PAM sequence: TGG
ctaagctggtcttgaactcc

SEQ ID NO: 54483 - DNA, 20 bp, Artificial Sequence
  Description of Artificial Sequence: Synthetic oligonucleotide
  Target: LAMA2; (-) strand; PAM type: NRG; PAM sequence: TGG
tctcactattttgcctaagc

SEQ ID NO: 54484 - DNA, 20 bp, Artificial Sequence
  Description of Artificial Sequence: Synthetic oligonucleotide
  Target: LAMA2; (-) strand; PAM type: NRG; PAM sequence: AAG
gggatctcactattttgcct

SEQ ID NO: 54485 - DNA, 20 bp, Artificial Sequence
  Description of Artificial Sequence: Synthetic oligonucleotide
  Target: LAMA2; (-) strand; PAM type: NRG; PAM sequence: GGG
attttatttttgtagaggca

SEQ ID NO: 54486 - DNA, 20 bp, Artificial Sequence
  Description of Artificial Sequence: Synthetic oligonucleotide
  Target: LAMA2; (-) strand; PAM type: NRG; PAM sequence: AGG
cattttatttttgtagaggc

SEQ ID NO: 54487 - DNA, 20 bp, Artificial Sequence
  Description of Artificial Sequence: Synthetic oligonucleotide
  Target: LAMA2; (-) strand; PAM type: NRG; PAM sequence: CAG
tcattttatttttgtagagg

SEQ ID NO: 54488 - DNA, 20 bp, Artificial Sequence
  Description of Artificial Sequence: Synthetic oligonucleotide
  Target: LAMA2; (-) strand; PAM type: NRG; PAM sequence: AGG
ttttcattttatttttgtag

SEQ ID NO: 54489 - DNA, 20 bp, Artificial Sequence
  Description of Artificial Sequence: Synthetic oligonucleotide
  Target: LAMA2; (-) strand; PAM type: NRG; PAM sequence: GAG
tttttcattttatttttgta

SEQ ID NO: 54490 - DNA, 20 bp, Artificial Sequence
  Description of Artificial Sequence: Synthetic oligonucleotide
  Target: LAMA2; (-) strand; PAM type: NRG; PAM sequence: TAG
attttttcattttatttttg

SEQ ID NO: 54491 - DNA, 20 bp, Artificial Sequence
  Description of Artificial Sequence: Synthetic oligonucleotide
  Target: LAMA2; (-) strand; PAM type: NRG; PAM sequence: CAG
ctggcatgtgccaccacacg

SEQ ID NO: 54492 - DNA, 20 bp, Artificial Sequence
  Description of Artificial Sequence: Synthetic oligonucleotide
  Target: LAMA2; (-) strand; PAM type: NRG; PAM sequence: TGG
tcctgagtagctgggaccac

SEQ ID NO: 54493 - DNA, 20 bp, Artificial Sequence
  Description of Artificial Sequence: Synthetic oligonucleotide
  Target: LAMA2; (-) strand; PAM type: NRG; PAM sequence: GGG
tctcagcctcctgagtagct

SEQ ID NO: 54494 - DNA, 20 bp, Artificial Sequence
  Description of Artificial Sequence: Synthetic oligonucleotide
  Target: LAMA2; (-) strand; PAM type: NRG; PAM sequence: TGG
atctcagcctcctgagtagc

SEQ ID NO: 54495 - DNA, 20 bp, Artificial Sequence
  Description of Artificial Sequence: Synthetic oligonucleotide
  Target: LAMA2; (-) strand; PAM type: NRG; PAM sequence: TAG
tcccatctcagcctcctgag

SEQ ID NO: 54496 - DNA, 20 bp, Artificial Sequence
  Description of Artificial Sequence: Synthetic oligonucleotide
  Target: LAMA2; (-) strand; PAM type: NRG; PAM sequence: GAG
tcttcccatctcagcctcct

SEQ ID NO: 54497 - DNA, 20 bp, Artificial Sequence
  Description of Artificial Sequence: Synthetic oligonucleotide
  Target: LAMA2; (-) strand; PAM type: NRG; PAM sequence: CAG
ttcaagtaatcttcccatct

SEQ ID NO: 54498 - DNA, 20 bp, Artificial Sequence
  Description of Artificial Sequence: Synthetic oligonucleotide
  Target: LAMA2; (-) strand; PAM type: NRG; PAM sequence: AAG
agcctcgacctcccgggttc

SEQ ID NO: 54499 - DNA, 20 bp, Artificial Sequence
  Description of Artificial Sequence: Synthetic oligonucleotide
  Target: LAMA2; (-) strand; PAM type: NRG; PAM sequence: GGG
cactgcagcctcgacctccc

SEQ ID NO: 54500 - DNA, 20 bp, Artificial Sequence
  Description of Artificial Sequence: Synthetic oligonucleotide
  Target: LAMA2; (-) strand; PAM type: NRG; PAM sequence: CGG
tcactgcagcctcgacctcc

SEQ ID NO: 54501 - DNA, 20 bp, Artificial Sequence
  Description of Artificial Sequence: Synthetic oligonucleotide
  Target: LAMA2; (-) strand; PAM type: NRG; PAM sequence: CAG
ggtgtgatcatgggtcactg

SEQ ID NO: 54502 - DNA, 20 bp, Artificial Sequence
  Description of Artificial Sequence: Synthetic oligonucleotide
  Target: LAMA2; (-) strand; PAM type: NRG; PAM sequence: GGG
aagtgcagtggtgtgatcat

SEQ ID NO: 54503 - DNA, 20 bp, Artificial Sequence
  Description of Artificial Sequence: Synthetic oligonucleotide
  Target: LAMA2; (-) strand; PAM type: NRG; PAM sequence: TGG
aaagtgcagtggtgtgatca

SEQ ID NO: 54504 - DNA, 20 bp, Artificial Sequence
  Description of Artificial Sequence: Synthetic oligonucleotide
  Target: LAMA2; (-) strand; PAM type: NRG; PAM sequence: TGG
ttgcccaggctaaagtgcag

SEQ ID NO: 54505 - DNA, 20 bp, Artificial Sequence
  Description of Artificial Sequence: Synthetic oligonucleotide
  Target: LAMA2; (-) strand; PAM type: NRG; PAM sequence: CAG
ctgttgcccaggctaaagtg

SEQ ID NO: 54506 - DNA, 20 bp, Artificial Sequence
  Description of Artificial Sequence: Synthetic oligonucleotide
  Target: LAMA2; (-) strand; PAM type: NRG; PAM sequence: AAG
ttgctctgttgcccaggcta

SEQ ID NO: 54507 - DNA, 20 bp, Artificial Sequence
  Description of Artificial Sequence: Synthetic oligonucleotide
  Target: LAMA2; (-) strand; PAM type: NRG; PAM sequence: AGG
aaggtcttgctctgttgccc

SEQ ID NO: 54508 - DNA, 20 bp, Artificial Sequence
  Description of Artificial Sequence: Synthetic oligonucleotide
  Target: LAMA2; (-) strand; PAM type: NRG; PAM sequence: CAG
taaggtcttgctctgttgcc

SEQ ID NO: 54509 - DNA, 20 bp, Artificial Sequence
  Description of Artificial Sequence: Synthetic oligonucleotide
  Target: LAMA2; (-) strand; PAM type: NRG; PAM sequence: AGG
ttttttattgttcctagata

SEQ ID NO: 54510 - DNA, 20 bp, Artificial Sequence
  Description of Artificial Sequence: Synthetic oligonucleotide
  Target: LAMA2; (-) strand; PAM type: NRG; PAM sequence: AAG
attttttattgttcctagat

SEQ ID NO: 54511 - DNA, 20 bp, Artificial Sequence
  Description of Artificial Sequence: Synthetic oligonucleotide
  Target: LAMA2; (-) strand; PAM type: NRG; PAM sequence: TAG
aatgaattttttattgttcc

SEQ ID NO: 54512 - DNA, 20 bp, Artificial Sequence
  Description of Artificial Sequence: Synthetic oligonucleotide
  Target: LAMA2; (-) strand; PAM type: NRG; PAM sequence: TGG
tctataacatgtttttgttt

SEQ ID NO: 54513 - DNA, 20 bp, Artificial Sequence
  Description of Artificial Sequence: Synthetic oligonucleotide
  Target: LAMA2; (-) strand; PAM type: NRG; PAM sequence: TAG
ttgaaaattgaatctataga

SEQ ID NO: 54514 - DNA, 20 bp, Artificial Sequence
  Description of Artificial Sequence: Synthetic oligonucleotide
  Target: LAMA2; (-) strand; PAM type: NRG; PAM sequence: TAG
atttttgaaaattgaatcta

SEQ ID NO: 54515 - DNA, 20 bp, Artificial Sequence
  Description of Artificial Sequence: Synthetic oligonucleotide
  Target: LAMA2; (-) strand; PAM type: NRG; PAM sequence: AGG
tatttagagatgagaagcat

SEQ ID NO: 54516 - DNA, 20 bp, Artificial Sequence
  Description of Artificial Sequence: Synthetic oligonucleotide
  Target: LAMA2; (-) strand; PAM type: NRG; PAM sequence: TAG
atatttagagatgagaagca

SEQ ID NO: 54517 - DNA, 20 bp, Artificial Sequence
  Description of Artificial Sequence: Synthetic oligonucleotide
  Target: LAMA2; (-) strand; PAM type: NRG; PAM sequence: AAG
taacaatatttagagatgag

SEQ ID NO: 54518 - DNA, 20 bp, Artificial Sequence
  Description of Artificial Sequence: Synthetic oligonucleotide
  Target: LAMA2; (-) strand; PAM type: NRG; PAM sequence: GAG
ttataacaatatttagagat

SEQ ID NO: 54519 - DNA, 20 bp, Artificial Sequence
  Description of Artificial Sequence: Synthetic oligonucleotide
  Target: LAMA2; (-) strand; PAM type: NRG; PAM sequence: GAG
cagtattataacaatattta

SEQ ID NO: 54520 - DNA, 20 bp, Artificial Sequence
  Description of Artificial Sequence: Synthetic oligonucleotide
  Target: LAMA2; (-) strand; PAM type: NRG; PAM sequence: TAG
tgcagtattataacaatatt

SEQ ID NO: 54521 - DNA, 20 bp, Artificial Sequence
  Description of Artificial Sequence: Synthetic oligonucleotide
  Target: LAMA2; (-) strand; PAM type: NRG; PAM sequence: CAG
gaaagctaatttgaaaattg

SEQ ID NO: 54522 - DNA, 20 bp, Artificial Sequence
  Description of Artificial Sequence: Synthetic oligonucleotide
  Target: LAMA2; (-) strand; PAM type: NRG; PAM sequence: AAG
gtagcatttcttaaaggtga

SEQ ID NO: 54523 - DNA, 20 bp, Artificial Sequence
  Description of Artificial Sequence: Synthetic oligonucleotide
  Target: LAMA2; (-) strand; PAM type: NRG; PAM sequence: AGG
tggaaagtagcatttcttaa

SEQ ID NO: 54524 - DNA, 20 bp, Artificial Sequence
  Description of Artificial Sequence: Synthetic oligonucleotide
  Target: LAMA2; (-) strand; PAM type: NRG; PAM sequence: AAG
atggaaagtagcatttctta

SEQ ID NO: 54525 - DNA, 20 bp, Artificial Sequence
  Description of Artificial Sequence: Synthetic oligonucleotide
  Target: LAMA2; (-) strand; PAM type: NRG; PAM sequence: TAG
attcattccaatatggaaag

SEQ ID NO: 54526 - DNA, 20 bp, Artificial Sequence
  Description of Artificial Sequence: Synthetic oligonucleotide
  Target: LAMA2; (-) strand; PAM type: NRG; PAM sequence: AAG
attattcattccaatatgga

SEQ ID NO: 54527 - DNA, 20 bp, Artificial Sequence
  Description of Artificial Sequence: Synthetic oligonucleotide
  Target: LAMA2; (-) strand; PAM type: NRG; PAM sequence: TGG
attaattattcattccaata

SEQ ID NO: 54528 - DNA, 20 bp, Artificial Sequence
  Description of Artificial Sequence: Synthetic oligonucleotide
  Target: LAMA2; (-) strand; PAM type: NRG; PAM sequence: TGG
taaatcccagacatgcattt

SEQ ID NO: 54529 - DNA, 20 bp, Artificial Sequence
  Description of Artificial Sequence: Synthetic oligonucleotide
  Target: LAMA2; (-) strand; PAM type: NRG; PAM sequence: CAG
tcccaagattttctaaatcc

SEQ ID NO: 54530 - DNA, 20 bp, Artificial Sequence
  Description of Artificial Sequence: Synthetic oligonucleotide
  Target: LAMA2; (-) strand; PAM type: NRG; PAM sequence: AAG
aaggatggaaacagaatccc

SEQ ID NO: 54531 - DNA, 20 bp, Artificial Sequence
  Description of Artificial Sequence: Synthetic oligonucleotide
  Target: LAMA2; (-) strand; PAM type: NRG; PAM sequence: CAG
aaaataagcaaggatggaaa

SEQ ID NO: 54532 - DNA, 20 bp, Artificial Sequence
  Description of Artificial Sequence: Synthetic oligonucleotide
  Target: LAMA2; (-) strand; PAM type: NRG; PAM sequence: TGG
taataaaaaataagcaagga

SEQ ID NO: 54533 - DNA, 20 bp, Artificial Sequence
  Description of Artificial Sequence: Synthetic oligonucleotide
  Target: LAMA2; (-) strand; PAM type: NRG; PAM sequence: AGG
agcttaataaaaaataagca

SEQ ID NO: 54534 - DNA, 20 bp, Artificial Sequence
  Description of Artificial Sequence: Synthetic oligonucleotide
  Target: LAMA2; (-) strand; PAM type: NRG; PAM sequence: AAG
tagcttaataaaaaataagc

SEQ ID NO: 54535 - DNA, 20 bp, Artificial Sequence
  Description of Artificial Sequence: Synthetic oligonucleotide
  Target: LAMA2; (-) strand; PAM type: NRG; PAM sequence: AAG
gacttagcttaataaaaaat

SEQ ID NO: 54536 - DNA, 20 bp, Artificial Sequence
  Description of Artificial Sequence: Synthetic oligonucleotide
  Target: LAMA2; (-) strand; PAM type: NRG; PAM sequence: TAG
atttcttaaaatgaatgact

SEQ ID NO: 54537 - DNA, 20 bp, Artificial Sequence
  Description of Artificial Sequence: Synthetic oligonucleotide
  Target: LAMA2; (-) strand; PAM type: NRG; PAM sequence: GGG
cctctatagttggggtaaag

SEQ ID NO: 54538 - DNA, 20 bp, Artificial Sequence
  Description of Artificial Sequence: Synthetic oligonucleotide
  Target: LAMA2; (-) strand; PAM type: NRG; PAM sequence: GGG
acctctatagttggggtaaa

SEQ ID NO: 54539 - DNA, 20 bp, Artificial Sequence
  Description of Artificial Sequence: Synthetic oligonucleotide
  Target: LAMA2; (-) strand; PAM type: NRG; PAM sequence: AGG
tacctctatagttggggtaa

SEQ ID NO: 54540 - DNA, 20 bp, Artificial Sequence
  Description of Artificial Sequence: Synthetic oligonucleotide
  Target: LAMA2; (-) strand; PAM type: NRG; PAM sequence: AAG
atacctctatagttggggta

SEQ ID NO: 54541 - DNA, 20 bp, Artificial Sequence
  Description of Artificial Sequence: Synthetic oligonucleotide
  Target: LAMA2; (-) strand; PAM type: NRG; PAM sequence: GGG
agtatatacctctatagttg

SEQ ID NO: 54542 - DNA, 20 bp, Artificial Sequence
  Description of Artificial Sequence: Synthetic oligonucleotide
  Target: LAMA2; (-) strand; PAM type: NRG; PAM sequence: GGG
tagtatatacctctatagtt

SEQ ID NO: 54543 - DNA, 20 bp, Artificial Sequence
  Description of Artificial Sequence: Synthetic oligonucleotide
  Target: LAMA2; (-) strand; PAM type: NRG; PAM sequence: TGG
gtagtatatacctctatagt

SEQ ID NO: 54544 - DNA, 20 bp, Artificial Sequence
  Description of Artificial Sequence: Synthetic oligonucleotide
  Target: LAMA2; (-) strand; PAM type: NRG; PAM sequence: TAG
taaggtagtatatacctcta

SEQ ID NO: 54545 - DNA, 20 bp, Artificial Sequence
  Description of Artificial Sequence: Synthetic oligonucleotide
  Target: LAMA2; (-) strand; PAM type: NRG; PAM sequence: TAG
aagtatggtagtatataagg

SEQ ID NO: 54546 - DNA, 20 bp, Artificial Sequence
  Description of Artificial Sequence: Synthetic oligonucleotide
  Target: LAMA2; (-) strand; PAM type: NRG; PAM sequence: AGG
tttaagtatggtagtatata

SEQ ID NO: 54547 - DNA, 20 bp, Artificial Sequence
  Description of Artificial Sequence: Synthetic oligonucleotide
  Target: LAMA2; (-) strand; PAM type: NRG; PAM sequence: AAG
ttttaagtatggtagtatat

SEQ ID NO: 54548 - DNA, 20 bp, Artificial Sequence
  Description of Artificial Sequence: Synthetic oligonucleotide
  Target: LAMA2; (-) strand; PAM type: NRG; PAM sequence: TAG
cactaaccttttaagtatgg

SEQ ID NO: 54549 - DNA, 20 bp, Artificial Sequence
  Description of Artificial Sequence: Synthetic oligonucleotide
  Target: LAMA2; (-) strand; PAM type: NRG; PAM sequence: TGG
cttcactaaccttttaagta

SEQ ID NO: 54550 - DNA, 20 bp, Artificial Sequence
  Description of Artificial Sequence: Synthetic oligonucleotide
  Target: LAMA2; (-) strand; PAM type: NRG; PAM sequence: AAG
tgcctcttcactaacctttt

SEQ ID NO: 54551 - DNA, 20 bp, Artificial Sequence
  Description of Artificial Sequence: Synthetic oligonucleotide
  Target: LAMA2; (-) strand; PAM type: NRG; PAM sequence: AGG
tatagcatctggcatctaga

SEQ ID NO: 54552 - DNA, 20 bp, Artificial Sequence
  Description of Artificial Sequence: Synthetic oligonucleotide
  Target: LAMA2; (-) strand; PAM type: NRG; PAM sequence: AAG
gtatagcatctggcatctag

SEQ ID NO: 54553 - DNA, 20 bp, Artificial Sequence
  Description of Artificial Sequence: Synthetic oligonucleotide
  Target: LAMA2; (-) strand; PAM type: NRG; PAM sequence: TAG
tttgtatagcatctggcatc

SEQ ID NO: 54554 - DNA, 20 bp, Artificial Sequence
  Description of Artificial Sequence: Synthetic oligonucleotide
  Target: LAMA2; (-) strand; PAM type: NRG; PAM sequence: TGG
cttcacatttgtatagcatc

SEQ ID NO: 54555 - DNA, 20 bp, Artificial Sequence
  Description of Artificial Sequence: Synthetic oligonucleotide
  Target: LAMA2; (-) strand; PAM type: NRG; PAM sequence: TAG
tcatatgcttcacatttgta

SEQ ID NO: 54556 - DNA, 20 bp, Artificial Sequence
  Description of Artificial Sequence: Synthetic oligonucleotide
  Target: LAMA2; (-) strand; PAM type: NRG; PAM sequence: TGG
agcttcctttttcaccatgc

SEQ ID NO: 54557 - DNA, 20 bp, Artificial Sequence
  Description of Artificial Sequence: Synthetic oligonucleotide
  Target: LAMA2; (-) strand; PAM type: NRG; PAM sequence: TAG
tactatctgatggtcttaat

SEQ ID NO: 54558 - DNA, 20 bp, Artificial Sequence
  Description of Artificial Sequence: Synthetic oligonucleotide
  Target: LAMA2; (-) strand; PAM type: NRG; PAM sequence: TGG
taaaatcaaatactatctga

SEQ ID NO: 54559 - DNA, 20 bp, Artificial Sequence
  Description of Artificial Sequence: Synthetic oligonucleotide
  Target: LAMA2; (-) strand; PAM type: NRG; PAM sequence: GAG
gttatcatgatttctatgga

SEQ ID NO: 54560 - DNA, 20 bp, Artificial Sequence
  Description of Artificial Sequence: Synthetic oligonucleotide
  Target: LAMA2; (-) strand; PAM type: NRG; PAM sequence: GAG
tagttatcatgatttctatg

SEQ ID NO: 54561 - DNA, 20 bp, Artificial Sequence
  Description of Artificial Sequence: Synthetic oligonucleotide
  Target: LAMA2; (-) strand; PAM type: NRG; PAM sequence: TGG
catagttatcatgatttcta

SEQ ID NO: 54562 - DNA, 20 bp, Artificial Sequence
  Description of Artificial Sequence: Synthetic oligonucleotide
  Target: LAMA2; (-) strand; PAM type: NRG; PAM sequence: TAG
atttcagtaactatgtaaca

SEQ ID NO: 54563 - DNA, 20 bp, Artificial Sequence
  Description of Artificial Sequence: Synthetic oligonucleotide
  Target: LAMA2; (-) strand; PAM type: NRG; PAM sequence: CAG
caaacttaatgtctaaattt

SEQ ID NO: 54564 - DNA, 20 bp, Artificial Sequence
  Description of Artificial Sequence: Synthetic oligonucleotide
  Target: LAMA2; (-) strand; PAM type: NRG; PAM sequence: GAG
tagctaatataactgtcaga

SEQ ID NO: 54565 - DNA, 20 bp, Artificial Sequence
  Description of Artificial Sequence: Synthetic oligonucleotide
  Target: LAMA2; (-) strand; PAM type: NRG; PAM sequence: GAG
attagctaatataactgtca

SEQ ID NO: 54566 - DNA, 20 bp, Artificial Sequence
  Description of Artificial Sequence: Synthetic oligonucleotide
  Target: LAMA2; (-) strand; PAM type: NRG; PAM sequence: CAG
tgattagctaatataactgt

SEQ ID NO: 54567 - DNA, 20 bp, Artificial Sequence
  Description of Artificial Sequence: Synthetic oligonucleotide
  Target: LAMA2; (-) strand; PAM type: NRG; PAM sequence: TAG
taaaatttctgtttagtgat

SEQ ID NO: 54568 - DNA, 20 bp, Artificial Sequence
  Description of Artificial Sequence: Synthetic oligonucleotide
  Target: LAMA2; (-) strand; PAM type: NRG; PAM sequence: TAG
cttcttttaaaatttctgtt

SEQ ID NO: 54569 - DNA, 20 bp, Artificial Sequence
  Description of Artificial Sequence: Synthetic oligonucleotide
  Target: LAMA2; (-) strand; PAM type: NRG; PAM sequence: GAG
taaatattctcctaagactt

SEQ ID NO: 54570 - DNA, 20 bp, Artificial Sequence
  Description of Artificial Sequence: Synthetic oligonucleotide
  Target: LAMA2; (-) strand; PAM type: NRG; PAM sequence: AAG
tattagctaaatattctcct

SEQ ID NO: 54571 - DNA, 20 bp, Artificial Sequence
  Description of Artificial Sequence: Synthetic oligonucleotide
  Target: LAMA2; (-) strand; PAM type: NRG; PAM sequence: TAG
gcagtcaactgtagaattat

SEQ ID NO: 54572 - DNA, 20 bp, Artificial Sequence
  Description of Artificial Sequence: Synthetic oligonucleotide
  Target: LAMA2; (-) strand; PAM type: NRG; PAM sequence: TAG
ataaactctgcagtcaactg

SEQ ID NO: 54573 - DNA, 20 bp, Artificial Sequence
  Description of Artificial Sequence: Synthetic oligonucleotide
  Target: LAMA2; (-) strand; PAM type: NRG; PAM sequence: CAG
taaataatgaataaactctg

SEQ ID NO: 54574 - DNA, 20 bp, Artificial Sequence
  Description of Artificial Sequence: Synthetic oligonucleotide
  Target: LAMA2; (-) strand; PAM type: NRG; PAM sequence: AAG
gaaacagtaaagtgattgaa

SEQ ID NO: 54575 - DNA, 20 bp, Artificial Sequence
  Description of Artificial Sequence: Synthetic oligonucleotide
  Target: LAMA2; (-) strand; PAM type: NRG; PAM sequence: AAG
tcatgaatcaagaaacagta

SEQ ID NO: 54576 - DNA, 20 bp, Artificial Sequence
  Description of Artificial Sequence: Synthetic oligonucleotide
  Target: LAMA2; (-) strand; PAM type: NRG; PAM sequence: CAG
attcttcatgaatcaagaaa

SEQ ID NO: 54577 - DNA, 20 bp, Artificial Sequence
  Description of Artificial Sequence: Synthetic oligonucleotide
  Target: LAMA2; (-) strand; PAM type: NRG; PAM sequence: AAG
gcatgtattcttcatgaatc

SEQ ID NO: 54578 - DNA, 20 bp, Artificial Sequence
  Description of Artificial Sequence: Synthetic oligonucleotide
  Target: LAMA2; (-) strand; PAM type: NRG; PAM sequence: TGG
tgagaacagactaatacact

SEQ ID NO: 54579 - DNA, 20 bp, Artificial Sequence
  Description of Artificial Sequence: Synthetic oligonucleotide
  Target: LAMA2; (-) strand; PAM type: NRG; PAM sequence: CAG
tctttacagcagtgtgagaa

SEQ ID NO: 54580 - DNA, 20 bp, Artificial Sequence
  Description of Artificial Sequence: Synthetic oligonucleotide
  Target: LAMA2; (-) strand; PAM type: NRG; PAM sequence: GAG
ccagttctttacagcagtgt

SEQ ID NO: 54581 - DNA, 20 bp, Artificial Sequence
  Description of Artificial Sequence: Synthetic oligonucleotide
  Target: LAMA2; (-) strand; PAM type: NRG; PAM sequence: CAG
tcttggccagttctttacag

SEQ ID NO: 54582 - DNA, 20 bp, Artificial Sequence
  Description of Artificial Sequence: Synthetic oligonucleotide
  Target: LAMA2; (-) strand; PAM type: NRG; PAM sequence: CAG
cagtcttggccagttcttta

SEQ ID NO: 54583 - DNA, 20 bp, Artificial Sequence
  Description of Artificial Sequence: Synthetic oligonucleotide
  Target: LAMA2; (-) strand; PAM type: NRG; PAM sequence: CAG
gtaaattgcccagtcttggc

SEQ ID NO: 54584 - DNA, 20 bp, Artificial Sequence
  Description of Artificial Sequence: Synthetic oligonucleotide
  Target: LAMA2; (-) strand; PAM type: NRG; PAM sequence: TGG
ctttgtaaattgcccagtct

SEQ ID NO: 54585 - DNA, 20 bp, Artificial Sequence
  Description of Artificial Sequence: Synthetic oligonucleotide
  Target: LAMA2; (-) strand; PAM type: NRG; PAM sequence: CAG
aaacctctttgtaaattgcc

SEQ ID NO: 54586 - DNA, 20 bp, Artificial Sequence
  Description of Artificial Sequence: Synthetic oligonucleotide
  Target: LAMA2; (-) strand; PAM type: NRG; PAM sequence: GAG
ctccccagccaggtggaact

SEQ ID NO: 54587 - DNA, 20 bp, Artificial Sequence
  Description of Artificial Sequence: Synthetic oligonucleotide
  Target: LAMA2; (-) strand; PAM type: NRG; PAM sequence: TGG
ctgaggcctccccagccagg

SEQ ID NO: 54588 - DNA, 20 bp, Artificial Sequence
  Description of Artificial Sequence: Synthetic oligonucleotide
  Target: LAMA2; (-) strand; PAM type: NRG; PAM sequence: AGG
ttcctgaggcctccccagcc

SEQ ID NO: 54589 - DNA, 20 bp, Artificial Sequence
  Description of Artificial Sequence: Synthetic oligonucleotide
  Target: LAMA2; (-) strand; PAM type: NRG; PAM sequence: CAG
tttcctgaggcctccccagc

SEQ ID NO: 54590 - DNA, 20 bp, Artificial Sequence
  Description of Artificial Sequence: Synthetic oligonucleotide
  Target: LAMA2; (-) strand; PAM type: NRG; PAM sequence: CAG
taagtttcctgaggcctccc

SEQ ID NO: 54591 - DNA, 20 bp, Artificial Sequence
  Description of Artificial Sequence: Synthetic oligonucleotide
  Target: LAMA2; (-) strand; PAM type: NRG; PAM sequence: AGG
tcatgattgtaagtttcctg

SEQ ID NO: 54592 - DNA, 20 bp, Artificial Sequence
  Description of Artificial Sequence: Synthetic oligonucleotide
  Target: LAMA2; (-) strand; PAM type: NRG; PAM sequence: GAG
gtcatgattgtaagtttcct

SEQ ID NO: 54593 - DNA, 20 bp, Artificial Sequence
  Description of Artificial Sequence: Synthetic oligonucleotide
  Target: LAMA2; (-) strand; PAM type: NRG; PAM sequence: AAG
ttcccttctgtcatgattgt

SEQ ID NO: 54594 - DNA, 20 bp, Artificial Sequence
  Description of Artificial Sequence: Synthetic oligonucleotide
  Target: LAMA2; (-) strand; PAM type: NRG; PAM sequence: AAG
tccttcctgacatcatgaag

SEQ ID NO: 54595 - DNA, 20 bp, Artificial Sequence
  Description of Artificial Sequence: Synthetic oligonucleotide
  Target: LAMA2; (-) strand; PAM type: NRG; PAM sequence: AAG
ttctccttcctgacatcatg

SEQ ID NO: 54596 - DNA, 20 bp, Artificial Sequence
  Description of Artificial Sequence: Synthetic oligonucleotide
  Target: LAMA2; (-) strand; PAM type: NRG; PAM sequence: GGG
aggtctgatggttttataag

SEQ ID NO: 54597 - DNA, 20 bp, Artificial Sequence
  Description of Artificial Sequence: Synthetic oligonucleotide
  Target: LAMA2; (-) strand; PAM type: NRG; PAM sequence: GGG
gaggtctgatggttttataa

SEQ ID NO: 54598 - DNA, 20 bp, Artificial Sequence
  Description of Artificial Sequence: Synthetic oligonucleotide
  Target: LAMA2; (-) strand; PAM type: NRG; PAM sequence: AGG
tgaggtctgatggttttata

SEQ ID NO: 54599 - DNA, 20 bp, Artificial Sequence
  Description of Artificial Sequence: Synthetic oligonucleotide
  Target: LAMA2; (-) strand; PAM type: NRG; PAM sequence: AAG
atgaggtctgatggttttat

SEQ ID NO: 54600 - DNA, 20 bp, Artificial Sequence
  Description of Artificial Sequence: Synthetic oligonucleotide
  Target: LAMA2; (-) strand; PAM type: NRG; PAM sequence: TGG
agtagtctcatgaggtctga

SEQ ID NO: 54601 - DNA, 20 bp, Artificial Sequence
  Description of Artificial Sequence: Synthetic oligonucleotide
  Target: LAMA2; (-) strand; PAM type: NRG; PAM sequence: AGG
ggatagtgagtagtctcatg

SEQ ID NO: 54602 - DNA, 20 bp, Artificial Sequence
  Description of Artificial Sequence: Synthetic oligonucleotide
  Target: LAMA2; (-) strand; PAM type: NRG; PAM sequence: GAG
aggatagtgagtagtctcat

SEQ ID NO: 54603 - DNA, 20 bp, Artificial Sequence
  Description of Artificial Sequence: Synthetic oligonucleotide
  Target: LAMA2; (-) strand; PAM type: NRG; PAM sequence: TAG
gctgttctcaggatagtgag

SEQ ID NO: 54604 - DNA, 20 bp, Artificial Sequence
  Description of Artificial Sequence: Synthetic oligonucleotide
  Target: LAMA2; (-) strand; PAM type: NRG; PAM sequence: GAG
catgctgttctcaggatagt

SEQ ID NO: 54605 - DNA, 20 bp, Artificial Sequence
  Description of Artificial Sequence: Synthetic oligonucleotide
  Target: LAMA2; (-) strand; PAM type: NRG; PAM sequence: TAG
cccccatgctgttctcagga

SEQ ID NO: 54606 - DNA, 20 bp, Artificial Sequence
  Description of Artificial Sequence: Synthetic oligonucleotide
  Target: LAMA2; (-) strand; PAM type: NRG; PAM sequence: AGG
gattcccccatgctgttctc

SEQ ID NO: 54607 - DNA, 20 bp, Artificial Sequence
  Description of Artificial Sequence: Synthetic oligonucleotide
  Target: LAMA2; (-) strand; PAM type: NRG; PAM sequence: CAG
tgattcccccatgctgttct

SEQ ID NO: 54608 - DNA, 20 bp, Artificial Sequence
  Description of Artificial Sequence: Synthetic oligonucleotide
  Target: LAMA2; (-) strand; PAM type: NRG; PAM sequence: GAG
ggaaggtgattagatcatga

SEQ ID NO: 54609 - DNA, 20 bp, Artificial Sequence
  Description of Artificial Sequence: Synthetic oligonucleotide
  Target: LAMA2; (-) strand; PAM type: NRG; PAM sequence: GAG
ctggaaggtgattagatcat

SEQ ID NO: 54610 - DNA, 20 bp, Artificial Sequence
  Description of Artificial Sequence: Synthetic oligonucleotide
  Target: LAMA2; (-) strand; PAM type: NRG; PAM sequence: TAG
gggacctcctggaaggtgat

SEQ ID NO: 54611 - DNA, 20 bp, Artificial Sequence
  Description of Artificial Sequence: Synthetic oligonucleotide
  Target: LAMA2; (-) strand; PAM type: NRG; PAM sequence: AGG
tgggggagggacctcctgga

SEQ ID NO: 54612 - DNA, 20 bp, Artificial Sequence
  Description of Artificial Sequence: Synthetic oligonucleotide
  Target: LAMA2; (-) strand; PAM type: NRG; PAM sequence: AAG
ttgggggagggacctcctgg

SEQ ID NO: 54613 - DNA, 20 bp, Artificial Sequence
  Description of Artificial Sequence: Synthetic oligonucleotide
  Target: LAMA2; (-) strand; PAM type: NRG; PAM sequence: TGG
gtgttgggggagggacctcc

SEQ ID NO: 54614 - DNA, 20 bp, Artificial Sequence
  Description of Artificial Sequence: Synthetic oligonucleotide
  Target: LAMA2; (-) strand; PAM type: NRG; PAM sequence: GGG
aatccccatgtgttggggga

SEQ ID NO: 54615 - DNA, 20 bp, Artificial Sequence
  Description of Artificial Sequence: Synthetic oligonucleotide
  Target: LAMA2; (-) strand; PAM type: NRG; PAM sequence: AGG
taatccccatgtgttggggg

SEQ ID NO: 54616 - DNA, 20 bp, Artificial Sequence
  Description of Artificial Sequence: Synthetic oligonucleotide
  Target: LAMA2; (-) strand; PAM type: NRG; PAM sequence: GAG
gtaatccccatgtgttgggg

SEQ ID NO: 54617 - DNA, 20 bp, Artificial Sequence
  Description of Artificial Sequence: Synthetic oligonucleotide
  Target: LAMA2; (-) strand; PAM type: NRG; PAM sequence: GGG
ttgtaatccccatgtgttgg

SEQ ID NO: 54618 - DNA, 20 bp, Artificial Sequence
  Description of Artificial Sequence: Synthetic oligonucleotide
  Target: LAMA2; (-) strand; PAM type: NRG; PAM sequence: GGG
attgtaatccccatgtgttg

SEQ ID NO: 54619 - DNA, 20 bp, Artificial Sequence
  Description of Artificial Sequence: Synthetic oligonucleotide
  Target: LAMA2; (-) strand; PAM type: NRG; PAM sequence: GGG
aattgtaatccccatgtgtt

SEQ ID NO: 54620 - DNA, 20 bp, Artificial Sequence
  Description of Artificial Sequence: Synthetic oligonucleotide
  Target: LAMA2; (-) strand; PAM type: NRG; PAM sequence: TGG
aaattgtaatccccatgtgt

SEQ ID NO: 54621 - DNA, 20 bp, Artificial Sequence
  Description of Artificial Sequence: Synthetic oligonucleotide
  Target: LAMA2; (-) strand; PAM type: NRG; PAM sequence: CAG
cttagtgatatggtctggct

SEQ ID NO: 54622 - DNA, 20 bp, Artificial Sequence
  Description of Artificial Sequence: Synthetic oligonucleotide
  Target: LAMA2; (-) strand; PAM type: NRG; PAM sequence: TGG
attctcttagtgatatggtc

SEQ ID NO: 54623 - DNA, 20 bp, Artificial Sequence
  Description of Artificial Sequence: Synthetic oligonucleotide
  Target: LAMA2; (-) strand; PAM type: NRG; PAM sequence: TGG
tttttattctcttagtgata

SEQ ID NO: 54624 - DNA, 20 bp, Artificial Sequence
  Description of Artificial Sequence: Synthetic oligonucleotide
  Target: LAMA2; (-) strand; PAM type: NRG; PAM sequence: TAG
tgtgtccatttttattctct

SEQ ID NO: 54625 - DNA, 20 bp, Artificial Sequence
  Description of Artificial Sequence: Synthetic oligonucleotide
  Target: LAMA2; (-) strand; PAM type: NRG; PAM sequence: TGG
atttaaagggaataggaaag

SEQ ID NO: 54626 - DNA, 20 bp, Artificial Sequence
  Description of Artificial Sequence: Synthetic oligonucleotide
  Target: LAMA2; (-) strand; PAM type: NRG; PAM sequence: AAG
aatatttaaagggaatagga

SEQ ID NO: 54627 - DNA, 20 bp, Artificial Sequence
  Description of Artificial Sequence: Synthetic oligonucleotide
  Target: LAMA2; (-) strand; PAM type: NRG; PAM sequence: AGG
tggaaatatttaaagggaat

SEQ ID NO: 54628 - DNA, 20 bp, Artificial Sequence
  Description of Artificial Sequence: Synthetic oligonucleotide
  Target: LAMA2; (-) strand; PAM type: NRG; PAM sequence: TAG
ctggaaatatttaaagggaa

SEQ ID NO: 54629 - DNA, 20 bp, Artificial Sequence
  Description of Artificial Sequence: Synthetic oligonucleotide
  Target: LAMA2; (-) strand; PAM type: NRG; PAM sequence: GGG
ttcaactggaaatatttaaa

SEQ ID NO: 54630 - DNA, 20 bp, Artificial Sequence
  Description of Artificial Sequence: Synthetic oligonucleotide
  Target: LAMA2; (-) strand; PAM type: NRG; PAM sequence: AGG
tttcaactggaaatatttaa

SEQ ID NO: 54631 - DNA, 20 bp, Artificial Sequence
  Description of Artificial Sequence: Synthetic oligonucleotide
  Target: LAMA2; (-) strand; PAM type: NRG; PAM sequence: AAG
ctttcaactggaaatattta

SEQ ID NO: 54632 - DNA, 20 bp, Artificial Sequence
  Description of Artificial Sequence: Synthetic oligonucleotide
  Target: LAMA2; (-) strand; PAM type: NRG; PAM sequence: TGG
gtcatggaaatactttcaac

SEQ ID NO: 54633 - DNA, 20 bp, Artificial Sequence
  Description of Artificial Sequence: Synthetic oligonucleotide
  Target: LAMA2; (-) strand; PAM type: NRG; PAM sequence: TGG
tctaagaactcactaggtca

SEQ ID NO: 54634 - DNA, 20 bp, Artificial Sequence
  Description of Artificial Sequence: Synthetic oligonucleotide
  Target: LAMA2; (-) strand; PAM type: NRG; PAM sequence: AGG
gaattctctaagaactcact

SEQ ID NO: 54635 - DNA, 20 bp, Artificial Sequence
  Description of Artificial Sequence: Synthetic oligonucleotide
  Target: LAMA2; (-) strand; PAM type: NRG; PAM sequence: TAG
tgaattctctaagaactcac

SEQ ID NO: 54636 - DNA, 20 bp, Artificial Sequence
  Description of Artificial Sequence: Synthetic oligonucleotide
  Target: LAMA2; (-) strand; PAM type: NRG; PAM sequence: AAG
caatagtgattgaattctct

SEQ ID NO: 54637 - DNA, 20 bp, Artificial Sequence
  Description of Artificial Sequence: Synthetic oligonucleotide
  Target: LAMA2; (-) strand; PAM type: NRG; PAM sequence: TAG
tataccagttgggacatcaa

SEQ ID NO: 54638 - DNA, 20 bp, Artificial Sequence
  Description of Artificial Sequence: Synthetic oligonucleotide
  Target: LAMA2; (-) strand; PAM type: NRG; PAM sequence: GGG
cttcttttattataccagtt

SEQ ID NO: 54639 - DNA, 20 bp, Artificial Sequence
  Description of Artificial Sequence: Synthetic oligonucleotide
  Target: LAMA2; (-) strand; PAM type: NRG; PAM sequence: TGG
tcttcttttattataccagt

SEQ ID NO: 54640 - DNA, 20 bp, Artificial Sequence
  Description of Artificial Sequence: Synthetic oligonucleotide
  Target: LAMA2; (-) strand; PAM type: NRG; PAM sequence: CAG
gttttcttcttttattatac

SEQ ID NO: 54641 - DNA, 20 bp, Artificial Sequence
  Description of Artificial Sequence: Synthetic oligonucleotide
  Target: LAMA2; (-) strand; PAM type: NRG; PAM sequence: TGG
tgctgagagtgtgagaaagg

SEQ ID NO: 54642 - DNA, 20 bp, Artificial Sequence
  Description of Artificial Sequence: Synthetic oligonucleotide
  Target: LAMA2; (-) strand; PAM type: NRG; PAM sequence: AGG
atatgctgagagtgtgagaa

SEQ ID NO: 54643 - DNA, 20 bp, Artificial Sequence
  Description of Artificial Sequence: Synthetic oligonucleotide
  Target: LAMA2; (-) strand; PAM type: NRG; PAM sequence: AAG
tatatgctgagagtgtgaga

SEQ ID NO: 54644 - DNA, 20 bp, Artificial Sequence
  Description of Artificial Sequence: Synthetic oligonucleotide
  Target: LAMA2; (-) strand; PAM type: NRG; PAM sequence: GAG
tgtttatatgctgagagtgt

SEQ ID NO: 54645 - DNA, 20 bp, Artificial Sequence
  Description of Artificial Sequence: Synthetic oligonucleotide
  Target: LAMA2; (-) strand; PAM type: NRG; PAM sequence: GAG
attatgtgtttatatgctga

SEQ ID NO: 54646 - DNA, 20 bp, Artificial Sequence
  Description of Artificial Sequence: Synthetic oligonucleotide
  Target: LAMA2; (-) strand; PAM type: NRG; PAM sequence: GAG
cgattatgtgtttatatgct

SEQ ID NO: 54647 - DNA, 20 bp, Artificial Sequence
  Description of Artificial Sequence: Synthetic oligonucleotide
  Target: LAMA2; (-) strand; PAM type: NRG; PAM sequence: TAG
gccccacatgtcataatgaa

SEQ ID NO: 54648 - DNA, 20 bp, Artificial Sequence
  Description of Artificial Sequence: Synthetic oligonucleotide
  Target: LAMA2; (-) strand; PAM type: NRG; PAM sequence: TGG
tccaattacttttgtcactt

SEQ ID NO: 54649 - DNA, 20 bp, Artificial Sequence
  Description of Artificial Sequence: Synthetic oligonucleotide
  Target: LAMA2; (-) strand; PAM type: NRG; PAM sequence: GAG
tcttccaagtcctcattgct

SEQ ID NO: 54650 - DNA, 20 bp, Artificial Sequence
  Description of Artificial Sequence: Synthetic oligonucleotide
  Target: LAMA2; (-) strand; PAM type: NRG; PAM sequence: AAG
actgaaagctcatttcttcc

SEQ ID NO: 54651 - DNA, 20 bp, Artificial Sequence
  Description of Artificial Sequence: Synthetic oligonucleotide
  Target: LAMA2; (-) strand; PAM type: NRG; PAM sequence: AAG
ctactttaaaatgggactga

SEQ ID NO: 54652 - DNA, 20 bp, Artificial Sequence
  Description of Artificial Sequence: Synthetic oligonucleotide
  Target: LAMA2; (-) strand; PAM type: NRG; PAM sequence: GGG
cttctcttctactttaaaat

SEQ ID NO: 54653 - DNA, 20 bp, Artificial Sequence
  Description of Artificial Sequence: Synthetic oligonucleotide
  Target: LAMA2; (-) strand; PAM type: NRG; PAM sequence: TGG
ccttctcttctactttaaaa

SEQ ID NO: 54654 - DNA, 20 bp, Artificial Sequence
  Description of Artificial Sequence: Synthetic oligonucleotide
  Target: LAMA2; (-) strand; PAM type: NRG; PAM sequence: TAG
aaaacaccctccactttgcg

SEQ ID NO: 54655 - DNA, 20 bp, Artificial Sequence
  Description of Artificial Sequence: Synthetic oligonucleotide
  Target: LAMA2; (-) strand; PAM type: NRG; PAM sequence: GAG
gcaaagatgggtgacagagg

SEQ ID NO: 54656 - DNA, 20 bp, Artificial Sequence
  Description of Artificial Sequence: Synthetic oligonucleotide
  Target: LAMA2; (-) strand; PAM type: NRG; PAM sequence: GGG
gggcaaagatgggtgacaga

SEQ ID NO: 54657 - DNA, 20 bp, Artificial Sequence
  Description of Artificial Sequence: Synthetic oligonucleotide
  Target: LAMA2; (-) strand; PAM type: NRG; PAM sequence: AGG
tgggcaaagatgggtgacag

SEQ ID NO: 54658 - DNA, 20 bp, Artificial Sequence
  Description of Artificial Sequence: Synthetic oligonucleotide
  Target: LAMA2; (-) strand; PAM type: NRG; PAM sequence: GAG
gtgggcaaagatgggtgaca

SEQ ID NO: 54659 - DNA, 20 bp, Artificial Sequence
  Description of Artificial Sequence: Synthetic oligonucleotide
  Target: LAMA2; (-) strand; PAM type: NRG; PAM sequence: CAG
cagtgggcaaagatgggtga

SEQ ID NO: 54660 - DNA, 20 bp, Artificial Sequence
  Description of Artificial Sequence: Synthetic oligonucleotide
  Target: LAMA2; (-) strand; PAM type: NRG; PAM sequence: GGG
aggctgcagtgggcaaagat

SEQ ID NO: 54661 - DNA, 20 bp, Artificial Sequence
  Description of Artificial Sequence: Synthetic oligonucleotide
  Target: LAMA2; (-) strand; PAM type: NRG; PAM sequence: TGG
aaggctgcagtgggcaaaga

SEQ ID NO: 54662 - DNA, 20 bp, Artificial Sequence
  Description of Artificial Sequence: Synthetic oligonucleotide
  Target: LAMA2; (-) strand; PAM type: NRG; PAM sequence: AAG
gttcaaggctgcagtgggca

SEQ ID NO: 54663 - DNA, 20 bp, Artificial Sequence
  Description of Artificial Sequence: Synthetic oligonucleotide
  Target: LAMA2; (-) strand; PAM type: NRG; PAM sequence: GGG
cagtagttcaaggctgcagt

SEQ ID NO: 54664 - DNA, 20 bp, Artificial Sequence
  Description of Artificial Sequence: Synthetic oligonucleotide
  Target: LAMA2; (-) strand; PAM type: NRG; PAM sequence: TGG
ccagtagttcaaggctgcag

SEQ ID NO: 54665 - DNA, 20 bp, Artificial Sequence
  Description of Artificial Sequence: Synthetic oligonucleotide
  Target: LAMA2; (-) strand; PAM type: NRG; PAM sequence: CAG
agcccagtagttcaaggctg

SEQ ID NO: 54666 - DNA, 20 bp, Artificial Sequence
  Description of Artificial Sequence: Synthetic oligonucleotide
  Target: LAMA2; (-) strand; PAM type: NRG; PAM sequence: AGG
cacttgagcccagtagttca

SEQ ID NO: 54667 - DNA, 20 bp, Artificial Sequence
  Description of Artificial Sequence: Synthetic oligonucleotide
  Target: LAMA2; (-) strand; PAM type: NRG; PAM sequence: AAG
tcacttgagcccagtagttc

SEQ ID NO: 54668 - DNA, 20 bp, Artificial Sequence
  Description of Artificial Sequence: Synthetic oligonucleotide
  Target: LAMA2; (-) strand; PAM type: NRG; PAM sequence: TAG
ggaggatcacttgagcccag

SEQ ID NO: 54669 - DNA, 20 bp, Artificial Sequence
  Description of Artificial Sequence: Synthetic oligonucleotide
  Target: LAMA2; (-) strand; PAM type: NRG; PAM sequence: CAG
gcaggaggatcacttgagcc

SEQ ID NO: 54670 - DNA, 20 bp, Artificial Sequence
  Description of Artificial Sequence: Synthetic oligonucleotide
  Target: LAMA2; (-) strand; PAM type: NRG; PAM sequence: GAG
ctgaggcaggaggatcactt

SEQ ID NO: 54671 - DNA, 20 bp, Artificial Sequence
  Description of Artificial Sequence: Synthetic oligonucleotide
  Target: LAMA2; (-) strand; PAM type: NRG; PAM sequence: AGG
ctgagggagactgaggcagg

SEQ ID NO: 54672 - DNA, 20 bp, Artificial Sequence
  Description of Artificial Sequence: Synthetic oligonucleotide
  Target: LAMA2; (-) strand; PAM type: NRG; PAM sequence: GAG
actgagggagactgaggcag

SEQ ID NO: 54673 - DNA, 20 bp, Artificial Sequence
  Description of Artificial Sequence: Synthetic oligonucleotide
  Target: LAMA2; (-) strand; PAM type: NRG; PAM sequence: AGG
gcactgagggagactgaggc

SEQ ID NO: 54674 - DNA, 20 bp, Artificial Sequence
  Description of Artificial Sequence: Synthetic oligonucleotide
  Target: LAMA2; (-) strand; PAM type: NRG; PAM sequence: CAG
agcactgagggagactgagg

SEQ ID NO: 54675 - DNA, 20 bp, Artificial Sequence
  Description of Artificial Sequence: Synthetic oligonucleotide
  Target: LAMA2; (-) strand; PAM type: NRG; PAM sequence: AGG
cccagcactgagggagactg

SEQ ID NO: 54676 - DNA, 20 bp, Artificial Sequence
  Description of Artificial Sequence: Synthetic oligonucleotide
  Target: LAMA2; (-) strand; PAM type: NRG; PAM sequence: GAG
tcccagcactgagggagact

SEQ ID NO: 54677 - DNA, 20 bp, Artificial Sequence
  Description of Artificial Sequence: Synthetic oligonucleotide
  Target: LAMA2; (-) strand; PAM type: NRG; PAM sequence: GAG
ttgtaatcccagcactgagg

SEQ ID NO: 54678 - DNA, 20 bp, Artificial Sequence
  Description of Artificial Sequence: Synthetic oligonucleotide
  Target: LAMA2; (-) strand; PAM type: NRG; PAM sequence: GGG
atttgtaatcccagcactga

SEQ ID NO: 54679 - DNA, 20 bp, Artificial Sequence
  Description of Artificial Sequence: Synthetic oligonucleotide
  Target: LAMA2; (-) strand; PAM type: NRG; PAM sequence: AGG
catttgtaatcccagcactg

SEQ ID NO: 54680 - DNA, 20 bp, Artificial Sequence
  Description of Artificial Sequence: Synthetic oligonucleotide
  Target: LAMA2; (-) strand; PAM type: NRG; PAM sequence: GAG
acatttgtaatcccagcact

SEQ ID NO: 54681 - DNA, 20 bp, Artificial Sequence
  Description of Artificial Sequence: Synthetic oligonucleotide
  Target: LAMA2; (-) strand; PAM type: NRG; PAM sequence: CAG
gtagctcacatttgtaatcc

SEQ ID NO: 54682 - DNA, 20 bp, Artificial Sequence
  Description of Artificial Sequence: Synthetic oligonucleotide
  Target: LAMA2; (-) strand; PAM type: NRG; PAM sequence: TAG
agaaaacattgggtgttggg

SEQ ID NO: 54683 - DNA, 20 bp, Artificial Sequence
  Description of Artificial Sequence: Synthetic oligonucleotide
  Target: LAMA2; (-) strand; PAM type: NRG; PAM sequence: GGG
tcaagaaaacattgggtgtt

SEQ ID NO: 54684 - DNA, 20 bp, Artificial Sequence
  Description of Artificial Sequence: Synthetic oligonucleotide
  Target: LAMA2; (-) strand; PAM type: NRG; PAM sequence: TGG
atcaagaaaacattgggtgt

SEQ ID NO: 54685 - DNA, 20 bp, Artificial Sequence
  Description of Artificial Sequence: Synthetic oligonucleotide
  Target: LAMA2; (-) strand; PAM type: NRG; PAM sequence: GGG
tttacaatcaagaaaacatt

SEQ ID NO: 54686 - DNA, 20 bp, Artificial Sequence
  Description of Artificial Sequence: Synthetic oligonucleotide
  Target: LAMA2; (-) strand; PAM type: NRG; PAM sequence: TGG
ttttacaatcaagaaaacat

SEQ ID NO: 54687 - DNA, 20 bp, Artificial Sequence
  Description of Artificial Sequence: Synthetic oligonucleotide
  Target: LAMA2; (-) strand; PAM type: NRG; PAM sequence: AAG
atcaattttcttttacaatc

SEQ ID NO: 54688 - DNA, 20 bp, Artificial Sequence
  Description of Artificial Sequence: Synthetic oligonucleotide
  Target: LAMA2; (-) strand; PAM type: NRG; PAM sequence: GAG
tgtttccctctggtgaacat

SEQ ID NO: 54689 - DNA, 20 bp, Artificial Sequence
  Description of Artificial Sequence: Synthetic oligonucleotide
  Target: LAMA2; (-) strand; PAM type: NRG; PAM sequence: TGG
aatgaatggatgtttccctc

SEQ ID NO: 54690 - DNA, 20 bp, Artificial Sequence
  Description of Artificial Sequence: Synthetic oligonucleotide
  Target: LAMA2; (-) strand; PAM type: NRG; PAM sequence: TGG
aaacacattgataaaatgaa

SEQ ID NO: 54691 - DNA, 20 bp, Artificial Sequence
  Description of Artificial Sequence: Synthetic oligonucleotide
  Target: LAMA2; (-) strand; PAM type: NRG; PAM sequence: AAG
tttaaagtgaaagaaggagt

SEQ ID NO: 54692 - DNA, 20 bp, Artificial Sequence
  Description of Artificial Sequence: Synthetic oligonucleotide
  Target: LAMA2; (-) strand; PAM type: NRG; PAM sequence: GAG
acactttaaagtgaaagaag

SEQ ID NO: 54693 - DNA, 20 bp, Artificial Sequence
  Description of Artificial Sequence: Synthetic oligonucleotide
  Target: LAMA2; (-) strand; PAM type: NRG; PAM sequence: AGG
aaacactttaaagtgaaaga

SEQ ID NO: 54694 - DNA, 20 bp, Artificial Sequence
  Description of Artificial Sequence: Synthetic oligonucleotide
  Target: LAMA2; (-) strand; PAM type: NRG; PAM sequence: AAG
taaacactttaaagtgaaag

SEQ ID NO: 54695 - DNA, 20 bp, Artificial Sequence
  Description of Artificial Sequence: Synthetic oligonucleotide
  Target: LAMA2; (-) strand; PAM type: NRG; PAM sequence: AAG
agttaaacactttaaagtga

SEQ ID NO: 54696 - DNA, 20 bp, Artificial Sequence
  Description of Artificial Sequence: Synthetic oligonucleotide
  Target: LAMA2; (-) strand; PAM type: NRG; PAM sequence: AAG
aaaatgagttaaacacttta

SEQ ID NO: 54697 - DNA, 20 bp, Artificial Sequence
  Description of Artificial Sequence: Synthetic oligonucleotide
  Target: LAMA2; (-) strand; PAM type: NRG; PAM sequence: GAG
tatgaatagaatgcaaaaat

SEQ ID NO: 54698 - DNA, 20 bp, Artificial Sequence
  Description of Artificial Sequence: Synthetic oligonucleotide
  Target: LAMA2; (-) strand; PAM type: NRG; PAM sequence: TAG
tgactggtcatatttatgaa

SEQ ID NO: 54699 - DNA, 20 bp, Artificial Sequence
  Description of Artificial Sequence: Synthetic oligonucleotide
  Target: LAMA2; (-) strand; PAM type: NRG; PAM sequence: TGG
tacatattctaagttgtgac

SEQ ID NO: 54700 - DNA, 20 bp, Artificial Sequence
  Description of Artificial Sequence: Synthetic oligonucleotide
  Target: LAMA2; (-) strand; PAM type: NRG; PAM sequence: AAG
taatacagtatacatattct

SEQ ID NO: 54701 - DNA, 20 bp, Artificial Sequence
  Description of Artificial Sequence: Synthetic oligonucleotide
  Target: LAMA2; (-) strand; PAM type: NRG; PAM sequence: CAG
tgtgttaatatgaaataata

SEQ ID NO: 54702 - DNA, 20 bp, Artificial Sequence
  Description of Artificial Sequence: Synthetic oligonucleotide
  Target: LAMA2; (-) strand; PAM type: NRG; PAM sequence: AAG
catacacaaatctattatag

SEQ ID NO: 54703 - DNA, 20 bp, Artificial Sequence
  Description of Artificial Sequence: Synthetic oligonucleotide
  Target: LAMA2; (-) strand; PAM type: NRG; PAM sequence: TAG
aaccatacacaaatctatta

SEQ ID NO: 54704 - DNA, 20 bp, Artificial Sequence
  Description of Artificial Sequence: Synthetic oligonucleotide
  Target: LAMA2; (-) strand; PAM type: NRG; PAM sequence: AAG
gttaacatcagtatttcact

SEQ ID NO: 54705 - DNA, 20 bp, Artificial Sequence
  Description of Artificial Sequence: Synthetic oligonucleotide
  Target: LAMA2; (-) strand; PAM type: NRG; PAM sequence: CAG
aacatactagatgttaacat

SEQ ID NO: 54706 - DNA, 20 bp, Artificial Sequence
  Description of Artificial Sequence: Synthetic oligonucleotide
  Target: LAMA2; (-) strand; PAM type: NRG; PAM sequence: TAG
tatccctcaaataaacatac

SEQ ID NO: 54707 - DNA, 20 bp, Artificial Sequence
  Description of Artificial Sequence: Synthetic oligonucleotide
  Target: LAMA2; (-) strand; PAM type: NRG; PAM sequence: AAG
tgaaaggatgatttcactgt

SEQ ID NO: 54708 - DNA, 20 bp, Artificial Sequence
  Description of Artificial Sequence: Synthetic oligonucleotide
  Target: LAMA2; (-) strand; PAM type: NRG; PAM sequence: AGG
tacaaagaaatcttggtgaa

SEQ ID NO: 54709 - DNA, 20 bp, Artificial Sequence
  Description of Artificial Sequence: Synthetic oligonucleotide
  Target: LAMA2; (-) strand; PAM type: NRG; PAM sequence: AAG
ttacaaagaaatcttggtga

SEQ ID NO: 54710 - DNA, 20 bp, Artificial Sequence
  Description of Artificial Sequence: Synthetic oligonucleotide
  Target: LAMA2; (-) strand; PAM type: NRG; PAM sequence: TGG
agtgtcttacaaagaaatct

SEQ ID NO: 54711 - DNA, 20 bp, Artificial Sequence
  Description of Artificial Sequence: Synthetic oligonucleotide
  Target: LAMA2; (-) strand; PAM type: NRG; PAM sequence: AAG
tccagtaacagtgtcttaca

SEQ ID NO: 54712 - DNA, 20 bp, Artificial Sequence
  Description of Artificial Sequence: Synthetic oligonucleotide
  Target: LAMA2; (-) strand; PAM type: NRG; PAM sequence: CAG
acaaagcacaattccagtaa

SEQ ID NO: 54713 - DNA, 20 bp, Artificial Sequence
  Description of Artificial Sequence: Synthetic oligonucleotide
  Target: LAMA2; (-) strand; PAM type: NRG; PAM sequence: CAG
taatgcacaaagcacaattc

SEQ ID NO: 54714 - DNA, 20 bp, Artificial Sequence
  Description of Artificial Sequence: Synthetic oligonucleotide
  Target: LAMA2; (-) strand; PAM type: NRG; PAM sequence: AAG
tcaatgaaatgtaatgcaca

SEQ ID NO: 54715 - DNA, 20 bp, Artificial Sequence
  Description of Artificial Sequence: Synthetic oligonucleotide
  Target: LAMA2; (-) strand; PAM type: NRG; PAM sequence: AAG
tttgtagtgaagtagaatgg

SEQ ID NO: 54716 - DNA, 20 bp, Artificial Sequence
  Description of Artificial Sequence: Synthetic oligonucleotide
  Target: LAMA2; (-) strand; PAM type: NRG; PAM sequence: TGG
ccatttgtagtgaagtagaa

SEQ ID NO: 54717 - DNA, 20 bp, Artificial Sequence
  Description of Artificial Sequence: Synthetic oligonucleotide
  Target: LAMA2; (-) strand; PAM type: NRG; PAM sequence: TAG
aaattccatttgtagtgaag

SEQ ID NO: 54718 - DNA, 20 bp, Artificial Sequence
  Description of Artificial Sequence: Synthetic oligonucleotide
  Target: LAMA2; (-) strand; PAM type: NRG; PAM sequence: AAG
atgaaattccatttgtagtg

SEQ ID NO: 54719 - DNA, 20 bp, Artificial Sequence
  Description of Artificial Sequence: Synthetic oligonucleotide
  Target: LAMA2; (-) strand; PAM type: NRG; PAM sequence: TAG
atataatgaaattccatttg

SEQ ID NO: 54720 - DNA, 20 bp, Artificial Sequence
  Description of Artificial Sequence: Synthetic oligonucleotide
  Target: LAMA2; (-) strand; PAM type: NRG; PAM sequence: CAG
gaacccacttattgtggagt

SEQ ID NO: 54721 - DNA, 20 bp, Artificial Sequence
  Description of Artificial Sequence: Synthetic oligonucleotide
  Target: LAMA2; (-) strand; PAM type: NRG; PAM sequence: GAG
tctggaacccacttattgtg

SEQ ID NO: 54722 - DNA, 20 bp, Artificial Sequence
  Description of Artificial Sequence: Synthetic oligonucleotide
  Target: LAMA2; (-) strand; PAM type: NRG; PAM sequence: TGG
attctggaacccacttattg

SEQ ID NO: 54723 - DNA, 20 bp, Artificial Sequence
  Description of Artificial Sequence: Synthetic oligonucleotide
  Target: LAMA2; (-) strand; PAM type: NRG; PAM sequence: TGG
ctactaaatgtcaacgattc

SEQ ID NO: 54724 - DNA, 20 bp, Artificial Sequence
  Description of Artificial Sequence: Synthetic oligonucleotide
  Target: LAMA2; (-) strand; PAM type: NRG; PAM sequence: AAG
acagaatgtacaaagacact

SEQ ID NO: 54725 - DNA, 20 bp, Artificial Sequence
  Description of Artificial Sequence: Synthetic oligonucleotide
  Target: LAMA2; (-) strand; PAM type: NRG; PAM sequence: AAG
attttaatacagaatgtaca

SEQ ID NO: 54726 - DNA, 20 bp, Artificial Sequence
  Description of Artificial Sequence: Synthetic oligonucleotide
  Target: LAMA2; (-) strand; PAM type: NRG; PAM sequence: CAG
acacataatgcattttaata

SEQ ID NO: 54727 - DNA, 20 bp, Artificial Sequence
  Description of Artificial Sequence: Synthetic oligonucleotide
  Target: LAMA2; (-) strand; PAM type: NRG; PAM sequence: AAG
tttctttaaaacagaattga

SEQ ID NO: 54728 - DNA, 20 bp, Artificial Sequence
  Description of Artificial Sequence: Synthetic oligonucleotide
  Target: LAMA2; (-) strand; PAM type: NRG; PAM sequence: CAG
caatggcaatttctttaaaa

SEQ ID NO: 54729 - DNA, 20 bp, Artificial Sequence
  Description of Artificial Sequence: Synthetic oligonucleotide
  Target: LAMA2; (-) strand; PAM type: NRG; PAM sequence: TGG
catacaaccatgtaaatcaa

SEQ ID NO: 54730 - DNA, 20 bp, Artificial Sequence
  Description of Artificial Sequence: Synthetic oligonucleotide
  Target: LAMA2; (-) strand; PAM type: NRG; PAM sequence: TGG
gccaccaggaaatcaggcaa

SEQ ID NO: 54731 - DNA, 20 bp, Artificial Sequence
  Description of Artificial Sequence: Synthetic oligonucleotide
  Target: LAMA2; (-) strand; PAM type: NRG; PAM sequence: AGG
ataaaagccaccaggaaatc

SEQ ID NO: 54732 - DNA, 20 bp, Artificial Sequence
  Description of Artificial Sequence: Synthetic oligonucleotide
  Target: LAMA2; (-) strand; PAM type: NRG; PAM sequence: CAG
aataaaagccaccaggaaat

SEQ ID NO: 54733 - DNA, 20 bp, Artificial Sequence
  Description of Artificial Sequence: Synthetic oligonucleotide
  Target: LAMA2; (-) strand; PAM type: NRG; PAM sequence: AGG
gaaggaaaataaaagccacc

SEQ ID NO: 54734 - DNA, 20 bp, Artificial Sequence
  Description of Artificial Sequence: Synthetic oligonucleotide
  Target: LAMA2; (-) strand; PAM type: NRG; PAM sequence: CAG
agaaggaaaataaaagccac

SEQ ID NO: 54735 - DNA, 20 bp, Artificial Sequence
  Description of Artificial Sequence: Synthetic oligonucleotide
  Target: LAMA2; (-) strand; PAM type: NRG; PAM sequence: AAG
tgatttcagaaggaaaataa

SEQ ID NO: 54736 - DNA, 20 bp, Artificial Sequence
  Description of Artificial Sequence: Synthetic oligonucleotide
  Target: LAMA2; (-) strand; PAM type: NRG; PAM sequence: AGG
tatttgtaaatgatttcaga

SEQ ID NO: 54737 - DNA, 20 bp, Artificial Sequence
  Description of Artificial Sequence: Synthetic oligonucleotide
  Target: LAMA2; (-) strand; PAM type: NRG; PAM sequence: AAG
atatttgtaaatgatttcag

SEQ ID NO: 54738 - DNA, 20 bp, Artificial Sequence
  Description of Artificial Sequence: Synthetic oligonucleotide
  Target: LAMA2; (-) strand; PAM type: NRG; PAM sequence: CAG
gaaatatttgtaaatgattt

SEQ ID NO: 54739 - DNA, 20 bp, Artificial Sequence
  Description of Artificial Sequence: Synthetic oligonucleotide
  Target: LAMA2; (-) strand; PAM type: NRG; PAM sequence: AAG
ccaacagtagccaataccct

SEQ ID NO: 54740 - DNA, 20 bp, Artificial Sequence
  Description of Artificial Sequence: Synthetic oligonucleotide
  Target: LAMA2; (-) strand; PAM type: NRG; PAM sequence: TAG
atctcatttcaaaccaacag

SEQ ID NO: 54741 - DNA, 20 bp, Artificial Sequence
  Description of Artificial Sequence: Synthetic oligonucleotide
  Target: LAMA2; (-) strand; PAM type: NRG; PAM sequence: CAG
tgtatctcatttcaaaccaa

SEQ ID NO: 54742 - DNA, 20 bp, Artificial Sequence
  Description of Artificial Sequence: Synthetic oligonucleotide
  Target: LAMA2; (-) strand; PAM type: NRG; PAM sequence: AAG
caaacatatttataatccat

SEQ ID NO: 54743 - DNA, 20 bp, Artificial Sequence
  Description of Artificial Sequence: Synthetic oligonucleotide
  Target: LAMA2; (-) strand; PAM type: NRG; PAM sequence: GAG
aggttttagaattactgcta

SEQ ID NO: 54744 - DNA, 20 bp, Artificial Sequence
  Description of Artificial Sequence: Synthetic oligonucleotide
  Target: LAMA2; (-) strand; PAM type: NRG; PAM sequence: TAG
aaaggttttagaattactgc

SEQ ID NO: 54745 - DNA, 20 bp, Artificial Sequence
  Description of Artificial Sequence: Synthetic oligonucleotide
  Target: LAMA2; (-) strand; PAM type: NRG; PAM sequence: TAG
cttaatgtccacaaaggttt

SEQ ID NO: 54746 - DNA, 20 bp, Artificial Sequence
  Description of Artificial Sequence: Synthetic oligonucleotide
  Target: LAMA2; (-) strand; PAM type: NRG; PAM sequence: AGG
ttacagcttaatgtccacaa

SEQ ID NO: 54747 - DNA, 20 bp, Artificial Sequence
  Description of Artificial Sequence: Synthetic oligonucleotide
  Target: LAMA2; (-) strand; PAM type: NRG; PAM sequence: AAG
attacagcttaatgtccaca

SEQ ID NO: 54748 - DNA, 20 bp, Artificial Sequence
  Description of Artificial Sequence: Synthetic oligonucleotide
  Target: LAMA2; (-) strand; PAM type: NRG; PAM sequence: CAG
gcaagagaaagctacaatta

SEQ ID NO: 54749 - DNA, 20 bp, Artificial Sequence
  Description of Artificial Sequence: Synthetic oligonucleotide
  Target: LAMA2; (-) strand; PAM type: NRG; PAM sequence: AAG
ataaagaagcttgcaagaga

SEQ ID NO: 54750 - DNA, 20 bp, Artificial Sequence
  Description of Artificial Sequence: Synthetic oligonucleotide
  Target: LAMA2; (-) strand; PAM type: NRG; PAM sequence: GAG
gaggataaagaagcttgcaa

SEQ ID NO: 54751 - DNA, 20 bp, Artificial Sequence
  Description of Artificial Sequence: Synthetic oligonucleotide
  Target: LAMA2; (-) strand; PAM type: NRG; PAM sequence: AAG
cagaggataaagaagcttgc

SEQ ID NO: 54752 - DNA, 20 bp, Artificial Sequence
  Description of Artificial Sequence: Synthetic oligonucleotide
  Target: LAMA2; (-) strand; PAM type: NRG; PAM sequence: AAG
taataaagcagaggataaag

SEQ ID NO: 54753 - DNA, 20 bp, Artificial Sequence
  Description of Artificial Sequence: Synthetic oligonucleotide
  Target: LAMA2; (-) strand; PAM type: NRG; PAM sequence: AAG
gaataataaagcagaggata

SEQ ID NO: 54754 - DNA, 20 bp, Artificial Sequence
  Description of Artificial Sequence: Synthetic oligonucleotide
  Target: LAMA2; (-) strand; PAM type: NRG; PAM sequence: AGG
acaagggaataataaagcag

SEQ ID NO: 54755 - DNA, 20 bp, Artificial Sequence
  Description of Artificial Sequence: Synthetic oligonucleotide
  Target: LAMA2; (-) strand; PAM type: NRG; PAM sequence: GAG
tacaagggaataataaagca

SEQ ID NO: 54756 - DNA, 20 bp, Artificial Sequence
  Description of Artificial Sequence: Synthetic oligonucleotide
  Target: LAMA2; (-) strand; PAM type: NRG; PAM sequence: CAG
cctacaagggaataataaag

SEQ ID NO: 54757 - DNA, 20 bp, Artificial Sequence
  Description of Artificial Sequence: Synthetic oligonucleotide
  Target: LAMA2; (-) strand; PAM type: NRG; PAM sequence: AAG
tttcctacaagggaataata

SEQ ID NO: 54758 - DNA, 20 bp, Artificial Sequence
  Description of Artificial Sequence: Synthetic oligonucleotide
  Target: LAMA2; (-) strand; PAM type: NRG; PAM sequence: GGG
aaatacttaatttcctacaa

SEQ ID NO: 54759 - DNA, 20 bp, Artificial Sequence
  Description of Artificial Sequence: Synthetic oligonucleotide
  Target: LAMA2; (-) strand; PAM type: NRG; PAM sequence: AGG
aaaatacttaatttcctaca

SEQ ID NO: 54760 - DNA, 20 bp, Artificial Sequence
  Description of Artificial Sequence: Synthetic oligonucleotide
  Target: LAMA2; (-) strand; PAM type: NRG; PAM sequence: AAG
taaaatacttaatttcctac

SEQ ID NO: 54761 - DNA, 20 bp, Artificial Sequence
  Description of Artificial Sequence: Synthetic oligonucleotide
  Target: LAMA2; (-) strand; PAM type: NRG; PAM sequence: AAG
ttaaaagagaaagatgttct

SEQ ID NO: 54762 - DNA, 20 bp, Artificial Sequence
  Description of Artificial Sequence: Synthetic oligonucleotide
  Target: LAMA2; (-) strand; PAM type: NRG; PAM sequence: AAG
atttccctctttaaaagaga

SEQ ID NO: 54763 - DNA, 20 bp, Artificial Sequence
  Description of Artificial Sequence: Synthetic oligonucleotide
  Target: LAMA2; (-) strand; PAM type: NRG; PAM sequence: GAG
cttaatttccctctttaaaa

SEQ ID NO: 54764 - DNA, 20 bp, Artificial Sequence
  Description of Artificial Sequence: Synthetic oligonucleotide
  Target: LAMA2; (-) strand; PAM type: NRG; PAM sequence: AAG
atcttaatttccctctttaa

SEQ ID NO: 54765 - DNA, 20 bp, Artificial Sequence
  Description of Artificial Sequence: Synthetic oligonucleotide
  Target: LAMA2; (-) strand; PAM type: NRG; PAM sequence: AAG
ggaaagatcctatatttgcc

SEQ ID NO: 54766 - DNA, 20 bp, Artificial Sequence
  Description of Artificial Sequence: Synthetic oligonucleotide
  Target: LAMA2; (-) strand; PAM type: NRG; PAM sequence: AAG
cagaaacatacaatccagga

SEQ ID NO: 54767 - DNA, 20 bp, Artificial Sequence
  Description of Artificial Sequence: Synthetic oligonucleotide
  Target: LAMA2; (-) strand; PAM type: NRG; PAM sequence: AGG
atctcagaaacatacaatcc

SEQ ID NO: 54768 - DNA, 20 bp, Artificial Sequence
  Description of Artificial Sequence: Synthetic oligonucleotide
  Target: LAMA2; (-) strand; PAM type: NRG; PAM sequence: CAG
aatctcagaaacatacaatc

SEQ ID NO: 54769 - DNA, 20 bp, Artificial Sequence
  Description of Artificial Sequence: Synthetic oligonucleotide
  Target: LAMA2; (-) strand; PAM type: NRG; PAM sequence: CAG
gacgctctgtcaccaaatct

SEQ ID NO: 54770 - DNA, 20 bp, Artificial Sequence
  Description of Artificial Sequence: Synthetic oligonucleotide
  Target: LAMA2; (-) strand; PAM type: NRG; PAM sequence: CAG
tccttccccatcctccacag

SEQ ID NO: 54771 - DNA, 20 bp, Artificial Sequence
  Description of Artificial Sequence: Synthetic oligonucleotide
  Target: LAMA2; (-) strand; PAM type: NRG; PAM sequence: CAG
ccgtccttccccatcctcca

SEQ ID NO: 54772 - DNA, 20 bp, Artificial Sequence
  Description of Artificial Sequence: Synthetic oligonucleotide
  Target: LAMA2; (-) strand; PAM type: NRG; PAM sequence: CAG
ctctgtctacttcttcagcc

SEQ ID NO: 54773 - DNA, 20 bp, Artificial Sequence
  Description of Artificial Sequence: Synthetic oligonucleotide
  Target: LAMA2; (-) strand; PAM type: NRG; PAM sequence: CAG
actgtctctgtctacttctt

SEQ ID NO: 54774 - DNA, 20 bp, Artificial Sequence
  Description of Artificial Sequence: Synthetic oligonucleotide
  Target: LAMA2; (-) strand; PAM type: NRG; PAM sequence: AAG
cagcaggcctcttaaaacca

SEQ ID NO: 54775 - DNA, 20 bp, Artificial Sequence
  Description of Artificial Sequence: Synthetic oligonucleotide
  Target: LAMA2; (-) strand; PAM type: NRG; PAM sequence: AGG
ggtgagaagatcccagcagc

SEQ ID NO: 54776 - DNA, 20 bp, Artificial Sequence
  Description of Artificial Sequence: Synthetic oligonucleotide
  Target: LAMA2; (-) strand; PAM type: NRG; PAM sequence: CAG
gggtgagaagatcccagcag

SEQ ID NO: 54777 - DNA, 20 bp, Artificial Sequence
  Description of Artificial Sequence: Synthetic oligonucleotide
  Target: LAMA2; (-) strand; PAM type: NRG; PAM sequence: CAG
gatgggtgagaagatcccag

SEQ ID NO: 54778 - DNA, 20 bp, Artificial Sequence
  Description of Artificial Sequence: Synthetic oligonucleotide
  Target: LAMA2; (-) strand; PAM type: NRG; PAM sequence: CAG
agggatgggtgagaagatcc

SEQ ID NO: 54779 - DNA, 20 bp, Artificial Sequence
  Description of Artificial Sequence: Synthetic oligonucleotide
  Target: LAMA2; (-) strand; PAM type: NRG; PAM sequence: AAG
ctctgctagggatgggtgag

SEQ ID NO: 54780 - DNA, 20 bp, Artificial Sequence
  Description of Artificial Sequence: Synthetic oligonucleotide
  Target: LAMA2; (-) strand; PAM type: NRG; PAM sequence: GAG
gagctctgctagggatgggt

SEQ ID NO: 54781 - DNA, 20 bp, Artificial Sequence
  Description of Artificial Sequence: Synthetic oligonucleotide
  Target: LAMA2; (-) strand; PAM type: NRG; PAM sequence: GGG
ttctgagctctgctagggat

SEQ ID NO: 54782 - DNA, 20 bp, Artificial Sequence
  Description of Artificial Sequence: Synthetic oligonucleotide
  Target: LAMA2; (-) strand; PAM type: NRG; PAM sequence: TGG
cttctgagctctgctaggga

SEQ ID NO: 54783 - DNA, 20 bp, Artificial Sequence
  Description of Artificial Sequence: Synthetic oligonucleotide
  Target: LAMA2; (-) strand; PAM type: NRG; PAM sequence: GGG
cctacttctgagctctgcta

SEQ ID NO: 54784 - DNA, 20 bp, Artificial Sequence
  Description of Artificial Sequence: Synthetic oligonucleotide
  Target: LAMA2; (-) strand; PAM type: NRG; PAM sequence: AGG
gcctacttctgagctctgct

SEQ ID NO: 54785 - DNA, 20 bp, Artificial Sequence
  Description of Artificial Sequence: Synthetic oligonucleotide
  Target: LAMA2; (-) strand; PAM type: NRG; PAM sequence: TAG
tgcctacttctgagctctgc

SEQ ID NO: 54786 - DNA, 20 bp, Artificial Sequence
  Description of Artificial Sequence: Synthetic oligonucleotide
  Target: LAMA2; (-) strand; PAM type: NRG; PAM sequence: GAG
gcagctggatgcctacttct

SEQ ID NO: 54787 - DNA, 20 bp, Artificial Sequence
  Description of Artificial Sequence: Synthetic oligonucleotide
  Target: LAMA2; (-) strand; PAM type: NRG; PAM sequence: TGG
aaaacacaattacctgcagc

SEQ ID NO: 54788 - DNA, 20 bp, Artificial Sequence
  Description of Artificial Sequence: Synthetic oligonucleotide
  Target: LAMA2; (-) strand; PAM type: NRG; PAM sequence: CAG
gcccaaaacacaattacctg

SEQ ID NO: 54789 - DNA, 20 bp, Artificial Sequence
  Description of Artificial Sequence: Synthetic oligonucleotide
  Target: LAMA2; (-) strand; PAM type: NRG; PAM sequence: GAG
ggcactctaagggctccttt

SEQ ID NO: 54790 - DNA, 20 bp, Artificial Sequence
  Description of Artificial Sequence: Synthetic oligonucleotide
  Target: LAMA2; (-) strand; PAM type: NRG; PAM sequence: GGG
ctttaggtctggcactctaa

SEQ ID NO: 54791 - DNA, 20 bp, Artificial Sequence
  Description of Artificial Sequence: Synthetic oligonucleotide
  Target: LAMA2; (-) strand; PAM type: NRG; PAM sequence: AGG
tctttaggtctggcactcta

SEQ ID NO: 54792 - DNA, 20 bp, Artificial Sequence
  Description of Artificial Sequence: Synthetic oligonucleotide
  Target: LAMA2; (-) strand; PAM type: NRG; PAM sequence: AAG
ctctttaggtctggcactct

SEQ ID NO: 54793 - DNA, 20 bp, Artificial Sequence
  Description of Artificial Sequence: Synthetic oligonucleotide
  Target: LAMA2; (-) strand; PAM type: NRG; PAM sequence: TGG
gggagttgcctctttaggtc

SEQ ID NO: 54794 - DNA, 20 bp, Artificial Sequence
  Description of Artificial Sequence: Synthetic oligonucleotide
  Target: LAMA2; (-) strand; PAM type: NRG; PAM sequence: AGG
ttatcgggagttgcctcttt

SEQ ID NO: 54795 - DNA, 20 bp, Artificial Sequence
  Description of Artificial Sequence: Synthetic oligonucleotide
  Target: LAMA2; (-) strand; PAM type: NRG; PAM sequence: TAG
cttatcgggagttgcctctt

SEQ ID NO: 54796 - DNA, 20 bp, Artificial Sequence
  Description of Artificial Sequence: Synthetic oligonucleotide
  Target: LAMA2; (-) strand; PAM type: NRG; PAM sequence: GAG
actattgaaactcttatcgg

SEQ ID NO: 54797 - DNA, 20 bp, Artificial Sequence
  Description of Artificial Sequence: Synthetic oligonucleotide
  Target: LAMA2; (-) strand; PAM type: NRG; PAM sequence: GGG
aaactattgaaactcttatc

SEQ ID NO: 54798 - DNA, 20 bp, Artificial Sequence
  Description of Artificial Sequence: Synthetic oligonucleotide
  Target: LAMA2; (-) strand; PAM type: NRG; PAM sequence: CGG
aaaactattgaaactcttat

SEQ ID NO: 54799 - DNA, 20 bp, Artificial Sequence
  Description of Artificial Sequence: Synthetic oligonucleotide
  Target: LAMA2; (-) strand; PAM type: NRG; PAM sequence: TGG
aggaaatggcggttctagaa

SEQ ID NO: 54800 - DNA, 20 bp, Artificial Sequence
  Description of Artificial Sequence: Synthetic oligonucleotide
  Target: LAMA2; (-) strand; PAM type: NRG; PAM sequence: TAG
tcttaaggaaatggcggttc

SEQ ID NO: 54801 - DNA, 20 bp, Artificial Sequence
  Description of Artificial Sequence: Synthetic oligonucleotide
  Target: LAMA2; (-) strand; PAM type: NRG; PAM sequence: CGG
tcagactcttaaggaaatgg

SEQ ID NO: 54802 - DNA, 20 bp, Artificial Sequence
  Description of Artificial Sequence: Synthetic oligonucleotide
  Target: LAMA2; (-) strand; PAM type: NRG; PAM sequence: TGG
gcctcagactcttaaggaaa

SEQ ID NO: 54803 - DNA, 20 bp, Artificial Sequence
  Description of Artificial Sequence: Synthetic oligonucleotide
  Target: LAMA2; (-) strand; PAM type: NRG; PAM sequence: AGG
ccctgggcctcagactctta

SEQ ID NO: 54804 - DNA, 20 bp, Artificial Sequence
  Description of Artificial Sequence: Synthetic oligonucleotide
  Target: LAMA2; (-) strand; PAM type: NRG; PAM sequence: AAG
tccctgggcctcagactctt

SEQ ID NO: 54805 - DNA, 20 bp, Artificial Sequence
  Description of Artificial Sequence: Synthetic oligonucleotide
  Target: LAMA2; (-) strand; PAM type: NRG; PAM sequence: CAG
gggcgttggtccctgggcct

SEQ ID NO: 54806 - DNA, 20 bp, Artificial Sequence
  Description of Artificial Sequence: Synthetic oligonucleotide
  Target: LAMA2; (-) strand; PAM type: NRG; PAM sequence: GGG
tgtcctgggcgttggtccct

SEQ ID NO: 54807 - DNA, 20 bp, Artificial Sequence
  Description of Artificial Sequence: Synthetic oligonucleotide
  Target: LAMA2; (-) strand; PAM type: NRG; PAM sequence: TGG
atgtcctgggcgttggtccc

SEQ ID NO: 54808 - DNA, 20 bp, Artificial Sequence
  Description of Artificial Sequence: Synthetic oligonucleotide
  Target: LAMA2; (-) strand; PAM type: NRG; PAM sequence: TGG
tgtatatatgtcctgggcgt

SEQ ID NO: 54809 - DNA, 20 bp, Artificial Sequence
  Description of Artificial Sequence: Synthetic oligonucleotide
  Target: LAMA2; (-) strand; PAM type: NRG; PAM sequence: GGG
tcaaagtgtatatatgtcct

SEQ ID NO: 54810 - DNA, 20 bp, Artificial Sequence
  Description of Artificial Sequence: Synthetic oligonucleotide
  Target: LAMA2; (-) strand; PAM type: NRG; PAM sequence: TGG
atcaaagtgtatatatgtcc

SEQ ID NO: 54811 - DNA, 20 bp, Artificial Sequence
  Description of Artificial Sequence: Synthetic oligonucleotide
  Target: LAMA2; (-) strand; PAM type: NRG; PAM sequence: AAG
ttgaaatgttcctcctatca

SEQ ID NO: 54812 - DNA, 20 bp, Artificial Sequence
  Description of Artificial Sequence: Synthetic oligonucleotide
  Target: LAMA2; (-) strand; PAM type: NRG; PAM sequence: TGG
cctagtgagtgatcttgacc

SEQ ID NO: 54813 - DNA, 20 bp, Artificial Sequence
  Description of Artificial Sequence: Synthetic oligonucleotide
  Target: LAMA2; (-) strand; PAM type: NRG; PAM sequence: GAG
ggaggtgcacaagacctagt

SEQ ID NO: 54814 - DNA, 20 bp, Artificial Sequence
  Description of Artificial Sequence: Synthetic oligonucleotide
  Target: LAMA2; (-) strand; PAM type: NRG; PAM sequence: TAG
cggaggaggtgcacaagacc

SEQ ID NO: 54815 - DNA, 20 bp, Artificial Sequence
  Description of Artificial Sequence: Synthetic oligonucleotide
  Target: LAMA2; (-) strand; PAM type: NRG; PAM sequence: AAG
aagaggcggaggaggtgcac

SEQ ID NO: 54816 - DNA, 20 bp, Artificial Sequence
  Description of Artificial Sequence: Synthetic oligonucleotide
  Target: LAMA2; (-) strand; PAM type: NRG; PAM sequence: AGG
agacagaaaagaggcggagg

SEQ ID NO: 54817 - DNA, 20 bp, Artificial Sequence
  Description of Artificial Sequence: Synthetic oligonucleotide
  Target: LAMA2; (-) strand; PAM type: NRG; PAM sequence: GAG
cagacagaaaagaggcggag

SEQ ID NO: 54818 - DNA, 20 bp, Artificial Sequence
  Description of Artificial Sequence: Synthetic oligonucleotide
  Target: LAMA2; (-) strand; PAM type: NRG; PAM sequence: AGG
tccagacagaaaagaggcgg

SEQ ID NO: 54819 - DNA, 20 bp, Artificial Sequence
  Description of Artificial Sequence: Synthetic oligonucleotide
  Target: LAMA2; (-) strand; PAM type: NRG; PAM sequence: GAG
ctccagacagaaaagaggcg

SEQ ID NO: 54820 - DNA, 20 bp, Artificial Sequence
  Description of Artificial Sequence: Synthetic oligonucleotide
  Target: LAMA2; (-) strand; PAM type: NRG; PAM sequence: CGG
aactccagacagaaaagagg

SEQ ID NO: 54821 - DNA, 20 bp, Artificial Sequence
  Description of Artificial Sequence: Synthetic oligonucleotide
  Target: LAMA2; (-) strand; PAM type: NRG; PAM sequence: AGG
actaactccagacagaaaag

SEQ ID NO: 54822 - DNA, 20 bp, Artificial Sequence
  Description of Artificial Sequence: Synthetic oligonucleotide
  Target: LAMA2; (-) strand; PAM type: NRG; PAM sequence: GAG
tactaactccagacagaaaa

SEQ ID NO: 54823 - DNA, 20 bp, Artificial Sequence
  Description of Artificial Sequence: Synthetic oligonucleotide
  Target: LAMA2; (-) strand; PAM type: NRG; PAM sequence: AAG
gttactaactccagacagaa

SEQ ID NO: 54824 - DNA, 20 bp, Artificial Sequence
  Description of Artificial Sequence: Synthetic oligonucleotide
  Target: LAMA2; (-) strand; PAM type: NRG; PAM sequence: CAG
aggtggttactaactccaga

SEQ ID NO: 54825 - DNA, 20 bp, Artificial Sequence
  Description of Artificial Sequence: Synthetic oligonucleotide
  Target: LAMA2; (-) strand; PAM type: NRG; PAM sequence: CAG
tttgaggtggttactaactc

SEQ ID NO: 54826 - DNA, 20 bp, Artificial Sequence
  Description of Artificial Sequence: Synthetic oligonucleotide
  Target: LAMA2; (-) strand; PAM type: NRG; PAM sequence: TGG
cagaaagctgtcttttgagg

SEQ ID NO: 54827 - DNA, 20 bp, Artificial Sequence
  Description of Artificial Sequence: Synthetic oligonucleotide
  Target: LAMA2; (-) strand; PAM type: NRG; PAM sequence: AGG
agtcagaaagctgtcttttg

SEQ ID NO: 54828 - DNA, 20 bp, Artificial Sequence
  Description of Artificial Sequence: Synthetic oligonucleotide
  Target: LAMA2; (-) strand; PAM type: NRG; PAM sequence: GAG
gagtcagaaagctgtctttt

SEQ ID NO: 54829 - DNA, 20 bp, Artificial Sequence
  Description of Artificial Sequence: Synthetic oligonucleotide
  Target: LAMA2; (-) strand; PAM type: NRG; PAM sequence: AAG
tggtataatgacgagtcaga

SEQ ID NO: 54830 - DNA, 20 bp, Artificial Sequence
  Description of Artificial Sequence: Synthetic oligonucleotide
  Target: LAMA2; (-) strand; PAM type: NRG; PAM sequence: CAG
taggtggtataatgacgagt

SEQ ID NO: 54831 - DNA, 20 bp, Artificial Sequence
  Description of Artificial Sequence: Synthetic oligonucleotide
  Target: LAMA2; (-) strand; PAM type: NRG; PAM sequence: GAG
actgtaggtggtataatgac

SEQ ID NO: 54832 - DNA, 20 bp, Artificial Sequence
  Description of Artificial Sequence: Synthetic oligonucleotide
  Target: LAMA2; (-) strand; PAM type: NRG; PAM sequence: TGG
gctaaaagtaagactgtagg

SEQ ID NO: 54833 - DNA, 20 bp, Artificial Sequence
  Description of Artificial Sequence: Synthetic oligonucleotide
  Target: LAMA2; (-) strand; PAM type: NRG; PAM sequence: AGG
caagctaaaagtaagactgt

SEQ ID NO: 54834 - DNA, 20 bp, Artificial Sequence
  Description of Artificial Sequence: Synthetic oligonucleotide
  Target: LAMA2; (-) strand; PAM type: NRG; PAM sequence: TAG
ccaagctaaaagtaagactg

SEQ ID NO: 54835 - DNA, 20 bp, Artificial Sequence
  Description of Artificial Sequence: Synthetic oligonucleotide
  Target: LAMA2; (-) strand; PAM type: NRG; PAM sequence: AAG
cctcaaaccaagctaaaagt

SEQ ID NO: 54836 - DNA, 20 bp, Artificial Sequence
  Description of Artificial Sequence: Synthetic oligonucleotide
  Target: LAMA2; (-) strand; PAM type: NRG; PAM sequence: AAG
acaccctcaaaccaagctaa

SEQ ID NO: 54837 - DNA, 20 bp, Artificial Sequence
  Description of Artificial Sequence: Synthetic oligonucleotide
  Target: LAMA2; (-) strand; PAM type: NRG; PAM sequence: AAG
gaacaggacaccctcaaacc

SEQ ID NO: 54838 - DNA, 20 bp, Artificial Sequence
  Description of Artificial Sequence: Synthetic oligonucleotide
  Target: LAMA2; (-) strand; PAM type: NRG; PAM sequence: AGG
tgtttctgtaagtaatgaac

SEQ ID NO: 54839 - DNA, 20 bp, Artificial Sequence
  Description of Artificial Sequence: Synthetic oligonucleotide
  Target: LAMA2; (-) strand; PAM type: NRG; PAM sequence: CAG
ctgtttctgtaagtaatgaa

SEQ ID NO: 54840 - DNA, 20 bp, Artificial Sequence
  Description of Artificial Sequence: Synthetic oligonucleotide
  Target: LAMA2; (-) strand; PAM type: NRG; PAM sequence: AAG
cactccaaatctgtttctgt

SEQ ID NO: 54841 - DNA, 20 bp, Artificial Sequence
  Description of Artificial Sequence: Synthetic oligonucleotide
  Target: LAMA2; (-) strand; PAM type: NRG; PAM sequence: GGG
cttattaaaactggtgttaa

SEQ ID NO: 54842 - DNA, 20 bp, Artificial Sequence
  Description of Artificial Sequence: Synthetic oligonucleotide
  Target: LAMA2; (-) strand; PAM type: NRG; PAM sequence: AGG
gcttattaaaactggtgtta

SEQ ID NO: 54843 - DNA, 20 bp, Artificial Sequence
  Description of Artificial Sequence: Synthetic oligonucleotide
  Target: LAMA2; (-) strand; PAM type: NRG; PAM sequence: AAG
tgcttattaaaactggtgtt

SEQ ID NO: 54844 - DNA, 20 bp, Artificial Sequence
  Description of Artificial Sequence: Synthetic oligonucleotide
  Target: LAMA2; (-) strand; PAM type: NRG; PAM sequence: TGG
ttaaaaatgcttattaaaac

SEQ ID NO: 54845 - DNA, 20 bp, Artificial Sequence
  Description of Artificial Sequence: Synthetic oligonucleotide
  Target: LAMA2; (-) strand; PAM type: NRG; PAM sequence: TAG
ttctctgaatcacattattg

SEQ ID NO: 54846 - DNA, 20 bp, Artificial Sequence
  Description of Artificial Sequence: Synthetic oligonucleotide
  Target: LAMA2; (-) strand; PAM type: NRG; PAM sequence: AGG
atctagggagatagagacaa

SEQ ID NO: 54847 - DNA, 20 bp, Artificial Sequence
  Description of Artificial Sequence: Synthetic oligonucleotide
  Target: LAMA2; (-) strand; PAM type: NRG; PAM sequence: AAG
tatctagggagatagagaca

SEQ ID NO: 54848 - DNA, 20 bp, Artificial Sequence
  Description of Artificial Sequence: Synthetic oligonucleotide
  Target: LAMA2; (-) strand; PAM type: NRG; PAM sequence: GAG
tatttctatctagggagata

SEQ ID NO: 54849 - DNA, 20 bp, Artificial Sequence
  Description of Artificial Sequence: Synthetic oligonucleotide
  Target: LAMA2; (-) strand; PAM type: NRG; PAM sequence: TAG
catatttctatctagggaga

SEQ ID NO: 54850 - DNA, 20 bp, Artificial Sequence
  Description of Artificial Sequence: Synthetic oligonucleotide
  Target: LAMA2; (-) strand; PAM type: NRG; PAM sequence: GAG
tccacatatttctatctagg

SEQ ID NO: 54851 - DNA, 20 bp, Artificial Sequence
  Description of Artificial Sequence: Synthetic oligonucleotide
  Target: LAMA2; (-) strand; PAM type: NRG; PAM sequence: GGG
cctccacatatttctatcta

SEQ ID NO: 54852 - DNA, 20 bp, Artificial Sequence
  Description of Artificial Sequence: Synthetic oligonucleotide
  Target: LAMA2; (-) strand; PAM type: NRG; PAM sequence: AGG
acctccacatatttctatct

SEQ ID NO: 54853 - DNA, 20 bp, Artificial Sequence
  Description of Artificial Sequence: Synthetic oligonucleotide
  Target: LAMA2; (-) strand; PAM type: NRG; PAM sequence: TAG
aacctccacatatttctatc

SEQ ID NO: 54854 - DNA, 20 bp, Artificial Sequence
  Description of Artificial Sequence: Synthetic oligonucleotide
  Target: LAMA2; (-) strand; PAM type: NRG; PAM sequence: AGG
aaaaaataaagaaactcagc

SEQ ID NO: 54855 - DNA, 20 bp, Artificial Sequence
  Description of Artificial Sequence: Synthetic oligonucleotide
  Target: LAMA2; (-) strand; PAM type: NRG; PAM sequence: CAG
aaaaaaataaagaaactcag

SEQ ID NO: 54856 - DNA, 20 bp, Artificial Sequence
  Description of Artificial Sequence: Synthetic oligonucleotide
  Target: LAMA2; (-) strand; PAM type: NRG; PAM sequence: CAG
aggaaaaaaataaagaaact

SEQ ID NO: 54857 - DNA, 20 bp, Artificial Sequence
  Description of Artificial Sequence: Synthetic oligonucleotide
  Target: LAMA2; (-) strand; PAM type: NRG; PAM sequence: AAG
aaaaagaaaggaaaaaaata

SEQ ID NO: 54858 - DNA, 20 bp, Artificial Sequence
  Description of Artificial Sequence: Synthetic oligonucleotide
  Target: LAMA2; (-) strand; PAM type: NRG; PAM sequence: AGG
aaaaaaaaaaaaaaaaagaa

SEQ ID NO: 54859 - DNA, 20 bp, Artificial Sequence
  Description of Artificial Sequence: Synthetic oligonucleotide
  Target: LAMA2; (-) strand; PAM type: NRG; PAM sequence: AAG
aaaaaaaaaaaaaaaaaaga

SEQ ID NO: 54860 - DNA, 20 bp, Artificial Sequence
  Description of Artificial Sequence: Synthetic oligonucleotide
  Target: LAMA2; (-) strand; PAM type: NRG; PAM sequence: AAG
ttaaaaaaaaaaaaaaaaaa

SEQ ID NO: 54861 - DNA, 20 bp, Artificial Sequence
  Description of Artificial Sequence: Synthetic oligonucleotide
  Target: LAMA2; (-) strand; PAM type: NRG; PAM sequence: GAG
tccagcctgggcaacagggt

SEQ ID NO: 54862 - DNA, 20 bp, Artificial Sequence
  Description of Artificial Sequence: Synthetic oligonucleotide
  Target: LAMA2; (-) strand; PAM type: NRG; PAM sequence: GGG
gcactccagcctgggcaaca

SEQ ID NO: 54863 - DNA, 20 bp, Artificial Sequence
  Description of Artificial Sequence: Synthetic oligonucleotide
  Target: LAMA2; (-) strand; PAM type: NRG; PAM sequence: AGG
tgcactccagcctgggcaac

SEQ ID NO: 54864 - DNA, 20 bp, Artificial Sequence
  Description of Artificial Sequence: Synthetic oligonucleotide
  Target: LAMA2; (-) strand; PAM type: NRG; PAM sequence: CAG
ttgcactccagcctgggcaa

SEQ ID NO: 54865 - DNA, 20 bp, Artificial Sequence
  Description of Artificial Sequence: Synthetic oligonucleotide
  Target: LAMA2; (-) strand; PAM type: NRG; PAM sequence: GGG
acgccattgcactccagcct

SEQ ID NO: 54866 - DNA, 20 bp, Artificial Sequence
  Description of Artificial Sequence: Synthetic oligonucleotide
  Target: LAMA2; (-) strand; PAM type: NRG; PAM sequence: TGG
cacgccattgcactccagcc

SEQ ID NO: 54867 - DNA, 20 bp, Artificial Sequence
  Description of Artificial Sequence: Synthetic oligonucleotide
  Target: LAMA2; (-) strand; PAM type: NRG; PAM sequence: CAG
aagatcacgccattgcactc

SEQ ID NO: 54868 - DNA, 20 bp, Artificial Sequence
  Description of Artificial Sequence: Synthetic oligonucleotide
  Target: LAMA2; (-) strand; PAM type: NRG; PAM sequence: AAG
ggcggaggttgcagtgagcc

SEQ ID NO: 54869 - DNA, 20 bp, Artificial Sequence
  Description of Artificial Sequence: Synthetic oligonucleotide
  Target: LAMA2; (-) strand; PAM type: NRG; PAM sequence: GAG
cgggaggcggaggttgcagt

SEQ ID NO: 54870 - DNA, 20 bp, Artificial Sequence
  Description of Artificial Sequence: Synthetic oligonucleotide
  Target: LAMA2; (-) strand; PAM type: NRG; PAM sequence: CAG
aacccgggaggcggaggttg

SEQ ID NO: 54871 - DNA, 20 bp, Artificial Sequence
  Description of Artificial Sequence: Synthetic oligonucleotide
  Target: LAMA2; (-) strand; PAM type: NRG; PAM sequence: AGG
cacttgaacccgggaggcgg

SEQ ID NO: 54872 - DNA, 20 bp, Artificial Sequence
  Description of Artificial Sequence: Synthetic oligonucleotide
  Target: LAMA2; (-) strand; PAM type: NRG; PAM sequence: GAG
tcacttgaacccgggaggcg

SEQ ID NO: 54873 - DNA, 20 bp, Artificial Sequence
  Description of Artificial Sequence: Synthetic oligonucleotide
  Target: LAMA2; (-) strand; PAM type: NRG; PAM sequence: CGG
aatcacttgaacccgggagg

SEQ ID NO: 54874 - DNA, 20 bp, Artificial Sequence
  Description of Artificial Sequence: Synthetic oligonucleotide
  Target: LAMA2; (-) strand; PAM type: NRG; PAM sequence: AGG
gagaatcacttgaacccggg

SEQ ID NO: 54875 - DNA, 20 bp, Artificial Sequence
  Description of Artificial Sequence: Synthetic oligonucleotide
  Target: LAMA2; (-) strand; PAM type: NRG; PAM sequence: GAG
ggagaatcacttgaacccgg

SEQ ID NO: 54876 - DNA, 20 bp, Artificial Sequence
  Description of Artificial Sequence: Synthetic oligonucleotide
  Target: LAMA2; (-) strand; PAM type: NRG; PAM sequence: GGG
caggagaatcacttgaaccc

SEQ ID NO: 54877 - DNA, 20 bp, Artificial Sequence
  Description of Artificial Sequence: Synthetic oligonucleotide
  Target: LAMA2; (-) strand; PAM type: NRG; PAM sequence: CGG
gcaggagaatcacttgaacc

SEQ ID NO: 54878 - DNA, 20 bp, Artificial Sequence
  Description of Artificial Sequence: Synthetic oligonucleotide
  Target: LAMA2; (-) strand; PAM type: NRG; PAM sequence: GAG
tactcaggaggctgaggcag

SEQ ID NO: 54879 - DNA, 20 bp, Artificial Sequence
  Description of Artificial Sequence: Synthetic oligonucleotide
  Target: LAMA2; (-) strand; PAM type: NRG; PAM sequence: AGG
gctactcaggaggctgaggc

SEQ ID NO: 54880 - DNA, 20 bp, Artificial Sequence
  Description of Artificial Sequence: Synthetic oligonucleotide
  Target: LAMA2; (-) strand; PAM type: NRG; PAM sequence: CAG
agctactcaggaggctgagg

SEQ ID NO: 54881 - DNA, 20 bp, Artificial Sequence
  Description of Artificial Sequence: Synthetic oligonucleotide
  Target: LAMA2; (-) strand; PAM type: NRG; PAM sequence: AGG
cccagctactcaggaggctg

SEQ ID NO: 54882 - DNA, 20 bp, Artificial Sequence
  Description of Artificial Sequence: Synthetic oligonucleotide
  Target: LAMA2; (-) strand; PAM type: NRG; PAM sequence: GAG
tcccagctactcaggaggct

SEQ ID NO: 54883 - DNA, 20 bp, Artificial Sequence
  Description of Artificial Sequence: Synthetic oligonucleotide
  Target: LAMA2; (-) strand; PAM type: NRG; PAM sequence: AGG
tgtaatcccagctactcagg

SEQ ID NO: 54884 - DNA, 20 bp, Artificial Sequence
  Description of Artificial Sequence: Synthetic oligonucleotide
  Target: LAMA2; (-) strand; PAM type: NRG; PAM sequence: GAG
ctgtaatcccagctactcag

SEQ ID NO: 54885 - DNA, 20 bp, Artificial Sequence
  Description of Artificial Sequence: Synthetic oligonucleotide
  Target: LAMA2; (-) strand; PAM type: NRG; PAM sequence: AGG
gcctgtaatcccagctactc

SEQ ID NO: 54886 - DNA, 20 bp, Artificial Sequence
  Description of Artificial Sequence: Synthetic oligonucleotide
  Target: LAMA2; (-) strand; PAM type: NRG; PAM sequence: CAG
cgcctgtaatcccagctact

SEQ ID NO: 54887 - DNA, 20 bp, Artificial Sequence
  Description of Artificial Sequence: Synthetic oligonucleotide
  Target: LAMA2; (-) strand; PAM type: NRG; PAM sequence: CAG
gtggcgctcgcctgtaatcc

SEQ ID NO: 54888 - DNA, 20 bp, Artificial Sequence
  Description of Artificial Sequence: Synthetic oligonucleotide
  Target: LAMA2; (-) strand; PAM type: NRG; PAM sequence: TGG
aataaattagccaggcatgg

SEQ ID NO: 54889 - DNA, 20 bp, Artificial Sequence
  Description of Artificial Sequence: Synthetic oligonucleotide
  Target: LAMA2; (-) strand; PAM type: NRG; PAM sequence: TGG
aagaataaattagccaggca

SEQ ID NO: 54890 - DNA, 20 bp, Artificial Sequence
  Description of Artificial Sequence: Synthetic oligonucleotide
  Target: LAMA2; (-) strand; PAM type: NRG; PAM sequence: AGG
aatacaagaataaattagcc

SEQ ID NO: 54891 - DNA, 20 bp, Artificial Sequence
  Description of Artificial Sequence: Synthetic oligonucleotide
  Target: LAMA2; (-) strand; PAM type: NRG; PAM sequence: CAG
aaatacaagaataaattagc

SEQ ID NO: 54892 - DNA, 20 bp, Artificial Sequence
  Description of Artificial Sequence: Synthetic oligonucleotide
  Target: LAMA2; (-) strand; PAM type: NRG; PAM sequence: TAG
ctaaaaatacaagaataaat

SEQ ID NO: 54893 - DNA, 20 bp, Artificial Sequence
  Description of Artificial Sequence: Synthetic oligonucleotide
  Target: LAMA2; (-) strand; PAM type: NRG; PAM sequence: AAG
cccatccctactaaaaatac

SEQ ID NO: 54894 - DNA, 20 bp, Artificial Sequence
  Description of Artificial Sequence: Synthetic oligonucleotide
  Target: LAMA2; (-) strand; PAM type: NRG; PAM sequence: TAG
cgagaccagcctggccaaca

SEQ ID NO: 54895 - DNA, 20 bp, Artificial Sequence
  Description of Artificial Sequence: Synthetic oligonucleotide
  Target: LAMA2; (-) strand; PAM type: NRG; PAM sequence: TGG
tcatgagttcgagaccagcc

SEQ ID NO: 54896 - DNA, 20 bp, Artificial Sequence
  Description of Artificial Sequence: Synthetic oligonucleotide
  Target: LAMA2; (-) strand; PAM type: NRG; PAM sequence: CAG
caaggtcatgagttcgagac

SEQ ID NO: 54897 - DNA, 20 bp, Artificial Sequence
  Description of Artificial Sequence: Synthetic oligonucleotide
  Target: LAMA2; (-) strand; PAM type: NRG; PAM sequence: GAG
gatcacaaggtcatgagttc

SEQ ID NO: 54898 - DNA, 20 bp, Artificial Sequence
  Description of Artificial Sequence: Synthetic oligonucleotide
  Target: LAMA2; (-) strand; PAM type: NRG; PAM sequence: GAG
caggcagatcacaaggtcat

SEQ ID NO: 54899 - DNA, 20 bp, Artificial Sequence
  Description of Artificial Sequence: Synthetic oligonucleotide
  Target: LAMA2; (-) strand; PAM type: NRG; PAM sequence: AGG
gccaaggcaggcagatcaca

SEQ ID NO: 54900 - DNA, 20 bp, Artificial Sequence
  Description of Artificial Sequence: Synthetic oligonucleotide
  Target: LAMA2; (-) strand; PAM type: NRG; PAM sequence: AAG
ggccaaggcaggcagatcac

SEQ ID NO: 54901 - DNA, 20 bp, Artificial Sequence
  Description of Artificial Sequence: Synthetic oligonucleotide
  Target: LAMA2; (-) strand; PAM type: NRG; PAM sequence: CAG
ctttgggaggccaaggcagg

SEQ ID NO: 54902 - DNA, 20 bp, Artificial Sequence
  Description of Artificial Sequence: Synthetic oligonucleotide
  Target: LAMA2; (-) strand; PAM type: NRG; PAM sequence: AGG
gaactttgggaggccaaggc

SEQ ID NO: 54903 - DNA, 20 bp, Artificial Sequence
  Description of Artificial Sequence: Synthetic oligonucleotide
  Target: LAMA2; (-) strand; PAM type: NRG; PAM sequence: CAG
agaactttgggaggccaagg

SEQ ID NO: 54904 - DNA, 20 bp, Artificial Sequence
  Description of Artificial Sequence: Synthetic oligonucleotide
  Target: LAMA2; (-) strand; PAM type: NRG; PAM sequence: AGG
cccagaactttgggaggcca

SEQ ID NO: 54905 - DNA, 20 bp, Artificial Sequence
  Description of Artificial Sequence: Synthetic oligonucleotide
  Target: LAMA2; (-) strand; PAM type: NRG; PAM sequence: AAG
tcccagaactttgggaggcc

SEQ ID NO: 54906 - DNA, 20 bp, Artificial Sequence
  Description of Artificial Sequence: Synthetic oligonucleotide
  Target: LAMA2; (-) strand; PAM type: NRG; PAM sequence: AGG
tgtaatcccagaactttggg

SEQ ID NO: 54907 - DNA, 20 bp, Artificial Sequence
  Description of Artificial Sequence: Synthetic oligonucleotide
  Target: LAMA2; (-) strand; PAM type: NRG; PAM sequence: GAG
ctgtaatcccagaactttgg

SEQ ID NO: 54908 - DNA, 20 bp, Artificial Sequence
  Description of Artificial Sequence: Synthetic oligonucleotide
  Target: LAMA2; (-) strand; PAM type: NRG; PAM sequence: GGG
acctgtaatcccagaacttt

SEQ ID NO: 54909 - DNA, 20 bp, Artificial Sequence
  Description of Artificial Sequence: Synthetic oligonucleotide
  Target: LAMA2; (-) strand; PAM type: NRG; PAM sequence: TGG
cacctgtaatcccagaactt

SEQ ID NO: 54910 - DNA, 20 bp, Artificial Sequence
  Description of Artificial Sequence: Synthetic oligonucleotide
  Target: LAMA2; (-) strand; PAM type: NRG; PAM sequence: CAG
gtggttcacacctgtaatcc

SEQ ID NO: 54911 - DNA, 20 bp, Artificial Sequence
  Description of Artificial Sequence: Synthetic oligonucleotide
  Target: LAMA2; (-) strand; PAM type: NRG; PAM sequence: TGG
agcaggaaggctgggcactg

SEQ ID NO: 54912 - DNA, 20 bp, Artificial Sequence
  Description of Artificial Sequence: Synthetic oligonucleotide
  Target: LAMA2; (-) strand; PAM type: NRG; PAM sequence: GGG
agaaactcagcaggaaggct

SEQ ID NO: 54913 - DNA, 20 bp, Artificial Sequence
  Description of Artificial Sequence: Synthetic oligonucleotide
  Target: LAMA2; (-) strand; PAM type: NRG; PAM sequence: TGG
aagaaactcagcaggaaggc

SEQ ID NO: 54914 - DNA, 20 bp, Artificial Sequence
  Description of Artificial Sequence: Synthetic oligonucleotide
  Target: LAMA2; (-) strand; PAM type: NRG; PAM sequence: AGG
tgctaagaaactcagcagga

SEQ ID NO: 54915 - DNA, 20 bp, Artificial Sequence
  Description of Artificial Sequence: Synthetic oligonucleotide
  Target: LAMA2; (-) strand; PAM type: NRG; PAM sequence: AAG
atgctaagaaactcagcagg

SEQ ID NO: 54916 - DNA, 20 bp, Artificial Sequence
  Description of Artificial Sequence: Synthetic oligonucleotide
  Target: LAMA2; (-) strand; PAM type: NRG; PAM sequence: AGG
ataatgctaagaaactcagc

SEQ ID NO: 54917 - DNA, 20 bp, Artificial Sequence
  Description of Artificial Sequence: Synthetic oligonucleotide
  Target: LAMA2; (-) strand; PAM type: NRG; PAM sequence: CAG
aataatgctaagaaactcag

SEQ ID NO: 54918 - DNA, 20 bp, Artificial Sequence
  Description of Artificial Sequence: Synthetic oligonucleotide
  Target: LAMA2; (-) strand; PAM type: NRG; PAM sequence: CAG
ggcaataatgctaagaaact

SEQ ID NO: 54919 - DNA, 20 bp, Artificial Sequence
  Description of Artificial Sequence: Synthetic oligonucleotide
  Target: LAMA2; (-) strand; PAM type: NRG; PAM sequence: AAG
tccgacctggcaataatgct

SEQ ID NO: 54920 - DNA, 20 bp, Artificial Sequence
  Description of Artificial Sequence: Synthetic oligonucleotide
  Target: LAMA2; (-) strand; PAM type: NRG; PAM sequence: TGG
actatgcctaagttccgacc

SEQ ID NO: 54921 - DNA, 20 bp, Artificial Sequence
  Description of Artificial Sequence: Synthetic oligonucleotide
  Target: LAMA2; (-) strand; PAM type: NRG; PAM sequence: AAG
tgtttcatgttactatgcct

SEQ ID NO: 54922 - DNA, 20 bp, Artificial Sequence
  Description of Artificial Sequence: Synthetic oligonucleotide
  Target: LAMA2; (-) strand; PAM type: NRG; PAM sequence: CAG
tatattctggccttcagatg

SEQ ID NO: 54923 - DNA, 20 bp, Artificial Sequence
  Description of Artificial Sequence: Synthetic oligonucleotide
  Target: LAMA2; (-) strand; PAM type: NRG; PAM sequence: CAG
gcttattatattctggcctt

SEQ ID NO: 54924 - DNA, 20 bp, Artificial Sequence
  Description of Artificial Sequence: Synthetic oligonucleotide
  Target: LAMA2; (-) strand; PAM type: NRG; PAM sequence: TGG
taacaatgcttattatattc

SEQ ID NO: 54925 - DNA, 20 bp, Artificial Sequence
  Description of Artificial Sequence: Synthetic oligonucleotide
  Target: LAMA2; (-) strand; PAM type: NRG; PAM sequence: CAG
agaagtctaaccttcaacag

SEQ ID NO: 54926 - DNA, 20 bp, Artificial Sequence
  Description of Artificial Sequence: Synthetic oligonucleotide
  Target: LAMA2; (-) strand; PAM type: NRG; PAM sequence: CAG
acaagaagtctaaccttcaa

SEQ ID NO: 54927 - DNA, 20 bp, Artificial Sequence
  Description of Artificial Sequence: Synthetic oligonucleotide
  Target: LAMA2; (-) strand; PAM type: NRG; PAM sequence: AAG
atctcccacacatacacaag

SEQ ID NO: 54928 - DNA, 20 bp, Artificial Sequence
  Description of Artificial Sequence: Synthetic oligonucleotide
  Target: LAMA2; (-) strand; PAM type: NRG; PAM sequence: AAG
gttatctcccacacatacac

SEQ ID NO: 54929 - DNA, 20 bp, Artificial Sequence
  Description of Artificial Sequence: Synthetic oligonucleotide
  Target: LAMA2; (-) strand; PAM type: NRG; PAM sequence: GAG
accatatgcatcttggaaaa

SEQ ID NO: 54930 - DNA, 20 bp, Artificial Sequence
  Description of Artificial Sequence: Synthetic oligonucleotide
  Target: LAMA2; (-) strand; PAM type: NRG; PAM sequence: AAG
aaaccatatgcatcttggaa

SEQ ID NO: 54931 - DNA, 20 bp, Artificial Sequence
  Description of Artificial Sequence: Synthetic oligonucleotide
  Target: LAMA2; (-) strand; PAM type: NRG; PAM sequence: TGG
aaagaaaaccatatgcatct

SEQ ID NO: 54932 - DNA, 20 bp, Artificial Sequence
  Description of Artificial Sequence: Synthetic oligonucleotide
  Target: LAMA2; (-) strand; PAM type: NRG; PAM sequence: AAG
taaaattggcacataagcaa

SEQ ID NO: 54933 - DNA, 20 bp, Artificial Sequence
  Description of Artificial Sequence: Synthetic oligonucleotide
  Target: LAMA2; (-) strand; PAM type: NRG; PAM sequence: AAG
attgattaaaattggcacat

SEQ ID NO: 54934 - DNA, 20 bp, Artificial Sequence
  Description of Artificial Sequence: Synthetic oligonucleotide
  Target: LAMA2; (-) strand; PAM type: NRG; PAM sequence: TGG
atttctccattgattaaaat

SEQ ID NO: 54935 - DNA, 20 bp, Artificial Sequence
  Description of Artificial Sequence: Synthetic oligonucleotide
  Target: LAMA2; (-) strand; PAM type: NRG; PAM sequence: TGG
atccgactaaaattataaaa

SEQ ID NO: 54936 - DNA, 20 bp, Artificial Sequence
  Description of Artificial Sequence: Synthetic oligonucleotide
  Target: LAMA2; (-) strand; PAM type: NRG; PAM sequence: TGG
ttataccatcatataagtac

SEQ ID NO: 54937 - DNA, 20 bp, Artificial Sequence
  Description of Artificial Sequence: Synthetic oligonucleotide
  Target: LAMA2; (-) strand; PAM type: NRG; PAM sequence: AAG
agaactttataccatcatat

SEQ ID NO: 54938 - DNA, 20 bp, Artificial Sequence
  Description of Artificial Sequence: Synthetic oligonucleotide
  Target: LAMA2; (-) strand; PAM type: NRG; PAM sequence: TAG
ttttaaagttatccagtttc

SEQ ID NO: 54939 - DNA, 20 bp, Artificial Sequence
  Description of Artificial Sequence: Synthetic oligonucleotide
  Target: LAMA2; (-) strand; PAM type: NRG; PAM sequence: CAG
gaaagatttttaaagttatc

SEQ ID NO: 54940 - DNA, 20 bp, Artificial Sequence
  Description of Artificial Sequence: Synthetic oligonucleotide
  Target: LAMA2; (-) strand; PAM type: NRG; PAM sequence: AAG
attatatggaaagattttta

SEQ ID NO: 54941 - DNA, 20 bp, Artificial Sequence
  Description of Artificial Sequence: Synthetic oligonucleotide
  Target: LAMA2; (-) strand; PAM type: NRG; PAM sequence: AAG
aatataatgcattatatgga

SEQ ID NO: 54942 - DNA, 20 bp, Artificial Sequence
  Description of Artificial Sequence: Synthetic oligonucleotide
  Target: LAMA2; (-) strand; PAM type: NRG; PAM sequence: TGG
ccagaatataatgcattata

SEQ ID NO: 54943 - DNA, 20 bp, Artificial Sequence
  Description of Artificial Sequence: Synthetic oligonucleotide
  Target: LAMA2; (-) strand; PAM type: NRG; PAM sequence: CAG
taatataggaaactatgacc

SEQ ID NO: 54944 - DNA, 20 bp, Artificial Sequence
  Description of Artificial Sequence: Synthetic oligonucleotide
  Target: LAMA2; (-) strand; PAM type: NRG; PAM sequence: AGG
ttgtttagcagttataatat

SEQ ID NO: 54945 - DNA, 20 bp, Artificial Sequence
  Description of Artificial Sequence: Synthetic oligonucleotide
  Target: LAMA2; (-) strand; PAM type: NRG; PAM sequence: TAG
gttgtttagcagttataata

SEQ ID NO: 54946 - DNA, 20 bp, Artificial Sequence
  Description of Artificial Sequence: Synthetic oligonucleotide
  Target: LAMA2; (-) strand; PAM type: NRG; PAM sequence: CAG
aattggtttatgttgtttag

SEQ ID NO: 54947 - DNA, 20 bp, Artificial Sequence
  Description of Artificial Sequence: Synthetic oligonucleotide
  Target: LAMA2; (-) strand; PAM type: NRG; PAM sequence: TAG
taaaattggtttatgttgtt

SEQ ID NO: 54948 - DNA, 20 bp, Artificial Sequence
  Description of Artificial Sequence: Synthetic oligonucleotide
  Target: LAMA2; (-) strand; PAM type: NRG; PAM sequence: TGG
attgattttgaaaataaaat

SEQ ID NO: 54949 - DNA, 20 bp, Artificial Sequence
  Description of Artificial Sequence: Synthetic oligonucleotide
  Target: LAMA2; (-) strand; PAM type: NRG; PAM sequence: AAG
tctaagtagaagttacccca

SEQ ID NO: 54950 - DNA, 20 bp, Artificial Sequence
  Description of Artificial Sequence: Synthetic oligonucleotide
  Target: LAMA2; (-) strand; PAM type: NRG; PAM sequence: AAG
taggtcagggctctaagtag

SEQ ID NO: 54951 - DNA, 20 bp, Artificial Sequence
  Description of Artificial Sequence: Synthetic oligonucleotide
  Target: LAMA2; (-) strand; PAM type: NRG; PAM sequence: TAG
tattaggtcagggctctaag

SEQ ID NO: 54952 - DNA, 20 bp, Artificial Sequence
  Description of Artificial Sequence: Synthetic oligonucleotide
  Target: LAMA2; (-) strand; PAM type: NRG; PAM sequence: AAG
atttattaggtcagggctct

SEQ ID NO: 54953 - DNA, 20 bp, Artificial Sequence
  Description of Artificial Sequence: Synthetic oligonucleotide
  Target: LAMA2; (-) strand; PAM type: NRG; PAM sequence: GGG
gtacatcatttattaggtca

SEQ ID NO: 54954 - DNA, 20 bp, Artificial Sequence
  Description of Artificial Sequence: Synthetic oligonucleotide
  Target: LAMA2; (-) strand; PAM type: NRG; PAM sequence: AGG
cgtacatcatttattaggtc

SEQ ID NO: 54955 - DNA, 20 bp, Artificial Sequence
  Description of Artificial Sequence: Synthetic oligonucleotide
  Target: LAMA2; (-) strand; PAM type: NRG; PAM sequence: CAG
acgtacatcatttattaggt

SEQ ID NO: 54956 - DNA, 20 bp, Artificial Sequence
  Description of Artificial Sequence: Synthetic oligonucleotide
  Target: LAMA2; (-) strand; PAM type: NRG; PAM sequence: AGG
aaacacgtacatcatttatt

SEQ ID NO: 54957 - DNA, 20 bp, Artificial Sequence
  Description of Artificial Sequence: Synthetic oligonucleotide
  Target: LAMA2; (-) strand; PAM type: NRG; PAM sequence: TAG
taaacacgtacatcatttat

SEQ ID NO: 54958 - DNA, 20 bp, Artificial Sequence
  Description of Artificial Sequence: Synthetic oligonucleotide
  Target: LAMA2; (-) strand; PAM type: NRG; PAM sequence: CAG
atgattatcaaaatacgtgt

SEQ ID NO: 54959 - DNA, 20 bp, Artificial Sequence
  Description of Artificial Sequence: Synthetic oligonucleotide
  Target: LAMA2; (-) strand; PAM type: NRG; PAM sequence: AAG
ttacacatatccacataaat

SEQ ID NO: 54960 - DNA, 20 bp, Artificial Sequence
  Description of Artificial Sequence: Synthetic oligonucleotide
  Target: LAMA2; (-) strand; PAM type: NRG; PAM sequence: AAG
tcaataaaccatattttcca

SEQ ID NO: 54961 - DNA, 20 bp, Artificial Sequence
  Description of Artificial Sequence: Synthetic oligonucleotide
  Target: LAMA2; (-) strand; PAM type: NRG; PAM sequence: AGG
gaaagtgaaatggaggtaag

SEQ ID NO: 54962 - DNA, 20 bp, Artificial Sequence
  Description of Artificial Sequence: Synthetic oligonucleotide
  Target: LAMA2; (-) strand; PAM type: NRG; PAM sequence: GAG
ggaaagtgaaatggaggtaa

SEQ ID NO: 54963 - DNA, 20 bp, Artificial Sequence
  Description of Artificial Sequence: Synthetic oligonucleotide
  Target: LAMA2; (-) strand; PAM type: NRG; PAM sequence: AAG
taggaaagtgaaatggaggt

SEQ ID NO: 54964 - DNA, 20 bp, Artificial Sequence
  Description of Artificial Sequence: Synthetic oligonucleotide
  Target: LAMA2; (-) strand; PAM type: NRG; PAM sequence: AGG
aatttaggaaagtgaaatgg

SEQ ID NO: 54965 - DNA, 20 bp, Artificial Sequence
  Description of Artificial Sequence: Synthetic oligonucleotide
  Target: LAMA2; (-) strand; PAM type: NRG; PAM sequence: GAG
aaatttaggaaagtgaaatg

SEQ ID NO: 54966 - DNA, 20 bp, Artificial Sequence
  Description of Artificial Sequence: Synthetic oligonucleotide
  Target: LAMA2; (-) strand; PAM type: NRG; PAM sequence: TGG
taaaatttaggaaagtgaaa

SEQ ID NO: 54967 - DNA, 20 bp, Artificial Sequence
  Description of Artificial Sequence: Synthetic oligonucleotide
  Target: LAMA2; (-) strand; PAM type: NRG; PAM sequence: AAG
aaaatagttaaaatttagga

SEQ ID NO: 54968 - DNA, 20 bp, Artificial Sequence
  Description of Artificial Sequence: Synthetic oligonucleotide
  Target: LAMA2; (-) strand; PAM type: NRG; PAM sequence: AGG
gaaaaaaatagttaaaattt

SEQ ID NO: 54969 - DNA, 20 bp, Artificial Sequence
  Description of Artificial Sequence: Synthetic oligonucleotide
  Target: LAMA2; (-) strand; PAM type: NRG; PAM sequence: TAG
agaaaaaaatagttaaaatt

SEQ ID NO: 54970 - DNA, 20 bp, Artificial Sequence
  Description of Artificial Sequence: Synthetic oligonucleotide
  Target: LAMA2; (-) strand; PAM type: NRG; PAM sequence: TAG
tgcaatggaacagaaaaaaa

SEQ ID NO: 54971 - DNA, 20 bp, Artificial Sequence
  Description of Artificial Sequence: Synthetic oligonucleotide
  Target: LAMA2; (-) strand; PAM type: NRG; PAM sequence: CAG
gtactatgcctgcaatggaa

SEQ ID NO: 54972 - DNA, 20 bp, Artificial Sequence
  Description of Artificial Sequence: Synthetic oligonucleotide
  Target: LAMA2; (-) strand; PAM type: NRG; PAM sequence: TGG
aattggtactatgcctgcaa

SEQ ID NO: 54973 - DNA, 20 bp, Artificial Sequence
  Description of Artificial Sequence: Synthetic oligonucleotide
  Target: LAMA2; (-) strand; PAM type: NRG; PAM sequence: TGG
taaaatgcctgacacagaat

SEQ ID NO: 54974 - DNA, 20 bp, Artificial Sequence
  Description of Artificial Sequence: Synthetic oligonucleotide
  Target: LAMA2; (-) strand; PAM type: NRG; PAM sequence: CAG
agtgaataaaatgcctgaca

SEQ ID NO: 54975 - DNA, 20 bp, Artificial Sequence
  Description of Artificial Sequence: Synthetic oligonucleotide
  Target: LAMA2; (-) strand; PAM type: NRG; PAM sequence: AAG
tctcaagaacagttgaaaca

SEQ ID NO: 54976 - DNA, 20 bp, Artificial Sequence
  Description of Artificial Sequence: Synthetic oligonucleotide
  Target: LAMA2; (-) strand; PAM type: NRG; PAM sequence: CAG
atcctccgggatctcaagaa

SEQ ID NO: 54977 - DNA, 20 bp, Artificial Sequence
  Description of Artificial Sequence: Synthetic oligonucleotide
  Target: LAMA2; (-) strand; PAM type: NRG; PAM sequence: AAG
tcctaatcctccgggatctc

SEQ ID NO: 54978 - DNA, 20 bp, Artificial Sequence
  Description of Artificial Sequence: Synthetic oligonucleotide
  Target: LAMA2; (-) strand; PAM type: NRG; PAM sequence: GGG
tgcaatagtcctaatcctcc

SEQ ID NO: 54979 - DNA, 20 bp, Artificial Sequence
  Description of Artificial Sequence: Synthetic oligonucleotide
  Target: LAMA2; (-) strand; PAM type: NRG; PAM sequence: CGG
ctgcaatagtcctaatcctc

SEQ ID NO: 54980 - DNA, 20 bp, Artificial Sequence
  Description of Artificial Sequence: Synthetic oligonucleotide
  Target: LAMA2; (-) strand; PAM type: NRG; PAM sequence: TAG
ttatagacttataactgcaa

SEQ ID NO: 54981 - DNA, 20 bp, Artificial Sequence
  Description of Artificial Sequence: Synthetic oligonucleotide
  Target: LAMA2; (-) strand; PAM type: NRG; PAM sequence: TAG
aagcttcctttcctcagtta

SEQ ID NO: 54982 - DNA, 20 bp, Artificial Sequence
  Description of Artificial Sequence: Synthetic oligonucleotide
  Target: LAMA2; (-) strand; PAM type: NRG; PAM sequence: CAG
ccagataagcttcctttcct

SEQ ID NO: 54983 - DNA, 20 bp, Artificial Sequence
  Description of Artificial Sequence: Synthetic oligonucleotide
  Target: LAMA2; (-) strand; PAM type: NRG; PAM sequence: AAG
aaatatcttcctgtccagat

SEQ ID NO: 54984 - DNA, 20 bp, Artificial Sequence
  Description of Artificial Sequence: Synthetic oligonucleotide
  Target: LAMA2; (-) strand; PAM type: NRG; PAM sequence: CAG
actctaaatatcttcctgtc

SEQ ID NO: 54985 - DNA, 20 bp, Artificial Sequence
  Description of Artificial Sequence: Synthetic oligonucleotide
  Target: LAMA2; (-) strand; PAM type: NRG; PAM sequence: GAG
taaaatgctgtttttaaaaa

SEQ ID NO: 54986 - DNA, 20 bp, Artificial Sequence
  Description of Artificial Sequence: Synthetic oligonucleotide
  Target: LAMA2; (-) strand; PAM type: NRG; PAM sequence: AAG
tttaaaatgctgtttttaaa

SEQ ID NO: 54987 - DNA, 20 bp, Artificial Sequence
  Description of Artificial Sequence: Synthetic oligonucleotide
  Target: LAMA2; (-) strand; PAM type: NRG; PAM sequence: AAG
aacgaaaaaaacaaacaaaa

SEQ ID NO: 54988 - DNA, 20 bp, Artificial Sequence
  Description of Artificial Sequence: Synthetic oligonucleotide
  Target: LAMA2; (-) strand; PAM type: NRG; PAM sequence: AAG
aacttaaagtataataataa

SEQ ID NO: 54989 - DNA, 20 bp, Artificial Sequence
  Description of Artificial Sequence: Synthetic oligonucleotide
  Target: LAMA2; (-) strand; PAM type: NRG; PAM sequence: AAG
cacatgtaccctaaaactta

SEQ ID NO: 54990 - DNA, 20 bp, Artificial Sequence
  Description of Artificial Sequence: Synthetic oligonucleotide
  Target: LAMA2; (-) strand; PAM type: NRG; PAM sequence: TGG
gtgggtgcagcgcaccagca

SEQ ID NO: 54991 - DNA, 20 bp, Artificial Sequence
  Description of Artificial Sequence: Synthetic oligonucleotide
  Target: LAMA2; (-) strand; PAM type: NRG; PAM sequence: CAG
agttagtgggtgcagcgcac

SEQ ID NO: 54992 - DNA, 20 bp, Artificial Sequence
  Description of Artificial Sequence: Synthetic oligonucleotide
  Target: LAMA2; (-) strand; PAM type: NRG; PAM sequence: CAG
agatgacgagttagtgggtg

SEQ ID NO: 54993 - DNA, 20 bp, Artificial Sequence
  Description of Artificial Sequence: Synthetic oligonucleotide
  Target: LAMA2; (-) strand; PAM type: NRG; PAM sequence: GGG
atgctagatgacgagttagt

SEQ ID NO: 54994 - DNA, 20 bp, Artificial Sequence
  Description of Artificial Sequence: Synthetic oligonucleotide
  Target: LAMA2; (-) strand; PAM type: NRG; PAM sequence: TGG
aatgctagatgacgagttag

SEQ ID NO: 54995 - DNA, 20 bp, Artificial Sequence
  Description of Artificial Sequence: Synthetic oligonucleotide
  Target: LAMA2; (-) strand; PAM type: NRG; PAM sequence: TAG
cctaatgctagatgacgagt

SEQ ID NO: 54996 - DNA, 20 bp, Artificial Sequence
  Description of Artificial Sequence: Synthetic oligonucleotide
  Target: LAMA2; (-) strand; PAM type: NRG; PAM sequence: GAG
tatacctaatgctagatgac

SEQ ID NO: 54997 - DNA, 20 bp, Artificial Sequence
  Description of Artificial Sequence: Synthetic oligonucleotide
  Target: LAMA2; (-) strand; PAM type: NRG; PAM sequence: TAG
ttgggagatatacctaatgc

SEQ ID NO: 54998 - DNA, 20 bp, Artificial Sequence
  Description of Artificial Sequence: Synthetic oligonucleotide
  Target: LAMA2; (-) strand; PAM type: NRG; PAM sequence: GAG
gtggggagggatagcattgg

SEQ ID NO: 54999 - DNA, 20 bp, Artificial Sequence
  Description of Artificial Sequence: Synthetic oligonucleotide
  Target: LAMA2; (-) strand; PAM type: NRG; PAM sequence: GGG
gagtggggagggatagcatt

SEQ ID NO: 55000 - DNA, 20 bp, Artificial Sequence
  Description of Artificial Sequence: Synthetic oligonucleotide
  Target: LAMA2; (-) strand; PAM type: NRG; PAM sequence: TGG
ggagtggggagggatagcat

SEQ ID NO: 55001 - DNA, 20 bp, Artificial Sequence
  Description of Artificial Sequence: Synthetic oligonucleotide
  Target: LAMA2; (-) strand; PAM type: NRG; PAM sequence: TAG
gtggggggagtggggaggga

SEQ ID NO: 55002 - DNA, 20 bp, Artificial Sequence
  Description of Artificial Sequence: Synthetic oligonucleotide
  Target: LAMA2; (-) strand; PAM type: NRG; PAM sequence: GGG
tggggtggggggagtgggga

SEQ ID NO: 55003 - DNA, 20 bp, Artificial Sequence
  Description of Artificial Sequence: Synthetic oligonucleotide
  Target: LAMA2; (-) strand; PAM type: NRG; PAM sequence: AGG
gtggggtggggggagtgggg

SEQ ID NO: 55004 - DNA, 20 bp, Artificial Sequence
  Description of Artificial Sequence: Synthetic oligonucleotide
  Target: LAMA2; (-) strand; PAM type: NRG; PAM sequence: GAG
tgtggggtggggggagtggg

SEQ ID NO: 55005 - DNA, 20 bp, Artificial Sequence
  Description of Artificial Sequence: Synthetic oligonucleotide
  Target: LAMA2; (-) strand; PAM type: NRG; PAM sequence: GGG
gttgtggggtggggggagtg

SEQ ID NO: 55006 - DNA, 20 bp, Artificial Sequence
  Description of Artificial Sequence: Synthetic oligonucleotide
  Target: LAMA2; (-) strand; PAM type: NRG; PAM sequence: GGG
tgttgtggggtggggggagt

SEQ ID NO: 55007 - DNA, 20 bp, Artificial Sequence
  Description of Artificial Sequence: Synthetic oligonucleotide
  Target: LAMA2; (-) strand; PAM type: NRG; PAM sequence: TGG
ctgttgtggggtggggggag

SEQ ID NO: 55008 - DNA, 20 bp, Artificial Sequence
  Description of Artificial Sequence: Synthetic oligonucleotide
  Target: LAMA2; (-) strand; PAM type: NRG; PAM sequence: GAG
ggactgttgtggggtggggg

SEQ ID NO: 55009 - DNA, 20 bp, Artificial Sequence
  Description of Artificial Sequence: Synthetic oligonucleotide
  Target: LAMA2; (-) strand; PAM type: NRG; PAM sequence: GGG
ggggactgttgtggggtggg

SEQ ID NO: 55010 - DNA, 20 bp, Artificial Sequence
  Description of Artificial Sequence: Synthetic oligonucleotide
  Target: LAMA2; (-) strand; PAM type: NRG; PAM sequence: GGG
tggggactgttgtggggtgg

SEQ ID NO: 55011 - DNA, 20 bp, Artificial Sequence
  Description of Artificial Sequence: Synthetic oligonucleotide
  Target: LAMA2; (-) strand; PAM type: NRG; PAM sequence: GGG
ctggggactgttgtggggtg

SEQ ID NO: 55012 - DNA, 20 bp, Artificial Sequence
  Description of Artificial Sequence: Synthetic oligonucleotide
  Target: LAMA2; (-) strand; PAM type: NRG; PAM sequence: GGG
tctggggactgttgtggggt

SEQ ID NO: 55013 - DNA, 20 bp, Artificial Sequence
  Description of Artificial Sequence: Synthetic oligonucleotide
  Target: LAMA2; (-) strand; PAM type: NRG; PAM sequence: TGG
ctctggggactgttgtgggg

SEQ ID NO: 55014 - DNA, 20 bp, Artificial Sequence
  Description of Artificial Sequence: Synthetic oligonucleotide
  Target: LAMA2; (-) strand; PAM type: NRG; PAM sequence: GGG
acactctggggactgttgtg

SEQ ID NO: 55015 - DNA, 20 bp, Artificial Sequence
  Description of Artificial Sequence: Synthetic oligonucleotide
  Target: LAMA2; (-) strand; PAM type: NRG; PAM sequence: GGG
cacactctggggactgttgt

SEQ ID NO: 55016 - DNA, 20 bp, Artificial Sequence
  Description of Artificial Sequence: Synthetic oligonucleotide
  Target: LAMA2; (-) strand; PAM type: NRG; PAM sequence: TGG
tcacactctggggactgttg

SEQ ID NO: 55017 - DNA, 20 bp, Artificial Sequence
  Description of Artificial Sequence: Synthetic oligonucleotide
  Target: LAMA2; (-) strand; PAM type: NRG; PAM sequence: GGG
aaggggaacatcacactctg

SEQ ID NO: 55018 - DNA, 20 bp, Artificial Sequence
  Description of Artificial Sequence: Synthetic oligonucleotide
  Target: LAMA2; (-) strand; PAM type: NRG; PAM sequence: GGG
gaaggggaacatcacactct

SEQ ID NO: 55019 - DNA, 20 bp, Artificial Sequence
  Description of Artificial Sequence: Synthetic oligonucleotide
  Target: LAMA2; (-) strand; PAM type: NRG; PAM sequence: TGG
ggaaggggaacatcacactc

SEQ ID NO: 55020 - DNA, 20 bp, Artificial Sequence
  Description of Artificial Sequence: Synthetic oligonucleotide
  Target: LAMA2; (-) strand; PAM type: NRG; PAM sequence: GGG
gatcacatggacacaggaag

SEQ ID NO: 55021 - DNA, 20 bp, Artificial Sequence
  Description of Artificial Sequence: Synthetic oligonucleotide
  Target: LAMA2; (-) strand; PAM type: NRG; PAM sequence: GGG
agatcacatggacacaggaa

SEQ ID NO: 55022 - DNA, 20 bp, Artificial Sequence
  Description of Artificial Sequence: Synthetic oligonucleotide
  Target: LAMA2; (-) strand; PAM type: NRG; PAM sequence: AGG
gagatcacatggacacagga

SEQ ID NO: 55023 - DNA, 20 bp, Artificial Sequence
  Description of Artificial Sequence: Synthetic oligonucleotide
  Target: LAMA2; (-) strand; PAM type: NRG; PAM sequence: AAG
tgagatcacatggacacagg

SEQ ID NO: 55024 - DNA, 20 bp, Artificial Sequence
  Description of Artificial Sequence: Synthetic oligonucleotide
  Target: LAMA2; (-) strand; PAM type: NRG; PAM sequence: AGG
caatgagatcacatggacac

SEQ ID NO: 55025 - DNA, 20 bp, Artificial Sequence
  Description of Artificial Sequence: Synthetic oligonucleotide
  Target: LAMA2; (-) strand; PAM type: NRG; PAM sequence: CAG
acaatgagatcacatggaca

SEQ ID NO: 55026 - DNA, 20 bp, Artificial Sequence
  Description of Artificial Sequence: Synthetic oligonucleotide
  Target: LAMA2; (-) strand; PAM type: NRG; PAM sequence: TGG
aattgaacaatgagatcaca

SEQ ID NO: 55027 - DNA, 20 bp, Artificial Sequence
  Description of Artificial Sequence: Synthetic oligonucleotide
  Target: LAMA2; (-) strand; PAM type: NRG; PAM sequence: GAG
ataggtgggaattgaacaat

SEQ ID NO: 55028 - DNA, 20 bp, Artificial Sequence
  Description of Artificial Sequence: Synthetic oligonucleotide
  Target: LAMA2; (-) strand; PAM type: NRG; PAM sequence: GGG
gcatgttctcaatcataggt

SEQ ID NO: 55029 - DNA, 20 bp, Artificial Sequence
  Description of Artificial Sequence: Synthetic oligonucleotide
  Target: LAMA2; (-) strand; PAM type: NRG; PAM sequence: TGG
cgcatgttctcaatcatagg

SEQ ID NO: 55030 - DNA, 20 bp, Artificial Sequence
  Description of Artificial Sequence: Synthetic oligonucleotide
  Target: LAMA2; (-) strand; PAM type: NRG; PAM sequence: AGG
caccgcatgttctcaatcat

SEQ ID NO: 55031 - DNA, 20 bp, Artificial Sequence
  Description of Artificial Sequence: Synthetic oligonucleotide
  Target: LAMA2; (-) strand; PAM type: NRG; PAM sequence: TAG
acaccgcatgttctcaatca

SEQ ID NO: 55032 - DNA, 20 bp, Artificial Sequence
  Description of Artificial Sequence: Synthetic oligonucleotide
  Target: LAMA2; (-) strand; PAM type: NRG; PAM sequence: AAG
cattctcagcaaactatcac

SEQ ID NO: 55033 - DNA, 20 bp, Artificial Sequence
  Description of Artificial Sequence: Synthetic oligonucleotide
  Target: LAMA2; (-) strand; PAM type: NRG; PAM sequence: CAG
aaattggaaatcatcattct

SEQ ID NO: 55034 - DNA, 20 bp, Artificial Sequence
  Description of Artificial Sequence: Synthetic oligonucleotide
  Target: LAMA2; (-) strand; PAM type: NRG; PAM sequence: TGG
tgtagggacatggatgaaat

SEQ ID NO: 55035 - DNA, 20 bp, Artificial Sequence
  Description of Artificial Sequence: Synthetic oligonucleotide
  Target: LAMA2; (-) strand; PAM type: NRG; PAM sequence: TGG
tcatgtcctttgtagggaca

SEQ ID NO: 55036 - DNA, 20 bp, Artificial Sequence
  Description of Artificial Sequence: Synthetic oligonucleotide
  Target: LAMA2; (-) strand; PAM type: NRG; PAM sequence: GGG
atgagttcatgtcctttgta

SEQ ID NO: 55037 - DNA, 20 bp, Artificial Sequence
  Description of Artificial Sequence: Synthetic oligonucleotide
  Target: LAMA2; (-) strand; PAM type: NRG; PAM sequence: AGG
gatgagttcatgtcctttgt

SEQ ID NO: 55038 - DNA, 20 bp, Artificial Sequence
  Description of Artificial Sequence: Synthetic oligonucleotide
  Target: LAMA2; (-) strand; PAM type: NRG; PAM sequence: TAG
tgatgagttcatgtcctttg

SEQ ID NO: 55039 - DNA, 20 bp, Artificial Sequence
  Description of Artificial Sequence: Synthetic oligonucleotide
  Target: LAMA2; (-) strand; PAM type: NRG; PAM sequence: GAG
atgcagccataaaaaatgat

SEQ ID NO: 55040 - DNA, 20 bp, Artificial Sequence
  Description of Artificial Sequence: Synthetic oligonucleotide
  Target: LAMA2; (-) strand; PAM type: NRG; PAM sequence: CAG
atacaccatggaatactatg

SEQ ID NO: 55041 - DNA, 20 bp, Artificial Sequence
  Description of Artificial Sequence: Synthetic oligonucleotide
  Target: LAMA2; (-) strand; PAM type: NRG; PAM sequence: TGG
aatgtggcacatatacacca

SEQ ID NO: 55042 - DNA, 20 bp, Artificial Sequence
  Description of Artificial Sequence: Synthetic oligonucleotide
  Target: LAMA2; (-) strand; PAM type: NRG; PAM sequence: TGG
tagactggattaagaaaatg

SEQ ID NO: 55043 - DNA, 20 bp, Artificial Sequence
  Description of Artificial Sequence: Synthetic oligonucleotide
  Target: LAMA2; (-) strand; PAM type: NRG; PAM sequence: AAG
caacaacgatagactggatt

SEQ ID NO: 55044 - DNA, 20 bp, Artificial Sequence
  Description of Artificial Sequence: Synthetic oligonucleotide
  Target: LAMA2; (-) strand; PAM type: NRG; PAM sequence: TGG
aatgtccaacaacgatagac

SEQ ID NO: 55045 - DNA, 20 bp, Artificial Sequence
  Description of Artificial Sequence: Synthetic oligonucleotide
  Target: LAMA2; (-) strand; PAM type: NRG; PAM sequence: TAG
acccaaatgtccaacaacga

SEQ ID NO: 55046 - DNA, 20 bp, Artificial Sequence
  Description of Artificial Sequence: Synthetic oligonucleotide
  Target: LAMA2; (-) strand; PAM type: NRG; PAM sequence: TGG
tattcacaatagcaaagact

SEQ ID NO: 55047 - DNA, 20 bp, Artificial Sequence
  Description of Artificial Sequence: Synthetic oligonucleotide
  Target: LAMA2; (-) strand; PAM type: NRG; PAM sequence: AAG
cggcactattcacaatagca

SEQ ID NO: 55048 - DNA, 20 bp, Artificial Sequence
  Description of Artificial Sequence: Synthetic oligonucleotide
  Target: LAMA2; (-) strand; PAM type: NRG; PAM sequence: TAG
tattgcggcactattcacaa

SEQ ID NO: 55049 - DNA, 20 bp, Artificial Sequence
  Description of Artificial Sequence: Synthetic oligonucleotide
  Target: LAMA2; (-) strand; PAM type: NRG; PAM sequence: CGG
atgcacacatatgtttattg

SEQ ID NO: 55050 - DNA, 20 bp, Artificial Sequence
  Description of Artificial Sequence: Synthetic oligonucleotide
  Target: LAMA2; (-) strand; PAM type: NRG; PAM sequence: AAG
ctataaatcatgctgctata

SEQ ID NO: 55051 - DNA, 20 bp, Artificial Sequence
  Description of Artificial Sequence: Synthetic oligonucleotide
  Target: LAMA2; (-) strand; PAM type: NRG; PAM sequence: AGG
attactgggtatatacccaa

SEQ ID NO: 55052 - DNA, 20 bp, Artificial Sequence
  Description of Artificial Sequence: Synthetic oligonucleotide
  Target: LAMA2; (-) strand; PAM type: NRG; PAM sequence: AAG
cattactgggtatataccca

SEQ ID NO: 55053 - DNA, 20 bp, Artificial Sequence
  Description of Artificial Sequence: Synthetic oligonucleotide
  Target: LAMA2; (-) strand; PAM type: NRG; PAM sequence: GGG
gacccagccatcccattact

SEQ ID NO: 55054 - DNA, 20 bp, Artificial Sequence
  Description of Artificial Sequence: Synthetic oligonucleotide
  Target: LAMA2; (-) strand; PAM type: NRG; PAM sequence: TGG
tgacccagccatcccattac

SEQ ID NO: 55055 - DNA, 20 bp, Artificial Sequence
  Description of Artificial Sequence: Synthetic oligonucleotide
  Target: LAMA2; (-) strand; PAM type: NRG; PAM sequence: CAG
actagaaataccatttgacc

SEQ ID NO: 55056 - DNA, 20 bp, Artificial Sequence
  Description of Artificial Sequence: Synthetic oligonucleotide
  Target: LAMA2; (-) strand; PAM type: NRG; PAM sequence: TAG
attcctcagggatctagaac

SEQ ID NO: 55057 - DNA, 20 bp, Artificial Sequence
  Description of Artificial Sequence: Synthetic oligonucleotide
  Target: LAMA2; (-) strand; PAM type: NRG; PAM sequence: TAG
gtggcgattcctcagggatc

SEQ ID NO: 55058 - DNA, 20 bp, Artificial Sequence
  Description of Artificial Sequence: Synthetic oligonucleotide
  Target: LAMA2; (-) strand; PAM type: NRG; PAM sequence: GGG
gtcagtgtggcgattcctca

SEQ ID NO: 55059 - DNA, 20 bp, Artificial Sequence
  Description of Artificial Sequence: Synthetic oligonucleotide
  Target: LAMA2; (-) strand; PAM type: NRG; PAM sequence: AGG
agtcagtgtggcgattcctc

SEQ ID NO: 55060 - DNA, 20 bp, Artificial Sequence
  Description of Artificial Sequence: Synthetic oligonucleotide
  Target: LAMA2; (-) strand; PAM type: NRG; PAM sequence: CAG
aagtcagtgtggcgattcct

SEQ ID NO: 55061 - DNA, 20 bp, Artificial Sequence
  Description of Artificial Sequence: Synthetic oligonucleotide
  Target: LAMA2; (-) strand; PAM type: NRG; PAM sequence: TGG
aaccattgtggaagtcagtg

SEQ ID NO: 55062 - DNA, 20 bp, Artificial Sequence
  Description of Artificial Sequence: Synthetic oligonucleotide
  Target: LAMA2; (-) strand; PAM type: NRG; PAM sequence: CAG
agttcaaccattgtggaagt

SEQ ID NO: 55063 - DNA, 20 bp, Artificial Sequence
  Description of Artificial Sequence: Synthetic oligonucleotide
  Target: LAMA2; (-) strand; PAM type: NRG; PAM sequence: AAG
aactagttcaaccattgtgg

SEQ ID NO: 55064 - DNA, 20 bp, Artificial Sequence
  Description of Artificial Sequence: Synthetic oligonucleotide
  Target: LAMA2; (-) strand; PAM type: NRG; PAM sequence: TGG
gtaaactagttcaaccattg

SEQ ID NO: 55065 - DNA, 20 bp, Artificial Sequence
  Description of Artificial Sequence: Synthetic oligonucleotide
  Target: LAMA2; (-) strand; PAM type: NRG; PAM sequence: TAG
ctgttggtgggactgtaaac

SEQ ID NO: 55066 - DNA, 20 bp, Artificial Sequence
  Description of Artificial Sequence: Synthetic oligonucleotide
  Target: LAMA2; (-) strand; PAM type: NRG; PAM sequence: GGG
aacacttttacactgttggt

SEQ ID NO: 55067 - DNA, 20 bp, Artificial Sequence
  Description of Artificial Sequence: Synthetic oligonucleotide
  Target: LAMA2; (-) strand; PAM type: NRG; PAM sequence: TGG
gaacacttttacactgttgg

SEQ ID NO: 55068 - DNA, 20 bp, Artificial Sequence
  Description of Artificial Sequence: Synthetic oligonucleotide
  Target: LAMA2; (-) strand; PAM type: NRG; PAM sequence: TGG
taggaacacttttacactgt

SEQ ID NO: 55069 - DNA, 20 bp, Artificial Sequence
  Description of Artificial Sequence: Synthetic oligonucleotide
  Target: LAMA2; (-) strand; PAM type: NRG; PAM sequence: AGG
tggagaggatgtggagaaat

SEQ ID NO: 55070 - DNA, 20 bp, Artificial Sequence
  Description of Artificial Sequence: Synthetic oligonucleotide
  Target: LAMA2; (-) strand; PAM type: NRG; PAM sequence: TAG
ctggagaggatgtggagaaa

SEQ ID NO: 55071 - DNA, 20 bp, Artificial Sequence
  Description of Artificial Sequence: Synthetic oligonucleotide
  Target: LAMA2; (-) strand; PAM type: NRG; PAM sequence: GAG
caggtgctggagaggatgtg

SEQ ID NO: 55072 - DNA, 20 bp, Artificial Sequence
  Description of Artificial Sequence: Synthetic oligonucleotide
  Target: LAMA2; (-) strand; PAM type: NRG; PAM sequence: TGG
aacaggtgctggagaggatg

SEQ ID NO: 55073 - DNA, 20 bp, Artificial Sequence
  Description of Artificial Sequence: Synthetic oligonucleotide
  Target: LAMA2; (-) strand; PAM type: NRG; PAM sequence: AGG
ggaaacaacaggtgctggag

SEQ ID NO: 55074 - DNA, 20 bp, Artificial Sequence
  Description of Artificial Sequence: Synthetic oligonucleotide
  Target: LAMA2; (-) strand; PAM type: NRG; PAM sequence: GAG
aggaaacaacaggtgctgga

SEQ ID NO: 55075 - DNA, 20 bp, Artificial Sequence
  Description of Artificial Sequence: Synthetic oligonucleotide
  Target: LAMA2; (-) strand; PAM type: NRG; PAM sequence: GAG
tcaggaaacaacaggtgctg

SEQ ID NO: 55076 - DNA, 20 bp, Artificial Sequence
  Description of Artificial Sequence: Synthetic oligonucleotide
  Target: LAMA2; (-) strand; PAM type: NRG; PAM sequence: TGG
agtcaggaaacaacaggtgc

SEQ ID NO: 55077 - DNA, 20 bp, Artificial Sequence
  Description of Artificial Sequence: Synthetic oligonucleotide
  Target: LAMA2; (-) strand; PAM type: NRG; PAM sequence: AGG
ttaaaaagtcaggaaacaac

SEQ ID NO: 55078 - DNA, 20 bp, Artificial Sequence
  Description of Artificial Sequence: Synthetic oligonucleotide
  Target: LAMA2; (-) strand; PAM type: NRG; PAM sequence: CAG
attaaaaagtcaggaaacaa

SEQ ID NO: 55079 - DNA, 20 bp, Artificial Sequence
  Description of Artificial Sequence: Synthetic oligonucleotide
  Target: LAMA2; (-) strand; PAM type: NRG; PAM sequence: AGG
atggcagtcattaaaaagtc

SEQ ID NO: 55080 - DNA, 20 bp, Artificial Sequence
  Description of Artificial Sequence: Synthetic oligonucleotide
  Target: LAMA2; (-) strand; PAM type: NRG; PAM sequence: CAG
aatggcagtcattaaaaagt

SEQ ID NO: 55081 - DNA, 20 bp, Artificial Sequence
  Description of Artificial Sequence: Synthetic oligonucleotide
  Target: LAMA2; (-) strand; PAM type: NRG; PAM sequence: AAG
ttagaatggcagtcattaaa

SEQ ID NO: 55082 - DNA, 20 bp, Artificial Sequence
  Description of Artificial Sequence: Synthetic oligonucleotide
  Target: LAMA2; (-) strand; PAM type: NRG; PAM sequence: CAG
tctcacaccagttagaatgg

SEQ ID NO: 55083 - DNA, 20 bp, Artificial Sequence
  Description of Artificial Sequence: Synthetic oligonucleotide
  Target: LAMA2; (-) strand; PAM type: NRG; PAM sequence: TGG
ccatctcacaccagttagaa

SEQ ID NO: 55084 - DNA, 20 bp, Artificial Sequence
  Description of Artificial Sequence: Synthetic oligonucleotide
  Target: LAMA2; (-) strand; PAM type: NRG; PAM sequence: TAG
agataccatctcacaccagt

SEQ ID NO: 55085 - DNA, 20 bp, Artificial Sequence
  Description of Artificial Sequence: Synthetic oligonucleotide
  Target: LAMA2; (-) strand; PAM type: NRG; PAM sequence: CAG
aatgagataccatctcacac

SEQ ID NO: 55086 - DNA, 20 bp, Artificial Sequence
  Description of Artificial Sequence: Synthetic oligonucleotide
  Target: LAMA2; (-) strand; PAM type: NRG; PAM sequence: GAG
atgcaaatcaaaaccacaat

SEQ ID NO: 55087 - DNA, 20 bp, Artificial Sequence
  Description of Artificial Sequence: Synthetic oligonucleotide
  Target: LAMA2; (-) strand; PAM type: NRG; PAM sequence: GAG
ctcatcatcactggccatca

SEQ ID NO: 55088 - DNA, 20 bp, Artificial Sequence
  Description of Artificial Sequence: Synthetic oligonucleotide
  Target: LAMA2; (-) strand; PAM type: NRG; PAM sequence: CAG
tgctcatcatcactggccat

SEQ ID NO: 55089 - DNA, 20 bp, Artificial Sequence
  Description of Artificial Sequence: Synthetic oligonucleotide
  Target: LAMA2; (-) strand; PAM type: NRG; PAM sequence: TGG
gaaaaaatgctcatcatcac

SEQ ID NO: 55090 - DNA, 20 bp, Artificial Sequence
  Description of Artificial Sequence: Synthetic oligonucleotide
  Target: LAMA2; (-) strand; PAM type: NRG; PAM sequence: CAG
ctcaaaagaagacatttatg

SEQ ID NO: 55091 - DNA, 20 bp, Artificial Sequence
  Description of Artificial Sequence: Synthetic oligonucleotide
  Target: LAMA2; (-) strand; PAM type: NRG; PAM sequence: AAG
gaacagacacttctcaaaag

SEQ ID NO: 55092 - DNA, 20 bp, Artificial Sequence
  Description of Artificial Sequence: Synthetic oligonucleotide
  Target: LAMA2; (-) strand; PAM type: NRG; PAM sequence: AAG
catgaacagacacttctcaa

SEQ ID NO: 55093 - DNA, 20 bp, Artificial Sequence
  Description of Artificial Sequence: Synthetic oligonucleotide
  Target: LAMA2; (-) strand; PAM type: NRG; PAM sequence: CAG
aagtgggcgaaggacatgaa

SEQ ID NO: 55094 - DNA, 20 bp, Artificial Sequence
  Description of Artificial Sequence: Synthetic oligonucleotide
  Target: LAMA2; (-) strand; PAM type: NRG; PAM sequence: AGG
ccccatcaaaaagtgggcga

SEQ ID NO: 55095 - DNA, 20 bp, Artificial Sequence
  Description of Artificial Sequence: Synthetic oligonucleotide
  Target: LAMA2; (-) strand; PAM type: NRG; PAM sequence: AAG
accccatcaaaaagtgggcg

SEQ ID NO: 55096 - DNA, 20 bp, Artificial Sequence
  Description of Artificial Sequence: Synthetic oligonucleotide
  Target: LAMA2; (-) strand; PAM type: NRG; PAM sequence: GGG
aaacaaccccatcaaaaagt

SEQ ID NO: 55097 - DNA, 20 bp, Artificial Sequence
  Description of Artificial Sequence: Synthetic oligonucleotide
  Target: LAMA2; (-) strand; PAM type: NRG; PAM sequence: TGG
caaacaaccccatcaaaaag

SEQ ID NO: 55098 - DNA, 20 bp, Artificial Sequence
  Description of Artificial Sequence: Synthetic oligonucleotide
  Target: LAMA2; (-) strand; PAM type: NRG; PAM sequence: AAG
aaacaaacaaccccatcaaa

SEQ ID NO: 55099 - DNA, 20 bp, Artificial Sequence
  Description of Artificial Sequence: Synthetic oligonucleotide
  Target: LAMA2; (-) strand; PAM type: NRG; PAM sequence: AAG
atgaactcaaacaaatttac

SEQ ID NO: 55100 - DNA, 20 bp, Artificial Sequence
  Description of Artificial Sequence: Synthetic oligonucleotide
  Target: LAMA2; (-) strand; PAM type: NRG; PAM sequence: CAG
tctgacaaagggctaatatc

SEQ ID NO: 55101 - DNA, 20 bp, Artificial Sequence
  Description of Artificial Sequence: Synthetic oligonucleotide
  Target: LAMA2; (-) strand; PAM type: NRG; PAM sequence: GGG
caacctactcatctgacaaa

SEQ ID NO: 55102 - DNA, 20 bp, Artificial Sequence
  Description of Artificial Sequence: Synthetic oligonucleotide
  Target: LAMA2; (-) strand; PAM type: NRG; PAM sequence: AGG
gcaacctactcatctgacaa

SEQ ID NO: 55103 - DNA, 20 bp, Artificial Sequence
  Description of Artificial Sequence: Synthetic oligonucleotide
  Target: LAMA2; (-) strand; PAM type: NRG; PAM sequence: AAG
cgcaacctactcatctgaca

SEQ ID NO: 55104 - DNA, 20 bp, Artificial Sequence
  Description of Artificial Sequence: Synthetic oligonucleotide
  Target: LAMA2; (-) strand; PAM type: NRG; PAM sequence: GAG
acaggcaacctacaaaatgg

SEQ ID NO: 55105 - DNA, 20 bp, Artificial Sequence
  Description of Artificial Sequence: Synthetic oligonucleotide
  Target: LAMA2; (-) strand; PAM type: NRG; PAM sequence: GGG
gaacaggcaacctacaaaat

SEQ ID NO: 55106 - DNA, 20 bp, Artificial Sequence
  Description of Artificial Sequence: Synthetic oligonucleotide
  Target: LAMA2; (-) strand; PAM type: NRG; PAM sequence: TGG
tgaacaggcaacctacaaaa

SEQ ID NO: 55107 - DNA, 20 bp, Artificial Sequence
  Description of Artificial Sequence: Synthetic oligonucleotide
  Target: LAMA2; (-) strand; PAM type: NRG; PAM sequence: AGG
aaactaccatcagagtgaac

SEQ ID NO: 55108 - DNA, 20 bp, Artificial Sequence
  Description of Artificial Sequence: Synthetic oligonucleotide
  Target: LAMA2; (-) strand; PAM type: NRG; PAM sequence: CAG
gaaactaccatcagagtgaa

SEQ ID NO: 55109 - DNA, 20 bp, Artificial Sequence
  Description of Artificial Sequence: Synthetic oligonucleotide
  Target: LAMA2; (-) strand; PAM type: NRG; PAM sequence: GAG
agcaaaagaaactaccatca

SEQ ID NO: 55110 - DNA, 20 bp, Artificial Sequence
  Description of Artificial Sequence: Synthetic oligonucleotide
  Target: LAMA2; (-) strand; PAM type: NRG; PAM sequence: CAG
gcagcaaaagaaactaccat

SEQ ID NO: 55111 - DNA, 20 bp, Artificial Sequence
  Description of Artificial Sequence: Synthetic oligonucleotide
  Target: LAMA2; (-) strand; PAM type: NRG; PAM sequence: AAG
aaagagcttctgtgcagcaa

SEQ ID NO: 55112 - DNA, 20 bp, Artificial Sequence
  Description of Artificial Sequence: Synthetic oligonucleotide
  Target: LAMA2; (-) strand; PAM type: NRG; PAM sequence: CAG
taaactaaagagcttctgtg

SEQ ID NO: 55113 - DNA, 20 bp, Artificial Sequence
  Description of Artificial Sequence: Synthetic oligonucleotide
  Target: LAMA2; (-) strand; PAM type: NRG; PAM sequence: GAG
tgggatctaattaaactaaa

SEQ ID NO: 55114 - DNA, 20 bp, Artificial Sequence
  Description of Artificial Sequence: Synthetic oligonucleotide
  Target: LAMA2; (-) strand; PAM type: NRG; PAM sequence: AAG
aatgggatctaattaaacta

SEQ ID NO: 55115 - DNA, 20 bp, Artificial Sequence
  Description of Artificial Sequence: Synthetic oligonucleotide
  Target: LAMA2; (-) strand; PAM type: NRG; PAM sequence: GGG
aaaagccaaaatggacaaat

SEQ ID NO: 55116 - DNA, 20 bp, Artificial Sequence
  Description of Artificial Sequence: Synthetic oligonucleotide
  Target: LAMA2; (-) strand; PAM type: NRG; PAM sequence: TGG
caaaagccaaaatggacaaa

SEQ ID NO: 55117 - DNA, 20 bp, Artificial Sequence
  Description of Artificial Sequence: Synthetic oligonucleotide
  Target: LAMA2; (-) strand; PAM type: NRG; PAM sequence: TGG
aatggcaacaaaagccaaaa

SEQ ID NO: 55118 - DNA, 20 bp, Artificial Sequence
  Description of Artificial Sequence: Synthetic oligonucleotide
  Target: LAMA2; (-) strand; PAM type: NRG; PAM sequence: AAG
accaaaagcaatggcaacaa

SEQ ID NO: 55119 - DNA, 20 bp, Artificial Sequence
  Description of Artificial Sequence: Synthetic oligonucleotide
  Target: LAMA2; (-) strand; PAM type: NRG; PAM sequence: TGG
gtctaaaacaccaaaagcaa

SEQ ID NO: 55120 - DNA, 20 bp, Artificial Sequence
  Description of Artificial Sequence: Synthetic oligonucleotide
  Target: LAMA2; (-) strand; PAM type: NRG; PAM sequence: AAG
cttcatgtctaaaacaccaa

SEQ ID NO: 55121 - DNA, 20 bp, Artificial Sequence
  Description of Artificial Sequence: Synthetic oligonucleotide
  Target: LAMA2; (-) strand; PAM type: NRG; PAM sequence: AGG
tcaggacataggcatgggta

SEQ ID NO: 55122 - DNA, 20 bp, Artificial Sequence
  Description of Artificial Sequence: Synthetic oligonucleotide
  Target: LAMA2; (-) strand; PAM type: NRG; PAM sequence: AAG
ttcaggacataggcatgggt

SEQ ID NO: 55123 - DNA, 20 bp, Artificial Sequence
  Description of Artificial Sequence: Synthetic oligonucleotide
  Target: LAMA2; (-) strand; PAM type: NRG; PAM sequence: GGG
accattcaggacataggcat

SEQ ID NO: 55124 - DNA, 20 bp, Artificial Sequence
  Description of Artificial Sequence: Synthetic oligonucleotide
  Target: LAMA2; (-) strand; PAM type: NRG; PAM sequence: TGG
taccattcaggacataggca

SEQ ID NO: 55125 - DNA, 20 bp, Artificial Sequence
  Description of Artificial Sequence: Synthetic oligonucleotide
  Target: LAMA2; (-) strand; PAM type: NRG; PAM sequence: AGG
ggcagtaccattcaggacat

SEQ ID NO: 55126 - DNA, 20 bp, Artificial Sequence
  Description of Artificial Sequence: Synthetic oligonucleotide
  Target: LAMA2; (-) strand; PAM type: NRG; PAM sequence: TAG
aggcagtaccattcaggaca

SEQ ID NO: 55127 - DNA, 20 bp, Artificial Sequence
  Description of Artificial Sequence: Synthetic oligonucleotide
  Target: LAMA2; (-) strand; PAM type: NRG; PAM sequence: AGG
aaacctaggcagtaccattc

SEQ ID NO: 55128 - DNA, 20 bp, Artificial Sequence
  Description of Artificial Sequence: Synthetic oligonucleotide
  Target: LAMA2; (-) strand; PAM type: NRG; PAM sequence: CAG
aaaacctaggcagtaccatt

SEQ ID NO: 55129 - DNA, 20 bp, Artificial Sequence
  Description of Artificial Sequence: Synthetic oligonucleotide
  Target: LAMA2; (-) strand; PAM type: NRG; PAM sequence: CAG
accctagaagaaaacctagg

SEQ ID NO: 55130 - DNA, 20 bp, Artificial Sequence
  Description of Artificial Sequence: Synthetic oligonucleotide
  Target: LAMA2; (-) strand; PAM type: NRG; PAM sequence: AGG
aaaaccctagaagaaaacct

SEQ ID NO: 55131 - DNA, 20 bp, Artificial Sequence
  Description of Artificial Sequence: Synthetic oligonucleotide
  Target: LAMA2; (-) strand; PAM type: NRG; PAM sequence: TAG
aaaaaccctagaagaaaacc

SEQ ID NO: 55132 - DNA, 20 bp, Artificial Sequence
  Description of Artificial Sequence: Synthetic oligonucleotide
  Target: LAMA2; (-) strand; PAM type: NRG; PAM sequence: AAG
taaaaccataaaaaccctag

SEQ ID NO: 55133 - DNA, 20 bp, Artificial Sequence
  Description of Artificial Sequence: Synthetic oligonucleotide
  Target: LAMA2; (-) strand; PAM type: NRG; PAM sequence: TAG
acctaaaaccataaaaaccc

SEQ ID NO: 55134 - DNA, 20 bp, Artificial Sequence
  Description of Artificial Sequence: Synthetic oligonucleotide
  Target: LAMA2; (-) strand; PAM type: NRG; PAM sequence: TAG
tggattaaagacttaaacgt

SEQ ID NO: 55135 - DNA, 20 bp, Artificial Sequence
  Description of Artificial Sequence: Synthetic oligonucleotide
  Target: LAMA2; (-) strand; PAM type: NRG; PAM sequence: AAG
aatcaattcaagatggatta

SEQ ID NO: 55136 - DNA, 20 bp, Artificial Sequence
  Description of Artificial Sequence: Synthetic oligonucleotide
  Target: LAMA2; (-) strand; PAM type: NRG; PAM sequence: TGG
atacaaaaatcaattcaaga

SEQ ID NO: 55137 - DNA, 20 bp, Artificial Sequence
  Description of Artificial Sequence: Synthetic oligonucleotide
  Target: LAMA2; (-) strand; PAM type: NRG; PAM sequence: AAG
ccttatacaaaaatcaattc

SEQ ID NO: 55138 - DNA, 20 bp, Artificial Sequence
  Description of Artificial Sequence: Synthetic oligonucleotide
  Target: LAMA2; (-) strand; PAM type: NRG; PAM sequence: TGG
catatgtagaaagctgaaac

SEQ ID NO: 55139 - DNA, 20 bp, Artificial Sequence
  Description of Artificial Sequence: Synthetic oligonucleotide
  Target: LAMA2; (-) strand; PAM type: NRG; PAM sequence: AAG
actggctagccatatgtaga

SEQ ID NO: 55140 - DNA, 20 bp, Artificial Sequence
  Description of Artificial Sequence: Synthetic oligonucleotide
  Target: LAMA2; (-) strand; PAM type: NRG; PAM sequence: TAG
ggaaactggctagccatatg

SEQ ID NO: 55141 - DNA, 20 bp, Artificial Sequence
  Description of Artificial Sequence: Synthetic oligonucleotide
  Target: LAMA2; (-) strand; PAM type: NRG; PAM sequence: TAG
atggtgctggggaaactggc

SEQ ID NO: 55142 - DNA, 20 bp, Artificial Sequence
  Description of Artificial Sequence: Synthetic oligonucleotide
  Target: LAMA2; (-) strand; PAM type: NRG; PAM sequence: TGG
ataaatggtgctggggaaac

SEQ ID NO: 55143 - DNA, 20 bp, Artificial Sequence
  Description of Artificial Sequence: Synthetic oligonucleotide
  Target: LAMA2; (-) strand; PAM type: NRG; PAM sequence: GGG
ctatttaataaatggtgctg

SEQ ID NO: 55144 - DNA, 20 bp, Artificial Sequence
  Description of Artificial Sequence: Synthetic oligonucleotide
  Target: LAMA2; (-) strand; PAM type: NRG; PAM sequence: GGG
cctatttaataaatggtgct

SEQ ID NO: 55145 - DNA, 20 bp, Artificial Sequence
  Description of Artificial Sequence: Synthetic oligonucleotide
  Target: LAMA2; (-) strand; PAM type: NRG; PAM sequence: TGG
ccctatttaataaatggtgc

SEQ ID NO: 55146 - DNA, 20 bp, Artificial Sequence
  Description of Artificial Sequence: Synthetic oligonucleotide
  Target: LAMA2; (-) strand; PAM type: NRG; PAM sequence: TGG
aggattccctatttaataaa

SEQ ID NO: 55147 - DNA, 20 bp, Artificial Sequence
  Description of Artificial Sequence: Synthetic oligonucleotide
  Target: LAMA2; (-) strand; PAM type: NRG; PAM sequence: AGG
gaaaaacaagcaatggggaa

SEQ ID NO: 55148 - DNA, 20 bp, Artificial Sequence
  Description of Artificial Sequence: Synthetic oligonucleotide
  Target: LAMA2; (-) strand; PAM type: NRG; PAM sequence: AAG
agaaaaacaagcaatgggga

SEQ ID NO: 55149 - DNA, 20 bp, Artificial Sequence
  Description of Artificial Sequence: Synthetic oligonucleotide
  Target: LAMA2; (-) strand; PAM type: NRG; PAM sequence: GGG
cctgagaaaaacaagcaatg

SEQ ID NO: 55150 - DNA, 20 bp, Artificial Sequence
  Description of Artificial Sequence: Synthetic oligonucleotide
  Target: LAMA2; (-) strand; PAM type: NRG; PAM sequence: GGG
acctgagaaaaacaagcaat

SEQ ID NO: 55151 - DNA, 20 bp, Artificial Sequence
  Description of Artificial Sequence: Synthetic oligonucleotide
  Target: LAMA2; (-) strand; PAM type: NRG; PAM sequence: TGG
aacctgagaaaaacaagcaa

SEQ ID NO: 55152 - DNA, 20 bp, Artificial Sequence
  Description of Artificial Sequence: Synthetic oligonucleotide
  Target: LAMA2; (-) strand; PAM type: NRG; PAM sequence: AAG
ttgacaaacctgagaaaaac

SEQ ID NO: 55153 - DNA, 20 bp, Artificial Sequence
  Description of Artificial Sequence: Synthetic oligonucleotide
  Target: LAMA2; (-) strand; PAM type: NRG; PAM sequence: GAG
atctgatctttgacaaacct

SEQ ID NO: 55154 - DNA, 20 bp, Artificial Sequence
  Description of Artificial Sequence: Synthetic oligonucleotide
  Target: LAMA2; (-) strand; PAM type: NRG; PAM sequence: CAG
atggaacagaacagagccct

SEQ ID NO: 55155 - DNA, 20 bp, Artificial Sequence
  Description of Artificial Sequence: Synthetic oligonucleotide
  Target: LAMA2; (-) strand; PAM type: NRG; PAM sequence: GAG
tagatcaatggaacagaaca

SEQ ID NO: 55156 - DNA, 20 bp, Artificial Sequence
  Description of Artificial Sequence: Synthetic oligonucleotide
  Target: LAMA2; (-) strand; PAM type: NRG; PAM sequence: CAG
tatagatcaatggaacagaa

SEQ ID NO: 55157 - DNA, 20 bp, Artificial Sequence
  Description of Artificial Sequence: Synthetic oligonucleotide
  Target: LAMA2; (-) strand; PAM type: NRG; PAM sequence: CAG
agagatatagatcaatggaa

SEQ ID NO: 55158 - DNA, 20 bp, Artificial Sequence
  Description of Artificial Sequence: Synthetic oligonucleotide
  Target: LAMA2; (-) strand; PAM type: NRG; PAM sequence: TGG
aaaacagagatatagatcaa

SEQ ID NO: 55159 - DNA, 20 bp, Artificial Sequence
  Description of Artificial Sequence: Synthetic oligonucleotide
  Target: LAMA2; (-) strand; PAM type: NRG; PAM sequence: TAG
ctggtaccaaaacagagata

SEQ ID NO: 55160 - DNA, 20 bp, Artificial Sequence
  Description of Artificial Sequence: Synthetic oligonucleotide
  Target: LAMA2; (-) strand; PAM type: NRG; PAM sequence: GAG
atggtactggtaccaaaaca

SEQ ID NO: 55161 - DNA, 20 bp, Artificial Sequence
  Description of Artificial Sequence: Synthetic oligonucleotide
  Target: LAMA2; (-) strand; PAM type: NRG; PAM sequence: CAG
gcatggtactggtaccaaaa

SEQ ID NO: 55162 - DNA, 20 bp, Artificial Sequence
  Description of Artificial Sequence: Synthetic oligonucleotide
  Target: LAMA2; (-) strand; PAM type: NRG; PAM sequence: TGG
taaccaaaacagcatggtac

SEQ ID NO: 55163 - DNA, 20 bp, Artificial Sequence
  Description of Artificial Sequence: Synthetic oligonucleotide
  Target: LAMA2; (-) strand; PAM type: NRG; PAM sequence: TGG
ctacagtaaccaaaacagca

SEQ ID NO: 55164 - DNA, 20 bp, Artificial Sequence
  Description of Artificial Sequence: Synthetic oligonucleotide
  Target: LAMA2; (-) strand; PAM type: NRG; PAM sequence: CAG
caagtctacagtaaccaaaa

SEQ ID NO: 55165 - DNA, 20 bp, Artificial Sequence
  Description of Artificial Sequence: Synthetic oligonucleotide
  Target: LAMA2; (-) strand; PAM type: NRG; PAM sequence: CAG
caaactatactacaagtcta

SEQ ID NO: 55166 - DNA, 20 bp, Artificial Sequence
  Description of Artificial Sequence: Synthetic oligonucleotide
  Target: LAMA2; (-) strand; PAM type: NRG; PAM sequence: AAG
ctgacttcaaactatactac

SEQ ID NO: 55167 - DNA, 20 bp, Artificial Sequence
  Description of Artificial Sequence: Synthetic oligonucleotide
  Target: LAMA2; (-) strand; PAM type: NRG; PAM sequence: AGG
agccaaaagaacaaagctgg

SEQ ID NO: 55168 - DNA, 20 bp, Artificial Sequence
  Description of Artificial Sequence: Synthetic oligonucleotide
  Target: LAMA2; (-) strand; PAM type: NRG; PAM sequence: GAG
aagccaaaagaacaaagctg

SEQ ID NO: 55169 - DNA, 20 bp, Artificial Sequence
  Description of Artificial Sequence: Synthetic oligonucleotide
  Target: LAMA2; (-) strand; PAM type: NRG; PAM sequence: TGG
ctaagccaaaagaacaaagc

SEQ ID NO: 55170 - DNA, 20 bp, Artificial Sequence
  Description of Artificial Sequence: Synthetic oligonucleotide
  Target: LAMA2; (-) strand; PAM type: NRG; PAM sequence: AAG
aatcctaagccaaaagaaca

SEQ ID NO: 55171 - DNA, 20 bp, Artificial Sequence
  Description of Artificial Sequence: Synthetic oligonucleotide
  Target: LAMA2; (-) strand; PAM type: NRG; PAM sequence: AAG
ccaagtcaatcctaagccaa

SEQ ID NO: 55172 - DNA, 20 bp, Artificial Sequence
  Description of Artificial Sequence: Synthetic oligonucleotide
  Target: LAMA2; (-) strand; PAM type: NRG; PAM sequence: AAG
cgcatcgccaagtcaatcct

SEQ ID NO: 55173 - DNA, 20 bp, Artificial Sequence
  Description of Artificial Sequence: Synthetic oligonucleotide
  Target: LAMA2; (-) strand; PAM type: NRG; PAM sequence: AAG
aaaaaagagcccgcatcgcc

SEQ ID NO: 55174 - DNA, 20 bp, Artificial Sequence
  Description of Artificial Sequence: Synthetic oligonucleotide
  Target: LAMA2; (-) strand; PAM type: NRG; PAM sequence: GAG
gttcatatggaaccaaaaaa

SEQ ID NO: 55175 - DNA, 20 bp, Artificial Sequence
  Description of Artificial Sequence: Synthetic oligonucleotide
  Target: LAMA2; (-) strand; PAM type: NRG; PAM sequence: AAG
aagttcatatggaaccaaaa

SEQ ID NO: 55176 - DNA, 20 bp, Artificial Sequence
  Description of Artificial Sequence: Synthetic oligonucleotide
  Target: LAMA2; (-) strand; PAM type: NRG; PAM sequence: TGG
aaactactttaaagttcata

SEQ ID NO: 55177 - DNA, 20 bp, Artificial Sequence
  Description of Artificial Sequence: Synthetic oligonucleotide
  Target: LAMA2; (-) strand; PAM type: NRG; PAM sequence: AAG
aattggaaaaaactacttta

SEQ ID NO: 55178 - DNA, 20 bp, Artificial Sequence
  Description of Artificial Sequence: Synthetic oligonucleotide
  Target: LAMA2; (-) strand; PAM type: NRG; PAM sequence: TGG
aatgcctttcttcacagaat

SEQ ID NO: 55179 - DNA, 20 bp, Artificial Sequence
  Description of Artificial Sequence: Synthetic oligonucleotide
  Target: LAMA2; (-) strand; PAM type: NRG; PAM sequence: CAG
gctaccaatgcctttcttca

SEQ ID NO: 55180 - DNA, 20 bp, Artificial Sequence
  Description of Artificial Sequence: Synthetic oligonucleotide
  Target: LAMA2; (-) strand; PAM type: NRG; PAM sequence: AAG
gattcaatgccatccccatc

SEQ ID NO: 55181 - DNA, 20 bp, Artificial Sequence
  Description of Artificial Sequence: Synthetic oligonucleotide
  Target: LAMA2; (-) strand; PAM type: NRG; PAM sequence: CAG
atactgcccaaggtaattta

SEQ ID NO: 55182 - DNA, 20 bp, Artificial Sequence
  Description of Artificial Sequence: Synthetic oligonucleotide
  Target: LAMA2; (-) strand; PAM type: NRG; PAM sequence: AGG
gaaaatggccatactgccca

SEQ ID NO: 55183 - DNA, 20 bp, Artificial Sequence
  Description of Artificial Sequence: Synthetic oligonucleotide
  Target: LAMA2; (-) strand; PAM type: NRG; PAM sequence: AAG
tgaaaatggccatactgccc

SEQ ID NO: 55184 - DNA, 20 bp, Artificial Sequence
  Description of Artificial Sequence: Synthetic oligonucleotide
  Target: LAMA2; (-) strand; PAM type: NRG; PAM sequence: TGG
aagaatcaatatcgtgaaaa

SEQ ID NO: 55185 - DNA, 20 bp, Artificial Sequence
  Description of Artificial Sequence: Synthetic oligonucleotide
  Target: LAMA2; (-) strand; PAM type: NRG; PAM sequence: AAG
attccatgctcatgggtagg

SEQ ID NO: 55186 - DNA, 20 bp, Artificial Sequence
  Description of Artificial Sequence: Synthetic oligonucleotide
  Target: LAMA2; (-) strand; PAM type: NRG; PAM sequence: AGG
aacattccatgctcatgggt

SEQ ID NO: 55187 - DNA, 20 bp, Artificial Sequence
  Description of Artificial Sequence: Synthetic oligonucleotide
  Target: LAMA2; (-) strand; PAM type: NRG; PAM sequence: TAG
gaacattccatgctcatggg

SEQ ID NO: 55188 - DNA, 20 bp, Artificial Sequence
  Description of Artificial Sequence: Synthetic oligonucleotide
  Target: LAMA2; (-) strand; PAM type: NRG; PAM sequence: GGG
gaagaacattccatgctcat

SEQ ID NO: 55189 - DNA, 20 bp, Artificial Sequence
  Description of Artificial Sequence: Synthetic oligonucleotide
  Target: LAMA2; (-) strand; PAM type: NRG; PAM sequence: TGG
ggaagaacattccatgctca

SEQ ID NO: 55190 - DNA, 20 bp, Artificial Sequence
  Description of Artificial Sequence: Synthetic oligonucleotide
  Target: LAMA2; (-) strand; PAM type: NRG; PAM sequence: AAG
aagaggatacaaacaaatgg

SEQ ID NO: 55191 - DNA, 20 bp, Artificial Sequence
  Description of Artificial Sequence: Synthetic oligonucleotide
  Target: LAMA2; (-) strand; PAM type: NRG; PAM sequence: TGG
taaaagaggatacaaacaaa

SEQ ID NO: 55192 - DNA, 20 bp, Artificial Sequence
  Description of Artificial Sequence: Synthetic oligonucleotide
  Target: LAMA2; (-) strand; PAM type: NRG; PAM sequence: AGG
actgctcaaggaaataaaag

SEQ ID NO: 55193 - DNA, 20 bp, Artificial Sequence
  Description of Artificial Sequence: Synthetic oligonucleotide
  Target: LAMA2; (-) strand; PAM type: NRG; PAM sequence: GAG
cactgctcaaggaaataaaa

SEQ ID NO: 55194 - DNA, 20 bp, Artificial Sequence
  Description of Artificial Sequence: Synthetic oligonucleotide
  Target: LAMA2; (-) strand; PAM type: NRG; PAM sequence: AAG
accactgctcaaggaaataa

SEQ ID NO: 55195 - DNA, 20 bp, Artificial Sequence
  Description of Artificial Sequence: Synthetic oligonucleotide
  Target: LAMA2; (-) strand; PAM type: NRG; PAM sequence: AGG
gaactacaaaccactgctca

SEQ ID NO: 55196 - DNA, 20 bp, Artificial Sequence
  Description of Artificial Sequence: Synthetic oligonucleotide
  Target: LAMA2; (-) strand; PAM type: NRG; PAM sequence: AAG
agaactacaaaccactgctc

SEQ ID NO: 55197 - DNA, 20 bp, Artificial Sequence
  Description of Artificial Sequence: Synthetic oligonucleotide
  Target: LAMA2; (-) strand; PAM type: NRG; PAM sequence: GAG
atgtgaaggacctcttcaag

SEQ ID NO: 55198 - DNA, 20 bp, Artificial Sequence
  Description of Artificial Sequence: Synthetic oligonucleotide
  Target: LAMA2; (-) strand; PAM type: NRG; PAM sequence: AGG
ggatgtgaaggacctcttca

SEQ ID NO: 55199 - DNA, 20 bp, Artificial Sequence
  Description of Artificial Sequence: Synthetic oligonucleotide
  Target: LAMA2; (-) strand; PAM type: NRG; PAM sequence: AAG
gggatgtgaaggacctcttc

SEQ ID NO: 55200 - DNA, 20 bp, Artificial Sequence
  Description of Artificial Sequence: Synthetic oligonucleotide
  Target: LAMA2; (-) strand; PAM type: NRG; PAM sequence: AGG
ccaacttacaagggatgtga

SEQ ID NO: 55201 - DNA, 20 bp, Artificial Sequence
  Description of Artificial Sequence: Synthetic oligonucleotide
  Target: LAMA2; (-) strand; PAM type: NRG; PAM sequence: AAG
tccaacttacaagggatgtg

SEQ ID NO: 55202 - DNA, 20 bp, Artificial Sequence
  Description of Artificial Sequence: Synthetic oligonucleotide
  Target: LAMA2; (-) strand; PAM type: NRG; PAM sequence: GGG
cctaggaatccaacttacaa

SEQ ID NO: 55203 - DNA, 20 bp, Artificial Sequence
  Description of Artificial Sequence: Synthetic oligonucleotide
  Target: LAMA2; (-) strand; PAM type: NRG; PAM sequence: AGG
acctaggaatccaacttaca

SEQ ID NO: 55204 - DNA, 20 bp, Artificial Sequence
  Description of Artificial Sequence: Synthetic oligonucleotide
  Target: LAMA2; (-) strand; PAM type: NRG; PAM sequence: AAG
tacctaggaatccaacttac

SEQ ID NO: 55205 - DNA, 20 bp, Artificial Sequence
  Description of Artificial Sequence: Synthetic oligonucleotide
  Target: LAMA2; (-) strand; PAM type: NRG; PAM sequence: AGG
tcaaagagaataaaatacct

SEQ ID NO: 55206 - DNA, 20 bp, Artificial Sequence
  Description of Artificial Sequence: Synthetic oligonucleotide
  Target: LAMA2; (-) strand; PAM type: NRG; PAM sequence: TAG
ttcaaagagaataaaatacc

SEQ ID NO: 55207 - DNA, 20 bp, Artificial Sequence
  Description of Artificial Sequence: Synthetic oligonucleotide
  Target: LAMA2; (-) strand; PAM type: NRG; PAM sequence: GAG
ccattcacaattgcttcaaa

SEQ ID NO: 55208 - DNA, 20 bp, Artificial Sequence
  Description of Artificial Sequence: Synthetic oligonucleotide
  Target: LAMA2; (-) strand; PAM type: NRG; PAM sequence: AAG
tcccattcacaattgcttca

SEQ ID NO: 55209 - DNA, 20 bp, Artificial Sequence
  Description of Artificial Sequence: Synthetic oligonucleotide
  Target: LAMA2; (-) strand; PAM type: NRG; PAM sequence: GAG
gacaaacagagccaaatcat

SEQ ID NO: 55210 - DNA, 20 bp, Artificial Sequence
  Description of Artificial Sequence: Synthetic oligonucleotide
  Target: LAMA2; (-) strand; PAM type: NRG; PAM sequence: GAG
acaccaacaacagacaaaca

SEQ ID NO: 55211 - DNA, 20 bp, Artificial Sequence
  Description of Artificial Sequence: Synthetic oligonucleotide
  Target: LAMA2; (-) strand; PAM type: NRG; PAM sequence: CAG
atacaccaacaacagacaaa

SEQ ID NO: 55212 - DNA, 20 bp, Artificial Sequence
  Description of Artificial Sequence: Synthetic oligonucleotide
  Target: LAMA2; (-) strand; PAM type: NRG; PAM sequence: CAG
gcattcttatacaccaacaa

SEQ ID NO: 55213 - DNA, 20 bp, Artificial Sequence
  Description of Artificial Sequence: Synthetic oligonucleotide
  Target: LAMA2; (-) strand; PAM type: NRG; PAM sequence: AAG
aatcaatgtgcaaaaatcac

SEQ ID NO: 55214 - DNA, 20 bp, Artificial Sequence
  Description of Artificial Sequence: Synthetic oligonucleotide
  Target: LAMA2; (-) strand; PAM type: NRG; PAM sequence: AGG
agcaacttcagcaaagtctc

SEQ ID NO: 55215 - DNA, 20 bp, Artificial Sequence
  Description of Artificial Sequence: Synthetic oligonucleotide
  Target: LAMA2; (-) strand; PAM type: NRG; PAM sequence: CAG
aagcaacttcagcaaagtct

SEQ ID NO: 55216 - DNA, 20 bp, Artificial Sequence
  Description of Artificial Sequence: Synthetic oligonucleotide
  Target: LAMA2; (-) strand; PAM type: NRG; PAM sequence: AAG
gctgataagcaacttcagca

SEQ ID NO: 55217 - DNA, 20 bp, Artificial Sequence
  Description of Artificial Sequence: Synthetic oligonucleotide
  Target: LAMA2; (-) strand; PAM type: NRG; PAM sequence: CAG
cttaagctgataagcaactt

SEQ ID NO: 55218 - DNA, 20 bp, Artificial Sequence
  Description of Artificial Sequence: Synthetic oligonucleotide
  Target: LAMA2; (-) strand; PAM type: NRG; PAM sequence: AAG
caaaatctccttaagctgat

SEQ ID NO: 55219 - DNA, 20 bp, Artificial Sequence
  Description of Artificial Sequence: Synthetic oligonucleotide
  Target: LAMA2; (-) strand; PAM type: NRG; PAM sequence: AAG
tctcagtccaaaatctcctt

SEQ ID NO: 55220 - DNA, 20 bp, Artificial Sequence
  Description of Artificial Sequence: Synthetic oligonucleotide
  Target: LAMA2; (-) strand; PAM type: NRG; PAM sequence: CAG
tctagaaaaccccattgtct

SEQ ID NO: 55221 - DNA, 20 bp, Artificial Sequence
  Description of Artificial Sequence: Synthetic oligonucleotide
  Target: LAMA2; (-) strand; PAM type: NRG; PAM sequence: TAG
agacgacatgattgtatatc

SEQ ID NO: 55222 - DNA, 20 bp, Artificial Sequence
  Description of Artificial Sequence: Synthetic oligonucleotide
  Target: LAMA2; (-) strand; PAM type: NRG; PAM sequence: CAG
agtcaaattgtccctctttg

SEQ ID NO: 55223 - DNA, 20 bp, Artificial Sequence
  Description of Artificial Sequence: Synthetic oligonucleotide
  Target: LAMA2; (-) strand; PAM type: NRG; PAM sequence: AAG
tattcaattaggaaaagagg

SEQ ID NO: 55224 - DNA, 20 bp, Artificial Sequence
  Description of Artificial Sequence: Synthetic oligonucleotide
  Target: LAMA2; (-) strand; PAM type: NRG; PAM sequence: AGG
gggtattcaattaggaaaag

SEQ ID NO: 55225 - DNA, 20 bp, Artificial Sequence
  Description of Artificial Sequence: Synthetic oligonucleotide
  Target: LAMA2; (-) strand; PAM type: NRG; PAM sequence: GAG
agggtattcaattaggaaaa

SEQ ID NO: 55226 - DNA, 20 bp, Artificial Sequence
  Description of Artificial Sequence: Synthetic oligonucleotide
  Target: LAMA2; (-) strand; PAM type: NRG; PAM sequence: AAG
aaagggtattcaattaggaa

SEQ ID NO: 55227 - DNA, 20 bp, Artificial Sequence
  Description of Artificial Sequence: Synthetic oligonucleotide
  Target: LAMA2; (-) strand; PAM type: NRG; PAM sequence: AGG
gaaataaagggtattcaatt

SEQ ID NO: 55228 - DNA, 20 bp, Artificial Sequence
  Description of Artificial Sequence: Synthetic oligonucleotide
  Target: LAMA2; (-) strand; PAM type: NRG; PAM sequence: TAG
ggaaataaagggtattcaat

SEQ ID NO: 55229 - DNA, 20 bp, Artificial Sequence
  Description of Artificial Sequence: Synthetic oligonucleotide
  Target: LAMA2; (-) strand; PAM type: NRG; PAM sequence: GGG
aggcaggagaaggaaataaa

SEQ ID NO: 55230 - DNA, 20 bp, Artificial Sequence
  Description of Artificial Sequence: Synthetic oligonucleotide
  Target: LAMA2; (-) strand; PAM type: NRG; PAM sequence: AGG
taggcaggagaaggaaataa

SEQ ID NO: 55231 - DNA, 20 bp, Artificial Sequence
  Description of Artificial Sequence: Synthetic oligonucleotide
  Target: LAMA2; (-) strand; PAM type: NRG; PAM sequence: AAG
ttaggcaggagaaggaaata

SEQ ID NO: 55232 - DNA, 20 bp, Artificial Sequence
  Description of Artificial Sequence: Synthetic oligonucleotide
  Target: LAMA2; (-) strand; PAM type: NRG; PAM sequence: AGG
cagggcaattaggcaggaga

SEQ ID NO: 55233 - DNA, 20 bp, Artificial Sequence
  Description of Artificial Sequence: Synthetic oligonucleotide
  Target: LAMA2; (-) strand; PAM type: NRG; PAM sequence: AAG
ccagggcaattaggcaggag

SEQ ID NO: 55234 - DNA, 20 bp, Artificial Sequence
  Description of Artificial Sequence: Synthetic oligonucleotide
  Target: LAMA2; (-) strand; PAM type: NRG; PAM sequence: GAG
tggccagggcaattaggcag

SEQ ID NO: 55235 - DNA, 20 bp, Artificial Sequence
  Description of Artificial Sequence: Synthetic oligonucleotide
  Target: LAMA2; (-) strand; PAM type: NRG; PAM sequence: AGG
tctggccagggcaattaggc

SEQ ID NO: 55236 - DNA, 20 bp, Artificial Sequence
  Description of Artificial Sequence: Synthetic oligonucleotide
  Target: LAMA2; (-) strand; PAM type: NRG; PAM sequence: CAG
ttctggccagggcaattagg

SEQ ID NO: 55237 - DNA, 20 bp, Artificial Sequence
  Description of Artificial Sequence: Synthetic oligonucleotide
  Target: LAMA2; (-) strand; PAM type: NRG; PAM sequence: AGG
aagttctggccagggcaatt

SEQ ID NO: 55238 - DNA, 20 bp, Artificial Sequence
  Description of Artificial Sequence: Synthetic oligonucleotide
  Target: LAMA2; (-) strand; PAM type: NRG; PAM sequence: TAG
gaagttctggccagggcaat

SEQ ID NO: 55239 - DNA, 20 bp, Artificial Sequence
  Description of Artificial Sequence: Synthetic oligonucleotide
  Target: LAMA2; (-) strand; PAM type: NRG; PAM sequence: GGG
agtgttggaagttctggcca

SEQ ID NO: 55240 - DNA, 20 bp, Artificial Sequence
  Description of Artificial Sequence: Synthetic oligonucleotide
  Target: LAMA2; (-) strand; PAM type: NRG; PAM sequence: AGG
tagtgttggaagttctggcc

SEQ ID NO: 55241 - DNA, 20 bp, Artificial Sequence
  Description of Artificial Sequence: Synthetic oligonucleotide
  Target: LAMA2; (-) strand; PAM type: NRG; PAM sequence: CAG
atagtgttggaagttctggc

SEQ ID NO: 55242 - DNA, 20 bp, Artificial Sequence
  Description of Artificial Sequence: Synthetic oligonucleotide
  Target: LAMA2; (-) strand; PAM type: NRG; PAM sequence: TGG
caatatagtgttggaagttc

SEQ ID NO: 55243 - DNA, 20 bp, Artificial Sequence
  Description of Artificial Sequence: Synthetic oligonucleotide
  Target: LAMA2; (-) strand; PAM type: NRG; PAM sequence: AAG
cctattcaatatagtgttgg

SEQ ID NO: 55244 - DNA, 20 bp, Artificial Sequence
  Description of Artificial Sequence: Synthetic oligonucleotide
  Target: LAMA2; (-) strand; PAM type: NRG; PAM sequence: TGG
actcctattcaatatagtgt

SEQ ID NO: 55245 - DNA, 20 bp, Artificial Sequence
  Description of Artificial Sequence: Synthetic oligonucleotide
  Target: LAMA2; (-) strand; PAM type: NRG; PAM sequence: TAG
ctcaccactcctattcaata

SEQ ID NO: 55246 - DNA, 20 bp, Artificial Sequence
  Description of Artificial Sequence: Synthetic oligonucleotide
  Target: LAMA2; (-) strand; PAM type: NRG; PAM sequence: GGG
ttgaaaactggcacaagaca

SEQ ID NO: 55247 - DNA, 20 bp, Artificial Sequence
  Description of Artificial Sequence: Synthetic oligonucleotide
  Target: LAMA2; (-) strand; PAM type: NRG; PAM sequence: AGG
tttgaaaactggcacaagac

SEQ ID NO: 55248 - DNA, 20 bp, Artificial Sequence
  Description of Artificial Sequence: Synthetic oligonucleotide
  Target: LAMA2; (-) strand; PAM type: NRG; PAM sequence: CAG
ctttgaaaactggcacaaga

SEQ ID NO: 55249 - DNA, 20 bp, Artificial Sequence
  Description of Artificial Sequence: Synthetic oligonucleotide
  Target: LAMA2; (-) strand; PAM type: NRG; PAM sequence: AAG
ttccctttgaaaactggcac

SEQ ID NO: 55250 - DNA, 20 bp, Artificial Sequence
  Description of Artificial Sequence: Synthetic oligonucleotide
  Target: LAMA2; (-) strand; PAM type: NRG; PAM sequence: TGG
gaagcattccctttgaaaac

SEQ ID NO: 55251 - DNA, 20 bp, Artificial Sequence
  Description of Artificial Sequence: Synthetic oligonucleotide
  Target: LAMA2; (-) strand; PAM type: NRG; PAM sequence: AAG
actgaattggcaaaaactgg

SEQ ID NO: 55252 - DNA, 20 bp, Artificial Sequence
  Description of Artificial Sequence: Synthetic oligonucleotide
  Target: LAMA2; (-) strand; PAM type: NRG; PAM sequence: TGG
catactgaattggcaaaaac

SEQ ID NO: 55253 - DNA, 20 bp, Artificial Sequence
  Description of Artificial Sequence: Synthetic oligonucleotide
  Target: LAMA2; (-) strand; PAM type: NRG; PAM sequence: TGG
cagcgaatatcatactgaat

SEQ ID NO: 55254 - DNA, 20 bp, Artificial Sequence
  Description of Artificial Sequence: Synthetic oligonucleotide
  Target: LAMA2; (-) strand; PAM type: NRG; PAM sequence: CAG
agctatctatgacaaaccca

SEQ ID NO: 55255 - DNA, 20 bp, Artificial Sequence
  Description of Artificial Sequence: Synthetic oligonucleotide
  Target: LAMA2; (-) strand; PAM type: NRG; PAM sequence: GAG
gacatatttcaaaataataa

SEQ ID NO: 55256 - DNA, 20 bp, Artificial Sequence
  Description of Artificial Sequence: Synthetic oligonucleotide
  Target: LAMA2; (-) strand; PAM type: NRG; PAM sequence: AAG
gggacatatttcaaaataat

SEQ ID NO: 55257 - DNA, 20 bp, Artificial Sequence
  Description of Artificial Sequence: Synthetic oligonucleotide
  Target: LAMA2; (-) strand; PAM type: NRG; PAM sequence: GGG
tcaataaattaggtattgat

SEQ ID NO: 55258 - DNA, 20 bp, Artificial Sequence
  Description of Artificial Sequence: Synthetic oligonucleotide
  Target: LAMA2; (-) strand; PAM type: NRG; PAM sequence: TGG
ctcaataaattaggtattga

SEQ ID NO: 55259 - DNA, 20 bp, Artificial Sequence
  Description of Artificial Sequence: Synthetic oligonucleotide
  Target: LAMA2; (-) strand; PAM type: NRG; PAM sequence: AGG
ctaaaaactctcaataaatt

SEQ ID NO: 55260 - DNA, 20 bp, Artificial Sequence
  Description of Artificial Sequence: Synthetic oligonucleotide
  Target: LAMA2; (-) strand; PAM type: NRG; PAM sequence: TAG
gctaaaaactctcaataaat

SEQ ID NO: 55261 - DNA, 20 bp, Artificial Sequence
  Description of Artificial Sequence: Synthetic oligonucleotide
  Target: LAMA2; (-) strand; PAM type: NRG; PAM sequence: AGG
tatctcaatagatgcagaaa

SEQ ID NO: 55262 - DNA, 20 bp, Artificial Sequence
  Description of Artificial Sequence: Synthetic oligonucleotide
  Target: LAMA2; (-) strand; PAM type: NRG; PAM sequence: AAG
ttatctcaatagatgcagaa

SEQ ID NO: 55263 - DNA, 20 bp, Artificial Sequence
  Description of Artificial Sequence: Synthetic oligonucleotide
  Target: LAMA2; (-) strand; PAM type: NRG; PAM sequence: CAG
catgattatctcaatagatg

SEQ ID NO: 55264 - DNA, 20 bp, Artificial Sequence
  Description of Artificial Sequence: Synthetic oligonucleotide
  Target: LAMA2; (-) strand; PAM type: NRG; PAM sequence: TAG
aaaccacatgattatctcaa

SEQ ID NO: 55265 - DNA, 20 bp, Artificial Sequence
  Description of Artificial Sequence: Synthetic oligonucleotide
  Target: LAMA2; (-) strand; PAM type: NRG; PAM sequence: AAG
ccagcatataaacagggcca

SEQ ID NO: 55266 - DNA, 20 bp, Artificial Sequence
  Description of Artificial Sequence: Synthetic oligonucleotide
  Target: LAMA2; (-) strand; PAM type: NRG; PAM sequence: GGG
tgtaatccagcatataaaca

SEQ ID NO: 55267 - DNA, 20 bp, Artificial Sequence
  Description of Artificial Sequence: Synthetic oligonucleotide
  Target: LAMA2; (-) strand; PAM type: NRG; PAM sequence: AGG
atgtaatccagcatataaac

SEQ ID NO: 55268 - DNA, 20 bp, Artificial Sequence
  Description of Artificial Sequence: Synthetic oligonucleotide
  Target: LAMA2; (-) strand; PAM type: NRG; PAM sequence: CAG
aatgtaatccagcatataaa

SEQ ID NO: 55269 - DNA, 20 bp, Artificial Sequence
  Description of Artificial Sequence: Synthetic oligonucleotide
  Target: LAMA2; (-) strand; PAM type: NRG; PAM sequence: CAG
gcaaatcagtaaatgtaatc

SEQ ID NO: 55270 - DNA, 20 bp, Artificial Sequence
  Description of Artificial Sequence: Synthetic oligonucleotide
  Target: LAMA2; (-) strand; PAM type: NRG; PAM sequence: CAG
ctggttcaatatacgcaaat

SEQ ID NO: 55271 - DNA, 20 bp, Artificial Sequence
  Description of Artificial Sequence: Synthetic oligonucleotide
  Target: LAMA2; (-) strand; PAM type: NRG; PAM sequence: TGG
tcatccctgggatgcaaggc

SEQ ID NO: 55272 - DNA, 20 bp, Artificial Sequence
  Description of Artificial Sequence: Synthetic oligonucleotide
  Target: LAMA2; (-) strand; PAM type: NRG; PAM sequence: AGG
ggcttcatccctgggatgca

SEQ ID NO: 55273 - DNA, 20 bp, Artificial Sequence
  Description of Artificial Sequence: Synthetic oligonucleotide
  Target: LAMA2; (-) strand; PAM type: NRG; PAM sequence: AAG
gggcttcatccctgggatgc

SEQ ID NO: 55274 - DNA, 20 bp, Artificial Sequence
  Description of Artificial Sequence: Synthetic oligonucleotide
  Target: LAMA2; (-) strand; PAM type: NRG; PAM sequence: GGG
atcaagtgggcttcatccct

SEQ ID NO: 55275 - DNA, 20 bp, Artificial Sequence
  Description of Artificial Sequence: Synthetic oligonucleotide
  Target: LAMA2; (-) strand; PAM type: NRG; PAM sequence: TGG
gatcaagtgggcttcatccc

SEQ ID NO: 55276 - DNA, 20 bp, Artificial Sequence
  Description of Artificial Sequence: Synthetic oligonucleotide
  Target: LAMA2; (-) strand; PAM type: NRG; PAM sequence: GGG
cttatccaccatgatcaagt

SEQ ID NO: 55277 - DNA, 20 bp, Artificial Sequence
  Description of Artificial Sequence: Synthetic oligonucleotide
  Target: LAMA2; (-) strand; PAM type: NRG; PAM sequence: TGG
gcttatccaccatgatcaag

SEQ ID NO: 55278 - DNA, 20 bp, Artificial Sequence
  Description of Artificial Sequence: Synthetic oligonucleotide
  Target: LAMA2; (-) strand; PAM type: NRG; PAM sequence: AAG
aaagcttatccaccatgatc

SEQ ID NO: 55279 - DNA, 20 bp, Artificial Sequence
  Description of Artificial Sequence: Synthetic oligonucleotide
  Target: LAMA2; (-) strand; PAM type: NRG; PAM sequence: AAG
aaatccagcagcacatcaaa

SEQ ID NO: 55280 - DNA, 20 bp, Artificial Sequence
  Description of Artificial Sequence: Synthetic oligonucleotide
  Target: LAMA2; (-) strand; PAM type: NRG; PAM sequence: CAG
tactggcaaaacaaatccag

SEQ ID NO: 55281 - DNA, 20 bp, Artificial Sequence
  Description of Artificial Sequence: Synthetic oligonucleotide
  Target: LAMA2; (-) strand; PAM type: NRG; PAM sequence: CAG
aaatactggcaaaacaaatc

SEQ ID NO: 55282 - DNA, 20 bp, Artificial Sequence
  Description of Artificial Sequence: Synthetic oligonucleotide
  Target: LAMA2; (-) strand; PAM type: NRG; PAM sequence: TGG
aaaaatcctcaataaaatac

SEQ ID NO: 55283 - DNA, 20 bp, Artificial Sequence
  Description of Artificial Sequence: Synthetic oligonucleotide
  Target: LAMA2; (-) strand; PAM type: NRG; PAM sequence: TAG
acaaccaaaaaagagaattt

SEQ ID NO: 55284 - DNA, 20 bp, Artificial Sequence
  Description of Artificial Sequence: Synthetic oligonucleotide
  Target: LAMA2; (-) strand; PAM type: NRG; PAM sequence: GAG
gcagagacacaaccaaaaaa

SEQ ID NO: 55285 - DNA, 20 bp, Artificial Sequence
  Description of Artificial Sequence: Synthetic oligonucleotide
  Target: LAMA2; (-) strand; PAM type: NRG; PAM sequence: AAG
aggcagagacacaaccaaaa

SEQ ID NO: 55286 - DNA, 20 bp, Artificial Sequence
  Description of Artificial Sequence: Synthetic oligonucleotide
  Target: LAMA2; (-) strand; PAM type: NRG; PAM sequence: GAG
tctgataccaaagccaggca

SEQ ID NO: 55287 - DNA, 20 bp, Artificial Sequence
  Description of Artificial Sequence: Synthetic oligonucleotide
  Target: LAMA2; (-) strand; PAM type: NRG; PAM sequence: CAG
attctgataccaaagccagg

SEQ ID NO: 55288 - DNA, 20 bp, Artificial Sequence
  Description of Artificial Sequence: Synthetic oligonucleotide
  Target: LAMA2; (-) strand; PAM type: NRG; PAM sequence: AGG
atcattctgataccaaagcc

SEQ ID NO: 55289 - DNA, 20 bp, Artificial Sequence
  Description of Artificial Sequence: Synthetic oligonucleotide
  Target: LAMA2; (-) strand; PAM type: NRG; PAM sequence: CAG
catcattctgataccaaagc

SEQ ID NO: 55290 - DNA, 20 bp, Artificial Sequence
  Description of Artificial Sequence: Synthetic oligonucleotide
  Target: LAMA2; (-) strand; PAM type: NRG; PAM sequence: AAG
ccagcatcattctgatacca

SEQ ID NO: 55291 - DNA, 20 bp, Artificial Sequence
  Description of Artificial Sequence: Synthetic oligonucleotide
  Target: LAMA2; (-) strand; PAM type: NRG; PAM sequence: CAG
cctaactcattttatgaggc

SEQ ID NO: 55292 - DNA, 20 bp, Artificial Sequence
  Description of Artificial Sequence: Synthetic oligonucleotide
  Target: LAMA2; (-) strand; PAM type: NRG; PAM sequence: AGG
cctccctaactcattttatg

SEQ ID NO: 55293 - DNA, 20 bp, Artificial Sequence
  Description of Artificial Sequence: Synthetic oligonucleotide
  Target: LAMA2; (-) strand; PAM type: NRG; PAM sequence: GAG
tcctccctaactcattttat

SEQ ID NO: 55294 - DNA, 20 bp, Artificial Sequence
  Description of Artificial Sequence: Synthetic oligonucleotide
  Target: LAMA2; (-) strand; PAM type: NRG; PAM sequence: GGG
ttccaatcaatagaaaaaga

SEQ ID NO: 55295 - DNA, 20 bp, Artificial Sequence
  Description of Artificial Sequence: Synthetic oligonucleotide
  Target: LAMA2; (-) strand; PAM type: NRG; PAM sequence: AGG
attccaatcaatagaaaaag

SEQ ID NO: 55296 - DNA, 20 bp, Artificial Sequence
  Description of Artificial Sequence: Synthetic oligonucleotide
  Target: LAMA2; (-) strand; PAM type: NRG; PAM sequence: GAG
tattccaatcaatagaaaaa

SEQ ID NO: 55297 - DNA, 20 bp, Artificial Sequence
  Description of Artificial Sequence: Synthetic oligonucleotide
  Target: LAMA2; (-) strand; PAM type: NRG; PAM sequence: AAG
actattccaatcaatagaaa

SEQ ID NO: 55298 - DNA, 20 bp, Artificial Sequence
  Description of Artificial Sequence: Synthetic oligonucleotide
  Target: LAMA2; (-) strand; PAM type: NRG; PAM sequence: TAG
tctgaaactattccaatcaa

SEQ ID NO: 55299 - DNA, 20 bp, Artificial Sequence
  Description of Artificial Sequence: Synthetic oligonucleotide
  Target: LAMA2; (-) strand; PAM type: NRG; PAM sequence: TGG
ccagaggtacaaggaggaac

SEQ ID NO: 55300 - DNA, 20 bp, Artificial Sequence
  Description of Artificial Sequence: Synthetic oligonucleotide
  Target: LAMA2; (-) strand; PAM type: NRG; PAM sequence: AGG
attctaccagaggtacaagg

SEQ ID NO: 55301 - DNA, 20 bp, Artificial Sequence
  Description of Artificial Sequence: Synthetic oligonucleotide
  Target: LAMA2; (-) strand; PAM type: NRG; PAM sequence: GAG
aattctaccagaggtacaag

SEQ ID NO: 55302 - DNA, 20 bp, Artificial Sequence
  Description of Artificial Sequence: Synthetic oligonucleotide
  Target: LAMA2; (-) strand; PAM type: NRG; PAM sequence: AGG
cgaattctaccagaggtaca

SEQ ID NO: 55303 - DNA, 20 bp, Artificial Sequence
  Description of Artificial Sequence: Synthetic oligonucleotide
  Target: LAMA2; (-) strand; PAM type: NRG; PAM sequence: AAG
ccgaattctaccagaggtac

SEQ ID NO: 55304 - DNA, 20 bp, Artificial Sequence
  Description of Artificial Sequence: Synthetic oligonucleotide
  Target: LAMA2; (-) strand; PAM type: NRG; PAM sequence: AGG
tcacagccgaattctaccag

SEQ ID NO: 55305 - DNA, 20 bp, Artificial Sequence
  Description of Artificial Sequence: Synthetic oligonucleotide
  Target: LAMA2; (-) strand; PAM type: NRG; PAM sequence: GAG
ttcacagccgaattctacca

SEQ ID NO: 55306 - DNA, 20 bp, Artificial Sequence
  Description of Artificial Sequence: Synthetic oligonucleotide
  Target: LAMA2; (-) strand; PAM type: NRG; PAM sequence: CAG
gattcacagccgaattctac

SEQ ID NO: 55307 - DNA, 20 bp, Artificial Sequence
  Description of Artificial Sequence: Synthetic oligonucleotide
  Target: LAMA2; (-) strand; PAM type: NRG; PAM sequence: CAG
tccaggaccagatggattca

SEQ ID NO: 55308 - DNA, 20 bp, Artificial Sequence
  Description of Artificial Sequence: Synthetic oligonucleotide
  Target: LAMA2; (-) strand; PAM type: NRG; PAM sequence: TGG
aaaaagagtccaggaccaga

SEQ ID NO: 55309 - DNA, 20 bp, Artificial Sequence
  Description of Artificial Sequence: Synthetic oligonucleotide
  Target: LAMA2; (-) strand; PAM type: NRG; PAM sequence: CAG
aaccaaaaagagtccaggac

SEQ ID NO: 55310 - DNA, 20 bp, Artificial Sequence
  Description of Artificial Sequence: Synthetic oligonucleotide
  Target: LAMA2; (-) strand; PAM type: NRG; PAM sequence: AGG
ttaccaaccaaaaagagtcc

SEQ ID NO: 55311 - DNA, 20 bp, Artificial Sequence
  Description of Artificial Sequence: Synthetic oligonucleotide
  Target: LAMA2; (-) strand; PAM type: NRG; PAM sequence: CAG
cttaccaaccaaaaagagtc

SEQ ID NO: 55312 - DNA, 20 bp, Artificial Sequence
  Description of Artificial Sequence: Synthetic oligonucleotide
  Target: LAMA2; (-) strand; PAM type: NRG; PAM sequence: GAG
aatagcttaccaaccaaaaa

SEQ ID NO: 55313 - DNA, 20 bp, Artificial Sequence
  Description of Artificial Sequence: Synthetic oligonucleotide
  Target: LAMA2; (-) strand; PAM type: NRG; PAM sequence: AAG
tcaatagcttaccaaccaaa

SEQ ID NO: 55314 - DNA, 20 bp, Artificial Sequence
  Description of Artificial Sequence: Synthetic oligonucleotide
  Target: LAMA2; (-) strand; PAM type: NRG; PAM sequence: TAG
gaaattgtgacaataatcaa

SEQ ID NO: 55315 - DNA, 20 bp, Artificial Sequence
  Description of Artificial Sequence: Synthetic oligonucleotide
  Target: LAMA2; (-) strand; PAM type: NRG; PAM sequence: AGG
tctctgaatagacaaataac

SEQ ID NO: 55316 - DNA, 20 bp, Artificial Sequence
  Description of Artificial Sequence: Synthetic oligonucleotide
  Target: LAMA2; (-) strand; PAM type: NRG; PAM sequence: CAG
atctctgaatagacaaataa

SEQ ID NO: 55317 - DNA, 20 bp, Artificial Sequence
  Description of Artificial Sequence: Synthetic oligonucleotide
  Target: LAMA2; (-) strand; PAM type: NRG; PAM sequence: TAG
gaagaagttgaatctctgaa

SEQ ID NO: 55318 - DNA, 20 bp, Artificial Sequence
  Description of Artificial Sequence: Synthetic oligonucleotide
  Target: LAMA2; (-) strand; PAM type: NRG; PAM sequence: AAG
cccaagactaaaccaggaag

SEQ ID NO: 55319 - DNA, 20 bp, Artificial Sequence
  Description of Artificial Sequence: Synthetic oligonucleotide
  Target: LAMA2; (-) strand; PAM type: NRG; PAM sequence: AAG
tctcccaagactaaaccagg

SEQ ID NO: 55320 - DNA, 20 bp, Artificial Sequence
  Description of Artificial Sequence: Synthetic oligonucleotide
  Target: LAMA2; (-) strand; PAM type: NRG; PAM sequence: AGG
cactctcccaagactaaacc

SEQ ID NO: 55321 - DNA, 20 bp, Artificial Sequence
  Description of Artificial Sequence: Synthetic oligonucleotide
  Target: LAMA2; (-) strand; PAM type: NRG; PAM sequence: CAG
acactctcccaagactaaac

SEQ ID NO: 55322 - DNA, 20 bp, Artificial Sequence
  Description of Artificial Sequence: Synthetic oligonucleotide
  Target: LAMA2; (-) strand; PAM type: NRG; PAM sequence: AAG
ctcgacacatacactctccc

SEQ ID NO: 55323 - DNA, 20 bp, Artificial Sequence
  Description of Artificial Sequence: Synthetic oligonucleotide
  Target: LAMA2; (-) strand; PAM type: NRG; PAM sequence: TGG
actagaaaatctagaagaaa

SEQ ID NO: 55324 - DNA, 20 bp, Artificial Sequence
  Description of Artificial Sequence: Synthetic oligonucleotide
  Target: LAMA2; (-) strand; PAM type: NRG; PAM sequence: AAG
aaataaactagaaaatctag

SEQ ID NO: 55325 - DNA, 20 bp, Artificial Sequence
  Description of Artificial Sequence: Synthetic oligonucleotide
  Target: LAMA2; (-) strand; PAM type: NRG; PAM sequence: TAG
cgcaaataaactagaaaatc

SEQ ID NO: 55326 - DNA, 20 bp, Artificial Sequence
  Description of Artificial Sequence: Synthetic oligonucleotide
  Target: LAMA2; (-) strand; PAM type: NRG; PAM sequence: TAG
acacctctacgcaaataaac

SEQ ID NO: 55327 - DNA, 20 bp, Artificial Sequence
  Description of Artificial Sequence: Synthetic oligonucleotide
  Target: LAMA2; (-) strand; PAM type: NRG; PAM sequence: GAG
agaaatacaaactaccatca

SEQ ID NO: 55328 - DNA, 20 bp, Artificial Sequence
  Description of Artificial Sequence: Synthetic oligonucleotide
  Target: LAMA2; (-) strand; PAM type: NRG; PAM sequence: CAG
acagaaatacaaactaccat

SEQ ID NO: 55329 - DNA, 20 bp, Artificial Sequence
  Description of Artificial Sequence: Synthetic oligonucleotide
  Target: LAMA2; (-) strand; PAM type: NRG; PAM sequence: CAG
ggatatcaccaccgatccca

SEQ ID NO: 55330 - DNA, 20 bp, Artificial Sequence
  Description of Artificial Sequence: Synthetic oligonucleotide
  Target: LAMA2; (-) strand; PAM type: NRG; PAM sequence: GGG
cgcaataaaaaatgataaag

SEQ ID NO: 55331 - DNA, 20 bp, Artificial Sequence
  Description of Artificial Sequence: Synthetic oligonucleotide
  Target: LAMA2; (-) strand; PAM type: NRG; PAM sequence: GGG
acgcaataaaaaatgataaa

SEQ ID NO: 55332 - DNA, 20 bp, Artificial Sequence
  Description of Artificial Sequence: Synthetic oligonucleotide
  Target: LAMA2; (-) strand; PAM type: NRG; PAM sequence: AGG
gacgcaataaaaaatgataa

SEQ ID NO: 55333 - DNA, 20 bp, Artificial Sequence
  Description of Artificial Sequence: Synthetic oligonucleotide
  Target: LAMA2; (-) strand; PAM type: NRG; PAM sequence: AAG
agacgcaataaaaaatgata

SEQ ID NO: 55334 - DNA, 20 bp, Artificial Sequence
  Description of Artificial Sequence: Synthetic oligonucleotide
  Target: LAMA2; (-) strand; PAM type: NRG; PAM sequence: TAG
aaaaagagagaagaatcaaa

SEQ ID NO: 55335 - DNA, 20 bp, Artificial Sequence
  Description of Artificial Sequence: Synthetic oligonucleotide
  Target: LAMA2; (-) strand; PAM type: NRG; PAM sequence: AAG
taataaagaaaaaaagagag

SEQ ID NO: 55336 - DNA, 20 bp, Artificial Sequence
  Description of Artificial Sequence: Synthetic oligonucleotide
  Target: LAMA2; (-) strand; PAM type: NRG; PAM sequence: GAG
gactaataaagaaaaaaaga

SEQ ID NO: 55337 - DNA, 20 bp, Artificial Sequence
  Description of Artificial Sequence: Synthetic oligonucleotide
  Target: LAMA2; (-) strand; PAM type: NRG; PAM sequence: GAG
aagactaataaagaaaaaaa

SEQ ID NO: 55338 - DNA, 20 bp, Artificial Sequence
  Description of Artificial Sequence: Synthetic oligonucleotide
  Target: LAMA2; (-) strand; PAM type: NRG; PAM sequence: AAG
gcaagactaataaagaaaaa

SEQ ID NO: 55339 - DNA, 20 bp, Artificial Sequence
  Description of Artificial Sequence: Synthetic oligonucleotide
  Target: LAMA2; (-) strand; PAM type: NRG; PAM sequence: AAG
gaccgctagcaagactaata

SEQ ID NO: 55340 - DNA, 20 bp, Artificial Sequence
  Description of Artificial Sequence: Synthetic oligonucleotide
  Target: LAMA2; (-) strand; PAM type: NRG; PAM sequence: AAG
aaaattgatagaccgctagc

SEQ ID NO: 55341 - DNA, 20 bp, Artificial Sequence
  Description of Artificial Sequence: Synthetic oligonucleotide
  Target: LAMA2; (-) strand; PAM type: NRG; PAM sequence: TAG
caacaaaattgatagaccgc

SEQ ID NO: 55342 - DNA, 20 bp, Artificial Sequence
  Description of Artificial Sequence: Synthetic oligonucleotide
  Target: LAMA2; (-) strand; PAM type: NRG; PAM sequence: TAG
gaaaggatcaacaaaattga

SEQ ID NO: 55343 - DNA, 20 bp, Artificial Sequence
  Description of Artificial Sequence: Synthetic oligonucleotide
  Target: LAMA2; (-) strand; PAM type: NRG; PAM sequence: AGG
ccaggagctggttttttgaa

SEQ ID NO: 55344 - DNA, 20 bp, Artificial Sequence
  Description of Artificial Sequence: Synthetic oligonucleotide
  Target: LAMA2; (-) strand; PAM type: NRG; PAM sequence: AAG
tccaggagctggttttttga

SEQ ID NO: 55345 - DNA, 20 bp, Artificial Sequence
  Description of Artificial Sequence: Synthetic oligonucleotide
  Target: LAMA2; (-) strand; PAM type: NRG; PAM sequence: TGG
aaattaatgaatccaggagc

SEQ ID NO: 55346 - DNA, 20 bp, Artificial Sequence
  Description of Artificial Sequence: Synthetic oligonucleotide
  Target: LAMA2; (-) strand; PAM type: NRG; PAM sequence: GAG
caaaaaattaatgaatccag

SEQ ID NO: 55347 - DNA, 20 bp, Artificial Sequence
  Description of Artificial Sequence: Synthetic oligonucleotide
  Target: LAMA2; (-) strand; PAM type: NRG; PAM sequence: AGG
ttcaaaaaattaatgaatcc

SEQ ID NO: 55348 - DNA, 20 bp, Artificial Sequence
  Description of Artificial Sequence: Synthetic oligonucleotide
  Target: LAMA2; (-) strand; PAM type: NRG; PAM sequence: CAG
cttcaaaaaattaatgaatc

SEQ ID NO: 55349 - DNA, 20 bp, Artificial Sequence
  Description of Artificial Sequence: Synthetic oligonucleotide
  Target: LAMA2; (-) strand; PAM type: NRG; PAM sequence: GAG
gagcagaactgaaggaaata

SEQ ID NO: 55350 - DNA, 20 bp, Artificial Sequence
  Description of Artificial Sequence: Synthetic oligonucleotide
  Target: LAMA2; (-) strand; PAM type: NRG; PAM sequence: TAG
cagagcagaactgaaggaaa

SEQ ID NO: 55351 - DNA, 20 bp, Artificial Sequence
  Description of Artificial Sequence: Synthetic oligonucleotide
  Target: LAMA2; (-) strand; PAM type: NRG; PAM sequence: AGG
taaaatcagagcagaactga

SEQ ID NO: 55352 - DNA, 20 bp, Artificial Sequence
  Description of Artificial Sequence: Synthetic oligonucleotide
  Target: LAMA2; (-) strand; PAM type: NRG; PAM sequence: AAG
ctaaaatcagagcagaactg

SEQ ID NO: 55353 - DNA, 20 bp, Artificial Sequence
  Description of Artificial Sequence: Synthetic oligonucleotide
  Target: LAMA2; (-) strand; PAM type: NRG; PAM sequence: CAG
agaaataactaaaatcagag

SEQ ID NO: 55354 - DNA, 20 bp, Artificial Sequence
  Description of Artificial Sequence: Synthetic oligonucleotide
  Target: LAMA2; (-) strand; PAM type: NRG; PAM sequence: GAG
gcaagaaataactaaaatca

SEQ ID NO: 55355 - DNA, 20 bp, Artificial Sequence
  Description of Artificial Sequence: Synthetic oligonucleotide
  Target: LAMA2; (-) strand; PAM type: NRG; PAM sequence: CAG
aggcaagaaataactaaaat

SEQ ID NO: 55356 - DNA, 20 bp, Artificial Sequence
  Description of Artificial Sequence: Synthetic oligonucleotide
  Target: LAMA2; (-) strand; PAM type: NRG; PAM sequence: AAG
ttcaaaagctagcagaaggc

SEQ ID NO: 55357 - DNA, 20 bp, Artificial Sequence
  Description of Artificial Sequence: Synthetic oligonucleotide
  Target: LAMA2; (-) strand; PAM type: NRG; PAM sequence: AGG
cacattcaaaagctagcaga

SEQ ID NO: 55358 - DNA, 20 bp, Artificial Sequence
  Description of Artificial Sequence: Synthetic oligonucleotide
  Target: LAMA2; (-) strand; PAM type: NRG; PAM sequence: AAG
acacattcaaaagctagcag

SEQ ID NO: 55359 - DNA, 20 bp, Artificial Sequence
  Description of Artificial Sequence: Synthetic oligonucleotide
  Target: LAMA2; (-) strand; PAM type: NRG; PAM sequence: CAG
caaacacattcaaaagctag

SEQ ID NO: 55360 - DNA, 20 bp, Artificial Sequence
  Description of Artificial Sequence: Synthetic oligonucleotide
  Target: LAMA2; (-) strand; PAM type: NRG; PAM sequence: TAG
gagcaaacacattcaaaagc

SEQ ID NO: 55361 - DNA, 20 bp, Artificial Sequence
  Description of Artificial Sequence: Synthetic oligonucleotide
  Target: LAMA2; (-) strand; PAM type: NRG; PAM sequence: AAG
gcaagagcaaacacattcaa

SEQ ID NO: 55362 - DNA, 20 bp, Artificial Sequence
  Description of Artificial Sequence: Synthetic oligonucleotide
  Target: LAMA2; (-) strand; PAM type: NRG; PAM sequence: GAG
taaaagaactagaaaagcaa

SEQ ID NO: 55363 - DNA, 20 bp, Artificial Sequence
  Description of Artificial Sequence: Synthetic oligonucleotide
  Target: LAMA2; (-) strand; PAM type: NRG; PAM sequence: AAG
attaaaagaactagaaaagc

SEQ ID NO: 55364 - DNA, 20 bp, Artificial Sequence
  Description of Artificial Sequence: Synthetic oligonucleotide
  Target: LAMA2; (-) strand; PAM type: NRG; PAM sequence: AAG
cacaattaaaagaactagaa

SEQ ID NO: 55365 - DNA, 20 bp, Artificial Sequence
  Description of Artificial Sequence: Synthetic oligonucleotide
  Target: LAMA2; (-) strand; PAM type: NRG; PAM sequence: TAG
aacatcacaattaaaagaac

SEQ ID NO: 55366 - DNA, 20 bp, Artificial Sequence
  Description of Artificial Sequence: Synthetic oligonucleotide
  Target: LAMA2; (-) strand; PAM type: NRG; PAM sequence: AAG
caccctaacatcacaattaa

SEQ ID NO: 55367 - DNA, 20 bp, Artificial Sequence
  Description of Artificial Sequence: Synthetic oligonucleotide
  Target: LAMA2; (-) strand; PAM type: NRG; PAM sequence: AAG
gcccacaagagacagcagga

SEQ ID NO: 55368 - DNA, 20 bp, Artificial Sequence
  Description of Artificial Sequence: Synthetic oligonucleotide
  Target: LAMA2; (-) strand; PAM type: NRG; PAM sequence: AGG
aaatgcccacaagagacagc

SEQ ID NO: 55369 - DNA, 20 bp, Artificial Sequence
  Description of Artificial Sequence: Synthetic oligonucleotide
  Target: LAMA2; (-) strand; PAM type: NRG; PAM sequence: CAG
taaatgcccacaagagacag

SEQ ID NO: 55370 - DNA, 20 bp, Artificial Sequence
  Description of Artificial Sequence: Synthetic oligonucleotide
  Target: LAMA2; (-) strand; PAM type: NRG; PAM sequence: CAG
cactaaatgcccacaagaga

SEQ ID NO: 55371 - DNA, 20 bp, Artificial Sequence
  Description of Artificial Sequence: Synthetic oligonucleotide
  Target: LAMA2; (-) strand; PAM type: NRG; PAM sequence: GAG
atagcactaaatgcccacaa

SEQ ID NO: 55372 - DNA, 20 bp, Artificial Sequence
  Description of Artificial Sequence: Synthetic oligonucleotide
  Target: LAMA2; (-) strand; PAM type: NRG; PAM sequence: AAG
ttatagcactaaatgcccac

SEQ ID NO: 55373 - DNA, 20 bp, Artificial Sequence
  Description of Artificial Sequence: Synthetic oligonucleotide
  Target: LAMA2; (-) strand; PAM type: NRG; PAM sequence: TAG
agtgtgtagagggaaattta

SEQ ID NO: 55374 - DNA, 20 bp, Artificial Sequence
  Description of Artificial Sequence: Synthetic oligonucleotide
  Target: LAMA2; (-) strand; PAM type: NRG; PAM sequence: GGG
cattcaaagcagtgtgtaga

SEQ ID NO: 55375 - DNA, 20 bp, Artificial Sequence
  Description of Artificial Sequence: Synthetic oligonucleotide
  Target: LAMA2; (-) strand; PAM type: NRG; PAM sequence: AGG
acattcaaagcagtgtgtag

SEQ ID NO: 55376 - DNA, 20 bp, Artificial Sequence
  Description of Artificial Sequence: Synthetic oligonucleotide
  Target: LAMA2; (-) strand; PAM type: NRG; PAM sequence: GAG
cacattcaaagcagtgtgta

SEQ ID NO: 55377 - DNA, 20 bp, Artificial Sequence
  Description of Artificial Sequence: Synthetic oligonucleotide
  Target: LAMA2; (-) strand; PAM type: NRG; PAM sequence: TAG
gacacattcaaagcagtgtg

SEQ ID NO: 55378 - DNA, 20 bp, Artificial Sequence
  Description of Artificial Sequence: Synthetic oligonucleotide
  Target: LAMA2; (-) strand; PAM type: NRG; PAM sequence: CAG
tctctgggacacattcaaag

SEQ ID NO: 55379 - DNA, 20 bp, Artificial Sequence
  Description of Artificial Sequence: Synthetic oligonucleotide
  Target: LAMA2; (-) strand; PAM type: NRG; PAM sequence: AAG
gaatctctgggacacattca

SEQ ID NO: 55380 - DNA, 20 bp, Artificial Sequence
  Description of Artificial Sequence: Synthetic oligonucleotide
  Target: LAMA2; (-) strand; PAM type: NRG; PAM sequence: GGG
cacaacataccagaatctct

SEQ ID NO: 55381 - DNA, 20 bp, Artificial Sequence
  Description of Artificial Sequence: Synthetic oligonucleotide
  Target: LAMA2; (-) strand; PAM type: NRG; PAM sequence: TGG
acacaacataccagaatctc

SEQ ID NO: 55382 - DNA, 20 bp, Artificial Sequence
  Description of Artificial Sequence: Synthetic oligonucleotide
  Target: LAMA2; (-) strand; PAM type: NRG; PAM sequence: CAG
agaacaaagacacaacatac

SEQ ID NO: 55383 - DNA, 20 bp, Artificial Sequence
  Description of Artificial Sequence: Synthetic oligonucleotide
  Target: LAMA2; (-) strand; PAM type: NRG; PAM sequence: AAG
ctttgaaaccgacaagaaca

SEQ ID NO: 55384 - DNA, 20 bp, Artificial Sequence
  Description of Artificial Sequence: Synthetic oligonucleotide
  Target: LAMA2; (-) strand; PAM type: NRG; PAM sequence: AAG
agatgttctttgaaaccgac

SEQ ID NO: 55385 - DNA, 20 bp, Artificial Sequence
  Description of Artificial Sequence: Synthetic oligonucleotide
  Target: LAMA2; (-) strand; PAM type: NRG; PAM sequence: AAG
acgaaatgaaggcagaaata

SEQ ID NO: 55386 - DNA, 20 bp, Artificial Sequence
  Description of Artificial Sequence: Synthetic oligonucleotide
  Target: LAMA2; (-) strand; PAM type: NRG; PAM sequence: CAG
ggtacataacgaaatgaagg

SEQ ID NO: 55387 - DNA, 20 bp, Artificial Sequence
  Description of Artificial Sequence: Synthetic oligonucleotide
  Target: LAMA2; (-) strand; PAM type: NRG; PAM sequence: AGG
ctgggtacataacgaaatga

SEQ ID NO: 55388 - DNA, 20 bp, Artificial Sequence
  Description of Artificial Sequence: Synthetic oligonucleotide
  Target: LAMA2; (-) strand; PAM type: NRG; PAM sequence: AAG
actgggtacataacgaaatg

SEQ ID NO: 55389 - DNA, 20 bp, Artificial Sequence
  Description of Artificial Sequence: Synthetic oligonucleotide
  Target: LAMA2; (-) strand; PAM type: NRG; PAM sequence: GGG
cctgctcctgaatgactact

SEQ ID NO: 55390 - DNA, 20 bp, Artificial Sequence
  Description of Artificial Sequence: Synthetic oligonucleotide
  Target: LAMA2; (-) strand; PAM type: NRG; PAM sequence: TGG
acctgctcctgaatgactac

SEQ ID NO: 55391 - DNA, 20 bp, Artificial Sequence
  Description of Artificial Sequence: Synthetic oligonucleotide
  Target: LAMA2; (-) strand; PAM type: NRG; PAM sequence: TGG
ctcaaaactgctcaactaca

SEQ ID NO: 55392 - DNA, 20 bp, Artificial Sequence
  Description of Artificial Sequence: Synthetic oligonucleotide
  Target: LAMA2; (-) strand; PAM type: NRG; PAM sequence: AAG
tcaaactagaactcaggatt

SEQ ID NO: 55393 - DNA, 20 bp, Artificial Sequence
  Description of Artificial Sequence: Synthetic oligonucleotide
  Target: LAMA2; (-) strand; PAM type: NRG; PAM sequence: AGG
gtgcaatcaaactagaactc

SEQ ID NO: 55394 - DNA, 20 bp, Artificial Sequence
  Description of Artificial Sequence: Synthetic oligonucleotide
  Target: LAMA2; (-) strand; PAM type: NRG; PAM sequence: CAG
agtgcaatcaaactagaact

SEQ ID NO: 55395 - DNA, 20 bp, Artificial Sequence
  Description of Artificial Sequence: Synthetic oligonucleotide
  Target: LAMA2; (-) strand; PAM type: NRG; PAM sequence: TAG
agaccacagtgcaatcaaac

SEQ ID NO: 55396 - DNA, 20 bp, Artificial Sequence
  Description of Artificial Sequence: Synthetic oligonucleotide
  Target: LAMA2; (-) strand; PAM type: NRG; PAM sequence: CAG
acaaactatctctcagacca

SEQ ID NO: 55397 - DNA, 20 bp, Artificial Sequence
  Description of Artificial Sequence: Synthetic oligonucleotide
  Target: LAMA2; (-) strand; PAM type: NRG; PAM sequence: CAG
aattataacaaactatctct

SEQ ID NO: 55398 - DNA, 20 bp, Artificial Sequence
  Description of Artificial Sequence: Synthetic oligonucleotide
  Target: LAMA2; (-) strand; PAM type: NRG; PAM sequence: CAG
cctcagcaaatgtaaaagaa

SEQ ID NO: 55399 - DNA, 20 bp, Artificial Sequence
  Description of Artificial Sequence: Synthetic oligonucleotide
  Target: LAMA2; (-) strand; PAM type: NRG; PAM sequence: AAG
gctctcctcagcaaatgtaa

SEQ ID NO: 55400 - DNA, 20 bp, Artificial Sequence
  Description of Artificial Sequence: Synthetic oligonucleotide
  Target: LAMA2; (-) strand; PAM type: NRG; PAM sequence: CAG
cttggaagtaaagctctcct

SEQ ID NO: 55401 - DNA, 20 bp, Artificial Sequence
  Description of Artificial Sequence: Synthetic oligonucleotide
  Target: LAMA2; (-) strand; PAM type: NRG; PAM sequence: AAG
tgaccacatacttggaagta

SEQ ID NO: 55402 - DNA, 20 bp, Artificial Sequence
  Description of Artificial Sequence: Synthetic oligonucleotide
  Target: LAMA2; (-) strand; PAM type: NRG; PAM sequence: AAG
aaaattgaccacatacttgg

SEQ ID NO: 55403 - DNA, 20 bp, Artificial Sequence
  Description of Artificial Sequence: Synthetic oligonucleotide
  Target: LAMA2; (-) strand; PAM type: NRG; PAM sequence: TGG
tccaaaattgaccacatact

SEQ ID NO: 55404 - DNA, 20 bp, Artificial Sequence
  Description of Artificial Sequence: Synthetic oligonucleotide
  Target: LAMA2; (-) strand; PAM type: NRG; PAM sequence: CAG
aacagaatatacattttttt

SEQ ID NO: 55405 - DNA, 20 bp, Artificial Sequence
  Description of Artificial Sequence: Synthetic oligonucleotide
  Target: LAMA2; (-) strand; PAM type: NRG; PAM sequence: CAG
aactctccaccccaaatcaa

SEQ ID NO: 55406 - DNA, 20 bp, Artificial Sequence
  Description of Artificial Sequence: Synthetic oligonucleotide
  Target: LAMA2; (-) strand; PAM type: NRG; PAM sequence: CAG
gcggacctgatagacatcta

SEQ ID NO: 55407 - DNA, 20 bp, Artificial Sequence
  Description of Artificial Sequence: Synthetic oligonucleotide
  Target: LAMA2; (-) strand; PAM type: NRG; PAM sequence: TAG
tctgcaccaagcggacctga

SEQ ID NO: 55408 - DNA, 20 bp, Artificial Sequence
  Description of Artificial Sequence: Synthetic oligonucleotide
  Target: LAMA2; (-) strand; PAM type: NRG; PAM sequence: CGG
gaactcagctctgcaccaag

SEQ ID NO: 55409 - DNA, 20 bp, Artificial Sequence
  Description of Artificial Sequence: Synthetic oligonucleotide
  Target: LAMA2; (-) strand; PAM type: NRG; PAM sequence: AAG
attgaactcagctctgcacc

SEQ ID NO: 55410 - DNA, 20 bp, Artificial Sequence
  Description of Artificial Sequence: Synthetic oligonucleotide
  Target: LAMA2; (-) strand; PAM type: NRG; PAM sequence: CAG
ggatacccaggaattgaact

SEQ ID NO: 55411 - DNA, 20 bp, Artificial Sequence
  Description of Artificial Sequence: Synthetic oligonucleotide
  Target: LAMA2; (-) strand; PAM type: NRG; PAM sequence: AGG
gaaagtcaacaaggataccc

SEQ ID NO: 55412 - DNA, 20 bp, Artificial Sequence
  Description of Artificial Sequence: Synthetic oligonucleotide
  Target: LAMA2; (-) strand; PAM type: NRG; PAM sequence: CAG
agaaagtcaacaaggatacc

SEQ ID NO: 55413 - DNA, 20 bp, Artificial Sequence
  Description of Artificial Sequence: Synthetic oligonucleotide
  Target: LAMA2; (-) strand; PAM type: NRG; PAM sequence: AGG
aacgagacagaaagtcaaca

SEQ ID NO: 55414 - DNA, 20 bp, Artificial Sequence
  Description of Artificial Sequence: Synthetic oligonucleotide
  Target: LAMA2; (-) strand; PAM type: NRG; PAM sequence: AAG
caacgagacagaaagtcaac

SEQ ID NO: 55415 - DNA, 20 bp, Artificial Sequence
  Description of Artificial Sequence: Synthetic oligonucleotide
  Target: LAMA2; (-) strand; PAM type: NRG; PAM sequence: AAG
agacagatcaacgagacaga

SEQ ID NO: 55416 - DNA, 20 bp, Artificial Sequence
  Description of Artificial Sequence: Synthetic oligonucleotide
  Target: LAMA2; (-) strand; PAM type: NRG; PAM sequence: CAG
cactagacagatcaacgaga

SEQ ID NO: 55417 - DNA, 20 bp, Artificial Sequence
  Description of Artificial Sequence: Synthetic oligonucleotide
  Target: LAMA2; (-) strand; PAM type: NRG; PAM sequence: GAG
tcaacactagacagatcaac

SEQ ID NO: 55418 - DNA, 20 bp, Artificial Sequence
  Description of Artificial Sequence: Synthetic oligonucleotide
  Target: LAMA2; (-) strand; PAM type: NRG; PAM sequence: CAG
accccactgtcaacactaga

SEQ ID NO: 55419 - DNA, 20 bp, Artificial Sequence
  Description of Artificial Sequence: Synthetic oligonucleotide
  Target: LAMA2; (-) strand; PAM type: NRG; PAM sequence: TAG
taataccccactgtcaacac

SEQ ID NO: 55420 - DNA, 20 bp, Artificial Sequence
  Description of Artificial Sequence: Synthetic oligonucleotide
  Target: LAMA2; (-) strand; PAM type: NRG; PAM sequence: GAG
ctcccacacattaataatgg

SEQ ID NO: 55421 - DNA, 20 bp, Artificial Sequence
  Description of Artificial Sequence: Synthetic oligonucleotide
  Target: LAMA2; (-) strand; PAM type: NRG; PAM sequence: GGG
gactcccacacattaataat

SEQ ID NO: 55422 - DNA, 20 bp, Artificial Sequence
  Description of Artificial Sequence: Synthetic oligonucleotide
  Target: LAMA2; (-) strand; PAM type: NRG; PAM sequence: TGG
agactcccacacattaataa

SEQ ID NO: 55423 - DNA, 20 bp, Artificial Sequence
  Description of Artificial Sequence: Synthetic oligonucleotide
  Target: LAMA2; (-) strand; PAM type: NRG; PAM sequence: TAG
gagtgacctacaaagagact

SEQ ID NO: 55424 - DNA, 20 bp, Artificial Sequence
  Description of Artificial Sequence: Synthetic oligonucleotide
  Target: LAMA2; (-) strand; PAM type: NRG; PAM sequence: GAG
agtcctgagtgacctacaaa

SEQ ID NO: 55425 - DNA, 20 bp, Artificial Sequence
  Description of Artificial Sequence: Synthetic oligonucleotide
  Target: LAMA2; (-) strand; PAM type: NRG; PAM sequence: AAG
caagtcctgagtgacctaca

SEQ ID NO: 55426 - DNA, 20 bp, Artificial Sequence
  Description of Artificial Sequence: Synthetic oligonucleotide
  Target: LAMA2; (-) strand; PAM type: NRG; PAM sequence: GAG
agattcataaagcaagtcct

SEQ ID NO: 55427 - DNA, 20 bp, Artificial Sequence
  Description of Artificial Sequence: Synthetic oligonucleotide
  Target: LAMA2; (-) strand; PAM type: NRG; PAM sequence: AAG
agcacccagattcataaagc

SEQ ID NO: 55428 - DNA, 20 bp, Artificial Sequence
  Description of Artificial Sequence: Synthetic oligonucleotide
  Target: LAMA2; (-) strand; PAM type: NRG; PAM sequence: AAG
caggagcacccagattcata

SEQ ID NO: 55429 - DNA, 20 bp, Artificial Sequence
  Description of Artificial Sequence: Synthetic oligonucleotide
  Target: LAMA2; (-) strand; PAM type: NRG; PAM sequence: CAG
gcacccaacacaggagcacc

SEQ ID NO: 55430 - DNA, 20 bp, Artificial Sequence
  Description of Artificial Sequence: Synthetic oligonucleotide
  Target: LAMA2; (-) strand; PAM type: NRG; PAM sequence: GAG
tatatacgcacccaacacag

SEQ ID NO: 55431 - DNA, 20 bp, Artificial Sequence
  Description of Artificial Sequence: Synthetic oligonucleotide
  Target: LAMA2; (-) strand; PAM type: NRG; PAM sequence: AGG
aatatatacgcacccaacac

SEQ ID NO: 55432 - DNA, 20 bp, Artificial Sequence
  Description of Artificial Sequence: Synthetic oligonucleotide
  Target: LAMA2; (-) strand; PAM type: NRG; PAM sequence: CAG
aaatatatacgcacccaaca

SEQ ID NO: 55433 - DNA, 20 bp, Artificial Sequence
  Description of Artificial Sequence: Synthetic oligonucleotide
  Target: LAMA2; (-) strand; PAM type: NRG; PAM sequence: GAG
agggatcaattcaacaagaa

SEQ ID NO: 55434 - DNA, 20 bp, Artificial Sequence
  Description of Artificial Sequence: Synthetic oligonucleotide
  Target: LAMA2; (-) strand; PAM type: NRG; PAM sequence: AAG
aaagggatcaattcaacaag

SEQ ID NO: 55435 - DNA, 20 bp, Artificial Sequence
  Description of Artificial Sequence: Synthetic oligonucleotide
  Target: LAMA2; (-) strand; PAM type: NRG; PAM sequence: AAG
ggtaaagggatcaattcaac

SEQ ID NO: 55436 - DNA, 20 bp, Artificial Sequence
  Description of Artificial Sequence: Synthetic oligonucleotide
  Target: LAMA2; (-) strand; PAM type: NRG; PAM sequence: GGG
ggccattacataatggtaaa

SEQ ID NO: 55437 - DNA, 20 bp, Artificial Sequence
  Description of Artificial Sequence: Synthetic oligonucleotide
  Target: LAMA2; (-) strand; PAM type: NRG; PAM sequence: AGG
aggccattacataatggtaa

SEQ ID NO: 55438 - DNA, 20 bp, Artificial Sequence
  Description of Artificial Sequence: Synthetic oligonucleotide
  Target: LAMA2; (-) strand; PAM type: NRG; PAM sequence: AAG
aaggccattacataatggta

SEQ ID NO: 55439 - DNA, 20 bp, Artificial Sequence
  Description of Artificial Sequence: Synthetic oligonucleotide
  Target: LAMA2; (-) strand; PAM type: NRG; PAM sequence: TGG
caaagaaggccattacataa

SEQ ID NO: 55440 - DNA, 20 bp, Artificial Sequence
  Description of Artificial Sequence: Synthetic oligonucleotide
  Target: LAMA2; (-) strand; PAM type: NRG; PAM sequence: AGG
aagatcaaaagagacaaaga

SEQ ID NO: 55441 - DNA, 20 bp, Artificial Sequence
  Description of Artificial Sequence: Synthetic oligonucleotide
  Target: LAMA2; (-) strand; PAM type: NRG; PAM sequence: AAG
aaagatcaaaagagacaaag

SEQ ID NO: 55442 - DNA, 20 bp, Artificial Sequence
  Description of Artificial Sequence: Synthetic oligonucleotide
  Target: LAMA2; (-) strand; PAM type: NRG; PAM sequence: AAG
aacaaagatcaaaagagaca

SEQ ID NO: 55443 - DNA, 20 bp, Artificial Sequence
  Description of Artificial Sequence: Synthetic oligonucleotide
  Target: LAMA2; (-) strand; PAM type: NRG; PAM sequence: GAG
taaaccaacaaagatcaaaa

SEQ ID NO: 55444 - DNA, 20 bp, Artificial Sequence
  Description of Artificial Sequence: Synthetic oligonucleotide
  Target: LAMA2; (-) strand; PAM type: NRG; PAM sequence: AAG
tttaaaccaacaaagatcaa

SEQ ID NO: 55445 - DNA, 20 bp, Artificial Sequence
  Description of Artificial Sequence: Synthetic oligonucleotide
  Target: LAMA2; (-) strand; PAM type: NRG; PAM sequence: AAG
aaacagattttaaaccaaca

SEQ ID NO: 55446 - DNA, 20 bp, Artificial Sequence
  Description of Artificial Sequence: Synthetic oligonucleotide
  Target: LAMA2; (-) strand; PAM type: NRG; PAM sequence: CAG
aatcctagtctctgataaaa

SEQ ID NO: 55447 - DNA, 20 bp, Artificial Sequence
  Description of Artificial Sequence: Synthetic oligonucleotide
  Target: LAMA2; (-) strand; PAM type: NRG; PAM sequence: TAG
aaaggcaggggttgcaatcc

SEQ ID NO: 55448 - DNA, 20 bp, Artificial Sequence
  Description of Artificial Sequence: Synthetic oligonucleotide
  Target: LAMA2; (-) strand; PAM type: NRG; PAM sequence: GGG
tggaaaacaaaaaaaggcag

SEQ ID NO: 55449 - DNA, 20 bp, Artificial Sequence
  Description of Artificial Sequence: Synthetic oligonucleotide
  Target: LAMA2; (-) strand; PAM type: NRG; PAM sequence: GGG
atggaaaacaaaaaaaggca

SEQ ID NO: 55450 - DNA, 20 bp, Artificial Sequence
  Description of Artificial Sequence: Synthetic oligonucleotide
  Target: LAMA2; (-) strand; PAM type: NRG; PAM sequence: AGG
aatggaaaacaaaaaaaggc

SEQ ID NO: 55451 - DNA, 20 bp, Artificial Sequence
  Description of Artificial Sequence: Synthetic oligonucleotide
  Target: LAMA2; (-) strand; PAM type: NRG; PAM sequence: CAG
aaatggaaaacaaaaaaagg

SEQ ID NO: 55452 - DNA, 20 bp, Artificial Sequence
  Description of Artificial Sequence: Synthetic oligonucleotide
  Target: LAMA2; (-) strand; PAM type: NRG; PAM sequence: AGG
agcaaatggaaaacaaaaaa

SEQ ID NO: 55453 - DNA, 20 bp, Artificial Sequence
  Description of Artificial Sequence: Synthetic oligonucleotide
  Target: LAMA2; (-) strand; PAM type: NRG; PAM sequence: AAG
aagcaaatggaaaacaaaaa

SEQ ID NO: 55454 - DNA, 20 bp, Artificial Sequence
  Description of Artificial Sequence: Synthetic oligonucleotide
  Target: LAMA2; (-) strand; PAM type: NRG; PAM sequence: TGG
aggaagatctaccaagcaaa

SEQ ID NO: 55455 - DNA, 20 bp, Artificial Sequence
  Description of Artificial Sequence: Synthetic oligonucleotide
  Target: LAMA2; (-) strand; PAM type: NRG; PAM sequence: AAG
aggatggaggaagatctacc

SEQ ID NO: 55456 - DNA, 20 bp, Artificial Sequence
  Description of Artificial Sequence: Synthetic oligonucleotide
  Target: LAMA2; (-) strand; PAM type: NRG; PAM sequence: AAG
tcaaaataaaaggatggagg

SEQ ID NO: 55457 - DNA, 20 bp, Artificial Sequence
  Description of Artificial Sequence: Synthetic oligonucleotide
  Target: LAMA2; (-) strand; PAM type: NRG; PAM sequence: AGG
ggctcaaaataaaaggatgg

SEQ ID NO: 55458 - DNA, 20 bp, Artificial Sequence
  Description of Artificial Sequence: Synthetic oligonucleotide
  Target: LAMA2; (-) strand; PAM type: NRG; PAM sequence: GAG
aggctcaaaataaaaggatg

SEQ ID NO: 55459 - DNA, 20 bp, Artificial Sequence
  Description of Artificial Sequence: Synthetic oligonucleotide
  Target: LAMA2; (-) strand; PAM type: NRG; PAM sequence: TGG
ataggctcaaaataaaagga

SEQ ID NO: 55460 - DNA, 20 bp, Artificial Sequence
  Description of Artificial Sequence: Synthetic oligonucleotide
  Target: LAMA2; (-) strand; PAM type: NRG; PAM sequence: AGG
acacataggctcaaaataaa

SEQ ID NO: 55461 - DNA, 20 bp, Artificial Sequence
  Description of Artificial Sequence: Synthetic oligonucleotide
  Target: LAMA2; (-) strand; PAM type: NRG; PAM sequence: AAG
cacacataggctcaaaataa

SEQ ID NO: 55462 - DNA, 20 bp, Artificial Sequence
  Description of Artificial Sequence: Synthetic oligonucleotide
  Target: LAMA2; (-) strand; PAM type: NRG; PAM sequence: AGG
tcacgtgcagagacacacat

SEQ ID NO: 55463 - DNA, 20 bp, Artificial Sequence
  Description of Artificial Sequence: Synthetic oligonucleotide
  Target: LAMA2; (-) strand; PAM type: NRG; PAM sequence: TAG
ctcacgtgcagagacacaca

SEQ ID NO: 55464 - DNA, 20 bp, Artificial Sequence
  Description of Artificial Sequence: Synthetic oligonucleotide
  Target: LAMA2; (-) strand; PAM type: NRG; PAM sequence: GAG
ggaaacccatctcacgtgca

SEQ ID NO: 55465 - DNA, 20 bp, Artificial Sequence
  Description of Artificial Sequence: Synthetic oligonucleotide
  Target: LAMA2; (-) strand; PAM type: NRG; PAM sequence: CAG
caggaaacccatctcacgtg

SEQ ID NO: 55466 - DNA, 20 bp, Artificial Sequence
  Description of Artificial Sequence: Synthetic oligonucleotide
  Target: LAMA2; (-) strand; PAM type: NRG; PAM sequence: AGG
cccatcagtgtgctgtattc

SEQ ID NO: 55467 - DNA, 20 bp, Artificial Sequence
  Description of Artificial Sequence: Synthetic oligonucleotide
  Target: LAMA2; (-) strand; PAM type: NRG; PAM sequence: CAG
acccatcagtgtgctgtatt

SEQ ID NO: 55468 - DNA, 20 bp, Artificial Sequence
  Description of Artificial Sequence: Synthetic oligonucleotide
  Target: LAMA2; (-) strand; PAM type: NRG; PAM sequence: CAG
gataaagagtcaagacccat

SEQ ID NO: 55469 - DNA, 20 bp, Artificial Sequence
  Description of Artificial Sequence: Synthetic oligonucleotide
  Target: LAMA2; (-) strand; PAM type: NRG; PAM sequence: AAG
ggcaaattggataaagagtc

SEQ ID NO: 55470 - DNA, 20 bp, Artificial Sequence
  Description of Artificial Sequence: Synthetic oligonucleotide
  Target: LAMA2; (-) strand; PAM type: NRG; PAM sequence: GAG
agactggcaaattggataaa

SEQ ID NO: 55471 - DNA, 20 bp, Artificial Sequence
  Description of Artificial Sequence: Synthetic oligonucleotide
  Target: LAMA2; (-) strand; PAM type: NRG; PAM sequence: AAG
acagactggcaaattggata

SEQ ID NO: 55472 - DNA, 20 bp, Artificial Sequence
  Description of Artificial Sequence: Synthetic oligonucleotide
  Target: LAMA2; (-) strand; PAM type: NRG; PAM sequence: TGG
aaagacacagactggcaaat

SEQ ID NO: 55473 - DNA, 20 bp, Artificial Sequence
  Description of Artificial Sequence: Synthetic oligonucleotide
  Target: LAMA2; (-) strand; PAM type: NRG; PAM sequence: TGG
tccaattaaaagacacagac

SEQ ID NO: 55474 - DNA, 20 bp, Artificial Sequence
  Description of Artificial Sequence: Synthetic oligonucleotide
  Target: LAMA2; (-) strand; PAM type: NRG; PAM sequence: CAG
aatgctccaattaaaagaca

SEQ ID NO: 55475 - DNA, 20 bp, Artificial Sequence
  Description of Artificial Sequence: Synthetic oligonucleotide
  Target: LAMA2; (-) strand; PAM type: NRG; PAM sequence: AAG
ggactaaatgctccaattaa

SEQ ID NO: 55476 - DNA, 20 bp, Artificial Sequence
  Description of Artificial Sequence: Synthetic oligonucleotide
  Target: LAMA2; (-) strand; PAM type: NRG; PAM sequence: TGG
atattaactttaaatgtaaa

SEQ ID NO: 55477 - DNA, 20 bp, Artificial Sequence
  Description of Artificial Sequence: Synthetic oligonucleotide
  Target: LAMA2; (-) strand; PAM type: NRG; PAM sequence: AGG
ccagctaacatcatcatgac

SEQ ID NO: 55478 - DNA, 20 bp, Artificial Sequence
  Description of Artificial Sequence: Synthetic oligonucleotide
  Target: LAMA2; (-) strand; PAM type: NRG; PAM sequence: CAG
accagctaacatcatcatga

SEQ ID NO: 55479 - DNA, 20 bp, Artificial Sequence
  Description of Artificial Sequence: Synthetic oligonucleotide
  Target: LAMA2; (-) strand; PAM type: NRG; PAM sequence: CAG
caactaacgagcaaaataac

SEQ ID NO: 55480 - DNA, 20 bp, Artificial Sequence
  Description of Artificial Sequence: Synthetic oligonucleotide
  Target: LAMA2; (-) strand; PAM type: NRG; PAM sequence: GAG
aagaaactgcatcaactaac

SEQ ID NO: 55481 - DNA, 20 bp, Artificial Sequence
  Description of Artificial Sequence: Synthetic oligonucleotide
  Target: LAMA2; (-) strand; PAM type: NRG; PAM sequence: AAG
taaagaccatcgagactagg

SEQ ID NO: 55482 - DNA, 20 bp, Artificial Sequence
  Description of Artificial Sequence: Synthetic oligonucleotide
  Target: LAMA2; (-) strand; PAM type: NRG; PAM sequence: AGG
atgtaaagaccatcgagact

SEQ ID NO: 55483 - DNA, 20 bp, Artificial Sequence
  Description of Artificial Sequence: Synthetic oligonucleotide
  Target: LAMA2; (-) strand; PAM type: NRG; PAM sequence: TAG
aatgtaaagaccatcgagac

SEQ ID NO: 55484 - DNA, 20 bp, Artificial Sequence
  Description of Artificial Sequence: Synthetic oligonucleotide
  Target: LAMA2; (-) strand; PAM type: NRG; PAM sequence: GAG
gccaaaatgtaaagaccatc

SEQ ID NO: 55485 - DNA, 20 bp, Artificial Sequence
  Description of Artificial Sequence: Synthetic oligonucleotide
  Target: LAMA2; (-) strand; PAM type: NRG; PAM sequence: AAG
caaaatcatgccaaaatgta

SEQ ID NO: 55486 - DNA, 20 bp, Artificial Sequence
  Description of Artificial Sequence: Synthetic oligonucleotide
  Target: LAMA2; (-) strand; PAM type: NRG; PAM sequence: AAG
tggaaaggaacaaccagtac

SEQ ID NO: 55487 - DNA, 20 bp, Artificial Sequence
  Description of Artificial Sequence: Synthetic oligonucleotide
  Target: LAMA2; (-) strand; PAM type: NRG; PAM sequence: CAG
taaacatggaaaggaacaac

SEQ ID NO: 55488 - DNA, 20 bp, Artificial Sequence
  Description of Artificial Sequence: Synthetic oligonucleotide
  Target: LAMA2; (-) strand; PAM type: NRG; PAM sequence: AGG
aggaagcactaaacatggaa

SEQ ID NO: 55489 - DNA, 20 bp, Artificial Sequence
  Description of Artificial Sequence: Synthetic oligonucleotide
  Target: LAMA2; (-) strand; PAM type: NRG; PAM sequence: AAG
aaggaagcactaaacatgga

SEQ ID NO: 55490 - DNA, 20 bp, Artificial Sequence
  Description of Artificial Sequence: Synthetic oligonucleotide
  Target: LAMA2; (-) strand; PAM type: NRG; PAM sequence: TGG
cctgaaggaagcactaaaca

SEQ ID NO: 55491 - DNA, 20 bp, Artificial Sequence
  Description of Artificial Sequence: Synthetic oligonucleotide
  Target: LAMA2; (-) strand; PAM type: NRG; PAM sequence: AAG
cctaaaagagctcctgaagg

SEQ ID NO: 55492 - DNA, 20 bp, Artificial Sequence
  Description of Artificial Sequence: Synthetic oligonucleotide
  Target: LAMA2; (-) strand; PAM type: NRG; PAM sequence: AGG
tgccctaaaagagctcctga

SEQ ID NO: 55493 - DNA, 20 bp, Artificial Sequence
  Description of Artificial Sequence: Synthetic oligonucleotide
  Target: LAMA2; (-) strand; PAM type: NRG; PAM sequence: AAG
ctgccctaaaagagctcctg

SEQ ID NO: 55494 - DNA, 20 bp, Artificial Sequence
  Description of Artificial Sequence: Synthetic oligonucleotide
  Target: LAMA2; (-) strand; PAM type: NRG; PAM sequence: GAG
ccaccaggcctgccctaaaa

SEQ ID NO: 55495 - DNA, 20 bp, Artificial Sequence
  Description of Artificial Sequence: Synthetic oligonucleotide
  Target: LAMA2; (-) strand; PAM type: NRG; PAM sequence: AAG
caccaccaggcctgccctaa

SEQ ID NO: 55496 - DNA, 20 bp, Artificial Sequence
  Description of Artificial Sequence: Synthetic oligonucleotide
  Target: LAMA2; (-) strand; PAM type: NRG; PAM sequence: AGG
tgagagattttgtcaccacc

SEQ ID NO: 55497 - DNA, 20 bp, Artificial Sequence
  Description of Artificial Sequence: Synthetic oligonucleotide
  Target: LAMA2; (-) strand; PAM type: NRG; PAM sequence: CAG
ctgagagattttgtcaccac

SEQ ID NO: 55498 - DNA, 20 bp, Artificial Sequence
  Description of Artificial Sequence: Synthetic oligonucleotide
  Target: LAMA2; (-) strand; PAM type: NRG; PAM sequence: GAG
tacagacaagcaaatgctga

SEQ ID NO: 55499 - DNA, 20 bp, Artificial Sequence
  Description of Artificial Sequence: Synthetic oligonucleotide
  Target: LAMA2; (-) strand; PAM type: NRG; PAM sequence: GAG
tttacagacaagcaaatgct

SEQ ID NO: 55500 - DNA, 20 bp, Artificial Sequence
  Description of Artificial Sequence: Synthetic oligonucleotide
  Target: LAMA2; (-) strand; PAM type: NRG; PAM sequence: AAG
aaataaaatactttacagac

SEQ ID NO: 55501 - DNA, 20 bp, Artificial Sequence
  Description of Artificial Sequence: Synthetic oligonucleotide
  Target: LAMA2; (-) strand; PAM type: NRG; PAM sequence: CAG
aggagaaataaaatacttta

SEQ ID NO: 55502 - DNA, 20 bp, Artificial Sequence
  Description of Artificial Sequence: Synthetic oligonucleotide
  Target: LAMA2; (-) strand; PAM type: NRG; PAM sequence: GAG
actaagcttcataagcgaag

SEQ ID NO: 55503 - DNA, 20 bp, Artificial Sequence
  Description of Artificial Sequence: Synthetic oligonucleotide
  Target: LAMA2; (-) strand; PAM type: NRG; PAM sequence: AGG
aaactaagcttcataagcga

SEQ ID NO: 55504 - DNA, 20 bp, Artificial Sequence
  Description of Artificial Sequence: Synthetic oligonucleotide
  Target: LAMA2; (-) strand; PAM type: NRG; PAM sequence: AAG
caaactaagcttcataagcg

SEQ ID NO: 55505 - DNA, 20 bp, Artificial Sequence
  Description of Artificial Sequence: Synthetic oligonucleotide
  Target: LAMA2; (-) strand; PAM type: NRG; PAM sequence: AAG
ccagccaaactaagcttcat

SEQ ID NO: 55506 - DNA, 20 bp, Artificial Sequence
  Description of Artificial Sequence: Synthetic oligonucleotide
  Target: LAMA2; (-) strand; PAM type: NRG; PAM sequence: AAG
atttcatatccagccaaact

SEQ ID NO: 55507 - DNA, 20 bp, Artificial Sequence
  Description of Artificial Sequence: Synthetic oligonucleotide
  Target: LAMA2; (-) strand; PAM type: NRG; PAM sequence: CAG
tcaacccagaatttcatatc

SEQ ID NO: 55508 - DNA, 20 bp, Artificial Sequence
  Description of Artificial Sequence: Synthetic oligonucleotide
  Target: LAMA2; (-) strand; PAM type: NRG; PAM sequence: CAG
aaagaaaagaattttcaacc

SEQ ID NO: 55509 - DNA, 20 bp, Artificial Sequence
  Description of Artificial Sequence: Synthetic oligonucleotide
  Target: LAMA2; (-) strand; PAM type: NRG; PAM sequence: AAG
tattcaacattcttaaagaa

SEQ ID NO: 55510 - DNA, 20 bp, Artificial Sequence
  Description of Artificial Sequence: Synthetic oligonucleotide
  Target: LAMA2; (-) strand; PAM type: NRG; PAM sequence: AAG
gccaatattcaacattctta

SEQ ID NO: 55511 - DNA, 20 bp, Artificial Sequence
  Description of Artificial Sequence: Synthetic oligonucleotide
  Target: LAMA2; (-) strand; PAM type: NRG; PAM sequence: GGG
tacaagccagaagagagtgg

SEQ ID NO: 55512 - DNA, 20 bp, Artificial Sequence
  Description of Artificial Sequence: Synthetic oligonucleotide
  Target: LAMA2; (-) strand; PAM type: NRG; PAM sequence: GGG
ctacaagccagaagagagtg

SEQ ID NO: 55513 - DNA, 20 bp, Artificial Sequence
  Description of Artificial Sequence: Synthetic oligonucleotide
  Target: LAMA2; (-) strand; PAM type: NRG; PAM sequence: GGG
cctacaagccagaagagagt

SEQ ID NO: 55514 - DNA, 20 bp, Artificial Sequence
  Description of Artificial Sequence: Synthetic oligonucleotide
  Target: LAMA2; (-) strand; PAM type: NRG; PAM sequence: TGG
ccctacaagccagaagagag

SEQ ID NO: 55515 - DNA, 20 bp, Artificial Sequence
  Description of Artificial Sequence: Synthetic oligonucleotide
  Target: LAMA2; (-) strand; PAM type: NRG; PAM sequence: GAG
aaaccctacaagccagaaga

SEQ ID NO: 55516 - DNA, 20 bp, Artificial Sequence
  Description of Artificial Sequence: Synthetic oligonucleotide
  Target: LAMA2; (-) strand; PAM type: NRG; PAM sequence: GAG
agaaaccctacaagccagaa

SEQ ID NO: 55517 - DNA, 20 bp, Artificial Sequence
  Description of Artificial Sequence: Synthetic oligonucleotide
  Target: LAMA2; (-) strand; PAM type: NRG; PAM sequence: AAG
gcagaaaccctacaagccag

SEQ ID NO: 55518 - DNA, 20 bp, Artificial Sequence
  Description of Artificial Sequence: Synthetic oligonucleotide
  Target: LAMA2; (-) strand; PAM type: NRG; PAM sequence: CAG
tcggcagaaaccctacaagc

SEQ ID NO: 55519 - DNA, 20 bp, Artificial Sequence
  Description of Artificial Sequence: Synthetic oligonucleotide
  Target: LAMA2; (-) strand; PAM type: NRG; PAM sequence: AAG
tctctcggcagaaaccctac

SEQ ID NO: 55520 - DNA, 20 bp, Artificial Sequence
  Description of Artificial Sequence: Synthetic oligonucleotide
  Target: LAMA2; (-) strand; PAM type: NRG; PAM sequence: CAG
actaacagcagatctctcgg

SEQ ID NO: 55521 - DNA, 20 bp, Artificial Sequence
  Description of Artificial Sequence: Synthetic oligonucleotide
  Target: LAMA2; (-) strand; PAM type: NRG; PAM sequence: CGG
cagactaacagcagatctct

SEQ ID NO: 55522 - DNA, 20 bp, Artificial Sequence
  Description of Artificial Sequence: Synthetic oligonucleotide
  Target: LAMA2; (-) strand; PAM type: NRG; PAM sequence: CAG
gaagcccatcagactaacag

SEQ ID NO: 55523 - DNA, 20 bp, Artificial Sequence
  Description of Artificial Sequence: Synthetic oligonucleotide
  Target: LAMA2; (-) strand; PAM type: NRG; PAM sequence: CAG
agggaagcccatcagactaa

SEQ ID NO: 55524 - DNA, 20 bp, Artificial Sequence
  Description of Artificial Sequence: Synthetic oligonucleotide
  Target: LAMA2; (-) strand; PAM type: NRG; PAM sequence: CAG
accctggaagggaagcccat

SEQ ID NO: 55525 - DNA, 20 bp, Artificial Sequence
  Description of Artificial Sequence: Synthetic oligonucleotide
  Target: LAMA2; (-) strand; PAM type: NRG; PAM sequence: AAG
cacgggttaccctggaaggg

SEQ ID NO: 55526 - DNA, 20 bp, Artificial Sequence
  Description of Artificial Sequence: Synthetic oligonucleotide
  Target: LAMA2; (-) strand; PAM type: NRG; PAM sequence: GGG
aagcacgggttaccctggaa

SEQ ID NO: 55527 - DNA, 20 bp, Artificial Sequence
  Description of Artificial Sequence: Synthetic oligonucleotide
  Target: LAMA2; (-) strand; PAM type: NRG; PAM sequence: AGG
aaagcacgggttaccctgga

SEQ ID NO: 55528 - DNA, 20 bp, Artificial Sequence
  Description of Artificial Sequence: Synthetic oligonucleotide
  Target: LAMA2; (-) strand; PAM type: NRG; PAM sequence: AAG
gaaagcacgggttaccctgg

SEQ ID NO: 55529 - DNA, 20 bp, Artificial Sequence
  Description of Artificial Sequence: Synthetic oligonucleotide
  Target: LAMA2; (-) strand; PAM type: NRG; PAM sequence: TGG
agagaaagcacgggttaccc

SEQ ID NO: 55530 - DNA, 20 bp, Artificial Sequence
  Description of Artificial Sequence: Synthetic oligonucleotide
  Target: LAMA2; (-) strand; PAM type: NRG; PAM sequence: GGG
ggcagccagagagaaagcac

SEQ ID NO: 55531 - DNA, 20 bp, Artificial Sequence
  Description of Artificial Sequence: Synthetic oligonucleotide
  Target: LAMA2; (-) strand; PAM type: NRG; PAM sequence: CGG
gggcagccagagagaaagca

SEQ ID NO: 55532 - DNA, 20 bp, Artificial Sequence
  Description of Artificial Sequence: Synthetic oligonucleotide
  Target: LAMA2; (-) strand; PAM type: NRG; PAM sequence: AAG
gttaagggcagccagagaga

SEQ ID NO: 55533 - DNA, 20 bp, Artificial Sequence
  Description of Artificial Sequence: Synthetic oligonucleotide
  Target: LAMA2; (-) strand; PAM type: NRG; PAM sequence: GAG
aaatgttaagggcagccaga

SEQ ID NO: 55534 - DNA, 20 bp, Artificial Sequence
  Description of Artificial Sequence: Synthetic oligonucleotide
  Target: LAMA2; (-) strand; PAM type: NRG; PAM sequence: GAG
aaaaatgttaagggcagcca

SEQ ID NO: 55535 - DNA, 20 bp, Artificial Sequence
  Description of Artificial Sequence: Synthetic oligonucleotide
  Target: LAMA2; (-) strand; PAM type: NRG; PAM sequence: CAG
gaaaaaatgttaagggcagc

SEQ ID NO: 55536 - DNA, 20 bp, Artificial Sequence
  Description of Artificial Sequence: Synthetic oligonucleotide
  Target: LAMA2; (-) strand; PAM type: NRG; PAM sequence: CAG
gaaggaaaaaatgttaaggg

SEQ ID NO: 55537 - DNA, 20 bp, Artificial Sequence
  Description of Artificial Sequence: Synthetic oligonucleotide
  Target: LAMA2; (-) strand; PAM type: NRG; PAM sequence: GGG
aatgaaggaaaaaatgttaa

SEQ ID NO: 55538 - DNA, 20 bp, Artificial Sequence
  Description of Artificial Sequence: Synthetic oligonucleotide
  Target: LAMA2; (-) strand; PAM type: NRG; PAM sequence: AGG
aaatgaaggaaaaaatgtta

SEQ ID NO: 55539 - DNA, 20 bp, Artificial Sequence
  Description of Artificial Sequence: Synthetic oligonucleotide
  Target: LAMA2; (-) strand; PAM type: NRG; PAM sequence: AAG
gaaatgaaggaaaaaatgtt

SEQ ID NO: 55540 - DNA, 20 bp, Artificial Sequence
  Description of Artificial Sequence: Synthetic oligonucleotide
  Target: LAMA2; (-) strand; PAM type: NRG; PAM sequence: AGG
attcaccaaagttgaaatga

SEQ ID NO: 55541 - DNA, 20 bp, Artificial Sequence
  Description of Artificial Sequence: Synthetic oligonucleotide
  Target: LAMA2; (-) strand; PAM type: NRG; PAM sequence: AAG
gattcaccaaagttgaaatg

SEQ ID NO: 55542 - DNA, 20 bp, Artificial Sequence
  Description of Artificial Sequence: Synthetic oligonucleotide
  Target: LAMA2; (-) strand; PAM type: NRG; PAM sequence: AAG
cataattgtcagattcacca

SEQ ID NO: 55543 - DNA, 20 bp, Artificial Sequence
  Description of Artificial Sequence: Synthetic oligonucleotide
  Target: LAMA2; (-) strand; PAM type: NRG; PAM sequence: CAG
actccaagacacataattgt

SEQ ID NO: 55544 - DNA, 20 bp, Artificial Sequence
  Description of Artificial Sequence: Synthetic oligonucleotide
  Target: LAMA2; (-) strand; PAM type: NRG; PAM sequence: AAG
ttctcgagaaaagcaactcc

SEQ ID NO: 55545 - DNA, 20 bp, Artificial Sequence
  Description of Artificial Sequence: Synthetic oligonucleotide
  Target: LAMA2; (-) strand; PAM type: NRG; PAM sequence: AAG
acaaagatacttctcgagaa

SEQ ID NO: 55546 - DNA, 20 bp, Artificial Sequence
  Description of Artificial Sequence: Synthetic oligonucleotide
  Target: LAMA2; (-) strand; PAM type: NRG; PAM sequence: GAG
aggccacaaagatacttctc

SEQ ID NO: 55547 - DNA, 20 bp, Artificial Sequence
  Description of Artificial Sequence: Synthetic oligonucleotide
  Target: LAMA2; (-) strand; PAM type: NRG; PAM sequence: AAG
gaaatacagagaaggccaca

SEQ ID NO: 55548 - DNA, 20 bp, Artificial Sequence
  Description of Artificial Sequence: Synthetic oligonucleotide
  Target: LAMA2; (-) strand; PAM type: NRG; PAM sequence: AGG
agattcaggaaatacagaga

SEQ ID NO: 55549 - DNA, 20 bp, Artificial Sequence
  Description of Artificial Sequence: Synthetic oligonucleotide
  Target: LAMA2; (-) strand; PAM type: NRG; PAM sequence: AAG
cagattcaggaaatacagag

SEQ ID NO: 55550 - DNA, 20 bp, Artificial Sequence
  Description of Artificial Sequence: Synthetic oligonucleotide
  Target: LAMA2; (-) strand; PAM type: NRG; PAM sequence: GAG
gttcagattcaggaaataca

SEQ ID NO: 55551 - DNA, 20 bp, Artificial Sequence
  Description of Artificial Sequence: Synthetic oligonucleotide
  Target: LAMA2; (-) strand; PAM type: NRG; PAM sequence: CAG
acgttcagattcaggaaata

SEQ ID NO: 55552 - DNA, 20 bp, Artificial Sequence
  Description of Artificial Sequence: Synthetic oligonucleotide
  Target: LAMA2; (-) strand; PAM type: NRG; PAM sequence: AGG
gcaggccaacgttcagattc

SEQ ID NO: 55553 - DNA, 20 bp, Artificial Sequence
  Description of Artificial Sequence: Synthetic oligonucleotide
  Target: LAMA2; (-) strand; PAM type: NRG; PAM sequence: CAG
ggcaggccaacgttcagatt

SEQ ID NO: 55554 - DNA, 20 bp, Artificial Sequence
  Description of Artificial Sequence: Synthetic oligonucleotide
  Target: LAMA2; (-) strand; PAM type: NRG; PAM sequence: CAG
tagcaaggcaggccaacgtt

SEQ ID NO: 55555 - DNA, 20 bp, Artificial Sequence
  Description of Artificial Sequence: Synthetic oligonucleotide
  Target: LAMA2; (-) strand; PAM type: NRG; PAM sequence: AGG
cttccccaatctagcaaggc

SEQ ID NO: 55556 - DNA, 20 bp, Artificial Sequence
  Description of Artificial Sequence: Synthetic oligonucleotide
  Target: LAMA2; (-) strand; PAM type: NRG; PAM sequence: CAG
acttccccaatctagcaagg

SEQ ID NO: 55557 - DNA, 20 bp, Artificial Sequence
  Description of Artificial Sequence: Synthetic oligonucleotide
  Target: LAMA2; (-) strand; PAM type: NRG; PAM sequence: AGG
agaacttccccaatctagca

SEQ ID NO: 55558 - DNA, 20 bp, Artificial Sequence
  Description of Artificial Sequence: Synthetic oligonucleotide
  Target: LAMA2; (-) strand; PAM type: NRG; PAM sequence: AAG
gagaacttccccaatctagc

SEQ ID NO: 55559 - DNA, 20 bp, Artificial Sequence
  Description of Artificial Sequence: Synthetic oligonucleotide
  Target: LAMA2; (-) strand; PAM type: NRG; PAM sequence: TAG
ccaggagaacttccccaatc

SEQ ID NO: 55560 - DNA, 20 bp, Artificial Sequence
  Description of Artificial Sequence: Synthetic oligonucleotide
  Target: LAMA2; (-) strand; PAM type: NRG; PAM sequence: GAG
ctctgcaggatattatccag

SEQ ID NO: 55561 - DNA, 20 bp, Artificial Sequence
  Description of Artificial Sequence: Synthetic oligonucleotide
  Target: LAMA2; (-) strand; PAM type: NRG; PAM sequence: AGG
cactctgcaggatattatcc

SEQ ID NO: 55562 - DNA, 20 bp, Artificial Sequence
  Description of Artificial Sequence: Synthetic oligonucleotide
  Target: LAMA2; (-) strand; PAM type: NRG; PAM sequence: CAG
acactctgcaggatattatc

SEQ ID NO: 55563 - DNA, 20 bp, Artificial Sequence
  Description of Artificial Sequence: Synthetic oligonucleotide
  Target: LAMA2; (-) strand; PAM type: NRG; PAM sequence: AGG
caagttggaaaacactctgc

SEQ ID NO: 55564 - DNA, 20 bp, Artificial Sequence
  Description of Artificial Sequence: Synthetic oligonucleotide
  Target: LAMA2; (-) strand; PAM type: NRG; PAM sequence: CAG
ccaagttggaaaacactctg

SEQ ID NO: 55565 - DNA, 20 bp, Artificial Sequence
  Description of Artificial Sequence: Synthetic oligonucleotide
  Target: LAMA2; (-) strand; PAM type: NRG; PAM sequence: TGG
cggggagaatgaaaccaagt

SEQ ID NO: 55566 - DNA, 20 bp, Artificial Sequence
  Description of Artificial Sequence: Synthetic oligonucleotide
  Target: LAMA2; (-) strand; PAM type: NRG; PAM sequence: AAG
gtgacggggagaatgaaacc

SEQ ID NO: 55567 - DNA, 20 bp, Artificial Sequence
  Description of Artificial Sequence: Synthetic oligonucleotide
  Target: LAMA2; (-) strand; PAM type: NRG; PAM sequence: GAG
gtgtacctgaaagtgacggg

SEQ ID NO: 55568 - DNA, 20 bp, Artificial Sequence
  Description of Artificial Sequence: Synthetic oligonucleotide
  Target: LAMA2; (-) strand; PAM type: NRG; PAM sequence: GGG
tggtgtacctgaaagtgacg

SEQ ID NO: 55569 - DNA, 20 bp, Artificial Sequence
  Description of Artificial Sequence: Synthetic oligonucleotide
  Target: LAMA2; (-) strand; PAM type: NRG; PAM sequence: GGG
ttggtgtacctgaaagtgac

SEQ ID NO: 55570 - DNA, 20 bp, Artificial Sequence
  Description of Artificial Sequence: Synthetic oligonucleotide
  Target: LAMA2; (-) strand; PAM type: NRG; PAM sequence: CGG
attggtgtacctgaaagtga

SEQ ID NO: 55571 - DNA, 20 bp, Artificial Sequence
  Description of Artificial Sequence: Synthetic oligonucleotide
  Target: LAMA2; (-) strand; PAM type: NRG; PAM sequence: AAG
cgtctgattggtgtacctga

SEQ ID NO: 55572 - DNA, 20 bp, Artificial Sequence
  Description of Artificial Sequence: Synthetic oligonucleotide
  Target: LAMA2; (-) strand; PAM type: NRG; PAM sequence: TGG
agaccaaatccacgtctgat

SEQ ID NO: 55573 - DNA, 20 bp, Artificial Sequence
  Description of Artificial Sequence: Synthetic oligonucleotide
  Target: LAMA2; (-) strand; PAM type: NRG; PAM sequence: AAG
gaaatatgggactatgtgaa

SEQ ID NO: 55574 - DNA, 20 bp, Artificial Sequence
  Description of Artificial Sequence: Synthetic oligonucleotide
  Target: LAMA2; (-) strand; PAM type: NRG; PAM sequence: GGG
gcaaagcctccaagaaatat

SEQ ID NO: 55575 - DNA, 20 bp, Artificial Sequence
  Description of Artificial Sequence: Synthetic oligonucleotide
  Target: LAMA2; (-) strand; PAM type: NRG; PAM sequence: TGG
agcaaagcctccaagaaata

SEQ ID NO: 55576 - DNA, 20 bp, Artificial Sequence
  Description of Artificial Sequence: Synthetic oligonucleotide
  Target: LAMA2; (-) strand; PAM type: NRG; PAM sequence: AAG
aagaaatgagcaaagcctcc

SEQ ID NO: 55577 - DNA, 20 bp, Artificial Sequence
  Description of Artificial Sequence: Synthetic oligonucleotide
  Target: LAMA2; (-) strand; PAM type: NRG; PAM sequence: AAG
agaataaaaagaaatgagca

SEQ ID NO: 55578 - DNA, 20 bp, Artificial Sequence
  Description of Artificial Sequence: Synthetic oligonucleotide
  Target: LAMA2; (-) strand; PAM type: NRG; PAM sequence: GAG
aaaaaagaataaaaagaaat

SEQ ID NO: 55579 - DNA, 20 bp, Artificial Sequence
  Description of Artificial Sequence: Synthetic oligonucleotide
  Target: LAMA2; (-) strand; PAM type: NRG; PAM sequence: AAG
tttagagaaaaaagaataaa

SEQ ID NO: 55580 - DNA, 20 bp, Artificial Sequence
  Description of Artificial Sequence: Synthetic oligonucleotide
  Target: LAMA2; (-) strand; PAM type: NRG; PAM sequence: AAG
gaagggaagtttagagaaaa

SEQ ID NO: 55581 - DNA, 20 bp, Artificial Sequence
  Description of Artificial Sequence: Synthetic oligonucleotide
  Target: LAMA2; (-) strand; PAM type: NRG; PAM sequence: GAG
gaagcaagaagggaagttta

SEQ ID NO: 55582 - DNA, 20 bp, Artificial Sequence
  Description of Artificial Sequence: Synthetic oligonucleotide
  Target: LAMA2; (-) strand; PAM type: NRG; PAM sequence: TAG
atgaagcaagaagggaagtt

SEQ ID NO: 55583 - DNA, 20 bp, Artificial Sequence
  Description of Artificial Sequence: Synthetic oligonucleotide
  Target: LAMA2; (-) strand; PAM type: NRG; PAM sequence: AAG
atgaaatgaagcaagaaggg

SEQ ID NO: 55584 - DNA, 20 bp, Artificial Sequence
  Description of Artificial Sequence: Synthetic oligonucleotide
  Target: LAMA2; (-) strand; PAM type: NRG; PAM sequence: GGG
tgaatgaaatgaagcaagaa

SEQ ID NO: 55585 - DNA, 20 bp, Artificial Sequence
  Description of Artificial Sequence: Synthetic oligonucleotide
  Target: LAMA2; (-) strand; PAM type: NRG; PAM sequence: AGG
atgaatgaaatgaagcaaga

SEQ ID NO: 55586 - DNA, 20 bp, Artificial Sequence
  Description of Artificial Sequence: Synthetic oligonucleotide
  Target: LAMA2; (-) strand; PAM type: NRG; PAM sequence: AAG
aatgaatgaaatgaagcaag

SEQ ID NO: 55587 - DNA, 20 bp, Artificial Sequence
  Description of Artificial Sequence: Synthetic oligonucleotide
  Target: LAMA2; (-) strand; PAM type: NRG; PAM sequence: AAG
cgaaatgaatgaaatgaagc

SEQ ID NO: 55588 - DNA, 20 bp, Artificial Sequence
  Description of Artificial Sequence: Synthetic oligonucleotide
  Target: LAMA2; (-) strand; PAM type: NRG; PAM sequence: AAG
aagacgaaatgaatgaaatg

SEQ ID NO: 55589 - DNA, 20 bp, Artificial Sequence
  Description of Artificial Sequence: Synthetic oligonucleotide
  Target: LAMA2; (-) strand; PAM type: NRG; PAM sequence: AAG
agaaagggtatcagcaatgg

SEQ ID NO: 55590 - DNA, 20 bp, Artificial Sequence
  Description of Artificial Sequence: Synthetic oligonucleotide
  Target: LAMA2; (-) strand; PAM type: NRG; PAM sequence: TGG
ggaagaaagggtatcagcaa

SEQ ID NO: 55591 - DNA, 20 bp, Artificial Sequence
  Description of Artificial Sequence: Synthetic oligonucleotide
  Target: LAMA2; (-) strand; PAM type: NRG; PAM sequence: CAG
tcaactggaagaaagggtat

SEQ ID NO: 55592 - DNA, 20 bp, Artificial Sequence
  Description of Artificial Sequence: Synthetic oligonucleotide
  Target: LAMA2; (-) strand; PAM type: NRG; PAM sequence: GGG
atgcgatcaactggaagaaa

SEQ ID NO: 55593 - DNA, 20 bp, Artificial Sequence
  Description of Artificial Sequence: Synthetic oligonucleotide
  Target: LAMA2; (-) strand; PAM type: NRG; PAM sequence: AGG
gatgcgatcaactggaagaa

SEQ ID NO: 55594 - DNA, 20 bp, Artificial Sequence
  Description of Artificial Sequence: Synthetic oligonucleotide
  Target: LAMA2; (-) strand; PAM type: NRG; PAM sequence: AAG
cgatgcgatcaactggaaga

SEQ ID NO: 55595 - DNA, 20 bp, Artificial Sequence
  Description of Artificial Sequence: Synthetic oligonucleotide
  Target: LAMA2; (-) strand; PAM type: NRG; PAM sequence: AAG
gagccgatgcgatcaactgg

SEQ ID NO: 55596 - DNA, 20 bp, Artificial Sequence
  Description of Artificial Sequence: Synthetic oligonucleotide
  Target: LAMA2; (-) strand; PAM type: NRG; PAM sequence: TGG
caggagccgatgcgatcaac

SEQ ID NO: 55597 - DNA, 20 bp, Artificial Sequence
  Description of Artificial Sequence: Synthetic oligonucleotide
  Target: LAMA2; (-) strand; PAM type: NRG; PAM sequence: GAG
gaagaatgcagaagcctcag

SEQ ID NO: 55598 - DNA, 20 bp, Artificial Sequence
  Description of Artificial Sequence: Synthetic oligonucleotide
  Target: LAMA2; (-) strand; PAM type: NRG; PAM sequence: AGG
gtgaagaatgcagaagcctc

SEQ ID NO: 55599 - DNA, 20 bp, Artificial Sequence
  Description of Artificial Sequence: Synthetic oligonucleotide
  Target: LAMA2; (-) strand; PAM type: NRG; PAM sequence: CAG
cgtgaagaatgcagaagcct

SEQ ID NO: 55600 - DNA, 20 bp, Artificial Sequence
  Description of Artificial Sequence: Synthetic oligonucleotide
  Target: LAMA2; (-) strand; PAM type: NRG; PAM sequence: AAG
gaactacgtgaagaatgcag

SEQ ID NO: 55601 - DNA, 20 bp, Artificial Sequence
  Description of Artificial Sequence: Synthetic oligonucleotide
  Target: LAMA2; (-) strand; PAM type: NRG; PAM sequence: CAG
cgagaactacgtgaagaatg

SEQ ID NO: 55602 - DNA, 20 bp, Artificial Sequence
  Description of Artificial Sequence: Synthetic oligonucleotide
  Target: LAMA2; (-) strand; PAM type: NRG; PAM sequence: AAG
caaggctcgagaactacgtg

SEQ ID NO: 55603 - DNA, 20 bp, Artificial Sequence
  Description of Artificial Sequence: Synthetic oligonucleotide
  Target: LAMA2; (-) strand; PAM type: NRG; PAM sequence: GAG
ggagctgaaaaccaaggctc

SEQ ID NO: 55604 - DNA, 20 bp, Artificial Sequence
  Description of Artificial Sequence: Synthetic oligonucleotide
  Target: LAMA2; (-) strand; PAM type: NRG; PAM sequence: AGG
gctgatggagctgaaaacca

SEQ ID NO: 55605 - DNA, 20 bp, Artificial Sequence
  Description of Artificial Sequence: Synthetic oligonucleotide
  Target: LAMA2; (-) strand; PAM type: NRG; PAM sequence: AAG
agctgatggagctgaaaacc

SEQ ID NO: 55606 - DNA, 20 bp, Artificial Sequence
  Description of Artificial Sequence: Synthetic oligonucleotide
  Target: LAMA2; (-) strand; PAM type: NRG; PAM sequence: GAG
aatgcttaaaggagctgatg

SEQ ID NO: 55607 - DNA, 20 bp, Artificial Sequence
  Description of Artificial Sequence: Synthetic oligonucleotide
  Target: LAMA2; (-) strand; PAM type: NRG; PAM sequence: TGG
gaaatgcttaaaggagctga

SEQ ID NO: 55608 - DNA, 20 bp, Artificial Sequence
  Description of Artificial Sequence: Synthetic oligonucleotide
  Target: LAMA2; (-) strand; PAM type: NRG; PAM sequence: GAG
atacagagaaatgcttaaag

SEQ ID NO: 55609 - DNA, 20 bp, Artificial Sequence
  Description of Artificial Sequence: Synthetic oligonucleotide
  Target: LAMA2; (-) strand; PAM type: NRG; PAM sequence: AGG
caatacagagaaatgcttaa

SEQ ID NO: 55610 - DNA, 20 bp, Artificial Sequence
  Description of Artificial Sequence: Synthetic oligonucleotide
  Target: LAMA2; (-) strand; PAM type: NRG; PAM sequence: AAG
ccaatacagagaaatgctta

SEQ ID NO: 55611 - DNA, 20 bp, Artificial Sequence
  Description of Artificial Sequence: Synthetic oligonucleotide
  Target: LAMA2; (-) strand; PAM type: NRG; PAM sequence: GAG
taactagaataaccaataca

SEQ ID NO: 55612 - DNA, 20 bp, Artificial Sequence
  Description of Artificial Sequence: Synthetic oligonucleotide
  Target: LAMA2; (-) strand; PAM type: NRG; PAM sequence: CAG
tataactagaataaccaata

SEQ ID NO: 55613 - DNA, 20 bp, Artificial Sequence
  Description of Artificial Sequence: Synthetic oligonucleotide
  Target: LAMA2; (-) strand; PAM type: NRG; PAM sequence: TAG
aatttagaagaatgtataac

SEQ ID NO: 55614 - DNA, 20 bp, Artificial Sequence
  Description of Artificial Sequence: Synthetic oligonucleotide
  Target: LAMA2; (-) strand; PAM type: NRG; PAM sequence: AAG
aaactttgaaaaaaatttag

SEQ ID NO: 55615 - DNA, 20 bp, Artificial Sequence
  Description of Artificial Sequence: Synthetic oligonucleotide
  Target: LAMA2; (-) strand; PAM type: NRG; PAM sequence: TAG
tgaaaactttgaaaaaaatt

SEQ ID NO: 55616 - DNA, 20 bp, Artificial Sequence
  Description of Artificial Sequence: Synthetic oligonucleotide
  Target: LAMA2; (-) strand; PAM type: NRG; PAM sequence: AAG
cattcaaaccaaaggcaaag

SEQ ID NO: 55617 - DNA, 20 bp, Artificial Sequence
  Description of Artificial Sequence: Synthetic oligonucleotide
  Target: LAMA2; (-) strand; PAM type: NRG; PAM sequence: AAG
ggacattcaaaccaaaggca

SEQ ID NO: 55618 - DNA, 20 bp, Artificial Sequence
  Description of Artificial Sequence: Synthetic oligonucleotide
  Target: LAMA2; (-) strand; PAM type: NRG; PAM sequence: AGG
cgggaggacattcaaaccaa

SEQ ID NO: 55619 - DNA, 20 bp, Artificial Sequence
  Description of Artificial Sequence: Synthetic oligonucleotide
  Target: LAMA2; (-) strand; PAM type: NRG; PAM sequence: AAG
acgggaggacattcaaacca

SEQ ID NO: 55620 - DNA, 20 bp, Artificial Sequence
  Description of Artificial Sequence: Synthetic oligonucleotide
  Target: LAMA2; (-) strand; PAM type: NRG; PAM sequence: AGG
aaattactctgagctacggg

SEQ ID NO: 55621 - DNA, 20 bp, Artificial Sequence
  Description of Artificial Sequence: Synthetic oligonucleotide
  Target: LAMA2; (-) strand; PAM type: NRG; PAM sequence: GAG
caaattactctgagctacgg

SEQ ID NO: 55622 - DNA, 20 bp, Artificial Sequence
  Description of Artificial Sequence: Synthetic oligonucleotide
  Target: LAMA2; (-) strand; PAM type: NRG; PAM sequence: GGG
atcaaattactctgagctac

SEQ ID NO: 55623 - DNA, 20 bp, Artificial Sequence
  Description of Artificial Sequence: Synthetic oligonucleotide
  Target: LAMA2; (-) strand; PAM type: NRG; PAM sequence: CGG
gatcaaattactctgagcta

SEQ ID NO: 55624 - DNA, 20 bp, Artificial Sequence
  Description of Artificial Sequence: Synthetic oligonucleotide
  Target: LAMA2; (-) strand; PAM type: NRG; PAM sequence: GAG
tcagatgatcaaattactct

SEQ ID NO: 55625 - DNA, 20 bp, Artificial Sequence
  Description of Artificial Sequence: Synthetic oligonucleotide
  Target: LAMA2; (-) strand; PAM type: NRG; PAM sequence: CAG
gagctgagagaagaaggctt

SEQ ID NO: 55626 - DNA, 20 bp, Artificial Sequence
  Description of Artificial Sequence: Synthetic oligonucleotide
  Target: LAMA2; (-) strand; PAM type: NRG; PAM sequence: AGG
tttgacgagctgagagaaga

SEQ ID NO: 55627 - DNA, 20 bp, Artificial Sequence
  Description of Artificial Sequence: Synthetic oligonucleotide
  Target: LAMA2; (-) strand; PAM type: NRG; PAM sequence: AAG
ctttgacgagctgagagaag

SEQ ID NO: 55628 - DNA, 20 bp, Artificial Sequence
  Description of Artificial Sequence: Synthetic oligonucleotide
  Target: LAMA2; (-) strand; PAM type: NRG; PAM sequence: AAG
cgactttgacgagctgagag

SEQ ID NO: 55629 - DNA, 20 bp, Artificial Sequence
  Description of Artificial Sequence: Synthetic oligonucleotide
  Target: LAMA2; (-) strand; PAM type: NRG; PAM sequence: GAG
gaacgactttgacgagctga

SEQ ID NO: 55630 - DNA, 20 bp, Artificial Sequence
  Description of Artificial Sequence: Synthetic oligonucleotide
  Target: LAMA2; (-) strand; PAM type: NRG; PAM sequence: GAG
gagaacgactttgacgagct

SEQ ID NO: 55631 - DNA, 20 bp, Artificial Sequence
  Description of Artificial Sequence: Synthetic oligonucleotide
  Target: LAMA2; (-) strand; PAM type: NRG; PAM sequence: GAG
agacggagaacgactttgac

SEQ ID NO: 55632 - DNA, 20 bp, Artificial Sequence
  Description of Artificial Sequence: Synthetic oligonucleotide
  Target: LAMA2; (-) strand; PAM type: NRG; PAM sequence: GAG
caacagaacgaagctagacg

SEQ ID NO: 55633 - DNA, 20 bp, Artificial Sequence
  Description of Artificial Sequence: Synthetic oligonucleotide
  Target: LAMA2; (-) strand; PAM type: NRG; PAM sequence: CGG
aacaacagaacgaagctaga

SEQ ID NO: 55634 - DNA, 20 bp, Artificial Sequence
  Description of Artificial Sequence: Synthetic oligonucleotide
  Target: LAMA2; (-) strand; PAM type: NRG; PAM sequence: TAG
caccaacaacagaacgaagc

SEQ ID NO: 55635 - DNA, 20 bp, Artificial Sequence
  Description of Artificial Sequence: Synthetic oligonucleotide
  Target: LAMA2; (-) strand; PAM type: NRG; PAM sequence: AAG
tcctcaccaacaacagaacg

SEQ ID NO: 55636 - DNA, 20 bp, Artificial Sequence
  Description of Artificial Sequence: Synthetic oligonucleotide
  Target: LAMA2; (-) strand; PAM type: NRG; PAM sequence: CAG
acgcagttcctcaccaacaa

SEQ ID NO: 55637 - DNA, 20 bp, Artificial Sequence
  Description of Artificial Sequence: Synthetic oligonucleotide
  Target: LAMA2; (-) strand; PAM type: NRG; PAM sequence: CAG
tctcctcctccaaaggaacg

SEQ ID NO: 55638 - DNA, 20 bp, Artificial Sequence
  Description of Artificial Sequence: Synthetic oligonucleotide
  Target: LAMA2; (-) strand; PAM type: NRG; PAM sequence: AGG
gagcgcctctcctcctccaa

SEQ ID NO: 55639 - DNA, 20 bp, Artificial Sequence
  Description of Artificial Sequence: Synthetic oligonucleotide
  Target: LAMA2; (-) strand; PAM type: NRG; PAM sequence: AAG
agagcgcctctcctcctcca

SEQ ID NO: 55640 - DNA, 20 bp, Artificial Sequence
  Description of Artificial Sequence: Synthetic oligonucleotide
  Target: LAMA2; (-) strand; PAM type: NRG; PAM sequence: GAG
actggaaactctaaaaagca

SEQ ID NO: 55641 - DNA, 20 bp, Artificial Sequence
  Description of Artificial Sequence: Synthetic oligonucleotide
  Target: LAMA2; (-) strand; PAM type: NRG; PAM sequence: CAG
aaactggaaactctaaaaag

SEQ ID NO: 55642 - DNA, 20 bp, Artificial Sequence
  Description of Artificial Sequence: Synthetic oligonucleotide
  Target: LAMA2; (-) strand; PAM type: NRG; PAM sequence: AAG
gaaaaactggaaactctaaa

SEQ ID NO: 55643 - DNA, 20 bp, Artificial Sequence
  Description of Artificial Sequence: Synthetic oligonucleotide
  Target: LAMA2; (-) strand; PAM type: NRG; PAM sequence: TGG
aaaaaacagaacagaaaaac

SEQ ID NO: 55644 - DNA, 20 bp, Artificial Sequence
  Description of Artificial Sequence: Synthetic oligonucleotide
  Target: LAMA2; (-) strand; PAM type: NRG; PAM sequence: CAG
aagatggggaaaaaacagaa

SEQ ID NO: 55645 - DNA, 20 bp, Artificial Sequence
  Description of Artificial Sequence: Synthetic oligonucleotide
  Target: LAMA2; (-) strand; PAM type: NRG; PAM sequence: CAG
ccacaaagatggggaaaaaa

SEQ ID NO: 55646 - DNA, 20 bp, Artificial Sequence
  Description of Artificial Sequence: Synthetic oligonucleotide
  Target: LAMA2; (-) strand; PAM type: NRG; PAM sequence: GGG
tagataaaaccacaaagatg

SEQ ID NO: 55647 - DNA, 20 bp, Artificial Sequence
  Description of Artificial Sequence: Synthetic oligonucleotide
  Target: LAMA2; (-) strand; PAM type: NRG; PAM sequence: GGG
gtagataaaaccacaaagat

SEQ ID NO: 55648 - DNA, 20 bp, Artificial Sequence
  Description of Artificial Sequence: Synthetic oligonucleotide
  Target: LAMA2; (-) strand; PAM type: NRG; PAM sequence: TGG
agtagataaaaccacaaaga

SEQ ID NO: 55649 - DNA, 20 bp, Artificial Sequence
  Description of Artificial Sequence: Synthetic oligonucleotide
  Target: LAMA2; (-) strand; PAM type: NRG; PAM sequence: AAG
caaaagtagataaaaccaca

SEQ ID NO: 55650 - DNA, 20 bp, Artificial Sequence
  Description of Artificial Sequence: Synthetic oligonucleotide
  Target: LAMA2; (-) strand; PAM type: NRG; PAM sequence: TAG
ccatcatcaaagaccaaaag

SEQ ID NO: 55651 - DNA, 20 bp, Artificial Sequence
  Description of Artificial Sequence: Synthetic oligonucleotide
  Target: LAMA2; (-) strand; PAM type: NRG; PAM sequence: AAG
tcaccatcatcaaagaccaa

SEQ ID NO: 55652 - DNA, 20 bp, Artificial Sequence
  Description of Artificial Sequence: Synthetic oligonucleotide
  Target: LAMA2; (-) strand; PAM type: NRG; PAM sequence: AAG
tctgtacatcaccatcatca

SEQ ID NO: 55653 - DNA, 20 bp, Artificial Sequence
  Description of Artificial Sequence: Synthetic oligonucleotide
  Target: LAMA2; (-) strand; PAM type: NRG; PAM sequence: AAG
acagaaaggacatccacacc

SEQ ID NO: 55654 - DNA, 20 bp, Artificial Sequence
  Description of Artificial Sequence: Synthetic oligonucleotide
  Target: LAMA2; (-) strand; PAM type: NRG; PAM sequence: AGG
aggaaaactaataaacagaa

SEQ ID NO: 55655 - DNA, 20 bp, Artificial Sequence
  Description of Artificial Sequence: Synthetic oligonucleotide
  Target: LAMA2; (-) strand; PAM type: NRG; PAM sequence: AAG
aaggaaaactaataaacaga

SEQ ID NO: 55656 - DNA, 20 bp, Artificial Sequence
  Description of Artificial Sequence: Synthetic oligonucleotide
  Target: LAMA2; (-) strand; PAM type: NRG; PAM sequence: CAG
ttagaaggaaaactaataaa

SEQ ID NO: 55657 - DNA, 20 bp, Artificial Sequence
  Description of Artificial Sequence: Synthetic oligonucleotide
  Target: LAMA2; (-) strand; PAM type: NRG; PAM sequence: AGG
tgagggtcctgtctgttaga

SEQ ID NO: 55658 - DNA, 20 bp, Artificial Sequence
  Description of Artificial Sequence: Synthetic oligonucleotide
  Target: LAMA2; (-) strand; PAM type: NRG; PAM sequence: AAG
ttgagggtcctgtctgttag

SEQ ID NO: 55659 - DNA, 20 bp, Artificial Sequence
  Description of Artificial Sequence: Synthetic oligonucleotide
  Target: LAMA2; (-) strand; PAM type: NRG; PAM sequence: TAG
cagttgagggtcctgtctgt

SEQ ID NO: 55660 - DNA, 20 bp, Artificial Sequence
  Description of Artificial Sequence: Synthetic oligonucleotide
  Target: LAMA2; (-) strand; PAM type: NRG; PAM sequence: GGG
tccaacagacctgcagttga

SEQ ID NO: 55661 - DNA, 20 bp, Artificial Sequence
  Description of Artificial Sequence: Synthetic oligonucleotide
  Target: LAMA2; (-) strand; PAM type: NRG; PAM sequence: AGG
ctccaacagacctgcagttg

SEQ ID NO: 55662 - DNA, 20 bp, Artificial Sequence
  Description of Artificial Sequence: Synthetic oligonucleotide
  Target: LAMA2; (-) strand; PAM type: NRG; PAM sequence: GAG
actccaacagacctgcagtt

SEQ ID NO: 55663 - DNA, 20 bp, Artificial Sequence
  Description of Artificial Sequence: Synthetic oligonucleotide
  Target: LAMA2; (-) strand; PAM type: NRG; PAM sequence: CAG
agggtactccaacagacctg

SEQ ID NO: 55664 - DNA, 20 bp, Artificial Sequence
  Description of Artificial Sequence: Synthetic oligonucleotide
  Target: LAMA2; (-) strand; PAM type: NRG; PAM sequence: CAG
cacatggcagggtactccaa

SEQ ID NO: 55665 - DNA, 20 bp, Artificial Sequence
  Description of Artificial Sequence: Synthetic oligonucleotide
  Target: LAMA2; (-) strand; PAM type: NRG; PAM sequence: GGG
cactgacacctcacatggca

SEQ ID NO: 55666 - DNA, 20 bp, Artificial Sequence
  Description of Artificial Sequence: Synthetic oligonucleotide
  Target: LAMA2; (-) strand; PAM type: NRG; PAM sequence: AGG
acactgacacctcacatggc

SEQ ID NO: 55667 - DNA, 20 bp, Artificial Sequence
  Description of Artificial Sequence: Synthetic oligonucleotide
  Target: LAMA2; (-) strand; PAM type: NRG; PAM sequence: CAG
cacactgacacctcacatgg

SEQ ID NO: 55668 - DNA, 20 bp, Artificial Sequence
  Description of Artificial Sequence: Synthetic oligonucleotide
  Target: LAMA2; (-) strand; PAM type: NRG; PAM sequence: TGG
gggcacactgacacctcaca

SEQ ID NO: 55669 - DNA, 20 bp, Artificial Sequence
  Description of Artificial Sequence: Synthetic oligonucleotide
  Target: LAMA2; (-) strand; PAM type: NRG; PAM sequence: GGG
tgggaggcaccccccagcag

SEQ ID NO: 55670 - DNA, 20 bp, Artificial Sequence
  Description of Artificial Sequence: Synthetic oligonucleotide
  Target: LAMA2; (-) strand; PAM type: NRG; PAM sequence: GGG
ctgggaggcaccccccagca

SEQ ID NO: 55671 - DNA, 20 bp, Artificial Sequence
  Description of Artificial Sequence: Synthetic oligonucleotide
  Target: LAMA2; (-) strand; PAM type: NRG; PAM sequence: AGG
actgggaggcaccccccagc

SEQ ID NO: 55672 - DNA, 20 bp, Artificial Sequence
  Description of Artificial Sequence: Synthetic oligonucleotide
  Target: LAMA2; (-) strand; PAM type: NRG; PAM sequence: CAG
aactgggaggcaccccccag

SEQ ID NO: 55673 - DNA, 20 bp, Artificial Sequence
  Description of Artificial Sequence: Synthetic oligonucleotide
  Target: LAMA2; (-) strand; PAM type: NRG; PAM sequence: CAG
cctaactgggaggcaccccc

SEQ ID NO: 55674 - DNA, 20 bp, Artificial Sequence
  Description of Artificial Sequence: Synthetic oligonucleotide
  Target: LAMA2; (-) strand; PAM type: NRG; PAM sequence: AGG
ccccgagcagcctaactggg

SEQ ID NO: 55675 - DNA, 20 bp, Artificial Sequence
  Description of Artificial Sequence: Synthetic oligonucleotide
  Target: LAMA2; (-) strand; PAM type: NRG; PAM sequence: GAG
cccccgagcagcctaactgg

SEQ ID NO: 55676 - DNA, 20 bp, Artificial Sequence
  Description of Artificial Sequence: Synthetic oligonucleotide
  Target: LAMA2; (-) strand; PAM type: NRG; PAM sequence: GGG
gacccccgagcagcctaact

SEQ ID NO: 55677 - DNA, 20 bp, Artificial Sequence
  Description of Artificial Sequence: Synthetic oligonucleotide
  Target: LAMA2; (-) strand; PAM type: NRG; PAM sequence: TGG
tgacccccgagcagcctaac

SEQ ID NO: 55678 - DNA, 20 bp, Artificial Sequence
  Description of Artificial Sequence: Synthetic oligonucleotide
  Target: LAMA2; (-) strand; PAM type: NRG; PAM sequence: CAG
cctgacccctgacccccgag

SEQ ID NO: 55679 - DNA, 20 bp, Artificial Sequence
  Description of Artificial Sequence: Synthetic oligonucleotide
  Target: LAMA2; (-) strand; PAM type: NRG; PAM sequence: GAG
gtccctgacccctgaccccc

SEQ ID NO: 55680 - DNA, 20 bp, Artificial Sequence
  Description of Artificial Sequence: Synthetic oligonucleotide
  Target: LAMA2; (-) strand; PAM type: NRG; PAM sequence: GGG
ggcagactgcctcctcaagt

SEQ ID NO: 55681 - DNA, 20 bp, Artificial Sequence
  Description of Artificial Sequence: Synthetic oligonucleotide
  Target: LAMA2; (-) strand; PAM type: NRG; PAM sequence: TGG
gggcagactgcctcctcaag

SEQ ID NO: 55682 - DNA, 20 bp, Artificial Sequence
  Description of Artificial Sequence: Synthetic oligonucleotide
  Target: LAMA2; (-) strand; PAM type: NRG; PAM sequence: AAG
aacgggcagactgcctcctc

SEQ ID NO: 55683 - DNA, 20 bp, Artificial Sequence
  Description of Artificial Sequence: Synthetic oligonucleotide
  Target: LAMA2; (-) strand; PAM type: NRG; PAM sequence: CAG
gctggagatctaagaacggg

SEQ ID NO: 55684 - DNA, 20 bp, Artificial Sequence
  Description of Artificial Sequence: Synthetic oligonucleotide
  Target: LAMA2; (-) strand; PAM type: NRG; PAM sequence: GGG
gcagctggagatctaagaac

SEQ ID NO: 55685 - DNA, 20 bp, Artificial Sequence
  Description of Artificial Sequence: Synthetic oligonucleotide
  Target: LAMA2; (-) strand; PAM type: NRG; PAM sequence: CGG
cgcagctggagatctaagaa

SEQ ID NO: 55686 - DNA, 20 bp, Artificial Sequence
  Description of Artificial Sequence: Synthetic oligonucleotide
  Target: LAMA2; (-) strand; PAM type: NRG; PAM sequence: AAG
cagtacgcagctggagatct

SEQ ID NO: 55687 - DNA, 20 bp, Artificial Sequence
  Description of Artificial Sequence: Synthetic oligonucleotide
  Target: LAMA2; (-) strand; PAM type: NRG; PAM sequence: GAG
gttctcccagtacgcagctg

SEQ ID NO: 55688 - DNA, 20 bp, Artificial Sequence
  Description of Artificial Sequence: Synthetic oligonucleotide
  Target: LAMA2; (-) strand; PAM type: NRG; PAM sequence: TGG
tggttctcccagtacgcagc

SEQ ID NO: 55689 - DNA, 20 bp, Artificial Sequence
  Description of Artificial Sequence: Synthetic oligonucleotide
  Target: LAMA2; (-) strand; PAM type: NRG; PAM sequence: CAG
gcagtggttctcccagtacg

SEQ ID NO: 55690 - DNA, 20 bp, Artificial Sequence
  Description of Artificial Sequence: Synthetic oligonucleotide
  Target: LAMA2; (-) strand; PAM type: NRG; PAM sequence: CAG
gaagagagcagtggttctcc

SEQ ID NO: 55691 - DNA, 20 bp, Artificial Sequence
  Description of Artificial Sequence: Synthetic oligonucleotide
  Target: LAMA2; (-) strand; PAM type: NRG; PAM sequence: TGG
gacagctttgaagagagcag

SEQ ID NO: 55692 - DNA, 20 bp, Artificial Sequence
  Description of Artificial Sequence: Synthetic oligonucleotide
  Target: LAMA2; (-) strand; PAM type: NRG; PAM sequence: CAG
tctgacagctttgaagagag

SEQ ID NO: 55693 - DNA, 20 bp, Artificial Sequence
  Description of Artificial Sequence: Synthetic oligonucleotide
  Target: LAMA2; (-) strand; PAM type: NRG; PAM sequence: GAG
ctgtctgacagctttgaaga

SEQ ID NO: 55694 - DNA, 20 bp, Artificial Sequence
  Description of Artificial Sequence: Synthetic oligonucleotide
  Target: LAMA2; (-) strand; PAM type: NRG; PAM sequence: GAG
ccctgtctgacagctttgaa

SEQ ID NO: 55695 - DNA, 20 bp, Artificial Sequence
  Description of Artificial Sequence: Synthetic oligonucleotide
  Target: LAMA2; (-) strand; PAM type: NRG; PAM sequence: AAG
gtccctgtctgacagctttg

SEQ ID NO: 55696 - DNA, 20 bp, Artificial Sequence
  Description of Artificial Sequence: Synthetic oligonucleotide
  Target: LAMA2; (-) strand; PAM type: NRG; PAM sequence: CAG
acttaaatgtccctgtctga

SEQ ID NO: 55697 - DNA, 20 bp, Artificial Sequence
  Description of Artificial Sequence: Synthetic oligonucleotide
  Target: LAMA2; (-) strand; PAM type: NRG; PAM sequence: CAG
aaagacagcagtaacctctg

SEQ ID NO: 55698 - DNA, 20 bp, Artificial Sequence
  Description of Artificial Sequence: Synthetic oligonucleotide
  Target: LAMA2; (-) strand; PAM type: NRG; PAM sequence: CAG
acagacaaacaaaaagacag

SEQ ID NO: 55699 - DNA, 20 bp, Artificial Sequence
  Description of Artificial Sequence: Synthetic oligonucleotide
  Target: LAMA2; (-) strand; PAM type: NRG; PAM sequence: CAG
ggcacagacaaacaaaaaga

SEQ ID NO: 55700 - DNA, 20 bp, Artificial Sequence
  Description of Artificial Sequence: Synthetic oligonucleotide
  Target: LAMA2; (-) strand; PAM type: NRG; PAM sequence: AAG
gcagggcacagacaaacaaa

SEQ ID NO: 55701 - DNA, 20 bp, Artificial Sequence
  Description of Artificial Sequence: Synthetic oligonucleotide
  Target: LAMA2; (-) strand; PAM type: NRG; PAM sequence: CAG
ccacctctgggggcagggca

SEQ ID NO: 55702 - DNA, 20 bp, Artificial Sequence
  Description of Artificial Sequence: Synthetic oligonucleotide
  Target: LAMA2; (-) strand; PAM type: NRG; PAM sequence: GGG
aggctccacctctgggggca

SEQ ID NO: 55703 - DNA, 20 bp, Artificial Sequence
  Description of Artificial Sequence: Synthetic oligonucleotide
  Target: LAMA2; (-) strand; PAM type: NRG; PAM sequence: AGG
taggctccacctctgggggc

SEQ ID NO: 55704 - DNA, 20 bp, Artificial Sequence
  Description of Artificial Sequence: Synthetic oligonucleotide
  Target: LAMA2; (-) strand; PAM type: NRG; PAM sequence: CAG
gtaggctccacctctggggg

SEQ ID NO: 55705 - DNA, 20 bp, Artificial Sequence
  Description of Artificial Sequence: Synthetic oligonucleotide
  Target: LAMA2; (-) strand; PAM type: NRG; PAM sequence: GGG
tttgtaggctccacctctgg

SEQ ID NO: 55706 - DNA, 20 bp, Artificial Sequence
  Description of Artificial Sequence: Synthetic oligonucleotide
  Target: LAMA2; (-) strand; PAM type: NRG; PAM sequence: GGG
ctttgtaggctccacctctg

SEQ ID NO: 55707 - DNA, 20 bp, Artificial Sequence
  Description of Artificial Sequence: Synthetic oligonucleotide
  Target: LAMA2; (-) strand; PAM type: NRG; PAM sequence: GGG
cctttgtaggctccacctct

SEQ ID NO: 55708 - DNA, 20 bp, Artificial Sequence
  Description of Artificial Sequence: Synthetic oligonucleotide
  Target: LAMA2; (-) strand; PAM type: NRG; PAM sequence: TGG
gcctttgtaggctccacctc

SEQ ID NO: 55709 - DNA, 20 bp, Artificial Sequence
  Description of Artificial Sequence: Synthetic oligonucleotide
  Target: LAMA2; (-) strand; PAM type: NRG; PAM sequence: AGG
ggaggcctgcctgcctttgt

SEQ ID NO: 55710 - DNA, 20 bp, Artificial Sequence
  Description of Artificial Sequence: Synthetic oligonucleotide
  Target: LAMA2; (-) strand; PAM type: NRG; PAM sequence: TAG
aggaggcctgcctgcctttg

SEQ ID NO: 55711 - DNA, 20 bp, Artificial Sequence
  Description of Artificial Sequence: Synthetic oligonucleotide
  Target: LAMA2; (-) strand; PAM type: NRG; PAM sequence: AGG
tagcccaccacagctcaagg

SEQ ID NO: 55712 - DNA, 20 bp, Artificial Sequence
  Description of Artificial Sequence: Synthetic oligonucleotide
  Target: LAMA2; (-) strand; PAM type: NRG; PAM sequence: GAG
gtagcccaccacagctcaag

SEQ ID NO: 55713 - DNA, 20 bp, Artificial Sequence
  Description of Artificial Sequence: Synthetic oligonucleotide
  Target: LAMA2; (-) strand; PAM type: NRG; PAM sequence: AGG
gtgtagcccaccacagctca

SEQ ID NO: 55714 - DNA, 20 bp, Artificial Sequence
  Description of Artificial Sequence: Synthetic oligonucleotide
  Target: LAMA2; (-) strand; PAM type: NRG; PAM sequence: AAG
ggtgtagcccaccacagctc

SEQ ID NO: 55715 - DNA, 20 bp, Artificial Sequence
  Description of Artificial Sequence: Synthetic oligonucleotide
  Target: LAMA2; (-) strand; PAM type: NRG; PAM sequence: CAG
gaactgggtgtagcccacca

SEQ ID NO: 55716 - DNA, 20 bp, Artificial Sequence
  Description of Artificial Sequence: Synthetic oligonucleotide
  Target: LAMA2; (-) strand; PAM type: NRG; PAM sequence: TAG
cgggaagctcgaactgggtg

SEQ ID NO: 55717 - DNA, 20 bp, Artificial Sequence
  Description of Artificial Sequence: Synthetic oligonucleotide
  Target: LAMA2; (-) strand; PAM type: NRG; PAM sequence: GGG
gcagccgggaagctcgaact

SEQ ID NO: 55718 - DNA, 20 bp, Artificial Sequence
  Description of Artificial Sequence: Synthetic oligonucleotide
  Target: LAMA2; (-) strand; PAM type: NRG; PAM sequence: TGG
agcagccgggaagctcgaac

SEQ ID NO: 55719 - DNA, 20 bp, Artificial Sequence
  Description of Artificial Sequence: Synthetic oligonucleotide
  Target: LAMA2; (-) strand; PAM type: NRG; PAM sequence: AAG
aggtaaacaaagcagccggg

SEQ ID NO: 55720 - DNA, 20 bp, Artificial Sequence
  Description of Artificial Sequence: Synthetic oligonucleotide
  Target: LAMA2; (-) strand; PAM type: NRG; PAM sequence: GGG
attaggtaaacaaagcagcc

SEQ ID NO: 55721 - DNA, 20 bp, Artificial Sequence
  Description of Artificial Sequence: Synthetic oligonucleotide
  Target: LAMA2; (-) strand; PAM type: NRG; PAM sequence: CGG
gattaggtaaacaaagcagc

SEQ ID NO: 55722 - DNA, 20 bp, Artificial Sequence
  Description of Artificial Sequence: Synthetic oligonucleotide
  Target: LAMA2; (-) strand; PAM type: NRG; PAM sequence: CAG
gcttgattaggtaaacaaag

SEQ ID NO: 55723 - DNA, 20 bp, Artificial Sequence
  Description of Artificial Sequence: Synthetic oligonucleotide
  Target: LAMA2; (-) strand; PAM type: NRG; PAM sequence: AAG
caggcttgattaggtaaaca

SEQ ID NO: 55724 - DNA, 20 bp, Artificial Sequence
  Description of Artificial Sequence: Synthetic oligonucleotide
  Target: LAMA2; (-) strand; PAM type: NRG; PAM sequence: AGG
gccattgcccaggcttgatt

SEQ ID NO: 55725 - DNA, 20 bp, Artificial Sequence
  Description of Artificial Sequence: Synthetic oligonucleotide
  Target: LAMA2; (-) strand; PAM type: NRG; PAM sequence: TAG
tgccattgcccaggcttgat

SEQ ID NO: 55726 - DNA, 20 bp, Artificial Sequence
  Description of Artificial Sequence: Synthetic oligonucleotide
  Target: LAMA2; (-) strand; PAM type: NRG; PAM sequence: AGG
aggggcgtctgccattgccc

SEQ ID NO: 55727 - DNA, 20 bp, Artificial Sequence
  Description of Artificial Sequence: Synthetic oligonucleotide
  Target: LAMA2; (-) strand; PAM type: NRG; PAM sequence: CAG
gaggggcgtctgccattgcc

SEQ ID NO: 55728 - DNA, 20 bp, Artificial Sequence
  Description of Artificial Sequence: Synthetic oligonucleotide
  Target: LAMA2; (-) strand; PAM type: NRG; PAM sequence: GGG
cggcagcgaggctgggggag

SEQ ID NO: 55729 - DNA, 20 bp, Artificial Sequence
  Description of Artificial Sequence: Synthetic oligonucleotide
  Target: LAMA2; (-) strand; PAM type: NRG; PAM sequence: GGG
gcggcagcgaggctggggga

SEQ ID NO: 55730 - DNA, 20 bp, Artificial Sequence
  Description of Artificial Sequence: Synthetic oligonucleotide
  Target: LAMA2; (-) strand; PAM type: NRG; PAM sequence: AGG
ggcggcagcgaggctggggg

SEQ ID NO: 55731 - DNA, 20 bp, Artificial Sequence
  Description of Artificial Sequence: Synthetic oligonucleotide
  Target: LAMA2; (-) strand; PAM type: NRG; PAM sequence: GAG
aggcggcagcgaggctgggg

SEQ ID NO: 55732 - DNA, 20 bp, Artificial Sequence
  Description of Artificial Sequence: Synthetic oligonucleotide
  Target: LAMA2; (-) strand; PAM type: NRG; PAM sequence: GGG
caaggcggcagcgaggctgg

SEQ ID NO: 55733 - DNA, 20 bp, Artificial Sequence
  Description of Artificial Sequence: Synthetic oligonucleotide
  Target: LAMA2; (-) strand; PAM type: NRG; PAM sequence: GGG
gcaaggcggcagcgaggctg

SEQ ID NO: 55734 - DNA, 20 bp, Artificial Sequence
  Description of Artificial Sequence: Synthetic oligonucleotide
  Target: LAMA2; (-) strand; PAM type: NRG; PAM sequence: GGG
tgcaaggcggcagcgaggct

SEQ ID NO: 55735 - DNA, 20 bp, Artificial Sequence
  Description of Artificial Sequence: Synthetic oligonucleotide
  Target: LAMA2; (-) strand; PAM type: NRG; PAM sequence: TGG
ctgcaaggcggcagcgaggc

SEQ ID NO: 55736 - DNA, 20 bp, Artificial Sequence
  Description of Artificial Sequence: Synthetic oligonucleotide
  Target: LAMA2; (-) strand; PAM type: NRG; PAM sequence: AGG
caaactgcaaggcggcagcg

SEQ ID NO: 55737 - DNA, 20 bp, Artificial Sequence
  Description of Artificial Sequence: Synthetic oligonucleotide
  Target: LAMA2; (-) strand; PAM type: NRG; PAM sequence: GAG
tcaaactgcaaggcggcagc

SEQ ID NO: 55738 - DNA, 20 bp, Artificial Sequence
  Description of Artificial Sequence: Synthetic oligonucleotide
  Target: LAMA2; (-) strand; PAM type: NRG; PAM sequence: CAG
gagatcaaactgcaaggcgg

SEQ ID NO: 55739 - DNA, 20 bp, Artificial Sequence
  Description of Artificial Sequence: Synthetic oligonucleotide
  Target: LAMA2; (-) strand; PAM type: NRG; PAM sequence: CGG
tctgagatcaaactgcaagg

SEQ ID NO: 55740 - DNA, 20 bp, Artificial Sequence
  Description of Artificial Sequence: Synthetic oligonucleotide
  Target: LAMA2; (-) strand; PAM type: NRG; PAM sequence: AGG
cagtctgagatcaaactgca

SEQ ID NO: 55741 - DNA, 20 bp, Artificial Sequence
  Description of Artificial Sequence: Synthetic oligonucleotide
  Target: LAMA2; (-) strand; PAM type: NRG; PAM sequence: AAG
gcagtctgagatcaaactgc

SEQ ID NO: 55742 - DNA, 20 bp, Artificial Sequence
  Description of Artificial Sequence: Synthetic oligonucleotide
  Target: LAMA2; (-) strand; PAM type: NRG; PAM sequence: GAG
gattgctagcacagcagtct

SEQ ID NO: 55743 - DNA, 20 bp, Artificial Sequence
  Description of Artificial Sequence: Synthetic oligonucleotide
  Target: LAMA2; (-) strand; PAM type: NRG; PAM sequence: CAG
ctcactgattgctagcacag

SEQ ID NO: 55744 - DNA, 20 bp, Artificial Sequence
  Description of Artificial Sequence: Synthetic oligonucleotide
  Target: LAMA2; (-) strand; PAM type: NRG; PAM sequence: CAG
agtctcactgattgctagca

SEQ ID NO: 55745 - DNA, 20 bp, Artificial Sequence
  Description of Artificial Sequence: Synthetic oligonucleotide
  Target: LAMA2; (-) strand; PAM type: NRG; PAM sequence: TAG
cacggagtctcactgattgc

SEQ ID NO: 55746 - DNA, 20 bp, Artificial Sequence
  Description of Artificial Sequence: Synthetic oligonucleotide
  Target: LAMA2; (-) strand; PAM type: NRG; PAM sequence: GAG
gggaaggtactacgcccacg

SEQ ID NO: 55747 - DNA, 20 bp, Artificial Sequence
  Description of Artificial Sequence: Synthetic oligonucleotide
  Target: LAMA2; (-) strand; PAM type: NRG; PAM sequence: CGG
ctgggaaggtactacgccca

SEQ ID NO: 55748 - DNA, 20 bp, Artificial Sequence
  Description of Artificial Sequence: Synthetic oligonucleotide
  Target: LAMA2; (-) strand; PAM type: NRG; PAM sequence: AGG
tatcctgcacctggctggga

SEQ ID NO: 55749 - DNA, 20 bp, Artificial Sequence
  Description of Artificial Sequence: Synthetic oligonucleotide
  Target: LAMA2; (-) strand; PAM type: NRG; PAM sequence: AAG
atatcctgcacctggctggg

SEQ ID NO: 55750 - DNA, 20 bp, Artificial Sequence
  Description of Artificial Sequence: Synthetic oligonucleotide
  Target: LAMA2; (-) strand; PAM type: NRG; PAM sequence: GGG
attatatcctgcacctggct

SEQ ID NO: 55751 - DNA, 20 bp, Artificial Sequence
  Description of Artificial Sequence: Synthetic oligonucleotide
  Target: LAMA2; (-) strand; PAM type: NRG; PAM sequence: TGG
gattatatcctgcacctggc

SEQ ID NO: 55752 - DNA, 20 bp, Artificial Sequence
  Description of Artificial Sequence: Synthetic oligonucleotide
  Target: LAMA2; (-) strand; PAM type: NRG; PAM sequence: TGG
acgagattatatcctgcacc

SEQ ID NO: 55753 - DNA, 20 bp, Artificial Sequence
  Description of Artificial Sequence: Synthetic oligonucleotide
  Target: LAMA2; (-) strand; PAM type: NRG; PAM sequence: GAG
cttaaaaaacggcgaaccac

SEQ ID NO: 55754 - DNA, 20 bp, Artificial Sequence
  Description of Artificial Sequence: Synthetic oligonucleotide
  Target: LAMA2; (-) strand; PAM type: NRG; PAM sequence: CGG
tttccgacgggcttaaaaaa

SEQ ID NO: 55755 - DNA, 20 bp, Artificial Sequence
  Description of Artificial Sequence: Synthetic oligonucleotide
  Target: LAMA2; (-) strand; PAM type: NRG; PAM sequence: GGG
gaatactgcgcctttccgac

SEQ ID NO: 55756 - DNA, 20 bp, Artificial Sequence
  Description of Artificial Sequence: Synthetic oligonucleotide
  Target: LAMA2; (-) strand; PAM type: NRG; PAM sequence: CGG
cgaatactgcgcctttccga

SEQ ID NO: 55757 - DNA, 20 bp, Artificial Sequence
  Description of Artificial Sequence: Synthetic oligonucleotide
  Target: LAMA2; (-) strand; PAM type: NRG; PAM sequence: TGG
tgggcggcacctggaaaatc

SEQ ID NO: 55758 - DNA, 20 bp, Artificial Sequence
  Description of Artificial Sequence: Synthetic oligonucleotide
  Target: LAMA2; (-) strand; PAM type: NRG; PAM sequence: TGG
aaggggtgatgggcggcacc

SEQ ID NO: 55759 - DNA, 20 bp, Artificial Sequence
  Description of Artificial Sequence: Synthetic oligonucleotide
  Target: LAMA2; (-) strand; PAM type: NRG; PAM sequence: CGG
tcaaagaaaggggtgatggg

SEQ ID NO: 55760 - DNA, 20 bp, Artificial Sequence
  Description of Artificial Sequence: Synthetic oligonucleotide
  Target: LAMA2; (-) strand; PAM type: NRG; PAM sequence: GGG
tagtcaaagaaaggggtgat

SEQ ID NO: 55761 - DNA, 20 bp, Artificial Sequence
  Description of Artificial Sequence: Synthetic oligonucleotide
  Target: LAMA2; (-) strand; PAM type: NRG; PAM sequence: TGG
ctagtcaaagaaaggggtga

SEQ ID NO: 55762 - DNA, 20 bp, Artificial Sequence
  Description of Artificial Sequence: Synthetic oligonucleotide
  Target: LAMA2; (-) strand; PAM type: NRG; PAM sequence: GGG
cctttcctagtcaaagaaag

SEQ ID NO: 55763 - DNA, 20 bp, Artificial Sequence
  Description of Artificial Sequence: Synthetic oligonucleotide
  Target: LAMA2; (-) strand; PAM type: NRG; PAM sequence: GGG
ccctttcctagtcaaagaaa

SEQ ID NO: 55764 - DNA, 20 bp, Artificial Sequence
  Description of Artificial Sequence: Synthetic oligonucleotide
  Target: LAMA2; (-) strand; PAM type: NRG; PAM sequence: AGG
tccctttcctagtcaaagaa

SEQ ID NO: 55765 - DNA, 20 bp, Artificial Sequence
  Description of Artificial Sequence: Synthetic oligonucleotide
  Target: LAMA2; (-) strand; PAM type: NRG; PAM sequence: AAG
ttccctttcctagtcaaaga

SEQ ID NO: 55766 - DNA, 20 bp, Artificial Sequence
  Description of Artificial Sequence: Synthetic oligonucleotide
  Target: LAMA2; (-) strand; PAM type: NRG; PAM sequence: AAG
ggagttccctttcctagtca

SEQ ID NO: 55767 - DNA, 20 bp, Artificial Sequence
  Description of Artificial Sequence: Synthetic oligonucleotide
  Target: LAMA2; (-) strand; PAM type: NRG; PAM sequence: TAG
ggtcagggagttccctttcc

SEQ ID NO: 55768 - DNA, 20 bp, Artificial Sequence
  Description of Artificial Sequence: Synthetic oligonucleotide
  Target: LAMA2; (-) strand; PAM type: NRG; PAM sequence: GAG
gggaagcgcaaggggtcagg

SEQ ID NO: 55769 - DNA, 20 bp, Artificial Sequence
  Description of Artificial Sequence: Synthetic oligonucleotide
  Target: LAMA2; (-) strand; PAM type: NRG; PAM sequence: GGG
tcgggaagcgcaaggggtca

SEQ ID NO: 55770 - DNA, 20 bp, Artificial Sequence
  Description of Artificial Sequence: Synthetic oligonucleotide
  Target: LAMA2; (-) strand; PAM type: NRG; PAM sequence: AGG
ctcgggaagcgcaaggggtc

SEQ ID NO: 55771 - DNA, 20 bp, Artificial Sequence
  Description of Artificial Sequence: Synthetic oligonucleotide
  Target: LAMA2; (-) strand; PAM type: NRG; PAM sequence: CAG
actcgggaagcgcaaggggt

SEQ ID NO: 55772 - DNA, 20 bp, Artificial Sequence
  Description of Artificial Sequence: Synthetic oligonucleotide
  Target: LAMA2; (-) strand; PAM type: NRG; PAM sequence: GGG
cctcactcgggaagcgcaag

SEQ ID NO: 55773 - DNA, 20 bp, Artificial Sequence
  Description of Artificial Sequence: Synthetic oligonucleotide
  Target: LAMA2; (-) strand; PAM type: NRG; PAM sequence: GGG
gcctcactcgggaagcgcaa

SEQ ID NO: 55774 - DNA, 20 bp, Artificial Sequence
  Description of Artificial Sequence: Synthetic oligonucleotide
  Target: LAMA2; (-) strand; PAM type: NRG; PAM sequence: AGG
tgcctcactcgggaagcgca

SEQ ID NO: 55775 - DNA, 20 bp, Artificial Sequence
  Description of Artificial Sequence: Synthetic oligonucleotide
  Target: LAMA2; (-) strand; PAM type: NRG; PAM sequence: AAG
ttgcctcactcgggaagcgc

SEQ ID NO: 55776 - DNA, 20 bp, Artificial Sequence
  Description of Artificial Sequence: Synthetic oligonucleotide
  Target: LAMA2; (-) strand; PAM type: NRG; PAM sequence: AAG
gaggcattgcctcactcggg

SEQ ID NO: 55777 - DNA, 20 bp, Artificial Sequence
  Description of Artificial Sequence: Synthetic oligonucleotide
  Target: LAMA2; (-) strand; PAM type: NRG; PAM sequence: GGG
ggtgaggcattgcctcactc

SEQ ID NO: 55778 - DNA, 20 bp, Artificial Sequence
  Description of Artificial Sequence: Synthetic oligonucleotide
  Target: LAMA2; (-) strand; PAM type: NRG; PAM sequence: CGG
gggtgaggcattgcctcact

SEQ ID NO: 55779 - DNA, 20 bp, Artificial Sequence
  Description of Artificial Sequence: Synthetic oligonucleotide
  Target: LAMA2; (-) strand; PAM type: NRG; PAM sequence: AGG
gcgtgagccgaagcagggtg

SEQ ID NO: 55780 - DNA, 20 bp, Artificial Sequence
  Description of Artificial Sequence: Synthetic oligonucleotide
  Target: LAMA2; (-) strand; PAM type: NRG; PAM sequence: GAG
tgcgtgagccgaagcagggt

SEQ ID NO: 55781 - DNA, 20 bp, Artificial Sequence
  Description of Artificial Sequence: Synthetic oligonucleotide
  Target: LAMA2; (-) strand; PAM type: NRG; PAM sequence: GGG
accgtgcgtgagccgaagca

SEQ ID NO: 55782 - DNA, 20 bp, Artificial Sequence
  Description of Artificial Sequence: Synthetic oligonucleotide
  Target: LAMA2; (-) strand; PAM type: NRG; PAM sequence: AGG
caccgtgcgtgagccgaagc

SEQ ID NO: 55783 - DNA, 20 bp, Artificial Sequence
  Description of Artificial Sequence: Synthetic oligonucleotide
  Target: LAMA2; (-) strand; PAM type: NRG; PAM sequence: CAG
gcaccgtgcgtgagccgaag

SEQ ID NO: 55784 - DNA, 20 bp, Artificial Sequence
  Description of Artificial Sequence: Synthetic oligonucleotide
  Target: LAMA2; (-) strand; PAM type: NRG; PAM sequence: AAG
cgcgcaccgtgcgtgagccg

SEQ ID NO: 55785 - DNA, 20 bp, Artificial Sequence
  Description of Artificial Sequence: Synthetic oligonucleotide
  Target: LAMA2; (-) strand; PAM type: NRG; PAM sequence: GAG
tgggtgcgcgcaccgtgcgt

SEQ ID NO: 55786 - DNA, 20 bp, Artificial Sequence
  Description of Artificial Sequence: Synthetic oligonucleotide
  Target: LAMA2; (-) strand; PAM type: NRG; PAM sequence: GGG
gacagtgggcgcaggtcagt

SEQ ID NO: 55787 - DNA, 20 bp, Artificial Sequence
  Description of Artificial Sequence: Synthetic oligonucleotide
  Target: LAMA2; (-) strand; PAM type: NRG; PAM sequence: TGG
agacagtgggcgcaggtcag

SEQ ID NO: 55788 - DNA, 20 bp, Artificial Sequence
  Description of Artificial Sequence: Synthetic oligonucleotide
  Target: LAMA2; (-) strand; PAM type: NRG; PAM sequence: CAG
gccagacagtgggcgcaggt

SEQ ID NO: 55789 - DNA, 20 bp, Artificial Sequence
  Description of Artificial Sequence: Synthetic oligonucleotide
  Target: LAMA2; (-) strand; PAM type: NRG; PAM sequence: AGG
gaatgccagacagtgggcgc

SEQ ID NO: 55790 - DNA, 20 bp, Artificial Sequence
  Description of Artificial Sequence: Synthetic oligonucleotide
  Target: LAMA2; (-) strand; PAM type: NRG; PAM sequence: CAG
ggaatgccagacagtgggcg

SEQ ID NO: 55791 - DNA, 20 bp, Artificial Sequence
  Description of Artificial Sequence: Synthetic oligonucleotide
  Target: LAMA2; (-) strand; PAM type: NRG; PAM sequence: GGG
actaaggaatgccagacagt

SEQ ID NO: 55792 - DNA, 20 bp, Artificial Sequence
  Description of Artificial Sequence: Synthetic oligonucleotide
  Target: LAMA2; (-) strand; PAM type: NRG; PAM sequence: TGG
cactaaggaatgccagacag

SEQ ID NO: 55793 - DNA, 20 bp, Artificial Sequence
  Description of Artificial Sequence: Synthetic oligonucleotide
  Target: LAMA2; (-) strand; PAM type: NRG; PAM sequence: CAG
tctcactaaggaatgccaga

SEQ ID NO: 55794 - DNA, 20 bp, Artificial Sequence
  Description of Artificial Sequence: Synthetic oligonucleotide
  Target: LAMA2; (-) strand; PAM type: NRG; PAM sequence: CAG
ttcatctcactaaggaatgc

SEQ ID NO: 55795 - DNA, 20 bp, Artificial Sequence
  Description of Artificial Sequence: Synthetic oligonucleotide
  Target: LAMA2; (-) strand; PAM type: NRG; PAM sequence: AGG
gtaccgggttcatctcacta

SEQ ID NO: 55796 - DNA, 20 bp, Artificial Sequence
  Description of Artificial Sequence: Synthetic oligonucleotide
  Target: LAMA2; (-) strand; PAM type: NRG; PAM sequence: AAG
ggtaccgggttcatctcact

SEQ ID NO: 55797 - DNA, 20 bp, Artificial Sequence
  Description of Artificial Sequence: Synthetic oligonucleotide
  Target: LAMA2; (-) strand; PAM type: NRG; PAM sequence: GGG
gcttttccatctgaggtacc

SEQ ID NO: 55798 - DNA, 20 bp, Artificial Sequence
  Description of Artificial Sequence: Synthetic oligonucleotide
  Target: LAMA2; (-) strand; PAM type: NRG; PAM sequence: CGG
tgcttttccatctgaggtac

SEQ ID NO: 55799 - DNA, 20 bp, Artificial Sequence
  Description of Artificial Sequence: Synthetic oligonucleotide
  Target: LAMA2; (-) strand; PAM type: NRG; PAM sequence: AGG
gatttctgcttttccatctg

SEQ ID NO: 55800 - DNA, 20 bp, Artificial Sequence
  Description of Artificial Sequence: Synthetic oligonucleotide
  Target: LAMA2; (-) strand; PAM type: NRG; PAM sequence: GAG
tgatttctgcttttccatct

SEQ ID NO: 55801 - DNA, 20 bp, Artificial Sequence
  Description of Artificial Sequence: Synthetic oligonucleotide
  Target: LAMA2; (-) strand; PAM type: NRG; PAM sequence: AGG
gcgtgagcgacgcagaagac

SEQ ID NO: 55802 - DNA, 20 bp, Artificial Sequence
  Description of Artificial Sequence: Synthetic oligonucleotide
  Target: LAMA2; (-) strand; PAM type: NRG; PAM sequence: CAG
agcgtgagcgacgcagaaga

SEQ ID NO: 55803 - DNA, 20 bp, Artificial Sequence
  Description of Artificial Sequence: Synthetic oligonucleotide
  Target: LAMA2; (-) strand; PAM type: NRG; PAM sequence: AAG
tcccagcgtgagcgacgcag

SEQ ID NO: 55804 - DNA, 20 bp, Artificial Sequence
  Description of Artificial Sequence: Synthetic oligonucleotide
  Target: LAMA2; (-) strand; PAM type: NRG; PAM sequence: CAG
agctcccagcgtgagcgacg

SEQ ID NO: 55805 - DNA, 20 bp, Artificial Sequence
  Description of Artificial Sequence: Synthetic oligonucleotide
  Target: LAMA2; (-) strand; PAM type: NRG; PAM sequence: GAG
cggtctacagctcccagcgt

SEQ ID NO: 55806 - DNA, 20 bp, Artificial Sequence
  Description of Artificial Sequence: Synthetic oligonucleotide
  Target: LAMA2; (-) strand; PAM type: NRG; PAM sequence: CAG
cagctccggtctacagctcc

SEQ ID NO: 55807 - DNA, 20 bp, Artificial Sequence
  Description of Artificial Sequence: Synthetic oligonucleotide
  Target: LAMA2; (-) strand; PAM type: NRG; PAM sequence: CAG
ataggaacagctccggtcta

SEQ ID NO: 55808 - DNA, 20 bp, Artificial Sequence
  Description of Artificial Sequence: Synthetic oligonucleotide
  Target: LAMA2; (-) strand; PAM type: NRG; PAM sequence: CGG
tggccgaataggaacagctc

SEQ ID NO: 55809 - DNA, 20 bp, Artificial Sequence
  Description of Artificial Sequence: Synthetic oligonucleotide
  Target: LAMA2; (-) strand; PAM type: NRG; PAM sequence: CAG
ccaagatggccgaataggaa

SEQ ID NO: 55810 - DNA, 20 bp, Artificial Sequence
  Description of Artificial Sequence: Synthetic oligonucleotide
  Target: LAMA2; (-) strand; PAM type: NRG; PAM sequence: AGG
aggagccaagatggccgaat

SEQ ID NO: 55811 - DNA, 20 bp, Artificial Sequence
  Description of Artificial Sequence: Synthetic oligonucleotide
  Target: LAMA2; (-) strand; PAM type: NRG; PAM sequence: TAG
gaggagccaagatggccgaa

SEQ ID NO: 55812 - DNA, 20 bp, Artificial Sequence
  Description of Artificial Sequence: Synthetic oligonucleotide
  Target: LAMA2; (-) strand; PAM type: NRG; PAM sequence: TGG
ctttaggggaggagccaaga

SEQ ID NO: 55813 - DNA, 20 bp, Artificial Sequence
  Description of Artificial Sequence: Synthetic oligonucleotide
  Target: LAMA2; (-) strand; PAM type: NRG; PAM sequence: AAG
atacctttaggggaggagcc

SEQ ID NO: 55814 - DNA, 20 bp, Artificial Sequence
  Description of Artificial Sequence: Synthetic oligonucleotide
  Target: LAMA2; (-) strand; PAM type: NRG; PAM sequence: GAG
aaattatacctttaggggag

SEQ ID NO: 55815 - DNA, 20 bp, Artificial Sequence
  Description of Artificial Sequence: Synthetic oligonucleotide
  Target: LAMA2; (-) strand; PAM type: NRG; PAM sequence: AGG
agaaattatacctttagggg

SEQ ID NO: 55816 - DNA, 20 bp, Artificial Sequence
  Description of Artificial Sequence: Synthetic oligonucleotide
  Target: LAMA2; (-) strand; PAM type: NRG; PAM sequence: GAG
tagaaattatacctttaggg

SEQ ID NO: 55817 - DNA, 20 bp, Artificial Sequence
  Description of Artificial Sequence: Synthetic oligonucleotide
  Target: LAMA2; (-) strand; PAM type: NRG; PAM sequence: GGG
tatagaaattatacctttag

SEQ ID NO: 55818 - DNA, 20 bp, Artificial Sequence
  Description of Artificial Sequence: Synthetic oligonucleotide
  Target: LAMA2; (-) strand; PAM type: NRG; PAM sequence: GGG
ttatagaaattataccttta

SEQ ID NO: 55819 - DNA, 20 bp, Artificial Sequence
  Description of Artificial Sequence: Synthetic oligonucleotide
  Target: LAMA2; (-) strand; PAM type: NRG; PAM sequence: AGG
tttatagaaattataccttt

SEQ ID NO: 55820 - DNA, 20 bp, Artificial Sequence
  Description of Artificial Sequence: Synthetic oligonucleotide
  Target: LAMA2; (-) strand; PAM type: NRG; PAM sequence: TAG
ttttatagaaattatacctt

SEQ ID NO: 55821 - DNA, 20 bp, Artificial Sequence
  Description of Artificial Sequence: Synthetic oligonucleotide
  Target: LAMA2; (-) strand; PAM type: NRG; PAM sequence: TAG
tgtaaaaaaactttatttta

SEQ ID NO: 55822 - DNA, 20 bp, Artificial Sequence
  Description of Artificial Sequence: Synthetic oligonucleotide
  Target: LAMA2; (-) strand; PAM type: NRG; PAM sequence: GGG
tgttgggctgacggttatat

SEQ ID NO: 55823 - DNA, 20 bp, Artificial Sequence
  Description of Artificial Sequence: Synthetic oligonucleotide
  Target: LAMA2; (-) strand; PAM type: NRG; PAM sequence: TGG
ttgttgggctgacggttata

SEQ ID NO: 55824 - DNA, 20 bp, Artificial Sequence
  Description of Artificial Sequence: Synthetic oligonucleotide
  Target: LAMA2; (-) strand; PAM type: NRG; PAM sequence: CGG
ttttgttgttgttgggctga

SEQ ID NO: 55825 - DNA, 20 bp, Artificial Sequence
  Description of Artificial Sequence: Synthetic oligonucleotide
  Target: LAMA2; (-) strand; PAM type: NRG; PAM sequence: GGG
ttctattttttgttgttgtt

SEQ ID NO: 55826 - DNA, 20 bp, Artificial Sequence
  Description of Artificial Sequence: Synthetic oligonucleotide
  Target: LAMA2; (-) strand; PAM type: NRG; PAM sequence: TGG
gttctattttttgttgttgt

SEQ ID NO: 55827 - DNA, 20 bp, Artificial Sequence
  Description of Artificial Sequence: Synthetic oligonucleotide
  Target: LAMA2; (-) strand; PAM type: NRG; PAM sequence: GAG
gtgagggccttctgggaaag

SEQ ID NO: 55828 - DNA, 20 bp, Artificial Sequence
  Description of Artificial Sequence: Synthetic oligonucleotide
  Target: LAMA2; (-) strand; PAM type: NRG; PAM sequence: AGG
cagtgagggccttctgggaa

SEQ ID NO: 55829 - DNA, 20 bp, Artificial Sequence
  Description of Artificial Sequence: Synthetic oligonucleotide
  Target: LAMA2; (-) strand; PAM type: NRG; PAM sequence: AAG
acagtgagggccttctggga

SEQ ID NO: 55830 - DNA, 20 bp, Artificial Sequence
  Description of Artificial Sequence: Synthetic oligonucleotide
  Target: LAMA2; (-) strand; PAM type: NRG; PAM sequence: GGG
aaaaacagtgagggccttct

SEQ ID NO: 55831 - DNA, 20 bp, Artificial Sequence
  Description of Artificial Sequence: Synthetic oligonucleotide
  Target: LAMA2; (-) strand; PAM type: NRG; PAM sequence: TGG
aaaaaacagtgagggccttc

SEQ ID NO: 55832 - DNA, 20 bp, Artificial Sequence
  Description of Artificial Sequence: Synthetic oligonucleotide
  Target: LAMA2; (-) strand; PAM type: NRG; PAM sequence: GGG
agacagcaaaaaaacagtga

SEQ ID NO: 55833 - DNA, 20 bp, Artificial Sequence
  Description of Artificial Sequence: Synthetic oligonucleotide
  Target: LAMA2; (-) strand; PAM type: NRG; PAM sequence: AGG
aagacagcaaaaaaacagtg

SEQ ID NO: 55834 - DNA, 20 bp, Artificial Sequence
  Description of Artificial Sequence: Synthetic oligonucleotide
  Target: LAMA2; (-) strand; PAM type: NRG; PAM sequence: GAG
gaagacagcaaaaaaacagt

SEQ ID NO: 55835 - DNA, 20 bp, Artificial Sequence
  Description of Artificial Sequence: Synthetic oligonucleotide
  Target: LAMA2; (-) strand; PAM type: NRG; PAM sequence: CAG
ggaagaagacagcaaaaaaa

SEQ ID NO: 55836 - DNA, 20 bp, Artificial Sequence
  Description of Artificial Sequence: Synthetic oligonucleotide
  Target: LAMA2; (-) strand; PAM type: NRG; PAM sequence: CAG
ttcagggctgtggaagaaga

SEQ ID NO: 55837 - DNA, 20 bp, Artificial Sequence
  Description of Artificial Sequence: Synthetic oligonucleotide
  Target: LAMA2; (-) strand; PAM type: NRG; PAM sequence: AAG
gagtttcagggctgtggaag

SEQ ID NO: 55838 - DNA, 20 bp, Artificial Sequence
  Description of Artificial Sequence: Synthetic oligonucleotide
  Target: LAMA2; (-) strand; PAM type: NRG; PAM sequence: AAG
taagagtttcagggctgtgg

SEQ ID NO: 55839 - DNA, 20 bp, Artificial Sequence
  Description of Artificial Sequence: Synthetic oligonucleotide
  Target: LAMA2; (-) strand; PAM type: NRG; PAM sequence: TGG
agataagagtttcagggctg

SEQ ID NO: 55840 - DNA, 20 bp, Artificial Sequence
  Description of Artificial Sequence: Synthetic oligonucleotide
  Target: LAMA2; (-) strand; PAM type: NRG; PAM sequence: GGG
ctaatcagataagagtttca

SEQ ID NO: 55841 - DNA, 20 bp, Artificial Sequence
  Description of Artificial Sequence: Synthetic oligonucleotide
  Target: LAMA2; (-) strand; PAM type: NRG; PAM sequence: AGG
actaatcagataagagtttc

SEQ ID NO: 55842 - DNA, 20 bp, Artificial Sequence
  Description of Artificial Sequence: Synthetic oligonucleotide
  Target: LAMA2; (-) strand; PAM type: NRG; PAM sequence: CAG
aactaatcagataagagttt

SEQ ID NO: 55843 - DNA, 20 bp, Artificial Sequence
  Description of Artificial Sequence: Synthetic oligonucleotide
  Target: LAMA2; (-) strand; PAM type: NRG; PAM sequence: GAG
agatgaaactaatcagataa

SEQ ID NO: 55844 - DNA, 20 bp, Artificial Sequence
  Description of Artificial Sequence: Synthetic oligonucleotide
  Target: LAMA2; (-) strand; PAM type: NRG; PAM sequence: AAG
acagatgaaactaatcagat

SEQ ID NO: 55845 - DNA, 20 bp, Artificial Sequence
  Description of Artificial Sequence: Synthetic oligonucleotide
  Target: LAMA2; (-) strand; PAM type: NRG; PAM sequence: CAG
ctaagacagatgaaactaat

SEQ ID NO: 55846 - DNA, 20 bp, Artificial Sequence
  Description of Artificial Sequence: Synthetic oligonucleotide
  Target: LAMA2; (-) strand; PAM type: NRG; PAM sequence: CAG
atataaaggaaattctaaga

SEQ ID NO: 55847 - DNA, 20 bp, Artificial Sequence
  Description of Artificial Sequence: Synthetic oligonucleotide
  Target: LAMA2; (-) strand; PAM type: NRG; PAM sequence: AAG
tttcatataaaggaaattct

SEQ ID NO: 55848 - DNA, 20 bp, Artificial Sequence
  Description of Artificial Sequence: Synthetic oligonucleotide
  Target: LAMA2; (-) strand; PAM type: NRG; PAM sequence: AGG
ttagttggtgtttcatataa

SEQ ID NO: 55849 - DNA, 20 bp, Artificial Sequence
  Description of Artificial Sequence: Synthetic oligonucleotide
  Target: LAMA2; (-) strand; PAM type: NRG; PAM sequence: AAG
cttagttggtgtttcatata

SEQ ID NO: 55850 - DNA, 20 bp, Artificial Sequence
  Description of Artificial Sequence: Synthetic oligonucleotide
  Target: LAMA2; (-) strand; PAM type: NRG; PAM sequence: TGG
gacagaaaaaagtacttagt

SEQ ID NO: 55851 - DNA, 20 bp, Artificial Sequence
  Description of Artificial Sequence: Synthetic oligonucleotide
  Target: LAMA2; (-) strand; PAM type: NRG; PAM sequence: TAG
ggcagacagaaaaaagtact

SEQ ID NO: 55852 - DNA, 20 bp, Artificial Sequence
  Description of Artificial Sequence: Synthetic oligonucleotide
  Target: LAMA2; (-) strand; PAM type: NRG; PAM sequence: AAG
gaaagaaggcagacagaaaa

SEQ ID NO: 55853 - DNA, 20 bp, Artificial Sequence
  Description of Artificial Sequence: Synthetic oligonucleotide
  Target: LAMA2; (-) strand; PAM type: NRG; PAM sequence: CAG
actgggtgaaagaaggcaga

SEQ ID NO: 55854 - DNA, 20 bp, Artificial Sequence
  Description of Artificial Sequence: Synthetic oligonucleotide
  Target: LAMA2; (-) strand; PAM type: NRG; PAM sequence: CAG
gtagactgggtgaaagaagg

SEQ ID NO: 55855 - DNA, 20 bp, Artificial Sequence
  Description of Artificial Sequence: Synthetic oligonucleotide
  Target: LAMA2; (-) strand; PAM type: NRG; PAM sequence: AGG
acagtagactgggtgaaaga

SEQ ID NO: 55856 - DNA, 20 bp, Artificial Sequence
  Description of Artificial Sequence: Synthetic oligonucleotide
  Target: LAMA2; (-) strand; PAM type: NRG; PAM sequence: AAG
gacagtagactgggtgaaag

SEQ ID NO: 55857 - DNA, 20 bp, Artificial Sequence
  Description of Artificial Sequence: Synthetic oligonucleotide
  Target: LAMA2; (-) strand; PAM type: NRG; PAM sequence: AAG
acagacagtagactgggtga

SEQ ID NO: 55858 - DNA, 20 bp, Artificial Sequence
  Description of Artificial Sequence: Synthetic oligonucleotide
  Target: LAMA2; (-) strand; PAM type: NRG; PAM sequence: GGG
atttttacagacagtagact

SEQ ID NO: 55859 - DNA, 20 bp, Artificial Sequence
  Description of Artificial Sequence: Synthetic oligonucleotide
  Target: LAMA2; (-) strand; PAM type: NRG; PAM sequence: TGG
gatttttacagacagtagac

SEQ ID NO: 55860 - DNA, 20 bp, Artificial Sequence
  Description of Artificial Sequence: Synthetic oligonucleotide
  Target: LAMA2; (-) strand; PAM type: NRG; PAM sequence: TAG
tgaatgatttttacagacag

SEQ ID NO: 55861 - DNA, 20 bp, Artificial Sequence
  Description of Artificial Sequence: Synthetic oligonucleotide
  Target: LAMA2; (-) strand; PAM type: NRG; PAM sequence: CAG
acatgaatgatttttacaga

SEQ ID NO: 55862 - DNA, 20 bp, Artificial Sequence
  Description of Artificial Sequence: Synthetic oligonucleotide
  Target: LAMA2; (-) strand; PAM type: NRG; PAM sequence: CAG
aaaaacatgaatgattttta

SEQ ID NO: 55863 - DNA, 20 bp, Artificial Sequence
  Description of Artificial Sequence: Synthetic oligonucleotide
  Target: LAMA2; (-) strand; PAM type: NRG; PAM sequence: TGG
taaaaggagcaaaatattga

SEQ ID NO: 55864 - DNA, 20 bp, Artificial Sequence
  Description of Artificial Sequence: Synthetic oligonucleotide
  Target: LAMA2; (-) strand; PAM type: NRG; PAM sequence: GAG
aaaatgttagcgattaaaag

SEQ ID NO: 55865 - DNA, 20 bp, Artificial Sequence
  Description of Artificial Sequence: Synthetic oligonucleotide
  Target: LAMA2; (-) strand; PAM type: NRG; PAM sequence: AGG
ggaaaatgttagcgattaaa

SEQ ID NO: 55866 - DNA, 20 bp, Artificial Sequence
  Description of Artificial Sequence: Synthetic oligonucleotide
  Target: LAMA2; (-) strand; PAM type: NRG; PAM sequence: AAG
cggaaaatgttagcgattaa

SEQ ID NO: 55867 - DNA, 20 bp, Artificial Sequence
  Description of Artificial Sequence: Synthetic oligonucleotide
  Target: LAMA2; (-) strand; PAM type: NRG; PAM sequence: TAG
attcattcaacggaaaatgt

SEQ ID NO: 55868 - DNA, 20 bp, Artificial Sequence
  Description of Artificial Sequence: Synthetic oligonucleotide
  Target: LAMA2; (-) strand; PAM type: NRG; PAM sequence: CGG
atggaggtacattcattcaa

SEQ ID NO: 55869 - DNA, 20 bp, Artificial Sequence
  Description of Artificial Sequence: Synthetic oligonucleotide
  Target: LAMA2; (-) strand; PAM type: NRG; PAM sequence: AGG
ggccaataaaataaaaatgg

SEQ ID NO: 55870 - DNA, 20 bp, Artificial Sequence
  Description of Artificial Sequence: Synthetic oligonucleotide
  Target: LAMA2; (-) strand; PAM type: NRG; PAM sequence: GAG
aggccaataaaataaaaatg

SEQ ID NO: 55871 - DNA, 20 bp, Artificial Sequence
  Description of Artificial Sequence: Synthetic oligonucleotide
  Target: LAMA2; (-) strand; PAM type: NRG; PAM sequence: TGG
acaggccaataaaataaaaa

SEQ ID NO: 55872 - DNA, 20 bp, Artificial Sequence
  Description of Artificial Sequence: Synthetic oligonucleotide
  Target: LAMA2; (-) strand; PAM type: NRG; PAM sequence: AGG
acagtcttaatgtcatcaac

SEQ ID NO: 55873 - DNA, 20 bp, Artificial Sequence
  Description of Artificial Sequence: Synthetic oligonucleotide
  Target: LAMA2; (-) strand; PAM type: NRG; PAM sequence: CAG
aacagtcttaatgtcatcaa

SEQ ID NO: 55874 - DNA, 20 bp, Artificial Sequence
  Description of Artificial Sequence: Synthetic oligonucleotide
  Target: LAMA2; (-) strand; PAM type: NRG; PAM sequence: CAG
tgataattaaaaactggaaa

SEQ ID NO: 55875 - DNA, 20 bp, Artificial Sequence
  Description of Artificial Sequence: Synthetic oligonucleotide
  Target: LAMA2; (-) strand; PAM type: NRG; PAM sequence: TGG
tattcatgataattaaaaac

SEQ ID NO: 55876 - DNA, 20 bp, Artificial Sequence
  Description of Artificial Sequence: Synthetic oligonucleotide
  Target: LAMA2; (-) strand; PAM type: NRG; PAM sequence: TAG
gcttgtacatgacttgtata

SEQ ID NO: 55877 - DNA, 20 bp, Artificial Sequence
  Description of Artificial Sequence: Synthetic oligonucleotide
  Target: LAMA2; (-) strand; PAM type: NRG; PAM sequence: AAG
gaaaacatatgtccataaaa

SEQ ID NO: 55878 - DNA, 20 bp, Artificial Sequence
  Description of Artificial Sequence: Synthetic oligonucleotide
  Target: LAMA2; (-) strand; PAM type: NRG; PAM sequence: CAG
caacccaggaattttactcc

SEQ ID NO: 55879 - DNA, 20 bp, Artificial Sequence
  Description of Artificial Sequence: Synthetic oligonucleotide
  Target: LAMA2; (-) strand; PAM type: NRG; PAM sequence: AGG
acattttttccatgcaaccc

SEQ ID NO: 55880 - DNA, 20 bp, Artificial Sequence
  Description of Artificial Sequence: Synthetic oligonucleotide
  Target: LAMA2; (-) strand; PAM type: NRG; PAM sequence: CAG
aacattttttccatgcaacc

SEQ ID NO: 55881 - DNA, 20 bp, Artificial Sequence
  Description of Artificial Sequence: Synthetic oligonucleotide
  Target: LAMA2; (-) strand; PAM type: NRG; PAM sequence: TAG
actaagatcatgccttcatt

SEQ ID NO: 55882 - DNA, 20 bp, Artificial Sequence
  Description of Artificial Sequence: Synthetic oligonucleotide
  Target: LAMA2; (-) strand; PAM type: NRG; PAM sequence: AAG
taaataaacattactagact

SEQ ID NO: 55883 - DNA, 20 bp, Artificial Sequence
  Description of Artificial Sequence: Synthetic oligonucleotide
  Target: LAMA2; (-) strand; PAM type: NRG; PAM sequence: TAG
tagaagtaaataaacattac

SEQ ID NO: 55884 - DNA, 20 bp, Artificial Sequence
  Description of Artificial Sequence: Synthetic oligonucleotide
  Target: LAMA2; (-) strand; PAM type: NRG; PAM sequence: AAG
ccaaacacatatgttgatag

SEQ ID NO: 55885 - DNA, 20 bp, Artificial Sequence
  Description of Artificial Sequence: Synthetic oligonucleotide
  Target: LAMA2; (-) strand; PAM type: NRG; PAM sequence: TAG
ttaccaaacacatatgttga

SEQ ID NO: 55886 - DNA, 20 bp, Artificial Sequence
  Description of Artificial Sequence: Synthetic oligonucleotide
  Target: LAMA2; (-) strand; PAM type: NRG; PAM sequence: CGG
tgagaaaaaaatatccatta

SEQ ID NO: 55887 - DNA, 20 bp, Artificial Sequence
  Description of Artificial Sequence: Synthetic oligonucleotide
  Target: LAMA2; (-) strand; PAM type: NRG; PAM sequence: GAG
gggagaaaggaagaagtagt

SEQ ID NO: 55888 - DNA, 20 bp, Artificial Sequence
  Description of Artificial Sequence: Synthetic oligonucleotide
  Target: LAMA2; (-) strand; PAM type: NRG; PAM sequence: TAG
aagagggagaaaggaagaag

SEQ ID NO: 55889 - DNA, 20 bp, Artificial Sequence
  Description of Artificial Sequence: Synthetic oligonucleotide
  Target: LAMA2; (-) strand; PAM type: NRG; PAM sequence: AAG
aaaaagagggagaaaggaag

SEQ ID NO: 55890 - DNA, 20 bp, Artificial Sequence
  Description of Artificial Sequence: Synthetic oligonucleotide
  Target: LAMA2; (-) strand; PAM type: NRG; PAM sequence: AAG
tgtaaaaagagggagaaagg

SEQ ID NO: 55891 - DNA, 20 bp, Artificial Sequence
  Description of Artificial Sequence: Synthetic oligonucleotide
  Target: LAMA2; (-) strand; PAM type: NRG; PAM sequence: AGG
ttgtgtaaaaagagggagaa

SEQ ID NO: 55892 - DNA, 20 bp, Artificial Sequence
  Description of Artificial Sequence: Synthetic oligonucleotide
  Target: LAMA2; (-) strand; PAM type: NRG; PAM sequence: AAG
attgtgtaaaaagagggaga

SEQ ID NO: 55893 - DNA, 20 bp, Artificial Sequence
  Description of Artificial Sequence: Synthetic oligonucleotide
  Target: LAMA2; (-) strand; PAM type: NRG; PAM sequence: GAG
tttaattgtgtaaaaagagg

SEQ ID NO: 55894 - DNA, 20 bp, Artificial Sequence
  Description of Artificial Sequence: Synthetic oligonucleotide
  Target: LAMA2; (-) strand; PAM type: NRG; PAM sequence: GGG
tttttaattgtgtaaaaaga

SEQ ID NO: 55895 - DNA, 20 bp, Artificial Sequence
  Description of Artificial Sequence: Synthetic oligonucleotide
  Target: LAMA2; (-) strand; PAM type: NRG; PAM sequence: AGG
ttttttaattgtgtaaaaag

SEQ ID NO: 55896 - DNA, 20 bp, Artificial Sequence
  Description of Artificial Sequence: Synthetic oligonucleotide
  Target: LAMA2; (-) strand; PAM type: NRG; PAM sequence: GAG
gttttttaattgtgtaaaaa

SEQ ID NO: 55897 - DNA, 20 bp, Artificial Sequence
  Description of Artificial Sequence: Synthetic oligonucleotide
  Target: LAMA2; (-) strand; PAM type: NRG; PAM sequence: AAG
tagttttttaattgtgtaaa

SEQ ID NO: 55898 - DNA, 20 bp, Artificial Sequence
  Description of Artificial Sequence: Synthetic oligonucleotide
  Target: LAMA2; (-) strand; PAM type: NRG; PAM sequence: TAG
atagagccaacttttatctt

SEQ ID NO: 55899 - DNA, 20 bp, Artificial Sequence
  Description of Artificial Sequence: Synthetic oligonucleotide
  Target: LAMA2; (-) strand; PAM type: NRG; PAM sequence: GAG
aaataaaacctttccctata

SEQ ID NO: 55900 - DNA, 20 bp, Artificial Sequence
  Description of Artificial Sequence: Synthetic oligonucleotide
  Target: LAMA2; (-) strand; PAM type: NRG; PAM sequence: TAG
aaaaataaaacctttcccta

SEQ ID NO: 55901 - DNA, 20 bp, Artificial Sequence
  Description of Artificial Sequence: Synthetic oligonucleotide
  Target: LAMA2; (-) strand; PAM type: NRG; PAM sequence: CAG
tatagaaatctcaaatttgc

SEQ ID NO: 55902 - DNA, 20 bp, Artificial Sequence
  Description of Artificial Sequence: Synthetic oligonucleotide
  Target: LAMA2; (-) strand; PAM type: NRG; PAM sequence: TAG
tatacctatgaagaatttta

SEQ ID NO: 55903 - DNA, 20 bp, Artificial Sequence
  Description of Artificial Sequence: Synthetic oligonucleotide
  Target: LAMA2; (-) strand; PAM type: NRG; PAM sequence: AAG
ctctgttttatatacctatg

SEQ ID NO: 55904 - DNA, 20 bp, Artificial Sequence
  Description of Artificial Sequence: Synthetic oligonucleotide
  Target: LAMA2; (-) strand; PAM type: NRG; PAM sequence: AAG
tgaataataccctgctttaa

SEQ ID NO: 55905 - DNA, 20 bp, Artificial Sequence
  Description of Artificial Sequence: Synthetic oligonucleotide
  Target: LAMA2; (-) strand; PAM type: NRG; PAM sequence: TAG
tgccttacccataattatag

SEQ ID NO: 55906 - DNA, 20 bp, Artificial Sequence
  Description of Artificial Sequence: Synthetic oligonucleotide
  Target: LAMA2; (-) strand; PAM type: NRG; PAM sequence: TAG
cactgccttacccataatta

SEQ ID NO: 55907 - DNA, 20 bp, Artificial Sequence
  Description of Artificial Sequence: Synthetic oligonucleotide
  Target: LAMA2; (-) strand; PAM type: NRG; PAM sequence: GGG
tcttatttaatgaataaatt

SEQ ID NO: 55908 - DNA, 20 bp, Artificial Sequence
  Description of Artificial Sequence: Synthetic oligonucleotide
  Target: LAMA2; (-) strand; PAM type: NRG; PAM sequence: TGG
ttcttatttaatgaataaat

SEQ ID NO: 55909 - DNA, 20 bp, Artificial Sequence
  Description of Artificial Sequence: Synthetic oligonucleotide
  Target: LAMA2; (-) strand; PAM type: NRG; PAM sequence: GAG
cttgctcatctttgtatttg

SEQ ID NO: 55910 - DNA, 20 bp, Artificial Sequence
  Description of Artificial Sequence: Synthetic oligonucleotide
  Target: LAMA2; (-) strand; PAM type: NRG; PAM sequence: TGG
gtcttgctcatctttgtatt

SEQ ID NO: 55911 - DNA, 20 bp, Artificial Sequence
  Description of Artificial Sequence: Synthetic oligonucleotide
  Target: LAMA2; (-) strand; PAM type: NRG; PAM sequence: AGG
tccctactatgccattcctg

SEQ ID NO: 55912 - DNA, 20 bp, Artificial Sequence
  Description of Artificial Sequence: Synthetic oligonucleotide
  Target: LAMA2; (-) strand; PAM type: NRG; PAM sequence: GAG
ttccctactatgccattcct

SEQ ID NO: 55913 - DNA, 20 bp, Artificial Sequence
  Description of Artificial Sequence: Synthetic oligonucleotide
  Target: LAMA2; (-) strand; PAM type: NRG; PAM sequence: CAG
cttaaagccctttccacatt

SEQ ID NO: 55914 - DNA, 20 bp, Artificial Sequence
  Description of Artificial Sequence: Synthetic oligonucleotide
  Target: LAMA2; (-) strand; PAM type: NRG; PAM sequence: AAG
caattttaataactttctta

SEQ ID NO: 55915 - DNA, 20 bp, Artificial Sequence
  Description of Artificial Sequence: Synthetic oligonucleotide
  Target: LAMA2; (-) strand; PAM type: NRG; PAM sequence: CAG
tggaaatgtttctacttccc

SEQ ID NO: 55916 - DNA, 20 bp, Artificial Sequence
  Description of Artificial Sequence: Synthetic oligonucleotide
  Target: LAMA2; (-) strand; PAM type: NRG; PAM sequence: TGG
actgccctgttcctgttaga

SEQ ID NO: 55917 - DNA, 20 bp, Artificial Sequence
  Description of Artificial Sequence: Synthetic oligonucleotide
  Target: LAMA2; (-) strand; PAM type: NRG; PAM sequence: TAG
tgaaactgccctgttcctgt

SEQ ID NO: 55918 - DNA, 20 bp, Artificial Sequence
  Description of Artificial Sequence: Synthetic oligonucleotide
  Target: LAMA2; (-) strand; PAM type: NRG; PAM sequence: CAG
attctcttctgttcaaaact

SEQ ID NO: 55919 - DNA, 20 bp, Artificial Sequence
  Description of Artificial Sequence: Synthetic oligonucleotide
  Target: LAMA2; (-) strand; PAM type: NRG; PAM sequence: CAG
ttctggtcgcccatgctcca

SEQ ID NO: 55920 - DNA, 20 bp, Artificial Sequence
  Description of Artificial Sequence: Synthetic oligonucleotide
  Target: LAMA2; (-) strand; PAM type: NRG; PAM sequence: TGG
tttaacttaatctgcctttc

SEQ ID NO: 55921 - DNA, 20 bp, Artificial Sequence
  Description of Artificial Sequence: Synthetic oligonucleotide
  Target: LAMA2; (-) strand; PAM type: NRG; PAM sequence: CAG
gcaaatctaaacttaaattc

SEQ ID NO: 55922 - DNA, 20 bp, Artificial Sequence
  Description of Artificial Sequence: Synthetic oligonucleotide
  Target: LAMA2; (-) strand; PAM type: NRG; PAM sequence: AAG
agtaacatttttctttatta

SEQ ID NO: 55923 - DNA, 20 bp, Artificial Sequence
  Description of Artificial Sequence: Synthetic oligonucleotide
  Target: LAMA2; (-) strand; PAM type: NRG; PAM sequence: AAG
gcttattttctctcatcaca

SEQ ID NO: 55924 - DNA, 20 bp, Artificial Sequence
  Description of Artificial Sequence: Synthetic oligonucleotide
  Target: LAMA2; (-) strand; PAM type: NRG; PAM sequence: TAG
gtttttaaatttttaatttt

SEQ ID NO: 55925 - DNA, 20 bp, Artificial Sequence
  Description of Artificial Sequence: Synthetic oligonucleotide
  Target: LAMA2; (-) strand; PAM type: NRG; PAM sequence: TGG
attaatctctcagagtggat

SEQ ID NO: 55926 - DNA, 20 bp, Artificial Sequence
  Description of Artificial Sequence: Synthetic oligonucleotide
  Target: LAMA2; (-) strand; PAM type: NRG; PAM sequence: TGG
ctttaattaatctctcagag

SEQ ID NO: 55927 - DNA, 20 bp, Artificial Sequence
  Description of Artificial Sequence: Synthetic oligonucleotide
  Target: LAMA2; (-) strand; PAM type: NRG; PAM sequence: GAG
tcactttaattaatctctca

SEQ ID NO: 55928 - DNA, 20 bp, Artificial Sequence
  Description of Artificial Sequence: Synthetic oligonucleotide
  Target: LAMA2; (-) strand; PAM type: NRG; PAM sequence: CAG
cttcactttaattaatctct

SEQ ID NO: 55929 - DNA, 20 bp, Artificial Sequence
  Description of Artificial Sequence: Synthetic oligonucleotide
  Target: LAMA2; (-) strand; PAM type: NRG; PAM sequence: CAG
tcacttcagtaacacattag

SEQ ID NO: 55930 - DNA, 20 bp, Artificial Sequence
  Description of Artificial Sequence: Synthetic oligonucleotide
  Target: LAMA2; (-) strand; PAM type: NRG; PAM sequence: TAG
agttcacttcagtaacacat

SEQ ID NO: 55931 - DNA, 20 bp, Artificial Sequence
  Description of Artificial Sequence: Synthetic oligonucleotide
  Target: LAMA2; (-) strand; PAM type: NRG; PAM sequence: CAG
ctgtactctgcagttcactt

SEQ ID NO: 55932 - DNA, 20 bp, Artificial Sequence
  Description of Artificial Sequence: Synthetic oligonucleotide
  Target: LAMA2; (-) strand; PAM type: NRG; PAM sequence: CAG
atgccagtgactgtactctg

SEQ ID NO: 55933 - DNA, 20 bp, Artificial Sequence
  Description of Artificial Sequence: Synthetic oligonucleotide
  Target: LAMA2; (-) strand; PAM type: NRG; PAM sequence: CAG
gcatctagactcatcaatgc

SEQ ID NO: 55934 - DNA, 20 bp, Artificial Sequence
  Description of Artificial Sequence: Synthetic oligonucleotide
  Target: LAMA2; (-) strand; PAM type: NRG; PAM sequence: TAG
atgatctttctcacagcatc

SEQ ID NO: 55935 - DNA, 20 bp, Artificial Sequence
  Description of Artificial Sequence: Synthetic oligonucleotide
  Target: LAMA2; (-) strand; PAM type: NRG; PAM sequence: CAG
tgcgctaatgatctttctca

SEQ ID NO: 55936 - DNA, 20 bp, Artificial Sequence
  Description of Artificial Sequence: Synthetic oligonucleotide
  Target: LAMA2; (-) strand; PAM type: NRG; PAM sequence: TAG
ttaaaaggtctccagctact

SEQ ID NO: 55937 - DNA, 20 bp, Artificial Sequence
  Description of Artificial Sequence: Synthetic oligonucleotide
  Target: LAMA2; (-) strand; PAM type: NRG; PAM sequence: CAG
ttgaaagtttaaaaggtctc

SEQ ID NO: 55938 - DNA, 20 bp, Artificial Sequence
  Description of Artificial Sequence: Synthetic oligonucleotide
  Target: LAMA2; (-) strand; PAM type: NRG; PAM sequence: AGG
atggaagttgaaagtttaaa

SEQ ID NO: 55939 - DNA, 20 bp, Artificial Sequence
  Description of Artificial Sequence: Synthetic oligonucleotide
  Target: LAMA2; (-) strand; PAM type: NRG; PAM sequence: AAG
tatggaagttgaaagtttaa

SEQ ID NO: 55940 - DNA, 20 bp, Artificial Sequence
  Description of Artificial Sequence: Synthetic oligonucleotide
  Target: LAMA2; (-) strand; PAM type: NRG; PAM sequence: AAG
actaaaaatatggaagttga

SEQ ID NO: 55941 - DNA, 20 bp, Artificial Sequence
  Description of Artificial Sequence: Synthetic oligonucleotide
  Target: LAMA2; (-) strand; PAM type: NRG; PAM sequence: AAG
aaaaattactaaaaatatgg

SEQ ID NO: 55942 - DNA, 20 bp, Artificial Sequence
  Description of Artificial Sequence: Synthetic oligonucleotide
  Target: LAMA2; (-) strand; PAM type: NRG; PAM sequence: TGG
ttgaaaaattactaaaaata

SEQ ID NO: 55943 - DNA, 20 bp, Artificial Sequence
  Description of Artificial Sequence: Synthetic oligonucleotide
  Target: LAMA2; (-) strand; PAM type: NRG; PAM sequence: GGG
atgatggggtgtgttttcat

SEQ ID NO: 55944 - DNA, 20 bp, Artificial Sequence
  Description of Artificial Sequence: Synthetic oligonucleotide
  Target: LAMA2; (-) strand; PAM type: NRG; PAM sequence: TGG
aatgatggggtgtgttttca

SEQ ID NO: 55945 - DNA, 20 bp, Artificial Sequence
  Description of Artificial Sequence: Synthetic oligonucleotide
  Target: LAMA2; (-) strand; PAM type: NRG; PAM sequence: GGG
gattggttatatcaatgatg

SEQ ID NO: 55946 - DNA, 20 bp, Artificial Sequence
  Description of Artificial Sequence: Synthetic oligonucleotide
  Target: LAMA2; (-) strand; PAM type: NRG; PAM sequence: GGG
tgattggttatatcaatgat

SEQ ID NO: 55947 - DNA, 20 bp, Artificial Sequence
  Description of Artificial Sequence: Synthetic oligonucleotide
  Target: LAMA2; (-) strand; PAM type: NRG; PAM sequence: TGG
atgattggttatatcaatga

SEQ ID NO: 55948 - DNA, 20 bp, Artificial Sequence
  Description of Artificial Sequence: Synthetic oligonucleotide
  Target: LAMA2; (-) strand; PAM type: NRG; PAM sequence: TGG
gaataaataattataatgat

SEQ ID NO: 55949 - DNA, 20 bp, Artificial Sequence
  Description of Artificial Sequence: Synthetic oligonucleotide
  Target: LAMA2; (-) strand; PAM type: NRG; PAM sequence: CAG
catttagagacaaagtacac

SEQ ID NO: 55950 - DNA, 20 bp, Artificial Sequence
  Description of Artificial Sequence: Synthetic oligonucleotide
  Target: LAMA2; (-) strand; PAM type: NRG; PAM sequence: AAG
aaatgtgtcatttagagaca

SEQ ID NO: 55951 - DNA, 20 bp, Artificial Sequence
  Description of Artificial Sequence: Synthetic oligonucleotide
  Target: LAMA2; (-) strand; PAM type: NRG; PAM sequence: GAG
tcatagaaatgtgtcattta

SEQ ID NO: 55952 - DNA, 20 bp, Artificial Sequence
  Description of Artificial Sequence: Synthetic oligonucleotide
  Target: LAMA2; (-) strand; PAM type: NRG; PAM sequence: TAG
tttcatagaaatgtgtcatt

SEQ ID NO: 55953 - DNA, 20 bp, Artificial Sequence
  Description of Artificial Sequence: Synthetic oligonucleotide
  Target: LAMA2; (-) strand; PAM type: NRG; PAM sequence: TAG
tgaaactgatctttttttca

SEQ ID NO: 55954 - DNA, 20 bp, Artificial Sequence
  Description of Artificial Sequence: Synthetic oligonucleotide
  Target: LAMA2; (-) strand; PAM type: NRG; PAM sequence: TAG
cagccagaagcctgaggagt

SEQ ID NO: 55955 - DNA, 20 bp, Artificial Sequence
  Description of Artificial Sequence: Synthetic oligonucleotide
  Target: LAMA2; (-) strand; PAM type: NRG; PAM sequence: GAG
gtcacagccagaagcctgag

SEQ ID NO: 55956 - DNA, 20 bp, Artificial Sequence
  Description of Artificial Sequence: Synthetic oligonucleotide
  Target: LAMA2; (-) strand; PAM type: NRG; PAM sequence: AGG
aagtcacagccagaagcctg

SEQ ID NO: 55957 - DNA, 20 bp, Artificial Sequence
  Description of Artificial Sequence: Synthetic oligonucleotide
  Target: LAMA2; (-) strand; PAM type: NRG; PAM sequence: GAG
aaagtcacagccagaagcct

SEQ ID NO: 55958 - DNA, 20 bp, Artificial Sequence
  Description of Artificial Sequence: Synthetic oligonucleotide
  Target: LAMA2; (-) strand; PAM type: NRG; PAM sequence: AAG
ttatgaaaagtcacagccag

SEQ ID NO: 55959 - DNA, 20 bp, Artificial Sequence
  Description of Artificial Sequence: Synthetic oligonucleotide
  Target: LAMA2; (-) strand; PAM type: NRG; PAM sequence: CAG
catttatgaaaagtcacagc

SEQ ID NO: 55960 - DNA, 20 bp, Artificial Sequence
  Description of Artificial Sequence: Synthetic oligonucleotide
  Target: LAMA2; (-) strand; PAM type: NRG; PAM sequence: CAG
cagacatttatgaaaagtca

SEQ ID NO: 55961 - DNA, 20 bp, Artificial Sequence
  Description of Artificial Sequence: Synthetic oligonucleotide
  Target: LAMA2; (-) strand; PAM type: NRG; PAM sequence: AAG
ttcatacagacatttatgaa

SEQ ID NO: 55962 - DNA, 20 bp, Artificial Sequence
  Description of Artificial Sequence: Synthetic oligonucleotide
  Target: LAMA2; (-) strand; PAM type: NRG; PAM sequence: CAG
agttatagcttacgttcata

SEQ ID NO: 55963 - DNA, 20 bp, Artificial Sequence
  Description of Artificial Sequence: Synthetic oligonucleotide
  Target: LAMA2; (-) strand; PAM type: NRG; PAM sequence: TAG
acaacaatgaagcaaagtta

SEQ ID NO: 55964 - DNA, 20 bp, Artificial Sequence
  Description of Artificial Sequence: Synthetic oligonucleotide
  Target: LAMA2; (-) strand; PAM type: NRG; PAM sequence: AAG
atctaaacaacaatgaagca

SEQ ID NO: 55965 - DNA, 20 bp, Artificial Sequence
  Description of Artificial Sequence: Synthetic oligonucleotide
  Target: LAMA2; (-) strand; PAM type: NRG; PAM sequence: AAG
atgtcatctaaacaacaatg

SEQ ID NO: 55966 - DNA, 20 bp, Artificial Sequence
  Description of Artificial Sequence: Synthetic oligonucleotide
  Target: LAMA2; (-) strand; PAM type: NRG; PAM sequence: AAG
ttaaaatgcccatagtcagt

SEQ ID NO: 55967 - DNA, 20 bp, Artificial Sequence
  Description of Artificial Sequence: Synthetic oligonucleotide
  Target: LAMA2; (-) strand; PAM type: NRG; PAM sequence: CAG
tgtattaaaatgcccatagt

SEQ ID NO: 55968 - DNA, 20 bp, Artificial Sequence
  Description of Artificial Sequence: Synthetic oligonucleotide
  Target: LAMA2; (-) strand; PAM type: NRG; PAM sequence: TAG
atcttgtattaaaatgccca

SEQ ID NO: 55969 - DNA, 20 bp, Artificial Sequence
  Description of Artificial Sequence: Synthetic oligonucleotide
  Target: LAMA2; (-) strand; PAM type: NRG; PAM sequence: TGG
acaagtacacacttttaaaa

SEQ ID NO: 55970 - DNA, 20 bp, Artificial Sequence
  Description of Artificial Sequence: Synthetic oligonucleotide
  Target: LAMA2; (-) strand; PAM type: NRG; PAM sequence: AAG
actgtgttgcaataagctac

SEQ ID NO: 55971 - DNA, 20 bp, Artificial Sequence
  Description of Artificial Sequence: Synthetic oligonucleotide
  Target: LAMA2; (-) strand; PAM type: NRG; PAM sequence: AAG
tttggtcactgtgttgcaat

SEQ ID NO: 55972 - DNA, 20 bp, Artificial Sequence
  Description of Artificial Sequence: Synthetic oligonucleotide
  Target: LAMA2; (-) strand; PAM type: NRG; PAM sequence: TGG
aagtaagaatatggtgtctt

SEQ ID NO: 55973 - DNA, 20 bp, Artificial Sequence
  Description of Artificial Sequence: Synthetic oligonucleotide
  Target: LAMA2; (-) strand; PAM type: NRG; PAM sequence: TGG
tgattccagaagtaagaata

SEQ ID NO: 55974 - DNA, 20 bp, Artificial Sequence
  Description of Artificial Sequence: Synthetic oligonucleotide
  Target: LAMA2; (-) strand; PAM type: NRG; PAM sequence: AAG
cacaaattgattccagaagt

SEQ ID NO: 55975 - DNA, 20 bp, Artificial Sequence
  Description of Artificial Sequence: Synthetic oligonucleotide
  Target: LAMA2; (-) strand; PAM type: NRG; PAM sequence: AAG
tgcccacaaattgattccag

SEQ ID NO: 55976 - DNA, 20 bp, Artificial Sequence
  Description of Artificial Sequence: Synthetic oligonucleotide
  Target: LAMA2; (-) strand; PAM type: NRG; PAM sequence: CAG
caatgcccacaaattgattc

SEQ ID NO: 55977 - DNA, 20 bp, Artificial Sequence
  Description of Artificial Sequence: Synthetic oligonucleotide
  Target: LAMA2; (-) strand; PAM type: NRG; PAM sequence: AAG
gcttgactagtgcagttgtg

SEQ ID NO: 55978 - DNA, 20 bp, Artificial Sequence
  Description of Artificial Sequence: Synthetic oligonucleotide
  Target: LAMA2; (-) strand; PAM type: NRG; PAM sequence: CAG
ctctgattgcttgactagtg

SEQ ID NO: 55979 - DNA, 20 bp, Artificial Sequence
  Description of Artificial Sequence: Synthetic oligonucleotide
  Target: LAMA2; (-) strand; PAM type: NRG; PAM sequence: TAG
cttagctctgattgcttgac

SEQ ID NO: 55980 - DNA, 20 bp, Artificial Sequence
  Description of Artificial Sequence: Synthetic oligonucleotide
  Target: LAMA2; (-) strand; PAM type: NRG; PAM sequence: TAG
tctaatctgctttgaaagct

SEQ ID NO: 55981 - DNA, 20 bp, Artificial Sequence
  Description of Artificial Sequence: Synthetic oligonucleotide
  Target: LAMA2; (-) strand; PAM type: NRG; PAM sequence: AAG
cttcctctaatctgctttga

SEQ ID NO: 55982 - DNA, 20 bp, Artificial Sequence
  Description of Artificial Sequence: Synthetic oligonucleotide
  Target: LAMA2; (-) strand; PAM type: NRG; PAM sequence: AAG
gactatattttattgctaat

SEQ ID NO: 55983 - DNA, 20 bp, Artificial Sequence
  Description of Artificial Sequence: Synthetic oligonucleotide
  Target: LAMA2; (-) strand; PAM type: NRG; PAM sequence: TGG
cataaaaatatgattatgcc

SEQ ID NO: 55984 - DNA, 20 bp, Artificial Sequence
  Description of Artificial Sequence: Synthetic oligonucleotide
  Target: LAMA2; (-) strand; PAM type: NRG; PAM sequence: AGG
tttagattctccatgtgctg

SEQ ID NO: 55985 - DNA, 20 bp, Artificial Sequence
  Description of Artificial Sequence: Synthetic oligonucleotide
  Target: LAMA2; (-) strand; PAM type: NRG; PAM sequence: GAG
atttagattctccatgtgct

SEQ ID NO: 55986 - DNA, 20 bp, Artificial Sequence
  Description of Artificial Sequence: Synthetic oligonucleotide
  Target: LAMA2; (-) strand; PAM type: NRG; PAM sequence: TAG
aattataaactcatttaatt

SEQ ID NO: 55987 - DNA, 20 bp, Artificial Sequence
  Description of Artificial Sequence: Synthetic oligonucleotide
  Target: LAMA2; (-) strand; PAM type: NRG; PAM sequence: CAG
aatatagagcgtttccataa

SEQ ID NO: 55988 - DNA, 20 bp, Artificial Sequence
  Description of Artificial Sequence: Synthetic oligonucleotide
  Target: LAMA2; (-) strand; PAM type: NRG; PAM sequence: GAG
gctataatgtaaaaaatata

SEQ ID NO: 55989 - DNA, 20 bp, Artificial Sequence
  Description of Artificial Sequence: Synthetic oligonucleotide
  Target: LAMA2; (-) strand; PAM type: NRG; PAM sequence: TAG
tggctataatgtaaaaaata

SEQ ID NO: 55990 - DNA, 20 bp, Artificial Sequence
  Description of Artificial Sequence: Synthetic oligonucleotide
  Target: LAMA2; (-) strand; PAM type: NRG; PAM sequence: TGG
tcaaaaggtaactaagactt

SEQ ID NO: 55991 - DNA, 20 bp, Artificial Sequence
  Description of Artificial Sequence: Synthetic oligonucleotide
  Target: LAMA2; (-) strand; PAM type: NRG; PAM sequence: AAG
gataccctcaaaaggtaact

SEQ ID NO: 55992 - DNA, 20 bp, Artificial Sequence
  Description of Artificial Sequence: Synthetic oligonucleotide
  Target: LAMA2; (-) strand; PAM type: NRG; PAM sequence: AGG
cacctacagataccctcaaa

SEQ ID NO: 55993 - DNA, 20 bp, Artificial Sequence
  Description of Artificial Sequence: Synthetic oligonucleotide
  Target: LAMA2; (-) strand; PAM type: NRG; PAM sequence: AAG
gcacctacagataccctcaa

SEQ ID NO: 55994 - DNA, 20 bp, Artificial Sequence
  Description of Artificial Sequence: Synthetic oligonucleotide
  Target: LAMA2; (-) strand; PAM type: NRG; PAM sequence: CAG
gctgaatttaatggcaccta

SEQ ID NO: 55995 - DNA, 20 bp, Artificial Sequence
  Description of Artificial Sequence: Synthetic oligonucleotide
  Target: LAMA2; (-) strand; PAM type: NRG; PAM sequence: TGG
aagaggatagctgaatttaa

SEQ ID NO: 55996 - DNA, 20 bp, Artificial Sequence
  Description of Artificial Sequence: Synthetic oligonucleotide
  Target: LAMA2; (-) strand; PAM type: NRG; PAM sequence: TAG
atacccacagcagaagagga

SEQ ID NO: 55997 - DNA, 20 bp, Artificial Sequence
  Description of Artificial Sequence: Synthetic oligonucleotide
  Target: LAMA2; (-) strand; PAM type: NRG; PAM sequence: AGG
gcttatacccacagcagaag

SEQ ID NO: 55998 - DNA, 20 bp, Artificial Sequence
  Description of Artificial Sequence: Synthetic oligonucleotide
  Target: LAMA2; (-) strand; PAM type: NRG; PAM sequence: GAG
tgcttatacccacagcagaa

SEQ ID NO: 55999 - DNA, 20 bp, Artificial Sequence
  Description of Artificial Sequence: Synthetic oligonucleotide
  Target: LAMA2; (-) strand; PAM type: NRG; PAM sequence: AAG
tgtgcttatacccacagcag

SEQ ID NO: 56000 - DNA, 20 bp, Artificial Sequence
  Description of Artificial Sequence: Synthetic oligonucleotide
  Target: LAMA2; (-) strand; PAM type: NRG; PAM sequence: CAG
ccatgtgcttatacccacag

SEQ ID NO: 56001 - DNA, 20 bp, Artificial Sequence
  Description of Artificial Sequence: Synthetic oligonucleotide
  Target: LAMA2; (-) strand; PAM type: NRG; PAM sequence: CAG
ttgccatgtgcttataccca

SEQ ID NO: 56002 - DNA, 20 bp, Artificial Sequence
  Description of Artificial Sequence: Synthetic oligonucleotide
  Target: LAMA2; (-) strand; PAM type: NRG; PAM sequence: GGG
tatttttctaatttttgcct

SEQ ID NO: 56003 - DNA, 20 bp, Artificial Sequence
  Description of Artificial Sequence: Synthetic oligonucleotide
  Target: LAMA2; (-) strand; PAM type: NRG; PAM sequence: TGG
ttatttttctaatttttgcc

SEQ ID NO: 56004 - DNA, 20 bp, Artificial Sequence
  Description of Artificial Sequence: Synthetic oligonucleotide
  Target: LAMA2; (-) strand; PAM type: NRG; PAM sequence: TAG
aaaaaaatggataagggagt

SEQ ID NO: 56005 - DNA, 20 bp, Artificial Sequence
  Description of Artificial Sequence: Synthetic oligonucleotide
  Target: LAMA2; (-) strand; PAM type: NRG; PAM sequence: GAG
gaggaaaaaaatggataagg

SEQ ID NO: 56006 - DNA, 20 bp, Artificial Sequence
  Description of Artificial Sequence: Synthetic oligonucleotide
  Target: LAMA2; (-) strand; PAM type: NRG; PAM sequence: GGG
ttgaggaaaaaaatggataa

SEQ ID NO: 56007 - DNA, 20 bp, Artificial Sequence
  Description of Artificial Sequence: Synthetic oligonucleotide
  Target: LAMA2; (-) strand; PAM type: NRG; PAM sequence: AGG
cttgaggaaaaaaatggata

SEQ ID NO: 56008 - DNA, 20 bp, Artificial Sequence
  Description of Artificial Sequence: Synthetic oligonucleotide
  Target: LAMA2; (-) strand; PAM type: NRG; PAM sequence: AAG
ccttgaggaaaaaaatggat

SEQ ID NO: 56009 - DNA, 20 bp, Artificial Sequence
  Description of Artificial Sequence: Synthetic oligonucleotide
  Target: LAMA2; (-) strand; PAM type: NRG; PAM sequence: TGG
aataaccttgaggaaaaaaa

SEQ ID NO: 56010 - DNA, 20 bp, Artificial Sequence
  Description of Artificial Sequence: Synthetic oligonucleotide
  Target: LAMA2; (-) strand; PAM type: NRG; PAM sequence: AGG
aatttctgttaataaccttg

SEQ ID NO: 56011 - DNA, 20 bp, Artificial Sequence
  Description of Artificial Sequence: Synthetic oligonucleotide
  Target: LAMA2; (-) strand; PAM type: NRG; PAM sequence: GAG
taatttctgttaataacctt

SEQ ID NO: 56012 - DNA, 20 bp, Artificial Sequence
  Description of Artificial Sequence: Synthetic oligonucleotide
  Target: LAMA2; (-) strand; PAM type: NRG; PAM sequence: TGG
ttatttatggacatttatgt

SEQ ID NO: 56013 - DNA, 20 bp, Artificial Sequence
  Description of Artificial Sequence: Synthetic oligonucleotide
  Target: LAMA2; (-) strand; PAM type: NRG; PAM sequence: TGG
tagattttcaaaattattta

SEQ ID NO: 56014 - DNA, 20 bp, Artificial Sequence
  Description of Artificial Sequence: Synthetic oligonucleotide
  Target: LAMA2; (-) strand; PAM type: NRG; PAM sequence: TAG
gtagaaatgcaatttctttc

SEQ ID NO: 56015 - DNA, 20 bp, Artificial Sequence
  Description of Artificial Sequence: Synthetic oligonucleotide
  Target: LAMA2; (-) strand; PAM type: NRG; PAM sequence: TAG
atagaaagctatttttaaag

SEQ ID NO: 56016 - DNA, 20 bp, Artificial Sequence
  Description of Artificial Sequence: Synthetic oligonucleotide
  Target: LAMA2; (-) strand; PAM type: NRG; PAM sequence: AAG
gccatagaaagctattttta

SEQ ID NO: 56017 - DNA, 20 bp, Artificial Sequence
  Description of Artificial Sequence: Synthetic oligonucleotide
  Target: LAMA2; (-) strand; PAM type: NRG; PAM sequence: AAG
agcaaaccttcagccataga

SEQ ID NO: 56018 - DNA, 20 bp, Artificial Sequence
  Description of Artificial Sequence: Synthetic oligonucleotide
  Target: LAMA2; (-) strand; PAM type: NRG; PAM sequence: TAG
ctgaagcaaaccttcagcca

SEQ ID NO: 56019 - DNA, 20 bp, Artificial Sequence
  Description of Artificial Sequence: Synthetic oligonucleotide
  Target: LAMA2; (-) strand; PAM type: NRG; PAM sequence: CAG
aaacaactgaagcaaacctt

SEQ ID NO: 56020 - DNA, 20 bp, Artificial Sequence
  Description of Artificial Sequence: Synthetic oligonucleotide
  Target: LAMA2; (-) strand; PAM type: NRG; PAM sequence: AAG
ttgtgacagtaaaacaactg

SEQ ID NO: 56021 - DNA, 20 bp, Artificial Sequence
  Description of Artificial Sequence: Synthetic oligonucleotide
  Target: LAMA2; (-) strand; PAM type: NRG; PAM sequence: CAG
ctggtttttgggagttgtga

SEQ ID NO: 56022 - DNA, 20 bp, Artificial Sequence
  Description of Artificial Sequence: Synthetic oligonucleotide
  Target: LAMA2; (-) strand; PAM type: NRG; PAM sequence: GAG
cagaaccagctggtttttgg

SEQ ID NO: 56023 - DNA, 20 bp, Artificial Sequence
  Description of Artificial Sequence: Synthetic oligonucleotide
  Target: LAMA2; (-) strand; PAM type: NRG; PAM sequence: GGG
cccagaaccagctggttttt

SEQ ID NO: 56024 - DNA, 20 bp, Artificial Sequence
  Description of Artificial Sequence: Synthetic oligonucleotide
  Target: LAMA2; (-) strand; PAM type: NRG; PAM sequence: TGG
tcccagaaccagctggtttt

SEQ ID NO: 56025 - DNA, 20 bp, Artificial Sequence
  Description of Artificial Sequence: Synthetic oligonucleotide
  Target: LAMA2; (-) strand; PAM type: NRG; PAM sequence: TGG
tacgacatcccagaaccagc

SEQ ID NO: 56026 - DNA, 20 bp, Artificial Sequence
  Description of Artificial Sequence: Synthetic oligonucleotide
  Target: LAMA2; (-) strand; PAM type: NRG; PAM sequence: CAG
ttgttacgacatcccagaac

SEQ ID NO: 56027 - DNA, 20 bp, Artificial Sequence
  Description of Artificial Sequence: Synthetic oligonucleotide
  Target: LAMA2; (-) strand; PAM type: NRG; PAM sequence: CAG
atcaaattgttacgacatcc

SEQ ID NO: 56028 - DNA, 20 bp, Artificial Sequence
  Description of Artificial Sequence: Synthetic oligonucleotide
  Target: LAMA2; (-) strand; PAM type: NRG; PAM sequence: AAG
gagcacaaaccattggtttg

SEQ ID NO: 56029 - DNA, 20 bp, Artificial Sequence
  Description of Artificial Sequence: Synthetic oligonucleotide
  Target: LAMA2; (-) strand; PAM type: NRG; PAM sequence: TGG
agccaatgagcacaaaccat

SEQ ID NO: 56030 - DNA, 20 bp, Artificial Sequence
  Description of Artificial Sequence: Synthetic oligonucleotide
  Target: LAMA2; (-) strand; PAM type: NRG; PAM sequence: GAG
gtttgcaccagggagccaat

SEQ ID NO: 56031 - DNA, 20 bp, Artificial Sequence
  Description of Artificial Sequence: Synthetic oligonucleotide
  Target: LAMA2; (-) strand; PAM type: NRG; PAM sequence: GAG
atctccctgtttgcaccagg

SEQ ID NO: 56032 - DNA, 20 bp, Artificial Sequence
  Description of Artificial Sequence: Synthetic oligonucleotide
  Target: LAMA2; (-) strand; PAM type: NRG; PAM sequence: GGG
ttatctccctgtttgcacca

SEQ ID NO: 56033 - DNA, 20 bp, Artificial Sequence
  Description of Artificial Sequence: Synthetic oligonucleotide
  Target: LAMA2; (-) strand; PAM type: NRG; PAM sequence: AGG
tttatctccctgtttgcacc

SEQ ID NO: 56034 - DNA, 20 bp, Artificial Sequence
  Description of Artificial Sequence: Synthetic oligonucleotide
  Target: LAMA2; (-) strand; PAM type: NRG; PAM sequence: CAG
atttatctccctgtttgcac

SEQ ID NO: 56035 - DNA, 20 bp, Artificial Sequence
  Description of Artificial Sequence: Synthetic oligonucleotide
  Target: LAMA2; (-) strand; PAM type: NRG; PAM sequence: TAG
acattcacctactatttaag

SEQ ID NO: 56036 - DNA, 20 bp, Artificial Sequence
  Description of Artificial Sequence: Synthetic oligonucleotide
  Target: LAMA2; (-) strand; PAM type: NRG; PAM sequence: AAG
attacattcacctactattt

SEQ ID NO: 56037 - DNA, 20 bp, Artificial Sequence
  Description of Artificial Sequence: Synthetic oligonucleotide
  Target: LAMA2; (-) strand; PAM type: NRG; PAM sequence: AAG
aaacatgcagacattttcta

SEQ ID NO: 56038 - DNA, 20 bp, Artificial Sequence
  Description of Artificial Sequence: Synthetic oligonucleotide
  Target: LAMA2; (-) strand; PAM type: NRG; PAM sequence: CAG
tcacttctctaataaacatg

SEQ ID NO: 56039 - DNA, 20 bp, Artificial Sequence
  Description of Artificial Sequence: Synthetic oligonucleotide
  Target: LAMA2; (-) strand; PAM type: NRG; PAM sequence: CAG
tacattttgttcgctgattt

SEQ ID NO: 56040 - DNA, 20 bp, Artificial Sequence
  Description of Artificial Sequence: Synthetic oligonucleotide
  Target: LAMA2; (-) strand; PAM type: NRG; PAM sequence: TAG
gagcccttataagtatttct

SEQ ID NO: 56041 - DNA, 20 bp, Artificial Sequence
  Description of Artificial Sequence: Synthetic oligonucleotide
  Target: LAMA2; (-) strand; PAM type: NRG; PAM sequence: AAG
taatacaagtgagcccttat

SEQ ID NO: 56042 - DNA, 20 bp, Artificial Sequence
  Description of Artificial Sequence: Synthetic oligonucleotide
  Target: LAMA2; (-) strand; PAM type: NRG; PAM sequence: GAG
cacagttaaataatacaagt

SEQ ID NO: 56043 - DNA, 20 bp, Artificial Sequence
  Description of Artificial Sequence: Synthetic oligonucleotide
  Target: LAMA2; (-) strand; PAM type: NRG; PAM sequence: AAG
attacacagttaaataatac

SEQ ID NO: 56044 - DNA, 20 bp, Artificial Sequence
  Description of Artificial Sequence: Synthetic oligonucleotide
  Target: LAMA2; (-) strand; PAM type: NRG; PAM sequence: CAG
atatgagatagaggattaca

SEQ ID NO: 56045 - DNA, 20 bp, Artificial Sequence
  Description of Artificial Sequence: Synthetic oligonucleotide
  Target: LAMA2; (-) strand; PAM type: NRG; PAM sequence: AGG
attacatatatatgagatag

SEQ ID NO: 56046 - DNA, 20 bp, Artificial Sequence
  Description of Artificial Sequence: Synthetic oligonucleotide
  Target: LAMA2; (-) strand; PAM type: NRG; PAM sequence: GAG
tattacatatatatgagata

SEQ ID NO: 56047 - DNA, 20 bp, Artificial Sequence
  Description of Artificial Sequence: Synthetic oligonucleotide
  Target: LAMA2; (-) strand; PAM type: NRG; PAM sequence: TAG
agtattacatatatatgaga

SEQ ID NO: 56048 - DNA, 20 bp, Artificial Sequence
  Description of Artificial Sequence: Synthetic oligonucleotide
  Target: LAMA2; (-) strand; PAM type: NRG; PAM sequence: GAG
agaaagtattacatatatat

SEQ ID NO: 56049 - DNA, 20 bp, Artificial Sequence
  Description of Artificial Sequence: Synthetic oligonucleotide
  Target: LAMA2; (-) strand; PAM type: NRG; PAM sequence: AAG
agctataatgaacttgaaga

SEQ ID NO: 56050 - DNA, 20 bp, Artificial Sequence
  Description of Artificial Sequence: Synthetic oligonucleotide
  Target: LAMA2; (-) strand; PAM type: NRG; PAM sequence: AAG
cgggagctataatgaacttg

SEQ ID NO: 56051 - DNA, 20 bp, Artificial Sequence
  Description of Artificial Sequence: Synthetic oligonucleotide
  Target: LAMA2; (-) strand; PAM type: NRG; PAM sequence: GAG
ctaggatgtactgggcccgg

SEQ ID NO: 56052 - DNA, 20 bp, Artificial Sequence
  Description of Artificial Sequence: Synthetic oligonucleotide
  Target: LAMA2; (-) strand; PAM type: NRG; PAM sequence: GGG
gactaggatgtactgggccc

SEQ ID NO: 56053 - DNA, 20 bp, Artificial Sequence
  Description of Artificial Sequence: Synthetic oligonucleotide
  Target: LAMA2; (-) strand; PAM type: NRG; PAM sequence: CGG
ggactaggatgtactgggcc

SEQ ID NO: 56054 - DNA, 20 bp, Artificial Sequence
  Description of Artificial Sequence: Synthetic oligonucleotide
  Target: LAMA2; (-) strand; PAM type: NRG; PAM sequence: GGG
gaactggactaggatgtact

SEQ ID NO: 56055 - DNA, 20 bp, Artificial Sequence
  Description of Artificial Sequence: Synthetic oligonucleotide
  Target: LAMA2; (-) strand; PAM type: NRG; PAM sequence: TGG
ggaactggactaggatgtac

SEQ ID NO: 56056 - DNA, 20 bp, Artificial Sequence
  Description of Artificial Sequence: Synthetic oligonucleotide
  Target: LAMA2; (-) strand; PAM type: NRG; PAM sequence: AGG
gacatggttggaactggact

SEQ ID NO: 56057 - DNA, 20 bp, Artificial Sequence
  Description of Artificial Sequence: Synthetic oligonucleotide
  Target: LAMA2; (-) strand; PAM type: NRG; PAM sequence: TAG
agacatggttggaactggac

SEQ ID NO: 56058 - DNA, 20 bp, Artificial Sequence
  Description of Artificial Sequence: Synthetic oligonucleotide
  Target: LAMA2; (-) strand; PAM type: NRG; PAM sequence: TGG
aaattagacatggttggaac

SEQ ID NO: 56059 - DNA, 20 bp, Artificial Sequence
  Description of Artificial Sequence: Synthetic oligonucleotide
  Target: LAMA2; (-) strand; PAM type: NRG; PAM sequence: TGG
attttaaaattagacatggt

SEQ ID NO: 56060 - DNA, 20 bp, Artificial Sequence
  Description of Artificial Sequence: Synthetic oligonucleotide
  Target: LAMA2; (-) strand; PAM type: NRG; PAM sequence: TGG
agctattttaaaattagaca

SEQ ID NO: 56061 - DNA, 20 bp, Artificial Sequence
  Description of Artificial Sequence: Synthetic oligonucleotide
  Target: LAMA2; (-) strand; PAM type: NRG; PAM sequence: TAG
gagcatagctattttaaaat

SEQ ID NO: 56062 - DNA, 20 bp, Artificial Sequence
  Description of Artificial Sequence: Synthetic oligonucleotide
  Target: LAMA2; (-) strand; PAM type: NRG; PAM sequence: TAG
atcttcgtttgaagtgagca

SEQ ID NO: 56063 - DNA, 20 bp, Artificial Sequence
  Description of Artificial Sequence: Synthetic oligonucleotide
  Target: LAMA2; (-) strand; PAM type: NRG; PAM sequence: GAG
gcaacatcttcgtttgaagt

SEQ ID NO: 56064 - DNA, 20 bp, Artificial Sequence
  Description of Artificial Sequence: Synthetic oligonucleotide
  Target: LAMA2; (-) strand; PAM type: NRG; PAM sequence: AAG
tatagcaacatcttcgtttg

SEQ ID NO: 56065 - DNA, 20 bp, Artificial Sequence
  Description of Artificial Sequence: Synthetic oligonucleotide
  Target: LAMA2; (-) strand; PAM type: NRG; PAM sequence: TAG
tataaaataaaataaagcta

SEQ ID NO: 56066 - DNA, 20 bp, Artificial Sequence
  Description of Artificial Sequence: Synthetic oligonucleotide
  Target: LAMA2; (-) strand; PAM type: NRG; PAM sequence: AAG
gaagcctataaaataaaata

SEQ ID NO: 56067 - DNA, 20 bp, Artificial Sequence
  Description of Artificial Sequence: Synthetic oligonucleotide
  Target: LAMA2; (-) strand; PAM type: NRG; PAM sequence: AAG
gtgatacaactttaaaattg

SEQ ID NO: 56068 - DNA, 20 bp, Artificial Sequence
  Description of Artificial Sequence: Synthetic oligonucleotide
  Target: LAMA2; (-) strand; PAM type: NRG; PAM sequence: AGG
aagctgtctttgttatctat

SEQ ID NO: 56069 - DNA, 20 bp, Artificial Sequence
  Description of Artificial Sequence: Synthetic oligonucleotide
  Target: LAMA2; (-) strand; PAM type: NRG; PAM sequence: TAG
aaagctgtctttgttatcta

SEQ ID NO: 56070 - DNA, 20 bp, Artificial Sequence
  Description of Artificial Sequence: Synthetic oligonucleotide
  Target: LAMA2; (-) strand; PAM type: NRG; PAM sequence: AAG
ctaaattgaggtgtccatga

SEQ ID NO: 56071 - DNA, 20 bp, Artificial Sequence
  Description of Artificial Sequence: Synthetic oligonucleotide
  Target: LAMA2; (-) strand; PAM type: NRG; PAM sequence: AGG
tataagactcttctaaattg

SEQ ID NO: 56072 - DNA, 20 bp, Artificial Sequence
  Description of Artificial Sequence: Synthetic oligonucleotide
  Target: LAMA2; (-) strand; PAM type: NRG; PAM sequence: GAG
ctataagactcttctaaatt

SEQ ID NO: 56073 - DNA, 20 bp, Artificial Sequence
  Description of Artificial Sequence: Synthetic oligonucleotide
  Target: LAMA2; (-) strand; PAM type: NRG; PAM sequence: AAG
ttatctcacaaagtgcctat

SEQ ID NO: 56074 - DNA, 20 bp, Artificial Sequence
  Description of Artificial Sequence: Synthetic oligonucleotide
  Target: LAMA2; (-) strand; PAM type: NRG; PAM sequence: AAG
cacttacagtttatctcaca

SEQ ID NO: 56075 - DNA, 20 bp, Artificial Sequence
  Description of Artificial Sequence: Synthetic oligonucleotide
  Target: LAMA2; (-) strand; PAM type: NRG; PAM sequence: CAG
ctgattagcacatacactta

SEQ ID NO: 56076 - DNA, 20 bp, Artificial Sequence
  Description of Artificial Sequence: Synthetic oligonucleotide
  Target: LAMA2; (-) strand; PAM type: NRG; PAM sequence: TAG
tagtaaaagaattatctgat

SEQ ID NO: 56077 - DNA, 20 bp, Artificial Sequence
  Description of Artificial Sequence: Synthetic oligonucleotide
  Target: LAMA2; (-) strand; PAM type: NRG; PAM sequence: AAG
tcacctaaagtctctagtaa

SEQ ID NO: 56078 - DNA, 20 bp, Artificial Sequence
  Description of Artificial Sequence: Synthetic oligonucleotide
  Target: LAMA2; (-) strand; PAM type: NRG; PAM sequence: TAG
ctatcttcacctaaagtctc

SEQ ID NO: 56079 - DNA, 20 bp, Artificial Sequence
  Description of Artificial Sequence: Synthetic oligonucleotide
  Target: LAMA2; (-) strand; PAM type: NRG; PAM sequence: AAG
agatttgctatcttcaccta

SEQ ID NO: 56080 - DNA, 20 bp, Artificial Sequence
  Description of Artificial Sequence: Synthetic oligonucleotide
  Target: LAMA2; (-) strand; PAM type: NRG; PAM sequence: AAG
taattatcagtctgttttag

SEQ ID NO: 56081 - DNA, 20 bp, Artificial Sequence
  Description of Artificial Sequence: Synthetic oligonucleotide
  Target: LAMA2; (-) strand; PAM type: NRG; PAM sequence: TAG
gtttaattatcagtctgttt

SEQ ID NO: 56082 - DNA, 20 bp, Artificial Sequence
  Description of Artificial Sequence: Synthetic oligonucleotide
  Target: LAMA2; (-) strand; PAM type: NRG; PAM sequence: CAG
gatcaacccagtttaattat

SEQ ID NO: 56083 - DNA, 20 bp, Artificial Sequence
  Description of Artificial Sequence: Synthetic oligonucleotide
  Target: LAMA2; (-) strand; PAM type: NRG; PAM sequence: CAG
gaacccaataatgatcaacc

SEQ ID NO: 56084 - DNA, 20 bp, Artificial Sequence
  Description of Artificial Sequence: Synthetic oligonucleotide
  Target: LAMA2; (-) strand; PAM type: NRG; PAM sequence: AAG
attttaaacattacaaaata

SEQ ID NO: 56085 - DNA, 20 bp, Artificial Sequence
  Description of Artificial Sequence: Synthetic oligonucleotide
  Target: LAMA2; (-) strand; PAM type: NRG; PAM sequence: AAG
attaatattctactgaattt

SEQ ID NO: 56086 - DNA, 20 bp, Artificial Sequence
  Description of Artificial Sequence: Synthetic oligonucleotide
  Target: LAMA2; (-) strand; PAM type: NRG; PAM sequence: AAG
aatatgatttaaaaatggaa

SEQ ID NO: 56087 - DNA, 20 bp, Artificial Sequence
  Description of Artificial Sequence: Synthetic oligonucleotide
  Target: LAMA2; (-) strand; PAM type: NRG; PAM sequence: TGG
tttttaatatgatttaaaaa

SEQ ID NO: 56088 - DNA, 20 bp, Artificial Sequence
  Description of Artificial Sequence: Synthetic oligonucleotide
  Target: LAMA2; (-) strand; PAM type: NRG; PAM sequence: AAG
agtataaagcatttttgaag

SEQ ID NO: 56089 - DNA, 20 bp, Artificial Sequence
  Description of Artificial Sequence: Synthetic oligonucleotide
  Target: LAMA2; (-) strand; PAM type: NRG; PAM sequence: AAG
tgaagtataaagcatttttg

SEQ ID NO: 56090 - DNA, 20 bp, Artificial Sequence
  Description of Artificial Sequence: Synthetic oligonucleotide
  Target: LAMA2; (-) strand; PAM type: NRG; PAM sequence: AAG
agtaatatacatgaagtata

SEQ ID NO: 56091 - DNA, 20 bp, Artificial Sequence
  Description of Artificial Sequence: Synthetic oligonucleotide
  Target: LAMA2; (-) strand; PAM type: NRG; PAM sequence: AAG
taaaatcagtaatatacatg

SEQ ID NO: 56092 - DNA, 20 bp, Artificial Sequence
  Description of Artificial Sequence: Synthetic oligonucleotide
  Target: LAMA2; (-) strand; PAM type: NRG; PAM sequence: CAG
attgtacttttacttaaaat

SEQ ID NO: 56093 - DNA, 20 bp, Artificial Sequence
  Description of Artificial Sequence: Synthetic oligonucleotide
  Target: LAMA2; (-) strand; PAM type: NRG; PAM sequence: TGG
gagctactcataaataggtc

SEQ ID NO: 56094 - DNA, 20 bp, Artificial Sequence
  Description of Artificial Sequence: Synthetic oligonucleotide
  Target: LAMA2; (-) strand; PAM type: NRG; PAM sequence: AGG
aattagagctactcataaat

SEQ ID NO: 56095 - DNA, 20 bp, Artificial Sequence
  Description of Artificial Sequence: Synthetic oligonucleotide
  Target: LAMA2; (-) strand; PAM type: NRG; PAM sequence: TAG
caattagagctactcataaa

SEQ ID NO: 56096 - DNA, 20 bp, Artificial Sequence
  Description of Artificial Sequence: Synthetic oligonucleotide
  Target: LAMA2; (-) strand; PAM type: NRG; PAM sequence: GAG
gcaacaagctgctccaatta

SEQ ID NO: 56097 - DNA, 20 bp, Artificial Sequence
  Description of Artificial Sequence: Synthetic oligonucleotide
  Target: LAMA2; (-) strand; PAM type: NRG; PAM sequence: TAG
cagcaacaagctgctccaat

SEQ ID NO: 56098 - DNA, 20 bp, Artificial Sequence
  Description of Artificial Sequence: Synthetic oligonucleotide
  Target: LAMA2; (-) strand; PAM type: NRG; PAM sequence: AAG
actgaatagggtccagcaac

SEQ ID NO: 56099 - DNA, 20 bp, Artificial Sequence
  Description of Artificial Sequence: Synthetic oligonucleotide
  Target: LAMA2; (-) strand; PAM type: NRG; PAM sequence: CAG
ctctaccactgaatagggtc

SEQ ID NO: 56100 - DNA, 20 bp, Artificial Sequence
  Description of Artificial Sequence: Synthetic oligonucleotide
  Target: LAMA2; (-) strand; PAM type: NRG; PAM sequence: GGG
cttatctctaccactgaata

SEQ ID NO: 56101 - DNA, 20 bp, Artificial Sequence
  Description of Artificial Sequence: Synthetic oligonucleotide
  Target: LAMA2; (-) strand; PAM type: NRG; PAM sequence: AGG
ccttatctctaccactgaat

SEQ ID NO: 56102 - DNA, 20 bp, Artificial Sequence
  Description of Artificial Sequence: Synthetic oligonucleotide
  Target: LAMA2; (-) strand; PAM type: NRG; PAM sequence: TAG
accttatctctaccactgaa

SEQ ID NO: 56103 - DNA, 20 bp, Artificial Sequence
  Description of Artificial Sequence: Synthetic oligonucleotide
  Target: LAMA2; (-) strand; PAM type: NRG; PAM sequence: CAG
ttcaaattagatgaactatt

SEQ ID NO: 56104 - DNA, 20 bp, Artificial Sequence
  Description of Artificial Sequence: Synthetic oligonucleotide
  Target: LAMA2; (-) strand; PAM type: NRG; PAM sequence: TAG
gacaccaaagtatttcaaat

SEQ ID NO: 56105 - DNA, 20 bp, Artificial Sequence
  Description of Artificial Sequence: Synthetic oligonucleotide
  Target: LAMA2; (-) strand; PAM type: NRG; PAM sequence: AAG
aaaaggtccatgtgacacca

SEQ ID NO: 56106 - DNA, 20 bp, Artificial Sequence
  Description of Artificial Sequence: Synthetic oligonucleotide
  Target: LAMA2; (-) strand; PAM type: NRG; PAM sequence: AGG
tagccatggtattcaggaaa

SEQ ID NO: 56107 - DNA, 20 bp, Artificial Sequence
  Description of Artificial Sequence: Synthetic oligonucleotide
  Target: LAMA2; (-) strand; PAM type: NRG; PAM sequence: AAG
atagccatggtattcaggaa

SEQ ID NO: 56108 - DNA, 20 bp, Artificial Sequence
  Description of Artificial Sequence: Synthetic oligonucleotide
  Target: LAMA2; (-) strand; PAM type: NRG; PAM sequence: AGG
agtacatagccatggtattc

SEQ ID NO: 56109 - DNA, 20 bp, Artificial Sequence
  Description of Artificial Sequence: Synthetic oligonucleotide
  Target: LAMA2; (-) strand; PAM type: NRG; PAM sequence: CAG
gagtacatagccatggtatt

SEQ ID NO: 56110 - DNA, 20 bp, Artificial Sequence
  Description of Artificial Sequence: Synthetic oligonucleotide
  Target: LAMA2; (-) strand; PAM type: NRG; PAM sequence: TGG
aaatagtgagtacatagcca

SEQ ID NO: 56111 - DNA, 20 bp, Artificial Sequence
  Description of Artificial Sequence: Synthetic oligonucleotide
  Target: LAMA2; (-) strand; PAM type: NRG; PAM sequence: TAG
ttggccaaatagtgagtaca

SEQ ID NO: 56112 - DNA, 20 bp, Artificial Sequence
  Description of Artificial Sequence: Synthetic oligonucleotide
  Target: LAMA2; (-) strand; PAM type: NRG; PAM sequence: GAG
tcagcatttggccaaatagt

SEQ ID NO: 56113 - DNA, 20 bp, Artificial Sequence
  Description of Artificial Sequence: Synthetic oligonucleotide
  Target: LAMA2; (-) strand; PAM type: NRG; PAM sequence: TAG
attttcagcatttggccaaa

SEQ ID NO: 56114 - DNA, 20 bp, Artificial Sequence
  Description of Artificial Sequence: Synthetic oligonucleotide
  Target: LAMA2; (-) strand; PAM type: NRG; PAM sequence: TGG
atatgttcattttcagcatt

SEQ ID NO: 56115 - DNA, 20 bp, Artificial Sequence
  Description of Artificial Sequence: Synthetic oligonucleotide
  Target: LAMA2; (-) strand; PAM type: NRG; PAM sequence: CAG
ggcaaatatatgttcatttt

SEQ ID NO: 56116 - DNA, 20 bp, Artificial Sequence
  Description of Artificial Sequence: Synthetic oligonucleotide
  Target: LAMA2; (-) strand; PAM type: NRG; PAM sequence: AGG
tttacaaaacattttgacgg

SEQ ID NO: 56117 - DNA, 20 bp, Artificial Sequence
  Description of Artificial Sequence: Synthetic oligonucleotide
  Target: LAMA2; (-) strand; PAM type: NRG; PAM sequence: GAG
atttacaaaacattttgacg

SEQ ID NO: 56118 - DNA, 20 bp, Artificial Sequence
  Description of Artificial Sequence: Synthetic oligonucleotide
  Target: LAMA2; (-) strand; PAM type: NRG; PAM sequence: CGG
acatttacaaaacattttga

SEQ ID NO: 56119 - DNA, 20 bp, Artificial Sequence
  Description of Artificial Sequence: Synthetic oligonucleotide
  Target: LAMA2; (-) strand; PAM type: NRG; PAM sequence: GAG
ccttgtttatgtcaatgtct

SEQ ID NO: 56120 - DNA, 20 bp, Artificial Sequence
  Description of Artificial Sequence: Synthetic oligonucleotide
  Target: LAMA2; (-) strand; PAM type: NRG; PAM sequence: AAG
tatgtatttttttaaagaaa

SEQ ID NO: 56121 - DNA, 20 bp, Artificial Sequence
  Description of Artificial Sequence: Synthetic oligonucleotide
  Target: LAMA2; (-) strand; PAM type: NRG; PAM sequence: AAG
tatgtgtatgtattttttta

SEQ ID NO: 56122 - DNA, 20 bp, Artificial Sequence
  Description of Artificial Sequence: Synthetic oligonucleotide
  Target: LAMA2; (-) strand; PAM type: NRG; PAM sequence: GAG
gcaggttagcaactaaaaga

SEQ ID NO: 56123 - DNA, 20 bp, Artificial Sequence
  Description of Artificial Sequence: Synthetic oligonucleotide
  Target: LAMA2; (-) strand; PAM type: NRG; PAM sequence: GAG
aagcaggttagcaactaaaa

SEQ ID NO: 56124 - DNA, 20 bp, Artificial Sequence
  Description of Artificial Sequence: Synthetic oligonucleotide
  Target: LAMA2; (-) strand; PAM type: NRG; PAM sequence: AAG
aaaagcaggttagcaactaa

SEQ ID NO: 56125 - DNA, 20 bp, Artificial Sequence
  Description of Artificial Sequence: Synthetic oligonucleotide
  Target: LAMA2; (-) strand; PAM type: NRG; PAM sequence: TAG
gactaatctaaaaagcaggt

SEQ ID NO: 56126 - DNA, 20 bp, Artificial Sequence
  Description of Artificial Sequence: Synthetic oligonucleotide
  Target: LAMA2; (-) strand; PAM type: NRG; PAM sequence: AGG
catggactaatctaaaaagc

SEQ ID NO: 56127 - DNA, 20 bp, Artificial Sequence
  Description of Artificial Sequence: Synthetic oligonucleotide
  Target: LAMA2; (-) strand; PAM type: NRG; PAM sequence: CAG
ccatggactaatctaaaaag

SEQ ID NO: 56128 - DNA, 20 bp, Artificial Sequence
  Description of Artificial Sequence: Synthetic oligonucleotide
  Target: LAMA2; (-) strand; PAM type: NRG; PAM sequence: AAG
taaccatggactaatctaaa

SEQ ID NO: 56129 - DNA, 20 bp, Artificial Sequence
  Description of Artificial Sequence: Synthetic oligonucleotide
  Target: LAMA2; (-) strand; PAM type: NRG; PAM sequence: TGG
cacctcttccaagataacca

SEQ ID NO: 56130 - DNA, 20 bp, Artificial Sequence
  Description of Artificial Sequence: Synthetic oligonucleotide
  Target: LAMA2; (-) strand; PAM type: NRG; PAM sequence: AAG
tgttctcccacacctcttcc

SEQ ID NO: 56131 - DNA, 20 bp, Artificial Sequence
  Description of Artificial Sequence: Synthetic oligonucleotide
  Target: LAMA2; (-) strand; PAM type: NRG; PAM sequence: TAG
tttgcatagaattccttcct

SEQ ID NO: 56132 - DNA, 20 bp, Artificial Sequence
  Description of Artificial Sequence: Synthetic oligonucleotide
  Target: LAMA2; (-) strand; PAM type: NRG; PAM sequence: TAG
agaatcagaaacgctttgca

SEQ ID NO: 56133 - DNA, 20 bp, Artificial Sequence
  Description of Artificial Sequence: Synthetic oligonucleotide
  Target: LAMA2; (-) strand; PAM type: NRG; PAM sequence: CAG
ccacaaaatactaagagaat

SEQ ID NO: 56134 - DNA, 20 bp, Artificial Sequence
  Description of Artificial Sequence: Synthetic oligonucleotide
  Target: LAMA2; (-) strand; PAM type: NRG; PAM sequence: GAG
gctgttccacaaaatactaa

SEQ ID NO: 56135 - DNA, 20 bp, Artificial Sequence
  Description of Artificial Sequence: Synthetic oligonucleotide
  Target: LAMA2; (-) strand; PAM type: NRG; PAM sequence: AAG
atgctgttccacaaaatact

SEQ ID NO: 56136 - DNA, 20 bp, Artificial Sequence
  Description of Artificial Sequence: Synthetic oligonucleotide
  Target: LAMA2; (-) strand; PAM type: NRG; PAM sequence: AAG
tacttatcctacacaactgg

SEQ ID NO: 56137 - DNA, 20 bp, Artificial Sequence
  Description of Artificial Sequence: Synthetic oligonucleotide
  Target: LAMA2; (-) strand; PAM type: NRG; PAM sequence: TGG
ctgtacttatcctacacaac

SEQ ID NO: 56138 - DNA, 20 bp, Artificial Sequence
  Description of Artificial Sequence: Synthetic oligonucleotide
  Target: LAMA2; (-) strand; PAM type: NRG; PAM sequence: GGG
gctggtaagcagtgttcagt

SEQ ID NO: 56139 - DNA, 20 bp, Artificial Sequence
  Description of Artificial Sequence: Synthetic oligonucleotide
  Target: LAMA2; (-) strand; PAM type: NRG; PAM sequence: TGG
tgctggtaagcagtgttcag

SEQ ID NO: 56140 - DNA, 20 bp, Artificial Sequence
  Description of Artificial Sequence: Synthetic oligonucleotide
  Target: LAMA2; (-) strand; PAM type: NRG; PAM sequence: CAG
aactgctggtaagcagtgtt

SEQ ID NO: 56141 - DNA, 20 bp, Artificial Sequence
  Description of Artificial Sequence: Synthetic oligonucleotide
  Target: LAMA2; (-) strand; PAM type: NRG; PAM sequence: CAG
tgtggtaaactgctggtaag

SEQ ID NO: 56142 - DNA, 20 bp, Artificial Sequence
  Description of Artificial Sequence: Synthetic oligonucleotide
  Target: LAMA2; (-) strand; PAM type: NRG; PAM sequence: AAG
gcttgtggtaaactgctggt

SEQ ID NO: 56143 - DNA, 20 bp, Artificial Sequence
  Description of Artificial Sequence: Synthetic oligonucleotide
  Target: LAMA2; (-) strand; PAM type: NRG; PAM sequence: TGG
actggcttgtggtaaactgc

SEQ ID NO: 56144 - DNA, 20 bp, Artificial Sequence
  Description of Artificial Sequence: Synthetic oligonucleotide
  Target: LAMA2; (-) strand; PAM type: NRG; PAM sequence: TGG
ttgatgttataactggcttg

SEQ ID NO: 56145 - DNA, 20 bp, Artificial Sequence
  Description of Artificial Sequence: Synthetic oligonucleotide
  Target: LAMA2; (-) strand; PAM type: NRG; PAM sequence: TGG
gatgtttttgatgttataac

SEQ ID NO: 56146 - DNA, 20 bp, Artificial Sequence
  Description of Artificial Sequence: Synthetic oligonucleotide
  Target: LAMA2; (-) strand; PAM type: NRG; PAM sequence: GGG
caaatatagaagaaaagaaa

SEQ ID NO: 56147 - DNA, 20 bp, Artificial Sequence
  Description of Artificial Sequence: Synthetic oligonucleotide
  Target: LAMA2; (-) strand; PAM type: NRG; PAM sequence: AGG
tcaaatatagaagaaaagaa

SEQ ID NO: 56148 - DNA, 20 bp, Artificial Sequence
  Description of Artificial Sequence: Synthetic oligonucleotide
  Target: LAMA2; (-) strand; PAM type: NRG; PAM sequence: AAG
ttcaaatatagaagaaaaga

SEQ ID NO: 56149 - DNA, 20 bp, Artificial Sequence
  Description of Artificial Sequence: Synthetic oligonucleotide
  Target: LAMA2; (-) strand; PAM type: NRG; PAM sequence: AAG
attattcaaatatagaagaa

SEQ ID NO: 56150 - DNA, 20 bp, Artificial Sequence
  Description of Artificial Sequence: Synthetic oligonucleotide
  Target: LAMA2; (-) strand; PAM type: NRG; PAM sequence: AAG
ttatcattattcaaatatag

SEQ ID NO: 56151 - DNA, 20 bp, Artificial Sequence
  Description of Artificial Sequence: Synthetic oligonucleotide
  Target: LAMA2; (-) strand; PAM type: NRG; PAM sequence: TAG
catttatcattattcaaata

SEQ ID NO: 56152 - DNA, 20 bp, Artificial Sequence
  Description of Artificial Sequence: Synthetic oligonucleotide
  Target: LAMA2; (-) strand; PAM type: NRG; PAM sequence: AGG
atagtgctcacacagcatga

SEQ ID NO: 56153 - DNA, 20 bp, Artificial Sequence
  Description of Artificial Sequence: Synthetic oligonucleotide
  Target: LAMA2; (-) strand; PAM type: NRG; PAM sequence: AAG
aatagtgctcacacagcatg

SEQ ID NO: 56154 - DNA, 20 bp, Artificial Sequence
  Description of Artificial Sequence: Synthetic oligonucleotide
  Target: LAMA2; (-) strand; PAM type: NRG; PAM sequence: CAG
acacttcaatagtgctcaca

SEQ ID NO: 56155 - DNA, 20 bp, Artificial Sequence
  Description of Artificial Sequence: Synthetic oligonucleotide
  Target: LAMA2; (-) strand; PAM type: NRG; PAM sequence: TAG
tgcagagaaacacacttcaa

SEQ ID NO: 56156 - DNA, 20 bp, Artificial Sequence
  Description of Artificial Sequence: Synthetic oligonucleotide
  Target: LAMA2; (-) strand; PAM type: NRG; PAM sequence: GAG
cactgccaagtttacctgca

SEQ ID NO: 56157 - DNA, 20 bp, Artificial Sequence
  Description of Artificial Sequence: Synthetic oligonucleotide
  Target: LAMA2; (-) strand; PAM type: NRG; PAM sequence: CAG
gacactgccaagtttacctg

SEQ ID NO: 56158 - DNA, 20 bp, Artificial Sequence
  Description of Artificial Sequence: Synthetic oligonucleotide
  Target: LAMA2; (-) strand; PAM type: NRG; PAM sequence: AAG
tagttatataagacactgcc

SEQ ID NO: 56159 - DNA, 20 bp, Artificial Sequence
  Description of Artificial Sequence: Synthetic oligonucleotide
  Target: LAMA2; (-) strand; PAM type: NRG; PAM sequence: AAG
cccatcgagtgtagttatat

SEQ ID NO: 56160 - DNA, 20 bp, Artificial Sequence
  Description of Artificial Sequence: Synthetic oligonucleotide
  Target: LAMA2; (-) strand; PAM type: NRG; PAM sequence: TAG
agtaatactcccatcgagtg

SEQ ID NO: 56161 - DNA, 20 bp, Artificial Sequence
  Description of Artificial Sequence: Synthetic oligonucleotide
  Target: LAMA2; (-) strand; PAM type: NRG; PAM sequence: GAG
gtttaagtaatactcccatc

SEQ ID NO: 56162 - DNA, 20 bp, Artificial Sequence
  Description of Artificial Sequence: Synthetic oligonucleotide
  Target: LAMA2; (-) strand; PAM type: NRG; PAM sequence: AAG
caatgtatttcacactgttt

SEQ ID NO: 56163 - DNA, 20 bp, Artificial Sequence
  Description of Artificial Sequence: Synthetic oligonucleotide
  Target: LAMA2; (-) strand; PAM type: NRG; PAM sequence: CAG
aattgtgatacaatttttat

SEQ ID NO: 56164 - DNA, 20 bp, Artificial Sequence
  Description of Artificial Sequence: Synthetic oligonucleotide
  Target: LAMA2; (-) strand; PAM type: NRG; PAM sequence: CAG
ttagactataaaataactgg

SEQ ID NO: 56165 - DNA, 20 bp, Artificial Sequence
  Description of Artificial Sequence: Synthetic oligonucleotide
  Target: LAMA2; (-) strand; PAM type: NRG; PAM sequence: TGG
tttttagactataaaataac

SEQ ID NO: 56166 - DNA, 20 bp, Artificial Sequence
  Description of Artificial Sequence: Synthetic oligonucleotide
  Target: LAMA2; (-) strand; PAM type: NRG; PAM sequence: TAG
gccttacaggttcatttttt

SEQ ID NO: 56167 - DNA, 20 bp, Artificial Sequence
  Description of Artificial Sequence: Synthetic oligonucleotide
  Target: LAMA2; (-) strand; PAM type: NRG; PAM sequence: AGG
attttatactgtagccttac

SEQ ID NO: 56168 - DNA, 20 bp, Artificial Sequence
  Description of Artificial Sequence: Synthetic oligonucleotide
  Target: LAMA2; (-) strand; PAM type: NRG; PAM sequence: CAG
gattttatactgtagcctta

SEQ ID NO: 56169 - DNA, 20 bp, Artificial Sequence
  Description of Artificial Sequence: Synthetic oligonucleotide
  Target: LAMA2; (-) strand; PAM type: NRG; PAM sequence: TAG
aagacttggattttatactg

SEQ ID NO: 56170 - DNA, 20 bp, Artificial Sequence
  Description of Artificial Sequence: Synthetic oligonucleotide
  Target: LAMA2; (-) strand; PAM type: NRG; PAM sequence: TGG
aatatacaactataaagact

SEQ ID NO: 56171 - DNA, 20 bp, Artificial Sequence
  Description of Artificial Sequence: Synthetic oligonucleotide
  Target: LAMA2; (-) strand; PAM type: NRG; PAM sequence: AAG
actacaaatatacaactata

SEQ ID NO: 56172 - DNA, 20 bp, Artificial Sequence
  Description of Artificial Sequence: Synthetic oligonucleotide
  Target: LAMA2; (-) strand; PAM type: NRG; PAM sequence: CGG
aagcttatattattccccca

SEQ ID NO: 56173 - DNA, 20 bp, Artificial Sequence
  Description of Artificial Sequence: Synthetic oligonucleotide
  Target: LAMA2; (-) strand; PAM type: NRG; PAM sequence: AAG
agactaatcaccaaatgatt

SEQ ID NO: 56174 - DNA, 20 bp, Artificial Sequence
  Description of Artificial Sequence: Synthetic oligonucleotide
  Target: LAMA2; (-) strand; PAM type: NRG; PAM sequence: TAG
ctctcatcattaatagttgg

SEQ ID NO: 56175 - DNA, 20 bp, Artificial Sequence
  Description of Artificial Sequence: Synthetic oligonucleotide
  Target: LAMA2; (-) strand; PAM type: NRG; PAM sequence: TGG
tatctctcatcattaatagt

SEQ ID NO: 56176 - DNA, 20 bp, Artificial Sequence
  Description of Artificial Sequence: Synthetic oligonucleotide
  Target: LAMA2; (-) strand; PAM type: NRG; PAM sequence: TAG
aggttatctctcatcattaa

SEQ ID NO: 56177 - DNA, 20 bp, Artificial Sequence
  Description of Artificial Sequence: Synthetic oligonucleotide
  Target: LAMA2; (-) strand; PAM type: NRG; PAM sequence: AGG
tttagaaataaagaacagat

SEQ ID NO: 56178 - DNA, 20 bp, Artificial Sequence
  Description of Artificial Sequence: Synthetic oligonucleotide
  Target: LAMA2; (-) strand; PAM type: NRG; PAM sequence: TAG
ttttagaaataaagaacaga

SEQ ID NO: 56179 - DNA, 20 bp, Artificial Sequence
  Description of Artificial Sequence: Synthetic oligonucleotide
  Target: LAMA2; (-) strand; PAM type: NRG; PAM sequence: CAG
cttattttagaaataaagaa

SEQ ID NO: 56180 - DNA, 20 bp, Artificial Sequence
  Description of Artificial Sequence: Synthetic oligonucleotide
  Target: LAMA2; (-) strand; PAM type: NRG; PAM sequence: AAG
cacatcttattttagaaata

SEQ ID NO: 56181 - DNA, 20 bp, Artificial Sequence
  Description of Artificial Sequence: Synthetic oligonucleotide
  Target: LAMA2; (-) strand; PAM type: NRG; PAM sequence: TAG
ctgtattacacatcttattt

SEQ ID NO: 56182 - DNA, 20 bp, Artificial Sequence
  Description of Artificial Sequence: Synthetic oligonucleotide
  Target: LAMA2; (-) strand; PAM type: NRG; PAM sequence: TAG
cttttaaaatagtgactaat

SEQ ID NO: 56183 - DNA, 20 bp, Artificial Sequence
  Description of Artificial Sequence: Synthetic oligonucleotide
  Target: LAMA2; (-) strand; PAM type: NRG; PAM sequence: TAG
tatttaaattccttttaaaa

SEQ ID NO: 56184 - DNA, 20 bp, Artificial Sequence
  Description of Artificial Sequence: Synthetic oligonucleotide
  Target: LAMA2; (-) strand; PAM type: NRG; PAM sequence: AGG
catgtaaataattaggcatt

SEQ ID NO: 56185 - DNA, 20 bp, Artificial Sequence
  Description of Artificial Sequence: Synthetic oligonucleotide
  Target: LAMA2; (-) strand; PAM type: NRG; PAM sequence: TAG
acatgtaaataattaggcat

SEQ ID NO: 56186 - DNA, 20 bp, Artificial Sequence
  Description of Artificial Sequence: Synthetic oligonucleotide
  Target: LAMA2; (-) strand; PAM type: NRG; PAM sequence: AGG
cagccaacatgtaaataatt

SEQ ID NO: 56187 - DNA, 20 bp, Artificial Sequence
  Description of Artificial Sequence: Synthetic oligonucleotide
  Target: LAMA2; (-) strand; PAM type: NRG; PAM sequence: TAG
tcagccaacatgtaaataat

SEQ ID NO: 56188 - DNA, 20 bp, Artificial Sequence
  Description of Artificial Sequence: Synthetic oligonucleotide
  Target: LAMA2; (-) strand; PAM type: NRG; PAM sequence: CAG
agttagataatagagaacat

SEQ ID NO: 56189 - DNA, 20 bp, Artificial Sequence
  Description of Artificial Sequence: Synthetic oligonucleotide
  Target: LAMA2; (-) strand; PAM type: NRG; PAM sequence: GAG
agcacagcagttagataata

SEQ ID NO: 56190 - DNA, 20 bp, Artificial Sequence
  Description of Artificial Sequence: Synthetic oligonucleotide
  Target: LAMA2; (-) strand; PAM type: NRG; PAM sequence: TAG
acagcacagcagttagataa

SEQ ID NO: 56191 - DNA, 20 bp, Artificial Sequence
  Description of Artificial Sequence: Synthetic oligonucleotide
  Target: LAMA2; (-) strand; PAM type: NRG; PAM sequence: TAG
attaagaacagcacagcagt

SEQ ID NO: 56192 - DNA, 20 bp, Artificial Sequence
  Description of Artificial Sequence: Synthetic oligonucleotide
  Target: LAMA2; (-) strand; PAM type: NRG; PAM sequence: CAG
agcaattaagaacagcacag

SEQ ID NO: 56193 - DNA, 20 bp, Artificial Sequence
  Description of Artificial Sequence: Synthetic oligonucleotide
  Target: LAMA2; (-) strand; PAM type: NRG; PAM sequence: CAG
agcagcaattaagaacagca

SEQ ID NO: 56194 - DNA, 20 bp, Artificial Sequence
  Description of Artificial Sequence: Synthetic oligonucleotide
  Target: LAMA2; (-) strand; PAM type: NRG; PAM sequence: CAG
gaactagcagcaattaagaa

SEQ ID NO: 56195 - DNA, 20 bp, Artificial Sequence
  Description of Artificial Sequence: Synthetic oligonucleotide
  Target: LAMA2; (-) strand; PAM type: NRG; PAM sequence: AAG
gagatgaactagcagcaatt

SEQ ID NO: 56196 - DNA, 20 bp, Artificial Sequence
  Description of Artificial Sequence: Synthetic oligonucleotide
  Target: LAMA2; (-) strand; PAM type: NRG; PAM sequence: CAG
gatgggcggagatgaactag

SEQ ID NO: 56197 - DNA, 20 bp, Artificial Sequence
  Description of Artificial Sequence: Synthetic oligonucleotide
  Target: LAMA2; (-) strand; PAM type: NRG; PAM sequence: TAG
ggagatgggcggagatgaac

SEQ ID NO: 56198 - DNA, 20 bp, Artificial Sequence
  Description of Artificial Sequence: Synthetic oligonucleotide
  Target: LAMA2; (-) strand; PAM type: NRG; PAM sequence: GAG
atcaccaagggagatgggcg

SEQ ID NO: 56199 - DNA, 20 bp, Artificial Sequence
  Description of Artificial Sequence: Synthetic oligonucleotide
  Target: LAMA2; (-) strand; PAM type: NRG; PAM sequence: CGG
tcatcaccaagggagatggg

SEQ ID NO: 56200 - DNA, 20 bp, Artificial Sequence
  Description of Artificial Sequence: Synthetic oligonucleotide
  Target: LAMA2; (-) strand; PAM type: NRG; PAM sequence: GGG
ctatcatcaccaagggagat

SEQ ID NO: 56201 - DNA, 20 bp, Artificial Sequence
  Description of Artificial Sequence: Synthetic oligonucleotide
  Target: LAMA2; (-) strand; PAM type: NRG; PAM sequence: TGG
actatcatcaccaagggaga

SEQ ID NO: 56202 - DNA, 20 bp, Artificial Sequence
  Description of Artificial Sequence: Synthetic oligonucleotide
  Target: LAMA2; (-) strand; PAM type: NRG; PAM sequence: GAG
caggactatcatcaccaagg

SEQ ID NO: 56203 - DNA, 20 bp, Artificial Sequence
  Description of Artificial Sequence: Synthetic oligonucleotide
  Target: LAMA2; (-) strand; PAM type: NRG; PAM sequence: GGG
tgcaggactatcatcaccaa

SEQ ID NO: 56204 - DNA, 20 bp, Artificial Sequence
  Description of Artificial Sequence: Synthetic oligonucleotide
  Target: LAMA2; (-) strand; PAM type: NRG; PAM sequence: AGG
atgcaggactatcatcacca

SEQ ID NO: 56205 - DNA, 20 bp, Artificial Sequence
  Description of Artificial Sequence: Synthetic oligonucleotide
  Target: LAMA2; (-) strand; PAM type: NRG; PAM sequence: AAG
aatgcaggactatcatcacc

SEQ ID NO: 56206 - DNA, 20 bp, Artificial Sequence
  Description of Artificial Sequence: Synthetic oligonucleotide
  Target: LAMA2; (-) strand; PAM type: NRG; PAM sequence: AGG
tgaaaattgccatgaaatgc

SEQ ID NO: 56207 - DNA, 20 bp, Artificial Sequence
  Description of Artificial Sequence: Synthetic oligonucleotide
  Target: LAMA2; (-) strand; PAM type: NRG; PAM sequence: CAG
ttgaaaattgccatgaaatg

SEQ ID NO: 56208 - DNA, 20 bp, Artificial Sequence
  Description of Artificial Sequence: Synthetic oligonucleotide
  Target: LAMA2; (-) strand; PAM type: NRG; PAM sequence: AAG
ggctattatgctacccactt

SEQ ID NO: 56209 - DNA, 20 bp, Artificial Sequence
  Description of Artificial Sequence: Synthetic oligonucleotide
  Target: LAMA2; (-) strand; PAM type: NRG; PAM sequence: TGG
tgttttttttgttgttcacc

SEQ ID NO: 56210 - DNA, 20 bp, Artificial Sequence
  Description of Artificial Sequence: Synthetic oligonucleotide
  Target: LAMA2; (-) strand; PAM type: NRG; PAM sequence: TAG
tcatatcccaatttgccaaa

SEQ ID NO: 56211 - DNA, 20 bp, Artificial Sequence
  Description of Artificial Sequence: Synthetic oligonucleotide
  Target: LAMA2; (-) strand; PAM type: NRG; PAM sequence: TGG
ttggcaaggactaaaagttt

SEQ ID NO: 56212 - DNA, 20 bp, Artificial Sequence
  Description of Artificial Sequence: Synthetic oligonucleotide
  Target: LAMA2; (-) strand; PAM type: NRG; PAM sequence: AAG
aaaaaattggcaaggactaa

SEQ ID NO: 56213 - DNA, 20 bp, Artificial Sequence
  Description of Artificial Sequence: Synthetic oligonucleotide
  Target: LAMA2; (-) strand; PAM type: NRG; PAM sequence: AGG
agttttaaaaaaaattggca

SEQ ID NO: 56214 - DNA, 20 bp, Artificial Sequence
  Description of Artificial Sequence: Synthetic oligonucleotide
  Target: LAMA2; (-) strand; PAM type: NRG; PAM sequence: AAG
aagttttaaaaaaaattggc

SEQ ID NO: 56215 - DNA, 20 bp, Artificial Sequence
  Description of Artificial Sequence: Synthetic oligonucleotide
  Target: LAMA2; (-) strand; PAM type: NRG; PAM sequence: TGG
attgaagttttaaaaaaaat

SEQ ID NO: 56216 - DNA, 20 bp, Artificial Sequence
  Description of Artificial Sequence: Synthetic oligonucleotide
  Target: LAMA2; (-) strand; PAM type: NRG; PAM sequence: AAG
aatatgaatcaagataattg

SEQ ID NO: 56217 - DNA, 20 bp, Artificial Sequence
  Description of Artificial Sequence: Synthetic oligonucleotide
  Target: LAMA2; (-) strand; PAM type: NRG; PAM sequence: AAG
aacaaatgggaatatgaatc

SEQ ID NO: 56218 - DNA, 20 bp, Artificial Sequence
  Description of Artificial Sequence: Synthetic oligonucleotide
  Target: LAMA2; (-) strand; PAM type: NRG; PAM sequence: GGG
tgcctaccaacccaacaaat

SEQ ID NO: 56219 - DNA, 20 bp, Artificial Sequence
  Description of Artificial Sequence: Synthetic oligonucleotide
  Target: LAMA2; (-) strand; PAM type: NRG; PAM sequence: TGG
gtgcctaccaacccaacaaa

SEQ ID NO: 56220 - DNA, 20 bp, Artificial Sequence
  Description of Artificial Sequence: Synthetic oligonucleotide
  Target: LAMA2; (-) strand; PAM type: NRG; PAM sequence: GAG
tgattattatatttattttg

SEQ ID NO: 56221 - DNA, 20 bp, Artificial Sequence
  Description of Artificial Sequence: Synthetic oligonucleotide
  Target: LAMA2; (-) strand; PAM type: NRG; PAM sequence: TGG
tctgattattatatttattt

SEQ ID NO: 56222 - DNA, 20 bp, Artificial Sequence
  Description of Artificial Sequence: Synthetic oligonucleotide
  Target: LAMA2; (-) strand; PAM type: NRG; PAM sequence: TGG
ctaaaactagtacctacagt

SEQ ID NO: 56223 - DNA, 20 bp, Artificial Sequence
  Description of Artificial Sequence: Synthetic oligonucleotide
  Target: LAMA2; (-) strand; PAM type: NRG; PAM sequence: CAG
gttgctaaaactagtaccta

SEQ ID NO: 56224 - DNA, 20 bp, Artificial Sequence
  Description of Artificial Sequence: Synthetic oligonucleotide
  Target: LAMA2; (-) strand; PAM type: NRG; PAM sequence: TAG
gttgtttcagttgctaaaac

SEQ ID NO: 56225 - DNA, 20 bp, Artificial Sequence
  Description of Artificial Sequence: Synthetic oligonucleotide
  Target: LAMA2; (-) strand; PAM type: NRG; PAM sequence: CAG
gattttaacgccagttgttt

SEQ ID NO: 56226 - DNA, 20 bp, Artificial Sequence
  Description of Artificial Sequence: Synthetic oligonucleotide
  Target: LAMA2; (-) strand; PAM type: NRG; PAM sequence: CAG
aagctcagtgattttaacgc

SEQ ID NO: 56227 - DNA, 20 bp, Artificial Sequence
  Description of Artificial Sequence: Synthetic oligonucleotide
  Target: LAMA2; (-) strand; PAM type: NRG; PAM sequence: CAG
gtattcatgtaacagaagct

SEQ ID NO: 56228 - DNA, 20 bp, Artificial Sequence
  Description of Artificial Sequence: Synthetic oligonucleotide
  Target: LAMA2; (-) strand; PAM type: NRG; PAM sequence: AAG
ctcaggtattcatgtaacag

SEQ ID NO: 56229 - DNA, 20 bp, Artificial Sequence
  Description of Artificial Sequence: Synthetic oligonucleotide
  Target: LAMA2; (-) strand; PAM type: NRG; PAM sequence: CAG
atactcaggtattcatgtaa

SEQ ID NO: 56230 - DNA, 20 bp, Artificial Sequence
  Description of Artificial Sequence: Synthetic oligonucleotide
  Target: LAMA2; (-) strand; PAM type: NRG; PAM sequence: AGG
gaagtagccacataatactc

SEQ ID NO: 56231 - DNA, 20 bp, Artificial Sequence
  Description of Artificial Sequence: Synthetic oligonucleotide
  Target: LAMA2; (-) strand; PAM type: NRG; PAM sequence: CAG
agaagtagccacataatact

SEQ ID NO: 56232 - DNA, 20 bp, Artificial Sequence
  Description of Artificial Sequence: Synthetic oligonucleotide
  Target: LAMA2; (-) strand; PAM type: NRG; PAM sequence: TAG
tgcatactccatttcagaag

SEQ ID NO: 56233 - DNA, 20 bp, Artificial Sequence
  Description of Artificial Sequence: Synthetic oligonucleotide
  Target: LAMA2; (-) strand; PAM type: NRG; PAM sequence: AAG
cactgcatactccatttcag

SEQ ID NO: 56234 - DNA, 20 bp, Artificial Sequence
  Description of Artificial Sequence: Synthetic oligonucleotide
  Target: LAMA2; (-) strand; PAM type: NRG; PAM sequence: CAG
gagcactgcatactccattt

SEQ ID NO: 56235 - DNA, 20 bp, Artificial Sequence
  Description of Artificial Sequence: Synthetic oligonucleotide
  Target: LAMA2; (-) strand; PAM type: NRG; PAM sequence: GAG
actgaaatgcccaattataa

SEQ ID NO: 56236 - DNA, 20 bp, Artificial Sequence
  Description of Artificial Sequence: Synthetic oligonucleotide
  Target: LAMA2; (-) strand; PAM type: NRG; PAM sequence: AAG
caactgaaatgcccaattat

SEQ ID NO: 56237 - DNA, 20 bp, Artificial Sequence
  Description of Artificial Sequence: Synthetic oligonucleotide
  Target: LAMA2; (-) strand; PAM type: NRG; PAM sequence: CAG
tgccagttactttactgaag

SEQ ID NO: 56238 - DNA, 20 bp, Artificial Sequence
  Description of Artificial Sequence: Synthetic oligonucleotide
  Target: LAMA2; (-) strand; PAM type: NRG; PAM sequence: AAG
aaatgccagttactttactg

SEQ ID NO: 56239 - DNA, 20 bp, Artificial Sequence
  Description of Artificial Sequence: Synthetic oligonucleotide
  Target: LAMA2; (-) strand; PAM type: NRG; PAM sequence: CAG
agaaggaagacttgaaatgc

SEQ ID NO: 56240 - DNA, 20 bp, Artificial Sequence
  Description of Artificial Sequence: Synthetic oligonucleotide
  Target: LAMA2; (-) strand; PAM type: NRG; PAM sequence: AAG
aaagcaatcactacagaagg

SEQ ID NO: 56241 - DNA, 20 bp, Artificial Sequence
  Description of Artificial Sequence: Synthetic oligonucleotide
  Target: LAMA2; (-) strand; PAM type: NRG; PAM sequence: AGG
gacaaagcaatcactacaga

SEQ ID NO: 56242 - DNA, 20 bp, Artificial Sequence
  Description of Artificial Sequence: Synthetic oligonucleotide
  Target: LAMA2; (-) strand; PAM type: NRG; PAM sequence: AAG
agacaaagcaatcactacag

SEQ ID NO: 56243 - DNA, 20 bp, Artificial Sequence
  Description of Artificial Sequence: Synthetic oligonucleotide
  Target: LAMA2; (-) strand; PAM type: NRG; PAM sequence: CAG
taaagacaaagcaatcacta

SEQ ID NO: 56244 - DNA, 20 bp, Artificial Sequence
  Description of Artificial Sequence: Synthetic oligonucleotide
  Target: LAMA2; (-) strand; PAM type: NRG; PAM sequence: AAG
gcaatcattgaataaagaca

SEQ ID NO: 56245 - DNA, 20 bp, Artificial Sequence
  Description of Artificial Sequence: Synthetic oligonucleotide
  Target: LAMA2; (-) strand; PAM type: NRG; PAM sequence: AAG
aaaaaagcaatcattgaata

SEQ ID NO: 56246 - DNA, 20 bp, Artificial Sequence
  Description of Artificial Sequence: Synthetic oligonucleotide
  Target: LAMA2; (-) strand; PAM type: NRG; PAM sequence: AAG
aaccagattctaacttaaaa

SEQ ID NO: 56247 - DNA, 20 bp, Artificial Sequence
  Description of Artificial Sequence: Synthetic oligonucleotide
  Target: LAMA2; (-) strand; PAM type: NRG; PAM sequence: CAG
accatggagcactatgcaac

SEQ ID NO: 56248 - DNA, 20 bp, Artificial Sequence
  Description of Artificial Sequence: Synthetic oligonucleotide
  Target: LAMA2; (-) strand; PAM type: NRG; PAM sequence: GAG
ctgcataggaaagaaccatg

SEQ ID NO: 56249 - DNA, 20 bp, Artificial Sequence
  Description of Artificial Sequence: Synthetic oligonucleotide
  Target: LAMA2; (-) strand; PAM type: NRG; PAM sequence: TGG
cactgcataggaaagaacca

SEQ ID NO: 56250 - DNA, 20 bp, Artificial Sequence
  Description of Artificial Sequence: Synthetic oligonucleotide
  Target: LAMA2; (-) strand; PAM type: NRG; PAM sequence: AAG
agaaacaccactgcatagga

SEQ ID NO: 56251 - DNA, 20 bp, Artificial Sequence
  Description of Artificial Sequence: Synthetic oligonucleotide
  Target: LAMA2; (-) strand; PAM type: NRG; PAM sequence: AGG
actgagaaacaccactgcat

SEQ ID NO: 56252 - DNA, 20 bp, Artificial Sequence
  Description of Artificial Sequence: Synthetic oligonucleotide
  Target: LAMA2; (-) strand; PAM type: NRG; PAM sequence: TAG
cactgagaaacaccactgca

SEQ ID NO: 56253 - DNA, 20 bp, Artificial Sequence
  Description of Artificial Sequence: Synthetic oligonucleotide
  Target: LAMA2; (-) strand; PAM type: NRG; PAM sequence: GAG
ggcttctccacatcaacact

SEQ ID NO: 56254 - DNA, 20 bp, Artificial Sequence
  Description of Artificial Sequence: Synthetic oligonucleotide
  Target: LAMA2; (-) strand; PAM type: NRG; PAM sequence: TGG
cagagttgtaggatgtctcc

SEQ ID NO: 56255 - DNA, 20 bp, Artificial Sequence
  Description of Artificial Sequence: Synthetic oligonucleotide
  Target: LAMA2; (-) strand; PAM type: NRG; PAM sequence: AGG
caaatgcttctcagagttgt

SEQ ID NO: 56256 - DNA, 20 bp, Artificial Sequence
  Description of Artificial Sequence: Synthetic oligonucleotide
  Target: LAMA2; (-) strand; PAM type: NRG; PAM sequence: TAG
tcaaatgcttctcagagttg

SEQ ID NO: 56257 - DNA, 20 bp, Artificial Sequence
  Description of Artificial Sequence: Synthetic oligonucleotide
  Target: LAMA2; (-) strand; PAM type: NRG; PAM sequence: GAG
ccaacatcaaatgcttctca

SEQ ID NO: 56258 - DNA, 20 bp, Artificial Sequence
  Description of Artificial Sequence: Synthetic oligonucleotide
  Target: LAMA2; (-) strand; PAM type: NRG; PAM sequence: CAG
tgccaacatcaaatgcttct

SEQ ID NO: 56259 - DNA, 20 bp, Artificial Sequence
  Description of Artificial Sequence: Synthetic oligonucleotide
  Target: LAMA2; (-) strand; PAM type: NRG; PAM sequence: CAG
aagttcatgggctaacctca

SEQ ID NO: 56260 - DNA, 20 bp, Artificial Sequence
  Description of Artificial Sequence: Synthetic oligonucleotide
  Target: LAMA2; (-) strand; PAM type: NRG; PAM sequence: GGG
acctctagccctaagttcat

SEQ ID NO: 56261 - DNA, 20 bp, Artificial Sequence
  Description of Artificial Sequence: Synthetic oligonucleotide
  Target: LAMA2; (-) strand; PAM type: NRG; PAM sequence: TGG
cacctctagccctaagttca

SEQ ID NO: 56262 - DNA, 20 bp, Artificial Sequence
  Description of Artificial Sequence: Synthetic oligonucleotide
  Target: LAMA2; (-) strand; PAM type: NRG; PAM sequence: AAG
taagactcacctctagccct

SEQ ID NO: 56263 - DNA, 20 bp, Artificial Sequence
  Description of Artificial Sequence: Synthetic oligonucleotide
  Target: LAMA2; (-) strand; PAM type: NRG; PAM sequence: TAG
ggaaggttaagactcacctc

SEQ ID NO: 56264 - DNA, 20 bp, Artificial Sequence
  Description of Artificial Sequence: Synthetic oligonucleotide
  Target: LAMA2; (-) strand; PAM type: NRG; PAM sequence: AAG
agatgctgaattggaaggtt

SEQ ID NO: 56265 - DNA, 20 bp, Artificial Sequence
  Description of Artificial Sequence: Synthetic oligonucleotide
  Target: LAMA2; (-) strand; PAM type: NRG; PAM sequence: AGG
ggaaaagatgctgaattgga

SEQ ID NO: 56266 - DNA, 20 bp, Artificial Sequence
  Description of Artificial Sequence: Synthetic oligonucleotide
  Target: LAMA2; (-) strand; PAM type: NRG; PAM sequence: AAG
tggaaaagatgctgaattgg

SEQ ID NO: 56267 - DNA, 20 bp, Artificial Sequence
  Description of Artificial Sequence: Synthetic oligonucleotide
  Target: LAMA2; (-) strand; PAM type: NRG; PAM sequence: TGG
agatggaaaagatgctgaat

SEQ ID NO: 56268 - DNA, 20 bp, Artificial Sequence
  Description of Artificial Sequence: Synthetic oligonucleotide
  Target: LAMA2; (-) strand; PAM type: NRG; PAM sequence: AAG
acttgaatgttcagatggaa

SEQ ID NO: 56269 - DNA, 20 bp, Artificial Sequence
  Description of Artificial Sequence: Synthetic oligonucleotide
  Target: LAMA2; (-) strand; PAM type: NRG; PAM sequence: TGG
atttgacttgaatgttcaga

SEQ ID NO: 56270 - DNA, 20 bp, Artificial Sequence
  Description of Artificial Sequence: Synthetic oligonucleotide
  Target: LAMA2; (-) strand; PAM type: NRG; PAM sequence: CAG
tcccatttgacttgaatgtt

SEQ ID NO: 56271 - DNA, 20 bp, Artificial Sequence
  Description of Artificial Sequence: Synthetic oligonucleotide
  Target: LAMA2; (-) strand; PAM type: NRG; PAM sequence: AGG
gatccagctggagggccaac

SEQ ID NO: 56272 - DNA, 20 bp, Artificial Sequence
  Description of Artificial Sequence: Synthetic oligonucleotide
  Target: LAMA2; (-) strand; PAM type: NRG; PAM sequence: CAG
agatccagctggagggccaa

SEQ ID NO: 56273 - DNA, 20 bp, Artificial Sequence
  Description of Artificial Sequence: Synthetic oligonucleotide
  Target: LAMA2; (-) strand; PAM type: NRG; PAM sequence: GGG
agtggaaagatccagctgga

SEQ ID NO: 56274 - DNA, 20 bp, Artificial Sequence
  Description of Artificial Sequence: Synthetic oligonucleotide
  Target: LAMA2; (-) strand; PAM type: NRG; PAM sequence: AGG
cagtggaaagatccagctgg

SEQ ID NO: 56275 - DNA, 20 bp, Artificial Sequence
  Description of Artificial Sequence: Synthetic oligonucleotide
  Target: LAMA2; (-) strand; PAM type: NRG; PAM sequence: GAG
acagtggaaagatccagctg

SEQ ID NO: 56276 - DNA, 20 bp, Artificial Sequence
  Description of Artificial Sequence: Synthetic oligonucleotide
  Target: LAMA2; (-) strand; PAM type: NRG; PAM sequence: TGG
aaacagtggaaagatccagc

SEQ ID NO: 56277 - DNA, 20 bp, Artificial Sequence
  Description of Artificial Sequence: Synthetic oligonucleotide
  Target: LAMA2; (-) strand; PAM type: NRG; PAM sequence: CAG
gttaaaacagtggaaagatc

SEQ ID NO: 56278 - DNA, 20 bp, Artificial Sequence
  Description of Artificial Sequence: Synthetic oligonucleotide
  Target: LAMA2; (-) strand; PAM type: NRG; PAM sequence: AAG
attccagttaaaacagtgga

SEQ ID NO: 56279 - DNA, 20 bp, Artificial Sequence
  Description of Artificial Sequence: Synthetic oligonucleotide
  Target: LAMA2; (-) strand; PAM type: NRG; PAM sequence: TGG
attcattccagttaaaacag

SEQ ID NO: 56280 - DNA, 20 bp, Artificial Sequence
  Description of Artificial Sequence: Synthetic oligonucleotide
  Target: LAMA2; (-) strand; PAM type: NRG; PAM sequence: CAG
ccaattcattccagttaaaa

SEQ ID NO: 56281 - DNA, 20 bp, Artificial Sequence
  Description of Artificial Sequence: Synthetic oligonucleotide
  Target: LAMA2; (-) strand; PAM type: NRG; PAM sequence: CAG
ataacttatccaattcattc

SEQ ID NO: 56282 - DNA, 20 bp, Artificial Sequence
  Description of Artificial Sequence: Synthetic oligonucleotide
  Target: LAMA2; (-) strand; PAM type: NRG; PAM sequence: CAG
ttcaccaaactccatcccat

SEQ ID NO: 56283 - DNA, 20 bp, Artificial Sequence
  Description of Artificial Sequence: Synthetic oligonucleotide
  Target: LAMA2; (-) strand; PAM type: NRG; PAM sequence: AAG
atctcaaacctaatgcttaa

SEQ ID NO: 56284 - DNA, 20 bp, Artificial Sequence
  Description of Artificial Sequence: Synthetic oligonucleotide
  Target: LAMA2; (-) strand; PAM type: NRG; PAM sequence: TAG
aaagagaggtcaacactccc

SEQ ID NO: 56285 - DNA, 20 bp, Artificial Sequence
  Description of Artificial Sequence: Synthetic oligonucleotide
  Target: LAMA2; (-) strand; PAM type: NRG; PAM sequence: AGG
ataatgtcagggggaaagag

SEQ ID NO: 56286 - DNA, 20 bp, Artificial Sequence
  Description of Artificial Sequence: Synthetic oligonucleotide
  Target: LAMA2; (-) strand; PAM type: NRG; PAM sequence: GAG
gataatgtcagggggaaaga

SEQ ID NO: 56287 - DNA, 20 bp, Artificial Sequence
  Description of Artificial Sequence: Synthetic oligonucleotide
  Target: LAMA2; (-) strand; PAM type: NRG; PAM sequence: GAG
aggataatgtcagggggaaa

SEQ ID NO: 56288 - DNA, 20 bp, Artificial Sequence
  Description of Artificial Sequence: Synthetic oligonucleotide
  Target: LAMA2; (-) strand; PAM type: NRG; PAM sequence: AAG
tgaggataatgtcaggggga

SEQ ID NO: 56289 - DNA, 20 bp, Artificial Sequence
  Description of Artificial Sequence: Synthetic oligonucleotide
  Target: LAMA2; (-) strand; PAM type: NRG; PAM sequence: GGG
aatgtgaggataatgtcagg

SEQ ID NO: 56290 - DNA, 20 bp, Artificial Sequence
  Description of Artificial Sequence: Synthetic oligonucleotide
  Target: LAMA2; (-) strand; PAM type: NRG; PAM sequence: GGG
aaatgtgaggataatgtcag

SEQ ID NO: 56291 - DNA, 20 bp, Artificial Sequence
  Description of Artificial Sequence: Synthetic oligonucleotide
  Target: LAMA2; (-) strand; PAM type: NRG; PAM sequence: GGG
caaatgtgaggataatgtca

SEQ ID NO: 56292 - DNA, 20 bp, Artificial Sequence
  Description of Artificial Sequence: Synthetic oligonucleotide
  Target: LAMA2; (-) strand; PAM type: NRG; PAM sequence: AGG
acaaatgtgaggataatgtc

SEQ ID NO: 56293 - DNA, 20 bp, Artificial Sequence
  Description of Artificial Sequence: Synthetic oligonucleotide
  Target: LAMA2; (-) strand; PAM type: NRG; PAM sequence: CAG
aacaaatgtgaggataatgt

SEQ ID NO: 56294 - DNA, 20 bp, Artificial Sequence
  Description of Artificial Sequence: Synthetic oligonucleotide
  Target: LAMA2; (-) strand; PAM type: NRG; PAM sequence: AGG
gtggaataaaaacaaatgtg

SEQ ID NO: 56295 - DNA, 20 bp, Artificial Sequence
  Description of Artificial Sequence: Synthetic oligonucleotide
  Target: LAMA2; (-) strand; PAM type: NRG; PAM sequence: GAG
ggtggaataaaaacaaatgt

SEQ ID NO: 56296 - DNA, 20 bp, Artificial Sequence
  Description of Artificial Sequence: Synthetic oligonucleotide
  Target: LAMA2; (-) strand; PAM type: NRG; PAM sequence: TGG
gtggatcaaggtagatatgg

SEQ ID NO: 56297 - DNA, 20 bp, Artificial Sequence
  Description of Artificial Sequence: Synthetic oligonucleotide
  Target: LAMA2; (-) strand; PAM type: NRG; PAM sequence: TGG
caggtggatcaaggtagata

SEQ ID NO: 56298 - DNA, 20 bp, Artificial Sequence
  Description of Artificial Sequence: Synthetic oligonucleotide
  Target: LAMA2; (-) strand; PAM type: NRG; PAM sequence: TAG
aagaatcaggtggatcaagg

SEQ ID NO: 56299 - DNA, 20 bp, Artificial Sequence
  Description of Artificial Sequence: Synthetic oligonucleotide
  Target: LAMA2; (-) strand; PAM type: NRG; PAM sequence: AGG
gaaaagaatcaggtggatca

SEQ ID NO: 56300 - DNA, 20 bp, Artificial Sequence
  Description of Artificial Sequence: Synthetic oligonucleotide
  Target: LAMA2; (-) strand; PAM type: NRG; PAM sequence: AAG
tgaaaagaatcaggtggatc

SEQ ID NO: 56301 - DNA, 20 bp, Artificial Sequence
  Description of Artificial Sequence: Synthetic oligonucleotide
  Target: LAMA2; (-) strand; PAM type: NRG; PAM sequence: TGG
aaaaaatgaaaagaatcagg

SEQ ID NO: 56302 - DNA, 20 bp, Artificial Sequence
  Description of Artificial Sequence: Synthetic oligonucleotide
  Target: LAMA2; (-) strand; PAM type: NRG; PAM sequence: AGG
agaaaaaaatgaaaagaatc

SEQ ID NO: 56303 - DNA, 20 bp, Artificial Sequence
  Description of Artificial Sequence: Synthetic oligonucleotide
  Target: LAMA2; (-) strand; PAM type: NRG; PAM sequence: CAG
aagaaaaaaatgaaaagaat

SEQ ID NO: 56304 - DNA, 20 bp, Artificial Sequence
  Description of Artificial Sequence: Synthetic oligonucleotide
  Target: LAMA2; (-) strand; PAM type: NRG; PAM sequence: AAG
gaatgaaagaaaaaaatgaa

SEQ ID NO: 56305 - DNA, 20 bp, Artificial Sequence
  Description of Artificial Sequence: Synthetic oligonucleotide
  Target: LAMA2; (-) strand; PAM type: NRG; PAM sequence: AAG
agccagcacaaagagaatga

SEQ ID NO: 56306 - DNA, 20 bp, Artificial Sequence
  Description of Artificial Sequence: Synthetic oligonucleotide
  Target: LAMA2; (-) strand; PAM type: NRG; PAM sequence: GAG
ggaaagaaagccagcacaaa

SEQ ID NO: 56307 - DNA, 20 bp, Artificial Sequence
  Description of Artificial Sequence: Synthetic oligonucleotide
  Target: LAMA2; (-) strand; PAM type: NRG; PAM sequence: AAG
aaggaaagaaagccagcaca

SEQ ID NO: 56308 - DNA, 20 bp, Artificial Sequence
  Description of Artificial Sequence: Synthetic oligonucleotide
  Target: LAMA2; (-) strand; PAM type: NRG; PAM sequence: CAG
tttaaaaaaggaaagaaagc

SEQ ID NO: 56309 - DNA, 20 bp, Artificial Sequence
  Description of Artificial Sequence: Synthetic oligonucleotide
  Target: LAMA2; (-) strand; PAM type: NRG; PAM sequence: AAG
ggattttaaaaaaggaaaga

SEQ ID NO: 56310 - DNA, 20 bp, Artificial Sequence
  Description of Artificial Sequence: Synthetic oligonucleotide
  Target: LAMA2; (-) strand; PAM type: NRG; PAM sequence: AAG
catgggattttaaaaaagga

SEQ ID NO: 56311 - DNA, 20 bp, Artificial Sequence
  Description of Artificial Sequence: Synthetic oligonucleotide
  Target: LAMA2; (-) strand; PAM type: NRG; PAM sequence: AGG
ataccatgggattttaaaaa

SEQ ID NO: 56312 - DNA, 20 bp, Artificial Sequence
  Description of Artificial Sequence: Synthetic oligonucleotide
  Target: LAMA2; (-) strand; PAM type: NRG; PAM sequence: AAG
gataccatgggattttaaaa

SEQ ID NO: 56313 - DNA, 20 bp, Artificial Sequence
  Description of Artificial Sequence: Synthetic oligonucleotide
  Target: LAMA2; (-) strand; PAM type: NRG; PAM sequence: GGG
aagagatgatgagataccat

SEQ ID NO: 56314 - DNA, 20 bp, Artificial Sequence
  Description of Artificial Sequence: Synthetic oligonucleotide
  Target: LAMA2; (-) strand; PAM type: NRG; PAM sequence: TGG
gaagagatgatgagatacca

SEQ ID NO: 56315 - DNA, 20 bp, Artificial Sequence
  Description of Artificial Sequence: Synthetic oligonucleotide
  Target: LAMA2; (-) strand; PAM type: NRG; PAM sequence: GAG
ggaggacaagaagagatgat

SEQ ID NO: 56316 - DNA, 20 bp, Artificial Sequence
  Description of Artificial Sequence: Synthetic oligonucleotide
  Target: LAMA2; (-) strand; PAM type: NRG; PAM sequence: GAG
gtagaatgggaggacaagaa

SEQ ID NO: 56317 - DNA, 20 bp, Artificial Sequence
  Description of Artificial Sequence: Synthetic oligonucleotide
  Target: LAMA2; (-) strand; PAM type: NRG; PAM sequence: AAG
ttgtagaatgggaggacaag

SEQ ID NO: 56318 - DNA, 20 bp, Artificial Sequence
  Description of Artificial Sequence: Synthetic oligonucleotide
  Target: LAMA2; (-) strand; PAM type: NRG; PAM sequence: AAG
tatttgtagaatgggaggac

SEQ ID NO: 56319 - DNA, 20 bp, Artificial Sequence
  Description of Artificial Sequence: Synthetic oligonucleotide
  Target: LAMA2; (-) strand; PAM type: NRG; PAM sequence: AGG
tgttctatttgtagaatggg

SEQ ID NO: 56320 - DNA, 20 bp, Artificial Sequence
  Description of Artificial Sequence: Synthetic oligonucleotide
  Target: LAMA2; (-) strand; PAM type: NRG; PAM sequence: GAG
atgttctatttgtagaatgg

SEQ ID NO: 56321 - DNA, 20 bp, Artificial Sequence
  Description of Artificial Sequence: Synthetic oligonucleotide
  Target: LAMA2; (-) strand; PAM type: NRG; PAM sequence: GGG
tcatgttctatttgtagaat

SEQ ID NO: 56322 - DNA, 20 bp, Artificial Sequence
  Description of Artificial Sequence: Synthetic oligonucleotide
  Target: LAMA2; (-) strand; PAM type: NRG; PAM sequence: TGG
ttcatgttctatttgtagaa

SEQ ID NO: 56323 - DNA, 20 bp, Artificial Sequence
  Description of Artificial Sequence: Synthetic oligonucleotide
  Target: LAMA2; (-) strand; PAM type: NRG; PAM sequence: TAG
tcaatttcatgttctatttg

SEQ ID NO: 56324 - DNA, 20 bp, Artificial Sequence
  Description of Artificial Sequence: Synthetic oligonucleotide
  Target: LAMA2; (-) strand; PAM type: NRG; PAM sequence: AGG
gttttttttttttttaaaaa

SEQ ID NO: 56325 - DNA, 20 bp, Artificial Sequence
  Description of Artificial Sequence: Synthetic oligonucleotide
  Target: LAMA2; (-) strand; PAM type: NRG; PAM sequence: AAG
agttttttttttttttaaaa

SEQ ID NO: 56326 - DNA, 20 bp, Artificial Sequence
  Description of Artificial Sequence: Synthetic oligonucleotide
  Target: LAMA2; (-) strand; PAM type: NRG; PAM sequence: TAG
acatatattaattctgtaat

SEQ ID NO: 56327 - DNA, 20 bp, Artificial Sequence
  Description of Artificial Sequence: Synthetic oligonucleotide
  Target: LAMA2; (-) strand; PAM type: NRG; PAM sequence: TAG
ttctaattgtagtaagtaca

SEQ ID NO: 56328 - DNA, 20 bp, Artificial Sequence
  Description of Artificial Sequence: Synthetic oligonucleotide
  Target: LAMA2; (-) strand; PAM type: NRG; PAM sequence: AAG
atatagtttctaattgtagt

SEQ ID NO: 56329 - DNA, 20 bp, Artificial Sequence
  Description of Artificial Sequence: Synthetic oligonucleotide
  Target: LAMA2; (-) strand; PAM type: NRG; PAM sequence: TAG
ttatatatagtttctaattg

SEQ ID NO: 56330 - DNA, 20 bp, Artificial Sequence
  Description of Artificial Sequence: Synthetic oligonucleotide
  Target: LAMA2; (-) strand; PAM type: NRG; PAM sequence: TAG
ctctcttttttgtttatata

SEQ ID NO: 56331 - DNA, 20 bp, Artificial Sequence
  Description of Artificial Sequence: Synthetic oligonucleotide
  Target: LAMA2; (-) strand; PAM type: NRG; PAM sequence: AAG
ttgcatgtggattgatgggc

SEQ ID NO: 56332 - DNA, 20 bp, Artificial Sequence
  Description of Artificial Sequence: Synthetic oligonucleotide
  Target: LAMA2; (-) strand; PAM type: NRG; PAM sequence: GGG
aattttgcatgtggattgat

SEQ ID NO: 56333 - DNA, 20 bp, Artificial Sequence
  Description of Artificial Sequence: Synthetic oligonucleotide
  Target: LAMA2; (-) strand; PAM type: NRG; PAM sequence: TGG
caattttgcatgtggattga

SEQ ID NO: 56334 - DNA, 20 bp, Artificial Sequence
  Description of Artificial Sequence: Synthetic oligonucleotide
  Target: LAMA2; (-) strand; PAM type: NRG; PAM sequence: TGG
tactcaaccaattttgcatg

SEQ ID NO: 56335 - DNA, 20 bp, Artificial Sequence
  Description of Artificial Sequence: Synthetic oligonucleotide
  Target: LAMA2; (-) strand; PAM type: NRG; PAM sequence: AGG
tatactattacaaatcttca

SEQ ID NO: 56336 - DNA, 20 bp, Artificial Sequence
  Description of Artificial Sequence: Synthetic oligonucleotide
  Target: LAMA2; (-) strand; PAM type: NRG; PAM sequence: AAG
atatactattacaaatcttc

SEQ ID NO: 56337 - DNA, 20 bp, Artificial Sequence
  Description of Artificial Sequence: Synthetic oligonucleotide
  Target: LAMA2; (-) strand; PAM type: NRG; PAM sequence: AAG
gaatacacttttaaatagtt

SEQ ID NO: 56338 - DNA, 20 bp, Artificial Sequence
  Description of Artificial Sequence: Synthetic oligonucleotide
  Target: LAMA2; (-) strand; PAM type: NRG; PAM sequence: TAG
atgcagaatacacttttaaa

SEQ ID NO: 56339 - DNA, 20 bp, Artificial Sequence
  Description of Artificial Sequence: Synthetic oligonucleotide
  Target: LAMA2; (-) strand; PAM type: NRG; PAM sequence: CAG
atgacttttaattgagaatg

SEQ ID NO: 56340 - DNA, 20 bp, Artificial Sequence
  Description of Artificial Sequence: Synthetic oligonucleotide
  Target: LAMA2; (-) strand; PAM type: NRG; PAM sequence: GAG
agataaaatgacttttaatt

SEQ ID NO: 56341 - DNA, 20 bp, Artificial Sequence
  Description of Artificial Sequence: Synthetic oligonucleotide
  Target: LAMA2; (-) strand; PAM type: NRG; PAM sequence: AAG
aggaataaaagaaaaagtaa

SEQ ID NO: 56342 - DNA, 20 bp, Artificial Sequence
  Description of Artificial Sequence: Synthetic oligonucleotide
  Target: LAMA2; (-) strand; PAM type: NRG; PAM sequence: AAG
ttaaaaaggaataaaagaaa

SEQ ID NO: 56343 - DNA, 20 bp, Artificial Sequence
  Description of Artificial Sequence: Synthetic oligonucleotide
  Target: LAMA2; (-) strand; PAM type: NRG; PAM sequence: AAG
tgttgcttaaaaaggaataa

SEQ ID NO: 56344 - DNA, 20 bp, Artificial Sequence
  Description of Artificial Sequence: Synthetic oligonucleotide
  Target: LAMA2; (-) strand; PAM type: NRG; PAM sequence: AGG
aattcatttgttgcttaaaa

SEQ ID NO: 56345 - DNA, 20 bp, Artificial Sequence
  Description of Artificial Sequence: Synthetic oligonucleotide
  Target: LAMA2; (-) strand; PAM type: NRG; PAM sequence: AAG
taattcatttgttgcttaaa

SEQ ID NO: 56346 - DNA, 20 bp, Artificial Sequence
  Description of Artificial Sequence: Synthetic oligonucleotide
  Target: LAMA2; (-) strand; PAM type: NRG; PAM sequence: AGG
ataggtcatatataaaacaa

SEQ ID NO: 56347 - DNA, 20 bp, Artificial Sequence
  Description of Artificial Sequence: Synthetic oligonucleotide
  Target: LAMA2; (-) strand; PAM type: NRG; PAM sequence: AAG
aataggtcatatataaaaca

SEQ ID NO: 56348 - DNA, 20 bp, Artificial Sequence
  Description of Artificial Sequence: Synthetic oligonucleotide
  Target: LAMA2; (-) strand; PAM type: NRG; PAM sequence: AGG
ctttctccattgaggttaat

SEQ ID NO: 56349 - DNA, 20 bp, Artificial Sequence
  Description of Artificial Sequence: Synthetic oligonucleotide
  Target: LAMA2; (-) strand; PAM type: NRG; PAM sequence: TAG
tctttctccattgaggttaa

SEQ ID NO: 56350 - DNA, 20 bp, Artificial Sequence
  Description of Artificial Sequence: Synthetic oligonucleotide
  Target: LAMA2; (-) strand; PAM type: NRG; PAM sequence: AGG
gggagcctctttctccattg

SEQ ID NO: 56351 - DNA, 20 bp, Artificial Sequence
  Description of Artificial Sequence: Synthetic oligonucleotide
  Target: LAMA2; (-) strand; PAM type: NRG; PAM sequence: GAG
agggagcctctttctccatt

SEQ ID NO: 56352 - DNA, 20 bp, Artificial Sequence
  Description of Artificial Sequence: Synthetic oligonucleotide
  Target: LAMA2; (-) strand; PAM type: NRG; PAM sequence: GAG
agtcctgaagcaaacaaagg

SEQ ID NO: 56353 - DNA, 20 bp, Artificial Sequence
  Description of Artificial Sequence: Synthetic oligonucleotide
  Target: LAMA2; (-) strand; PAM type: NRG; PAM sequence: GGG
taagtcctgaagcaaacaaa

SEQ ID NO: 56354 - DNA, 20 bp, Artificial Sequence
  Description of Artificial Sequence: Synthetic oligonucleotide
  Target: LAMA2; (-) strand; PAM type: NRG; PAM sequence: AGG
gtaagtcctgaagcaaacaa

SEQ ID NO: 56355 - DNA, 20 bp, Artificial Sequence
  Description of Artificial Sequence: Synthetic oligonucleotide
  Target: LAMA2; (-) strand; PAM type: NRG; PAM sequence: AAG
tgtaagtcctgaagcaaaca

SEQ ID NO: 56356 - DNA, 20 bp, Artificial Sequence
  Description of Artificial Sequence: Synthetic oligonucleotide
  Target: LAMA2; (-) strand; PAM type: NRG; PAM sequence: AAG
gtaacaatatgtaagtcctg

SEQ ID NO: 56357 - DNA, 20 bp, Artificial Sequence
  Description of Artificial Sequence: Synthetic oligonucleotide
  Target: LAMA2; (-) strand; PAM type: NRG; PAM sequence: AAG
gactaactgtaacaatatgt

SEQ ID NO: 56358 - DNA, 20 bp, Artificial Sequence
  Description of Artificial Sequence: Synthetic oligonucleotide
  Target: LAMA2; (-) strand; PAM type: NRG; PAM sequence: AGG
cttctcatttcatttaccta

SEQ ID NO: 56359 - DNA, 20 bp, Artificial Sequence
  Description of Artificial Sequence: Synthetic oligonucleotide
  Target: LAMA2; (-) strand; PAM type: NRG; PAM sequence: AAG
tcttctcatttcatttacct

SEQ ID NO: 56360 - DNA, 20 bp, Artificial Sequence
  Description of Artificial Sequence: Synthetic oligonucleotide
  Target: LAMA2; (-) strand; PAM type: NRG; PAM sequence: AAG
gaagaactagtgctgatgtg

SEQ ID NO: 56361 - DNA, 20 bp, Artificial Sequence
  Description of Artificial Sequence: Synthetic oligonucleotide
  Target: LAMA2; (-) strand; PAM type: NRG; PAM sequence: TAG
aaaattccatggggaagaac

SEQ ID NO: 56362 - DNA, 20 bp, Artificial Sequence
  Description of Artificial Sequence: Synthetic oligonucleotide
  Target: LAMA2; (-) strand; PAM type: NRG; PAM sequence: AAG
gaaactaaaattccatgggg

SEQ ID NO: 56363 - DNA, 20 bp, Artificial Sequence
  Description of Artificial Sequence: Synthetic oligonucleotide
  Target: LAMA2; (-) strand; PAM type: NRG; PAM sequence: GGG
ggagaaactaaaattccatg

SEQ ID NO: 56364 - DNA, 20 bp, Artificial Sequence
  Description of Artificial Sequence: Synthetic oligonucleotide
  Target: LAMA2; (-) strand; PAM type: NRG; PAM sequence: GGG
tggagaaactaaaattccat

SEQ ID NO: 56365 - DNA, 20 bp, Artificial Sequence
  Description of Artificial Sequence: Synthetic oligonucleotide
  Target: LAMA2; (-) strand; PAM type: NRG; PAM sequence: TGG
gtggagaaactaaaattcca

SEQ ID NO: 56366 - DNA, 20 bp, Artificial Sequence
  Description of Artificial Sequence: Synthetic oligonucleotide
  Target: LAMA2; (-) strand; PAM type: NRG; PAM sequence: GAG
cattcagtaaagtggttgtg

SEQ ID NO: 56367 - DNA, 20 bp, Artificial Sequence
  Description of Artificial Sequence: Synthetic oligonucleotide
  Target: LAMA2; (-) strand; PAM type: NRG; PAM sequence: TGG
cacattcagtaaagtggttg

SEQ ID NO: 56368 - DNA, 20 bp, Artificial Sequence
  Description of Artificial Sequence: Synthetic oligonucleotide
  Target: LAMA2; (-) strand; PAM type: NRG; PAM sequence: TGG
attatacacattcagtaaag

SEQ ID NO: 56369 - DNA, 20 bp, Artificial Sequence
  Description of Artificial Sequence: Synthetic oligonucleotide
  Target: LAMA2; (-) strand; PAM type: NRG; PAM sequence: AAG
ataattatacacattcagta

SEQ ID NO: 56370 - DNA, 20 bp, Artificial Sequence
  Description of Artificial Sequence: Synthetic oligonucleotide
  Target: LAMA2; (-) strand; PAM type: NRG; PAM sequence: CAG
ttcttataattatacacatt

SEQ ID NO: 56371 - DNA, 20 bp, Artificial Sequence
  Description of Artificial Sequence: Synthetic oligonucleotide
  Target: LAMA2; (-) strand; PAM type: NRG; PAM sequence: AAG
aaataaagagaaaaagttgt

SEQ ID NO: 56372 - DNA, 20 bp, Artificial Sequence
  Description of Artificial Sequence: Synthetic oligonucleotide
  Target: LAMA2; (-) strand; PAM type: NRG; PAM sequence: AAG
gagtataaaataaagagaaa

SEQ ID NO: 56373 - DNA, 20 bp, Artificial Sequence
  Description of Artificial Sequence: Synthetic oligonucleotide
  Target: LAMA2; (-) strand; PAM type: NRG; PAM sequence: GAG
gggtgagagtataaaataaa

SEQ ID NO: 56374 - DNA, 20 bp, Artificial Sequence
  Description of Artificial Sequence: Synthetic oligonucleotide
  Target: LAMA2; (-) strand; PAM type: NRG; PAM sequence: AAG
tagggtgagagtataaaata

SEQ ID NO: 56375 - DNA, 20 bp, Artificial Sequence
  Description of Artificial Sequence: Synthetic oligonucleotide
  Target: LAMA2; (-) strand; PAM type: NRG; PAM sequence: GAG
aaggacagataatagggtga

SEQ ID NO: 56376 - DNA, 20 bp, Artificial Sequence
  Description of Artificial Sequence: Synthetic oligonucleotide
  Target: LAMA2; (-) strand; PAM type: NRG; PAM sequence: GAG
aaaaggacagataatagggt

SEQ ID NO: 56377 - DNA, 20 bp, Artificial Sequence
  Description of Artificial Sequence: Synthetic oligonucleotide
  Target: LAMA2; (-) strand; PAM type: NRG; PAM sequence: GGG
aagaaaaaggacagataata

SEQ ID NO: 56378 - DNA, 20 bp, Artificial Sequence
  Description of Artificial Sequence: Synthetic oligonucleotide
  Target: LAMA2; (-) strand; PAM type: NRG; PAM sequence: AGG
aaagaaaaaggacagataat

SEQ ID NO: 56379 - DNA, 20 bp, Artificial Sequence
  Description of Artificial Sequence: Synthetic oligonucleotide
  Target: LAMA2; (-) strand; PAM type: NRG; PAM sequence: TAG
aaaagaaaaaggacagataa

SEQ ID NO: 56380 - DNA, 20 bp, Artificial Sequence
  Description of Artificial Sequence: Synthetic oligonucleotide
  Target: LAMA2; (-) strand; PAM type: NRG; PAM sequence: CAG
gaaaaaaaaaagaaaaagga

SEQ ID NO: 56381 - DNA, 20 bp, Artificial Sequence
  Description of Artificial Sequence: Synthetic oligonucleotide
  Target: LAMA2; (-) strand; PAM type: NRG; PAM sequence: AGG
gaaagaaaaaaaaaagaaaa

SEQ ID NO: 56382 - DNA, 20 bp, Artificial Sequence
  Description of Artificial Sequence: Synthetic oligonucleotide
  Target: LAMA2; (-) strand; PAM type: NRG; PAM sequence: AAG
agaaagaaaaaaaaaagaaa

SEQ ID NO: 56383 - DNA, 20 bp, Artificial Sequence
  Description of Artificial Sequence: Synthetic oligonucleotide
  Target: LAMA2; (-) strand; PAM type: NRG; PAM sequence: AAG
aaagaaagaaagaaaaaaaa

SEQ ID NO: 56384 - DNA, 20 bp, Artificial Sequence
  Description of Artificial Sequence: Synthetic oligonucleotide
  Target: LAMA2; (-) strand; PAM type: NRG; PAM sequence: AAG
aagaaagaaagaaagaaaga

SEQ ID NO: 56385 - DNA, 20 bp, Artificial Sequence
  Description of Artificial Sequence: Synthetic oligonucleotide
  Target: LAMA2; (-) strand; PAM type: NRG; PAM sequence: AAG
aagaaagaaagaaagaaaga

SEQ ID NO: 56386 - DNA, 20 bp, Artificial Sequence
  Description of Artificial Sequence: Synthetic oligonucleotide
  Target: LAMA2; (-) strand; PAM type: NRG; PAM sequence: AAG
aaaaaagaaagaaagaaaga

SEQ ID NO: 56387 - DNA, 20 bp, Artificial Sequence
  Description of Artificial Sequence: Synthetic oligonucleotide
  Target: LAMA2; (-) strand; PAM type: NRG; PAM sequence: AAG
aaaaaaaaaagaaagaaaga

SEQ ID NO: 56388 - DNA, 20 bp, Artificial Sequence
  Description of Artificial Sequence: Synthetic oligonucleotide
  Target: LAMA2; (-) strand; PAM type: NRG; PAM sequence: AAG
aaaaaaaaaaaaaagaaaga

SEQ ID NO: 56389 - DNA, 20 bp, Artificial Sequence
  Description of Artificial Sequence: Synthetic oligonucleotide
  Target: LAMA2; (-) strand; PAM type: NRG; PAM sequence: AAG
caaaaaaaaaaaaaaaaaga

SEQ ID NO: 56390 - DNA, 20 bp, Artificial Sequence
  Description of Artificial Sequence: Synthetic oligonucleotide
  Target: LAMA2; (-) strand; PAM type: NRG; PAM sequence: AAG
gtctcaaaaaaaaaaaaaaa

SEQ ID NO: 56391 - DNA, 20 bp, Artificial Sequence
  Description of Artificial Sequence: Synthetic oligonucleotide
  Target: LAMA2; (-) strand; PAM type: NRG; PAM sequence: GAG
cagcctgggcaacggagtaa

SEQ ID NO: 56392 - DNA, 20 bp, Artificial Sequence
  Description of Artificial Sequence: Synthetic oligonucleotide
  Target: LAMA2; (-) strand; PAM type: NRG; PAM sequence: AAG
ttcagcctgggcaacggagt

SEQ ID NO: 56393 - DNA, 20 bp, Artificial Sequence
  Description of Artificial Sequence: Synthetic oligonucleotide
  Target: LAMA2; (-) strand; PAM type: NRG; PAM sequence: GAG
gcacttcagcctgggcaacg

SEQ ID NO: 56394 - DNA, 20 bp, Artificial Sequence
  Description of Artificial Sequence: Synthetic oligonucleotide
  Target: LAMA2; (-) strand; PAM type: NRG; PAM sequence: CGG
ctgcacttcagcctgggcaa

SEQ ID NO: 56395 - DNA, 20 bp, Artificial Sequence
  Description of Artificial Sequence: Synthetic oligonucleotide
  Target: LAMA2; (-) strand; PAM type: NRG; PAM sequence: GGG
ctgccactgcacttcagcct

SEQ ID NO: 56396 - DNA, 20 bp, Artificial Sequence
  Description of Artificial Sequence: Synthetic oligonucleotide
  Target: LAMA2; (-) strand; PAM type: NRG; PAM sequence: TGG
cctgccactgcacttcagcc

SEQ ID NO: 56397 - DNA, 20 bp, Artificial Sequence
  Description of Artificial Sequence: Synthetic oligonucleotide
  Target: LAMA2; (-) strand; PAM type: NRG; PAM sequence: CAG
atgatcctgccactgcactt

SEQ ID NO: 56398 - DNA, 20 bp, Artificial Sequence
  Description of Artificial Sequence: Synthetic oligonucleotide
  Target: LAMA2; (-) strand; PAM type: NRG; PAM sequence: AAG
tgagatgtcaagggcacaat

SEQ ID NO: 56399 - DNA, 20 bp, Artificial Sequence
  Description of Artificial Sequence: Synthetic oligonucleotide
  Target: LAMA2; (-) strand; PAM type: NRG; PAM sequence: GGG
acttgaaactgagatgtcaa

SEQ ID NO: 56400 - DNA, 20 bp, Artificial Sequence
  Description of Artificial Sequence: Synthetic oligonucleotide
  Target: LAMA2; (-) strand; PAM type: NRG; PAM sequence: AGG
cacttgaaactgagatgtca

SEQ ID NO: 56401 - DNA, 20 bp, Artificial Sequence
  Description of Artificial Sequence: Synthetic oligonucleotide
  Target: LAMA2; (-) strand; PAM type: NRG; PAM sequence: AAG
tcacttgaaactgagatgtc

SEQ ID NO: 56402 - DNA, 20 bp, Artificial Sequence
  Description of Artificial Sequence: Synthetic oligonucleotide
  Target: LAMA2; (-) strand; PAM type: NRG; PAM sequence: GAG
tgggagtatcacttgaaact

SEQ ID NO: 56403 - DNA, 20 bp, Artificial Sequence
  Description of Artificial Sequence: Synthetic oligonucleotide
  Target: LAMA2; (-) strand; PAM type: NRG; PAM sequence: GAG
tagtgaagaggctgaagtgg

SEQ ID NO: 56404 - DNA, 20 bp, Artificial Sequence
  Description of Artificial Sequence: Synthetic oligonucleotide
  Target: LAMA2; (-) strand; PAM type: NRG; PAM sequence: GGG
gctagtgaagaggctgaagt

SEQ ID NO: 56405 - DNA, 20 bp, Artificial Sequence
  Description of Artificial Sequence: Synthetic oligonucleotide
  Target: LAMA2; (-) strand; PAM type: NRG; PAM sequence: TGG
agctagtgaagaggctgaag

SEQ ID NO: 56406 - DNA, 20 bp, Artificial Sequence
  Description of Artificial Sequence: Synthetic oligonucleotide
  Target: LAMA2; (-) strand; PAM type: NRG; PAM sequence: AAG
cccagctagtgaagaggctg

SEQ ID NO: 56407 - DNA, 20 bp, Artificial Sequence
  Description of Artificial Sequence: Synthetic oligonucleotide
  Target: LAMA2; (-) strand; PAM type: NRG; PAM sequence: AGG
tgtagtcccagctagtgaag

SEQ ID NO: 56408 - DNA, 20 bp, Artificial Sequence
  Description of Artificial Sequence: Synthetic oligonucleotide
  Target: LAMA2; (-) strand; PAM type: NRG; PAM sequence: GAG
ctgtagtcccagctagtgaa

SEQ ID NO: 56409 - DNA, 20 bp, Artificial Sequence
  Description of Artificial Sequence: Synthetic oligonucleotide
  Target: LAMA2; (-) strand; PAM type: NRG; PAM sequence: AAG
gcctgtagtcccagctagtg

SEQ ID NO: 56410 - DNA, 20 bp, Artificial Sequence
  Description of Artificial Sequence: Synthetic oligonucleotide
  Target: LAMA2; (-) strand; PAM type: NRG; PAM sequence: TAG
caagagcctgtagtcccagc

SEQ ID NO: 56411 - DNA, 20 bp, Artificial Sequence
  Description of Artificial Sequence: Synthetic oligonucleotide
  Target: LAMA2; (-) strand; PAM type: NRG; PAM sequence: CAG
gtggcaagagcctgtagtcc

SEQ ID NO: 56412 - DNA, 20 bp, Artificial Sequence
  Description of Artificial Sequence: Synthetic oligonucleotide
  Target: LAMA2; (-) strand; PAM type: NRG; PAM sequence: TAG
ggtggggtggcaagagcctg

SEQ ID NO: 56413 - DNA, 20 bp, Artificial Sequence
  Description of Artificial Sequence: Synthetic oligonucleotide
  Target: LAMA2; (-) strand; PAM type: NRG; PAM sequence: GAG
ttagccaggtggggtggcaa

SEQ ID NO: 56414 - DNA, 20 bp, Artificial Sequence
  Description of Artificial Sequence: Synthetic oligonucleotide
  Target: LAMA2; (-) strand; PAM type: NRG; PAM sequence: AAG
aattagccaggtggggtggc

SEQ ID NO: 56415 - DNA, 20 bp, Artificial Sequence
  Description of Artificial Sequence: Synthetic oligonucleotide
  Target: LAMA2; (-) strand; PAM type: NRG; PAM sequence: TGG
gaaaaattagccaggtgggg

SEQ ID NO: 56416 - DNA, 20 bp, Artificial Sequence
  Description of Artificial Sequence: Synthetic oligonucleotide
  Target: LAMA2; (-) strand; PAM type: NRG; PAM sequence: GGG
atagaaaaattagccaggtg

SEQ ID NO: 56417 - DNA, 20 bp, Artificial Sequence
  Description of Artificial Sequence: Synthetic oligonucleotide
  Target: LAMA2; (-) strand; PAM type: NRG; PAM sequence: GGG
aatagaaaaattagccaggt

SEQ ID NO: 56418 - DNA, 20 bp, Artificial Sequence
  Description of Artificial Sequence: Synthetic oligonucleotide
  Target: LAMA2; (-) strand; PAM type: NRG; PAM sequence: TGG
aaatagaaaaattagccagg

SEQ ID NO: 56419 - DNA, 20 bp, Artificial Sequence
  Description of Artificial Sequence: Synthetic oligonucleotide
  Target: LAMA2; (-) strand; PAM type: NRG; PAM sequence: AGG
aaaaaatagaaaaattagcc

SEQ ID NO: 56420 - DNA, 20 bp, Artificial Sequence
  Description of Artificial Sequence: Synthetic oligonucleotide
  Target: LAMA2; (-) strand; PAM type: NRG; PAM sequence: CAG
aaaaaaatagaaaaattagc

SEQ ID NO: 56421 - DNA, 20 bp, Artificial Sequence
  Description of Artificial Sequence: Synthetic oligonucleotide
  Target: LAMA2; (-) strand; PAM type: NRG; PAM sequence: TAG
tacaaaaaaaatagaaaaat

SEQ ID NO: 56422 - DNA, 20 bp, Artificial Sequence
  Description of Artificial Sequence: Synthetic oligonucleotide
  Target: LAMA2; (-) strand; PAM type: NRG; PAM sequence: TAG
taccatctttacaaaaaaaa

SEQ ID NO: 56423 - DNA, 20 bp, Artificial Sequence
  Description of Artificial Sequence: Synthetic oligonucleotide
  Target: LAMA2; (-) strand; PAM type: NRG; PAM sequence: AAG
tcagtctgagcaacatggca

SEQ ID NO: 56424 - DNA, 20 bp, Artificial Sequence
  Description of Artificial Sequence: Synthetic oligonucleotide
  Target: LAMA2; (-) strand; PAM type: NRG; PAM sequence: TGG
ggagttcagtctgagcaaca

SEQ ID NO: 56425 - DNA, 20 bp, Artificial Sequence
  Description of Artificial Sequence: Synthetic oligonucleotide
  Target: LAMA2; (-) strand; PAM type: NRG; PAM sequence: GAG
tgagcccaggagttcagtct

SEQ ID NO: 56426 - DNA, 20 bp, Artificial Sequence
  Description of Artificial Sequence: Synthetic oligonucleotide
  Target: LAMA2; (-) strand; PAM type: NRG; PAM sequence: CAG
attgtttgagcccaggagtt

SEQ ID NO: 56427 - DNA, 20 bp, Artificial Sequence
  Description of Artificial Sequence: Synthetic oligonucleotide
  Target: LAMA2; (-) strand; PAM type: NRG; PAM sequence: GAG
ggaggattgtttgagcccag

SEQ ID NO: 56428 - DNA, 20 bp, Artificial Sequence
  Description of Artificial Sequence: Synthetic oligonucleotide
  Target: LAMA2; (-) strand; PAM type: NRG; PAM sequence: AGG
ggggaggattgtttgagccc

SEQ ID NO: 56429 - DNA, 20 bp, Artificial Sequence
  Description of Artificial Sequence: Synthetic oligonucleotide
  Target: LAMA2; (-) strand; PAM type: NRG; PAM sequence: CAG
tggggaggattgtttgagcc

SEQ ID NO: 56430 - DNA, 20 bp, Artificial Sequence
  Description of Artificial Sequence: Synthetic oligonucleotide
  Target: LAMA2; (-) strand; PAM type: NRG; PAM sequence: GAG
cgaggtggggaggattgttt

SEQ ID NO: 56431 - DNA, 20 bp, Artificial Sequence
  Description of Artificial Sequence: Synthetic oligonucleotide
  Target: LAMA2; (-) strand; PAM type: NRG; PAM sequence: AGG
tatgggaggccgaggtgggg

SEQ ID NO: 56432 - DNA, 20 bp, Artificial Sequence
  Description of Artificial Sequence: Synthetic oligonucleotide
  Target: LAMA2; (-) strand; PAM type: NRG; PAM sequence: GAG
ctatgggaggccgaggtggg

SEQ ID NO: 56433 - DNA, 20 bp, Artificial Sequence
  Description of Artificial Sequence: Synthetic oligonucleotide
  Target: LAMA2; (-) strand; PAM type: NRG; PAM sequence: GGG
cactatgggaggccgaggtg

SEQ ID NO: 56434 - DNA, 20 bp, Artificial Sequence
  Description of Artificial Sequence: Synthetic oligonucleotide
  Target: LAMA2; (-) strand; PAM type: NRG; PAM sequence: GGG
gcactatgggaggccgaggt

SEQ ID NO: 56435 - DNA, 20 bp, Artificial Sequence
  Description of Artificial Sequence: Synthetic oligonucleotide
  Target: LAMA2; (-) strand; PAM type: NRG; PAM sequence: TGG
agcactatgggaggccgagg

SEQ ID NO: 56436 - DNA, 20 bp, Artificial Sequence
  Description of Artificial Sequence: Synthetic oligonucleotide
  Target: LAMA2; (-) strand; PAM type: NRG; PAM sequence: AGG
cctagcactatgggaggccg

SEQ ID NO: 56437 - DNA, 20 bp, Artificial Sequence
  Description of Artificial Sequence: Synthetic oligonucleotide
  Target: LAMA2; (-) strand; PAM type: NRG; PAM sequence: GAG
tcctagcactatgggaggcc

SEQ ID NO: 56438 - DNA, 20 bp, Artificial Sequence
  Description of Artificial Sequence: Synthetic oligonucleotide
  Target: LAMA2; (-) strand; PAM type: NRG; PAM sequence: AGG
tataatcctagcactatggg

SEQ ID NO: 56439 - DNA, 20 bp, Artificial Sequence
  Description of Artificial Sequence: Synthetic oligonucleotide
  Target: LAMA2; (-) strand; PAM type: NRG; PAM sequence: GAG
ctataatcctagcactatgg

SEQ ID NO: 56440 - DNA, 20 bp, Artificial Sequence
  Description of Artificial Sequence: Synthetic oligonucleotide
  Target: LAMA2; (-) strand; PAM type: NRG; PAM sequence: GGG
gcctataatcctagcactat

SEQ ID NO: 56441 - DNA, 20 bp, Artificial Sequence
  Description of Artificial Sequence: Synthetic oligonucleotide
  Target: LAMA2; (-) strand; PAM type: NRG; PAM sequence: TGG
tgcctataatcctagcacta

SEQ ID NO: 56442 - DNA, 20 bp, Artificial Sequence
  Description of Artificial Sequence: Synthetic oligonucleotide
  Target: LAMA2; (-) strand; PAM type: NRG; PAM sequence: TAG
gtggctcatgcctataatcc

SEQ ID NO: 56443 - DNA, 20 bp, Artificial Sequence
  Description of Artificial Sequence: Synthetic oligonucleotide
  Target: LAMA2; (-) strand; PAM type: NRG; PAM sequence: TGG
aatataaaagccaggtgcag

SEQ ID NO: 56444 - DNA, 20 bp, Artificial Sequence
  Description of Artificial Sequence: Synthetic oligonucleotide
  Target: LAMA2; (-) strand; PAM type: NRG; PAM sequence: CAG
aagaatataaaagccaggtg

SEQ ID NO: 56445 - DNA, 20 bp, Artificial Sequence
  Description of Artificial Sequence: Synthetic oligonucleotide
  Target: LAMA2; (-) strand; PAM type: NRG; PAM sequence: AGG
atattaagaatataaaagcc

SEQ ID NO: 56446 - DNA, 20 bp, Artificial Sequence
  Description of Artificial Sequence: Synthetic oligonucleotide
  Target: LAMA2; (-) strand; PAM type: NRG; PAM sequence: CAG
aatattaagaatataaaagc

SEQ ID NO: 56447 - DNA, 20 bp, Artificial Sequence
  Description of Artificial Sequence: Synthetic oligonucleotide
  Target: LAMA2; (-) strand; PAM type: NRG; PAM sequence: AAG
aagaaatattaagaatataa

SEQ ID NO: 56448 - DNA, 20 bp, Artificial Sequence
  Description of Artificial Sequence: Synthetic oligonucleotide
  Target: LAMA2; (-) strand; PAM type: NRG; PAM sequence: AAG
tagaagaaacaagaaatatt

SEQ ID NO: 56449 - DNA, 20 bp, Artificial Sequence
  Description of Artificial Sequence: Synthetic oligonucleotide
  Target: LAMA2; (-) strand; PAM type: NRG; PAM sequence: AAG
agaaaataaatagaagaaac

SEQ ID NO: 56450 - DNA, 20 bp, Artificial Sequence
  Description of Artificial Sequence: Synthetic oligonucleotide
  Target: LAMA2; (-) strand; PAM type: NRG; PAM sequence: AAG
aaagtaaagaaaataaatag

SEQ ID NO: 56451 - DNA, 20 bp, Artificial Sequence
  Description of Artificial Sequence: Synthetic oligonucleotide
  Target: LAMA2; (-) strand; PAM type: NRG; PAM sequence: TAG
tttaaagtaaagaaaataaa

SEQ ID NO: 56452 - DNA, 20 bp, Artificial Sequence
  Description of Artificial Sequence: Synthetic oligonucleotide
  Target: LAMA2; (-) strand; PAM type: NRG; PAM sequence: AAG
ataacaacgagtttaaagta

SEQ ID NO: 56453 - DNA, 20 bp, Artificial Sequence
  Description of Artificial Sequence: Synthetic oligonucleotide
  Target: LAMA2; (-) strand; PAM type: NRG; PAM sequence: AAG
actttataacaacgagttta

SEQ ID NO: 56454 - DNA, 20 bp, Artificial Sequence
  Description of Artificial Sequence: Synthetic oligonucleotide
  Target: LAMA2; (-) strand; PAM type: NRG; PAM sequence: GAG
ccataccactttataacaac

SEQ ID NO: 56455 - DNA, 20 bp, Artificial Sequence
  Description of Artificial Sequence: Synthetic oligonucleotide
  Target: LAMA2; (-) strand; PAM type: NRG; PAM sequence: GAG
cactcacacacagaaaaaca

SEQ ID NO: 56456 - DNA, 20 bp, Artificial Sequence
  Description of Artificial Sequence: Synthetic oligonucleotide
  Target: LAMA2; (-) strand; PAM type: NRG; PAM sequence: CAG
ttcactcacacacagaaaaa

SEQ ID NO: 56457 - DNA, 20 bp, Artificial Sequence
  Description of Artificial Sequence: Synthetic oligonucleotide
  Target: LAMA2; (-) strand; PAM type: NRG; PAM sequence: CAG
ctaaatctttcactcacaca

SEQ ID NO: 56458 - DNA, 20 bp, Artificial Sequence
  Description of Artificial Sequence: Synthetic oligonucleotide
  Target: LAMA2; (-) strand; PAM type: NRG; PAM sequence: AAG
aacatcattactttgggaag

SEQ ID NO: 56459 - DNA, 20 bp, Artificial Sequence
  Description of Artificial Sequence: Synthetic oligonucleotide
  Target: LAMA2; (-) strand; PAM type: NRG; PAM sequence: AAG
gtaaacatcattactttggg

SEQ ID NO: 56460 - DNA, 20 bp, Artificial Sequence
  Description of Artificial Sequence: Synthetic oligonucleotide
  Target: LAMA2; (-) strand; PAM type: NRG; PAM sequence: GGG
ttggtaaacatcattacttt

SEQ ID NO: 56461 - DNA, 20 bp, Artificial Sequence
  Description of Artificial Sequence: Synthetic oligonucleotide
  Target: LAMA2; (-) strand; PAM type: NRG; PAM sequence: TGG
tttggtaaacatcattactt

SEQ ID NO: 56462 - DNA, 20 bp, Artificial Sequence
  Description of Artificial Sequence: Synthetic oligonucleotide
  Target: LAMA2; (-) strand; PAM type: NRG; PAM sequence: TGG
aagtaatgttaccagtgttt

SEQ ID NO: 56463 - DNA, 20 bp, Artificial Sequence
  Description of Artificial Sequence: Synthetic oligonucleotide
  Target: LAMA2; (-) strand; PAM type: NRG; PAM sequence: CAG
gaaatttaaagtaatgttac

SEQ ID NO: 56464 - DNA, 20 bp, Artificial Sequence
  Description of Artificial Sequence: Synthetic oligonucleotide
  Target: LAMA2; (-) strand; PAM type: NRG; PAM sequence: AAG
ttataaatttaggaaattta

SEQ ID NO: 56465 - DNA, 20 bp, Artificial Sequence
  Description of Artificial Sequence: Synthetic oligonucleotide
  Target: LAMA2; (-) strand; PAM type: NRG; PAM sequence: AGG
ctaaattgaattataaattt

SEQ ID NO: 56466 - DNA, 20 bp, Artificial Sequence
  Description of Artificial Sequence: Synthetic oligonucleotide
  Target: LAMA2; (-) strand; PAM type: NRG; PAM sequence: TAG
actaaattgaattataaatt

SEQ ID NO: 56467 - DNA, 20 bp, Artificial Sequence
  Description of Artificial Sequence: Synthetic oligonucleotide
  Target: LAMA2; (-) strand; PAM type: NRG; PAM sequence: AAG
tatctaaaaatccatttcag

SEQ ID NO: 56468 - DNA, 20 bp, Artificial Sequence
  Description of Artificial Sequence: Synthetic oligonucleotide
  Target: LAMA2; (-) strand; PAM type: NRG; PAM sequence: CAG
atatatctaaaaatccattt

SEQ ID NO: 56469 - DNA, 20 bp, Artificial Sequence
  Description of Artificial Sequence: Synthetic oligonucleotide
  Target: LAMA2; (-) strand; PAM type: NRG; PAM sequence: TAG
acatcctaaaaagtttacct

SEQ ID NO: 56470 - DNA, 20 bp, Artificial Sequence
  Description of Artificial Sequence: Synthetic oligonucleotide
  Target: LAMA2; (-) strand; PAM type: NRG; PAM sequence: AAG
aaatatatatacatcctaaa

SEQ ID NO: 56471 - DNA, 20 bp, Artificial Sequence
  Description of Artificial Sequence: Synthetic oligonucleotide
  Target: LAMA2; (-) strand; PAM type: NRG; PAM sequence: TGG
cagataaacacaaccatgaa

SEQ ID NO: 56472 - DNA, 20 bp, Artificial Sequence
  Description of Artificial Sequence: Synthetic oligonucleotide
  Target: LAMA2; (-) strand; PAM type: NRG; PAM sequence: CAG
ataaaaatgtattaggtttt

SEQ ID NO: 56473 - DNA, 20 bp, Artificial Sequence
  Description of Artificial Sequence: Synthetic oligonucleotide
  Target: LAMA2; (-) strand; PAM type: NRG; PAM sequence: AGG
ttttatgataaaaatgtatt

SEQ ID NO: 56474 - DNA, 20 bp, Artificial Sequence
  Description of Artificial Sequence: Synthetic oligonucleotide
  Target: LAMA2; (-) strand; PAM type: NRG; PAM sequence: TAG
tttttatgataaaaatgtat

SEQ ID NO: 56475 - DNA, 20 bp, Artificial Sequence
  Description of Artificial Sequence: Synthetic oligonucleotide
  Target: LAMA2; (-) strand; PAM type: NRG; PAM sequence: TAG
tgagatgatttagaattatg

SEQ ID NO: 56476 - DNA, 20 bp, Artificial Sequence
  Description of Artificial Sequence: Synthetic oligonucleotide
  Target: LAMA2; (-) strand; PAM type: NRG; PAM sequence: TAG
taatttcacttgagatgatt

SEQ ID NO: 56477 - DNA, 20 bp, Artificial Sequence
  Description of Artificial Sequence: Synthetic oligonucleotide
  Target: LAMA2; (-) strand; PAM type: NRG; PAM sequence: GAG
tattaattctaatttcactt

SEQ ID NO: 56478 - DNA, 20 bp, Artificial Sequence
  Description of Artificial Sequence: Synthetic oligonucleotide
  Target: LAMA2; (-) strand; PAM type: NRG; PAM sequence: CAG
ggagtagaagacgaaaaatt

SEQ ID NO: 56479 - DNA, 20 bp, Artificial Sequence
  Description of Artificial Sequence: Synthetic oligonucleotide
  Target: LAMA2; (-) strand; PAM type: NRG; PAM sequence: AAG
ttacgggaggataggagtag

SEQ ID NO: 56480 - DNA, 20 bp, Artificial Sequence
  Description of Artificial Sequence: Synthetic oligonucleotide
  Target: LAMA2; (-) strand; PAM type: NRG; PAM sequence: TAG
tgtttacgggaggataggag

SEQ ID NO: 56481 - DNA, 20 bp, Artificial Sequence
  Description of Artificial Sequence: Synthetic oligonucleotide
  Target: LAMA2; (-) strand; PAM type: NRG; PAM sequence: GAG
tagtgtttacgggaggatag

SEQ ID NO: 56482 - DNA, 20 bp, Artificial Sequence
  Description of Artificial Sequence: Synthetic oligonucleotide
  Target: LAMA2; (-) strand; PAM type: NRG; PAM sequence: AGG
gatagtgtttacgggaggat

SEQ ID NO: 56483 - DNA, 20 bp, Artificial Sequence
  Description of Artificial Sequence: Synthetic oligonucleotide
  Target: LAMA2; (-) strand; PAM type: NRG; PAM sequence: TAG
agatagtgtttacgggagga

SEQ ID NO: 56484 - DNA, 20 bp, Artificial Sequence
  Description of Artificial Sequence: Synthetic oligonucleotide
  Target: LAMA2; (-) strand; PAM type: NRG; PAM sequence: AGG
ttctagatagtgtttacggg

SEQ ID NO: 56485 - DNA, 20 bp, Artificial Sequence
  Description of Artificial Sequence: Synthetic oligonucleotide
  Target: LAMA2; (-) strand; PAM type: NRG; PAM sequence: GAG
tttctagatagtgtttacgg

SEQ ID NO: 56486 - DNA, 20 bp, Artificial Sequence
  Description of Artificial Sequence: Synthetic oligonucleotide
  Target: LAMA2; (-) strand; PAM type: NRG; PAM sequence: GGG
attttctagatagtgtttac

SEQ ID NO: 56487 - DNA, 20 bp, Artificial Sequence
  Description of Artificial Sequence: Synthetic oligonucleotide
  Target: LAMA2; (-) strand; PAM type: NRG; PAM sequence: CGG
aattttctagatagtgttta

SEQ ID NO: 56488 - DNA, 20 bp, Artificial Sequence
  Description of Artificial Sequence: Synthetic oligonucleotide
  Target: LAMA2; (-) strand; PAM type: NRG; PAM sequence: TAG
ttgggtgacaattttctaga

SEQ ID NO: 56489 - DNA, 20 bp, Artificial Sequence
  Description of Artificial Sequence: Synthetic oligonucleotide
  Target: LAMA2; (-) strand; PAM type: NRG; PAM sequence: TAG
taggttgggtgacaattttc

SEQ ID NO: 56490 - DNA, 20 bp, Artificial Sequence
  Description of Artificial Sequence: Synthetic oligonucleotide
  Target: LAMA2; (-) strand; PAM type: NRG; PAM sequence: GGG
ttttagttctacaataggtt

SEQ ID NO: 56491 - DNA, 20 bp, Artificial Sequence
  Description of Artificial Sequence: Synthetic oligonucleotide
  Target: LAMA2; (-) strand; PAM type: NRG; PAM sequence: TGG
tttttagttctacaataggt

SEQ ID NO: 56492 - DNA, 20 bp, Artificial Sequence
  Description of Artificial Sequence: Synthetic oligonucleotide
  Target: LAMA2; (-) strand; PAM type: NRG; PAM sequence: AGG
taggtttttagttctacaat

SEQ ID NO: 56493 - DNA, 20 bp, Artificial Sequence
  Description of Artificial Sequence: Synthetic oligonucleotide
  Target: LAMA2; (-) strand; PAM type: NRG; PAM sequence: TAG
ctaggtttttagttctacaa

SEQ ID NO: 56494 - DNA, 20 bp, Artificial Sequence
  Description of Artificial Sequence: Synthetic oligonucleotide
  Target: LAMA2; (-) strand; PAM type: NRG; PAM sequence: TAG
gaggaagaccactaggtttt

SEQ ID NO: 56495 - DNA, 20 bp, Artificial Sequence
  Description of Artificial Sequence: Synthetic oligonucleotide
  Target: LAMA2; (-) strand; PAM type: NRG; PAM sequence: AGG
tgaagatgaggaagaccact

SEQ ID NO: 56496 - DNA, 20 bp, Artificial Sequence
  Description of Artificial Sequence: Synthetic oligonucleotide
  Target: LAMA2; (-) strand; PAM type: NRG; PAM sequence: TAG
atgaagatgaggaagaccac

SEQ ID NO: 56497 - DNA, 20 bp, Artificial Sequence
  Description of Artificial Sequence: Synthetic oligonucleotide
  Target: LAMA2; (-) strand; PAM type: NRG; PAM sequence: AAG
tgaagacaatgaagatgagg

SEQ ID NO: 56498 - DNA, 20 bp, Artificial Sequence
  Description of Artificial Sequence: Synthetic oligonucleotide
  Target: LAMA2; (-) strand; PAM type: NRG; PAM sequence: AGG
taatgaagacaatgaagatg

SEQ ID NO: 56499 - DNA, 20 bp, Artificial Sequence
  Description of Artificial Sequence: Synthetic oligonucleotide
  Target: LAMA2; (-) strand; PAM type: NRG; PAM sequence: GAG
ataatgaagacaatgaagat

SEQ ID NO: 56500 - DNA, 20 bp, Artificial Sequence
  Description of Artificial Sequence: Synthetic oligonucleotide
  Target: LAMA2; (-) strand; PAM type: NRG; PAM sequence: AAG
tggaaataatgaagacaatg

SEQ ID NO: 56501 - DNA, 20 bp, Artificial Sequence
  Description of Artificial Sequence: Synthetic oligonucleotide
  Target: LAMA2; (-) strand; PAM type: NRG; PAM sequence: AAG
ttcgtgtagtggaaataatg

SEQ ID NO: 56502 - DNA, 20 bp, Artificial Sequence
  Description of Artificial Sequence: Synthetic oligonucleotide
  Target: LAMA2; (-) strand; PAM type: NRG; PAM sequence: TGG
caagggaatgtttcgtgtag

SEQ ID NO: 56503 - DNA, 20 bp, Artificial Sequence
  Description of Artificial Sequence: Synthetic oligonucleotide
  Target: LAMA2; (-) strand; PAM type: NRG; PAM sequence: TAG
ttacaagggaatgtttcgtg

SEQ ID NO: 56504 - DNA, 20 bp, Artificial Sequence
  Description of Artificial Sequence: Synthetic oligonucleotide
  Target: LAMA2; (-) strand; PAM type: NRG; PAM sequence: GGG
gaatattatatttgttacaa

SEQ ID NO: 56505 - DNA, 20 bp, Artificial Sequence
  Description of Artificial Sequence: Synthetic oligonucleotide
  Target: LAMA2; (-) strand; PAM type: NRG; PAM sequence: AGG
tgaatattatatttgttaca

SEQ ID NO: 56506 - DNA, 20 bp, Artificial Sequence
  Description of Artificial Sequence: Synthetic oligonucleotide
  Target: LAMA2; (-) strand; PAM type: NRG; PAM sequence: AAG
gtgaatattatatttgttac

SEQ ID NO: 56507 - DNA, 20 bp, Artificial Sequence
  Description of Artificial Sequence: Synthetic oligonucleotide
  Target: LAMA2; (-) strand; PAM type: NRG; PAM sequence: TAG
tcacaaatcaaattttatac

SEQ ID NO: 56508 - DNA, 20 bp, Artificial Sequence
  Description of Artificial Sequence: Synthetic oligonucleotide
  Target: LAMA2; (-) strand; PAM type: NRG; PAM sequence: GAG
ctaaggaaactgggggctca

SEQ ID NO: 56509 - DNA, 20 bp, Artificial Sequence
  Description of Artificial Sequence: Synthetic oligonucleotide
  Target: LAMA2; (-) strand; PAM type: NRG; PAM sequence: CAG
ccctaaggaaactgggggct

SEQ ID NO: 56510 - DNA, 20 bp, Artificial Sequence
  Description of Artificial Sequence: Synthetic oligonucleotide
  Target: LAMA2; (-) strand; PAM type: NRG; PAM sequence: GGG
gtttgccctaaggaaactgg

SEQ ID NO: 56511 - DNA, 20 bp, Artificial Sequence
  Description of Artificial Sequence: Synthetic oligonucleotide
  Target: LAMA2; (-) strand; PAM type: NRG; PAM sequence: GGG
tgtttgccctaaggaaactg

SEQ ID NO: 56512 - DNA, 20 bp, Artificial Sequence
  Description of Artificial Sequence: Synthetic oligonucleotide
  Target: LAMA2; (-) strand; PAM type: NRG; PAM sequence: GGG
ttgtttgccctaaggaaact

SEQ ID NO: 56513 - DNA, 20 bp, Artificial Sequence
  Description of Artificial Sequence: Synthetic oligonucleotide
  Target: LAMA2; (-) strand; PAM type: NRG; PAM sequence: TGG
attgtttgccctaaggaaac

SEQ ID NO: 56514 - DNA, 20 bp, Artificial Sequence
  Description of Artificial Sequence: Synthetic oligonucleotide
  Target: LAMA2; (-) strand; PAM type: NRG; PAM sequence: AGG
cacccatattgtttgcccta

SEQ ID NO: 56515 - DNA, 20 bp, Artificial Sequence
  Description of Artificial Sequence: Synthetic oligonucleotide
  Target: LAMA2; (-) strand; PAM type: NRG; PAM sequence: AAG
gcacccatattgtttgccct

SEQ ID NO: 56516 - DNA, 20 bp, Artificial Sequence
  Description of Artificial Sequence: Synthetic oligonucleotide
  Target: LAMA2; (-) strand; PAM type: NRG; PAM sequence: AAG
attggactaaaattaactga

SEQ ID NO: 56517 - DNA, 20 bp, Artificial Sequence
  Description of Artificial Sequence: Synthetic oligonucleotide
  Target: LAMA2; (-) strand; PAM type: NRG; PAM sequence: TGG
taactgaaaaattactggat

SEQ ID NO: 56518 - DNA, 20 bp, Artificial Sequence
  Description of Artificial Sequence: Synthetic oligonucleotide
  Target: LAMA2; (-) strand; PAM type: NRG; PAM sequence: TGG
aaaagtaactgaaaaattac

SEQ ID NO: 56519 - DNA, 20 bp, Artificial Sequence
  Description of Artificial Sequence: Synthetic oligonucleotide
  Target: LAMA2; (-) strand; PAM type: NRG; PAM sequence: AAG
actacttgttttaaatggaa

SEQ ID NO: 56520 - DNA, 20 bp, Artificial Sequence
  Description of Artificial Sequence: Synthetic oligonucleotide
  Target: LAMA2; (-) strand; PAM type: NRG; PAM sequence: TGG
ctcgaactacttgttttaaa

SEQ ID NO: 56521 - DNA, 20 bp, Artificial Sequence
  Description of Artificial Sequence: Synthetic oligonucleotide
  Target: LAMA2; (-) strand; PAM type: NRG; PAM sequence: AGG
atatcaggaaaatgatcaga

SEQ ID NO: 56522 - DNA, 20 bp, Artificial Sequence
  Description of Artificial Sequence: Synthetic oligonucleotide
  Target: LAMA2; (-) strand; PAM type: NRG; PAM sequence: AAG
catatcaggaaaatgatcag

SEQ ID NO: 56523 - DNA, 20 bp, Artificial Sequence
  Description of Artificial Sequence: Synthetic oligonucleotide
  Target: LAMA2; (-) strand; PAM type: NRG; PAM sequence: CAG
ttccatatcaggaaaatgat

SEQ ID NO: 56524 - DNA, 20 bp, Artificial Sequence
  Description of Artificial Sequence: Synthetic oligonucleotide
  Target: LAMA2; (-) strand; PAM type: NRG; PAM sequence: AGG
ctgctcccagattccatatc

SEQ ID NO: 56525 - DNA, 20 bp, Artificial Sequence
  Description of Artificial Sequence: Synthetic oligonucleotide
  Target: LAMA2; (-) strand; PAM type: NRG; PAM sequence: CAG
gctgctcccagattccatat

SEQ ID NO: 56526 - DNA, 20 bp, Artificial Sequence
  Description of Artificial Sequence: Synthetic oligonucleotide
  Target: LAMA2; (-) strand; PAM type: NRG; PAM sequence: CAG
cttatgttccctgctgctcc

SEQ ID NO: 56527 - DNA, 20 bp, Artificial Sequence
  Description of Artificial Sequence: Synthetic oligonucleotide
  Target: LAMA2; (-) strand; PAM type: NRG; PAM sequence: AGG
ctacgttgatacatttaatc

SEQ ID NO: 56528 - DNA, 20 bp, Artificial Sequence
  Description of Artificial Sequence: Synthetic oligonucleotide
  Target: LAMA2; (-) strand; PAM type: NRG; PAM sequence: CAG
cctacgttgatacatttaat

SEQ ID NO: 56529 - DNA, 20 bp, Artificial Sequence
  Description of Artificial Sequence: Synthetic oligonucleotide
  Target: LAMA2; (-) strand; PAM type: NRG; PAM sequence: AGG
gaactgaatttgtaccagga

SEQ ID NO: 56530 - DNA, 20 bp, Artificial Sequence
  Description of Artificial Sequence: Synthetic oligonucleotide
  Target: LAMA2; (-) strand; PAM type: NRG; PAM sequence: AAG
ggaactgaatttgtaccagg

SEQ ID NO: 56531 - DNA, 20 bp, Artificial Sequence
  Description of Artificial Sequence: Synthetic oligonucleotide
  Target: LAMA2; (-) strand; PAM type: NRG; PAM sequence: AGG
tggggaactgaatttgtacc

SEQ ID NO: 56532 - DNA, 20 bp, Artificial Sequence
  Description of Artificial Sequence: Synthetic oligonucleotide
  Target: LAMA2; (-) strand; PAM type: NRG; PAM sequence: CAG
gtggggaactgaatttgtac

SEQ ID NO: 56533 - DNA, 20 bp, Artificial Sequence
  Description of Artificial Sequence: Synthetic oligonucleotide
  Target: LAMA2; (-) strand; PAM type: NRG; PAM sequence: GGG
tcaattttgaggttactgtg

SEQ ID NO: 56534 - DNA, 20 bp, Artificial Sequence
  Description of Artificial Sequence: Synthetic oligonucleotide
  Target: LAMA2; (-) strand; PAM type: NRG; PAM sequence: GGG
gtcaattttgaggttactgt

SEQ ID NO: 56535 - DNA, 20 bp, Artificial Sequence
  Description of Artificial Sequence: Synthetic oligonucleotide
  Target: LAMA2; (-) strand; PAM type: NRG; PAM sequence: TGG
agtcaattttgaggttactg

SEQ ID NO: 56536 - DNA, 20 bp, Artificial Sequence
  Description of Artificial Sequence: Synthetic oligonucleotide
  Target: LAMA2; (-) strand; PAM type: NRG; PAM sequence: AGG
taggtttgaagtcaattttg

SEQ ID NO: 56537 - DNA, 20 bp, Artificial Sequence
  Description of Artificial Sequence: Synthetic oligonucleotide
  Target: LAMA2; (-) strand; PAM type: NRG; PAM sequence: GAG
gtaggtttgaagtcaatttt

SEQ ID NO: 56538 - DNA, 20 bp, Artificial Sequence
  Description of Artificial Sequence: Synthetic oligonucleotide
  Target: LAMA2; (-) strand; PAM type: NRG; PAM sequence: AAG
atttgaagtcagtaggtttg

SEQ ID NO: 56539 - DNA, 20 bp, Artificial Sequence
  Description of Artificial Sequence: Synthetic oligonucleotide
  Target: LAMA2; (-) strand; PAM type: NRG; PAM sequence: AGG
gagtcagatttgaagtcagt

SEQ ID NO: 56540 - DNA, 20 bp, Artificial Sequence
  Description of Artificial Sequence: Synthetic oligonucleotide
  Target: LAMA2; (-) strand; PAM type: NRG; PAM sequence: TAG
tgagtcagatttgaagtcag

SEQ ID NO: 56541 - DNA, 20 bp, Artificial Sequence
  Description of Artificial Sequence: Synthetic oligonucleotide
  Target: LAMA2; (-) strand; PAM type: NRG; PAM sequence: CAG
tcatgagtcagatttgaagt

SEQ ID NO: 56542 - DNA, 20 bp, Artificial Sequence
  Description of Artificial Sequence: Synthetic oligonucleotide
  Target: LAMA2; (-) strand; PAM type: NRG; PAM sequence: AAG
aacatcatgagtcagatttg

SEQ ID NO: 56543 - DNA, 20 bp, Artificial Sequence
  Description of Artificial Sequence: Synthetic oligonucleotide
  Target: LAMA2; (-) strand; PAM type: NRG; PAM sequence: CAG
agaggagaaacatcatgagt

SEQ ID NO: 56544 - DNA, 20 bp, Artificial Sequence
  Description of Artificial Sequence: Synthetic oligonucleotide
  Target: LAMA2; (-) strand; PAM type: NRG; PAM sequence: GAG
tgggagaggagaaacatcat

SEQ ID NO: 56545 - DNA, 20 bp, Artificial Sequence
  Description of Artificial Sequence: Synthetic oligonucleotide
  Target: LAMA2; (-) strand; PAM type: NRG; PAM sequence: GAG
agtgaaaagtgatgggagag

SEQ ID NO: 56546 - DNA, 20 bp, Artificial Sequence
  Description of Artificial Sequence: Synthetic oligonucleotide
  Target: LAMA2; (-) strand; PAM type: NRG; PAM sequence: AGG
acagtgaaaagtgatgggag

SEQ ID NO: 56547 - DNA, 20 bp, Artificial Sequence
  Description of Artificial Sequence: Synthetic oligonucleotide
  Target: LAMA2; (-) strand; PAM type: NRG; PAM sequence: GAG
cacagtgaaaagtgatggga

SEQ ID NO: 56548 - DNA, 20 bp, Artificial Sequence
  Description of Artificial Sequence: Synthetic oligonucleotide
  Target: LAMA2; (-) strand; PAM type: NRG; PAM sequence: GAG
aacacagtgaaaagtgatgg

SEQ ID NO: 56549 - DNA, 20 bp, Artificial Sequence
  Description of Artificial Sequence: Synthetic oligonucleotide
  Target: LAMA2; (-) strand; PAM type: NRG; PAM sequence: GGG
agaacacagtgaaaagtgat

SEQ ID NO: 56550 - DNA, 20 bp, Artificial Sequence
  Description of Artificial Sequence: Synthetic oligonucleotide
  Target: LAMA2; (-) strand; PAM type: NRG; PAM sequence: TGG
cagaacacagtgaaaagtga

SEQ ID NO: 56551 - DNA, 20 bp, Artificial Sequence
  Description of Artificial Sequence: Synthetic oligonucleotide
  Target: LAMA2; (-) strand; PAM type: NRG; PAM sequence: AAG
gatcagcagaacacagtgaa

SEQ ID NO: 56552 - DNA, 20 bp, Artificial Sequence
  Description of Artificial Sequence: Synthetic oligonucleotide
  Target: LAMA2; (-) strand; PAM type: NRG; PAM sequence: CAG
gtatggagatcagcagaaca

SEQ ID NO: 56553 - DNA, 20 bp, Artificial Sequence
  Description of Artificial Sequence: Synthetic oligonucleotide
  Target: LAMA2; (-) strand; PAM type: NRG; PAM sequence: CAG
ggaaacagtatggagatcag

SEQ ID NO: 56554 - DNA, 20 bp, Artificial Sequence
  Description of Artificial Sequence: Synthetic oligonucleotide
  Target: LAMA2; (-) strand; PAM type: NRG; PAM sequence: CAG
tgaggaaacagtatggagat

SEQ ID NO: 56555 - DNA, 20 bp, Artificial Sequence
  Description of Artificial Sequence: Synthetic oligonucleotide
  Target: LAMA2; (-) strand; PAM type: NRG; PAM sequence: GAG
atcattgaggaaacagtatg

SEQ ID NO: 56556 - DNA, 20 bp, Artificial Sequence
  Description of Artificial Sequence: Synthetic oligonucleotide
  Target: LAMA2; (-) strand; PAM type: NRG; PAM sequence: TGG
ccatcattgaggaaacagta

SEQ ID NO: 56557 - DNA, 20 bp, Artificial Sequence
  Description of Artificial Sequence: Synthetic oligonucleotide
  Target: LAMA2; (-) strand; PAM type: NRG; PAM sequence: CAG
tgggcccatcattgaggaaa

SEQ ID NO: 56558 - DNA, 20 bp, Artificial Sequence
  Description of Artificial Sequence: Synthetic oligonucleotide
  Target: LAMA2; (-) strand; PAM type: NRG; PAM sequence: AGG
attttttgggcccatcattg

SEQ ID NO: 56559 - DNA, 20 bp, Artificial Sequence
  Description of Artificial Sequence: Synthetic oligonucleotide
  Target: LAMA2; (-) strand; PAM type: NRG; PAM sequence: GAG
cattttttgggcccatcatt

SEQ ID NO: 56560 - DNA, 20 bp, Artificial Sequence
  Description of Artificial Sequence: Synthetic oligonucleotide
  Target: LAMA2; (-) strand; PAM type: NRG; PAM sequence: GGG
gaaaacttccagcatttttt

SEQ ID NO: 56561 - DNA, 20 bp, Artificial Sequence
  Description of Artificial Sequence: Synthetic oligonucleotide
  Target: LAMA2; (-) strand; PAM type: NRG; PAM sequence: TGG
agaaaacttccagcattttt

SEQ ID NO: 56562 - DNA, 20 bp, Artificial Sequence
  Description of Artificial Sequence: Synthetic oligonucleotide
  Target: LAMA2; (-) strand; PAM type: NRG; PAM sequence: CAG
gagaaatagaagaaaacttc

SEQ ID NO: 56563 - DNA, 20 bp, Artificial Sequence
  Description of Artificial Sequence: Synthetic oligonucleotide
  Target: LAMA2; (-) strand; PAM type: NRG; PAM sequence: AAG
attctcaaagagagaaatag

SEQ ID NO: 56564 - DNA, 20 bp, Artificial Sequence
  Description of Artificial Sequence: Synthetic oligonucleotide
  Target: LAMA2; (-) strand; PAM type: NRG; PAM sequence: TAG
atgattctcaaagagagaaa

SEQ ID NO: 56565 - DNA, 20 bp, Artificial Sequence
  Description of Artificial Sequence: Synthetic oligonucleotide
  Target: LAMA2; (-) strand; PAM type: NRG; PAM sequence: GAG
tgcctcatgattctcaaaga

SEQ ID NO: 56566 - DNA, 20 bp, Artificial Sequence
  Description of Artificial Sequence: Synthetic oligonucleotide
  Target: LAMA2; (-) strand; PAM type: NRG; PAM sequence: GAG
agtgcctcatgattctcaaa

SEQ ID NO: 56567 - DNA, 20 bp, Artificial Sequence
  Description of Artificial Sequence: Synthetic oligonucleotide
  Target: LAMA2; (-) strand; PAM type: NRG; PAM sequence: AAG
tgagtgcctcatgattctca

SEQ ID NO: 56568 - DNA, 20 bp, Artificial Sequence
  Description of Artificial Sequence: Synthetic oligonucleotide
  Target: LAMA2; (-) strand; PAM type: NRG; PAM sequence: GAG
ccaagaaccacaatcccaat

SEQ ID NO: 56569 - DNA, 20 bp, Artificial Sequence
  Description of Artificial Sequence: Synthetic oligonucleotide
  Target: LAMA2; (-) strand; PAM type: NRG; PAM sequence: AAG
tacaaagagggaaacaatcc

SEQ ID NO: 56570 - DNA, 20 bp, Artificial Sequence
  Description of Artificial Sequence: Synthetic oligonucleotide
  Target: LAMA2; (-) strand; PAM type: NRG; PAM sequence: GGG
tacataaatacatacaaaga

SEQ ID NO: 56571 - DNA, 20 bp, Artificial Sequence
  Description of Artificial Sequence: Synthetic oligonucleotide
  Target: LAMA2; (-) strand; PAM type: NRG; PAM sequence: AGG
atacataaatacatacaaag

SEQ ID NO: 56572 - DNA, 20 bp, Artificial Sequence
  Description of Artificial Sequence: Synthetic oligonucleotide
  Target: LAMA2; (-) strand; PAM type: NRG; PAM sequence: GAG
catacataaatacatacaaa

SEQ ID NO: 56573 - DNA, 20 bp, Artificial Sequence
  Description of Artificial Sequence: Synthetic oligonucleotide
  Target: LAMA2; (-) strand; PAM type: NRG; PAM sequence: AAG
ctcatacataaatacataca

SEQ ID NO: 56574 - DNA, 20 bp, Artificial Sequence
  Description of Artificial Sequence: Synthetic oligonucleotide
  Target: LAMA2; (-) strand; PAM type: NRG; PAM sequence: TGG
agagaacagttgattgtata

SEQ ID NO: 56575 - DNA, 20 bp, Artificial Sequence
  Description of Artificial Sequence: Synthetic oligonucleotide
  Target: LAMA2; (-) strand; PAM type: NRG; PAM sequence: CAG
acctcttgatattgagagaa

SEQ ID NO: 56576 - DNA, 20 bp, Artificial Sequence
  Description of Artificial Sequence: Synthetic oligonucleotide
  Target: LAMA2; (-) strand; PAM type: NRG; PAM sequence: GAG
ttgctacctcttgatattga

SEQ ID NO: 56577 - DNA, 20 bp, Artificial Sequence
  Description of Artificial Sequence: Synthetic oligonucleotide
  Target: LAMA2; (-) strand; PAM type: NRG; PAM sequence: GAG
aattgctacctcttgatatt

SEQ ID NO: 56578 - DNA, 20 bp, Artificial Sequence
  Description of Artificial Sequence: Synthetic oligonucleotide
  Target: LAMA2; (-) strand; PAM type: NRG; PAM sequence: CAG
atacattaaagtttaaaaca

SEQ ID NO: 56579 - DNA, 20 bp, Artificial Sequence
  Description of Artificial Sequence: Synthetic oligonucleotide
  Target: LAMA2; (-) strand; PAM type: NRG; PAM sequence: AAG
ctgacgtaagttatacatta

SEQ ID NO: 56580 - DNA, 20 bp, Artificial Sequence
  Description of Artificial Sequence: Synthetic oligonucleotide
  Target: LAMA2; (-) strand; PAM type: NRG; PAM sequence: AAG
ttatcaggattgactgacgt

SEQ ID NO: 56581 - DNA, 20 bp, Artificial Sequence
  Description of Artificial Sequence: Synthetic oligonucleotide
  Target: LAMA2; (-) strand; PAM type: NRG; PAM sequence: AGG
gtgagaatagtggtattatc

SEQ ID NO: 56582 - DNA, 20 bp, Artificial Sequence
  Description of Artificial Sequence: Synthetic oligonucleotide
  Target: LAMA2; (-) strand; PAM type: NRG; PAM sequence: CAG
agtgagaatagtggtattat

SEQ ID NO: 56583 - DNA, 20 bp, Artificial Sequence
  Description of Artificial Sequence: Synthetic oligonucleotide
  Target: LAMA2; (-) strand; PAM type: NRG; PAM sequence: TGG
ttgatgactagtgagaatag

SEQ ID NO: 56584 - DNA, 20 bp, Artificial Sequence
  Description of Artificial Sequence: Synthetic oligonucleotide
  Target: LAMA2; (-) strand; PAM type: NRG; PAM sequence: TAG
atgttgatgactagtgagaa

SEQ ID NO: 56585 - DNA, 20 bp, Artificial Sequence
  Description of Artificial Sequence: Synthetic oligonucleotide
  Target: LAMA2; (-) strand; PAM type: NRG; PAM sequence: GAG
taatgatgttgatgactagt

SEQ ID NO: 56586 - DNA, 20 bp, Artificial Sequence
  Description of Artificial Sequence: Synthetic oligonucleotide
  Target: LAMA2; (-) strand; PAM type: NRG; PAM sequence: TAG
atgataatgatgttgatgac

SEQ ID NO: 56587 - DNA, 20 bp, Artificial Sequence
  Description of Artificial Sequence: Synthetic oligonucleotide
  Target: LAMA2; (-) strand; PAM type: NRG; PAM sequence: TGG
aaggaactaggattgatttg

SEQ ID NO: 56588 - DNA, 20 bp, Artificial Sequence
  Description of Artificial Sequence: Synthetic oligonucleotide
  Target: LAMA2; (-) strand; PAM type: NRG; PAM sequence: AGG
ctaatagattttaaggaact

SEQ ID NO: 56589 - DNA, 20 bp, Artificial Sequence
  Description of Artificial Sequence: Synthetic oligonucleotide
  Target: LAMA2; (-) strand; PAM type: NRG; PAM sequence: TAG
actaatagattttaaggaac

SEQ ID NO: 56590 - DNA, 20 bp, Artificial Sequence
  Description of Artificial Sequence: Synthetic oligonucleotide
  Target: LAMA2; (-) strand; PAM type: NRG; PAM sequence: AGG
ggctcaactaatagatttta

SEQ ID NO: 56591 - DNA, 20 bp, Artificial Sequence
  Description of Artificial Sequence: Synthetic oligonucleotide
  Target: LAMA2; (-) strand; PAM type: NRG; PAM sequence: AAG
aggctcaactaatagatttt

SEQ ID NO: 56592 - DNA, 20 bp, Artificial Sequence
  Description of Artificial Sequence: Synthetic oligonucleotide
  Target: LAMA2; (-) strand; PAM type: NRG; PAM sequence: TAG
gtttcataaggctcaactaa

SEQ ID NO: 56593 - DNA, 20 bp, Artificial Sequence
  Description of Artificial Sequence: Synthetic oligonucleotide
  Target: LAMA2; (-) strand; PAM type: NRG; PAM sequence: AGG
acaaaaagggcagtttcata

SEQ ID NO: 56594 - DNA, 20 bp, Artificial Sequence
  Description of Artificial Sequence: Synthetic oligonucleotide
  Target: LAMA2; (-) strand; PAM type: NRG; PAM sequence: AAG
gacaaaaagggcagtttcat

SEQ ID NO: 56595 - DNA, 20 bp, Artificial Sequence
  Description of Artificial Sequence: Synthetic oligonucleotide
  Target: LAMA2; (-) strand; PAM type: NRG; PAM sequence: CAG
atttgaaccgacaaaaaggg

SEQ ID NO: 56596 - DNA, 20 bp, Artificial Sequence
  Description of Artificial Sequence: Synthetic oligonucleotide
  Target: LAMA2; (-) strand; PAM type: NRG; PAM sequence: GGG
accatttgaaccgacaaaaa

SEQ ID NO: 56597 - DNA, 20 bp, Artificial Sequence
  Description of Artificial Sequence: Synthetic oligonucleotide
  Target: LAMA2; (-) strand; PAM type: NRG; PAM sequence: AGG
caccatttgaaccgacaaaa

SEQ ID NO: 56598 - DNA, 20 bp, Artificial Sequence
  Description of Artificial Sequence: Synthetic oligonucleotide
  Target: LAMA2; (-) strand; PAM type: NRG; PAM sequence: AAG
tcaccatttgaaccgacaaa

SEQ ID NO: 56599 - DNA, 20 bp, Artificial Sequence
  Description of Artificial Sequence: Synthetic oligonucleotide
  Target: LAMA2; (-) strand; PAM type: NRG; PAM sequence: AAG
aaggaaattgaagtaataat

SEQ ID NO: 56600 - DNA, 20 bp, Artificial Sequence
  Description of Artificial Sequence: Synthetic oligonucleotide
  Target: LAMA2; (-) strand; PAM type: NRG; PAM sequence: AAG
gtaagcctgtaaggaaattg

SEQ ID NO: 56601 - DNA, 20 bp, Artificial Sequence
  Description of Artificial Sequence: Synthetic oligonucleotide
  Target: LAMA2; (-) strand; PAM type: NRG; PAM sequence: AGG
gtgttggctgtaagcctgta

SEQ ID NO: 56602 - DNA, 20 bp, Artificial Sequence
  Description of Artificial Sequence: Synthetic oligonucleotide
  Target: LAMA2; (-) strand; PAM type: NRG; PAM sequence: AAG
tgtgttggctgtaagcctgt

SEQ ID NO: 56603 - DNA, 20 bp, Artificial Sequence
  Description of Artificial Sequence: Synthetic oligonucleotide
  Target: LAMA2; (-) strand; PAM type: NRG; PAM sequence: AAG
tgaatcactgtgttggctgt

SEQ ID NO: 56604 - DNA, 20 bp, Artificial Sequence
  Description of Artificial Sequence: Synthetic oligonucleotide
  Target: LAMA2; (-) strand; PAM type: NRG; PAM sequence: TGG
ggtggcctgaatcactgtgt

SEQ ID NO: 56605 - DNA, 20 bp, Artificial Sequence
  Description of Artificial Sequence: Synthetic oligonucleotide
  Target: LAMA2; (-) strand; PAM type: NRG; PAM sequence: TGG
ttctagttgtgagatgatgg

SEQ ID NO: 56606 - DNA, 20 bp, Artificial Sequence
  Description of Artificial Sequence: Synthetic oligonucleotide
  Target: LAMA2; (-) strand; PAM type: NRG; PAM sequence: TGG
gatttctagttgtgagatga

SEQ ID NO: 56607 - DNA, 20 bp, Artificial Sequence
  Description of Artificial Sequence: Synthetic oligonucleotide
  Target: LAMA2; (-) strand; PAM type: NRG; PAM sequence: GAG
cagtgatgatttctagttgt

SEQ ID NO: 56608 - DNA, 20 bp, Artificial Sequence
  Description of Artificial Sequence: Synthetic oligonucleotide
  Target: LAMA2; (-) strand; PAM type: NRG; PAM sequence: TAG
aaggccacagtgatgatttc

SEQ ID NO: 56609 - DNA, 20 bp, Artificial Sequence
  Description of Artificial Sequence: Synthetic oligonucleotide
  Target: LAMA2; (-) strand; PAM type: NRG; PAM sequence: CAG
gaatatccattagaaggcca

SEQ ID NO: 56610 - DNA, 20 bp, Artificial Sequence
  Description of Artificial Sequence: Synthetic oligonucleotide
  Target: LAMA2; (-) strand; PAM type: NRG; PAM sequence: AGG
aagcaagaatatccattaga

SEQ ID NO: 56611 - DNA, 20 bp, Artificial Sequence
  Description of Artificial Sequence: Synthetic oligonucleotide
  Target: LAMA2; (-) strand; PAM type: NRG; PAM sequence: AAG
caagcaagaatatccattag

SEQ ID NO: 56612 - DNA, 20 bp, Artificial Sequence
  Description of Artificial Sequence: Synthetic oligonucleotide
  Target: LAMA2; (-) strand; PAM type: NRG; PAM sequence: TAG
ttgcaagcaagaatatccat

SEQ ID NO: 56613 - DNA, 20 bp, Artificial Sequence
  Description of Artificial Sequence: Synthetic oligonucleotide
  Target: LAMA2; (-) strand; PAM type: NRG; PAM sequence: AAG
gggagggctaaattgcaagc

SEQ ID NO: 56614 - DNA, 20 bp, Artificial Sequence
  Description of Artificial Sequence: Synthetic oligonucleotide
  Target: LAMA2; (-) strand; PAM type: NRG; PAM sequence: AAG
atgggggagggctaaattgc

SEQ ID NO: 56615 - DNA, 20 bp, Artificial Sequence
  Description of Artificial Sequence: Synthetic oligonucleotide
  Target: LAMA2; (-) strand; PAM type: NRG; PAM sequence: GGG
tacaacaaacaaatggggga

SEQ ID NO: 56616 - DNA, 20 bp, Artificial Sequence
  Description of Artificial Sequence: Synthetic oligonucleotide
  Target: LAMA2; (-) strand; PAM type: NRG; PAM sequence: AGG
gtacaacaaacaaatggggg

SEQ ID NO: 56617 - DNA, 20 bp, Artificial Sequence
  Description of Artificial Sequence: Synthetic oligonucleotide
  Target: LAMA2; (-) strand; PAM type: NRG; PAM sequence: GAG
agtacaacaaacaaatgggg

SEQ ID NO: 56618 - DNA, 20 bp, Artificial Sequence
  Description of Artificial Sequence: Synthetic oligonucleotide
  Target: LAMA2; (-) strand; PAM type: NRG; PAM sequence: GGG
gaagtacaacaaacaaatgg

SEQ ID NO: 56619 - DNA, 20 bp, Artificial Sequence
  Description of Artificial Sequence: Synthetic oligonucleotide
  Target: LAMA2; (-) strand; PAM type: NRG; PAM sequence: GGG
tgaagtacaacaaacaaatg

SEQ ID NO: 56620 - DNA, 20 bp, Artificial Sequence
  Description of Artificial Sequence: Synthetic oligonucleotide
  Target: LAMA2; (-) strand; PAM type: NRG; PAM sequence: GGG
ctgaagtacaacaaacaaat

SEQ ID NO: 56621 - DNA, 20 bp, Artificial Sequence
  Description of Artificial Sequence: Synthetic oligonucleotide
  Target: LAMA2; (-) strand; PAM type: NRG; PAM sequence: TGG
gctgaagtacaacaaacaaa

SEQ ID NO: 56622 - DNA, 20 bp, Artificial Sequence
  Description of Artificial Sequence: Synthetic oligonucleotide
  Target: LAMA2; (-) strand; PAM type: NRG; PAM sequence: AAG
tataaagcttaacctagctg

SEQ ID NO: 56623 - DNA, 20 bp, Artificial Sequence
  Description of Artificial Sequence: Synthetic oligonucleotide
  Target: LAMA2; (-) strand; PAM type: NRG; PAM sequence: TAG
gtgttttataaagcttaacc

SEQ ID NO: 56624 - DNA, 20 bp, Artificial Sequence
  Description of Artificial Sequence: Synthetic oligonucleotide
  Target: LAMA2; (-) strand; PAM type: NRG; PAM sequence: AAG
caatactattgtgttttata

SEQ ID NO: 56625 - DNA, 20 bp, Artificial Sequence
  Description of Artificial Sequence: Synthetic oligonucleotide
  Target: LAMA2; (-) strand; PAM type: NRG; PAM sequence: TAG
cagcattttagagagaggaa

SEQ ID NO: 56626 - DNA, 20 bp, Artificial Sequence
  Description of Artificial Sequence: Synthetic oligonucleotide
  Target: LAMA2; (-) strand; PAM type: NRG; PAM sequence: AGG
catgacagcattttagagag

SEQ ID NO: 56627 - DNA, 20 bp, Artificial Sequence
  Description of Artificial Sequence: Synthetic oligonucleotide
  Target: LAMA2; (-) strand; PAM type: NRG; PAM sequence: GAG
ccatgacagcattttagaga

SEQ ID NO: 56628 - DNA, 20 bp, Artificial Sequence
  Description of Artificial Sequence: Synthetic oligonucleotide
  Target: LAMA2; (-) strand; PAM type: NRG; PAM sequence: GAG
tgccatgacagcattttaga

SEQ ID NO: 56629 - DNA, 20 bp, Artificial Sequence
  Description of Artificial Sequence: Synthetic oligonucleotide
  Target: LAMA2; (-) strand; PAM type: NRG; PAM sequence: GAG
gatgccatgacagcatttta

SEQ ID NO: 56630 - DNA, 20 bp, Artificial Sequence
  Description of Artificial Sequence: Synthetic oligonucleotide
  Target: LAMA2; (-) strand; PAM type: NRG; PAM sequence: TAG
cagatgccatgacagcattt

SEQ ID NO: 56631 - DNA, 20 bp, Artificial Sequence
  Description of Artificial Sequence: Synthetic oligonucleotide
  Target: LAMA2; (-) strand; PAM type: NRG; PAM sequence: CAG
aggtcaatcagatgccatga

SEQ ID NO: 56632 - DNA, 20 bp, Artificial Sequence
  Description of Artificial Sequence: Synthetic oligonucleotide
  Target: LAMA2; (-) strand; PAM type: NRG; PAM sequence: CAG
gattttatactaaggtcaat

SEQ ID NO: 56633 - DNA, 20 bp, Artificial Sequence
  Description of Artificial Sequence: Synthetic oligonucleotide
  Target: LAMA2; (-) strand; PAM type: NRG; PAM sequence: AGG
agagcttggattttatacta

SEQ ID NO: 56634 - DNA, 20 bp, Artificial Sequence
  Description of Artificial Sequence: Synthetic oligonucleotide
  Target: LAMA2; (-) strand; PAM type: NRG; PAM sequence: AAG
cagagcttggattttatact

SEQ ID NO: 56635 - DNA, 20 bp, Artificial Sequence
  Description of Artificial Sequence: Synthetic oligonucleotide
  Target: LAMA2; (-) strand; PAM type: NRG; PAM sequence: TGG
taaatcacattaacagagct

SEQ ID NO: 56636 - DNA, 20 bp, Artificial Sequence
  Description of Artificial Sequence: Synthetic oligonucleotide
  Target: LAMA2; (-) strand; PAM type: NRG; PAM sequence: GAG
acttataaatcacattaaca

SEQ ID NO: 56637 - DNA, 20 bp, Artificial Sequence
  Description of Artificial Sequence: Synthetic oligonucleotide
  Target: LAMA2; (-) strand; PAM type: NRG; PAM sequence: CAG
tgacttataaatcacattaa

SEQ ID NO: 56638 - DNA, 20 bp, Artificial Sequence
  Description of Artificial Sequence: Synthetic oligonucleotide
  Target: LAMA2; (-) strand; PAM type: NRG; PAM sequence: CGG
cagagactaactgggatgta

SEQ ID NO: 56639 - DNA, 20 bp, Artificial Sequence
  Description of Artificial Sequence: Synthetic oligonucleotide
  Target: LAMA2; (-) strand; PAM type: NRG; PAM sequence: GGG
agggctgtcagagactaact

SEQ ID NO: 56640 - DNA, 20 bp, Artificial Sequence
  Description of Artificial Sequence: Synthetic oligonucleotide
  Target: LAMA2; (-) strand; PAM type: NRG; PAM sequence: TGG
cagggctgtcagagactaac

SEQ ID NO: 56641 - DNA, 20 bp, Artificial Sequence
  Description of Artificial Sequence: Synthetic oligonucleotide
  Target: LAMA2; (-) strand; PAM type: NRG; PAM sequence: GAG
gttgtaaaccagggctgtca

SEQ ID NO: 56642 - DNA, 20 bp, Artificial Sequence
  Description of Artificial Sequence: Synthetic oligonucleotide
  Target: LAMA2; (-) strand; PAM type: NRG; PAM sequence: CAG
cagttgtaaaccagggctgt

SEQ ID NO: 56643 - DNA, 20 bp, Artificial Sequence
  Description of Artificial Sequence: Synthetic oligonucleotide
  Target: LAMA2; (-) strand; PAM type: NRG; PAM sequence: GGG
ggggcagcagttgtaaacca

SEQ ID NO: 56644 - DNA, 20 bp, Artificial Sequence
  Description of Artificial Sequence: Synthetic oligonucleotide
  Target: LAMA2; (-) strand; PAM type: NRG; PAM sequence: AGG
tggggcagcagttgtaaacc

SEQ ID NO: 56645 - DNA, 20 bp, Artificial Sequence
  Description of Artificial Sequence: Synthetic oligonucleotide
  Target: LAMA2; (-) strand; PAM type: NRG; PAM sequence: CAG
ctggggcagcagttgtaaac

SEQ ID NO: 56646 - DNA, 20 bp, Artificial Sequence
  Description of Artificial Sequence: Synthetic oligonucleotide
  Target: LAMA2; (-) strand; PAM type: NRG; PAM sequence: CAG
tattaattaggctggggcag

SEQ ID NO: 56647 - DNA, 20 bp, Artificial Sequence
  Description of Artificial Sequence: Synthetic oligonucleotide
  Target: LAMA2; (-) strand; PAM type: NRG; PAM sequence: CAG
cactattaattaggctgggg

SEQ ID NO: 56648 - DNA, 20 bp, Artificial Sequence
  Description of Artificial Sequence: Synthetic oligonucleotide
  Target: LAMA2; (-) strand; PAM type: NRG; PAM sequence: GGG
caccactattaattaggctg

SEQ ID NO: 56649 - DNA, 20 bp, Artificial Sequence
  Description of Artificial Sequence: Synthetic oligonucleotide
  Target: LAMA2; (-) strand; PAM type: NRG; PAM sequence: GGG
acaccactattaattaggct

SEQ ID NO: 56650 - DNA, 20 bp, Artificial Sequence
  Description of Artificial Sequence: Synthetic oligonucleotide
  Target: LAMA2; (-) strand; PAM type: NRG; PAM sequence: TGG
aacaccactattaattaggc

SEQ ID NO: 56651 - DNA, 20 bp, Artificial Sequence
  Description of Artificial Sequence: Synthetic oligonucleotide
  Target: LAMA2; (-) strand; PAM type: NRG; PAM sequence: AGG
agggaacaccactattaatt

SEQ ID NO: 56652 - DNA, 20 bp, Artificial Sequence
  Description of Artificial Sequence: Synthetic oligonucleotide
  Target: LAMA2; (-) strand; PAM type: NRG; PAM sequence: TAG
aagggaacaccactattaat

SEQ ID NO: 56653 - DNA, 20 bp, Artificial Sequence
  Description of Artificial Sequence: Synthetic oligonucleotide
  Target: LAMA2; (-) strand; PAM type: NRG; PAM sequence: GGG
agtccacttctgagaataaa

SEQ ID NO: 56654 - DNA, 20 bp, Artificial Sequence
  Description of Artificial Sequence: Synthetic oligonucleotide
  Target: LAMA2; (-) strand; PAM type: NRG; PAM sequence: AGG
cagtccacttctgagaataa

SEQ ID NO: 56655 - DNA, 20 bp, Artificial Sequence
  Description of Artificial Sequence: Synthetic oligonucleotide
  Target: LAMA2; (-) strand; PAM type: NRG; PAM sequence: AAG
ccagtccacttctgagaata

SEQ ID NO: 56656 - DNA, 20 bp, Artificial Sequence
  Description of Artificial Sequence: Synthetic oligonucleotide
  Target: LAMA2; (-) strand; PAM type: NRG; PAM sequence: GAG
atctaaaccagtccacttct

SEQ ID NO: 56657 - DNA, 20 bp, Artificial Sequence
  Description of Artificial Sequence: Synthetic oligonucleotide
  Target: LAMA2; (-) strand; PAM type: NRG; PAM sequence: CAG
atgtaattcatcatctaaac

SEQ ID NO: 56658 - DNA, 20 bp, Artificial Sequence
  Description of Artificial Sequence: Synthetic oligonucleotide
  Target: LAMA2; (-) strand; PAM type: NRG; PAM sequence: TGG
gaggtacattataaataagg

SEQ ID NO: 56659 - DNA, 20 bp, Artificial Sequence
  Description of Artificial Sequence: Synthetic oligonucleotide
  Target: LAMA2; (-) strand; PAM type: NRG; PAM sequence: AGG
catgaggtacattataaata

SEQ ID NO: 56660 - DNA, 20 bp, Artificial Sequence
  Description of Artificial Sequence: Synthetic oligonucleotide
  Target: LAMA2; (-) strand; PAM type: NRG; PAM sequence: AAG
gcatgaggtacattataaat

SEQ ID NO: 56661 - DNA, 20 bp, Artificial Sequence
  Description of Artificial Sequence: Synthetic oligonucleotide
  Target: LAMA2; (-) strand; PAM type: NRG; PAM sequence: AGG
actgcacagggcagagcatg

SEQ ID NO: 56662 - DNA, 20 bp, Artificial Sequence
  Description of Artificial Sequence: Synthetic oligonucleotide
  Target: LAMA2; (-) strand; PAM type: NRG; PAM sequence: GAG
aactgcacagggcagagcat

SEQ ID NO: 56663 - DNA, 20 bp, Artificial Sequence
  Description of Artificial Sequence: Synthetic oligonucleotide
  Target: LAMA2; (-) strand; PAM type: NRG; PAM sequence: GAG
ggagagaactgcacagggca

SEQ ID NO: 56664 - DNA, 20 bp, Artificial Sequence
  Description of Artificial Sequence: Synthetic oligonucleotide
  Target: LAMA2; (-) strand; PAM type: NRG; PAM sequence: CAG
ctggagagaactgcacaggg

SEQ ID NO: 56665 - DNA, 20 bp, Artificial Sequence
  Description of Artificial Sequence: Synthetic oligonucleotide
  Target: LAMA2; (-) strand; PAM type: NRG; PAM sequence: GGG
aggctggagagaactgcaca

SEQ ID NO: 56666 - DNA, 20 bp, Artificial Sequence
  Description of Artificial Sequence: Synthetic oligonucleotide
  Target: LAMA2; (-) strand; PAM type: NRG; PAM sequence: AGG
gaggctggagagaactgcac

SEQ ID NO: 56667 - DNA, 20 bp, Artificial Sequence
  Description of Artificial Sequence: Synthetic oligonucleotide
  Target: LAMA2; (-) strand; PAM type: NRG; PAM sequence: CAG
tgaggctggagagaactgca

SEQ ID NO: 56668 - DNA, 20 bp, Artificial Sequence
  Description of Artificial Sequence: Synthetic oligonucleotide
  Target: LAMA2; (-) strand; PAM type: NRG; PAM sequence: GAG
tggtgagagatgaggctgga

SEQ ID NO: 56669 - DNA, 20 bp, Artificial Sequence
  Description of Artificial Sequence: Synthetic oligonucleotide
  Target: LAMA2; (-) strand; PAM type: NRG; PAM sequence: GAG
agtggtgagagatgaggctg

SEQ ID NO: 56670 - DNA, 20 bp, Artificial Sequence
  Description of Artificial Sequence: Synthetic oligonucleotide
  Target: LAMA2; (-) strand; PAM type: NRG; PAM sequence: TGG
aaagtggtgagagatgaggc

SEQ ID NO: 56671 - DNA, 20 bp, Artificial Sequence
  Description of Artificial Sequence: Synthetic oligonucleotide
  Target: LAMA2; (-) strand; PAM type: NRG; PAM sequence: AGG
ttaaaaagtggtgagagatg

SEQ ID NO: 56672 - DNA, 20 bp, Artificial Sequence
  Description of Artificial Sequence: Synthetic oligonucleotide
  Target: LAMA2; (-) strand; PAM type: NRG; PAM sequence: GAG
tttaaaaagtggtgagagat

SEQ ID NO: 56673 - DNA, 20 bp, Artificial Sequence
  Description of Artificial Sequence: Synthetic oligonucleotide
  Target: LAMA2; (-) strand; PAM type: NRG; PAM sequence: GAG
tatgatttaaaaagtggtga

SEQ ID NO: 56674 - DNA, 20 bp, Artificial Sequence
  Description of Artificial Sequence: Synthetic oligonucleotide
  Target: LAMA2; (-) strand; PAM type: NRG; PAM sequence: GAG
tttatgatttaaaaagtggt

SEQ ID NO: 56675 - DNA, 20 bp, Artificial Sequence
  Description of Artificial Sequence: Synthetic oligonucleotide
  Target: LAMA2; (-) strand; PAM type: NRG; PAM sequence: TGG
catttttatgatttaaaaag

SEQ ID NO: 56676 - DNA, 20 bp, Artificial Sequence
  Description of Artificial Sequence: Synthetic oligonucleotide
  Target: LAMA2; (-) strand; PAM type: NRG; PAM sequence: AAG
gctcatttttatgatttaaa

SEQ ID NO: 56677 - DNA, 20 bp, Artificial Sequence
  Description of Artificial Sequence: Synthetic oligonucleotide
  Target: LAMA2; (-) strand; PAM type: NRG; PAM sequence: CAG
aaaggaattcagaatggata

SEQ ID NO: 56678 - DNA, 20 bp, Artificial Sequence
  Description of Artificial Sequence: Synthetic oligonucleotide
  Target: LAMA2; (-) strand; PAM type: NRG; PAM sequence: TGG
aaatccaaaggaattcagaa

SEQ ID NO: 56679 - DNA, 20 bp, Artificial Sequence
  Description of Artificial Sequence: Synthetic oligonucleotide
  Target: LAMA2; (-) strand; PAM type: NRG; PAM sequence: CAG
tccataaatccaaaggaatt

SEQ ID NO: 56680 - DNA, 20 bp, Artificial Sequence
  Description of Artificial Sequence: Synthetic oligonucleotide
  Target: LAMA2; (-) strand; PAM type: NRG; PAM sequence: AGG
gatatattccataaatccaa

SEQ ID NO: 56681 - DNA, 20 bp, Artificial Sequence
  Description of Artificial Sequence: Synthetic oligonucleotide
  Target: LAMA2; (-) strand; PAM type: NRG; PAM sequence: AAG
tgatatattccataaatcca

SEQ ID NO: 56682 - DNA, 20 bp, Artificial Sequence
  Description of Artificial Sequence: Synthetic oligonucleotide
  Target: LAMA2; (-) strand; PAM type: NRG; PAM sequence: CAG
aggctttgaactgaaagaga

SEQ ID NO: 56683 - DNA, 20 bp, Artificial Sequence
  Description of Artificial Sequence: Synthetic oligonucleotide
  Target: LAMA2; (-) strand; PAM type: NRG; PAM sequence: GAG
gcacaggctttgaactgaaa

SEQ ID NO: 56684 - DNA, 20 bp, Artificial Sequence
  Description of Artificial Sequence: Synthetic oligonucleotide
  Target: LAMA2; (-) strand; PAM type: NRG; PAM sequence: AAG
gggcacaggctttgaactga

SEQ ID NO: 56685 - DNA, 20 bp, Artificial Sequence
  Description of Artificial Sequence: Synthetic oligonucleotide
  Target: LAMA2; (-) strand; PAM type: NRG; PAM sequence: AGG
agtgacaacattatgggcac

SEQ ID NO: 56686 - DNA, 20 bp, Artificial Sequence
  Description of Artificial Sequence: Synthetic oligonucleotide
  Target: LAMA2; (-) strand; PAM type: NRG; PAM sequence: CAG
cagtgacaacattatgggca

SEQ ID NO: 56687 - DNA, 20 bp, Artificial Sequence
  Description of Artificial Sequence: Synthetic oligonucleotide
  Target: LAMA2; (-) strand; PAM type: NRG; PAM sequence: GGG
ttaggcagtgacaacattat

SEQ ID NO: 56688 - DNA, 20 bp, Artificial Sequence
  Description of Artificial Sequence: Synthetic oligonucleotide
  Target: LAMA2; (-) strand; PAM type: NRG; PAM sequence: TGG
tttaggcagtgacaacatta

SEQ ID NO: 56689 - DNA, 20 bp, Artificial Sequence
  Description of Artificial Sequence: Synthetic oligonucleotide
  Target: LAMA2; (-) strand; PAM type: NRG; PAM sequence: CAG
taacagagagatattttagg

SEQ ID NO: 56690 - DNA, 20 bp, Artificial Sequence
  Description of Artificial Sequence: Synthetic oligonucleotide
  Target: LAMA2; (-) strand; PAM type: NRG; PAM sequence: AGG
ggttaacagagagatatttt

SEQ ID NO: 56691 - DNA, 20 bp, Artificial Sequence
  Description of Artificial Sequence: Synthetic oligonucleotide
  Target: LAMA2; (-) strand; PAM type: NRG; PAM sequence: TAG
aggttaacagagagatattt

SEQ ID NO: 56692 - DNA, 20 bp, Artificial Sequence
  Description of Artificial Sequence: Synthetic oligonucleotide
  Target: LAMA2; (-) strand; PAM type: NRG; PAM sequence: GAG
gcattagtcaggttaacaga

SEQ ID NO: 56693 - DNA, 20 bp, Artificial Sequence
  Description of Artificial Sequence: Synthetic oligonucleotide
  Target: LAMA2; (-) strand; PAM type: NRG; PAM sequence: GAG
atgcattagtcaggttaaca

SEQ ID NO: 56694 - DNA, 20 bp, Artificial Sequence
  Description of Artificial Sequence: Synthetic oligonucleotide
  Target: LAMA2; (-) strand; PAM type: NRG; PAM sequence: CAG
gtatgcattagtcaggttaa

SEQ ID NO: 56695 - DNA, 20 bp, Artificial Sequence
  Description of Artificial Sequence: Synthetic oligonucleotide
  Target: LAMA2; (-) strand; PAM type: NRG; PAM sequence: AGG
aaaattggtatgcattagtc

SEQ ID NO: 56696 - DNA, 20 bp, Artificial Sequence
  Description of Artificial Sequence: Synthetic oligonucleotide
  Target: LAMA2; (-) strand; PAM type: NRG; PAM sequence: CAG
gaaaattggtatgcattagt

SEQ ID NO: 56697 - DNA, 20 bp, Artificial Sequence
  Description of Artificial Sequence: Synthetic oligonucleotide
  Target: LAMA2; (-) strand; PAM type: NRG; PAM sequence: TAG
gcatgaaaattggtatgcat

SEQ ID NO: 56698 - DNA, 20 bp, Artificial Sequence
  Description of Artificial Sequence: Synthetic oligonucleotide
  Target: LAMA2; (-) strand; PAM type: NRG; PAM sequence: TGG
agaaaaatgagcatgaaaat

SEQ ID NO: 56699 - DNA, 20 bp, Artificial Sequence
  Description of Artificial Sequence: Synthetic oligonucleotide
  Target: LAMA2; (-) strand; PAM type: NRG; PAM sequence: GAG
aaaaaaaagaaaagaaaaat

SEQ ID NO: 56700 - DNA, 20 bp, Artificial Sequence
  Description of Artificial Sequence: Synthetic oligonucleotide
  Target: LAMA2; (-) strand; PAM type: NRG; PAM sequence: AAG
gtcaaaaaaaaaaaaaagaa

SEQ ID NO: 56701 - DNA, 20 bp, Artificial Sequence
  Description of Artificial Sequence: Synthetic oligonucleotide
  Target: LAMA2; (-) strand; PAM type: NRG; PAM sequence: AAG
actccgtcaaaaaaaaaaaa

SEQ ID NO: 56702 - DNA, 20 bp, Artificial Sequence
  Description of Artificial Sequence: Synthetic oligonucleotide
  Target: LAMA2; (-) strand; PAM type: NRG; PAM sequence: AGG
tccagcctgggtgacagagc

SEQ ID NO: 56703 - DNA, 20 bp, Artificial Sequence
  Description of Artificial Sequence: Synthetic oligonucleotide
  Target: LAMA2; (-) strand; PAM type: NRG; PAM sequence: CAG
ctccagcctgggtgacagag

SEQ ID NO: 56704 - DNA, 20 bp, Artificial Sequence
  Description of Artificial Sequence: Synthetic oligonucleotide
  Target: LAMA2; (-) strand; PAM type: NRG; PAM sequence: GAG
gcactccagcctgggtgaca

SEQ ID NO: 56705 - DNA, 20 bp, Artificial Sequence
  Description of Artificial Sequence: Synthetic oligonucleotide
  Target: LAMA2; (-) strand; PAM type: NRG; PAM sequence: CAG
ctgcactccagcctgggtga

SEQ ID NO: 56706 - DNA, 20 bp, Artificial Sequence
  Description of Artificial Sequence: Synthetic oligonucleotide
  Target: LAMA2; (-) strand; PAM type: NRG; PAM sequence: GGG
gcagcactgcactccagcct

SEQ ID NO: 56707 - DNA, 20 bp, Artificial Sequence
  Description of Artificial Sequence: Synthetic oligonucleotide
  Target: LAMA2; (-) strand; PAM type: NRG; PAM sequence: TGG
cgcagcactgcactccagcc

SEQ ID NO: 56708 - DNA, 20 bp, Artificial Sequence
  Description of Artificial Sequence: Synthetic oligonucleotide
  Target: LAMA2; (-) strand; PAM type: NRG; PAM sequence: CAG
gagatcgcagcactgcactc

SEQ ID NO: 56709 - DNA, 20 bp, Artificial Sequence
  Description of Artificial Sequence: Synthetic oligonucleotide
  Target: LAMA2; (-) strand; PAM type: NRG; PAM sequence: CAG
gttgcagtgagctgagatcg

SEQ ID NO: 56710 - DNA, 20 bp, Artificial Sequence
  Description of Artificial Sequence: Synthetic oligonucleotide
  Target: LAMA2; (-) strand; PAM type: NRG; PAM sequence: GAG
ggtggaggttgcagtgagct

SEQ ID NO: 56711 - DNA, 20 bp, Artificial Sequence
  Description of Artificial Sequence: Synthetic oligonucleotide
  Target: LAMA2; (-) strand; PAM type: NRG; PAM sequence: GAG
cgggaggtggaggttgcagt

SEQ ID NO: 56712 - DNA, 20 bp, Artificial Sequence
  Description of Artificial Sequence: Synthetic oligonucleotide
  Target: LAMA2; (-) strand; PAM type: NRG; PAM sequence: CAG
aacccgggaggtggaggttg

SEQ ID NO: 56713 - DNA, 20 bp, Artificial Sequence
  Description of Artificial Sequence: Synthetic oligonucleotide
  Target: LAMA2; (-) strand; PAM type: NRG; PAM sequence: AGG
cgcttgaacccgggaggtgg

SEQ ID NO: 56714 - DNA, 20 bp, Artificial Sequence
  Description of Artificial Sequence: Synthetic oligonucleotide
  Target: LAMA2; (-) strand; PAM type: NRG; PAM sequence: GAG
tcgcttgaacccgggaggtg

SEQ ID NO: 56715 - DNA, 20 bp, Artificial Sequence
  Description of Artificial Sequence: Synthetic oligonucleotide
  Target: LAMA2; (-) strand; PAM type: NRG; PAM sequence: TGG
aatcgcttgaacccgggagg

SEQ ID NO: 56716 - DNA, 20 bp, Artificial Sequence
  Description of Artificial Sequence: Synthetic oligonucleotide
  Target: LAMA2; (-) strand; PAM type: NRG; PAM sequence: AGG
gagaatcgcttgaacccggg

SEQ ID NO: 56717 - DNA, 20 bp, Artificial Sequence
  Description of Artificial Sequence: Synthetic oligonucleotide
  Target: LAMA2; (-) strand; PAM type: NRG; PAM sequence: GAG
ggagaatcgcttgaacccgg

SEQ ID NO: 56718 - DNA, 20 bp, Artificial Sequence
  Description of Artificial Sequence: Synthetic oligonucleotide
  Target: LAMA2; (-) strand; PAM type: NRG; PAM sequence: GGG
aaggagaatcgcttgaaccc

SEQ ID NO: 56719 - DNA, 20 bp, Artificial Sequence
  Description of Artificial Sequence: Synthetic oligonucleotide
  Target: LAMA2; (-) strand; PAM type: NRG; PAM sequence: CGG
gaaggagaatcgcttgaacc

SEQ ID NO: 56720 - DNA, 20 bp, Artificial Sequence
  Description of Artificial Sequence: Synthetic oligonucleotide
  Target: LAMA2; (-) strand; PAM type: NRG; PAM sequence: GAG
tactctagaggctgaggaag

SEQ ID NO: 56721 - DNA, 20 bp, Artificial Sequence
  Description of Artificial Sequence: Synthetic oligonucleotide
  Target: LAMA2; (-) strand; PAM type: NRG; PAM sequence: AGG
gctactctagaggctgagga

SEQ ID NO: 56722 - DNA, 20 bp, Artificial Sequence
  Description of Artificial Sequence: Synthetic oligonucleotide
  Target: LAMA2; (-) strand; PAM type: NRG; PAM sequence: AAG
agctactctagaggctgagg

SEQ ID NO: 56723 - DNA, 20 bp, Artificial Sequence
  Description of Artificial Sequence: Synthetic oligonucleotide
  Target: LAMA2; (-) strand; PAM type: NRG; PAM sequence: AGG
cccagctactctagaggctg

SEQ ID NO: 56724 - DNA, 20 bp, Artificial Sequence
  Description of Artificial Sequence: Synthetic oligonucleotide
  Target: LAMA2; (-) strand; PAM type: NRG; PAM sequence: GAG
tcccagctactctagaggct

SEQ ID NO: 56725 - DNA, 20 bp, Artificial Sequence
  Description of Artificial Sequence: Synthetic oligonucleotide
  Target: LAMA2; (-) strand; PAM type: NRG; PAM sequence: AGG
tgtagtcccagctactctag

SEQ ID NO: 56726 - DNA, 20 bp, Artificial Sequence
  Description of Artificial Sequence: Synthetic oligonucleotide
  Target: LAMA2; (-) strand; PAM type: NRG; PAM sequence: GAG
ctgtagtcccagctactcta

SEQ ID NO: 56727 - DNA, 20 bp, Artificial Sequence
  Description of Artificial Sequence: Synthetic oligonucleotide
  Target: LAMA2; (-) strand; PAM type: NRG; PAM sequence: TAG
gcctgtagtcccagctactc

SEQ ID NO: 56728 - DNA, 20 bp, Artificial Sequence
  Description of Artificial Sequence: Synthetic oligonucleotide
  Target: LAMA2; (-) strand; PAM type: NRG; PAM sequence: CAG
gtggcacacgcctgtagtcc

SEQ ID NO: 56729 - DNA, 20 bp, Artificial Sequence
  Description of Artificial Sequence: Synthetic oligonucleotide
  Target: LAMA2; (-) strand; PAM type: NRG; PAM sequence: TAG
ggcgtggtggcacacgcctg

SEQ ID NO: 56730 - DNA, 20 bp, Artificial Sequence
  Description of Artificial Sequence: Synthetic oligonucleotide
  Target: LAMA2; (-) strand; PAM type: NRG; PAM sequence: TGG
caaaaattagctgggcgtgg

SEQ ID NO: 56731 - DNA, 20 bp, Artificial Sequence
  Description of Artificial Sequence: Synthetic oligonucleotide
  Target: LAMA2; (-) strand; PAM type: NRG; PAM sequence: TGG
atacaaaaattagctgggcg

SEQ ID NO: 56732 - DNA, 20 bp, Artificial Sequence
  Description of Artificial Sequence: Synthetic oligonucleotide
  Target: LAMA2; (-) strand; PAM type: NRG; PAM sequence: GGG
taaaaatacaaaaattagct

SEQ ID NO: 56733 - DNA, 20 bp, Artificial Sequence
  Description of Artificial Sequence: Synthetic oligonucleotide
  Target: LAMA2; (-) strand; PAM type: NRG; PAM sequence: TGG
ctaaaaatacaaaaattagc

SEQ ID NO: 56734 - DNA, 20 bp, Artificial Sequence
  Description of Artificial Sequence: Synthetic oligonucleotide
  Target: LAMA2; (-) strand; PAM type: NRG; PAM sequence: TAG
tctactaaaaatacaaaaat

SEQ ID NO: 56735 - DNA, 20 bp, Artificial Sequence
  Description of Artificial Sequence: Synthetic oligonucleotide
  Target: LAMA2; (-) strand; PAM type: NRG; PAM sequence: TGG
cgagaccaacatggccaaca

SEQ ID NO: 56736 - DNA, 20 bp, Artificial Sequence
  Description of Artificial Sequence: Synthetic oligonucleotide
  Target: LAMA2; (-) strand; PAM type: NRG; PAM sequence: TGG
tcgagagatcgagaccaaca

SEQ ID NO: 56737 - DNA, 20 bp, Artificial Sequence
  Description of Artificial Sequence: Synthetic oligonucleotide
  Target: LAMA2; (-) strand; PAM type: NRG; PAM sequence: GAG
aattgcgaggtcgagagatc

SEQ ID NO: 56738 - DNA, 20 bp, Artificial Sequence
  Description of Artificial Sequence: Synthetic oligonucleotide
  Target: LAMA2; (-) strand; PAM type: NRG; PAM sequence: GAG
cgggcgaattgcgaggtcga

SEQ ID NO: 56739 - DNA, 20 bp, Artificial Sequence
  Description of Artificial Sequence: Synthetic oligonucleotide
  Target: LAMA2; (-) strand; PAM type: NRG; PAM sequence: GAG
ggcgggcgaattgcgaggtc

SEQ ID NO: 56740 - DNA, 20 bp, Artificial Sequence
  Description of Artificial Sequence: Synthetic oligonucleotide
  Target: LAMA2; (-) strand; PAM type: NRG; PAM sequence: AGG
cctgaggcgggcgaattgcg

SEQ ID NO: 56741 - DNA, 20 bp, Artificial Sequence
  Description of Artificial Sequence: Synthetic oligonucleotide
  Target: LAMA2; (-) strand; PAM type: NRG; PAM sequence: GAG
gcctgaggcgggcgaattgc

SEQ ID NO: 56742 - DNA, 20 bp, Artificial Sequence
  Description of Artificial Sequence: Synthetic oligonucleotide
  Target: LAMA2; (-) strand; PAM type: NRG; PAM sequence: GGG
gcactttgggagcctgaggc

SEQ ID NO: 56743 - DNA, 20 bp, Artificial Sequence
  Description of Artificial Sequence: Synthetic oligonucleotide
  Target: LAMA2; (-) strand; PAM type: NRG; PAM sequence: CGG
agcactttgggagcctgagg

SEQ ID NO: 56744 - DNA, 20 bp, Artificial Sequence
  Description of Artificial Sequence: Synthetic oligonucleotide
  Target: LAMA2; (-) strand; PAM type: NRG; PAM sequence: AGG
cccagcactttgggagcctg

SEQ ID NO: 56745 - DNA, 20 bp, Artificial Sequence
  Description of Artificial Sequence: Synthetic oligonucleotide
  Target: LAMA2; (-) strand; PAM type: NRG; PAM sequence: GAG
tcccagcactttgggagcct

SEQ ID NO: 56746 - DNA, 20 bp, Artificial Sequence
  Description of Artificial Sequence: Synthetic oligonucleotide
  Target: LAMA2; (-) strand; PAM type: NRG; PAM sequence: GAG
ctgtaatcccagcactttgg

SEQ ID NO: 56747 - DNA, 20 bp, Artificial Sequence
  Description of Artificial Sequence: Synthetic oligonucleotide
  Target: LAMA2; (-) strand; PAM type: NRG; PAM sequence: GGG
gcctgtaatcccagcacttt

SEQ ID NO: 56748 - DNA, 20 bp, Artificial Sequence
  Description of Artificial Sequence: Synthetic oligonucleotide
  Target: LAMA2; (-) strand; PAM type: NRG; PAM sequence: TGG
cgcctgtaatcccagcactt

SEQ ID NO: 56749 - DNA, 20 bp, Artificial Sequence
  Description of Artificial Sequence: Synthetic oligonucleotide
  Target: LAMA2; (-) strand; PAM type: NRG; PAM sequence: CAG
gtggctcacgcctgtaatcc

SEQ ID NO: 56750 - DNA, 20 bp, Artificial Sequence
  Description of Artificial Sequence: Synthetic oligonucleotide
  Target: LAMA2; (-) strand; PAM type: NRG; PAM sequence: TGG
agcatgagggaccggcacgg

SEQ ID NO: 56751 - DNA, 20 bp, Artificial Sequence
  Description of Artificial Sequence: Synthetic oligonucleotide
  Target: LAMA2; (-) strand; PAM type: NRG; PAM sequence: CGG
tggagcatgagggaccggca

SEQ ID NO: 56752 - DNA, 20 bp, Artificial Sequence
  Description of Artificial Sequence: Synthetic oligonucleotide
  Target: LAMA2; (-) strand; PAM type: NRG; PAM sequence: CGG
aaaaatggagcatgagggac

SEQ ID NO: 56753 - DNA, 20 bp, Artificial Sequence
  Description of Artificial Sequence: Synthetic oligonucleotide
  Target: LAMA2; (-) strand; PAM type: NRG; PAM sequence: GGG
actataaaaatggagcatga

SEQ ID NO: 56754 - DNA, 20 bp, Artificial Sequence
  Description of Artificial Sequence: Synthetic oligonucleotide
  Target: LAMA2; (-) strand; PAM type: NRG; PAM sequence: AGG
aactataaaaatggagcatg

SEQ ID NO: 56755 - DNA, 20 bp, Artificial Sequence
  Description of Artificial Sequence: Synthetic oligonucleotide
  Target: LAMA2; (-) strand; PAM type: NRG; PAM sequence: GAG
aaactataaaaatggagcat

SEQ ID NO: 56756 - DNA, 20 bp, Artificial Sequence
  Description of Artificial Sequence: Synthetic oligonucleotide
  Target: LAMA2; (-) strand; PAM type: NRG; PAM sequence: GAG
ttggagaaactataaaaatg

SEQ ID NO: 56757 - DNA, 20 bp, Artificial Sequence
  Description of Artificial Sequence: Synthetic oligonucleotide
  Target: LAMA2; (-) strand; PAM type: NRG; PAM sequence: TGG
tcttggagaaactataaaaa

SEQ ID NO: 56758 - DNA, 20 bp, Artificial Sequence
  Description of Artificial Sequence: Synthetic oligonucleotide
  Target: LAMA2; (-) strand; PAM type: NRG; PAM sequence: GAG
aggtcagaaagtgcttcttg

SEQ ID NO: 56759 - DNA, 20 bp, Artificial Sequence
  Description of Artificial Sequence: Synthetic oligonucleotide
  Target: LAMA2; (-) strand; PAM type: NRG; PAM sequence: TGG
agaggtcagaaagtgcttct

SEQ ID NO: 56760 - DNA, 20 bp, Artificial Sequence
  Description of Artificial Sequence: Synthetic oligonucleotide
  Target: LAMA2; (-) strand; PAM type: NRG; PAM sequence: AAG
aaactagtctagaggtcaga

SEQ ID NO: 56761 - DNA, 20 bp, Artificial Sequence
  Description of Artificial Sequence: Synthetic oligonucleotide
  Target: LAMA2; (-) strand; PAM type: NRG; PAM sequence: CAG
attcaaactagtctagaggt

SEQ ID NO: 56762 - DNA, 20 bp, Artificial Sequence
  Description of Artificial Sequence: Synthetic oligonucleotide
  Target: LAMA2; (-) strand; PAM type: NRG; PAM sequence: AGG
gaaaattcaaactagtctag

SEQ ID NO: 56763 - DNA, 20 bp, Artificial Sequence
  Description of Artificial Sequence: Synthetic oligonucleotide
  Target: LAMA2; (-) strand; PAM type: NRG; PAM sequence: GAG
ggaaaattcaaactagtcta

SEQ ID NO: 56764 - DNA, 20 bp, Artificial Sequence
  Description of Artificial Sequence: Synthetic oligonucleotide
  Target: LAMA2; (-) strand; PAM type: NRG; PAM sequence: TAG
taggaaaattcaaactagtc

SEQ ID NO: 56765 - DNA, 20 bp, Artificial Sequence
  Description of Artificial Sequence: Synthetic oligonucleotide
  Target: LAMA2; (-) strand; PAM type: NRG; PAM sequence: TAG
agaaataggaaaattcaaac

SEQ ID NO: 56766 - DNA, 20 bp, Artificial Sequence
  Description of Artificial Sequence: Synthetic oligonucleotide
  Target: LAMA2; (-) strand; PAM type: NRG; PAM sequence: AGG
gccaatatgggtacagaaat

SEQ ID NO: 56767 - DNA, 20 bp, Artificial Sequence
  Description of Artificial Sequence: Synthetic oligonucleotide
  Target: LAMA2; (-) strand; PAM type: NRG; PAM sequence: TAG
agccaatatgggtacagaaa

SEQ ID NO: 56768 - DNA, 20 bp, Artificial Sequence
  Description of Artificial Sequence: Synthetic oligonucleotide
  Target: LAMA2; (-) strand; PAM type: NRG; PAM sequence: CAG
gaatagagccaatatgggta

SEQ ID NO: 56769 - DNA, 20 bp, Artificial Sequence
  Description of Artificial Sequence: Synthetic oligonucleotide
  Target: LAMA2; (-) strand; PAM type: NRG; PAM sequence: GGG
gggaagaatagagccaatat

SEQ ID NO: 56770 - DNA, 20 bp, Artificial Sequence
  Description of Artificial Sequence: Synthetic oligonucleotide
  Target: LAMA2; (-) strand; PAM type: NRG; PAM sequence: TGG
ggggaagaatagagccaata

SEQ ID NO: 56771 - DNA, 20 bp, Artificial Sequence
  Description of Artificial Sequence: Synthetic oligonucleotide
  Target: LAMA2; (-) strand; PAM type: NRG; PAM sequence: GAG
gtttgattaggggaagaata

SEQ ID NO: 56772 - DNA, 20 bp, Artificial Sequence
  Description of Artificial Sequence: Synthetic oligonucleotide
  Target: LAMA2; (-) strand; PAM type: NRG; PAM sequence: TAG
gggtttgattaggggaagaa

SEQ ID NO: 56773 - DNA, 20 bp, Artificial Sequence
  Description of Artificial Sequence: Synthetic oligonucleotide
  Target: LAMA2; (-) strand; PAM type: NRG; PAM sequence: AAG
gaaaagggtttgattagggg

SEQ ID NO: 56774 - DNA, 20 bp, Artificial Sequence
  Description of Artificial Sequence: Synthetic oligonucleotide
  Target: LAMA2; (-) strand; PAM type: NRG; PAM sequence: GGG
tgggaaaagggtttgattag

SEQ ID NO: 56775 - DNA, 20 bp, Artificial Sequence
  Description of Artificial Sequence: Synthetic oligonucleotide
  Target: LAMA2; (-) strand; PAM type: NRG; PAM sequence: GGG
ttgggaaaagggtttgatta

SEQ ID NO: 56776 - DNA, 20 bp, Artificial Sequence
  Description of Artificial Sequence: Synthetic oligonucleotide
  Target: LAMA2; (-) strand; PAM type: NRG; PAM sequence: AGG
attgggaaaagggtttgatt

SEQ ID NO: 56777 - DNA, 20 bp, Artificial Sequence
  Description of Artificial Sequence: Synthetic oligonucleotide
  Target: LAMA2; (-) strand; PAM type: NRG; PAM sequence: TAG
aattgggaaaagggtttgat

SEQ ID NO: 56778 - DNA, 20 bp, Artificial Sequence
  Description of Artificial Sequence: Synthetic oligonucleotide
  Target: LAMA2; (-) strand; PAM type: NRG; PAM sequence: GGG
aacatggttaattgggaaaa

SEQ ID NO: 56779 - DNA, 20 bp, Artificial Sequence
  Description of Artificial Sequence: Synthetic oligonucleotide
  Target: LAMA2; (-) strand; PAM type: NRG; PAM sequence: AGG
aaacatggttaattgggaaa

SEQ ID NO: 56780 - DNA, 20 bp, Artificial Sequence
  Description of Artificial Sequence: Synthetic oligonucleotide
  Target: LAMA2; (-) strand; PAM type: NRG; PAM sequence: AAG
taaacatggttaattgggaa

SEQ ID NO: 56781 - DNA, 20 bp, Artificial Sequence
  Description of Artificial Sequence: Synthetic oligonucleotide
  Target: LAMA2; (-) strand; PAM type: NRG; PAM sequence: GGG
ggatataaacatggttaatt

SEQ ID NO: 56782 - DNA, 20 bp, Artificial Sequence
  Description of Artificial Sequence: Synthetic oligonucleotide
  Target: LAMA2; (-) strand; PAM type: NRG; PAM sequence: TGG
aggatataaacatggttaat

SEQ ID NO: 56783 - DNA, 20 bp, Artificial Sequence
  Description of Artificial Sequence: Synthetic oligonucleotide
  Target: LAMA2; (-) strand; PAM type: NRG; PAM sequence: TGG
cataaactaggatataaaca

SEQ ID NO: 56784 - DNA, 20 bp, Artificial Sequence
  Description of Artificial Sequence: Synthetic oligonucleotide
  Target: LAMA2; (-) strand; PAM type: NRG; PAM sequence: AGG
taaaaggaagcacataaact

SEQ ID NO: 56785 - DNA, 20 bp, Artificial Sequence
  Description of Artificial Sequence: Synthetic oligonucleotide
  Target: LAMA2; (-) strand; PAM type: NRG; PAM sequence: TAG
ctaaaaggaagcacataaac

SEQ ID NO: 56786 - DNA, 20 bp, Artificial Sequence
  Description of Artificial Sequence: Synthetic oligonucleotide
  Target: LAMA2; (-) strand; PAM type: NRG; PAM sequence: AAG
caatggtacatgctaaaagg

SEQ ID NO: 56787 - DNA, 20 bp, Artificial Sequence
  Description of Artificial Sequence: Synthetic oligonucleotide
  Target: LAMA2; (-) strand; PAM type: NRG; PAM sequence: AGG
aaacaatggtacatgctaaa

SEQ ID NO: 56788 - DNA, 20 bp, Artificial Sequence
  Description of Artificial Sequence: Synthetic oligonucleotide
  Target: LAMA2; (-) strand; PAM type: NRG; PAM sequence: AAG
gaaacaatggtacatgctaa

SEQ ID NO: 56789 - DNA, 20 bp, Artificial Sequence
  Description of Artificial Sequence: Synthetic oligonucleotide
  Target: LAMA2; (-) strand; PAM type: NRG; PAM sequence: TGG
ataaggccctagagaaacaa

SEQ ID NO: 56790 - DNA, 20 bp, Artificial Sequence
  Description of Artificial Sequence: Synthetic oligonucleotide
  Target: LAMA2; (-) strand; PAM type: NRG; PAM sequence: GAG
caaatacttataaggcccta

SEQ ID NO: 56791 - DNA, 20 bp, Artificial Sequence
  Description of Artificial Sequence: Synthetic oligonucleotide
  Target: LAMA2; (-) strand; PAM type: NRG; PAM sequence: TAG
aacaaatacttataaggccc

SEQ ID NO: 56792 - DNA, 20 bp, Artificial Sequence
  Description of Artificial Sequence: Synthetic oligonucleotide
  Target: LAMA2; (-) strand; PAM type: NRG; PAM sequence: AGG
ctgtataacaaatacttata

SEQ ID NO: 56793 - DNA, 20 bp, Artificial Sequence
  Description of Artificial Sequence: Synthetic oligonucleotide
  Target: LAMA2; (-) strand; PAM type: NRG; PAM sequence: AAG
tctgtataacaaatacttat

SEQ ID NO: 56794 - DNA, 20 bp, Artificial Sequence
  Description of Artificial Sequence: Synthetic oligonucleotide
  Target: LAMA2; (-) strand; PAM type: NRG; PAM sequence: AAG
caaagtccaaaagcaaccta

SEQ ID NO: 56795 - DNA, 20 bp, Artificial Sequence
  Description of Artificial Sequence: Synthetic oligonucleotide
  Target: LAMA2; (-) strand; PAM type: NRG; PAM sequence: AAG
gagcagatgtcaaagtccaa

SEQ ID NO: 56796 - DNA, 20 bp, Artificial Sequence
  Description of Artificial Sequence: Synthetic oligonucleotide
  Target: LAMA2; (-) strand; PAM type: NRG; PAM sequence: AAG
aaagtcaagagcagatgtca

SEQ ID NO: 56797 - DNA, 20 bp, Artificial Sequence
  Description of Artificial Sequence: Synthetic oligonucleotide
  Target: LAMA2; (-) strand; PAM type: NRG; PAM sequence: CAG
tcaacataaaaagtcaagag

SEQ ID NO: 56798 - DNA, 20 bp, Artificial Sequence
  Description of Artificial Sequence: Synthetic oligonucleotide
  Target: LAMA2; (-) strand; PAM type: NRG; PAM sequence: GAG
ttctcaacataaaaagtcaa

SEQ ID NO: 56799 - DNA, 20 bp, Artificial Sequence
  Description of Artificial Sequence: Synthetic oligonucleotide
  Target: LAMA2; (-) strand; PAM type: NRG; PAM sequence: AAG
ctttctcaacataaaaagtc

SEQ ID NO: 56800 - DNA, 20 bp, Artificial Sequence
  Description of Artificial Sequence: Synthetic oligonucleotide
  Target: LAMA2; (-) strand; PAM type: NRG; PAM sequence: AAG
catccctttctcaacataaa

SEQ ID NO: 56801 - DNA, 20 bp, Artificial Sequence
  Description of Artificial Sequence: Synthetic oligonucleotide
  Target: LAMA2; (-) strand; PAM type: NRG; PAM sequence: TAG
tcttttcttctcccttgcta

SEQ ID NO: 56802 - DNA, 20 bp, Artificial Sequence
  Description of Artificial Sequence: Synthetic oligonucleotide
  Target: LAMA2; (-) strand; PAM type: NRG; PAM sequence: TGG
ttcaataatcagcccttttc

SEQ ID NO: 56803 - DNA, 20 bp, Artificial Sequence
  Description of Artificial Sequence: Synthetic oligonucleotide
  Target: LAMA2; (-) strand; PAM type: NRG; PAM sequence: CAG
ctttcttgatattcaataat

SEQ ID NO: 56804 - DNA, 20 bp, Artificial Sequence
  Description of Artificial Sequence: Synthetic oligonucleotide
  Target: LAMA2; (-) strand; PAM type: NRG; PAM sequence: AAG
ccatccaaattgtcagttca

SEQ ID NO: 56805 - DNA, 20 bp, Artificial Sequence
  Description of Artificial Sequence: Synthetic oligonucleotide
  Target: LAMA2; (-) strand; PAM type: NRG; PAM sequence: CAG
tagttgtccatccaaattgt

SEQ ID NO: 56806 - DNA, 20 bp, Artificial Sequence
  Description of Artificial Sequence: Synthetic oligonucleotide
  Target: LAMA2; (-) strand; PAM type: NRG; PAM sequence: TAG
cgatgatcagaaatggaatg

SEQ ID NO: 56807 - DNA, 20 bp, Artificial Sequence
  Description of Artificial Sequence: Synthetic oligonucleotide
  Target: LAMA2; (-) strand; PAM type: NRG; PAM sequence: TGG
acaggatcgatgatcagaaa

SEQ ID NO: 56808 - DNA, 20 bp, Artificial Sequence
  Description of Artificial Sequence: Synthetic oligonucleotide
  Target: LAMA2; (-) strand; PAM type: NRG; PAM sequence: CAG
gcaaagacaggatcgatgat

SEQ ID NO: 56809 - DNA, 20 bp, Artificial Sequence
  Description of Artificial Sequence: Synthetic oligonucleotide
  Target: LAMA2; (-) strand; PAM type: NRG; PAM sequence: AGG
gcaagcaatagtgcaaagac

SEQ ID NO: 56810 - DNA, 20 bp, Artificial Sequence
  Description of Artificial Sequence: Synthetic oligonucleotide
  Target: LAMA2; (-) strand; PAM type: NRG; PAM sequence: CAG
tgcaagcaatagtgcaaaga

SEQ ID NO: 56811 - DNA, 20 bp, Artificial Sequence
  Description of Artificial Sequence: Synthetic oligonucleotide
  Target: LAMA2; (-) strand; PAM type: NRG; PAM sequence: AAG
taagtgcaagcaatagtgca

SEQ ID NO: 56812 - DNA, 20 bp, Artificial Sequence
  Description of Artificial Sequence: Synthetic oligonucleotide
  Target: LAMA2; (-) strand; PAM type: NRG; PAM sequence: TAG
gctaagataagtgcaagcaa

SEQ ID NO: 56813 - DNA, 20 bp, Artificial Sequence
  Description of Artificial Sequence: Synthetic oligonucleotide
  Target: LAMA2; (-) strand; PAM type: NRG; PAM sequence: AAG
gcccctgctaagataagtgc

SEQ ID NO: 56814 - DNA, 20 bp, Artificial Sequence
  Description of Artificial Sequence: Synthetic oligonucleotide
  Target: LAMA2; (-) strand; PAM type: NRG; PAM sequence: AAG
ttaagtgcccctgctaagat

SEQ ID NO: 56815 - DNA, 20 bp, Artificial Sequence
  Description of Artificial Sequence: Synthetic oligonucleotide
  Target: LAMA2; (-) strand; PAM type: NRG; PAM sequence: AAG
gctttttaagtgcccctgct

SEQ ID NO: 56816 - DNA, 20 bp, Artificial Sequence
  Description of Artificial Sequence: Synthetic oligonucleotide
  Target: LAMA2; (-) strand; PAM type: NRG; PAM sequence: AAG
atacgcgtttcaggcttttt

SEQ ID NO: 56817 - DNA, 20 bp, Artificial Sequence
  Description of Artificial Sequence: Synthetic oligonucleotide
  Target: LAMA2; (-) strand; PAM type: NRG; PAM sequence: AGG
gcaggcaagatacgcgtttc

SEQ ID NO: 56818 - DNA, 20 bp, Artificial Sequence
  Description of Artificial Sequence: Synthetic oligonucleotide
  Target: LAMA2; (-) strand; PAM type: NRG; PAM sequence: CAG
tgcaggcaagatacgcgttt

SEQ ID NO: 56819 - DNA, 20 bp, Artificial Sequence
  Description of Artificial Sequence: Synthetic oligonucleotide
  Target: LAMA2; (-) strand; PAM type: NRG; PAM sequence: AAG
taagtttgtacattgcaggc

SEQ ID NO: 56820 - DNA, 20 bp, Artificial Sequence
  Description of Artificial Sequence: Synthetic oligonucleotide
  Target: LAMA2; (-) strand; PAM type: NRG; PAM sequence: AGG
ctgataagtttgtacattgc

SEQ ID NO: 56821 - DNA, 20 bp, Artificial Sequence
  Description of Artificial Sequence: Synthetic oligonucleotide
  Target: LAMA2; (-) strand; PAM type: NRG; PAM sequence: CAG
tctgataagtttgtacattg

SEQ ID NO: 56822 - DNA, 20 bp, Artificial Sequence
  Description of Artificial Sequence: Synthetic oligonucleotide
  Target: LAMA2; (-) strand; PAM type: NRG; PAM sequence: AAG
actatatgagatgttctgat

SEQ ID NO: 56823 - DNA, 20 bp, Artificial Sequence
  Description of Artificial Sequence: Synthetic oligonucleotide
  Target: LAMA2; (-) strand; PAM type: NRG; PAM sequence: GAG
tgaaaattatgttactatat

SEQ ID NO: 56824 - DNA, 20 bp, Artificial Sequence
  Description of Artificial Sequence: Synthetic oligonucleotide
  Target: LAMA2; (-) strand; PAM type: NRG; PAM sequence: TAG
taaaaaaggagagataatct

SEQ ID NO: 56825 - DNA, 20 bp, Artificial Sequence
  Description of Artificial Sequence: Synthetic oligonucleotide
  Target: LAMA2; (-) strand; PAM type: NRG; PAM sequence: GAG
taccaacttttaaaaaagga

SEQ ID NO: 56826 - DNA, 20 bp, Artificial Sequence
  Description of Artificial Sequence: Synthetic oligonucleotide
  Target: LAMA2; (-) strand; PAM type: NRG; PAM sequence: GAG
cttaccaacttttaaaaaag

SEQ ID NO: 56827 - DNA, 20 bp, Artificial Sequence
  Description of Artificial Sequence: Synthetic oligonucleotide
  Target: LAMA2; (-) strand; PAM type: NRG; PAM sequence: AGG
aacttaccaacttttaaaaa

SEQ ID NO: 56828 - DNA, 20 bp, Artificial Sequence
  Description of Artificial Sequence: Synthetic oligonucleotide
  Target: LAMA2; (-) strand; PAM type: NRG; PAM sequence: AAG
taacttaccaacttttaaaa

SEQ ID NO: 56829 - DNA, 20 bp, Artificial Sequence
  Description of Artificial Sequence: Synthetic oligonucleotide
  Target: LAMA2; (-) strand; PAM type: NRG; PAM sequence: TAG
cttacttttagtcatcattt

SEQ ID NO: 56830 - DNA, 20 bp, Artificial Sequence
  Description of Artificial Sequence: Synthetic oligonucleotide
  Target: LAMA2; (-) strand; PAM type: NRG; PAM sequence: TAG
atttaaacaacccttacttt

SEQ ID NO: 56831 - DNA, 20 bp, Artificial Sequence
  Description of Artificial Sequence: Synthetic oligonucleotide
  Target: LAMA2; (-) strand; PAM type: NRG; PAM sequence: TGG
tggaagtaaatcttataaaa

SEQ ID NO: 56832 - DNA, 20 bp, Artificial Sequence
  Description of Artificial Sequence: Synthetic oligonucleotide
  Target: LAMA2; (-) strand; PAM type: NRG; PAM sequence: AAG
ttcccactttcatcttctgg

SEQ ID NO: 56833 - DNA, 20 bp, Artificial Sequence
  Description of Artificial Sequence: Synthetic oligonucleotide
  Target: LAMA2; (-) strand; PAM type: NRG; PAM sequence: TGG
agcttcccactttcatcttc

SEQ ID NO: 56834 - DNA, 20 bp, Artificial Sequence
  Description of Artificial Sequence: Synthetic oligonucleotide
  Target: LAMA2; (-) strand; PAM type: NRG; PAM sequence: CAG
ttagaaatgatatgccactt

SEQ ID NO: 56835 - DNA, 20 bp, Artificial Sequence
  Description of Artificial Sequence: Synthetic oligonucleotide
  Target: LAMA2; (-) strand; PAM type: NRG; PAM sequence: TAG
ttcaacctacaaaaatagct

SEQ ID NO: 56836 - DNA, 20 bp, Artificial Sequence
  Description of Artificial Sequence: Synthetic oligonucleotide
  Target: LAMA2; (-) strand; PAM type: NRG; PAM sequence: TAG
tgcaattcaacctacaaaaa

SEQ ID NO: 56837 - DNA, 20 bp, Artificial Sequence
  Description of Artificial Sequence: Synthetic oligonucleotide
  Target: LAMA2; (-) strand; PAM type: NRG; PAM sequence: AGG
acttcaacatttctttttga

SEQ ID NO: 56838 - DNA, 20 bp, Artificial Sequence
  Description of Artificial Sequence: Synthetic oligonucleotide
  Target: LAMA2; (-) strand; PAM type: NRG; PAM sequence: AAG
gacttcaacatttctttttg

SEQ ID NO: 56839 - DNA, 20 bp, Artificial Sequence
  Description of Artificial Sequence: Synthetic oligonucleotide
  Target: LAMA2; (-) strand; PAM type: NRG; PAM sequence: AAG
attcatagttacctggggtt

SEQ ID NO: 56840 - DNA, 20 bp, Artificial Sequence
  Description of Artificial Sequence: Synthetic oligonucleotide
  Target: LAMA2; (-) strand; PAM type: NRG; PAM sequence: GGG
gtcacattcatagttacctg

SEQ ID NO: 56841 - DNA, 20 bp, Artificial Sequence
  Description of Artificial Sequence: Synthetic oligonucleotide
  Target: LAMA2; (-) strand; PAM type: NRG; PAM sequence: GGG
ggtcacattcatagttacct

SEQ ID NO: 56842 - DNA, 20 bp, Artificial Sequence
  Description of Artificial Sequence: Synthetic oligonucleotide
  Target: LAMA2; (-) strand; PAM type: NRG; PAM sequence: TGG
aggtcacattcatagttacc

SEQ ID NO: 56843 - DNA, 20 bp, Artificial Sequence
  Description of Artificial Sequence: Synthetic oligonucleotide
  Target: LAMA2; (-) strand; PAM type: NRG; PAM sequence: TAG
tgcaaataaggtcacattca

SEQ ID NO: 56844 - DNA, 20 bp, Artificial Sequence
  Description of Artificial Sequence: Synthetic oligonucleotide
  Target: LAMA2; (-) strand; PAM type: NRG; PAM sequence: AGG
aaagaccctatttgcaaata

SEQ ID NO: 56845 - DNA, 20 bp, Artificial Sequence
  Description of Artificial Sequence: Synthetic oligonucleotide
  Target: LAMA2; (-) strand; PAM type: NRG; PAM sequence: AAG
caaagaccctatttgcaaat

SEQ ID NO: 56846 - DNA, 20 bp, Artificial Sequence
  Description of Artificial Sequence: Synthetic oligonucleotide
  Target: LAMA2; (-) strand; PAM type: NRG; PAM sequence: AAG
ttaacttaattatatttgca

SEQ ID NO: 56847 - DNA, 20 bp, Artificial Sequence
  Description of Artificial Sequence: Synthetic oligonucleotide
  Target: LAMA2; (-) strand; PAM type: NRG; PAM sequence: CAG
gatcagggtccaccctaaac

SEQ ID NO: 56848 - DNA, 20 bp, Artificial Sequence
  Description of Artificial Sequence: Synthetic oligonucleotide
  Target: LAMA2; (-) strand; PAM type: NRG; PAM sequence: GGG
ataccagtcatattggatca

SEQ ID NO: 56849 - DNA, 20 bp, Artificial Sequence
  Description of Artificial Sequence: Synthetic oligonucleotide
  Target: LAMA2; (-) strand; PAM type: NRG; PAM sequence: AGG
gataccagtcatattggatc

SEQ ID NO: 56850 - DNA, 20 bp, Artificial Sequence
  Description of Artificial Sequence: Synthetic oligonucleotide
  Target: LAMA2; (-) strand; PAM type: NRG; PAM sequence: CAG
tgataccagtcatattggat

SEQ ID NO: 56851 - DNA, 20 bp, Artificial Sequence
  Description of Artificial Sequence: Synthetic oligonucleotide
  Target: LAMA2; (-) strand; PAM type: NRG; PAM sequence: TGG
ttctatgataccagtcatat

SEQ ID NO: 56852 - DNA, 20 bp, Artificial Sequence
  Description of Artificial Sequence: Synthetic oligonucleotide
  Target: LAMA2; (-) strand; PAM type: NRG; PAM sequence: CAG
cctcccctcttctatgatac

SEQ ID NO: 56853 - DNA, 20 bp, Artificial Sequence
  Description of Artificial Sequence: Synthetic oligonucleotide
  Target: LAMA2; (-) strand; PAM type: NRG; PAM sequence: CAG
tctctgcctccatctttaca

SEQ ID NO: 56854 - DNA, 20 bp, Artificial Sequence
  Description of Artificial Sequence: Synthetic oligonucleotide
  Target: LAMA2; (-) strand; PAM type: NRG; PAM sequence: TGG
ccttggcattgcttggcttg

SEQ ID NO: 56855 - DNA, 20 bp, Artificial Sequence
  Description of Artificial Sequence: Synthetic oligonucleotide
  Target: LAMA2; (-) strand; PAM type: NRG; PAM sequence: TGG
cttctttccttggcattgct

SEQ ID NO: 56856 - DNA, 20 bp, Artificial Sequence
  Description of Artificial Sequence: Synthetic oligonucleotide
  Target: LAMA2; (-) strand; PAM type: NRG; PAM sequence: TGG
aatgtccatgcttctttcct

SEQ ID NO: 56857 - DNA, 20 bp, Artificial Sequence
  Description of Artificial Sequence: Synthetic oligonucleotide
  Target: LAMA2; (-) strand; PAM type: NRG; PAM sequence: AAG
tggttccttctagacacagt

SEQ ID NO: 56858 - DNA, 20 bp, Artificial Sequence
  Description of Artificial Sequence: Synthetic oligonucleotide
  Target: LAMA2; (-) strand; PAM type: NRG; PAM sequence: CAG
tagttggttccttctagaca

SEQ ID NO: 56859 - DNA, 20 bp, Artificial Sequence
  Description of Artificial Sequence: Synthetic oligonucleotide
  Target: LAMA2; (-) strand; PAM type: NRG; PAM sequence: TAG
tcagcctagttggttccttc

SEQ ID NO: 56860 - DNA, 20 bp, Artificial Sequence
  Description of Artificial Sequence: Synthetic oligonucleotide
  Target: LAMA2; (-) strand; PAM type: NRG; PAM sequence: TGG
aaccaaaatgtcagcctagt

SEQ ID NO: 56861 - DNA, 20 bp, Artificial Sequence
  Description of Artificial Sequence: Synthetic oligonucleotide
  Target: LAMA2; (-) strand; PAM type: NRG; PAM sequence: TAG
ctgaaaccaaaatgtcagcc

SEQ ID NO: 56862 - DNA, 20 bp, Artificial Sequence
  Description of Artificial Sequence: Synthetic oligonucleotide
  Target: LAMA2; (-) strand; PAM type: NRG; PAM sequence: CAG
taactctgaaaccaaaatgt

SEQ ID NO: 56863 - DNA, 20 bp, Artificial Sequence
  Description of Artificial Sequence: Synthetic oligonucleotide
  Target: LAMA2; (-) strand; PAM type: NRG; PAM sequence: AGG
cattcatttcacagttcagg

SEQ ID NO: 56864 - DNA, 20 bp, Artificial Sequence
  Description of Artificial Sequence: Synthetic oligonucleotide
  Target: LAMA2; (-) strand; PAM type: NRG; PAM sequence: GAG
acattcatttcacagttcag

SEQ ID NO: 56865 - DNA, 20 bp, Artificial Sequence
  Description of Artificial Sequence: Synthetic oligonucleotide
  Target: LAMA2; (-) strand; PAM type: NRG; PAM sequence: AGG
agacattcatttcacagttc

SEQ ID NO: 56866 - DNA, 20 bp, Artificial Sequence
  Description of Artificial Sequence: Synthetic oligonucleotide
  Target: LAMA2; (-) strand; PAM type: NRG; PAM sequence: CAG
cagacattcatttcacagtt

SEQ ID NO: 56867 - DNA, 20 bp, Artificial Sequence
  Description of Artificial Sequence: Synthetic oligonucleotide
  Target: LAMA2; (-) strand; PAM type: NRG; PAM sequence: CAG
aaaaacagacattcatttca

SEQ ID NO: 56868 - DNA, 20 bp, Artificial Sequence
  Description of Artificial Sequence: Synthetic oligonucleotide
  Target: LAMA2; (-) strand; PAM type: NRG; PAM sequence: CAG
taataaaaaaaaaaaaaaaa

SEQ ID NO: 56869 - DNA, 20 bp, Artificial Sequence
  Description of Artificial Sequence: Synthetic oligonucleotide
  Target: LAMA2; (-) strand; PAM type: NRG; PAM sequence: AAG
cacatgtaccctaaaactta

SEQ ID NO: 56870 - DNA, 20 bp, Artificial Sequence
  Description of Artificial Sequence: Synthetic oligonucleotide
  Target: LAMA2; (-) strand; PAM type: NRG; PAM sequence: CGG
tgtatacatatgtaactaat

SEQ ID NO: 56871 - DNA, 20 bp, Artificial Sequence
  Description of Artificial Sequence: Synthetic oligonucleotide
  Target: LAMA2; (-) strand; PAM type: NRG; PAM sequence: AAG
agttagtgggtgcagcgcac

SEQ ID NO: 56872 - DNA, 20 bp, Artificial Sequence
  Description of Artificial Sequence: Synthetic oligonucleotide
  Target: LAMA2; (-) strand; PAM type: NRG; PAM sequence: CAG
agatgacgagttagtgggtg

SEQ ID NO: 56873 - DNA, 20 bp, Artificial Sequence
  Description of Artificial Sequence: Synthetic oligonucleotide
  Target: LAMA2; (-) strand; PAM type: NRG; PAM sequence: GGG
atgctagatgacgagttagt

SEQ ID NO: 56874 - DNA, 20 bp, Artificial Sequence
  Description of Artificial Sequence: Synthetic oligonucleotide
  Target: LAMA2; (-) strand; PAM type: NRG; PAM sequence: TGG
aatgctagatgacgagttag

SEQ ID NO: 56875 - DNA, 20 bp, Artificial Sequence
  Description of Artificial Sequence: Synthetic oligonucleotide
  Target: LAMA2; (-) strand; PAM type: NRG; PAM sequence: TAG
cctaatgctagatgacgagt

SEQ ID NO: 56876 - DNA, 20 bp, Artificial Sequence
  Description of Artificial Sequence: Synthetic oligonucleotide
  Target: LAMA2; (-) strand; PAM type: NRG; PAM sequence: GAG
tatacctaatgctagatgac

SEQ ID NO: 56877 - DNA, 20 bp, Artificial Sequence
  Description of Artificial Sequence: Synthetic oligonucleotide
  Target: LAMA2; (-) strand; PAM type: NRG; PAM sequence: TAG
ttgggagatatacctaatgc

SEQ ID NO: 56878 - DNA, 20 bp, Artificial Sequence
  Description of Artificial Sequence: Synthetic oligonucleotide
  Target: LAMA2; (-) strand; PAM type: NRG; PAM sequence: GAG
gggggaagggatagcattgg

SEQ ID NO: 56879 - DNA, 20 bp, Artificial Sequence
  Description of Artificial Sequence: Synthetic oligonucleotide
  Target: LAMA2; (-) strand; PAM type: NRG; PAM sequence: GGG
gagggggaagggatagcatt

SEQ ID NO: 56880 - DNA, 20 bp, Artificial Sequence
  Description of Artificial Sequence: Synthetic oligonucleotide
  Target: LAMA2; (-) strand; PAM type: NRG; PAM sequence: TGG
ggagggggaagggatagcat

SEQ ID NO: 56881 - DNA, 20 bp, Artificial Sequence
  Description of Artificial Sequence: Synthetic oligonucleotide
  Target: LAMA2; (-) strand; PAM type: NRG; PAM sequence: TAG
gtggggggagggggaaggga

SEQ ID NO: 56882 - DNA, 20 bp, Artificial Sequence
  Description of Artificial Sequence: Synthetic oligonucleotide
  Target: LAMA2; (-) strand; PAM type: NRG; PAM sequence: GGG
tggggtggggggagggggaa

SEQ ID NO: 56883 - DNA, 20 bp, Artificial Sequence
  Description of Artificial Sequence: Synthetic oligonucleotide
  Target: LAMA2; (-) strand; PAM type: NRG; PAM sequence: AGG
gtggggtggggggaggggga

SEQ ID NO: 56884 - DNA, 20 bp, Artificial Sequence
  Description of Artificial Sequence: Synthetic oligonucleotide
  Target: LAMA2; (-) strand; PAM type: NRG; PAM sequence: AAG
tgtggggtggggggaggggg

SEQ ID NO: 56885 - DNA, 20 bp, Artificial Sequence
  Description of Artificial Sequence: Synthetic oligonucleotide
  Target: LAMA2; (-) strand; PAM type: NRG; PAM sequence: GGG
tgttgtggggtggggggagg

SEQ ID NO: 56886 - DNA, 20 bp, Artificial Sequence
  Description of Artificial Sequence: Synthetic oligonucleotide
  Target: LAMA2; (-) strand; PAM type: NRG; PAM sequence: GGG
ctgttgtggggtggggggag

SEQ ID NO: 56887 - DNA, 20 bp, Artificial Sequence
  Description of Artificial Sequence: Synthetic oligonucleotide
  Target: LAMA2; (-) strand; PAM type: NRG; PAM sequence: GGG
actgttgtggggtgggggga

SEQ ID NO: 56888 - DNA, 20 bp, Artificial Sequence
  Description of Artificial Sequence: Synthetic oligonucleotide
  Target: LAMA2; (-) strand; PAM type: NRG; PAM sequence: AGG
gactgttgtggggtgggggg

SEQ ID NO: 56889 - DNA, 20 bp, Artificial Sequence
  Description of Artificial Sequence: Synthetic oligonucleotide
  Target: LAMA2; (-) strand; PAM type: NRG; PAM sequence: GAG
ggactgttgtggggtggggg

SEQ ID NO: 56890 - DNA, 20 bp, Artificial Sequence
  Description of Artificial Sequence: Synthetic oligonucleotide
  Target: LAMA2; (-) strand; PAM type: NRG; PAM sequence: GGG
ggggactgttgtggggtggg

SEQ ID NO: 56891 - DNA, 20 bp, Artificial Sequence
  Description of Artificial Sequence: Synthetic oligonucleotide
  Target: LAMA2; (-) strand; PAM type: NRG; PAM sequence: GGG
tggggactgttgtggggtgg

SEQ ID NO: 56892 - DNA, 20 bp, Artificial Sequence
  Description of Artificial Sequence: Synthetic oligonucleotide
  Target: LAMA2; (-) strand; PAM type: NRG; PAM sequence: GGG
ctggggactgttgtggggtg

SEQ ID NO: 56893 - DNA, 20 bp, Artificial Sequence
  Description of Artificial Sequence: Synthetic oligonucleotide
  Target: LAMA2; (-) strand; PAM type: NRG; PAM sequence: GGG
tctggggactgttgtggggt

SEQ ID NO: 56894 - DNA, 20 bp, Artificial Sequence
  Description of Artificial Sequence: Synthetic oligonucleotide
  Target: LAMA2; (-) strand; PAM type: NRG; PAM sequence: TGG
ctctggggactgttgtgggg

SEQ ID NO: 56895 - DNA, 20 bp, Artificial Sequence
  Description of Artificial Sequence: Synthetic oligonucleotide
  Target: LAMA2; (-) strand; PAM type: NRG; PAM sequence: GGG
acactctggggactgttgtg

SEQ ID NO: 56896 - DNA, 20 bp, Artificial Sequence
  Description of Artificial Sequence: Synthetic oligonucleotide
  Target: LAMA2; (-) strand; PAM type: NRG; PAM sequence: GGG
cacactctggggactgttgt

SEQ ID NO: 56897 - DNA, 20 bp, Artificial Sequence
  Description of Artificial Sequence: Synthetic oligonucleotide
  Target: LAMA2; (-) strand; PAM type: NRG; PAM sequence: TGG
tcacactctggggactgttg

SEQ ID NO: 56898 - DNA, 20 bp, Artificial Sequence
  Description of Artificial Sequence: Synthetic oligonucleotide
  Target: LAMA2; (-) strand; PAM type: NRG; PAM sequence: GGG
aaggggaacatcacactctg

SEQ ID NO: 56899 - DNA, 20 bp, Artificial Sequence
  Description of Artificial Sequence: Synthetic oligonucleotide
  Target: LAMA2; (-) strand; PAM type: NRG; PAM sequence: GGG
gaaggggaacatcacactct

SEQ ID NO: 56900 - DNA, 20 bp, Artificial Sequence
  Description of Artificial Sequence: Synthetic oligonucleotide
  Target: LAMA2; (-) strand; PAM type: NRG; PAM sequence: TGG
ggaaggggaacatcacactc

SEQ ID NO: 56901 - DNA, 20 bp, Artificial Sequence
  Description of Artificial Sequence: Synthetic oligonucleotide
  Target: LAMA2; (-) strand; PAM type: NRG; PAM sequence: GGG
gaacacatggacacaggaag

SEQ ID NO: 56902 - DNA, 20 bp, Artificial Sequence
  Description of Artificial Sequence: Synthetic oligonucleotide
  Target: LAMA2; (-) strand; PAM type: NRG; PAM sequence: GGG
agaacacatggacacaggaa

SEQ ID NO: 56903 - DNA, 20 bp, Artificial Sequence
  Description of Artificial Sequence: Synthetic oligonucleotide
  Target: LAMA2; (-) strand; PAM type: NRG; PAM sequence: AGG
gagaacacatggacacagga

SEQ ID NO: 56904 - DNA, 20 bp, Artificial Sequence
  Description of Artificial Sequence: Synthetic oligonucleotide
  Target: LAMA2; (-) strand; PAM type: NRG; PAM sequence: AAG
tgagaacacatggacacagg

SEQ ID NO: 56905 - DNA, 20 bp, Artificial Sequence
  Description of Artificial Sequence: Synthetic oligonucleotide
  Target: LAMA2; (-) strand; PAM type: NRG; PAM sequence: AGG
caatgagaacacatggacac

SEQ ID NO: 56906 - DNA, 20 bp, Artificial Sequence
  Description of Artificial Sequence: Synthetic oligonucleotide
  Target: LAMA2; (-) strand; PAM type: NRG; PAM sequence: CAG
acaatgagaacacatggaca

SEQ ID NO: 56907 - DNA, 20 bp, Artificial Sequence
  Description of Artificial Sequence: Synthetic oligonucleotide
  Target: LAMA2; (-) strand; PAM type: NRG; PAM sequence: TGG
aattgaacaatgagaacaca

SEQ ID NO: 56908 - DNA, 20 bp, Artificial Sequence
  Description of Artificial Sequence: Synthetic oligonucleotide
  Target: LAMA2; (-) strand; PAM type: NRG; PAM sequence: GAG
ataggtgggaattgaacaat

SEQ ID NO: 56909 - DNA, 20 bp, Artificial Sequence
  Description of Artificial Sequence: Synthetic oligonucleotide
  Target: LAMA2; (-) strand; PAM type: NRG; PAM sequence: GGG
gcatattctcactcataggt

SEQ ID NO: 56910 - DNA, 20 bp, Artificial Sequence
  Description of Artificial Sequence: Synthetic oligonucleotide
  Target: LAMA2; (-) strand; PAM type: NRG; PAM sequence: TGG
cgcatattctcactcatagg

SEQ ID NO: 56911 - DNA, 20 bp, Artificial Sequence
  Description of Artificial Sequence: Synthetic oligonucleotide
  Target: LAMA2; (-) strand; PAM type: NRG; PAM sequence: AGG
caccgcatattctcactcat

SEQ ID NO: 56912 - DNA, 20 bp, Artificial Sequence
  Description of Artificial Sequence: Synthetic oligonucleotide
  Target: LAMA2; (-) strand; PAM type: NRG; PAM sequence: TAG
acaccgcatattctcactca

SEQ ID NO: 56913 - DNA, 20 bp, Artificial Sequence
  Description of Artificial Sequence: Synthetic oligonucleotide
  Target: LAMA2; (-) strand; PAM type: NRG; PAM sequence: AGG
attctcagtaaactatcaca

SEQ ID NO: 56914 - DNA, 20 bp, Artificial Sequence
  Description of Artificial Sequence: Synthetic oligonucleotide
  Target: LAMA2; (-) strand; PAM type: NRG; PAM sequence: AAG
cattctcagtaaactatcac

SEQ ID NO: 56915 - DNA, 20 bp, Artificial Sequence
  Description of Artificial Sequence: Synthetic oligonucleotide
  Target: LAMA2; (-) strand; PAM type: NRG; PAM sequence: CAG
aaactggaaatcatcattct

SEQ ID NO: 56916 - DNA, 20 bp, Artificial Sequence
  Description of Artificial Sequence: Synthetic oligonucleotide
  Target: LAMA2; (-) strand; PAM type: NRG; PAM sequence: TGG
tgtagggccatggatgaaac

SEQ ID NO: 56917 - DNA, 20 bp, Artificial Sequence
  Description of Artificial Sequence: Synthetic oligonucleotide
  Target: LAMA2; (-) strand; PAM type: NRG; PAM sequence: TGG
tcatgtgctttgtagggcca

SEQ ID NO: 56918 - DNA, 20 bp, Artificial Sequence
  Description of Artificial Sequence: Synthetic oligonucleotide
  Target: LAMA2; (-) strand; PAM type: NRG; PAM sequence: GGG
atgagttcatgtgctttgta

SEQ ID NO: 56919 - DNA, 20 bp, Artificial Sequence
  Description of Artificial Sequence: Synthetic oligonucleotide
  Target: LAMA2; (-) strand; PAM type: NRG; PAM sequence: AGG
gatgagttcatgtgctttgt

SEQ ID NO: 56920 - DNA, 20 bp, Artificial Sequence
  Description of Artificial Sequence: Synthetic oligonucleotide
  Target: LAMA2; (-) strand; PAM type: NRG; PAM sequence: TAG
tgatgagttcatgtgctttg

SEQ ID NO: 56921 - DNA, 20 bp, Artificial Sequence
  Description of Artificial Sequence: Synthetic oligonucleotide
  Target: LAMA2; (-) strand; PAM type: NRG; PAM sequence: GAG
atgcagccataaaaaatgat

SEQ ID NO: 56922 - DNA, 20 bp, Artificial Sequence
  Description of Artificial Sequence: Synthetic oligonucleotide
  Target: LAMA2; (-) strand; PAM type: NRG; PAM sequence: CAG
atacaccatggaatactatg

SEQ ID NO: 56923 - DNA, 20 bp, Artificial Sequence
  Description of Artificial Sequence: Synthetic oligonucleotide
  Target: LAMA2; (-) strand; PAM type: NRG; PAM sequence: TGG
aatgtggcacatatacacca

SEQ ID NO: 56924 - DNA, 20 bp, Artificial Sequence
  Description of Artificial Sequence: Synthetic oligonucleotide
  Target: LAMA2; (-) strand; PAM type: NRG; PAM sequence: TGG
tagactagattaagaaaatg

SEQ ID NO: 56925 - DNA, 20 bp, Artificial Sequence
  Description of Artificial Sequence: Synthetic oligonucleotide
  Target: LAMA2; (-) strand; PAM type: NRG; PAM sequence: AAG
caacaaagatagactagatt

SEQ ID NO: 56926 - DNA, 20 bp, Artificial Sequence
  Description of Artificial Sequence: Synthetic oligonucleotide
  Target: LAMA2; (-) strand; PAM type: NRG; PAM sequence: TAG
aatgtccaacaaagatagac

SEQ ID NO: 56927 - DNA, 20 bp, Artificial Sequence
  Description of Artificial Sequence: Synthetic oligonucleotide
  Target: LAMA2; (-) strand; PAM type: NRG; PAM sequence: TAG
acccaaatgtccaacaaaga

SEQ ID NO: 56928 - DNA, 20 bp, Artificial Sequence
  Description of Artificial Sequence: Synthetic oligonucleotide
  Target: LAMA2; (-) strand; PAM type: NRG; PAM sequence: AAG
accaacccaaatgtccaaca

SEQ ID NO: 56929 - DNA, 20 bp, Artificial Sequence
  Description of Artificial Sequence: Synthetic oligonucleotide
  Target: LAMA2; (-) strand; PAM type: NRG; PAM sequence: TGG
ttttcacaatagcaaagact

SEQ ID NO: 56930 - DNA, 20 bp, Artificial Sequence
  Description of Artificial Sequence: Synthetic oligonucleotide
  Target: LAMA2; (-) strand; PAM type: NRG; PAM sequence: AAG
tggcatttttcacaatagca

SEQ ID NO: 56931 - DNA, 20 bp, Artificial Sequence
  Description of Artificial Sequence: Synthetic oligonucleotide
  Target: LAMA2; (-) strand; PAM type: NRG; PAM sequence: TAG
tattgtggcatttttcacaa

SEQ ID NO: 56932 - DNA, 20 bp, Artificial Sequence
  Description of Artificial Sequence: Synthetic oligonucleotide
  Target: LAMA2; (-) strand; PAM type: NRG; PAM sequence: TGG
atacacaggtatgtttattg

SEQ ID NO: 56933 - DNA, 20 bp, Artificial Sequence
  Description of Artificial Sequence: Synthetic oligonucleotide
  Target: LAMA2; (-) strand; PAM type: NRG; PAM sequence: AGG
tgctataaagacacatacac

SEQ ID NO: 56934 - DNA, 20 bp, Artificial Sequence
  Description of Artificial Sequence: Synthetic oligonucleotide
  Target: LAMA2; (-) strand; PAM type: NRG; PAM sequence: CAG
ctgctataaagacacataca

SEQ ID NO: 56935 - DNA, 20 bp, Artificial Sequence
  Description of Artificial Sequence: Synthetic oligonucleotide
  Target: LAMA2; (-) strand; PAM type: NRG; PAM sequence: AAG
ctataaatcatgctgctata

SEQ ID NO: 56936 - DNA, 20 bp, Artificial Sequence
  Description of Artificial Sequence: Synthetic oligonucleotide
  Target: LAMA2; (-) strand; PAM type: NRG; PAM sequence: AGG
attactgggtatatacccaa

SEQ ID NO: 56937 - DNA, 20 bp, Artificial Sequence
  Description of Artificial Sequence: Synthetic oligonucleotide
  Target: LAMA2; (-) strand; PAM type: NRG; PAM sequence: AAG
cattactgggtatataccca

SEQ ID NO: 56938 - DNA, 20 bp, Artificial Sequence
  Description of Artificial Sequence: Synthetic oligonucleotide
  Target: LAMA2; (-) strand; PAM type: NRG; PAM sequence: GGG
gacccagccatcccattact

SEQ ID NO: 56939 - DNA, 20 bp, Artificial Sequence
  Description of Artificial Sequence: Synthetic oligonucleotide
  Target: LAMA2; (-) strand; PAM type: NRG; PAM sequence: TGG
tgacccagccatcccattac

SEQ ID NO: 56940 - DNA, 20 bp, Artificial Sequence
  Description of Artificial Sequence: Synthetic oligonucleotide
  Target: LAMA2; (-) strand; PAM type: NRG; PAM sequence: CAG
actagaaataccatttgacc

SEQ ID NO: 56941 - DNA, 20 bp, Artificial Sequence
  Description of Artificial Sequence: Synthetic oligonucleotide
  Target: LAMA2; (-) strand; PAM type: NRG; PAM sequence: TAG
attcctcagggatctagaac

SEQ ID NO: 56942 - DNA, 20 bp, Artificial Sequence
  Description of Artificial Sequence: Synthetic oligonucleotide
  Target: LAMA2; (-) strand; PAM type: NRG; PAM sequence: TAG
gtggcgattcctcagggatc

SEQ ID NO: 56943 - DNA, 20 bp, Artificial Sequence
  Description of Artificial Sequence: Synthetic oligonucleotide
  Target: LAMA2; (-) strand; PAM type: NRG; PAM sequence: GGG
gtcagtgtggcgattcctca

SEQ ID NO: 56944 - DNA, 20 bp, Artificial Sequence
  Description of Artificial Sequence: Synthetic oligonucleotide
  Target: LAMA2; (-) strand; PAM type: NRG; PAM sequence: AGG
agtcagtgtggcgattcctc

SEQ ID NO: 56945 - DNA, 20 bp, Artificial Sequence
  Description of Artificial Sequence: Synthetic oligonucleotide
  Target: LAMA2; (-) strand; PAM type: NRG; PAM sequence: CAG
aagtcagtgtggcgattcct

SEQ ID NO: 56946 - DNA, 20 bp, Artificial Sequence
  Description of Artificial Sequence: Synthetic oligonucleotide
  Target: LAMA2; (-) strand; PAM type: NRG; PAM sequence: TGG
aaccattgtggaagtcagtg

SEQ ID NO: 56947 - DNA, 20 bp, Artificial Sequence
  Description of Artificial Sequence: Synthetic oligonucleotide
  Target: LAMA2; (-) strand; PAM type: NRG; PAM sequence: CAG
agttcaaccattgtggaagt

SEQ ID NO: 56948 - DNA, 20 bp, Artificial Sequence
  Description of Artificial Sequence: Synthetic oligonucleotide
  Target: LAMA2; (-) strand; PAM type: NRG; PAM sequence: AAG
aactagttcaaccattgtgg

SEQ ID NO: 56949 - DNA, 20 bp, Artificial Sequence
  Description of Artificial Sequence: Synthetic oligonucleotide
  Target: LAMA2; (-) strand; PAM type: NRG; PAM sequence: TGG
gtaaactagttcaaccattg

SEQ ID NO: 56950 - DNA, 20 bp, Artificial Sequence
  Description of Artificial Sequence: Synthetic oligonucleotide
  Target: LAMA2; (-) strand; PAM type: NRG; PAM sequence: TAG
ctgttggtgggactgtaaac

SEQ ID NO: 56951 - DNA, 20 bp, Artificial Sequence
  Description of Artificial Sequence: Synthetic oligonucleotide
  Target: LAMA2; (-) strand; PAM type: NRG; PAM sequence: GGG
aacacttttacactgttggt

SEQ ID NO: 56952 - DNA, 20 bp, Artificial Sequence
  Description of Artificial Sequence: Synthetic oligonucleotide
  Target: LAMA2; (-) strand; PAM type: NRG; PAM sequence: TGG
gaacacttttacactgttgg

SEQ ID NO: 56953 - DNA, 20 bp, Artificial Sequence
  Description of Artificial Sequence: Synthetic oligonucleotide
  Target: LAMA2; (-) strand; PAM type: NRG; PAM sequence: TGG
taggaacacttttacactgt

SEQ ID NO: 56954 - DNA, 20 bp, Artificial Sequence
  Description of Artificial Sequence: Synthetic oligonucleotide
  Target: LAMA2; (-) strand; PAM type: NRG; PAM sequence: AGG
tggagaggatgtggagaaat

SEQ ID NO: 56955 - DNA, 20 bp, Artificial Sequence
  Description of Artificial Sequence: Synthetic oligonucleotide
  Target: LAMA2; (-) strand; PAM type: NRG; PAM sequence: TAG
ctggagaggatgtggagaaa

SEQ ID NO: 56956 - DNA, 20 bp, Artificial Sequence
  Description of Artificial Sequence: Synthetic oligonucleotide
  Target: LAMA2; (-) strand; PAM type: NRG; PAM sequence: GAG
caggggctggagaggatgtg

SEQ ID NO: 56957 - DNA, 20 bp, Artificial Sequence
  Description of Artificial Sequence: Synthetic oligonucleotide
  Target: LAMA2; (-) strand; PAM type: NRG; PAM sequence: TGG
aacaggggctggagaggatg

SEQ ID NO: 56958 - DNA, 20 bp, Artificial Sequence
  Description of Artificial Sequence: Synthetic oligonucleotide
  Target: LAMA2; (-) strand; PAM type: NRG; PAM sequence: AGG
ggaaacaacaggggctggag

SEQ ID NO: 56959 - DNA, 20 bp, Artificial Sequence
  Description of Artificial Sequence: Synthetic oligonucleotide
  Target: LAMA2; (-) strand; PAM type: NRG; PAM sequence: GAG
aggaaacaacaggggctgga

SEQ ID NO: 56960 - DNA, 20 bp, Artificial Sequence
  Description of Artificial Sequence: Synthetic oligonucleotide
  Target: LAMA2; (-) strand; PAM type: NRG; PAM sequence: GAG
tcaggaaacaacaggggctg

SEQ ID NO: 56961 - DNA, 20 bp, Artificial Sequence
  Description of Artificial Sequence: Synthetic oligonucleotide
  Target: LAMA2; (-) strand; PAM type: NRG; PAM sequence: TGG
agtcaggaaacaacaggggc

SEQ ID NO: 56962 - DNA, 20 bp, Artificial Sequence
  Description of Artificial Sequence: Synthetic oligonucleotide
  Target: LAMA2; (-) strand; PAM type: NRG; PAM sequence: GGG
aaaaagtcaggaaacaacag

SEQ ID NO: 56963 - DNA, 20 bp, Artificial Sequence
  Description of Artificial Sequence: Synthetic oligonucleotide
  Target: LAMA2; (-) strand; PAM type: NRG; PAM sequence: GGG
taaaaagtcaggaaacaaca

SEQ ID NO: 56964 - DNA, 20 bp, Artificial Sequence
  Description of Artificial Sequence: Synthetic oligonucleotide
  Target: LAMA2; (-) strand; PAM type: NRG; PAM sequence: AGG
ttaaaaagtcaggaaacaac

SEQ ID NO: 56965 - DNA, 20 bp, Artificial Sequence
  Description of Artificial Sequence: Synthetic oligonucleotide
  Target: LAMA2; (-) strand; PAM type: NRG; PAM sequence: CAG
attaaaaagtcaggaaacaa

SEQ ID NO: 56966 - DNA, 20 bp, Artificial Sequence
  Description of Artificial Sequence: Synthetic oligonucleotide
  Target: LAMA2; (-) strand; PAM type: NRG; PAM sequence: AGG
atggcaatcattaaaaagtc

SEQ ID NO: 56967 - DNA, 20 bp, Artificial Sequence
  Description of Artificial Sequence: Synthetic oligonucleotide
  Target: LAMA2; (-) strand; PAM type: NRG; PAM sequence: CAG
aatggcaatcattaaaaagt

SEQ ID NO: 56968 - DNA, 20 bp, Artificial Sequence
  Description of Artificial Sequence: Synthetic oligonucleotide
  Target: LAMA2; (-) strand; PAM type: NRG; PAM sequence: AAG
ttagaatggcaatcattaaa

SEQ ID NO: 56969 - DNA, 20 bp, Artificial Sequence
  Description of Artificial Sequence: Synthetic oligonucleotide
  Target: LAMA2; (-) strand; PAM type: NRG; PAM sequence: TGG
ccatctcacaccagttagaa

SEQ ID NO: 56970 - DNA, 20 bp, Artificial Sequence
  Description of Artificial Sequence: Synthetic oligonucleotide
  Target: LAMA2; (-) strand; PAM type: NRG; PAM sequence: TAG
agataccatctcacaccagt

SEQ ID NO: 56971 - DNA, 20 bp, Artificial Sequence
  Description of Artificial Sequence: Synthetic oligonucleotide
  Target: LAMA2; (-) strand; PAM type: NRG; PAM sequence: CAG
aatgagataccatctcacac

SEQ ID NO: 56972 - DNA, 20 bp, Artificial Sequence
  Description of Artificial Sequence: Synthetic oligonucleotide
  Target: LAMA2; (-) strand; PAM type: NRG; PAM sequence: GAG
atgcaaatcaaaaccacaat

SEQ ID NO: 56973 - DNA, 20 bp, Artificial Sequence
  Description of Artificial Sequence: Synthetic oligonucleotide
  Target: LAMA2; (-) strand; PAM type: NRG; PAM sequence: GAG
ctcaccatcactggccatca

SEQ ID NO: 56974 - DNA, 20 bp, Artificial Sequence
  Description of Artificial Sequence: Synthetic oligonucleotide
  Target: LAMA2; (-) strand; PAM type: NRG; PAM sequence: CAG
tgctcaccatcactggccat

SEQ ID NO: 56975 - DNA, 20 bp, Artificial Sequence
  Description of Artificial Sequence: Synthetic oligonucleotide
  Target: LAMA2; (-) strand; PAM type: NRG; PAM sequence: TGG
gaaaaaatgctcaccatcac

SEQ ID NO: 56976 - DNA, 20 bp, Artificial Sequence
  Description of Artificial Sequence: Synthetic oligonucleotide
  Target: LAMA2; (-) strand; PAM type: NRG; PAM sequence: AAG
gaagacatttatgcagccaa

SEQ ID NO: 56977 - DNA, 20 bp, Artificial Sequence
  Description of Artificial Sequence: Synthetic oligonucleotide
  Target: LAMA2; (-) strand; PAM type: NRG; PAM sequence: CAG
ctcaaaagaagacatttatg

SEQ ID NO: 56978 - DNA, 20 bp, Artificial Sequence
  Description of Artificial Sequence: Synthetic oligonucleotide
  Target: LAMA2; (-) strand; PAM type: NRG; PAM sequence: AAG
gaacagacacttctcaaaag

SEQ ID NO: 56979 - DNA, 20 bp, Artificial Sequence
  Description of Artificial Sequence: Synthetic oligonucleotide
  Target: LAMA2; (-) strand; PAM type: NRG; PAM sequence: AAG
catgaacagacacttctcaa

SEQ ID NO: 56980 - DNA, 20 bp, Artificial Sequence
  Description of Artificial Sequence: Synthetic oligonucleotide
  Target: LAMA2; (-) strand; PAM type: NRG; PAM sequence: CAG
aagtgggcgaaggacatgaa

SEQ ID NO: 56981 - DNA, 20 bp, Artificial Sequence
  Description of Artificial Sequence: Synthetic oligonucleotide
  Target: LAMA2; (-) strand; PAM type: NRG; PAM sequence: AGG
ccccatcaacaagtgggcga

SEQ ID NO: 56982 - DNA, 20 bp, Artificial Sequence
  Description of Artificial Sequence: Synthetic oligonucleotide
  Target: LAMA2; (-) strand; PAM type: NRG; PAM sequence: AAG
accccatcaacaagtgggcg

SEQ ID NO: 56983 - DNA, 20 bp, Artificial Sequence
  Description of Artificial Sequence: Synthetic oligonucleotide
  Target: LAMA2; (-) strand; PAM type: NRG; PAM sequence: GGG
aaacaaccccatcaacaagt

SEQ ID NO: 56984 - DNA, 20 bp, Artificial Sequence
  Description of Artificial Sequence: Synthetic oligonucleotide
  Target: LAMA2; (-) strand; PAM type: NRG; PAM sequence: TGG
caaacaaccccatcaacaag

SEQ ID NO: 56985 - DNA, 20 bp, Artificial Sequence
  Description of Artificial Sequence: Synthetic oligonucleotide
  Target: LAMA2; (-) strand; PAM type: NRG; PAM sequence: AAG
aaacaaacaaccccatcaac

SEQ ID NO: 56986 - DNA, 20 bp, Artificial Sequence
  Description of Artificial Sequence: Synthetic oligonucleotide
  Target: LAMA2; (-) strand; PAM type: NRG; PAM sequence: AAG
atgaactcaaacaaatttac

SEQ ID NO: 56987 - DNA, 20 bp, Artificial Sequence
  Description of Artificial Sequence: Synthetic oligonucleotide
  Target: LAMA2; (-) strand; PAM type: NRG; PAM sequence: CAG
tctgacaaagggctaatatc

SEQ ID NO: 56988 - DNA, 20 bp, Artificial Sequence
  Description of Artificial Sequence: Synthetic oligonucleotide
  Target: LAMA2; (-) strand; PAM type: NRG; PAM sequence: GGG
caacctgctcatctgacaaa

SEQ ID NO: 56989 - DNA, 20 bp, Artificial Sequence
  Description of Artificial Sequence: Synthetic oligonucleotide
  Target: LAMA2; (-) strand; PAM type: NRG; PAM sequence: AGG
gcaacctgctcatctgacaa

SEQ ID NO: 56990 - DNA, 20 bp, Artificial Sequence
  Description of Artificial Sequence: Synthetic oligonucleotide
  Target: LAMA2; (-) strand; PAM type: NRG; PAM sequence: AAG
cgcaacctgctcatctgaca

SEQ ID NO: 56991 - DNA, 20 bp, Artificial Sequence
  Description of Artificial Sequence: Synthetic oligonucleotide
  Target: LAMA2; (-) strand; PAM type: NRG; PAM sequence: GAG
acaggcaaccgacaaaatgg

SEQ ID NO: 56992 - DNA, 20 bp, Artificial Sequence
  Description of Artificial Sequence: Synthetic oligonucleotide
  Target: LAMA2; (-) strand; PAM type: NRG; PAM sequence: GGG
gaacaggcaaccgacaaaat

SEQ ID NO: 56993 - DNA, 20 bp, Artificial Sequence
  Description of Artificial Sequence: Synthetic oligonucleotide
  Target: LAMA2; (-) strand; PAM type: NRG; PAM sequence: TGG
tgaacaggcaaccgacaaaa

SEQ ID NO: 56994 - DNA, 20 bp, Artificial Sequence
  Description of Artificial Sequence: Synthetic oligonucleotide
  Target: LAMA2; (-) strand; PAM type: NRG; PAM sequence: AGG
aaactaccagcagagtgaac

SEQ ID NO: 56995 - DNA, 20 bp, Artificial Sequence
  Description of Artificial Sequence: Synthetic oligonucleotide
  Target: LAMA2; (-) strand; PAM type: NRG; PAM sequence: CAG
gaaactaccagcagagtgaa

SEQ ID NO: 56996 - DNA, 20 bp, Artificial Sequence
  Description of Artificial Sequence: Synthetic oligonucleotide
  Target: LAMA2; (-) strand; PAM type: NRG; PAM sequence: GAG
agcaaaagaaactaccagca

SEQ ID NO: 56997 - DNA, 20 bp, Artificial Sequence
  Description of Artificial Sequence: Synthetic oligonucleotide
  Target: LAMA2; (-) strand; PAM type: NRG; PAM sequence: CAG
acagcaaaagaaactaccag

SEQ ID NO: 56998 - DNA, 20 bp, Artificial Sequence
  Description of Artificial Sequence: Synthetic oligonucleotide
  Target: LAMA2; (-) strand; PAM type: NRG; PAM sequence: CAG
tgcacagcaaaagaaactac

SEQ ID NO: 56999 - DNA, 20 bp, Artificial Sequence
  Description of Artificial Sequence: Synthetic oligonucleotide
  Target: LAMA2; (-) strand; PAM type: NRG; PAM sequence: AAG
aaagagcttctgcacagcaa

SEQ ID NO: 57000 - DNA, 20 bp, Artificial Sequence
  Description of Artificial Sequence: Synthetic oligonucleotide
  Target: LAMA2; (-) strand; PAM type: NRG; PAM sequence: CAG
taaactaaagagcttctgca

SEQ ID NO: 57001 - DNA, 20 bp, Artificial Sequence
  Description of Artificial Sequence: Synthetic oligonucleotide
  Target: LAMA2; (-) strand; PAM type: NRG; PAM sequence: GAG
tgggatctaattaaactaaa

SEQ ID NO: 57002 - DNA, 20 bp, Artificial Sequence
  Description of Artificial Sequence: Synthetic oligonucleotide
  Target: LAMA2; (-) strand; PAM type: NRG; PAM sequence: AAG
aatgggatctaattaaacta

SEQ ID NO: 57003 - DNA, 20 bp, Artificial Sequence
  Description of Artificial Sequence: Synthetic oligonucleotide
  Target: LAMA2; (-) strand; PAM type: NRG; PAM sequence: GGG
aaaagccaaaatggacaaat

SEQ ID NO: 57004 - DNA, 20 bp, Artificial Sequence
  Description of Artificial Sequence: Synthetic oligonucleotide
  Target: LAMA2; (-) strand; PAM type: NRG; PAM sequence: TGG
caaaagccaaaatggacaaa

SEQ ID NO: 57005 - DNA, 20 bp, Artificial Sequence
  Description of Artificial Sequence: Synthetic oligonucleotide
  Target: LAMA2; (-) strand; PAM type: NRG; PAM sequence: TGG
aatggcaacaaaagccaaaa

SEQ ID NO: 57006 - DNA, 20 bp, Artificial Sequence
  Description of Artificial Sequence: Synthetic oligonucleotide
  Target: LAMA2; (-) strand; PAM type: NRG; PAM sequence: AAG
accaaaagcaatggcaacaa

SEQ ID NO: 57007 - DNA, 20 bp, Artificial Sequence
  Description of Artificial Sequence: Synthetic oligonucleotide
  Target: LAMA2; (-) strand; PAM type: NRG; PAM sequence: TGG
gtctaaaacaccaaaagcaa

SEQ ID NO: 57008 - DNA, 20 bp, Artificial Sequence
  Description of Artificial Sequence: Synthetic oligonucleotide
  Target: LAMA2; (-) strand; PAM type: NRG; PAM sequence: AAG
cttcatgtctaaaacaccaa

SEQ ID NO: 57009 - DNA, 20 bp, Artificial Sequence
  Description of Artificial Sequence: Synthetic oligonucleotide
  Target: LAMA2; (-) strand; PAM type: NRG; PAM sequence: AAG
tcaggacataggcatgggca

SEQ ID NO: 57010 - DNA, 20 bp, Artificial Sequence
  Description of Artificial Sequence: Synthetic oligonucleotide
  Target: LAMA2; (-) strand; PAM type: NRG; PAM sequence: GGG
accattcaggacataggcat

SEQ ID NO: 57011 - DNA, 20 bp, Artificial Sequence
  Description of Artificial Sequence: Synthetic oligonucleotide
  Target: LAMA2; (-) strand; PAM type: NRG; PAM sequence: TGG
taccattcaggacataggca

SEQ ID NO: 57012 - DNA, 20 bp, Artificial Sequence
  Description of Artificial Sequence: Synthetic oligonucleotide
  Target: LAMA2; (-) strand; PAM type: NRG; PAM sequence: AGG
ggcattaccattcaggacat

SEQ ID NO: 57013 - DNA, 20 bp, Artificial Sequence
  Description of Artificial Sequence: Synthetic oligonucleotide
  Target: LAMA2; (-) strand; PAM type: NRG; PAM sequence: TAG
aggcattaccattcaggaca

SEQ ID NO: 57014 - DNA, 20 bp, Artificial Sequence
  Description of Artificial Sequence: Synthetic oligonucleotide
  Target: LAMA2; (-) strand; PAM type: NRG; PAM sequence: AGG
aaacctaggcattaccattc

SEQ ID NO: 57015 - DNA, 20 bp, Artificial Sequence
  Description of Artificial Sequence: Synthetic oligonucleotide
  Target: LAMA2; (-) strand; PAM type: NRG; PAM sequence: CAG
aaaacctaggcattaccatt

SEQ ID NO: 57016 - DNA, 20 bp, Artificial Sequence
  Description of Artificial Sequence: Synthetic oligonucleotide
  Target: LAMA2; (-) strand; PAM type: NRG; PAM sequence: AGG
aaaacactagaagaaaacct

SEQ ID NO: 57017 - DNA, 20 bp, Artificial Sequence
  Description of Artificial Sequence: Synthetic oligonucleotide
  Target: LAMA2; (-) strand; PAM type: NRG; PAM sequence: TAG
aaaaacactagaagaaaacc

SEQ ID NO: 57018 - DNA, 20 bp, Artificial Sequence
  Description of Artificial Sequence: Synthetic oligonucleotide
  Target: LAMA2; (-) strand; PAM type: NRG; PAM sequence: AAG
taaaaccataaaaacactag

SEQ ID NO: 57019 - DNA, 20 bp, Artificial Sequence
  Description of Artificial Sequence: Synthetic oligonucleotide
  Target: LAMA2; (-) strand; PAM type: NRG; PAM sequence: TAG
acctaaaaccataaaaacac

SEQ ID NO: 57020 - DNA, 20 bp, Artificial Sequence
  Description of Artificial Sequence: Synthetic oligonucleotide
  Target: LAMA2; (-) strand; PAM type: NRG; PAM sequence: TAG
tggattaaagaattaaacgt

SEQ ID NO: 57021 - DNA, 20 bp, Artificial Sequence
  Description of Artificial Sequence: Synthetic oligonucleotide
  Target: LAMA2; (-) strand; PAM type: NRG; PAM sequence: AAG
aatcaattcaagatggatta

SEQ ID NO: 57022 - DNA, 20 bp, Artificial Sequence
  Description of Artificial Sequence: Synthetic oligonucleotide
  Target: LAMA2; (-) strand; PAM type: NRG; PAM sequence: TGG
atacaaaaatcaattcaaga

SEQ ID NO: 57023 - DNA, 20 bp, Artificial Sequence
  Description of Artificial Sequence: Synthetic oligonucleotide
  Target: LAMA2; (-) strand; PAM type: NRG; PAM sequence: AAG
ccttatacaaaaatcaattc

SEQ ID NO: 57024 - DNA, 20 bp, Artificial Sequence
  Description of Artificial Sequence: Synthetic oligonucleotide
  Target: LAMA2; (-) strand; PAM type: NRG; PAM sequence: TGG
catatgtagaaagctgaaac

SEQ ID NO: 57025 - DNA, 20 bp, Artificial Sequence
  Description of Artificial Sequence: Synthetic oligonucleotide
  Target: LAMA2; (-) strand; PAM type: NRG; PAM sequence: AAG
actggctagccatatgtaga

SEQ ID NO: 57026 - DNA, 20 bp, Artificial Sequence
  Description of Artificial Sequence: Synthetic oligonucleotide
  Target: LAMA2; (-) strand; PAM type: NRG; PAM sequence: TAG
gaaaactggctagccatatg

SEQ ID NO: 57027 - DNA, 20 bp, Artificial Sequence
  Description of Artificial Sequence: Synthetic oligonucleotide
  Target: LAMA2; (-) strand; PAM type: NRG; PAM sequence: TAG
atggtgctgggaaaactggc

SEQ ID NO: 57028 - DNA, 20 bp, Artificial Sequence
  Description of Artificial Sequence: Synthetic oligonucleotide
  Target: LAMA2; (-) strand; PAM type: NRG; PAM sequence: TGG
ataaatggtgctgggaaaac

SEQ ID NO: 57029 - DNA, 20 bp, Artificial Sequence
  Description of Artificial Sequence: Synthetic oligonucleotide
  Target: LAMA2; (-) strand; PAM type: NRG; PAM sequence: GGG
cctatttaataaatggtgct

SEQ ID NO: 57030 - DNA, 20 bp, Artificial Sequence
  Description of Artificial Sequence: Synthetic oligonucleotide
  Target: LAMA2; (-) strand; PAM type: NRG; PAM sequence: TGG
ccctatttaataaatggtgc

SEQ ID NO: 57031 - DNA, 20 bp, Artificial Sequence
  Description of Artificial Sequence: Synthetic oligonucleotide
  Target: LAMA2; (-) strand; PAM type: NRG; PAM sequence: TGG
aggattccctatttaataaa

SEQ ID NO: 57032 - DNA, 20 bp, Artificial Sequence
  Description of Artificial Sequence: Synthetic oligonucleotide
  Target: LAMA2; (-) strand; PAM type: NRG; PAM sequence: AGG
gaaaaacaagcaatgcggaa

SEQ ID NO: 57033 - DNA, 20 bp, Artificial Sequence
  Description of Artificial Sequence: Synthetic oligonucleotide
  Target: LAMA2; (-) strand; PAM type: NRG; PAM sequence: AAG
agaaaaacaagcaatgcgga

SEQ ID NO: 57034 - DNA, 20 bp, Artificial Sequence
  Description of Artificial Sequence: Synthetic oligonucleotide
  Target: LAMA2; (-) strand; PAM type: NRG; PAM sequence: CGG
cctgagaaaaacaagcaatg

SEQ ID NO: 57035 - DNA, 20 bp, Artificial Sequence
  Description of Artificial Sequence: Synthetic oligonucleotide
  Target: LAMA2; (-) strand; PAM type: NRG; PAM sequence: AAG
ttgacaaacctgagaaaaac

SEQ ID NO: 57036 - DNA, 20 bp, Artificial Sequence
  Description of Artificial Sequence: Synthetic oligonucleotide
  Target: LAMA2; (-) strand; PAM type: NRG; PAM sequence: GAG
atctgatctttgacaaacct

SEQ ID NO: 57037 - DNA, 20 bp, Artificial Sequence
  Description of Artificial Sequence: Synthetic oligonucleotide
  Target: LAMA2; (-) strand; PAM type: NRG; PAM sequence: CAG
atggaacagaacagagccct

SEQ ID NO: 57038 - DNA, 20 bp, Artificial Sequence
  Description of Artificial Sequence: Synthetic oligonucleotide
  Target: LAMA2; (-) strand; PAM type: NRG; PAM sequence: GAG
tagatcaatggaacagaaca

SEQ ID NO: 57039 - DNA, 20 bp, Artificial Sequence
  Description of Artificial Sequence: Synthetic oligonucleotide
  Target: LAMA2; (-) strand; PAM type: NRG; PAM sequence: CAG
tatagatcaatggaacagaa

SEQ ID NO: 57040 - DNA, 20 bp, Artificial Sequence
  Description of Artificial Sequence: Synthetic oligonucleotide
  Target: LAMA2; (-) strand; PAM type: NRG; PAM sequence: CAG
agagatatagatcaatggaa

SEQ ID NO: 57041 - DNA, 20 bp, Artificial Sequence
  Description of Artificial Sequence: Synthetic oligonucleotide
  Target: LAMA2; (-) strand; PAM type: NRG; PAM sequence: TGG
aaaacagagatatagatcaa

SEQ ID NO: 57042 - DNA, 20 bp, Artificial Sequence
  Description of Artificial Sequence: Synthetic oligonucleotide
  Target: LAMA2; (-) strand; PAM type: NRG; PAM sequence: TAG
ctggtaccaaaacagagata

SEQ ID NO: 57043 - DNA, 20 bp, Artificial Sequence
  Description of Artificial Sequence: Synthetic oligonucleotide
  Target: LAMA2; (-) strand; PAM type: NRG; PAM sequence: GAG
atggtactggtaccaaaaca

SEQ ID NO: 57044 - DNA, 20 bp, Artificial Sequence
  Description of Artificial Sequence: Synthetic oligonucleotide
  Target: LAMA2; (-) strand; PAM type: NRG; PAM sequence: CAG
gcatggtactggtaccaaaa

SEQ ID NO: 57045 - DNA, 20 bp, Artificial Sequence
  Description of Artificial Sequence: Synthetic oligonucleotide
  Target: LAMA2; (-) strand; PAM type: NRG; PAM sequence: TGG
taaccaaaacagcatggtac

SEQ ID NO: 57046 - DNA, 20 bp, Artificial Sequence
  Description of Artificial Sequence: Synthetic oligonucleotide
  Target: LAMA2; (-) strand; PAM type: NRG; PAM sequence: TGG
ctacagtaaccaaaacagca

SEQ ID NO: 57047 - DNA, 20 bp, Artificial Sequence
  Description of Artificial Sequence: Synthetic oligonucleotide
  Target: LAMA2; (-) strand; PAM type: NRG; PAM sequence: CAG
caaggctacagtaaccaaaa

SEQ ID NO: 57048 - DNA, 20 bp, Artificial Sequence
  Description of Artificial Sequence: Synthetic oligonucleotide
  Target: LAMA2; (-) strand; PAM type: NRG; PAM sequence: CAG
caaactatactacaaggcta

SEQ ID NO: 57049 - DNA, 20 bp, Artificial Sequence
  Description of Artificial Sequence: Synthetic oligonucleotide
  Target: LAMA2; (-) strand; PAM type: NRG; PAM sequence: AGG
tgacttcaaactatactaca

SEQ ID NO: 57050 - DNA, 20 bp, Artificial Sequence
  Description of Artificial Sequence: Synthetic oligonucleotide
  Target: LAMA2; (-) strand; PAM type: NRG; PAM sequence: AAG
ctgacttcaaactatactac

SEQ ID NO: 57051 - DNA, 20 bp, Artificial Sequence
  Description of Artificial Sequence: Synthetic oligonucleotide
  Target: LAMA2; (-) strand; PAM type: NRG; PAM sequence: AGG
agccaaaagaacaaagctgg

SEQ ID NO: 57052 - DNA, 20 bp, Artificial Sequence
  Description of Artificial Sequence: Synthetic oligonucleotide
  Target: LAMA2; (-) strand; PAM type: NRG; PAM sequence: GAG
aagccaaaagaacaaagctg

SEQ ID NO: 57053 - DNA, 20 bp, Artificial Sequence
  Description of Artificial Sequence: Synthetic oligonucleotide
  Target: LAMA2; (-) strand; PAM type: NRG; PAM sequence: TGG
ctaagccaaaagaacaaagc

SEQ ID NO: 57054 - DNA, 20 bp, Artificial Sequence
  Description of Artificial Sequence: Synthetic oligonucleotide
  Target: LAMA2; (-) strand; PAM type: NRG; PAM sequence: AAG
aatcctaagccaaaagaaca

SEQ ID NO: 57055 - DNA, 20 bp, Artificial Sequence
  Description of Artificial Sequence: Synthetic oligonucleotide
  Target: LAMA2; (-) strand; PAM type: NRG; PAM sequence: AAG
ccaagtcaatcctaagccaa

SEQ ID NO: 57056 - DNA, 20 bp, Artificial Sequence
  Description of Artificial Sequence: Synthetic oligonucleotide
  Target: LAMA2; (-) strand; PAM type: NRG; PAM sequence: AAG
cgcatcgccaagtcaatcct

SEQ ID NO: 57057 - DNA, 20 bp, Artificial Sequence
  Description of Artificial Sequence: Synthetic oligonucleotide
  Target: LAMA2; (-) strand; PAM type: NRG; PAM sequence: AAG
aaaaaagagcccgcatcgcc

SEQ ID NO: 57058 - DNA, 20 bp, Artificial Sequence
  Description of Artificial Sequence: Synthetic oligonucleotide
  Target: LAMA2; (-) strand; PAM type: NRG; PAM sequence: GAG
gttcatatggaaccaaaaaa

SEQ ID NO: 57059 - DNA, 20 bp, Artificial Sequence
  Description of Artificial Sequence: Synthetic oligonucleotide
  Target: LAMA2; (-) strand; PAM type: NRG; PAM sequence: AAG
aagttcatatggaaccaaaa

SEQ ID NO: 57060 - DNA, 20 bp, Artificial Sequence
  Description of Artificial Sequence: Synthetic oligonucleotide
  Target: LAMA2; (-) strand; PAM type: NRG; PAM sequence: TGG
aaactactttaaagttcata

SEQ ID NO: 57061 - DNA, 20 bp, Artificial Sequence
  Description of Artificial Sequence: Synthetic oligonucleotide
  Target: LAMA2; (-) strand; PAM type: NRG; PAM sequence: AAG
agttggaaaaaactacttta

SEQ ID NO: 57062 - DNA, 20 bp, Artificial Sequence
  Description of Artificial Sequence: Synthetic oligonucleotide
  Target: LAMA2; (-) strand; PAM type: NRG; PAM sequence: TGG
aatgactttcttcacagagt

SEQ ID NO: 57063 - DNA, 20 bp, Artificial Sequence
  Description of Artificial Sequence: Synthetic oligonucleotide
  Target: LAMA2; (-) strand; PAM type: NRG; PAM sequence: GAG
taccaatgactttcttcaca

SEQ ID NO: 57064 - DNA, 20 bp, Artificial Sequence
  Description of Artificial Sequence: Synthetic oligonucleotide
  Target: LAMA2; (-) strand; PAM type: NRG; PAM sequence: CAG
gctaccaatgactttcttca

SEQ ID NO: 57065 - DNA, 20 bp, Artificial Sequence
  Description of Artificial Sequence: Synthetic oligonucleotide
  Target: LAMA2; (-) strand; PAM type: NRG; PAM sequence: AAG
gattcaatgccattcccatc

SEQ ID NO: 57066 - DNA, 20 bp, Artificial Sequence
  Description of Artificial Sequence: Synthetic oligonucleotide
  Target: LAMA2; (-) strand; PAM type: NRG; PAM sequence: CAG
atactgcccaaggtaattta

SEQ ID NO: 57067 - DNA, 20 bp, Artificial Sequence
  Description of Artificial Sequence: Synthetic oligonucleotide
  Target: LAMA2; (-) strand; PAM type: NRG; PAM sequence: AGG
gaaaatggccatactgccca

SEQ ID NO: 57068 - DNA, 20 bp, Artificial Sequence
  Description of Artificial Sequence: Synthetic oligonucleotide
  Target: LAMA2; (-) strand; PAM type: NRG; PAM sequence: AAG
tgaaaatggccatactgccc

SEQ ID NO: 57069 - DNA, 20 bp, Artificial Sequence
  Description of Artificial Sequence: Synthetic oligonucleotide
  Target: LAMA2; (-) strand; PAM type: NRG; PAM sequence: TGG
aagaatcaatatcgtgaaaa

SEQ ID NO: 57070 - DNA, 20 bp, Artificial Sequence
  Description of Artificial Sequence: Synthetic oligonucleotide
  Target: LAMA2; (-) strand; PAM type: NRG; PAM sequence: AAG
attccatgctcatgggtagg

SEQ ID NO: 57071 - DNA, 20 bp, Artificial Sequence
  Description of Artificial Sequence: Synthetic oligonucleotide
  Target: LAMA2; (-) strand; PAM type: NRG; PAM sequence: AGG
aacattccatgctcatgggt

SEQ ID NO: 57072 - DNA, 20 bp, Artificial Sequence
  Description of Artificial Sequence: Synthetic oligonucleotide
  Target: LAMA2; (-) strand; PAM type: NRG; PAM sequence: TAG
gaacattccatgctcatggg

SEQ ID NO: 57073 - DNA, 20 bp, Artificial Sequence
  Description of Artificial Sequence: Synthetic oligonucleotide
  Target: LAMA2; (-) strand; PAM type: NRG; PAM sequence: GGG
gaagaacattccatgctcat

SEQ ID NO: 57074 - DNA, 20 bp, Artificial Sequence
  Description of Artificial Sequence: Synthetic oligonucleotide
  Target: LAMA2; (-) strand; PAM type: NRG; PAM sequence: TGG
ggaagaacattccatgctca

SEQ ID NO: 57075 - DNA, 20 bp, Artificial Sequence
  Description of Artificial Sequence: Synthetic oligonucleotide
  Target: LAMA2; (-) strand; PAM type: NRG; PAM sequence: AAG
aagaggatacaaacaaatgg

SEQ ID NO: 57076 - DNA, 20 bp, Artificial Sequence
  Description of Artificial Sequence: Synthetic oligonucleotide
  Target: LAMA2; (-) strand; PAM type: NRG; PAM sequence: TGG
taaaagaggatacaaacaaa

SEQ ID NO: 57077 - DNA, 20 bp, Artificial Sequence
  Description of Artificial Sequence: Synthetic oligonucleotide
  Target: LAMA2; (-) strand; PAM type: NRG; PAM sequence: AGG
actgctcaaggaaataaaag

SEQ ID NO: 57078 - DNA, 20 bp, Artificial Sequence
  Description of Artificial Sequence: Synthetic oligonucleotide
  Target: LAMA2; (-) strand; PAM type: NRG; PAM sequence: GAG
cactgctcaaggaaataaaa

SEQ ID NO: 57079 - DNA, 20 bp, Artificial Sequence
  Description of Artificial Sequence: Synthetic oligonucleotide
  Target: LAMA2; (-) strand; PAM type: NRG; PAM sequence: AAG
accactgctcaaggaaataa

SEQ ID NO: 57080 - DNA, 20 bp, Artificial Sequence
  Description of Artificial Sequence: Synthetic oligonucleotide
  Target: LAMA2; (-) strand; PAM type: NRG; PAM sequence: AGG
gaactacaaaccactgctca

SEQ ID NO: 57081 - DNA, 20 bp, Artificial Sequence
  Description of Artificial Sequence: Synthetic oligonucleotide
  Target: LAMA2; (-) strand; PAM type: NRG; PAM sequence: AAG
agaactacaaaccactgctc

SEQ ID NO: 57082 - DNA, 20 bp, Artificial Sequence
  Description of Artificial Sequence: Synthetic oligonucleotide
  Target: LAMA2; (-) strand; PAM type: NRG; PAM sequence: GAG
atgtgaaggacctcttcaag

SEQ ID NO: 57083 - DNA, 20 bp, Artificial Sequence
  Description of Artificial Sequence: Synthetic oligonucleotide
  Target: LAMA2; (-) strand; PAM type: NRG; PAM sequence: AGG
ggatgtgaaggacctcttca

SEQ ID NO: 57084 - DNA, 20 bp, Artificial Sequence
  Description of Artificial Sequence: Synthetic oligonucleotide
  Target: LAMA2; (-) strand; PAM type: NRG; PAM sequence: AAG
gggatgtgaaggacctcttc

SEQ ID NO: 57085 - DNA, 20 bp, Artificial Sequence
  Description of Artificial Sequence: Synthetic oligonucleotide
  Target: LAMA2; (-) strand; PAM type: NRG; PAM sequence: AGG
ccaacttacaagggatgtga

SEQ ID NO: 57086 - DNA, 20 bp, Artificial Sequence
  Description of Artificial Sequence: Synthetic oligonucleotide
  Target: LAMA2; (-) strand; PAM type: NRG; PAM sequence: AAG
tccaacttacaagggatgtg

SEQ ID NO: 57087 - DNA, 20 bp, Artificial Sequence
  Description of Artificial Sequence: Synthetic oligonucleotide
  Target: LAMA2; (-) strand; PAM type: NRG; PAM sequence: GGG
cctaggaatccaacttacaa

SEQ ID NO: 57088 - DNA, 20 bp, Artificial Sequence
  Description of Artificial Sequence: Synthetic oligonucleotide
  Target: LAMA2; (-) strand; PAM type: NRG; PAM sequence: AGG
acctaggaatccaacttaca

SEQ ID NO: 57089 - DNA, 20 bp, Artificial Sequence
  Description of Artificial Sequence: Synthetic oligonucleotide
  Target: LAMA2; (-) strand; PAM type: NRG; PAM sequence: AAG
tacctaggaatccaacttac

SEQ ID NO: 57090 - DNA, 20 bp, Artificial Sequence
  Description of Artificial Sequence: Synthetic oligonucleotide
  Target: LAMA2; (-) strand; PAM type: NRG; PAM sequence: AGG
acagacattctaaaatacct

SEQ ID NO: 57091 - DNA, 20 bp, Artificial Sequence
  Description of Artificial Sequence: Synthetic oligonucleotide
  Target: LAMA2; (-) strand; PAM type: NRG; PAM sequence: TAG
aacagacattctaaaatacc

SEQ ID NO: 57092 - DNA, 20 bp, Artificial Sequence
  Description of Artificial Sequence: Synthetic oligonucleotide
  Target: LAMA2; (-) strand; PAM type: NRG; PAM sequence: CAG
aactaggtggcttaaaacaa

SEQ ID NO: 57093 - DNA, 20 bp, Artificial Sequence
  Description of Artificial Sequence: Synthetic oligonucleotide
  Target: LAMA2; (-) strand; PAM type: NRG; PAM sequence: TGG
ataaatgaccacaaactagg

SEQ ID NO: 57094 - DNA, 20 bp, Artificial Sequence
  Description of Artificial Sequence: Synthetic oligonucleotide
  Target: LAMA2; (-) strand; PAM type: NRG; PAM sequence: AGG
ataataaatgaccacaaact

SEQ ID NO: 57095 - DNA, 20 bp, Artificial Sequence
  Description of Artificial Sequence: Synthetic oligonucleotide
  Target: LAMA2; (-) strand; PAM type: NRG; PAM sequence: TAG
cataataaatgaccacaaac

SEQ ID NO: 57096 - DNA, 20 bp, Artificial Sequence
  Description of Artificial Sequence: Synthetic oligonucleotide
  Target: LAMA2; (-) strand; PAM type: NRG; PAM sequence: AGG
tttaggtatcttagttttct

SEQ ID NO: 57097 - DNA, 20 bp, Artificial Sequence
  Description of Artificial Sequence: Synthetic oligonucleotide
  Target: LAMA2; (-) strand; PAM type: NRG; PAM sequence: TAG
atttaggtatcttagttttc

SEQ ID NO: 57098 - DNA, 20 bp, Artificial Sequence
  Description of Artificial Sequence: Synthetic oligonucleotide
  Target: LAMA2; (-) strand; PAM type: NRG; PAM sequence: TAG
gtttcctaatttaggtatct

SEQ ID NO: 57099 - DNA, 20 bp, Artificial Sequence
  Description of Artificial Sequence: Synthetic oligonucleotide
  Target: LAMA2; (-) strand; PAM type: NRG; PAM sequence: AGG
ttatatttgtttcctaattt

SEQ ID NO: 57100 - DNA, 20 bp, Artificial Sequence
  Description of Artificial Sequence: Synthetic oligonucleotide
  Target: LAMA2; (-) strand; PAM type: NRG; PAM sequence: TAG
gttatatttgtttcctaatt

SEQ ID NO: 57101 - DNA, 20 bp, Artificial Sequence
  Description of Artificial Sequence: Synthetic oligonucleotide
  Target: LAMA2; (-) strand; PAM type: NRG; PAM sequence: TAG
tatactatccccttttaata

SEQ ID NO: 57102 - DNA, 20 bp, Artificial Sequence
  Description of Artificial Sequence: Synthetic oligonucleotide
  Target: LAMA2; (-) strand; PAM type: NRG; PAM sequence: TGG
cctttctgtattaaatatat

SEQ ID NO: 57103 - DNA, 20 bp, Artificial Sequence
  Description of Artificial Sequence: Synthetic oligonucleotide
  Target: LAMA2; (-) strand; PAM type: NRG; PAM sequence: GGG
gcagtgatattgagaacagt

SEQ ID NO: 57104 - DNA, 20 bp, Artificial Sequence
  Description of Artificial Sequence: Synthetic oligonucleotide
  Target: LAMA2; (-) strand; PAM type: NRG; PAM sequence: TGG
agcagtgatattgagaacag

SEQ ID NO: 57105 - DNA, 20 bp, Artificial Sequence
  Description of Artificial Sequence: Synthetic oligonucleotide
  Target: LAMA2; (-) strand; PAM type: NRG; PAM sequence: CAG
attagcagtgatattgagaa

SEQ ID NO: 57106 - DNA, 20 bp, Artificial Sequence
  Description of Artificial Sequence: Synthetic oligonucleotide
  Target: LAMA2; (-) strand; PAM type: NRG; PAM sequence: GAG
taggaattagcagtgatatt

SEQ ID NO: 57107 - DNA, 20 bp, Artificial Sequence
  Description of Artificial Sequence: Synthetic oligonucleotide
  Target: LAMA2; (-) strand; PAM type: NRG; PAM sequence: CAG
tgtgttcttataggaattag

SEQ ID NO: 57108 - DNA, 20 bp, Artificial Sequence
  Description of Artificial Sequence: Synthetic oligonucleotide
  Target: LAMA2; (-) strand; PAM type: NRG; PAM sequence: TAG
aattgtgttcttataggaat

SEQ ID NO: 57109 - DNA, 20 bp, Artificial Sequence
  Description of Artificial Sequence: Synthetic oligonucleotide
  Target: LAMA2; (-) strand; PAM type: NRG; PAM sequence: AGG
ttgagtaattgtgttcttat

SEQ ID NO: 57110 - DNA, 20 bp, Artificial Sequence
  Description of Artificial Sequence: Synthetic oligonucleotide
  Target: LAMA2; (-) strand; PAM type: NRG; PAM sequence: TAG
attgagtaattgtgttctta

SEQ ID NO: 57111 - DNA, 20 bp, Artificial Sequence
  Description of Artificial Sequence: Synthetic oligonucleotide
  Target: LAMA2; (-) strand; PAM type: NRG; PAM sequence: GAG
actacagcagattagtgatt

SEQ ID NO: 57112 - DNA, 20 bp, Artificial Sequence
  Description of Artificial Sequence: Synthetic oligonucleotide
  Target: LAMA2; (-) strand; PAM type: NRG; PAM sequence: TAG
atcagactactacagcagat

SEQ ID NO: 57113 - DNA, 20 bp, Artificial Sequence
  Description of Artificial Sequence: Synthetic oligonucleotide
  Target: LAMA2; (-) strand; PAM type: NRG; PAM sequence: CAG
catcaatcagactactacag

SEQ ID NO: 57114 - DNA, 20 bp, Artificial Sequence
  Description of Artificial Sequence: Synthetic oligonucleotide
  Target: LAMA2; (-) strand; PAM type: NRG; PAM sequence: CAG
tagcatcaatcagactacta

SEQ ID NO: 57115 - DNA, 20 bp, Artificial Sequence
  Description of Artificial Sequence: Synthetic oligonucleotide
  Target: LAMA2; (-) strand; PAM type: NRG; PAM sequence: CAG
cagcatggcttagcatcaat

SEQ ID NO: 57116 - DNA, 20 bp, Artificial Sequence
  Description of Artificial Sequence: Synthetic oligonucleotide
  Target: LAMA2; (-) strand; PAM type: NRG; PAM sequence: TAG
ttcattcctgcagcatggct

SEQ ID NO: 57117 - DNA, 20 bp, Artificial Sequence
  Description of Artificial Sequence: Synthetic oligonucleotide
  Target: LAMA2; (-) strand; PAM type: NRG; PAM sequence: TGG
gtttattcattcctgcagca

SEQ ID NO: 57118 - DNA, 20 bp, Artificial Sequence
  Description of Artificial Sequence: Synthetic oligonucleotide
  Target: LAMA2; (-) strand; PAM type: NRG; PAM sequence: CAG
tgggggtttattcattcctg

SEQ ID NO: 57119 - DNA, 20 bp, Artificial Sequence
  Description of Artificial Sequence: Synthetic oligonucleotide
  Target: LAMA2; (-) strand; PAM type: NRG; PAM sequence: GGG
gctaagattttaagatttgg

SEQ ID NO: 57120 - DNA, 20 bp, Artificial Sequence
  Description of Artificial Sequence: Synthetic oligonucleotide
  Target: LAMA2; (-) strand; PAM type: NRG; PAM sequence: GGG
tgctaagattttaagatttg

SEQ ID NO: 57121 - DNA, 20 bp, Artificial Sequence
  Description of Artificial Sequence: Synthetic oligonucleotide
  Target: LAMA2; (-) strand; PAM type: NRG; PAM sequence: GGG
atgctaagattttaagattt

SEQ ID NO: 57122 - DNA, 20 bp, Artificial Sequence
  Description of Artificial Sequence: Synthetic oligonucleotide
  Target: LAMA2; (-) strand; PAM type: NRG; PAM sequence: TGG
aatgctaagattttaagatt

SEQ ID NO: 57123 - DNA, 20 bp, Artificial Sequence
  Description of Artificial Sequence: Synthetic oligonucleotide
  Target: LAMA2; (-) strand; PAM type: NRG; PAM sequence: AAG
ctctataatgctaagatttt

SEQ ID NO: 57124 - DNA, 20 bp, Artificial Sequence
  Description of Artificial Sequence: Synthetic oligonucleotide
  Target: LAMA2; (-) strand; PAM type: NRG; PAM sequence: AAG
aaataaacctctataatgct

SEQ ID NO: 57125 - DNA, 20 bp, Artificial Sequence
  Description of Artificial Sequence: Synthetic oligonucleotide
  Target: LAMA2; (-) strand; PAM type: NRG; PAM sequence: GAG
gtatttgtcattgcatcatt

SEQ ID NO: 57126 - DNA, 20 bp, Artificial Sequence
  Description of Artificial Sequence: Synthetic oligonucleotide
  Target: LAMA2; (-) strand; PAM type: NRG; PAM sequence: TGG
tgggaccctgagtcaccaga

SEQ ID NO: 57127 - DNA, 20 bp, Artificial Sequence
  Description of Artificial Sequence: Synthetic oligonucleotide
  Target: LAMA2; (-) strand; PAM type: NRG; PAM sequence: CAG
caactgggaccctgagtcac

SEQ ID NO: 57128 - DNA, 20 bp, Artificial Sequence
  Description of Artificial Sequence: Synthetic oligonucleotide
  Target: LAMA2; (-) strand; PAM type: NRG; PAM sequence: GAG
cggaggacaactgggaccct

SEQ ID NO: 57129 - DNA, 20 bp, Artificial Sequence
  Description of Artificial Sequence: Synthetic oligonucleotide
  Target: LAMA2; (-) strand; PAM type: NRG; PAM sequence: GGG
atcataagcggaggacaact

SEQ ID NO: 57130 - DNA, 20 bp, Artificial Sequence
  Description of Artificial Sequence: Synthetic oligonucleotide
  Target: LAMA2; (-) strand; PAM type: NRG; PAM sequence: TGG
catcataagcggaggacaac

SEQ ID NO: 57131 - DNA, 20 bp, Artificial Sequence
  Description of Artificial Sequence: Synthetic oligonucleotide
  Target: LAMA2; (-) strand; PAM type: NRG; PAM sequence: AGG
gttggaaacatcataagcgg

SEQ ID NO: 57132 - DNA, 20 bp, Artificial Sequence
  Description of Artificial Sequence: Synthetic oligonucleotide
  Target: LAMA2; (-) strand; PAM type: NRG; PAM sequence: GAG
agttggaaacatcataagcg

SEQ ID NO: 57133 - DNA, 20 bp, Artificial Sequence
  Description of Artificial Sequence: Synthetic oligonucleotide
  Target: LAMA2; (-) strand; PAM type: NRG; PAM sequence: CGG
tgagttggaaacatcataag

SEQ ID NO: 57134 - DNA, 20 bp, Artificial Sequence
  Description of Artificial Sequence: Synthetic oligonucleotide
  Target: LAMA2; (-) strand; PAM type: NRG; PAM sequence: AAG
tcctgagttggaaacatcat

SEQ ID NO: 57135 - DNA, 20 bp, Artificial Sequence
  Description of Artificial Sequence: Synthetic oligonucleotide
  Target: LAMA2; (-) strand; PAM type: NRG; PAM sequence: TGG
ataaaaggcatttcctgagt

SEQ ID NO: 57136 - DNA, 20 bp, Artificial Sequence
  Description of Artificial Sequence: Synthetic oligonucleotide
  Target: LAMA2; (-) strand; PAM type: NRG; PAM sequence: GAG
aaccataaaaggcatttcct

SEQ ID NO: 57137 - DNA, 20 bp, Artificial Sequence
  Description of Artificial Sequence: Synthetic oligonucleotide
  Target: LAMA2; (-) strand; PAM type: NRG; PAM sequence: AGG
tctgccatagcaaccataaa

SEQ ID NO: 57138 - DNA, 20 bp, Artificial Sequence
  Description of Artificial Sequence: Synthetic oligonucleotide
  Target: LAMA2; (-) strand; PAM type: NRG; PAM sequence: AAG
ctctgccatagcaaccataa

SEQ ID NO: 57139 - DNA, 20 bp, Artificial Sequence
  Description of Artificial Sequence: Synthetic oligonucleotide
  Target: LAMA2; (-) strand; PAM type: NRG; PAM sequence: TAG
actcctctcttcctctgcca

SEQ ID NO: 57140 - DNA, 20 bp, Artificial Sequence
  Description of Artificial Sequence: Synthetic oligonucleotide
  Target: LAMA2; (-) strand; PAM type: NRG; PAM sequence: CAG
agcactgaagacctaggtgc

SEQ ID NO: 57141 - DNA, 20 bp, Artificial Sequence
  Description of Artificial Sequence: Synthetic oligonucleotide
  Target: LAMA2; (-) strand; PAM type: NRG; PAM sequence: AGG
agctgaagcactgaagacct

SEQ ID NO: 57142 - DNA, 20 bp, Artificial Sequence
  Description of Artificial Sequence: Synthetic oligonucleotide
  Target: LAMA2; (-) strand; PAM type: NRG; PAM sequence: TAG
tagctgaagcactgaagacc

SEQ ID NO: 57143 - DNA, 20 bp, Artificial Sequence
  Description of Artificial Sequence: Synthetic oligonucleotide
  Target: LAMA2; (-) strand; PAM type: NRG; PAM sequence: AAG
acttcctagctgaagcactg

SEQ ID NO: 57144 - DNA, 20 bp, Artificial Sequence
  Description of Artificial Sequence: Synthetic oligonucleotide
  Target: LAMA2; (-) strand; PAM type: NRG; PAM sequence: AAG
tgactatgacttcctagctg

SEQ ID NO: 57145 - DNA, 20 bp, Artificial Sequence
  Description of Artificial Sequence: Synthetic oligonucleotide
  Target: LAMA2; (-) strand; PAM type: NRG; PAM sequence: TAG
gagtcatgactatgacttcc

SEQ ID NO: 57146 - DNA, 20 bp, Artificial Sequence
  Description of Artificial Sequence: Synthetic oligonucleotide
  Target: LAMA2; (-) strand; PAM type: NRG; PAM sequence: GAG
gattgtaaaaatgtggagca

SEQ ID NO: 57147 - DNA, 20 bp, Artificial Sequence
  Description of Artificial Sequence: Synthetic oligonucleotide
  Target: LAMA2; (-) strand; PAM type: NRG; PAM sequence: CAG
tagattgtaaaaatgtggag

SEQ ID NO: 57148 - DNA, 20 bp, Artificial Sequence
  Description of Artificial Sequence: Synthetic oligonucleotide
  Target: LAMA2; (-) strand; PAM type: NRG; PAM sequence: GAG
tcttagattgtaaaaatgtg

SEQ ID NO: 57149 - DNA, 20 bp, Artificial Sequence
  Description of Artificial Sequence: Synthetic oligonucleotide
  Target: LAMA2; (-) strand; PAM type: NRG; PAM sequence: TGG
attcttagattgtaaaaatg

SEQ ID NO: 57150 - DNA, 20 bp, Artificial Sequence
  Description of Artificial Sequence: Synthetic oligonucleotide
  Target: LAMA2; (-) strand; PAM type: NRG; PAM sequence: TAG
gaggggcatctgactattct

SEQ ID NO: 57151 - DNA, 20 bp, Artificial Sequence
  Description of Artificial Sequence: Synthetic oligonucleotide
  Target: LAMA2; (-) strand; PAM type: NRG; PAM sequence: GGG
cagccccttgcagttaagag

SEQ ID NO: 57152 - DNA, 20 bp, Artificial Sequence
  Description of Artificial Sequence: Synthetic oligonucleotide
  Target: LAMA2; (-) strand; PAM type: NRG; PAM sequence: GGG
tcagccccttgcagttaaga

SEQ ID NO: 57153 - DNA, 20 bp, Artificial Sequence
  Description of Artificial Sequence: Synthetic oligonucleotide
  Target: LAMA2; (-) strand; PAM type: NRG; PAM sequence: AGG
ctcagccccttgcagttaag

SEQ ID NO: 57154 - DNA, 20 bp, Artificial Sequence
  Description of Artificial Sequence: Synthetic oligonucleotide
  Target: LAMA2; (-) strand; PAM type: NRG; PAM sequence: GAG
tctcagccccttgcagttaa

SEQ ID NO: 57155 - DNA, 20 bp, Artificial Sequence
  Description of Artificial Sequence: Synthetic oligonucleotide
  Target: LAMA2; (-) strand; PAM type: NRG; PAM sequence: AAG
cttctcagccccttgcagtt

SEQ ID NO: 57156 - DNA, 20 bp, Artificial Sequence
  Description of Artificial Sequence: Synthetic oligonucleotide
  Target: LAMA2; (-) strand; PAM type: NRG; PAM sequence: CAG
ctacacttctcagccccttg

SEQ ID NO: 57157 - DNA, 20 bp, Artificial Sequence
  Description of Artificial Sequence: Synthetic oligonucleotide
  Target: LAMA2; (-) strand; PAM type: NRG; PAM sequence: CAG
cttgtgttccctacacttct

SEQ ID NO: 57158 - DNA, 20 bp, Artificial Sequence
  Description of Artificial Sequence: Synthetic oligonucleotide
  Target: LAMA2; (-) strand; PAM type: NRG; PAM sequence: TAG
ttatatgtaagcagagatag

SEQ ID NO: 57159 - DNA, 20 bp, Artificial Sequence
  Description of Artificial Sequence: Synthetic oligonucleotide
  Target: LAMA2; (-) strand; PAM type: NRG; PAM sequence: TAG
ccattatatgtaagcagaga

SEQ ID NO: 57160 - DNA, 20 bp, Artificial Sequence
  Description of Artificial Sequence: Synthetic oligonucleotide
  Target: LAMA2; (-) strand; PAM type: NRG; PAM sequence: GAG
tctgccattatatgtaagca

SEQ ID NO: 57161 - DNA, 20 bp, Artificial Sequence
  Description of Artificial Sequence: Synthetic oligonucleotide
  Target: LAMA2; (-) strand; PAM type: NRG; PAM sequence: CAG
cttctgccattatatgtaag

SEQ ID NO: 57162 - DNA, 20 bp, Artificial Sequence
  Description of Artificial Sequence: Synthetic oligonucleotide
  Target: LAMA2; (-) strand; PAM type: NRG; PAM sequence: AAG
tttcttctgccattatatgt

SEQ ID NO: 57163 - DNA, 20 bp, Artificial Sequence
  Description of Artificial Sequence: Synthetic oligonucleotide
  Target: LAMA2; (-) strand; PAM type: NRG; PAM sequence: AGG
atgattttaatagatttagg

SEQ ID NO: 57164 - DNA, 20 bp, Artificial Sequence
  Description of Artificial Sequence: Synthetic oligonucleotide
  Target: LAMA2; (-) strand; PAM type: NRG; PAM sequence: GAG
tatgattttaatagatttag

SEQ ID NO: 57165 - DNA, 20 bp, Artificial Sequence
  Description of Artificial Sequence: Synthetic oligonucleotide
  Target: LAMA2; (-) strand; PAM type: NRG; PAM sequence: AGG
agtatgattttaatagattt

SEQ ID NO: 57166 - DNA, 20 bp, Artificial Sequence
  Description of Artificial Sequence: Synthetic oligonucleotide
  Target: LAMA2; (-) strand; PAM type: NRG; PAM sequence: TAG
tagtatgattttaatagatt

SEQ ID NO: 57167 - DNA, 20 bp, Artificial Sequence
  Description of Artificial Sequence: Synthetic oligonucleotide
  Target: LAMA2; (-) strand; PAM type: NRG; PAM sequence: TAG
agagcatagtatgattttaa

SEQ ID NO: 57168 - DNA, 20 bp, Artificial Sequence
  Description of Artificial Sequence: Synthetic oligonucleotide
  Target: LAMA2; (-) strand; PAM type: NRG; PAM sequence: TAG
agctagaatctttgagagca

SEQ ID NO: 57169 - DNA, 20 bp, Artificial Sequence
  Description of Artificial Sequence: Synthetic oligonucleotide
  Target: LAMA2; (-) strand; PAM type: NRG; PAM sequence: GAG
ggagcagctagaatctttga

SEQ ID NO: 57170 - DNA, 20 bp, Artificial Sequence
  Description of Artificial Sequence: Synthetic oligonucleotide
  Target: LAMA2; (-) strand; PAM type: NRG; PAM sequence: GAG
agggagcagctagaatcttt

SEQ ID NO: 57171 - DNA, 20 bp, Artificial Sequence
  Description of Artificial Sequence: Synthetic oligonucleotide
  Target: LAMA2; (-) strand; PAM type: NRG; PAM sequence: TAG
tatcaaattaagggagcagc

SEQ ID NO: 57172 - DNA, 20 bp, Artificial Sequence
  Description of Artificial Sequence: Synthetic oligonucleotide
  Target: LAMA2; (-) strand; PAM type: NRG; PAM sequence: CAG
aaaatatcaaattaagggag

SEQ ID NO: 57173 - DNA, 20 bp, Artificial Sequence
  Description of Artificial Sequence: Synthetic oligonucleotide
  Target: LAMA2; (-) strand; PAM type: NRG; PAM sequence: GAG
gataaaatatcaaattaagg

SEQ ID NO: 57174 - DNA, 20 bp, Artificial Sequence
  Description of Artificial Sequence: Synthetic oligonucleotide
  Target: LAMA2; (-) strand; PAM type: NRG; PAM sequence: GGG
gggataaaatatcaaattaa

SEQ ID NO: 57175 - DNA, 20 bp, Artificial Sequence
  Description of Artificial Sequence: Synthetic oligonucleotide
  Target: LAMA2; (-) strand; PAM type: NRG; PAM sequence: AGG
agggataaaatatcaaatta

SEQ ID NO: 57176 - DNA, 20 bp, Artificial Sequence
  Description of Artificial Sequence: Synthetic oligonucleotide
  Target: LAMA2; (-) strand; PAM type: NRG; PAM sequence: AAG
cagggataaaatatcaaatt

SEQ ID NO: 57177 - DNA, 20 bp, Artificial Sequence
  Description of Artificial Sequence: Synthetic oligonucleotide
  Target: LAMA2; (-) strand; PAM type: NRG; PAM sequence: GGG
agcttgtaaaaattatagca

SEQ ID NO: 57178 - DNA, 20 bp, Artificial Sequence
  Description of Artificial Sequence: Synthetic oligonucleotide
  Target: LAMA2; (-) strand; PAM type: NRG; PAM sequence: AGG
aagcttgtaaaaattatagc

SEQ ID NO: 57179 - DNA, 20 bp, Artificial Sequence
  Description of Artificial Sequence: Synthetic oligonucleotide
  Target: LAMA2; (-) strand; PAM type: NRG; PAM sequence: CAG
gaagcttgtaaaaattatag

SEQ ID NO: 57180 - DNA, 20 bp, Artificial Sequence
  Description of Artificial Sequence: Synthetic oligonucleotide
  Target: LAMA2; (-) strand; PAM type: NRG; PAM sequence: TAG
aaagaagcttgtaaaaatta

SEQ ID NO: 57181 - DNA, 20 bp, Artificial Sequence
  Description of Artificial Sequence: Synthetic oligonucleotide
  Target: LAMA2; (-) strand; PAM type: NRG; PAM sequence: AAG
gtgtatatatatatgaaaag

SEQ ID NO: 57182 - DNA, 20 bp, Artificial Sequence
  Description of Artificial Sequence: Synthetic oligonucleotide
  Target: LAMA2; (-) strand; PAM type: NRG; PAM sequence: AAG
tgtgtgtatatatatatgaa

SEQ ID NO: 57183 - DNA, 20 bp, Artificial Sequence
  Description of Artificial Sequence: Synthetic oligonucleotide
  Target: LAMA2; (-) strand; PAM type: NRG; PAM sequence: TAG
taatggaaagacttgggtaa

SEQ ID NO: 57184 - DNA, 20 bp, Artificial Sequence
  Description of Artificial Sequence: Synthetic oligonucleotide
  Target: LAMA2; (-) strand; PAM type: NRG; PAM sequence: GGG
ccatgttaatggaaagactt

SEQ ID NO: 57185 - DNA, 20 bp, Artificial Sequence
  Description of Artificial Sequence: Synthetic oligonucleotide
  Target: LAMA2; (-) strand; PAM type: NRG; PAM sequence: TGG
accatgttaatggaaagact

SEQ ID NO: 57186 - DNA, 20 bp, Artificial Sequence
  Description of Artificial Sequence: Synthetic oligonucleotide
  Target: LAMA2; (-) strand; PAM type: NRG; PAM sequence: AAG
tataacaccatgttaatgga

SEQ ID NO: 57187 - DNA, 20 bp, Artificial Sequence
  Description of Artificial Sequence: Synthetic oligonucleotide
  Target: LAMA2; (-) strand; PAM type: NRG; PAM sequence: TGG
caaatataacaccatgttaa

SEQ ID NO: 57188 - DNA, 20 bp, Artificial Sequence
  Description of Artificial Sequence: Synthetic oligonucleotide
  Target: LAMA2; (-) strand; PAM type: NRG; PAM sequence: AGG
agcagtcagtagttctggta

SEQ ID NO: 57189 - DNA, 20 bp, Artificial Sequence
  Description of Artificial Sequence: Synthetic oligonucleotide
  Target: LAMA2; (-) strand; PAM type: NRG; PAM sequence: AAG
tagcagtcagtagttctggt

SEQ ID NO: 57190 - DNA, 20 bp, Artificial Sequence
  Description of Artificial Sequence: Synthetic oligonucleotide
  Target: LAMA2; (-) strand; PAM type: NRG; PAM sequence: TGG
ttgttagcagtcagtagttc

SEQ ID NO: 57191 - DNA, 20 bp, Artificial Sequence
  Description of Artificial Sequence: Synthetic oligonucleotide
  Target: LAMA2; (-) strand; PAM type: NRG; PAM sequence: TAG
tttatgttgttagcagtcag

SEQ ID NO: 57192 - DNA, 20 bp, Artificial Sequence
  Description of Artificial Sequence: Synthetic oligonucleotide
  Target: LAMA2; (-) strand; PAM type: NRG; PAM sequence: CAG
agttttatgttgttagcagt

SEQ ID NO: 57193 - DNA, 20 bp, Artificial Sequence
  Description of Artificial Sequence: Synthetic oligonucleotide
  Target: LAMA2; (-) strand; PAM type: NRG; PAM sequence: CAG
aaagagttttatgttgttag

SEQ ID NO: 57194 - DNA, 20 bp, Artificial Sequence
  Description of Artificial Sequence: Synthetic oligonucleotide
  Target: LAMA2; (-) strand; PAM type: NRG; PAM sequence: TAG
ggaaaagagttttatgttgt

SEQ ID NO: 57195 - DNA, 20 bp, Artificial Sequence
  Description of Artificial Sequence: Synthetic oligonucleotide
  Target: LAMA2; (-) strand; PAM type: NRG; PAM sequence: GAG
gaatgattttggatggaaaa

SEQ ID NO: 57196 - DNA, 20 bp, Artificial Sequence
  Description of Artificial Sequence: Synthetic oligonucleotide
  Target: LAMA2; (-) strand; PAM type: NRG; PAM sequence: AAG
aggaatgattttggatggaa

SEQ ID NO: 57197 - DNA, 20 bp, Artificial Sequence
  Description of Artificial Sequence: Synthetic oligonucleotide
  Target: LAMA2; (-) strand; PAM type: NRG; PAM sequence: TGG
taaataggaatgattttgga

SEQ ID NO: 57198 - DNA, 20 bp, Artificial Sequence
  Description of Artificial Sequence: Synthetic oligonucleotide
  Target: LAMA2; (-) strand; PAM type: NRG; PAM sequence: TGG
tgtttaaataggaatgattt

SEQ ID NO: 57199 - DNA, 20 bp, Artificial Sequence
  Description of Artificial Sequence: Synthetic oligonucleotide
  Target: LAMA2; (-) strand; PAM type: NRG; PAM sequence: AGG
acactaataaatgtttaaat

SEQ ID NO: 57200 - DNA, 20 bp, Artificial Sequence
  Description of Artificial Sequence: Synthetic oligonucleotide
  Target: LAMA2; (-) strand; PAM type: NRG; PAM sequence: TAG
aacactaataaatgtttaaa

SEQ ID NO: 57201 - DNA, 20 bp, Artificial Sequence
  Description of Artificial Sequence: Synthetic oligonucleotide
  Target: LAMA2; (-) strand; PAM type: NRG; PAM sequence: TAG
tatgagcagttgaatggtat

SEQ ID NO: 57202 - DNA, 20 bp, Artificial Sequence
  Description of Artificial Sequence: Synthetic oligonucleotide
  Target: LAMA2; (-) strand; PAM type: NRG; PAM sequence: TGG
ctcctttatgagcagttgaa

SEQ ID NO: 57203 - DNA, 20 bp, Artificial Sequence
  Description of Artificial Sequence: Synthetic oligonucleotide
  Target: LAMA2; (-) strand; PAM type: NRG; PAM sequence: CAG
tcctctttctcctttatgag

SEQ ID NO: 57204 - DNA, 20 bp, Artificial Sequence
  Description of Artificial Sequence: Synthetic oligonucleotide
  Target: LAMA2; (-) strand; PAM type: NRG; PAM sequence: GAG
tcttcctctttctcctttat

SEQ ID NO: 57205 - DNA, 20 bp, Artificial Sequence
  Description of Artificial Sequence: Synthetic oligonucleotide
  Target: LAMA2; (-) strand; PAM type: NRG; PAM sequence: TGG
ctttactctataaacttacc

SEQ ID NO: 57206 - DNA, 20 bp, Artificial Sequence
  Description of Artificial Sequence: Synthetic oligonucleotide
  Target: LAMA2; (-) strand; PAM type: NRG; PAM sequence: AGG
ctcaaaacaatcaaaatggc

SEQ ID NO: 57207 - DNA, 20 bp, Artificial Sequence
  Description of Artificial Sequence: Synthetic oligonucleotide
  Target: LAMA2; (-) strand; PAM type: NRG; PAM sequence: CAG
actcaaaacaatcaaaatgg

SEQ ID NO: 57208 - DNA, 20 bp, Artificial Sequence
  Description of Artificial Sequence: Synthetic oligonucleotide
  Target: LAMA2; (-) strand; PAM type: NRG; PAM sequence: TGG
gatactcaaaacaatcaaaa

SEQ ID NO: 57209 - DNA, 20 bp, Artificial Sequence
  Description of Artificial Sequence: Synthetic oligonucleotide
  Target: LAMA2; (-) strand; PAM type: NRG; PAM sequence: GGG
caggggattttttttttcct

SEQ ID NO: 57210 - DNA, 20 bp, Artificial Sequence
  Description of Artificial Sequence: Synthetic oligonucleotide
  Target: LAMA2; (-) strand; PAM type: NRG; PAM sequence: TGG
acaggggattttttttttcc

SEQ ID NO: 57211 - DNA, 20 bp, Artificial Sequence
  Description of Artificial Sequence: Synthetic oligonucleotide
  Target: LAMA2; (-) strand; PAM type: NRG; PAM sequence: GGG
agctttagtttattatacag

SEQ ID NO: 57212 - DNA, 20 bp, Artificial Sequence
  Description of Artificial Sequence: Synthetic oligonucleotide
  Target: LAMA2; (-) strand; PAM type: NRG; PAM sequence: GGG
aagctttagtttattataca

SEQ ID NO: 57213 - DNA, 20 bp, Artificial Sequence
  Description of Artificial Sequence: Synthetic oligonucleotide
  Target: LAMA2; (-) strand; PAM type: NRG; PAM sequence: AGG
aaagctttagtttattatac

SEQ ID NO: 57214 - DNA, 20 bp, Artificial Sequence
  Description of Artificial Sequence: Synthetic oligonucleotide
  Target: LAMA2; (-) strand; PAM type: NRG; PAM sequence: CAG
aaaagctttagtttattata

SEQ ID NO: 57215 - DNA, 20 bp, Artificial Sequence
  Description of Artificial Sequence: Synthetic oligonucleotide
  Target: LAMA2; (-) strand; PAM type: NRG; PAM sequence: TAG
gaaggatgttaaaaaagctt

SEQ ID NO: 57216 - DNA, 20 bp, Artificial Sequence
  Description of Artificial Sequence: Synthetic oligonucleotide
  Target: LAMA2; (-) strand; PAM type: NRG; PAM sequence: AAG
gattaagaaggatgttaaaa

SEQ ID NO: 57217 - DNA, 20 bp, Artificial Sequence
  Description of Artificial Sequence: Synthetic oligonucleotide
  Target: LAMA2; (-) strand; PAM type: NRG; PAM sequence: AGG
tttcatatgagggattaaga

SEQ ID NO: 57218 - DNA, 20 bp, Artificial Sequence
  Description of Artificial Sequence: Synthetic oligonucleotide
  Target: LAMA2; (-) strand; PAM type: NRG; PAM sequence: AAG
ttttcatatgagggattaag

SEQ ID NO: 57219 - DNA, 20 bp, Artificial Sequence
  Description of Artificial Sequence: Synthetic oligonucleotide
  Target: LAMA2; (-) strand; PAM type: NRG; PAM sequence: AAG
aatttttcatatgagggatt

SEQ ID NO: 57220 - DNA, 20 bp, Artificial Sequence
  Description of Artificial Sequence: Synthetic oligonucleotide
  Target: LAMA2; (-) strand; PAM type: NRG; PAM sequence: GGG
agtataaatttttcatatga

SEQ ID NO: 57221 - DNA, 20 bp, Artificial Sequence
  Description of Artificial Sequence: Synthetic oligonucleotide
  Target: LAMA2; (-) strand; PAM type: NRG; PAM sequence: AGG
gagtataaatttttcatatg

SEQ ID NO: 57222 - DNA, 20 bp, Artificial Sequence
  Description of Artificial Sequence: Synthetic oligonucleotide
  Target: LAMA2; (-) strand; PAM type: NRG; PAM sequence: GAG
ggagtataaatttttcatat

SEQ ID NO: 57223 - DNA, 20 bp, Artificial Sequence
  Description of Artificial Sequence: Synthetic oligonucleotide
  Target: LAMA2; (-) strand; PAM type: NRG; PAM sequence: GAG
tttattaatatctaagaggg

SEQ ID NO: 57224 - DNA, 20 bp, Artificial Sequence
  Description of Artificial Sequence: Synthetic oligonucleotide
  Target: LAMA2; (-) strand; PAM type: NRG; PAM sequence: GGG
cttttattaatatctaagag

SEQ ID NO: 57225 - DNA, 20 bp, Artificial Sequence
  Description of Artificial Sequence: Synthetic oligonucleotide
  Target: LAMA2; (-) strand; PAM type: NRG; PAM sequence: GGG
gcttttattaatatctaaga

SEQ ID NO: 57226 - DNA, 20 bp, Artificial Sequence
  Description of Artificial Sequence: Synthetic oligonucleotide
  Target: LAMA2; (-) strand; PAM type: NRG; PAM sequence: AGG
agcttttattaatatctaag

SEQ ID NO: 57227 - DNA, 20 bp, Artificial Sequence
  Description of Artificial Sequence: Synthetic oligonucleotide
  Target: LAMA2; (-) strand; PAM type: NRG; PAM sequence: GAG
gagcttttattaatatctaa

SEQ ID NO: 57228 - DNA, 20 bp, Artificial Sequence
  Description of Artificial Sequence: Synthetic oligonucleotide
  Target: LAMA2; (-) strand; PAM type: NRG; PAM sequence: AAG
ttgagcttttattaatatct

SEQ ID NO: 57229 - DNA, 20 bp, Artificial Sequence
  Description of Artificial Sequence: Synthetic oligonucleotide
  Target: LAMA2; (-) strand; PAM type: NRG; PAM sequence: GAG
accctagctacctgtacatt

SEQ ID NO: 57230 - DNA, 20 bp, Artificial Sequence
  Description of Artificial Sequence: Synthetic oligonucleotide
  Target: LAMA2; (-) strand; PAM type: NRG; PAM sequence: TAG
agggaagacggggggcaccc

SEQ ID NO: 57231 - DNA, 20 bp, Artificial Sequence
  Description of Artificial Sequence: Synthetic oligonucleotide
  Target: LAMA2; (-) strand; PAM type: NRG; PAM sequence: GGG
aatccagcagggaagacggg

SEQ ID NO: 57232 - DNA, 20 bp, Artificial Sequence
  Description of Artificial Sequence: Synthetic oligonucleotide
  Target: LAMA2; (-) strand; PAM type: NRG; PAM sequence: GGG
aaatccagcagggaagacgg

SEQ ID NO: 57233 - DNA, 20 bp, Artificial Sequence
  Description of Artificial Sequence: Synthetic oligonucleotide
  Target: LAMA2; (-) strand; PAM type: NRG; PAM sequence: GGG
caaatccagcagggaagacg

SEQ ID NO: 57234 - DNA, 20 bp, Artificial Sequence
  Description of Artificial Sequence: Synthetic oligonucleotide
  Target: LAMA2; (-) strand; PAM type: NRG; PAM sequence: GGG
acaaatccagcagggaagac

SEQ ID NO: 57235 - DNA, 20 bp, Artificial Sequence
  Description of Artificial Sequence: Synthetic oligonucleotide
  Target: LAMA2; (-) strand; PAM type: NRG; PAM sequence: CGG
tacaaatccagcagggaaga

SEQ ID NO: 57236 - DNA, 20 bp, Artificial Sequence
  Description of Artificial Sequence: Synthetic oligonucleotide
  Target: LAMA2; (-) strand; PAM type: NRG; PAM sequence: AAG
gacctacaaatccagcaggg

SEQ ID NO: 57237 - DNA, 20 bp, Artificial Sequence
  Description of Artificial Sequence: Synthetic oligonucleotide
  Target: LAMA2; (-) strand; PAM type: NRG; PAM sequence: GGG
caggacctacaaatccagca

SEQ ID NO: 57238 - DNA, 20 bp, Artificial Sequence
  Description of Artificial Sequence: Synthetic oligonucleotide
  Target: LAMA2; (-) strand; PAM type: NRG; PAM sequence: AGG
gcaggacctacaaatccagc

SEQ ID NO: 57239 - DNA, 20 bp, Artificial Sequence
  Description of Artificial Sequence: Synthetic oligonucleotide
  Target: LAMA2; (-) strand; PAM type: NRG; PAM sequence: CAG
agcaggacctacaaatccag

SEQ ID NO: 57240 - DNA, 20 bp, Artificial Sequence
  Description of Artificial Sequence: Synthetic oligonucleotide
  Target: LAMA2; (-) strand; PAM type: NRG; PAM sequence: CAG
atgagcaggacctacaaatc

SEQ ID NO: 57241 - DNA, 20 bp, Artificial Sequence
  Description of Artificial Sequence: Synthetic oligonucleotide
  Target: LAMA2; (-) strand; PAM type: NRG; PAM sequence: AGG
aataacccctctgcatgagc

SEQ ID NO: 57242 - DNA, 20 bp, Artificial Sequence
  Description of Artificial Sequence: Synthetic oligonucleotide
  Target: LAMA2; (-) strand; PAM type: NRG; PAM sequence: CAG
aaataacccctctgcatgag

SEQ ID NO: 57243 - DNA, 20 bp, Artificial Sequence
  Description of Artificial Sequence: Synthetic oligonucleotide
  Target: LAMA2; (-) strand; PAM type: NRG; PAM sequence: GAG
gggaaataacccctctgcat

SEQ ID NO: 57244 - DNA, 20 bp, Artificial Sequence
  Description of Artificial Sequence: Synthetic oligonucleotide
  Target: LAMA2; (-) strand; PAM type: NRG; PAM sequence: GGG
aaatagagcatccacatgct

SEQ ID NO: 57245 - DNA, 20 bp, Artificial Sequence
  Description of Artificial Sequence: Synthetic oligonucleotide
  Target: LAMA2; (-) strand; PAM type: NRG; PAM sequence: TGG
caaatagagcatccacatgc

SEQ ID NO: 57246 - DNA, 20 bp, Artificial Sequence
  Description of Artificial Sequence: Synthetic oligonucleotide
  Target: LAMA2; (-) strand; PAM type: NRG; PAM sequence: GAG
gcctacagtggagtcaaata

SEQ ID NO: 57247 - DNA, 20 bp, Artificial Sequence
  Description of Artificial Sequence: Synthetic oligonucleotide
  Target: LAMA2; (-) strand; PAM type: NRG; PAM sequence: TAG
tggcctacagtggagtcaaa

SEQ ID NO: 57248 - DNA, 20 bp, Artificial Sequence
  Description of Artificial Sequence: Synthetic oligonucleotide
  Target: LAMA2; (-) strand; PAM type: NRG; PAM sequence: GAG
ggggtggttggcctacagtg

SEQ ID NO: 57249 - DNA, 20 bp, Artificial Sequence
  Description of Artificial Sequence: Synthetic oligonucleotide
  Target: LAMA2; (-) strand; PAM type: NRG; PAM sequence: TGG
aaggggtggttggcctacag

SEQ ID NO: 57250 - DNA, 20 bp, Artificial Sequence
  Description of Artificial Sequence: Synthetic oligonucleotide
  Target: LAMA2; (-) strand; PAM type: NRG; PAM sequence: CAG
gagaaggggtggttggccta

SEQ ID NO: 57251 - DNA, 20 bp, Artificial Sequence
  Description of Artificial Sequence: Synthetic oligonucleotide
  Target: LAMA2; (-) strand; PAM type: NRG; PAM sequence: TGG
gattgatgagaaggggtggt

SEQ ID NO: 57252 - DNA, 20 bp, Artificial Sequence
  Description of Artificial Sequence: Synthetic oligonucleotide
  Target: LAMA2; (-) strand; PAM type: NRG; PAM sequence: TGG
acatgattgatgagaagggg

SEQ ID NO: 57253 - DNA, 20 bp, Artificial Sequence
  Description of Artificial Sequence: Synthetic oligonucleotide
  Target: LAMA2; (-) strand; PAM type: NRG; PAM sequence: GGG
gcaacatgattgatgagaag

SEQ ID NO: 57254 - DNA, 20 bp, Artificial Sequence
  Description of Artificial Sequence: Synthetic oligonucleotide
  Target: LAMA2; (-) strand; PAM type: NRG; PAM sequence: GGG
tgcaacatgattgatgagaa

SEQ ID NO: 57255 - DNA, 20 bp, Artificial Sequence
  Description of Artificial Sequence: Synthetic oligonucleotide
  Target: LAMA2; (-) strand; PAM type: NRG; PAM sequence: AGG
ttgcaacatgattgatgaga

SEQ ID NO: 57256 - DNA, 20 bp, Artificial Sequence
  Description of Artificial Sequence: Synthetic oligonucleotide
  Target: LAMA2; (-) strand; PAM type: NRG; PAM sequence: AAG
attgcaacatgattgatgag

SEQ ID NO: 57257 - DNA, 20 bp, Artificial Sequence
  Description of Artificial Sequence: Synthetic oligonucleotide
  Target: LAMA2; (-) strand; PAM type: NRG; PAM sequence: GAG
ataattgcaacatgattgat

SEQ ID NO: 57258 - DNA, 20 bp, Artificial Sequence
  Description of Artificial Sequence: Synthetic oligonucleotide
  Target: LAMA2; (-) strand; PAM type: NRG; PAM sequence: AAG
ataattctcttctctaaaag

SEQ ID NO: 57259 - DNA, 20 bp, Artificial Sequence
  Description of Artificial Sequence: Synthetic oligonucleotide
  Target: LAMA2; (-) strand; PAM type: NRG; PAM sequence: AAG
taaataattctcttctctaa

SEQ ID NO: 57260 - DNA, 20 bp, Artificial Sequence
  Description of Artificial Sequence: Synthetic oligonucleotide
  Target: LAMA2; (-) strand; PAM type: NRG; PAM sequence: TGG
aggcttgttgatgttatttc

SEQ ID NO: 57261 - DNA, 20 bp, Artificial Sequence
  Description of Artificial Sequence: Synthetic oligonucleotide
  Target: LAMA2; (-) strand; PAM type: NRG; PAM sequence: AGG
aagcatgtatattctgtaaa

SEQ ID NO: 57262 - DNA, 20 bp, Artificial Sequence
  Description of Artificial Sequence: Synthetic oligonucleotide
  Target: LAMA2; (-) strand; PAM type: NRG; PAM sequence: AAG
taagcatgtatattctgtaa

SEQ ID NO: 57263 - DNA, 20 bp, Artificial Sequence
  Description of Artificial Sequence: Synthetic oligonucleotide
  Target: LAMA2; (-) strand; PAM type: NRG; PAM sequence: AAG
aacaatatggtgtgaaactt

SEQ ID NO: 57264 - DNA, 20 bp, Artificial Sequence
  Description of Artificial Sequence: Synthetic oligonucleotide
  Target: LAMA2; (-) strand; PAM type: NRG; PAM sequence: TGG
cttaaaatatctcaacaata

SEQ ID NO: 57265 - DNA, 20 bp, Artificial Sequence
  Description of Artificial Sequence: Synthetic oligonucleotide
  Target: LAMA2; (-) strand; PAM type: NRG; PAM sequence: AAG
cagccatcctaatgggtata

SEQ ID NO: 57266 - DNA, 20 bp, Artificial Sequence
  Description of Artificial Sequence: Synthetic oligonucleotide
  Target: LAMA2; (-) strand; PAM type: NRG; PAM sequence: GGG
attatggcagccatcctaat

SEQ ID NO: 57267 - DNA, 20 bp, Artificial Sequence
  Description of Artificial Sequence: Synthetic oligonucleotide
  Target: LAMA2; (-) strand; PAM type: NRG; PAM sequence: TGG
aattatggcagccatcctaa

SEQ ID NO: 57268 - DNA, 20 bp, Artificial Sequence
  Description of Artificial Sequence: Synthetic oligonucleotide
  Target: LAMA2; (-) strand; PAM type: NRG; PAM sequence: CAG
ttccatttttaaaattatgg

SEQ ID NO: 57269 - DNA, 20 bp, Artificial Sequence
  Description of Artificial Sequence: Synthetic oligonucleotide
  Target: LAMA2; (-) strand; PAM type: NRG; PAM sequence: TGG
accttccatttttaaaatta

SEQ ID NO: 57270 - DNA, 20 bp, Artificial Sequence
  Description of Artificial Sequence: Synthetic oligonucleotide
  Target: LAMA2; (-) strand; PAM type: NRG; PAM sequence: AGG
attcccatcaacaatgcata

SEQ ID NO: 57271 - DNA, 20 bp, Artificial Sequence
  Description of Artificial Sequence: Synthetic oligonucleotide
  Target: LAMA2; (-) strand; PAM type: NRG; PAM sequence: AAG
tattcccatcaacaatgcat

SEQ ID NO: 57272 - DNA, 20 bp, Artificial Sequence
  Description of Artificial Sequence: Synthetic oligonucleotide
  Target: LAMA2; (-) strand; PAM type: NRG; PAM sequence: AGG
attctatttgtaatgttttg

SEQ ID NO: 57273 - DNA, 20 bp, Artificial Sequence
  Description of Artificial Sequence: Synthetic oligonucleotide
  Target: LAMA2; (-) strand; PAM type: NRG; PAM sequence: GAG
aattctatttgtaatgtttt

SEQ ID NO: 57274 - DNA, 20 bp, Artificial Sequence
  Description of Artificial Sequence: Synthetic oligonucleotide
  Target: LAMA2; (-) strand; PAM type: NRG; PAM sequence: TGG
attcccagaagtggaattgt

SEQ ID NO: 57275 - DNA, 20 bp, Artificial Sequence
  Description of Artificial Sequence: Synthetic oligonucleotide
  Target: LAMA2; (-) strand; PAM type: NRG; PAM sequence: TGG
ttggggcatattcccagaag

SEQ ID NO: 57276 - DNA, 20 bp, Artificial Sequence
  Description of Artificial Sequence: Synthetic oligonucleotide
  Target: LAMA2; (-) strand; PAM type: NRG; PAM sequence: AAG
tatttggggcatattcccag

SEQ ID NO: 57277 - DNA, 20 bp, Artificial Sequence
  Description of Artificial Sequence: Synthetic oligonucleotide
  Target: LAMA2; (-) strand; PAM type: NRG; PAM sequence: CAG
aattatttggggcatattcc

SEQ ID NO: 57278 - DNA, 20 bp, Artificial Sequence
  Description of Artificial Sequence: Synthetic oligonucleotide
  Target: LAMA2; (-) strand; PAM type: NRG; PAM sequence: GGG
accctgcttttaattatttg

SEQ ID NO: 57279 - DNA, 20 bp, Artificial Sequence
  Description of Artificial Sequence: Synthetic oligonucleotide
  Target: LAMA2; (-) strand; PAM type: NRG; PAM sequence: GGG
gaccctgcttttaattattt

SEQ ID NO: 57280 - DNA, 20 bp, Artificial Sequence
  Description of Artificial Sequence: Synthetic oligonucleotide
  Target: LAMA2; (-) strand; PAM type: NRG; PAM sequence: TGG
ggaccctgcttttaattatt

SEQ ID NO: 57281 - DNA, 20 bp, Artificial Sequence
  Description of Artificial Sequence: Synthetic oligonucleotide
  Target: LAMA2; (-) strand; PAM type: NRG; PAM sequence: AGG
agatgtataaatatcttttc

SEQ ID NO: 57282 - DNA, 20 bp, Artificial Sequence
  Description of Artificial Sequence: Synthetic oligonucleotide
  Target: LAMA2; (-) strand; PAM type: NRG; PAM sequence: CAG
gagatgtataaatatctttt

SEQ ID NO: 57283 - DNA, 20 bp, Artificial Sequence
  Description of Artificial Sequence: Synthetic oligonucleotide
  Target: LAMA2; (-) strand; PAM type: NRG; PAM sequence: GAG
taaataatgctactatgaca

SEQ ID NO: 57284 - DNA, 20 bp, Artificial Sequence
  Description of Artificial Sequence: Synthetic oligonucleotide
  Target: LAMA2; (-) strand; PAM type: NRG; PAM sequence: CAG
tgtaaataatgctactatga

SEQ ID NO: 57285 - DNA, 20 bp, Artificial Sequence
  Description of Artificial Sequence: Synthetic oligonucleotide
  Target: LAMA2; (-) strand; PAM type: NRG; PAM sequence: TGG
gccaggtttctcccaccttt

SEQ ID NO: 57286 - DNA, 20 bp, Artificial Sequence
  Description of Artificial Sequence: Synthetic oligonucleotide
  Target: LAMA2; (-) strand; PAM type: NRG; PAM sequence: AGG
ctattcgtctgtcaacagcc

SEQ ID NO: 57287 - DNA, 20 bp, Artificial Sequence
  Description of Artificial Sequence: Synthetic oligonucleotide
  Target: LAMA2; (-) strand; PAM type: NRG; PAM sequence: CAG
tctattcgtctgtcaacagc

SEQ ID NO: 57288 - DNA, 20 bp, Artificial Sequence
  Description of Artificial Sequence: Synthetic oligonucleotide
  Target: LAMA2; (-) strand; PAM type: NRG; PAM sequence: CAG
tttatctattcgtctgtcaa

SEQ ID NO: 57289 - DNA, 20 bp, Artificial Sequence
  Description of Artificial Sequence: Synthetic oligonucleotide
  Target: LAMA2; (-) strand; PAM type: NRG; PAM sequence: CGG
aatttcctctcttttacaga

SEQ ID NO: 57290 - DNA, 20 bp, Artificial Sequence
  Description of Artificial Sequence: Synthetic oligonucleotide
  Target: LAMA2; (-) strand; PAM type: NRG; PAM sequence: CAG
tcagaatttcctctctttta

SEQ ID NO: 57291 - DNA, 20 bp, Artificial Sequence
  Description of Artificial Sequence: Synthetic oligonucleotide
  Target: LAMA2; (-) strand; PAM type: NRG; PAM sequence: CAG
attcatatggtagcatgtgt

SEQ ID NO: 57292 - DNA, 20 bp, Artificial Sequence
  Description of Artificial Sequence: Synthetic oligonucleotide
  Target: LAMA2; (-) strand; PAM type: NRG; PAM sequence: TAG
ctcaaggtccattcatatgg

SEQ ID NO: 57293 - DNA, 20 bp, Artificial Sequence
  Description of Artificial Sequence: Synthetic oligonucleotide
  Target: LAMA2; (-) strand; PAM type: NRG; PAM sequence: TGG
gtcctcaaggtccattcata

SEQ ID NO: 57294 - DNA, 20 bp, Artificial Sequence
  Description of Artificial Sequence: Synthetic oligonucleotide
  Target: LAMA2; (-) strand; PAM type: NRG; PAM sequence: AGG
cacttagcagaatgtcctca

SEQ ID NO: 57295 - DNA, 20 bp, Artificial Sequence
  Description of Artificial Sequence: Synthetic oligonucleotide
  Target: LAMA2; (-) strand; PAM type: NRG; PAM sequence: AAG
tcacttagcagaatgtcctc

SEQ ID NO: 57296 - DNA, 20 bp, Artificial Sequence
  Description of Artificial Sequence: Synthetic oligonucleotide
  Target: LAMA2; (-) strand; PAM type: NRG; PAM sequence: CAG
gactggtatatttcacttag

SEQ ID NO: 57297 - DNA, 20 bp, Artificial Sequence
  Description of Artificial Sequence: Synthetic oligonucleotide
  Target: LAMA2; (-) strand; PAM type: NRG; PAM sequence: TAG
tgtgactggtatatttcact

SEQ ID NO: 57298 - DNA, 20 bp, Artificial Sequence
  Description of Artificial Sequence: Synthetic oligonucleotide
  Target: LAMA2; (-) strand; PAM type: NRG; PAM sequence: TGG
agcatttgtctttttgtgac

SEQ ID NO: 57299 - DNA, 20 bp, Artificial Sequence
  Description of Artificial Sequence: Synthetic oligonucleotide
  Target: LAMA2; (-) strand; PAM type: NRG; PAM sequence: CAG
ctaggtaagtagaatcataa

SEQ ID NO: 57300 - DNA, 20 bp, Artificial Sequence
  Description of Artificial Sequence: Synthetic oligonucleotide
  Target: LAMA2; (-) strand; PAM type: NRG; PAM sequence: TAG
ttctgactactctaggtaag

SEQ ID NO: 57301 - DNA, 20 bp, Artificial Sequence
  Description of Artificial Sequence: Synthetic oligonucleotide
  Target: LAMA2; (-) strand; PAM type: NRG; PAM sequence: AAG
tgattctgactactctaggt

SEQ ID NO: 57302 - DNA, 20 bp, Artificial Sequence
  Description of Artificial Sequence: Synthetic oligonucleotide
  Target: LAMA2; (-) strand; PAM type: NRG; PAM sequence: AGG
tctatgattctgactactct

SEQ ID NO: 57303 - DNA, 20 bp, Artificial Sequence
  Description of Artificial Sequence: Synthetic oligonucleotide
  Target: LAMA2; (-) strand; PAM type: NRG; PAM sequence: TAG
ctctatgattctgactactc

SEQ ID NO: 57304 - DNA, 20 bp, Artificial Sequence
  Description of Artificial Sequence: Synthetic oligonucleotide
  Target: LAMA2; (-) strand; PAM type: NRG; PAM sequence: TAG
tcctctctccctgcagccgc

SEQ ID NO: 57305 - DNA, 20 bp, Artificial Sequence
  Description of Artificial Sequence: Synthetic oligonucleotide
  Target: LAMA2; (-) strand; PAM type: NRG; PAM sequence: CAG
tccctattcctctctccctg

SEQ ID NO: 57306 - DNA, 20 bp, Artificial Sequence
  Description of Artificial Sequence: Synthetic oligonucleotide
  Target: LAMA2; (-) strand; PAM type: NRG; PAM sequence: CGG
catcttgcaaaactgaaact

SEQ ID NO: 57307 - DNA, 20 bp, Artificial Sequence
  Description of Artificial Sequence: Synthetic oligonucleotide
  Target: LAMA2; (-) strand; PAM type: NRG; PAM sequence: CAG
ccatcaacaccattcacatc

SEQ ID NO: 57308 - DNA, 20 bp, Artificial Sequence
  Description of Artificial Sequence: Synthetic oligonucleotide
  Target: LAMA2; (-) strand; PAM type: NRG; PAM sequence: TAG
agtatacagttcagtagtat

SEQ ID NO: 57309 - DNA, 20 bp, Artificial Sequence
  Description of Artificial Sequence: Synthetic oligonucleotide
  Target: LAMA2; (-) strand; PAM type: NRG; PAM sequence: TAG
tttttaagtatacagttcag

SEQ ID NO: 57310 - DNA, 20 bp, Artificial Sequence
  Description of Artificial Sequence: Synthetic oligonucleotide
  Target: LAMA2; (-) strand; PAM type: NRG; PAM sequence: CAG
ccatttttaagtatacagtt

SEQ ID NO: 57311 - DNA, 20 bp, Artificial Sequence
  Description of Artificial Sequence: Synthetic oligonucleotide
  Target: LAMA2; (-) strand; PAM type: NRG; PAM sequence: CAG
tgtaaccatttttaagtata

SEQ ID NO: 57312 - DNA, 20 bp, Artificial Sequence
  Description of Artificial Sequence: Synthetic oligonucleotide
  Target: LAMA2; (-) strand; PAM type: NRG; PAM sequence: AAG
tcatcattgtaaccattttt

SEQ ID NO: 57313 - DNA, 20 bp, Artificial Sequence
  Description of Artificial Sequence: Synthetic oligonucleotide
  Target: LAMA2; (-) strand; PAM type: NRG; PAM sequence: AAG
gttacttttgaattatttta

SEQ ID NO: 57314 - DNA, 20 bp, Artificial Sequence
  Description of Artificial Sequence: Synthetic oligonucleotide
  Target: LAMA2; (-) strand; PAM type: NRG; PAM sequence: AGG
tgtatagagcactgggagtg

SEQ ID NO: 57315 - DNA, 20 bp, Artificial Sequence
  Description of Artificial Sequence: Synthetic oligonucleotide
  Target: LAMA2; (-) strand; PAM type: NRG; PAM sequence: GAG
ctgtatagagcactgggagt

SEQ ID NO: 57316 - DNA, 20 bp, Artificial Sequence
  Description of Artificial Sequence: Synthetic oligonucleotide
  Target: LAMA2; (-) strand; PAM type: NRG; PAM sequence: GAG
ttctctgtatagagcactgg

SEQ ID NO: 57317 - DNA, 20 bp, Artificial Sequence
  Description of Artificial Sequence: Synthetic oligonucleotide
  Target: LAMA2; (-) strand; PAM type: NRG; PAM sequence: GGG
ttttctctgtatagagcact

SEQ ID NO: 57318 - DNA, 20 bp, Artificial Sequence
  Description of Artificial Sequence: Synthetic oligonucleotide
  Target: LAMA2; (-) strand; PAM type: NRG; PAM sequence: TGG
gttttctctgtatagagcac

SEQ ID NO: 57319 - DNA, 20 bp, Artificial Sequence
  Description of Artificial Sequence: Synthetic oligonucleotide
  Target: LAMA2; (-) strand; PAM type: NRG; PAM sequence: GAG
acattggttttctctgtata

SEQ ID NO: 57320 - DNA, 20 bp, Artificial Sequence
  Description of Artificial Sequence: Synthetic oligonucleotide
  Target: LAMA2; (-) strand; PAM type: NRG; PAM sequence: TAG
agacattggttttctctgta

SEQ ID NO: 57321 - DNA, 20 bp, Artificial Sequence
  Description of Artificial Sequence: Synthetic oligonucleotide
  Target: LAMA2; (-) strand; PAM type: NRG; PAM sequence: TGG
gaactaaagaataaagacat

SEQ ID NO: 57322 - DNA, 20 bp, Artificial Sequence
  Description of Artificial Sequence: Synthetic oligonucleotide
  Target: LAMA2; (-) strand; PAM type: NRG; PAM sequence: AAG
aaacgcagaactaaagaata

SEQ ID NO: 57323 - DNA, 20 bp, Artificial Sequence
  Description of Artificial Sequence: Synthetic oligonucleotide
  Target: LAMA2; (-) strand; PAM type: NRG; PAM sequence: AAG
tctatgtaaacgcagaacta

SEQ ID NO: 57324 - DNA, 20 bp, Artificial Sequence
  Description of Artificial Sequence: Synthetic oligonucleotide
  Target: LAMA2; (-) strand; PAM type: NRG; PAM sequence: CAG
aatttgtgtctatgtaaacg

SEQ ID NO: 57325 - DNA, 20 bp, Artificial Sequence
  Description of Artificial Sequence: Synthetic oligonucleotide
  Target: LAMA2; (-) strand; PAM type: NRG; PAM sequence: GAG
taaaccatatattgctatgt

SEQ ID NO: 57326 - DNA, 20 bp, Artificial Sequence
  Description of Artificial Sequence: Synthetic oligonucleotide
  Target: LAMA2; (-) strand; PAM type: NRG; PAM sequence: AAG
tgtgaaaaaaaaatgaatca

SEQ ID NO: 57327 - DNA, 20 bp, Artificial Sequence
  Description of Artificial Sequence: Synthetic oligonucleotide
  Target: LAMA2; (-) strand; PAM type: NRG; PAM sequence: TAG
gaacaagatatgcattaaga

SEQ ID NO: 57328 - DNA, 20 bp, Artificial Sequence
  Description of Artificial Sequence: Synthetic oligonucleotide
  Target: LAMA2; (-) strand; PAM type: NRG; PAM sequence: AAG
tgcagaacaagatatgcatt

SEQ ID NO: 57329 - DNA, 20 bp, Artificial Sequence
  Description of Artificial Sequence: Synthetic oligonucleotide
  Target: LAMA2; (-) strand; PAM type: NRG; PAM sequence: AAG
cattgttgaacatgcagaac

SEQ ID NO: 57330 - DNA, 20 bp, Artificial Sequence
  Description of Artificial Sequence: Synthetic oligonucleotide
  Target: LAMA2; (-) strand; PAM type: NRG; PAM sequence: CAG
ctgagacattgttgaacatg

SEQ ID NO: 57331 - DNA, 20 bp, Artificial Sequence
  Description of Artificial Sequence: Synthetic oligonucleotide
  Target: LAMA2; (-) strand; PAM type: NRG; PAM sequence: GAG
ccgtttctcatggcaagact

SEQ ID NO: 57332 - DNA, 20 bp, Artificial Sequence
  Description of Artificial Sequence: Synthetic oligonucleotide
  Target: LAMA2; (-) strand; PAM type: NRG; PAM sequence: AAG
cctgctccgtttctcatggc

SEQ ID NO: 57333 - DNA, 20 bp, Artificial Sequence
  Description of Artificial Sequence: Synthetic oligonucleotide
  Target: LAMA2; (-) strand; PAM type: NRG; PAM sequence: TGG
tttccctgctccgtttctca

SEQ ID NO: 57334 - DNA, 20 bp, Artificial Sequence
  Description of Artificial Sequence: Synthetic oligonucleotide
  Target: LAMA2; (-) strand; PAM type: NRG; PAM sequence: AAG
ctattcagtttaggcccagg

SEQ ID NO: 57335 - DNA, 20 bp, Artificial Sequence
  Description of Artificial Sequence: Synthetic oligonucleotide
  Target: LAMA2; (-) strand; PAM type: NRG; PAM sequence: AGG
ggcctattcagtttaggccc

SEQ ID NO: 57336 - DNA, 20 bp, Artificial Sequence
  Description of Artificial Sequence: Synthetic oligonucleotide
  Target: LAMA2; (-) strand; PAM type: NRG; PAM sequence: CAG
tggcctattcagtttaggcc

SEQ ID NO: 57337 - DNA, 20 bp, Artificial Sequence
  Description of Artificial Sequence: Synthetic oligonucleotide
  Target: LAMA2; (-) strand; PAM type: NRG; PAM sequence: AGG
taaaatggcctattcagttt

SEQ ID NO: 57338 - DNA, 20 bp, Artificial Sequence
  Description of Artificial Sequence: Synthetic oligonucleotide
  Target: LAMA2; (-) strand; PAM type: NRG; PAM sequence: TAG
ataaaatggcctattcagtt

SEQ ID NO: 57339 - DNA, 20 bp, Artificial Sequence
  Description of Artificial Sequence: Synthetic oligonucleotide
  Target: LAMA2; (-) strand; PAM type: NRG; PAM sequence: CAG
agagaataaaatggcctatt

SEQ ID NO: 57340 - DNA, 20 bp, Artificial Sequence
  Description of Artificial Sequence: Synthetic oligonucleotide
  Target: LAMA2; (-) strand; PAM type: NRG; PAM sequence: TGG
tggcagagaagagaataaaa

SEQ ID NO: 57341 - DNA, 20 bp, Artificial Sequence
  Description of Artificial Sequence: Synthetic oligonucleotide
  Target: LAMA2; (-) strand; PAM type: NRG; PAM sequence: GAG
acaaagaatgtggcagagaa

SEQ ID NO: 57342 - DNA, 20 bp, Artificial Sequence
  Description of Artificial Sequence: Synthetic oligonucleotide
  Target: LAMA2; (-) strand; PAM type: NRG; PAM sequence: AAG
ccacaaagaatgtggcagag

SEQ ID NO: 57343 - DNA, 20 bp, Artificial Sequence
  Description of Artificial Sequence: Synthetic oligonucleotide
  Target: LAMA2; (-) strand; PAM type: NRG; PAM sequence: GAG
gaaccacaaagaatgtggca

SEQ ID NO: 57344 - DNA, 20 bp, Artificial Sequence
  Description of Artificial Sequence: Synthetic oligonucleotide
  Target: LAMA2; (-) strand; PAM type: NRG; PAM sequence: CAG
cagaaccacaaagaatgtgg

SEQ ID NO: 57345 - DNA, 20 bp, Artificial Sequence
  Description of Artificial Sequence: Synthetic oligonucleotide
  Target: LAMA2; (-) strand; PAM type: NRG; PAM sequence: TGG
agacagaaccacaaagaatg

SEQ ID NO: 57346 - DNA, 20 bp, Artificial Sequence
  Description of Artificial Sequence: Synthetic oligonucleotide
  Target: LAMA2; (-) strand; PAM type: NRG; PAM sequence: AAG
ccagtggagacagaaccaca

SEQ ID NO: 57347 - DNA, 20 bp, Artificial Sequence
  Description of Artificial Sequence: Synthetic oligonucleotide
  Target: LAMA2; (-) strand; PAM type: NRG; PAM sequence: CAG
gagtcccagtccagtggaga

SEQ ID NO: 57348 - DNA, 20 bp, Artificial Sequence
  Description of Artificial Sequence: Synthetic oligonucleotide
  Target: LAMA2; (-) strand; PAM type: NRG; PAM sequence: GAG
tggagagtcccagtccagtg

SEQ ID NO: 57349 - DNA, 20 bp, Artificial Sequence
  Description of Artificial Sequence: Synthetic oligonucleotide
  Target: LAMA2; (-) strand; PAM type: NRG; PAM sequence: TGG
aatggagagtcccagtccag

SEQ ID NO: 57350 - DNA, 20 bp, Artificial Sequence
  Description of Artificial Sequence: Synthetic oligonucleotide
  Target: LAMA2; (-) strand; PAM type: NRG; PAM sequence: CAG
accaatggagagtcccagtc

SEQ ID NO: 57351 - DNA, 20 bp, Artificial Sequence
  Description of Artificial Sequence: Synthetic oligonucleotide
  Target: LAMA2; (-) strand; PAM type: NRG; PAM sequence: CAG
aaaggaccaatggagagtcc

SEQ ID NO: 57352 - DNA, 20 bp, Artificial Sequence
  Description of Artificial Sequence: Synthetic oligonucleotide
  Target: LAMA2; (-) strand; PAM type: NRG; PAM sequence: GAG
attggtaaaggaccaatgga

SEQ ID NO: 57353 - DNA, 20 bp, Artificial Sequence
  Description of Artificial Sequence: Synthetic oligonucleotide
  Target: LAMA2; (-) strand; PAM type: NRG; PAM sequence: GAG
tcattggtaaaggaccaatg

SEQ ID NO: 57354 - DNA, 20 bp, Artificial Sequence
  Description of Artificial Sequence: Synthetic oligonucleotide
  Target: LAMA2; (-) strand; PAM type: NRG; PAM sequence: TGG
gctcattggtaaaggaccaa

SEQ ID NO: 57355 - DNA, 20 bp, Artificial Sequence
  Description of Artificial Sequence: Synthetic oligonucleotide
  Target: LAMA2; (-) strand; PAM type: NRG; PAM sequence: AGG
atagaatggctcattggtaa

SEQ ID NO: 57356 - DNA, 20 bp, Artificial Sequence
  Description of Artificial Sequence: Synthetic oligonucleotide
  Target: LAMA2; (-) strand; PAM type: NRG; PAM sequence: AAG
aatagaatggctcattggta

SEQ ID NO: 57357 - DNA, 20 bp, Artificial Sequence
  Description of Artificial Sequence: Synthetic oligonucleotide
  Target: LAMA2; (-) strand; PAM type: NRG; PAM sequence: TGG
atgagaatagaatggctcat

SEQ ID NO: 57358 - DNA, 20 bp, Artificial Sequence
  Description of Artificial Sequence: Synthetic oligonucleotide
  Target: LAMA2; (-) strand; PAM type: NRG; PAM sequence: TGG
aatatttcatgagaatagaa

SEQ ID NO: 57359 - DNA, 20 bp, Artificial Sequence
  Description of Artificial Sequence: Synthetic oligonucleotide
  Target: LAMA2; (-) strand; PAM type: NRG; PAM sequence: TAG
tcatgaatatttcatgagaa

SEQ ID NO: 57360 - DNA, 20 bp, Artificial Sequence
  Description of Artificial Sequence: Synthetic oligonucleotide
  Target: LAMA2; (-) strand; PAM type: NRG; PAM sequence: GAG
cattctcatgaatatttcat

SEQ ID NO: 57361 - DNA, 20 bp, Artificial Sequence
  Description of Artificial Sequence: Synthetic oligonucleotide
  Target: LAMA2; (-) strand; PAM type: NRG; PAM sequence: TGG
atatgtagaaatcctagatc

SEQ ID NO: 57362 - DNA, 20 bp, Artificial Sequence
  Description of Artificial Sequence: Synthetic oligonucleotide
  Target: LAMA2; (-) strand; PAM type: NRG; PAM sequence: TAG
gaagtaatatgtagaaatcc

SEQ ID NO: 57363 - DNA, 20 bp, Artificial Sequence
  Description of Artificial Sequence: Synthetic oligonucleotide
  Target: LAMA2; (-) strand; PAM type: NRG; PAM sequence: TAG
gaaatgttagaagtaatatg

SEQ ID NO: 57364 - DNA, 20 bp, Artificial Sequence
  Description of Artificial Sequence: Synthetic oligonucleotide
  Target: LAMA2; (-) strand; PAM type: NRG; PAM sequence: AAG
aagaaatatggaaatgttag

SEQ ID NO: 57365 - DNA, 20 bp, Artificial Sequence
  Description of Artificial Sequence: Synthetic oligonucleotide
  Target: LAMA2; (-) strand; PAM type: NRG; PAM sequence: TAG
gcaaagaaatatggaaatgt

SEQ ID NO: 57366 - DNA, 20 bp, Artificial Sequence
  Description of Artificial Sequence: Synthetic oligonucleotide
  Target: LAMA2; (-) strand; PAM type: NRG; PAM sequence: TGG
aaattttaggcaaagaaata

SEQ ID NO: 57367 - DNA, 20 bp, Artificial Sequence
  Description of Artificial Sequence: Synthetic oligonucleotide
  Target: LAMA2; (-) strand; PAM type: NRG; PAM sequence: AAG
agaatggaaaattttaggca

SEQ ID NO: 57368 - DNA, 20 bp, Artificial Sequence
  Description of Artificial Sequence: Synthetic oligonucleotide
  Target: LAMA2; (-) strand; PAM type: NRG; PAM sequence: AGG
caaatagaatggaaaatttt

SEQ ID NO: 57369 - DNA, 20 bp, Artificial Sequence
  Description of Artificial Sequence: Synthetic oligonucleotide
  Target: LAMA2; (-) strand; PAM type: NRG; PAM sequence: TAG
tcaaatagaatggaaaattt

SEQ ID NO: 57370 - DNA, 20 bp, Artificial Sequence
  Description of Artificial Sequence: Synthetic oligonucleotide
  Target: LAMA2; (-) strand; PAM type: NRG; PAM sequence: TGG
cacacaactttcaaatagaa

SEQ ID NO: 57371 - DNA, 20 bp, Artificial Sequence
  Description of Artificial Sequence: Synthetic oligonucleotide
  Target: LAMA2; (-) strand; PAM type: NRG; PAM sequence: TAG
aaaggcacacaactttcaaa

SEQ ID NO: 57372 - DNA, 20 bp, Artificial Sequence
  Description of Artificial Sequence: Synthetic oligonucleotide
  Target: LAMA2; (-) strand; PAM type: NRG; PAM sequence: AGG
gataaaaagaaaaagaaaaa

SEQ ID NO: 57373 - DNA, 20 bp, Artificial Sequence
  Description of Artificial Sequence: Synthetic oligonucleotide
  Target: LAMA2; (-) strand; PAM type: NRG; PAM sequence: AAG
tgataaaaagaaaaagaaaa

SEQ ID NO: 57374 - DNA, 20 bp, Artificial Sequence
  Description of Artificial Sequence: Synthetic oligonucleotide
  Target: LAMA2; (-) strand; PAM type: NRG; PAM sequence: AAG
atgtaggtgataaaaagaaa

SEQ ID NO: 57375 - DNA, 20 bp, Artificial Sequence
  Description of Artificial Sequence: Synthetic oligonucleotide
  Target: LAMA2; (-) strand; PAM type: NRG; PAM sequence: AAG
ctccccatgtaggtgataaa

SEQ ID NO: 57376 - DNA, 20 bp, Artificial Sequence
  Description of Artificial Sequence: Synthetic oligonucleotide
  Target: LAMA2; (-) strand; PAM type: NRG; PAM sequence: AGG
aacactctacctccccatgt

SEQ ID NO: 57377 - DNA, 20 bp, Artificial Sequence
  Description of Artificial Sequence: Synthetic oligonucleotide
  Target: LAMA2; (-) strand; PAM type: NRG; PAM sequence: TAG
caacactctacctccccatg

SEQ ID NO: 57378 - DNA, 20 bp, Artificial Sequence
  Description of Artificial Sequence: Synthetic oligonucleotide
  Target: LAMA2; (-) strand; PAM type: NRG; PAM sequence: AAG
agatgcaatttcacctttga

SEQ ID NO: 57379 - DNA, 20 bp, Artificial Sequence
  Description of Artificial Sequence: Synthetic oligonucleotide
  Target: LAMA2; (-) strand; PAM type: NRG; PAM sequence: AAG
agaaaactcagagttgtgga

SEQ ID NO: 57380 - DNA, 20 bp, Artificial Sequence
  Description of Artificial Sequence: Synthetic oligonucleotide
  Target: LAMA2; (-) strand; PAM type: NRG; PAM sequence: TGG
actcagaaaactcagagttg

SEQ ID NO: 57381 - DNA, 20 bp, Artificial Sequence
  Description of Artificial Sequence: Synthetic oligonucleotide
  Target: LAMA2; (-) strand; PAM type: NRG; PAM sequence: GAG
ctcaaaactcagaaaactca

SEQ ID NO: 57382 - DNA, 20 bp, Artificial Sequence
  Description of Artificial Sequence: Synthetic oligonucleotide
  Target: LAMA2; (-) strand; PAM type: NRG; PAM sequence: CAG
gactcaaaactcagaaaact

SEQ ID NO: 57383 - DNA, 20 bp, Artificial Sequence
  Description of Artificial Sequence: Synthetic oligonucleotide
  Target: LAMA2; (-) strand; PAM type: NRG; PAM sequence: CAG
tcaagaacagactcaaaact

SEQ ID NO: 57384 - DNA, 20 bp, Artificial Sequence
  Description of Artificial Sequence: Synthetic oligonucleotide
  Target: LAMA2; (-) strand; PAM type: NRG; PAM sequence: CAG
tttttaaaagaagtcaagaa

SEQ ID NO: 57385 - DNA, 20 bp, Artificial Sequence
  Description of Artificial Sequence: Synthetic oligonucleotide
  Target: LAMA2; (-) strand; PAM type: NRG; PAM sequence: AAG
gtttttttttaaaagaagtc

SEQ ID NO: 57386 - DNA, 20 bp, Artificial Sequence
  Description of Artificial Sequence: Synthetic oligonucleotide
  Target: LAMA2; (-) strand; PAM type: NRG; PAM sequence: AAG
aaagagtttttttttaaaag

SEQ ID NO: 57387 - DNA, 20 bp, Artificial Sequence
  Description of Artificial Sequence: Synthetic oligonucleotide
  Target: LAMA2; (-) strand; PAM type: NRG; PAM sequence: AAG
accaaagagtttttttttaa

SEQ ID NO: 57388 - DNA, 20 bp, Artificial Sequence
  Description of Artificial Sequence: Synthetic oligonucleotide
  Target: LAMA2; (-) strand; PAM type: NRG; PAM sequence: GAG
ctattgccaccatgaccaaa

SEQ ID NO: 57389 - DNA, 20 bp, Artificial Sequence
  Description of Artificial Sequence: Synthetic oligonucleotide
  Target: LAMA2; (-) strand; PAM type: NRG; PAM sequence: AAG
ctctattgccaccatgacca

SEQ ID NO: 57390 - DNA, 20 bp, Artificial Sequence
  Description of Artificial Sequence: Synthetic oligonucleotide
  Target: LAMA2; (-) strand; PAM type: NRG; PAM sequence: TGG
gaggcctaaacgagaggagt

SEQ ID NO: 57391 - DNA, 20 bp, Artificial Sequence
  Description of Artificial Sequence: Synthetic oligonucleotide
  Target: LAMA2; (-) strand; PAM type: NRG; PAM sequence: GAG
aacagaggcctaaacgagag

SEQ ID NO: 57392 - DNA, 20 bp, Artificial Sequence
  Description of Artificial Sequence: Synthetic oligonucleotide
  Target: LAMA2; (-) strand; PAM type: NRG; PAM sequence: AGG
agaacagaggcctaaacgag

SEQ ID NO: 57393 - DNA, 20 bp, Artificial Sequence
  Description of Artificial Sequence: Synthetic oligonucleotide
  Target: LAMA2; (-) strand; PAM type: NRG; PAM sequence: GAG
aagaacagaggcctaaacga

SEQ ID NO: 57394 - DNA, 20 bp, Artificial Sequence
  Description of Artificial Sequence: Synthetic oligonucleotide
  Target: LAMA2; (-) strand; PAM type: NRG; PAM sequence: GAG
taaagaacagaggcctaaac

SEQ ID NO: 57395 - DNA, 20 bp, Artificial Sequence
  Description of Artificial Sequence: Synthetic oligonucleotide
  Target: LAMA2; (-) strand; PAM type: NRG; PAM sequence: AGG
tgaccatatctaaagaacag

SEQ ID NO: 57396 - DNA, 20 bp, Artificial Sequence
  Description of Artificial Sequence: Synthetic oligonucleotide
  Target: LAMA2; (-) strand; PAM type: NRG; PAM sequence: GAG
atgaccatatctaaagaaca

SEQ ID NO: 57397 - DNA, 20 bp, Artificial Sequence
  Description of Artificial Sequence: Synthetic oligonucleotide
  Target: LAMA2; (-) strand; PAM type: NRG; PAM sequence: CAG
aaatgaccatatctaaagaa

SEQ ID NO: 57398 - DNA, 20 bp, Artificial Sequence
  Description of Artificial Sequence: Synthetic oligonucleotide
  Target: LAMA2; (-) strand; PAM type: NRG; PAM sequence: AAG
cggtaaaatgaccatatcta

SEQ ID NO: 57399 - DNA, 20 bp, Artificial Sequence
  Description of Artificial Sequence: Synthetic oligonucleotide
  Target: LAMA2; (-) strand; PAM type: NRG; PAM sequence: CGG
atatgttctgatccttgaag

SEQ ID NO: 57400 - DNA, 20 bp, Artificial Sequence
  Description of Artificial Sequence: Synthetic oligonucleotide
  Target: LAMA2; (-) strand; PAM type: NRG; PAM sequence: AAG
atgatatgttctgatccttg

SEQ ID NO: 57401 - DNA, 20 bp, Artificial Sequence
  Description of Artificial Sequence: Synthetic oligonucleotide
  Target: LAMA2; (-) strand; PAM type: NRG; PAM sequence: GGG
cctctggggattataaattt

SEQ ID NO: 57402 - DNA, 20 bp, Artificial Sequence
  Description of Artificial Sequence: Synthetic oligonucleotide
  Target: LAMA2; (-) strand; PAM type: NRG; PAM sequence: TGG
acctctggggattataaatt

SEQ ID NO: 57403 - DNA, 20 bp, Artificial Sequence
  Description of Artificial Sequence: Synthetic oligonucleotide
  Target: LAMA2; (-) strand; PAM type: NRG; PAM sequence: GGG
acatatctgagttacctctg

SEQ ID NO: 57404 - DNA, 20 bp, Artificial Sequence
  Description of Artificial Sequence: Synthetic oligonucleotide
  Target: LAMA2; (-) strand; PAM type: NRG; PAM sequence: GGG
tacatatctgagttacctct

SEQ ID NO: 57405 - DNA, 20 bp, Artificial Sequence
  Description of Artificial Sequence: Synthetic oligonucleotide
  Target: LAMA2; (-) strand; PAM type: NRG; PAM sequence: TGG
atacatatctgagttacctc

SEQ ID NO: 57406 - DNA, 20 bp, Artificial Sequence
  Description of Artificial Sequence: Synthetic oligonucleotide
  Target: LAMA2; (-) strand; PAM type: NRG; PAM sequence: GAG
ttaaagaattatacatatct

SEQ ID NO: 57407 - DNA, 20 bp, Artificial Sequence
  Description of Artificial Sequence: Synthetic oligonucleotide
  Target: LAMA2; (-) strand; PAM type: NRG; PAM sequence: AAG
aacaaatcagattgttatta

SEQ ID NO: 57408 - DNA, 20 bp, Artificial Sequence
  Description of Artificial Sequence: Synthetic oligonucleotide
  Target: LAMA2; (-) strand; PAM type: NRG; PAM sequence: CAG
tttaaatattgagaacaaat

SEQ ID NO: 57409 - DNA, 20 bp, Artificial Sequence
  Description of Artificial Sequence: Synthetic oligonucleotide
  Target: LAMA2; (-) strand; PAM type: NRG; PAM sequence: GAG
ttgggttcactttaaatatt

SEQ ID NO: 57410 - DNA, 20 bp, Artificial Sequence
  Description of Artificial Sequence: Synthetic oligonucleotide
  Target: LAMA2; (-) strand; PAM type: NRG; PAM sequence: GGG
cctttccaactcttcatctt

SEQ ID NO: 57411 - DNA, 20 bp, Artificial Sequence
  Description of Artificial Sequence: Synthetic oligonucleotide
  Target: LAMA2; (-) strand; PAM type: NRG; PAM sequence: TGG
tcctttccaactcttcatct

SEQ ID NO: 57412 - DNA, 20 bp, Artificial Sequence
  Description of Artificial Sequence: Synthetic oligonucleotide
  Target: LAMA2; (-) strand; PAM type: NRG; PAM sequence: GAG
gagagcctactaaagcatta

SEQ ID NO: 57413 - DNA, 20 bp, Artificial Sequence
  Description of Artificial Sequence: Synthetic oligonucleotide
  Target: LAMA2; (-) strand; PAM type: NRG; PAM sequence: TAG
ttgagagcctactaaagcat

SEQ ID NO: 57414 - DNA, 20 bp, Artificial Sequence
  Description of Artificial Sequence: Synthetic oligonucleotide
  Target: LAMA2; (-) strand; PAM type: NRG; PAM sequence: AAG
agcagtttgagagcctacta

SEQ ID NO: 57415 - DNA, 20 bp, Artificial Sequence
  Description of Artificial Sequence: Synthetic oligonucleotide
  Target: LAMA2; (-) strand; PAM type: NRG; PAM sequence: GAG
ttgagctgtcagcagtttga

SEQ ID NO: 57416 - DNA, 20 bp, Artificial Sequence
  Description of Artificial Sequence: Synthetic oligonucleotide
  Target: LAMA2; (-) strand; PAM type: NRG; PAM sequence: GAG
acttgagctgtcagcagttt

SEQ ID NO: 57417 - DNA, 20 bp, Artificial Sequence
  Description of Artificial Sequence: Synthetic oligonucleotide
  Target: LAMA2; (-) strand; PAM type: NRG; PAM sequence: CAG
cagaacacttgagctgtcag

SEQ ID NO: 57418 - DNA, 20 bp, Artificial Sequence
  Description of Artificial Sequence: Synthetic oligonucleotide
  Target: LAMA2; (-) strand; PAM type: NRG; PAM sequence: CAG
agacagaacacttgagctgt

SEQ ID NO: 57419 - DNA, 20 bp, Artificial Sequence
  Description of Artificial Sequence: Synthetic oligonucleotide
  Target: LAMA2; (-) strand; PAM type: NRG; PAM sequence: GAG
gccaaagagacagaacactt

SEQ ID NO: 57420 - DNA, 20 bp, Artificial Sequence
  Description of Artificial Sequence: Synthetic oligonucleotide
  Target: LAMA2; (-) strand; PAM type: NRG; PAM sequence: CAG
tttatatgttgccaaagaga

SEQ ID NO: 57421 - DNA, 20 bp, Artificial Sequence
  Description of Artificial Sequence: Synthetic oligonucleotide
  Target: LAMA2; (-) strand; PAM type: NRG; PAM sequence: GAG
gatttttatatgttgccaaa

SEQ ID NO: 57422 - DNA, 20 bp, Artificial Sequence
  Description of Artificial Sequence: Synthetic oligonucleotide
  Target: LAMA2; (-) strand; PAM type: NRG; PAM sequence: AAG
tggatttttatatgttgcca

SEQ ID NO: 57423 - DNA, 20 bp, Artificial Sequence
  Description of Artificial Sequence: Synthetic oligonucleotide
  Target: LAMA2; (-) strand; PAM type: NRG; PAM sequence: TGG
ggaatatttaactgttattc

SEQ ID NO: 57424 - DNA, 20 bp, Artificial Sequence
  Description of Artificial Sequence: Synthetic oligonucleotide
  Target: LAMA2; (-) strand; PAM type: NRG; PAM sequence: TGG
tattaaataatagttagctg

SEQ ID NO: 57425 - DNA, 20 bp, Artificial Sequence
  Description of Artificial Sequence: Synthetic oligonucleotide
  Target: LAMA2; (-) strand; PAM type: NRG; PAM sequence: TAG
tattagtattaaataatagt

SEQ ID NO: 57426 - DNA, 20 bp, Artificial Sequence
  Description of Artificial Sequence: Synthetic oligonucleotide
  Target: LAMA2; (-) strand; PAM type: NRG; PAM sequence: TAG
ataatattagtattaaataa

SEQ ID NO: 57427 - DNA, 20 bp, Artificial Sequence
  Description of Artificial Sequence: Synthetic oligonucleotide
  Target: LAMA2; (-) strand; PAM type: NRG; PAM sequence: TAG
cattaaccaagacataatat

SEQ ID NO: 57428 - DNA, 20 bp, Artificial Sequence
  Description of Artificial Sequence: Synthetic oligonucleotide
  Target: LAMA2; (-) strand; PAM type: NRG; PAM sequence: AAG
tatggtgtcttccattaacc

SEQ ID NO: 57429 - DNA, 20 bp, Artificial Sequence
  Description of Artificial Sequence: Synthetic oligonucleotide
  Target: LAMA2; (-) strand; PAM type: NRG; PAM sequence: TGG
aatattcaaaatgtggtcta

SEQ ID NO: 57430 - DNA, 20 bp, Artificial Sequence
  Description of Artificial Sequence: Synthetic oligonucleotide
  Target: LAMA2; (-) strand; PAM type: NRG; PAM sequence: TGG
gagcacaaatattcaaaatg

SEQ ID NO: 57431 - DNA, 20 bp, Artificial Sequence
  Description of Artificial Sequence: Synthetic oligonucleotide
  Target: LAMA2; (-) strand; PAM type: NRG; PAM sequence: GAG
ggattaccaatattaaaaag

SEQ ID NO: 57432 - DNA, 20 bp, Artificial Sequence
  Description of Artificial Sequence: Synthetic oligonucleotide
  Target: LAMA2; (-) strand; PAM type: NRG; PAM sequence: AGG
gaggattaccaatattaaaa

SEQ ID NO: 57433 - DNA, 20 bp, Artificial Sequence
  Description of Artificial Sequence: Synthetic oligonucleotide
  Target: LAMA2; (-) strand; PAM type: NRG; PAM sequence: AAG
ggaggattaccaatattaaa

SEQ ID NO: 57434 - DNA, 20 bp, Artificial Sequence
  Description of Artificial Sequence: Synthetic oligonucleotide
  Target: LAMA2; (-) strand; PAM type: NRG; PAM sequence: AGG
cctgaatttatctcagaagg

SEQ ID NO: 57435 - DNA, 20 bp, Artificial Sequence
  Description of Artificial Sequence: Synthetic oligonucleotide
  Target: LAMA2; (-) strand; PAM type: NRG; PAM sequence: GAG
tcctgaatttatctcagaag

SEQ ID NO: 57436 - DNA, 20 bp, Artificial Sequence
  Description of Artificial Sequence: Synthetic oligonucleotide
  Target: LAMA2; (-) strand; PAM type: NRG; PAM sequence: AGG
tttcctgaatttatctcaga

SEQ ID NO: 57437 - DNA, 20 bp, Artificial Sequence
  Description of Artificial Sequence: Synthetic oligonucleotide
  Target: LAMA2; (-) strand; PAM type: NRG; PAM sequence: AAG
atttcctgaatttatctcag

SEQ ID NO: 57438 - DNA, 20 bp, Artificial Sequence
  Description of Artificial Sequence: Synthetic oligonucleotide
  Target: LAMA2; (-) strand; PAM type: NRG; PAM sequence: CAG
cagatttcctgaatttatct

SEQ ID NO: 57439 - DNA, 20 bp, Artificial Sequence
  Description of Artificial Sequence: Synthetic oligonucleotide
  Target: LAMA2; (-) strand; PAM type: NRG; PAM sequence: CAG
aaagggctgaggagaaaggt

SEQ ID NO: 57440 - DNA, 20 bp, Artificial Sequence
  Description of Artificial Sequence: Synthetic oligonucleotide
  Target: LAMA2; (-) strand; PAM type: NRG; PAM sequence: AGG
ttcaaaagggctgaggagaa

SEQ ID NO: 57441 - DNA, 20 bp, Artificial Sequence
  Description of Artificial Sequence: Synthetic oligonucleotide
  Target: LAMA2; (-) strand; PAM type: NRG; PAM sequence: AAG
tttcaaaagggctgaggaga

SEQ ID NO: 57442 - DNA, 20 bp, Artificial Sequence
  Description of Artificial Sequence: Synthetic oligonucleotide
  Target: LAMA2; (-) strand; PAM type: NRG; PAM sequence: GAG
tttatttcaaaagggctgag

SEQ ID NO: 57443 - DNA, 20 bp, Artificial Sequence
  Description of Artificial Sequence: Synthetic oligonucleotide
  Target: LAMA2; (-) strand; PAM type: NRG; PAM sequence: AGG
tctttatttcaaaagggctg

SEQ ID NO: 57444 - DNA, 20 bp, Artificial Sequence
  Description of Artificial Sequence: Synthetic oligonucleotide
  Target: LAMA2; (-) strand; PAM type: NRG; PAM sequence: GAG
gtctttatttcaaaagggct

SEQ ID NO: 57445 - DNA, 20 bp, Artificial Sequence
  Description of Artificial Sequence: Synthetic oligonucleotide
  Target: LAMA2; (-) strand; PAM type: NRG; PAM sequence: GGG
aagtggtctttatttcaaaa

SEQ ID NO: 57446 - DNA, 20 bp, Artificial Sequence
  Description of Artificial Sequence: Synthetic oligonucleotide
  Target: LAMA2; (-) strand; PAM type: NRG; PAM sequence: AGG
aaagtggtctttatttcaaa

SEQ ID NO: 57447 - DNA, 20 bp, Artificial Sequence
  Description of Artificial Sequence: Synthetic oligonucleotide
  Target: LAMA2; (-) strand; PAM type: NRG; PAM sequence: AAG
aaaagtggtctttatttcaa

SEQ ID NO: 57448 - DNA, 20 bp, Artificial Sequence
  Description of Artificial Sequence: Synthetic oligonucleotide
  Target: LAMA2; (-) strand; PAM type: NRG; PAM sequence: TGG
gatattcctaattggaaaag

SEQ ID NO: 57449 - DNA, 20 bp, Artificial Sequence
  Description of Artificial Sequence: Synthetic oligonucleotide
  Target: LAMA2; (-) strand; PAM type: NRG; PAM sequence: AAG
ttagatattcctaattggaa

SEQ ID NO: 57450 - DNA, 20 bp, Artificial Sequence
  Description of Artificial Sequence: Synthetic oligonucleotide
  Target: LAMA2; (-) strand; PAM type: NRG; PAM sequence: TGG
ctacattagatattcctaat

SEQ ID NO: 57451 - DNA, 20 bp, Artificial Sequence
  Description of Artificial Sequence: Synthetic oligonucleotide
  Target: LAMA2; (-) strand; PAM type: NRG; PAM sequence: TAG
tctgagctttaacactacat

SEQ ID NO: 57452 - DNA, 20 bp, Artificial Sequence
  Description of Artificial Sequence: Synthetic oligonucleotide
  Target: LAMA2; (-) strand; PAM type: NRG; PAM sequence: GAG
taaaacatcttttcaactct

SEQ ID NO: 57453 - DNA, 20 bp, Artificial Sequence
  Description of Artificial Sequence: Synthetic oligonucleotide
  Target: LAMA2; (-) strand; PAM type: NRG; PAM sequence: TGG
ttagcagagctgaagtgtac

SEQ ID NO: 57454 - DNA, 20 bp, Artificial Sequence
  Description of Artificial Sequence: Synthetic oligonucleotide
  Target: LAMA2; (-) strand; PAM type: NRG; PAM sequence: AAG
catctttgttagcagagctg

SEQ ID NO: 57455 - DNA, 20 bp, Artificial Sequence
  Description of Artificial Sequence: Synthetic oligonucleotide
  Target: LAMA2; (-) strand; PAM type: NRG; PAM sequence: GAG
ctatttcatctttgttagca

SEQ ID NO: 57456 - DNA, 20 bp, Artificial Sequence
  Description of Artificial Sequence: Synthetic oligonucleotide
  Target: LAMA2; (-) strand; PAM type: NRG; PAM sequence: CAG
ctctatttcatctttgttag

SEQ ID NO: 57457 - DNA, 20 bp, Artificial Sequence
  Description of Artificial Sequence: Synthetic oligonucleotide
  Target: LAMA2; (-) strand; PAM type: NRG; PAM sequence: TAG
attctctatttcatctttgt

SEQ ID NO: 57458 - DNA, 20 bp, Artificial Sequence
  Description of Artificial Sequence: Synthetic oligonucleotide
  Target: LAMA2; (-) strand; PAM type: NRG; PAM sequence: CAG
atgtcaaccttaataagatt

SEQ ID NO: 57459 - DNA, 20 bp, Artificial Sequence
  Description of Artificial Sequence: Synthetic oligonucleotide
  Target: LAMA2; (-) strand; PAM type: NRG; PAM sequence: AAG
aactggatgtcaaccttaat

SEQ ID NO: 57460 - DNA, 20 bp, Artificial Sequence
  Description of Artificial Sequence: Synthetic oligonucleotide
  Target: LAMA2; (-) strand; PAM type: NRG; PAM sequence: TGG
gaggatgaatgtattcaaac

SEQ ID NO: 57461 - DNA, 20 bp, Artificial Sequence
  Description of Artificial Sequence: Synthetic oligonucleotide
  Target: LAMA2; (-) strand; PAM type: NRG; PAM sequence: AGG
tacccaaaactataccttag

SEQ ID NO: 57462 - DNA, 20 bp, Artificial Sequence
  Description of Artificial Sequence: Synthetic oligonucleotide
  Target: LAMA2; (-) strand; PAM type: NRG; PAM sequence: GAG
atacccaaaactatacctta

SEQ ID NO: 57463 - DNA, 20 bp, Artificial Sequence
  Description of Artificial Sequence: Synthetic oligonucleotide
  Target: LAMA2; (-) strand; PAM type: NRG; PAM sequence: TAG
ttatacccaaaactatacct

SEQ ID NO: 57464 - DNA, 20 bp, Artificial Sequence
  Description of Artificial Sequence: Synthetic oligonucleotide
  Target: LAMA2; (-) strand; PAM type: NRG; PAM sequence: TGG
actgttttgtgcttgctcga

SEQ ID NO: 57465 - DNA, 20 bp, Artificial Sequence
  Description of Artificial Sequence: Synthetic oligonucleotide
  Target: LAMA2; (-) strand; PAM type: NRG; PAM sequence: CAG
tctctatgttctgcagctct

SEQ ID NO: 57466 - DNA, 20 bp, Artificial Sequence
  Description of Artificial Sequence: Synthetic oligonucleotide
  Target: LAMA2; (-) strand; PAM type: NRG; PAM sequence: CAG
caccagatctctatgttctg

SEQ ID NO: 57467 - DNA, 20 bp, Artificial Sequence
  Description of Artificial Sequence: Synthetic oligonucleotide
  Target: LAMA2; (-) strand; PAM type: NRG; PAM sequence: CAG
ctcagtcctttagaatccac

SEQ ID NO: 57468 - DNA, 20 bp, Artificial Sequence
  Description of Artificial Sequence: Synthetic oligonucleotide
  Target: LAMA2; (-) strand; PAM type: NRG; PAM sequence: TAG
atcgatcattctcagtcctt

SEQ ID NO: 57469 - DNA, 20 bp, Artificial Sequence
  Description of Artificial Sequence: Synthetic oligonucleotide
  Target: LAMA2; (-) strand; PAM type: NRG; PAM sequence: CAG
cagtagccatcgatcattct

SEQ ID NO: 57470 - DNA, 20 bp, Artificial Sequence
  Description of Artificial Sequence: Synthetic oligonucleotide
  Target: LAMA2; (-) strand; PAM type: NRG; PAM sequence: TAG
catttcacacttcatttcag

SEQ ID NO: 57471 - DNA, 20 bp, Artificial Sequence
  Description of Artificial Sequence: Synthetic oligonucleotide
  Target: LAMA2; (-) strand; PAM type: NRG; PAM sequence: CAG
taccatttcacacttcattt

SEQ ID NO: 57472 - DNA, 20 bp, Artificial Sequence
  Description of Artificial Sequence: Synthetic oligonucleotide
  Target: LAMA2; (-) strand; PAM type: NRG; PAM sequence: TGG
ttaaagacaaatatcagcta

SEQ ID NO: 57473 - DNA, 20 bp, Artificial Sequence
  Description of Artificial Sequence: Synthetic oligonucleotide
  Target: LAMA2; (-) strand; PAM type: NRG; PAM sequence: CAG
tatcagttaaagacaaatat

SEQ ID NO: 57474 - DNA, 20 bp, Artificial Sequence
  Description of Artificial Sequence: Synthetic oligonucleotide
  Target: LAMA2; (-) strand; PAM type: NRG; PAM sequence: AAG
tttagccattttatcagtta

SEQ ID NO: 57475 - DNA, 20 bp, Artificial Sequence
  Description of Artificial Sequence: Synthetic oligonucleotide
  Target: LAMA2; (-) strand; PAM type: NRG; PAM sequence: CAG
aaatgctttagccattttat

SEQ ID NO: 57476 - DNA, 20 bp, Artificial Sequence
  Description of Artificial Sequence: Synthetic oligonucleotide
  Target: LAMA2; (-) strand; PAM type: NRG; PAM sequence: TAG
gtgttgaccaggaaatgctt

SEQ ID NO: 57477 - DNA, 20 bp, Artificial Sequence
  Description of Artificial Sequence: Synthetic oligonucleotide
  Target: LAMA2; (-) strand; PAM type: NRG; PAM sequence: AGG
gggagagtggtgtgttgacc

SEQ ID NO: 57478 - DNA, 20 bp, Artificial Sequence
  Description of Artificial Sequence: Synthetic oligonucleotide
  Target: LAMA2; (-) strand; PAM type: NRG; PAM sequence: CAG
agggagagtggtgtgttgac

SEQ ID NO: 57479 - DNA, 20 bp, Artificial Sequence
  Description of Artificial Sequence: Synthetic oligonucleotide
  Target: LAMA2; (-) strand; PAM type: NRG; PAM sequence: TGG
tgagaagagaggagggagag

SEQ ID NO: 57480 - DNA, 20 bp, Artificial Sequence
  Description of Artificial Sequence: Synthetic oligonucleotide
  Target: LAMA2; (-) strand; PAM type: NRG; PAM sequence: GAG
gaatgagaagagaggaggga

SEQ ID NO: 57481 - DNA, 20 bp, Artificial Sequence
  Description of Artificial Sequence: Synthetic oligonucleotide
  Target: LAMA2; (-) strand; PAM type: NRG; PAM sequence: GAG
aggaatgagaagagaggagg

SEQ ID NO: 57482 - DNA, 20 bp, Artificial Sequence
  Description of Artificial Sequence: Synthetic oligonucleotide
  Target: LAMA2; (-) strand; PAM type: NRG; PAM sequence: GGG
agaggaatgagaagagagga

SEQ ID NO: 57483 - DNA, 20 bp, Artificial Sequence
  Description of Artificial Sequence: Synthetic oligonucleotide
  Target: LAMA2; (-) strand; PAM type: NRG; PAM sequence: AGG
tagaggaatgagaagagagg

SEQ ID NO: 57484 - DNA, 20 bp, Artificial Sequence
  Description of Artificial Sequence: Synthetic oligonucleotide
  Target: LAMA2; (-) strand; PAM type: NRG; PAM sequence: GAG
ctagaggaatgagaagagag

SEQ ID NO: 57485 - DNA, 20 bp, Artificial Sequence
  Description of Artificial Sequence: Synthetic oligonucleotide
  Target: LAMA2; (-) strand; PAM type: NRG; PAM sequence: AGG
ttctagaggaatgagaagag

SEQ ID NO: 57486 - DNA, 20 bp, Artificial Sequence
  Description of Artificial Sequence: Synthetic oligonucleotide
  Target: LAMA2; (-) strand; PAM type: NRG; PAM sequence: GAG
gttctagaggaatgagaaga

SEQ ID NO: 57487 - DNA, 20 bp, Artificial Sequence
  Description of Artificial Sequence: Synthetic oligonucleotide
  Target: LAMA2; (-) strand; PAM type: NRG; PAM sequence: GAG
ctgttctagaggaatgagaa

SEQ ID NO: 57488 - DNA, 20 bp, Artificial Sequence
  Description of Artificial Sequence: Synthetic oligonucleotide
  Target: LAMA2; (-) strand; PAM type: NRG; PAM sequence: AAG
cactgttctagaggaatgag

SEQ ID NO: 57489 - DNA, 20 bp, Artificial Sequence
  Description of Artificial Sequence: Synthetic oligonucleotide
  Target: LAMA2; (-) strand; PAM type: NRG; PAM sequence: GAG
ggccactgttctagaggaat

SEQ ID NO: 57490 - DNA, 20 bp, Artificial Sequence
  Description of Artificial Sequence: Synthetic oligonucleotide
  Target: LAMA2; (-) strand; PAM type: NRG; PAM sequence: AGG
tttgaaggccactgttctag

SEQ ID NO: 57491 - DNA, 20 bp, Artificial Sequence
  Description of Artificial Sequence: Synthetic oligonucleotide
  Target: LAMA2; (-) strand; PAM type: NRG; PAM sequence: GAG
gtttgaaggccactgttcta

SEQ ID NO: 57492 - DNA, 20 bp, Artificial Sequence
  Description of Artificial Sequence: Synthetic oligonucleotide
  Target: LAMA2; (-) strand; PAM type: NRG; PAM sequence: TAG
gagtttgaaggccactgttc

SEQ ID NO: 57493 - DNA, 20 bp, Artificial Sequence
  Description of Artificial Sequence: Synthetic oligonucleotide
  Target: LAMA2; (-) strand; PAM type: NRG; PAM sequence: AGG
ttatcaagaaaagagtttga

SEQ ID NO: 57494 - DNA, 20 bp, Artificial Sequence
  Description of Artificial Sequence: Synthetic oligonucleotide
  Target: LAMA2; (-) strand; PAM type: NRG; PAM sequence: AAG
gttatcaagaaaagagtttg

SEQ ID NO: 57495 - DNA, 20 bp, Artificial Sequence
  Description of Artificial Sequence: Synthetic oligonucleotide
  Target: LAMA2; (-) strand; PAM type: NRG; PAM sequence: GAG
tgcatttgttatcaagaaaa

SEQ ID NO: 57496 - DNA, 20 bp, Artificial Sequence
  Description of Artificial Sequence: Synthetic oligonucleotide
  Target: LAMA2; (-) strand; PAM type: NRG; PAM sequence: AAG
agtgcatttgttatcaagaa

SEQ ID NO: 57497 - DNA, 20 bp, Artificial Sequence
  Description of Artificial Sequence: Synthetic oligonucleotide
  Target: LAMA2; (-) strand; PAM type: NRG; PAM sequence: AAG
atttaagtgcatttgttatc

SEQ ID NO: 57498 - DNA, 20 bp, Artificial Sequence
  Description of Artificial Sequence: Synthetic oligonucleotide
  Target: LAMA2; (-) strand; PAM type: NRG; PAM sequence: AAG
agagagatattctccaattt

SEQ ID NO: 57499 - DNA, 20 bp, Artificial Sequence
  Description of Artificial Sequence: Synthetic oligonucleotide
  Target: LAMA2; (-) strand; PAM type: NRG; PAM sequence: GAG
ttatgtgtgtgttagaaaga

SEQ ID NO: 57500 - DNA, 20 bp, Artificial Sequence
  Description of Artificial Sequence: Synthetic oligonucleotide
  Target: LAMA2; (-) strand; PAM type: NRG; PAM sequence: GAG
tgttatgtgtgtgttagaaa

SEQ ID NO: 57501 - DNA, 20 bp, Artificial Sequence
  Description of Artificial Sequence: Synthetic oligonucleotide
  Target: LAMA2; (-) strand; PAM type: NRG; PAM sequence: AAG
tttgttatgtgtgtgttaga

SEQ ID NO: 57502 - DNA, 20 bp, Artificial Sequence
  Description of Artificial Sequence: Synthetic oligonucleotide
  Target: LAMA2; (-) strand; PAM type: NRG; PAM sequence: TAG
catttttgttatgtgtgtgt

SEQ ID NO: 57503 - DNA, 20 bp, Artificial Sequence
  Description of Artificial Sequence: Synthetic oligonucleotide
  Target: LAMA2; (-) strand; PAM type: NRG; PAM sequence: AAG
tgtaaaatgtctaagtattt

SEQ ID NO: 57504 - DNA, 20 bp, Artificial Sequence
  Description of Artificial Sequence: Synthetic oligonucleotide
  Target: LAMA2; (-) strand; PAM type: NRG; PAM sequence: AAG
acactgaatgtaaaatgtct

SEQ ID NO: 57505 - DNA, 20 bp, Artificial Sequence
  Description of Artificial Sequence: Synthetic oligonucleotide
  Target: LAMA2; (-) strand; PAM type: NRG; PAM sequence: GAG
aatataaaatagaaatattg

SEQ ID NO: 57506 - DNA, 20 bp, Artificial Sequence
  Description of Artificial Sequence: Synthetic oligonucleotide
  Target: LAMA2; (-) strand; PAM type: NRG; PAM sequence: TGG
agaatataaaatagaaatat

SEQ ID NO: 57507 - DNA, 20 bp, Artificial Sequence
  Description of Artificial Sequence: Synthetic oligonucleotide
  Target: LAMA2; (-) strand; PAM type: NRG; PAM sequence: TAG
atttaaaaaagaatataaaa

SEQ ID NO: 57508 - DNA, 20 bp, Artificial Sequence
  Description of Artificial Sequence: Synthetic oligonucleotide
  Target: LAMA2; (-) strand; PAM type: NRG; PAM sequence: AAG
gtcaaaaccagtatttaaaa

SEQ ID NO: 57509 - DNA, 20 bp, Artificial Sequence
  Description of Artificial Sequence: Synthetic oligonucleotide
  Target: LAMA2; (-) strand; PAM type: NRG; PAM sequence: CAG
tccatttaataggtcaaaac

SEQ ID NO: 57510 - DNA, 20 bp, Artificial Sequence
  Description of Artificial Sequence: Synthetic oligonucleotide
  Target: LAMA2; (-) strand; PAM type: NRG; PAM sequence: AGG
tttcttgaagtccatttaat

SEQ ID NO: 57511 - DNA, 20 bp, Artificial Sequence
  Description of Artificial Sequence: Synthetic oligonucleotide
  Target: LAMA2; (-) strand; PAM type: NRG; PAM sequence: TAG
atttcttgaagtccatttaa

SEQ ID NO: 57512 - DNA, 20 bp, Artificial Sequence
  Description of Artificial Sequence: Synthetic oligonucleotide
  Target: LAMA2; (-) strand; PAM type: NRG; PAM sequence: AAG
tgagactgaaaaatttcttg

SEQ ID NO: 57513 - DNA, 20 bp, Artificial Sequence
  Description of Artificial Sequence: Synthetic oligonucleotide
  Target: LAMA2; (-) strand; PAM type: NRG; PAM sequence: GAG
ttaaatctgtgtgcctagat

SEQ ID NO: 57514 - DNA, 20 bp, Artificial Sequence
  Description of Artificial Sequence: Synthetic oligonucleotide
  Target: LAMA2; (-) strand; PAM type: NRG; PAM sequence: TAG
aatatttaaatctgtgtgcc

SEQ ID NO: 57515 - DNA, 20 bp, Artificial Sequence
  Description of Artificial Sequence: Synthetic oligonucleotide
  Target: LAMA2; (-) strand; PAM type: NRG; PAM sequence: AAG
agaagaggtcactaacatag

SEQ ID NO: 57516 - DNA, 20 bp, Artificial Sequence
  Description of Artificial Sequence: Synthetic oligonucleotide
  Target: LAMA2; (-) strand; PAM type: NRG; PAM sequence: TAG
cacagaagaggtcactaaca

SEQ ID NO: 57517 - DNA, 20 bp, Artificial Sequence
  Description of Artificial Sequence: Synthetic oligonucleotide
  Target: LAMA2; (-) strand; PAM type: NRG; PAM sequence: AGG
acggagcttactcacagaag

SEQ ID NO: 57518 - DNA, 20 bp, Artificial Sequence
  Description of Artificial Sequence: Synthetic oligonucleotide
  Target: LAMA2; (-) strand; PAM type: NRG; PAM sequence: GAG
gacggagcttactcacagaa

SEQ ID NO: 57519 - DNA, 20 bp, Artificial Sequence
  Description of Artificial Sequence: Synthetic oligonucleotide
  Target: LAMA2; (-) strand; PAM type: NRG; PAM sequence: AAG
gagacggagcttactcacag

SEQ ID NO: 57520 - DNA, 20 bp, Artificial Sequence
  Description of Artificial Sequence: Synthetic oligonucleotide
  Target: LAMA2; (-) strand; PAM type: NRG; PAM sequence: CAG
ttagagacggagcttactca

SEQ ID NO: 57521 - DNA, 20 bp, Artificial Sequence
  Description of Artificial Sequence: Synthetic oligonucleotide
  Target: LAMA2; (-) strand; PAM type: NRG; PAM sequence: GAG
gagatagaaagttagagacg

SEQ ID NO: 57522 - DNA, 20 bp, Artificial Sequence
  Description of Artificial Sequence: Synthetic oligonucleotide
  Target: LAMA2; (-) strand; PAM type: NRG; PAM sequence: CGG
aggagatagaaagttagaga

SEQ ID NO: 57523 - DNA, 20 bp, Artificial Sequence
  Description of Artificial Sequence: Synthetic oligonucleotide
  Target: LAMA2; (-) strand; PAM type: NRG; PAM sequence: GAG
ccaaaggagatagaaagtta

SEQ ID NO: 57524 - DNA, 20 bp, Artificial Sequence
  Description of Artificial Sequence: Synthetic oligonucleotide
  Target: LAMA2; (-) strand; PAM type: NRG; PAM sequence: TAG
atccaaaggagatagaaagt

SEQ ID NO: 57525 - DNA, 20 bp, Artificial Sequence
  Description of Artificial Sequence: Synthetic oligonucleotide
  Target: LAMA2; (-) strand; PAM type: NRG; PAM sequence: AAG
ggatatccaaaggagataga

SEQ ID NO: 57526 - DNA, 20 bp, Artificial Sequence
  Description of Artificial Sequence: Synthetic oligonucleotide
  Target: LAMA2; (-) strand; PAM type: NRG; PAM sequence: TAG
ataaggatatccaaaggaga

SEQ ID NO: 57527 - DNA, 20 bp, Artificial Sequence
  Description of Artificial Sequence: Synthetic oligonucleotide
  Target: LAMA2; (-) strand; PAM type: NRG; PAM sequence: GAG
gcgaataaggatatccaaag

SEQ ID NO: 57528 - DNA, 20 bp, Artificial Sequence
  Description of Artificial Sequence: Synthetic oligonucleotide
  Target: LAMA2; (-) strand; PAM type: NRG; PAM sequence: AGG
atgcgaataaggatatccaa

SEQ ID NO: 57529 - DNA, 20 bp, Artificial Sequence
  Description of Artificial Sequence: Synthetic oligonucleotide
  Target: LAMA2; (-) strand; PAM type: NRG; PAM sequence: AAG
tatgcgaataaggatatcca

SEQ ID NO: 57530 - DNA, 20 bp, Artificial Sequence
  Description of Artificial Sequence: Synthetic oligonucleotide
  Target: LAMA2; (-) strand; PAM type: NRG; PAM sequence: AGG
ctggaaggaatatgcgaata

SEQ ID NO: 57531 - DNA, 20 bp, Artificial Sequence
  Description of Artificial Sequence: Synthetic oligonucleotide
  Target: LAMA2; (-) strand; PAM type: NRG; PAM sequence: AAG
tctggaaggaatatgcgaat

SEQ ID NO: 57532 - DNA, 20 bp, Artificial Sequence
  Description of Artificial Sequence: Synthetic oligonucleotide
  Target: LAMA2; (-) strand; PAM type: NRG; PAM sequence: AGG
gttaagttgtacgttctgga

SEQ ID NO: 57533 - DNA, 20 bp, Artificial Sequence
  Description of Artificial Sequence: Synthetic oligonucleotide
  Target: LAMA2; (-) strand; PAM type: NRG; PAM sequence: AAG
cgttaagttgtacgttctgg

SEQ ID NO: 57534 - DNA, 20 bp, Artificial Sequence
  Description of Artificial Sequence: Synthetic oligonucleotide
  Target: LAMA2; (-) strand; PAM type: NRG; PAM sequence: TGG
ccacgttaagttgtacgttc

SEQ ID NO: 57535 - DNA, 20 bp, Artificial Sequence
  Description of Artificial Sequence: Synthetic oligonucleotide
  Target: LAMA2; (-) strand; PAM type: NRG; PAM sequence: AAG
tgttaagtttaagccacgtt

SEQ ID NO: 57536 - DNA, 20 bp, Artificial Sequence
  Description of Artificial Sequence: Synthetic oligonucleotide
  Target: LAMA2; (-) strand; PAM type: NRG; PAM sequence: AAG
aatgtttagctgttaagttt

SEQ ID NO: 57537 - DNA, 20 bp, Artificial Sequence
  Description of Artificial Sequence: Synthetic oligonucleotide
  Target: LAMA2; (-) strand; PAM type: NRG; PAM sequence: AAG
agggagaatgtttagctgtt

SEQ ID NO: 57538 - DNA, 20 bp, Artificial Sequence
  Description of Artificial Sequence: Synthetic oligonucleotide
  Target: LAMA2; (-) strand; PAM type: NRG; PAM sequence: TAG
tacttcagagggagaatgtt

SEQ ID NO: 57539 - DNA, 20 bp, Artificial Sequence
  Description of Artificial Sequence: Synthetic oligonucleotide
  Target: LAMA2; (-) strand; PAM type: NRG; PAM sequence: GAG
agaatgggatacttcagagg

SEQ ID NO: 57540 - DNA, 20 bp, Artificial Sequence
  Description of Artificial Sequence: Synthetic oligonucleotide
  Target: LAMA2; (-) strand; PAM type: NRG; PAM sequence: GGG
aaagaatgggatacttcaga

SEQ ID NO: 57541 - DNA, 20 bp, Artificial Sequence
  Description of Artificial Sequence: Synthetic oligonucleotide
  Target: LAMA2; (-) strand; PAM type: NRG; PAM sequence: AGG
gaaagaatgggatacttcag

SEQ ID NO: 57542 - DNA, 20 bp, Artificial Sequence
  Description of Artificial Sequence: Synthetic oligonucleotide
  Target: LAMA2; (-) strand; PAM type: NRG; PAM sequence: GAG
ggaaagaatgggatacttca

SEQ ID NO: 57543 - DNA, 20 bp, Artificial Sequence
  Description of Artificial Sequence: Synthetic oligonucleotide
  Target: LAMA2; (-) strand; PAM type: NRG; PAM sequence: CAG
gtggaaagaatgggatactt

SEQ ID NO: 57544 - DNA, 20 bp, Artificial Sequence
  Description of Artificial Sequence: Synthetic oligonucleotide
  Target: LAMA2; (-) strand; PAM type: NRG; PAM sequence: GGG
gtgaggactgtggaaagaat

SEQ ID NO: 57545 - DNA, 20 bp, Artificial Sequence
  Description of Artificial Sequence: Synthetic oligonucleotide
  Target: LAMA2; (-) strand; PAM type: NRG; PAM sequence: TGG
ggtgaggactgtggaaagaa

SEQ ID NO: 57546 - DNA, 20 bp, Artificial Sequence
  Description of Artificial Sequence: Synthetic oligonucleotide
  Target: LAMA2; (-) strand; PAM type: NRG; PAM sequence: AAG
aggtgggtgaggactgtgga

SEQ ID NO: 57547 - DNA, 20 bp, Artificial Sequence
  Description of Artificial Sequence: Synthetic oligonucleotide
  Target: LAMA2; (-) strand; PAM type: NRG; PAM sequence: TGG
atggaggtgggtgaggactg

SEQ ID NO: 57548 - DNA, 20 bp, Artificial Sequence
  Description of Artificial Sequence: Synthetic oligonucleotide
  Target: LAMA2; (-) strand; PAM type: NRG; PAM sequence: AGG
taacttgatggaggtgggtg

SEQ ID NO: 57549 - DNA, 20 bp, Artificial Sequence
  Description of Artificial Sequence: Synthetic oligonucleotide
  Target: LAMA2; (-) strand; PAM type: NRG; PAM sequence: GAG
ataacttgatggaggtgggt

SEQ ID NO: 57550 - DNA, 20 bp, Artificial Sequence
  Description of Artificial Sequence: Synthetic oligonucleotide
  Target: LAMA2; (-) strand; PAM type: NRG; PAM sequence: GGG
gaaaataacttgatggaggt

SEQ ID NO: 57551 - DNA, 20 bp, Artificial Sequence
  Description of Artificial Sequence: Synthetic oligonucleotide
  Target: LAMA2; (-) strand; PAM type: NRG; PAM sequence: TGG
ggaaaataacttgatggagg

SEQ ID NO: 57552 - DNA, 20 bp, Artificial Sequence
  Description of Artificial Sequence: Synthetic oligonucleotide
  Target: LAMA2; (-) strand; PAM type: NRG; PAM sequence: AGG
ggaggaaaataacttgatgg

SEQ ID NO: 57553 - DNA, 20 bp, Artificial Sequence
  Description of Artificial Sequence: Synthetic oligonucleotide
  Target: LAMA2; (-) strand; PAM type: NRG; PAM sequence: GAG
aggaggaaaataacttgatg

SEQ ID NO: 57554 - DNA, 20 bp, Artificial Sequence
  Description of Artificial Sequence: Synthetic oligonucleotide
  Target: LAMA2; (-) strand; PAM type: NRG; PAM sequence: TGG
acaggaggaaaataacttga

SEQ ID NO: 57555 - DNA, 20 bp, Artificial Sequence
  Description of Artificial Sequence: Synthetic oligonucleotide
  Target: LAMA2; (-) strand; PAM type: NRG; PAM sequence: AGG
agcagaaatttggaaacagg

SEQ ID NO: 57556 - DNA, 20 bp, Artificial Sequence
  Description of Artificial Sequence: Synthetic oligonucleotide
  Target: LAMA2; (-) strand; PAM type: NRG; PAM sequence: GAG
cagcagaaatttggaaacag

SEQ ID NO: 57557 - DNA, 20 bp, Artificial Sequence
  Description of Artificial Sequence: Synthetic oligonucleotide
  Target: LAMA2; (-) strand; PAM type: NRG; PAM sequence: AGG
ctcagcagaaatttggaaac

SEQ ID NO: 57558 - DNA, 20 bp, Artificial Sequence
  Description of Artificial Sequence: Synthetic oligonucleotide
  Target: LAMA2; (-) strand; PAM type: NRG; PAM sequence: CAG
cctcagcagaaatttggaaa

SEQ ID NO: 57559 - DNA, 20 bp, Artificial Sequence
  Description of Artificial Sequence: Synthetic oligonucleotide
  Target: LAMA2; (-) strand; PAM type: NRG; PAM sequence: TGG
tgggaccctcagcagaaatt

SEQ ID NO: 57560 - DNA, 20 bp, Artificial Sequence
  Description of Artificial Sequence: Synthetic oligonucleotide
  Target: LAMA2; (-) strand; PAM type: NRG; PAM sequence: CAG
aagactgatgggaccctcag

SEQ ID NO: 57561 - DNA, 20 bp, Artificial Sequence
  Description of Artificial Sequence: Synthetic oligonucleotide
  Target: LAMA2; (-) strand; PAM type: NRG; PAM sequence: CAG
tggaagactgatgggaccct

SEQ ID NO: 57562 - DNA, 20 bp, Artificial Sequence
  Description of Artificial Sequence: Synthetic oligonucleotide
  Target: LAMA2; (-) strand; PAM type: NRG; PAM sequence: GGG
tttacacctggaagactgat

SEQ ID NO: 57563 - DNA, 20 bp, Artificial Sequence
  Description of Artificial Sequence: Synthetic oligonucleotide
  Target: LAMA2; (-) strand; PAM type: NRG; PAM sequence: TGG
gtttacacctggaagactga

SEQ ID NO: 57564 - DNA, 20 bp, Artificial Sequence
  Description of Artificial Sequence: Synthetic oligonucleotide
  Target: LAMA2; (-) strand; PAM type: NRG; PAM sequence: AAG
atctaatggtttacacctgg

SEQ ID NO: 57565 - DNA, 20 bp, Artificial Sequence
  Description of Artificial Sequence: Synthetic oligonucleotide
  Target: LAMA2; (-) strand; PAM type: NRG; PAM sequence: TGG
ggaatctaatggtttacacc

SEQ ID NO: 57566 - DNA, 20 bp, Artificial Sequence
  Description of Artificial Sequence: Synthetic oligonucleotide
  Target: LAMA2; (-) strand; PAM type: NRG; PAM sequence: TGG
gggatctagtaggaatctaa

SEQ ID NO: 57567 - DNA, 20 bp, Artificial Sequence
  Description of Artificial Sequence: Synthetic oligonucleotide
  Target: LAMA2; (-) strand; PAM type: NRG; PAM sequence: AGG
aagaaagatagggatctagt

SEQ ID NO: 57568 - DNA, 20 bp, Artificial Sequence
  Description of Artificial Sequence: Synthetic oligonucleotide
  Target: LAMA2; (-) strand; PAM type: NRG; PAM sequence: TAG
gaagaaagatagggatctag

SEQ ID NO: 57569 - DNA, 20 bp, Artificial Sequence
  Description of Artificial Sequence: Synthetic oligonucleotide
  Target: LAMA2; (-) strand; PAM type: NRG; PAM sequence: TAG
cgggaagaaagatagggatc

SEQ ID NO: 57570 - DNA, 20 bp, Artificial Sequence
  Description of Artificial Sequence: Synthetic oligonucleotide
  Target: LAMA2; (-) strand; PAM type: NRG; PAM sequence: GGG
tagtaacgggaagaaagata

SEQ ID NO: 57571 - DNA, 20 bp, Artificial Sequence
  Description of Artificial Sequence: Synthetic oligonucleotide
  Target: LAMA2; (-) strand; PAM type: NRG; PAM sequence: AGG
atagtaacgggaagaaagat

SEQ ID NO: 57572 - DNA, 20 bp, Artificial Sequence
  Description of Artificial Sequence: Synthetic oligonucleotide
  Target: LAMA2; (-) strand; PAM type: NRG; PAM sequence: TAG
tatagtaacgggaagaaaga

SEQ ID NO: 57573 - DNA, 20 bp, Artificial Sequence
  Description of Artificial Sequence: Synthetic oligonucleotide
  Target: LAMA2; (-) strand; PAM type: NRG; PAM sequence: AAG
ctgatatagtaacgggaaga

SEQ ID NO: 57574 - DNA, 20 bp, Artificial Sequence
  Description of Artificial Sequence: Synthetic oligonucleotide
  Target: LAMA2; (-) strand; PAM type: NRG; PAM sequence: AAG
ctcactgatatagtaacggg

SEQ ID NO: 57575 - DNA, 20 bp, Artificial Sequence
  Description of Artificial Sequence: Synthetic oligonucleotide
  Target: LAMA2; (-) strand; PAM type: NRG; PAM sequence: GGG
ttgctcactgatatagtaac

SEQ ID NO: 57576 - DNA, 20 bp, Artificial Sequence
  Description of Artificial Sequence: Synthetic oligonucleotide
  Target: LAMA2; (-) strand; PAM type: NRG; PAM sequence: CGG
cttgctcactgatatagtaa

SEQ ID NO: 57577 - DNA, 20 bp, Artificial Sequence
  Description of Artificial Sequence: Synthetic oligonucleotide
  Target: LAMA2; (-) strand; PAM type: NRG; PAM sequence: TAG
caagaccttgctcactgata

SEQ ID NO: 57578 - DNA, 20 bp, Artificial Sequence
  Description of Artificial Sequence: Synthetic oligonucleotide
  Target: LAMA2; (-) strand; PAM type: NRG; PAM sequence: AAG
acaaaaaacgaaatagaatc

SEQ ID NO: 57579 - DNA, 20 bp, Artificial Sequence
  Description of Artificial Sequence: Synthetic oligonucleotide
  Target: LAMA2; (-) strand; PAM type: NRG; PAM sequence: TAG
aattgtgacaaaaaacgaaa

SEQ ID NO: 57580 - DNA, 20 bp, Artificial Sequence
  Description of Artificial Sequence: Synthetic oligonucleotide
  Target: LAMA2; (-) strand; PAM type: NRG; PAM sequence: AAG
aacaactttgaaactggaat

SEQ ID NO: 57581 - DNA, 20 bp, Artificial Sequence
  Description of Artificial Sequence: Synthetic oligonucleotide
  Target: LAMA2; (-) strand; PAM type: NRG; PAM sequence: TGG
aattataacaactttgaaac

SEQ ID NO: 57582 - DNA, 20 bp, Artificial Sequence
  Description of Artificial Sequence: Synthetic oligonucleotide
  Target: LAMA2; (-) strand; PAM type: NRG; PAM sequence: TAG
taaaattcattttttaaaat

SEQ ID NO: 57583 - DNA, 20 bp, Artificial Sequence
  Description of Artificial Sequence: Synthetic oligonucleotide
  Target: LAMA2; (-) strand; PAM type: NRG; PAM sequence: AAG
ttagtcaaagaaggattatt

SEQ ID NO: 57584 - DNA, 20 bp, Artificial Sequence
  Description of Artificial Sequence: Synthetic oligonucleotide
  Target: LAMA2; (-) strand; PAM type: NRG; PAM sequence: AGG
ttcattgtcttagtcaaaga

SEQ ID NO: 57585 - DNA, 20 bp, Artificial Sequence
  Description of Artificial Sequence: Synthetic oligonucleotide
  Target: LAMA2; (-) strand; PAM type: NRG; PAM sequence: AAG
tttcattgtcttagtcaaag

SEQ ID NO: 57586 - DNA, 20 bp, Artificial Sequence
  Description of Artificial Sequence: Synthetic oligonucleotide
  Target: LAMA2; (-) strand; PAM type: NRG; PAM sequence: AAG
acatttcattgtcttagtca

SEQ ID NO: 57587 - DNA, 20 bp, Artificial Sequence
  Description of Artificial Sequence: Synthetic oligonucleotide
  Target: LAMA2; (-) strand; PAM type: NRG; PAM sequence: TAG
aaagccacatttcattgtct

SEQ ID NO: 57588 - DNA, 20 bp, Artificial Sequence
  Description of Artificial Sequence: Synthetic oligonucleotide
  Target: LAMA2; (-) strand; PAM type: NRG; PAM sequence: AAG
ggtgctgattacttttttta

SEQ ID NO: 57589 - DNA, 20 bp, Artificial Sequence
  Description of Artificial Sequence: Synthetic oligonucleotide
  Target: LAMA2; (-) strand; PAM type: NRG; PAM sequence: TGG
ctgaaagacctataagcaaa

SEQ ID NO: 57590 - DNA, 20 bp, Artificial Sequence
  Description of Artificial Sequence: Synthetic oligonucleotide
  Target: LAMA2; (-) strand; PAM type: NRG; PAM sequence: AAG
acaaattctgaaagacctat

SEQ ID NO: 57591 - DNA, 20 bp, Artificial Sequence
  Description of Artificial Sequence: Synthetic oligonucleotide
  Target: LAMA2; (-) strand; PAM type: NRG; PAM sequence: AAG
actttaagaacaaattctga

SEQ ID NO: 57592 - DNA, 20 bp, Artificial Sequence
  Description of Artificial Sequence: Synthetic oligonucleotide
  Target: LAMA2; (-) strand; PAM type: NRG; PAM sequence: AAG
aggaaagttccagaaacttt

SEQ ID NO: 57593 - DNA, 20 bp, Artificial Sequence
  Description of Artificial Sequence: Synthetic oligonucleotide
  Target: LAMA2; (-) strand; PAM type: NRG; PAM sequence: CAG
ctttacagagaggaaagttc

SEQ ID NO: 57594 - DNA, 20 bp, Artificial Sequence
  Description of Artificial Sequence: Synthetic oligonucleotide
  Target: LAMA2; (-) strand; PAM type: NRG; PAM sequence: AAG
cctgtactttacagagagga

SEQ ID NO: 57595 - DNA, 20 bp, Artificial Sequence
  Description of Artificial Sequence: Synthetic oligonucleotide
  Target: LAMA2; (-) strand; PAM type: NRG; PAM sequence: AGG
atttcctgtactttacagag

SEQ ID NO: 57596 - DNA, 20 bp, Artificial Sequence
  Description of Artificial Sequence: Synthetic oligonucleotide
  Target: LAMA2; (-) strand; PAM type: NRG; PAM sequence: GAG
tatttcctgtactttacaga

SEQ ID NO: 57597 - DNA, 20 bp, Artificial Sequence
  Description of Artificial Sequence: Synthetic oligonucleotide
  Target: LAMA2; (-) strand; PAM type: NRG; PAM sequence: GAG
agtatttcctgtactttaca

SEQ ID NO: 57598 - DNA, 20 bp, Artificial Sequence
  Description of Artificial Sequence: Synthetic oligonucleotide
  Target: LAMA2; (-) strand; PAM type: NRG; PAM sequence: CAG
tcagtatttcctgtacttta

SEQ ID NO: 57599 - DNA, 20 bp, Artificial Sequence
  Description of Artificial Sequence: Synthetic oligonucleotide
  Target: LAMA2; (-) strand; PAM type: NRG; PAM sequence: CAG
agaggctttccagtgtagct

SEQ ID NO: 57600 - DNA, 20 bp, Artificial Sequence
  Description of Artificial Sequence: Synthetic oligonucleotide
  Target: LAMA2; (-) strand; PAM type: NRG; PAM sequence: TAG
cccagagaggctttccagtg

SEQ ID NO: 57601 - DNA, 20 bp, Artificial Sequence
  Description of Artificial Sequence: Synthetic oligonucleotide
  Target: LAMA2; (-) strand; PAM type: NRG; PAM sequence: CAG
cctgtcccagagaggctttc

SEQ ID NO: 57602 - DNA, 20 bp, Artificial Sequence
  Description of Artificial Sequence: Synthetic oligonucleotide
  Target: LAMA2; (-) strand; PAM type: NRG; PAM sequence: AGG
ccccattgcctgtcccagag

SEQ ID NO: 57603 - DNA, 20 bp, Artificial Sequence
  Description of Artificial Sequence: Synthetic oligonucleotide
  Target: LAMA2; (-) strand; PAM type: NRG; PAM sequence: GAG
tccccattgcctgtcccaga

SEQ ID NO: 57604 - DNA, 20 bp, Artificial Sequence
  Description of Artificial Sequence: Synthetic oligonucleotide
  Target: LAMA2; (-) strand; PAM type: NRG; PAM sequence: GAG
actccccattgcctgtccca

SEQ ID NO: 57605 - DNA, 20 bp, Artificial Sequence
  Description of Artificial Sequence: Synthetic oligonucleotide
  Target: LAMA2; (-) strand; PAM type: NRG; PAM sequence: CAG
taactccccattgcctgtcc

SEQ ID NO: 57606 - DNA, 20 bp, Artificial Sequence
  Description of Artificial Sequence: Synthetic oligonucleotide
  Target: LAMA2; (-) strand; PAM type: NRG; PAM sequence: AAG
aaggaattgttgtgtagtcc

SEQ ID NO: 57607 - DNA, 20 bp, Artificial Sequence
  Description of Artificial Sequence: Synthetic oligonucleotide
  Target: LAMA2; (-) strand; PAM type: NRG; PAM sequence: TAG
gaggagaaggaattgttgtg

SEQ ID NO: 57608 - DNA, 20 bp, Artificial Sequence
  Description of Artificial Sequence: Synthetic oligonucleotide
  Target: LAMA2; (-) strand; PAM type: NRG; PAM sequence: AGG
ttgagctaccgtagaggaga

SEQ ID NO: 57609 - DNA, 20 bp, Artificial Sequence
  Description of Artificial Sequence: Synthetic oligonucleotide
  Target: LAMA2; (-) strand; PAM type: NRG; PAM sequence: AAG
cttgagctaccgtagaggag

SEQ ID NO: 57610 - DNA, 20 bp, Artificial Sequence
  Description of Artificial Sequence: Synthetic oligonucleotide
  Target: LAMA2; (-) strand; PAM type: NRG; PAM sequence: GAG
tctcttgagctaccgtagag

SEQ ID NO: 57611 - DNA, 20 bp, Artificial Sequence
  Description of Artificial Sequence: Synthetic oligonucleotide
  Target: LAMA2; (-) strand; PAM type: NRG; PAM sequence: AGG
tctctcttgagctaccgtag

SEQ ID NO: 57612 - DNA, 20 bp, Artificial Sequence
  Description of Artificial Sequence: Synthetic oligonucleotide
  Target: LAMA2; (-) strand; PAM type: NRG; PAM sequence: GAG
gtctctcttgagctaccgta

SEQ ID NO: 57613 - DNA, 20 bp, Artificial Sequence
  Description of Artificial Sequence: Synthetic oligonucleotide
  Target: LAMA2; (-) strand; PAM type: NRG; PAM sequence: TAG
atgtctctcttgagctaccg

SEQ ID NO: 57614 - DNA, 20 bp, Artificial Sequence
  Description of Artificial Sequence: Synthetic oligonucleotide
  Target: LAMA2; (-) strand; PAM type: NRG; PAM sequence: GAG
cttagaagcatgtctctctt

SEQ ID NO: 57615 - DNA, 20 bp, Artificial Sequence
  Description of Artificial Sequence: Synthetic oligonucleotide
  Target: LAMA2; (-) strand; PAM type: NRG; PAM sequence: AAG
tctcatacctctgtgcttag

SEQ ID NO: 57616 - DNA, 20 bp, Artificial Sequence
  Description of Artificial Sequence: Synthetic oligonucleotide
  Target: LAMA2; (-) strand; PAM type: NRG; PAM sequence: TAG
acttctcatacctctgtgct

SEQ ID NO: 57617 - DNA, 20 bp, Artificial Sequence
  Description of Artificial Sequence: Synthetic oligonucleotide
  Target: LAMA2; (-) strand; PAM type: NRG; PAM sequence: GAG
ctaacagcaaataacagtct

SEQ ID NO: 57618 - DNA, 20 bp, Artificial Sequence
  Description of Artificial Sequence: Synthetic oligonucleotide
  Target: LAMA2; (-) strand; PAM type: NRG; PAM sequence: CAG
ccaattctaacagcaaataa

SEQ ID NO: 57619 - DNA, 20 bp, Artificial Sequence
  Description of Artificial Sequence: Synthetic oligonucleotide
  Target: LAMA2; (-) strand; PAM type: NRG; PAM sequence: CAG
gatggggagaccaattctaa

SEQ ID NO: 57620 - DNA, 20 bp, Artificial Sequence
  Description of Artificial Sequence: Synthetic oligonucleotide
  Target: LAMA2; (-) strand; PAM type: NRG; PAM sequence: GAG
atttactgttattagatggg

SEQ ID NO: 57621 - DNA, 20 bp, Artificial Sequence
  Description of Artificial Sequence: Synthetic oligonucleotide
  Target: LAMA2; (-) strand; PAM type: NRG; PAM sequence: GGG
agatttactgttattagatg

SEQ ID NO: 57622 - DNA, 20 bp, Artificial Sequence
  Description of Artificial Sequence: Synthetic oligonucleotide
  Target: LAMA2; (-) strand; PAM type: NRG; PAM sequence: GGG
gagatttactgttattagat

SEQ ID NO: 57623 - DNA, 20 bp, Artificial Sequence
  Description of Artificial Sequence: Synthetic oligonucleotide
  Target: LAMA2; (-) strand; PAM type: NRG; PAM sequence: TGG
agagatttactgttattaga

SEQ ID NO: 57624 - DNA, 20 bp, Artificial Sequence
  Description of Artificial Sequence: Synthetic oligonucleotide
  Target: LAMA2; (-) strand; PAM type: NRG; PAM sequence: TAG
tgccagagatttactgttat

SEQ ID NO: 57625 - DNA, 20 bp, Artificial Sequence
  Description of Artificial Sequence: Synthetic oligonucleotide
  Target: LAMA2; (-) strand; PAM type: NRG; PAM sequence: GAG
gaccaatagcatctgtgcca

SEQ ID NO: 57626 - DNA, 20 bp, Artificial Sequence
  Description of Artificial Sequence: Synthetic oligonucleotide
  Target: LAMA2; (-) strand; PAM type: NRG; PAM sequence: CAG
aggaccaatagcatctgtgc

SEQ ID NO: 57627 - DNA, 20 bp, Artificial Sequence
  Description of Artificial Sequence: Synthetic oligonucleotide
  Target: LAMA2; (-) strand; PAM type: NRG; PAM sequence: TAG
cacaggacattaaggaccaa

SEQ ID NO: 57628 - DNA, 20 bp, Artificial Sequence
  Description of Artificial Sequence: Synthetic oligonucleotide
  Target: LAMA2; (-) strand; PAM type: NRG; PAM sequence: AGG
cctaaaatcacaggacatta

SEQ ID NO: 57629 - DNA, 20 bp, Artificial Sequence
  Description of Artificial Sequence: Synthetic oligonucleotide
  Target: LAMA2; (-) strand; PAM type: NRG; PAM sequence: AAG
tcctaaaatcacaggacatt

SEQ ID NO: 57630 - DNA, 20 bp, Artificial Sequence
  Description of Artificial Sequence: Synthetic oligonucleotide
  Target: LAMA2; (-) strand; PAM type: NRG; PAM sequence: AGG
aaactatttcctaaaatcac

SEQ ID NO: 57631 - DNA, 20 bp, Artificial Sequence
  Description of Artificial Sequence: Synthetic oligonucleotide
  Target: LAMA2; (-) strand; PAM type: NRG; PAM sequence: CAG
caaactatttcctaaaatca

SEQ ID NO: 57632 - DNA, 20 bp, Artificial Sequence
  Description of Artificial Sequence: Synthetic oligonucleotide
  Target: LAMA2; (-) strand; PAM type: NRG; PAM sequence: CAG
atacccttactctgccagag

SEQ ID NO: 57633 - DNA, 20 bp, Artificial Sequence
  Description of Artificial Sequence: Synthetic oligonucleotide
  Target: LAMA2; (-) strand; PAM type: NRG; PAM sequence: GAG
agcatacccttactctgcca

SEQ ID NO: 57634 - DNA, 20 bp, Artificial Sequence
  Description of Artificial Sequence: Synthetic oligonucleotide
  Target: LAMA2; (-) strand; PAM type: NRG; PAM sequence: CAG
ccagcatacccttactctgc

SEQ ID NO: 57635 - DNA, 20 bp, Artificial Sequence
  Description of Artificial Sequence: Synthetic oligonucleotide
  Target: LAMA2; (-) strand; PAM type: NRG; PAM sequence: CAG
atattataaagatactaaac

SEQ ID NO: 57636 - DNA, 20 bp, Artificial Sequence
  Description of Artificial Sequence: Synthetic oligonucleotide
  Target: LAMA2; (-) strand; PAM type: NRG; PAM sequence: AAG
ctcattatatatatattata

SEQ ID NO: 57637 - DNA, 20 bp, Artificial Sequence
  Description of Artificial Sequence: Synthetic oligonucleotide
  Target: LAMA2; (-) strand; PAM type: NRG; PAM sequence: AAG
tagtattctaagtatgattt

SEQ ID NO: 57638 - DNA, 20 bp, Artificial Sequence
  Description of Artificial Sequence: Synthetic oligonucleotide
  Target: LAMA2; (-) strand; PAM type: NRG; PAM sequence: AAG
tttaaataatatagtattct

SEQ ID NO: 57639 - DNA, 20 bp, Artificial Sequence
  Description of Artificial Sequence: Synthetic oligonucleotide
  Target: LAMA2; (-) strand; PAM type: NRG; PAM sequence: TAG
agatattggtttaaataata

SEQ ID NO: 57640 - DNA, 20 bp, Artificial Sequence
  Description of Artificial Sequence: Synthetic oligonucleotide
  Target: LAMA2; (-) strand; PAM type: NRG; PAM sequence: TGG
cattttgttgaaatagatat

SEQ ID NO: 57641 - DNA, 20 bp, Artificial Sequence
  Description of Artificial Sequence: Synthetic oligonucleotide
  Target: LAMA2; (-) strand; PAM type: NRG; PAM sequence: TAG
ttataaacattttgttgaaa

SEQ ID NO: 57642 - DNA, 20 bp, Artificial Sequence
  Description of Artificial Sequence: Synthetic oligonucleotide
  Target: LAMA2; (-) strand; PAM type: NRG; PAM sequence: CAG
acctttggatttagtttcat

SEQ ID NO: 57643 - DNA, 20 bp, Artificial Sequence
  Description of Artificial Sequence: Synthetic oligonucleotide
  Target: LAMA2; (-) strand; PAM type: NRG; PAM sequence: TAG
ctttgtcatacctttggatt

SEQ ID NO: 57644 - DNA, 20 bp, Artificial Sequence
  Description of Artificial Sequence: Synthetic oligonucleotide
  Target: LAMA2; (-) strand; PAM type: NRG; PAM sequence: TGG
agtcgtctttgtcatacctt

SEQ ID NO: 57645 - DNA, 20 bp, Artificial Sequence
  Description of Artificial Sequence: Synthetic oligonucleotide
  Target: LAMA2; (-) strand; PAM type: NRG; PAM sequence: GAG
tctttaagcaacatagagct

SEQ ID NO: 57646 - DNA, 20 bp, Artificial Sequence
  Description of Artificial Sequence: Synthetic oligonucleotide
  Target: LAMA2; (-) strand; PAM type: NRG; PAM sequence: GAG
aaagttctttaagcaacata

SEQ ID NO: 57647 - DNA, 20 bp, Artificial Sequence
  Description of Artificial Sequence: Synthetic oligonucleotide
  Target: LAMA2; (-) strand; PAM type: NRG; PAM sequence: TAG
ttaaagttctttaagcaaca

SEQ ID NO: 57648 - DNA, 20 bp, Artificial Sequence
  Description of Artificial Sequence: Synthetic oligonucleotide
  Target: LAMA2; (-) strand; PAM type: NRG; PAM sequence: AAG
catgctttttaaagttcttt

SEQ ID NO: 57649 - DNA, 20 bp, Artificial Sequence
  Description of Artificial Sequence: Synthetic oligonucleotide
  Target: LAMA2; (-) strand; PAM type: NRG; PAM sequence: AAG
ttatgggcacatgcttttta

SEQ ID NO: 57650 - DNA, 20 bp, Artificial Sequence
  Description of Artificial Sequence: Synthetic oligonucleotide
  Target: LAMA2; (-) strand; PAM type: NRG; PAM sequence: GGG
ctctccttgaacggctttat

SEQ ID NO: 57651 - DNA, 20 bp, Artificial Sequence
  Description of Artificial Sequence: Synthetic oligonucleotide
  Target: LAMA2; (-) strand; PAM type: NRG; PAM sequence: TGG
cctctccttgaacggcttta

SEQ ID NO: 57652 - DNA, 20 bp, Artificial Sequence
  Description of Artificial Sequence: Synthetic oligonucleotide
  Target: LAMA2; (-) strand; PAM type: NRG; PAM sequence: CGG
cctccttccctctccttgaa

SEQ ID NO: 57653 - DNA, 20 bp, Artificial Sequence
  Description of Artificial Sequence: Synthetic oligonucleotide
  Target: LAMA2; (-) strand; PAM type: NRG; PAM sequence: GGG
atcgtaagaataaggagaag

SEQ ID NO: 57654 - DNA, 20 bp, Artificial Sequence
  Description of Artificial Sequence: Synthetic oligonucleotide
  Target: LAMA2; (-) strand; PAM type: NRG; PAM sequence: GGG
tatcgtaagaataaggagaa

SEQ ID NO: 57655 - DNA, 20 bp, Artificial Sequence
  Description of Artificial Sequence: Synthetic oligonucleotide
  Target: LAMA2; (-) strand; PAM type: NRG; PAM sequence: AGG
ctatcgtaagaataaggaga

SEQ ID NO: 57656 - DNA, 20 bp, Artificial Sequence
  Description of Artificial Sequence: Synthetic oligonucleotide
  Target: LAMA2; (-) strand; PAM type: NRG; PAM sequence: AAG
tctatcgtaagaataaggag

SEQ ID NO: 57657 - DNA, 20 bp, Artificial Sequence
  Description of Artificial Sequence: Synthetic oligonucleotide
  Target: LAMA2; (-) strand; PAM type: NRG; PAM sequence: GAG
aattctatcgtaagaataag

SEQ ID NO: 57658 - DNA, 20 bp, Artificial Sequence
  Description of Artificial Sequence: Synthetic oligonucleotide
  Target: LAMA2; (-) strand; PAM type: NRG; PAM sequence: AGG
ggaattctatcgtaagaata

SEQ ID NO: 57659 - DNA, 20 bp, Artificial Sequence
  Description of Artificial Sequence: Synthetic oligonucleotide
  Target: LAMA2; (-) strand; PAM type: NRG; PAM sequence: AAG
aggaattctatcgtaagaat

SEQ ID NO: 57660 - DNA, 20 bp, Artificial Sequence
  Description of Artificial Sequence: Synthetic oligonucleotide
  Target: LAMA2; (-) strand; PAM type: NRG; PAM sequence: AAG
cccaataggaattctatcgt

SEQ ID NO: 57661 - DNA, 20 bp, Artificial Sequence
  Description of Artificial Sequence: Synthetic oligonucleotide
  Target: LAMA2; (-) strand; PAM type: NRG; PAM sequence: AGG
atttctggcacagccccaat

SEQ ID NO: 57662 - DNA, 20 bp, Artificial Sequence
  Description of Artificial Sequence: Synthetic oligonucleotide
  Target: LAMA2; (-) strand; PAM type: NRG; PAM sequence: TAG
catttctggcacagccccaa

SEQ ID NO: 57663 - DNA, 20 bp, Artificial Sequence
  Description of Artificial Sequence: Synthetic oligonucleotide
  Target: LAMA2; (-) strand; PAM type: NRG; PAM sequence: CAG
agaagtgctcatttctggca

SEQ ID NO: 57664 - DNA, 20 bp, Artificial Sequence
  Description of Artificial Sequence: Synthetic oligonucleotide
  Target: LAMA2; (-) strand; PAM type: NRG; PAM sequence: TGG
tacttagaagtgctcatttc

SEQ ID NO: 57665 - DNA, 20 bp, Artificial Sequence
  Description of Artificial Sequence: Synthetic oligonucleotide
  Target: LAMA2; (-) strand; PAM type: NRG; PAM sequence: AAG
gacttctctgaaatacttag

SEQ ID NO: 57666 - DNA, 20 bp, Artificial Sequence
  Description of Artificial Sequence: Synthetic oligonucleotide
  Target: LAMA2; (-) strand; PAM type: NRG; PAM sequence: TAG
ttggacttctctgaaatact

SEQ ID NO: 57667 - DNA, 20 bp, Artificial Sequence
  Description of Artificial Sequence: Synthetic oligonucleotide
  Target: LAMA2; (-) strand; PAM type: NRG; PAM sequence: TGG
taaaagactttttaacactt

SEQ ID NO: 57668 - DNA, 20 bp, Artificial Sequence
  Description of Artificial Sequence: Synthetic oligonucleotide
  Target: LAMA2; (-) strand; PAM type: NRG; PAM sequence: AAG
aaagacgttcttttgcataa

SEQ ID NO: 57669 - DNA, 20 bp, Artificial Sequence
  Description of Artificial Sequence: Synthetic oligonucleotide
  Target: LAMA2; (-) strand; PAM type: NRG; PAM sequence: AAG
ttactattcactgattcaga

SEQ ID NO: 57670 - DNA, 20 bp, Artificial Sequence
  Description of Artificial Sequence: Synthetic oligonucleotide
  Target: LAMA2; (-) strand; PAM type: NRG; PAM sequence: CAG
agcattactattcactgatt

SEQ ID NO: 57671 - DNA, 20 bp, Artificial Sequence
  Description of Artificial Sequence: Synthetic oligonucleotide
  Target: LAMA2; (-) strand; PAM type: NRG; PAM sequence: GAG
tgttattagaaaattctgat

SEQ ID NO: 57672 - DNA, 20 bp, Artificial Sequence
  Description of Artificial Sequence: Synthetic oligonucleotide
  Target: LAMA2; (-) strand; PAM type: NRG; PAM sequence: TAG
tggctttgtttttgtgttat

SEQ ID NO: 57673 - DNA, 20 bp, Artificial Sequence
  Description of Artificial Sequence: Synthetic oligonucleotide
  Target: LAMA2; (-) strand; PAM type: NRG; PAM sequence: TGG
actgatcaaatgtatggact

SEQ ID NO: 57674 - DNA, 20 bp, Artificial Sequence
  Description of Artificial Sequence: Synthetic oligonucleotide
  Target: LAMA2; (-) strand; PAM type: NRG; PAM sequence: TGG
ttgacaactgatcaaatgta

SEQ ID NO: 57675 - DNA, 20 bp, Artificial Sequence
  Description of Artificial Sequence: Synthetic oligonucleotide
  Target: LAMA2; (-) strand; PAM type: NRG; PAM sequence: TAG
tctgactaaggttgacataa

SEQ ID NO: 57676 - DNA, 20 bp, Artificial Sequence
  Description of Artificial Sequence: Synthetic oligonucleotide
  Target: LAMA2; (-) strand; PAM type: NRG; PAM sequence: AGG
gccagcaggagctctgacta

SEQ ID NO: 57677 - DNA, 20 bp, Artificial Sequence
  Description of Artificial Sequence: Synthetic oligonucleotide
  Target: LAMA2; (-) strand; PAM type: NRG; PAM sequence: AAG
agccagcaggagctctgact

SEQ ID NO: 57678 - DNA, 20 bp, Artificial Sequence
  Description of Artificial Sequence: Synthetic oligonucleotide
  Target: LAMA2; (-) strand; PAM type: NRG; PAM sequence: GAG
gtatacaaagaagccagcag

SEQ ID NO: 57679 - DNA, 20 bp, Artificial Sequence
  Description of Artificial Sequence: Synthetic oligonucleotide
  Target: LAMA2; (-) strand; PAM type: NRG; PAM sequence: AGG
gtgtatacaaagaagccagc

SEQ ID NO: 57680 - DNA, 20 bp, Artificial Sequence
  Description of Artificial Sequence: Synthetic oligonucleotide
  Target: LAMA2; (-) strand; PAM type: NRG; PAM sequence: CAG
agtgtatacaaagaagccag

SEQ ID NO: 57681 - DNA, 20 bp, Artificial Sequence
  Description of Artificial Sequence: Synthetic oligonucleotide
  Target: LAMA2; (-) strand; PAM type: NRG; PAM sequence: CAG
aacagtgtatacaaagaagc

SEQ ID NO: 57682 - DNA, 20 bp, Artificial Sequence
  Description of Artificial Sequence: Synthetic oligonucleotide
  Target: LAMA2; (-) strand; PAM type: NRG; PAM sequence: AAG
ggtgaacagtgtatacaaag

SEQ ID NO: 57683 - DNA, 20 bp, Artificial Sequence
  Description of Artificial Sequence: Synthetic oligonucleotide
  Target: LAMA2; (-) strand; PAM type: NRG; PAM sequence: AAG
attggtgaacagtgtataca

SEQ ID NO: 57684 - DNA, 20 bp, Artificial Sequence
  Description of Artificial Sequence: Synthetic oligonucleotide
  Target: LAMA2; (-) strand; PAM type: NRG; PAM sequence: CAG
actttactcaaattggtgaa

SEQ ID NO: 57685 - DNA, 20 bp, Artificial Sequence
  Description of Artificial Sequence: Synthetic oligonucleotide
  Target: LAMA2; (-) strand; PAM type: NRG; PAM sequence: TGG
aaagtccactttactcaaat

SEQ ID NO: 57686 - DNA, 20 bp, Artificial Sequence
  Description of Artificial Sequence: Synthetic oligonucleotide
  Target: LAMA2; (-) strand; PAM type: NRG; PAM sequence: AAG
tcaaacactattctctcaca

SEQ ID NO: 57687 - DNA, 20 bp, Artificial Sequence
  Description of Artificial Sequence: Synthetic oligonucleotide
  Target: LAMA2; (-) strand; PAM type: NRG; PAM sequence: TGG
gaaatgcccaaaagaggtcc

SEQ ID NO: 57688 - DNA, 20 bp, Artificial Sequence
  Description of Artificial Sequence: Synthetic oligonucleotide
  Target: LAMA2; (-) strand; PAM type: NRG; PAM sequence: AGG
taggaagaaatgcccaaaag

SEQ ID NO: 57689 - DNA, 20 bp, Artificial Sequence
  Description of Artificial Sequence: Synthetic oligonucleotide
  Target: LAMA2; (-) strand; PAM type: NRG; PAM sequence: GAG
ttaggaagaaatgcccaaaa

SEQ ID NO: 57690 - DNA, 20 bp, Artificial Sequence
  Description of Artificial Sequence: Synthetic oligonucleotide
  Target: LAMA2; (-) strand; PAM type: NRG; PAM sequence: AAG
acttaggaagaaatgcccaa

SEQ ID NO: 57691 - DNA, 20 bp, Artificial Sequence
  Description of Artificial Sequence: Synthetic oligonucleotide
  Target: LAMA2; (-) strand; PAM type: NRG; PAM sequence: AAG
tgttgtgtattccacttagg

SEQ ID NO: 57692 - DNA, 20 bp, Artificial Sequence
  Description of Artificial Sequence: Synthetic oligonucleotide
  Target: LAMA2; (-) strand; PAM type: NRG; PAM sequence: AGG
atctgttgtgtattccactt

SEQ ID NO: 57693 - DNA, 20 bp, Artificial Sequence
  Description of Artificial Sequence: Synthetic oligonucleotide
  Target: LAMA2; (-) strand; PAM type: NRG; PAM sequence: TAG
tatctgttgtgtattccact

SEQ ID NO: 57694 - DNA, 20 bp, Artificial Sequence
  Description of Artificial Sequence: Synthetic oligonucleotide
  Target: LAMA2; (-) strand; PAM type: NRG; PAM sequence: TAG
tccttctgagctggaatgag

SEQ ID NO: 57695 - DNA, 20 bp, Artificial Sequence
  Description of Artificial Sequence: Synthetic oligonucleotide
  Target: LAMA2; (-) strand; PAM type: NRG; PAM sequence: GAG
tgctccttctgagctggaat

SEQ ID NO: 57696 - DNA, 20 bp, Artificial Sequence
  Description of Artificial Sequence: Synthetic oligonucleotide
  Target: LAMA2; (-) strand; PAM type: NRG; PAM sequence: TGG
tccttctgctccttctgagc

SEQ ID NO: 57697 - DNA, 20 bp, Artificial Sequence
  Description of Artificial Sequence: Synthetic oligonucleotide
  Target: LAMA2; (-) strand; PAM type: NRG; PAM sequence: GAG
taactccttctgctccttct

SEQ ID NO: 57698 - DNA, 20 bp, Artificial Sequence
  Description of Artificial Sequence: Synthetic oligonucleotide
  Target: LAMA2; (-) strand; PAM type: NRG; PAM sequence: GGG
ggcttcttgaatgcatatat

SEQ ID NO: 57699 - DNA, 20 bp, Artificial Sequence
  Description of Artificial Sequence: Synthetic oligonucleotide
  Target: LAMA2; (-) strand; PAM type: NRG; PAM sequence: TGG
tggcttcttgaatgcatata

SEQ ID NO: 57700 - DNA, 20 bp, Artificial Sequence
  Description of Artificial Sequence: Synthetic oligonucleotide
  Target: LAMA2; (-) strand; PAM type: NRG; PAM sequence: TGG
ccacagctagaggataccat

SEQ ID NO: 57701 - DNA, 20 bp, Artificial Sequence
  Description of Artificial Sequence: Synthetic oligonucleotide
  Target: LAMA2; (-) strand; PAM type: NRG; PAM sequence: AGG
tagccactatccacagctag

SEQ ID NO: 57702 - DNA, 20 bp, Artificial Sequence
  Description of Artificial Sequence: Synthetic oligonucleotide
  Target: LAMA2; (-) strand; PAM type: NRG; PAM sequence: GAG
ttagccactatccacagcta

SEQ ID NO: 57703 - DNA, 20 bp, Artificial Sequence
  Description of Artificial Sequence: Synthetic oligonucleotide
  Target: LAMA2; (-) strand; PAM type: NRG; PAM sequence: TAG
cattagccactatccacagc

SEQ ID NO: 57704 - DNA, 20 bp, Artificial Sequence
  Description of Artificial Sequence: Synthetic oligonucleotide
  Target: LAMA2; (-) strand; PAM type: NRG; PAM sequence: CAG
accacattagccactatcca

SEQ ID NO: 57705 - DNA, 20 bp, Artificial Sequence
  Description of Artificial Sequence: Synthetic oligonucleotide
  Target: LAMA2; (-) strand; PAM type: NRG; PAM sequence: TAG
tggattctggatgaccacat

SEQ ID NO: 57706 - DNA, 20 bp, Artificial Sequence
  Description of Artificial Sequence: Synthetic oligonucleotide
  Target: LAMA2; (-) strand; PAM type: NRG; PAM sequence: TGG
gcggtccacagtgtggattc

SEQ ID NO: 57707 - DNA, 20 bp, Artificial Sequence
  Description of Artificial Sequence: Synthetic oligonucleotide
  Target: LAMA2; (-) strand; PAM type: NRG; PAM sequence: TGG
cgctgctgcggtccacagtg

SEQ ID NO: 57708 - DNA, 20 bp, Artificial Sequence
  Description of Artificial Sequence: Synthetic oligonucleotide
  Target: LAMA2; (-) strand; PAM type: NRG; PAM sequence: CAG
gaaaacgctgctgcggtcca

SEQ ID NO: 57709 - DNA, 20 bp, Artificial Sequence
  Description of Artificial Sequence: Synthetic oligonucleotide
  Target: LAMA2; (-) strand; PAM type: NRG; PAM sequence: CGG
tgtacgggaaaacgctgctg

SEQ ID NO: 57710 - DNA, 20 bp, Artificial Sequence
  Description of Artificial Sequence: Synthetic oligonucleotide
  Target: LAMA2; (-) strand; PAM type: NRG; PAM sequence: GGG
cagagtttttggatctgtac

SEQ ID NO: 57711 - DNA, 20 bp, Artificial Sequence
  Description of Artificial Sequence: Synthetic oligonucleotide
  Target: LAMA2; (-) strand; PAM type: NRG; PAM sequence: CGG
ccagagtttttggatctgta

SEQ ID NO: 57712 - DNA, 20 bp, Artificial Sequence
  Description of Artificial Sequence: Synthetic oligonucleotide
  Target: LAMA2; (-) strand; PAM type: NRG; PAM sequence: TGG
aaatccctatccagagtttt

SEQ ID NO: 57713 - DNA, 20 bp, Artificial Sequence
  Description of Artificial Sequence: Synthetic oligonucleotide
  Target: LAMA2; (-) strand; PAM type: NRG; PAM sequence: GAG
atcctgtaaatccctatcca

SEQ ID NO: 57714 - DNA, 20 bp, Artificial Sequence
  Description of Artificial Sequence: Synthetic oligonucleotide
  Target: LAMA2; (-) strand; PAM type: NRG; PAM sequence: CAG
ggatcctgtaaatccctatc

SEQ ID NO: 57715 - DNA, 20 bp, Artificial Sequence
  Description of Artificial Sequence: Synthetic oligonucleotide
  Target: LAMA2; (-) strand; PAM type: NRG; PAM sequence: TGG
tcattttatctaccggccat

SEQ ID NO: 57716 - DNA, 20 bp, Artificial Sequence
  Description of Artificial Sequence: Synthetic oligonucleotide
  Target: LAMA2; (-) strand; PAM type: NRG; PAM sequence: CGG
tccccattcattttatctac

SEQ ID NO: 57717 - DNA, 20 bp, Artificial Sequence
  Description of Artificial Sequence: Synthetic oligonucleotide
  Target: LAMA2; (-) strand; PAM type: NRG; PAM sequence: GAG
gctcagaaggcgctgggtgg

SEQ ID NO: 57718 - DNA, 20 bp, Artificial Sequence
  Description of Artificial Sequence: Synthetic oligonucleotide
  Target: LAMA2; (-) strand; PAM type: NRG; PAM sequence: GGG
aagctcagaaggcgctgggt

SEQ ID NO: 57719 - DNA, 20 bp, Artificial Sequence
  Description of Artificial Sequence: Synthetic oligonucleotide
  Target: LAMA2; (-) strand; PAM type: NRG; PAM sequence: TGG
gaagctcagaaggcgctggg

SEQ ID NO: 57720 - DNA, 20 bp, Artificial Sequence
  Description of Artificial Sequence: Synthetic oligonucleotide
  Target: LAMA2; (-) strand; PAM type: NRG; PAM sequence: GGG
gaagaagctcagaaggcgct

SEQ ID NO: 57721 - DNA, 20 bp, Artificial Sequence
  Description of Artificial Sequence: Synthetic oligonucleotide
  Target: LAMA2; (-) strand; PAM type: NRG; PAM sequence: TGG
ggaagaagctcagaaggcgc

SEQ ID NO: 57722 - DNA, 20 bp, Artificial Sequence
  Description of Artificial Sequence: Synthetic oligonucleotide
  Target: LAMA2; (-) strand; PAM type: NRG; PAM sequence: AGG
atcagaggaagaagctcaga

SEQ ID NO: 57723 - DNA, 20 bp, Artificial Sequence
  Description of Artificial Sequence: Synthetic oligonucleotide
  Target: LAMA2; (-) strand; PAM type: NRG; PAM sequence: AAG
aatcagaggaagaagctcag

SEQ ID NO: 57724 - DNA, 20 bp, Artificial Sequence
  Description of Artificial Sequence: Synthetic oligonucleotide
  Target: LAMA2; (-) strand; PAM type: NRG; PAM sequence: CAG
atcaatcagaggaagaagct

SEQ ID NO: 57725 - DNA, 20 bp, Artificial Sequence
  Description of Artificial Sequence: Synthetic oligonucleotide
  Target: LAMA2; (-) strand; PAM type: NRG; PAM sequence: AAG
agtacatcaatcagaggaag

SEQ ID NO: 57726 - DNA, 20 bp, Artificial Sequence
  Description of Artificial Sequence: Synthetic oligonucleotide
  Target: LAMA2; (-) strand; PAM type: NRG; PAM sequence: AAG
tacagtacatcaatcagagg

SEQ ID NO: 57727 - DNA, 20 bp, Artificial Sequence
  Description of Artificial Sequence: Synthetic oligonucleotide
  Target: LAMA2; (-) strand; PAM type: NRG; PAM sequence: AGG
tcttacagtacatcaatcag

SEQ ID NO: 57728 - DNA, 20 bp, Artificial Sequence
  Description of Artificial Sequence: Synthetic oligonucleotide
  Target: LAMA2; (-) strand; PAM type: NRG; PAM sequence: GAG
ctcttacagtacatcaatca

SEQ ID NO: 57729 - DNA, 20 bp, Artificial Sequence
  Description of Artificial Sequence: Synthetic oligonucleotide
  Target: LAMA2; (-) strand; PAM type: NRG; PAM sequence: CAG
gtctcttacagtacatcaat

SEQ ID NO: 57730 - DNA, 20 bp, Artificial Sequence
  Description of Artificial Sequence: Synthetic oligonucleotide
  Target: LAMA2; (-) strand; PAM type: NRG; PAM sequence: CAG
tagccattgacggtctctta

SEQ ID NO: 57731 - DNA, 20 bp, Artificial Sequence
  Description of Artificial Sequence: Synthetic oligonucleotide
  Target: LAMA2; (-) strand; PAM type: NRG; PAM sequence: CGG
gacgggaacttagccattga

SEQ ID NO: 57732 - DNA, 20 bp, Artificial Sequence
  Description of Artificial Sequence: Synthetic oligonucleotide
  Target: LAMA2; (-) strand; PAM type: NRG; PAM sequence: TAG
ccgcatcaatgacgggaact

SEQ ID NO: 57733 - DNA, 20 bp, Artificial Sequence
  Description of Artificial Sequence: Synthetic oligonucleotide
  Target: LAMA2; (-) strand; PAM type: NRG; PAM sequence: GGG
cagggatccgcatcaatgac

SEQ ID NO: 57734 - DNA, 20 bp, Artificial Sequence
  Description of Artificial Sequence: Synthetic oligonucleotide
  Target: LAMA2; (-) strand; PAM type: NRG; PAM sequence: CGG
gcagggatccgcatcaatga

SEQ ID NO: 57735 - DNA, 20 bp, Artificial Sequence
  Description of Artificial Sequence: Synthetic oligonucleotide
  Target: LAMA2; (-) strand; PAM type: NRG; PAM sequence: GGG
agctgtgggacatgtgggca

SEQ ID NO: 57736 - DNA, 20 bp, Artificial Sequence
  Description of Artificial Sequence: Synthetic oligonucleotide
  Target: LAMA2; (-) strand; PAM type: NRG; PAM sequence: AGG
gagctgtgggacatgtgggc

SEQ ID NO: 57737 - DNA, 20 bp, Artificial Sequence
  Description of Artificial Sequence: Synthetic oligonucleotide
  Target: LAMA2; (-) strand; PAM type: NRG; PAM sequence: CAG
tgagctgtgggacatgtggg

SEQ ID NO: 57738 - DNA, 20 bp, Artificial Sequence
  Description of Artificial Sequence: Synthetic oligonucleotide
  Target: LAMA2; (-) strand; PAM type: NRG; PAM sequence: GGG
gagtgagctgtgggacatgt

SEQ ID NO: 57739 - DNA, 20 bp, Artificial Sequence
  Description of Artificial Sequence: Synthetic oligonucleotide
  Target: LAMA2; (-) strand; PAM type: NRG; PAM sequence: TGG
agagtgagctgtgggacatg

SEQ ID NO: 57740 - DNA, 20 bp, Artificial Sequence
  Description of Artificial Sequence: Synthetic oligonucleotide
  Target: LAMA2; (-) strand; PAM type: NRG; PAM sequence: GGG
gctctgtgagagtgagctgt

SEQ ID NO: 57741 - DNA, 20 bp, Artificial Sequence
  Description of Artificial Sequence: Synthetic oligonucleotide
  Target: LAMA2; (-) strand; PAM type: NRG; PAM sequence: TGG
ggctctgtgagagtgagctg

SEQ ID NO: 57742 - DNA, 20 bp, Artificial Sequence
  Description of Artificial Sequence: Synthetic oligonucleotide
  Target: LAMA2; (-) strand; PAM type: NRG; PAM sequence: GAG
gtacttggctctgtgagagt

SEQ ID NO: 57743 - DNA, 20 bp, Artificial Sequence
  Description of Artificial Sequence: Synthetic oligonucleotide
  Target: LAMA2; (-) strand; PAM type: NRG; PAM sequence: GAG
ccgtgtacttggctctgtga

SEQ ID NO: 57744 - DNA, 20 bp, Artificial Sequence
  Description of Artificial Sequence: Synthetic oligonucleotide
  Target: LAMA2; (-) strand; PAM type: NRG; PAM sequence: GAG
ggccgtgtacttggctctgt

SEQ ID NO: 57745 - DNA, 20 bp, Artificial Sequence
  Description of Artificial Sequence: Synthetic oligonucleotide
  Target: LAMA2; (-) strand; PAM type: NRG; PAM sequence: TGG
cagtctttgggccgtgtact

SEQ ID NO: 57746 - DNA, 20 bp, Artificial Sequence
  Description of Artificial Sequence: Synthetic oligonucleotide
  Target: LAMA2; (-) strand; PAM type: NRG; PAM sequence: GGG
gaggtctcaccccagtcttt

SEQ ID NO: 57747 - DNA, 20 bp, Artificial Sequence
  Description of Artificial Sequence: Synthetic oligonucleotide
  Target: LAMA2; (-) strand; PAM type: NRG; PAM sequence: TGG
cgaggtctcaccccagtctt

SEQ ID NO: 57748 - DNA, 20 bp, Artificial Sequence
  Description of Artificial Sequence: Synthetic oligonucleotide
  Target: LAMA2; (-) strand; PAM type: NRG; PAM sequence: CAG
attctctcgaggtctcaccc

SEQ ID NO: 57749 - DNA, 20 bp, Artificial Sequence
  Description of Artificial Sequence: Synthetic oligonucleotide
  Target: LAMA2; (-) strand; PAM type: NRG; PAM sequence: AGG
aacttctttgtattctctcg

SEQ ID NO: 57750 - DNA, 20 bp, Artificial Sequence
  Description of Artificial Sequence: Synthetic oligonucleotide
  Target: LAMA2; (-) strand; PAM type: NRG; PAM sequence: GAG
gaacttctttgtattctctc

SEQ ID NO: 57751 - DNA, 20 bp, Artificial Sequence
  Description of Artificial Sequence: Synthetic oligonucleotide
  Target: LAMA2; (-) strand; PAM type: NRG; PAM sequence: AGG
caaaagctactcaaagatgg

SEQ ID NO: 57752 - DNA, 20 bp, Artificial Sequence
  Description of Artificial Sequence: Synthetic oligonucleotide
  Target: LAMA2; (-) strand; PAM type: NRG; PAM sequence: GAG
ccaaaagctactcaaagatg

SEQ ID NO: 57753 - DNA, 20 bp, Artificial Sequence
  Description of Artificial Sequence: Synthetic oligonucleotide
  Target: LAMA2; (-) strand; PAM type: NRG; PAM sequence: TGG
ctccaaaagctactcaaaga

SEQ ID NO: 57754 - DNA, 20 bp, Artificial Sequence
  Description of Artificial Sequence: Synthetic oligonucleotide
  Target: LAMA2; (-) strand; PAM type: NRG; PAM sequence: AAG
ccttctccaaaagctactca

SEQ ID NO: 57755 - DNA, 20 bp, Artificial Sequence
  Description of Artificial Sequence: Synthetic oligonucleotide
  Target: LAMA2; (-) strand; PAM type: NRG; PAM sequence: AAG
accgtccactccttctccaa

SEQ ID NO: 57756 - DNA, 20 bp, Artificial Sequence
  Description of Artificial Sequence: Synthetic oligonucleotide
  Target: LAMA2; (-) strand; PAM type: NRG; PAM sequence: GAG
caaatggaggtatctttcct

SEQ ID NO: 57757 - DNA, 20 bp, Artificial Sequence
  Description of Artificial Sequence: Synthetic oligonucleotide
  Target: LAMA2; (-) strand; PAM type: NRG; PAM sequence: AGG
agagtctgtctgtcaaatgg

SEQ ID NO: 57758 - DNA, 20 bp, Artificial Sequence
  Description of Artificial Sequence: Synthetic oligonucleotide
  Target: LAMA2; (-) strand; PAM type: NRG; PAM sequence: GAG
aagagtctgtctgtcaaatg

SEQ ID NO: 57759 - DNA, 20 bp, Artificial Sequence
  Description of Artificial Sequence: Synthetic oligonucleotide
  Target: LAMA2; (-) strand; PAM type: NRG; PAM sequence: TGG
taaagagtctgtctgtcaaa

SEQ ID NO: 57760 - DNA, 20 bp, Artificial Sequence
  Description of Artificial Sequence: Synthetic oligonucleotide
  Target: LAMA2; (-) strand; PAM type: NRG; PAM sequence: GAG
tctggtcggcataccataaa

SEQ ID NO: 57761 - DNA, 20 bp, Artificial Sequence
  Description of Artificial Sequence: Synthetic oligonucleotide
  Target: LAMA2; (-) strand; PAM type: NRG; PAM sequence: AAG
gatctggtcggcataccata

SEQ ID NO: 57762 - DNA, 20 bp, Artificial Sequence
  Description of Artificial Sequence: Synthetic oligonucleotide
  Target: LAMA2; (-) strand; PAM type: NRG; PAM sequence: CGG
acaagcagaatcgatctggt

SEQ ID NO: 57763 - DNA, 20 bp, Artificial Sequence
  Description of Artificial Sequence: Synthetic oligonucleotide
  Target: LAMA2; (-) strand; PAM type: NRG; PAM sequence: TGG
aggtacaagcagaatcgatc

SEQ ID NO: 57764 - DNA, 20 bp, Artificial Sequence
  Description of Artificial Sequence: Synthetic oligonucleotide
  Target: LAMA2; (-) strand; PAM type: NRG; PAM sequence: CAG
agtttctctacaggtacaag

SEQ ID NO: 57765 - DNA, 20 bp, Artificial Sequence
  Description of Artificial Sequence: Synthetic oligonucleotide
  Target: LAMA2; (-) strand; PAM type: NRG; PAM sequence: AAG
aggagtttctctacaggtac

SEQ ID NO: 57766 - DNA, 20 bp, Artificial Sequence
  Description of Artificial Sequence: Synthetic oligonucleotide
  Target: LAMA2; (-) strand; PAM type: NRG; PAM sequence: AGG
tcgctcaggagtttctctac

SEQ ID NO: 57767 - DNA, 20 bp, Artificial Sequence
  Description of Artificial Sequence: Synthetic oligonucleotide
  Target: LAMA2; (-) strand; PAM type: NRG; PAM sequence: CAG
gtcgctcaggagtttctcta

SEQ ID NO: 57768 - DNA, 20 bp, Artificial Sequence
  Description of Artificial Sequence: Synthetic oligonucleotide
  Target: LAMA2; (-) strand; PAM type: NRG; PAM sequence: GAG
tggagataattgtcgctcag

SEQ ID NO: 57769 - DNA, 20 bp, Artificial Sequence
  Description of Artificial Sequence: Synthetic oligonucleotide
  Target: LAMA2; (-) strand; PAM type: NRG; PAM sequence: AGG
tatggagataattgtcgctc

SEQ ID NO: 57770 - DNA, 20 bp, Artificial Sequence
  Description of Artificial Sequence: Synthetic oligonucleotide
  Target: LAMA2; (-) strand; PAM type: NRG; PAM sequence: CAG
ctatggagataattgtcgct

SEQ ID NO: 57771 - DNA, 20 bp, Artificial Sequence
  Description of Artificial Sequence: Synthetic oligonucleotide
  Target: LAMA2; (-) strand; PAM type: NRG; PAM sequence: GAG
gatcaagtctcatgactatg

SEQ ID NO: 57772 - DNA, 20 bp, Artificial Sequence
  Description of Artificial Sequence: Synthetic oligonucleotide
  Target: LAMA2; (-) strand; PAM type: NRG; PAM sequence: TGG
aggatcaagtctcatgacta

SEQ ID NO: 57773 - DNA, 20 bp, Artificial Sequence
  Description of Artificial Sequence: Synthetic oligonucleotide
  Target: LAMA2; (-) strand; PAM type: NRG; PAM sequence: AAG
ggctccagaactgcaggatc

SEQ ID NO: 57774 - DNA, 20 bp, Artificial Sequence
  Description of Artificial Sequence: Synthetic oligonucleotide
  Target: LAMA2; (-) strand; PAM type: NRG; PAM sequence: AGG
atctggggctccagaactgc

SEQ ID NO: 57775 - DNA, 20 bp, Artificial Sequence
  Description of Artificial Sequence: Synthetic oligonucleotide
  Target: LAMA2; (-) strand; PAM type: NRG; PAM sequence: CAG
catctggggctccagaactg

SEQ ID NO: 57776 - DNA, 20 bp, Artificial Sequence
  Description of Artificial Sequence: Synthetic oligonucleotide
  Target: LAMA2; (-) strand; PAM type: NRG; PAM sequence: CAG
ttttgcggcatctggggctc

SEQ ID NO: 57777 - DNA, 20 bp, Artificial Sequence
  Description of Artificial Sequence: Synthetic oligonucleotide
  Target: LAMA2; (-) strand; PAM type: NRG; PAM sequence: GGG
aagcgcttttgcggcatctg

SEQ ID NO: 57778 - DNA, 20 bp, Artificial Sequence
  Description of Artificial Sequence: Synthetic oligonucleotide
  Target: LAMA2; (-) strand; PAM type: NRG; PAM sequence: GGG
gaagcgcttttgcggcatct

SEQ ID NO: 57779 - DNA, 20 bp, Artificial Sequence
  Description of Artificial Sequence: Synthetic oligonucleotide
  Target: LAMA2; (-) strand; PAM type: NRG; PAM sequence: TGG
ggaagcgcttttgcggcatc

SEQ ID NO: 57780 - DNA, 20 bp, Artificial Sequence
  Description of Artificial Sequence: Synthetic oligonucleotide
  Target: LAMA2; (-) strand; PAM type: NRG; PAM sequence: CGG
gcatcgtggaagcgcttttg

SEQ ID NO: 57781 - DNA, 20 bp, Artificial Sequence
  Description of Artificial Sequence: Synthetic oligonucleotide
  Target: LAMA2; (-) strand; PAM type: NRG; PAM sequence: AAG
tgagcaggtcagcatcgtgg

SEQ ID NO: 57782 - DNA, 20 bp, Artificial Sequence
  Description of Artificial Sequence: Synthetic oligonucleotide
  Target: LAMA2; (-) strand; PAM type: NRG; PAM sequence: TGG
atttgagcaggtcagcatcg

SEQ ID NO: 57783 - DNA, 20 bp, Artificial Sequence
  Description of Artificial Sequence: Synthetic oligonucleotide
  Target: LAMA2; (-) strand; PAM type: NRG; PAM sequence: CAG
tattccatatttgagcaggt

SEQ ID NO: 57784 - DNA, 20 bp, Artificial Sequence
  Description of Artificial Sequence: Synthetic oligonucleotide
  Target: LAMA2; (-) strand; PAM type: NRG; PAM sequence: AGG
tcactattccatatttgagc

SEQ ID NO: 57785 - DNA, 20 bp, Artificial Sequence
  Description of Artificial Sequence: Synthetic oligonucleotide
  Target: LAMA2; (-) strand; PAM type: NRG; PAM sequence: CAG
atcactattccatatttgag

SEQ ID NO: 57786 - DNA, 20 bp, Artificial Sequence
  Description of Artificial Sequence: Synthetic oligonucleotide
  Target: LAMA2; (-) strand; PAM type: NRG; PAM sequence: GAG
cgcatcactattccatattt

SEQ ID NO: 57787 - DNA, 20 bp, Artificial Sequence
  Description of Artificial Sequence: Synthetic oligonucleotide
  Target: LAMA2; (-) strand; PAM type: NRG; PAM sequence: GAG
gttggcttcagtgacaaacc

SEQ ID NO: 57788 - DNA, 20 bp, Artificial Sequence
  Description of Artificial Sequence: Synthetic oligonucleotide
  Target: LAMA2; (-) strand; PAM type: NRG; PAM sequence: CAG
tgatttcttggcgttggctt

SEQ ID NO: 57789 - DNA, 20 bp, Artificial Sequence
  Description of Artificial Sequence: Synthetic oligonucleotide
  Target: LAMA2; (-) strand; PAM type: NRG; PAM sequence: TGG
tgcccttgatttcttggcgt

SEQ ID NO: 57790 - DNA, 20 bp, Artificial Sequence
  Description of Artificial Sequence: Synthetic oligonucleotide
  Target: LAMA2; (-) strand; PAM type: NRG; PAM sequence: TGG
ggtgattgcccttgatttct

SEQ ID NO: 57791 - DNA, 20 bp, Artificial Sequence
  Description of Artificial Sequence: Synthetic oligonucleotide
  Target: LAMA2; (-) strand; PAM type: NRG; PAM sequence: GGG
tctgaccttgaggtttcatc

SEQ ID NO: 57792 - DNA, 20 bp, Artificial Sequence
  Description of Artificial Sequence: Synthetic oligonucleotide
  Target: LAMA2; (-) strand; PAM type: NRG; PAM sequence: CGG
gtctgaccttgaggtttcat

SEQ ID NO: 57793 - DNA, 20 bp, Artificial Sequence
  Description of Artificial Sequence: Synthetic oligonucleotide
  Target: LAMA2; (-) strand; PAM type: NRG; PAM sequence: AGG
attgggaaggtctgaccttg

SEQ ID NO: 57794 - DNA, 20 bp, Artificial Sequence
  Description of Artificial Sequence: Synthetic oligonucleotide
  Target: LAMA2; (-) strand; PAM type: NRG; PAM sequence: GAG
aattgggaaggtctgacctt

SEQ ID NO: 57795 - DNA, 20 bp, Artificial Sequence
  Description of Artificial Sequence: Synthetic oligonucleotide
  Target: LAMA2; (-) strand; PAM type: NRG; PAM sequence: AGG
gattggtacaagaattggga

SEQ ID NO: 57796 - DNA, 20 bp, Artificial Sequence
  Description of Artificial Sequence: Synthetic oligonucleotide
  Target: LAMA2; (-) strand; PAM type: NRG; PAM sequence: AAG
cgattggtacaagaattggg

SEQ ID NO: 57797 - DNA, 20 bp, Artificial Sequence
  Description of Artificial Sequence: Synthetic oligonucleotide
  Target: LAMA2; (-) strand; PAM type: NRG; PAM sequence: GGG
ctacgattggtacaagaatt

SEQ ID NO: 57798 - DNA, 20 bp, Artificial Sequence
  Description of Artificial Sequence: Synthetic oligonucleotide
  Target: LAMA2; (-) strand; PAM type: NRG; PAM sequence: TGG
gctacgattggtacaagaat

SEQ ID NO: 57799 - DNA, 20 bp, Artificial Sequence
  Description of Artificial Sequence: Synthetic oligonucleotide
  Target: LAMA2; (-) strand; PAM type: NRG; PAM sequence: AAG
tatccagctacgattggtac

SEQ ID NO: 57800 - DNA, 20 bp, Artificial Sequence
  Description of Artificial Sequence: Synthetic oligonucleotide
  Target: LAMA2; (-) strand; PAM type: NRG; PAM sequence: TGG
ttccaatatccagctacgat

SEQ ID NO: 57801 - DNA, 20 bp, Artificial Sequence
  Description of Artificial Sequence: Synthetic oligonucleotide
  Target: LAMA2; (-) strand; PAM type: NRG; PAM sequence: CAG
tttacacgttttccaatatc

SEQ ID NO: 57802 - DNA, 20 bp, Artificial Sequence
  Description of Artificial Sequence: Synthetic oligonucleotide
  Target: LAMA2; (-) strand; PAM type: NRG; PAM sequence: TGG
tggaagtcaggagacagttg

SEQ ID NO: 57803 - DNA, 20 bp, Artificial Sequence
  Description of Artificial Sequence: Synthetic oligonucleotide
  Target: LAMA2; (-) strand; PAM type: NRG; PAM sequence: CAG
tgtggttggaagtcaggaga

SEQ ID NO: 57804 - DNA, 20 bp, Artificial Sequence
  Description of Artificial Sequence: Synthetic oligonucleotide
  Target: LAMA2; (-) strand; PAM type: NRG; PAM sequence: GAG
tgggtgtggttggaagtcag

SEQ ID NO: 57805 - DNA, 20 bp, Artificial Sequence
  Description of Artificial Sequence: Synthetic oligonucleotide
  Target: LAMA2; (-) strand; PAM type: NRG; PAM sequence: AGG
tgtgggtgtggttggaagtc

SEQ ID NO: 57806 - DNA, 20 bp, Artificial Sequence
  Description of Artificial Sequence: Synthetic oligonucleotide
  Target: LAMA2; (-) strand; PAM type: NRG; PAM sequence: CAG
ctgtgggtgtggttggaagt

SEQ ID NO: 57807 - DNA, 20 bp, Artificial Sequence
  Description of Artificial Sequence: Synthetic oligonucleotide
  Target: LAMA2; (-) strand; PAM type: NRG; PAM sequence: AAG
gactctgtgggtgtggttgg

SEQ ID NO: 57808 - DNA, 20 bp, Artificial Sequence
  Description of Artificial Sequence: Synthetic oligonucleotide
  Target: LAMA2; (-) strand; PAM type: NRG; PAM sequence: TGG
caagactctgtgggtgtggt

SEQ ID NO: 57809 - DNA, 20 bp, Artificial Sequence
  Description of Artificial Sequence: Synthetic oligonucleotide
  Target: LAMA2; (-) strand; PAM type: NRG; PAM sequence: TGG
ctaccaagactctgtgggtg

SEQ ID NO: 57810 - DNA, 20 bp, Artificial Sequence
  Description of Artificial Sequence: Synthetic oligonucleotide
  Target: LAMA2; (-) strand; PAM type: NRG; PAM sequence: GGG
atcttctaccaagactctgt

SEQ ID NO: 57811 - DNA, 20 bp, Artificial Sequence
  Description of Artificial Sequence: Synthetic oligonucleotide
  Target: LAMA2; (-) strand; PAM type: NRG; PAM sequence: TGG
tatcttctaccaagactctg

SEQ ID NO: 57812 - DNA, 20 bp, Artificial Sequence
  Description of Artificial Sequence: Synthetic oligonucleotide
  Target: LAMA2; (-) strand; PAM type: NRG; PAM sequence: AAG
gggactgcgtatcttctacc

SEQ ID NO: 57813 - DNA, 20 bp, Artificial Sequence
  Description of Artificial Sequence: Synthetic oligonucleotide
  Target: LAMA2; (-) strand; PAM type: NRG; PAM sequence: GGG
ggcaagtttttcacttacaa

SEQ ID NO: 57814 - DNA, 20 bp, Artificial Sequence
  Description of Artificial Sequence: Synthetic oligonucleotide
  Target: LAMA2; (-) strand; PAM type: NRG; PAM sequence: AGG
aggcaagtttttcacttaca

SEQ ID NO: 57815 - DNA, 20 bp, Artificial Sequence
  Description of Artificial Sequence: Synthetic oligonucleotide
  Target: LAMA2; (-) strand; PAM type: NRG; PAM sequence: AAG
caggcaagtttttcacttac

SEQ ID NO: 57816 - DNA, 20 bp, Artificial Sequence
  Description of Artificial Sequence: Synthetic oligonucleotide
  Target: LAMA2; (-) strand; PAM type: NRG; PAM sequence: AAG
actcgtggaagtcttcaggc

SEQ ID NO: 57817 - DNA, 20 bp, Artificial Sequence
  Description of Artificial Sequence: Synthetic oligonucleotide
  Target: LAMA2; (-) strand; PAM type: NRG; PAM sequence: AGG
cttcactcgtggaagtcttc

SEQ ID NO: 57818 - DNA, 20 bp, Artificial Sequence
  Description of Artificial Sequence: Synthetic oligonucleotide
  Target: LAMA2; (-) strand; PAM type: NRG; PAM sequence: CAG
tcttcactcgtggaagtctt

SEQ ID NO: 57819 - DNA, 20 bp, Artificial Sequence
  Description of Artificial Sequence: Synthetic oligonucleotide
  Target: LAMA2; (-) strand; PAM type: NRG; PAM sequence: AAG
cacctgatcttcactcgtgg

SEQ ID NO: 57820 - DNA, 20 bp, Artificial Sequence
  Description of Artificial Sequence: Synthetic oligonucleotide
  Target: LAMA2; (-) strand; PAM type: NRG; PAM sequence: TGG
tgtcacctgatcttcactcg

SEQ ID NO: 57821 - DNA, 20 bp, Artificial Sequence
  Description of Artificial Sequence: Synthetic oligonucleotide
  Target: LAMA2; (-) strand; PAM type: NRG; PAM sequence: CAG
acctgcacatcccatacact

SEQ ID NO: 57822 - DNA, 20 bp, Artificial Sequence
  Description of Artificial Sequence: Synthetic oligonucleotide
  Target: LAMA2; (-) strand; PAM type: NRG; PAM sequence: GGG
gtgggtccaggtggggctgt

SEQ ID NO: 57823 - DNA, 20 bp, Artificial Sequence
  Description of Artificial Sequence: Synthetic oligonucleotide
  Target: LAMA2; (-) strand; PAM type: NRG; PAM sequence: TGG
ggtgggtccaggtggggctg

SEQ ID NO: 57824 - DNA, 20 bp, Artificial Sequence
  Description of Artificial Sequence: Synthetic oligonucleotide
  Target: LAMA2; (-) strand; PAM type: NRG; PAM sequence: GGG
gggagtggtgggtccaggtg

SEQ ID NO: 57825 - DNA, 20 bp, Artificial Sequence
  Description of Artificial Sequence: Synthetic oligonucleotide
  Target: LAMA2; (-) strand; PAM type: NRG; PAM sequence: GGG
agggagtggtgggtccaggt

SEQ ID NO: 57826 - DNA, 20 bp, Artificial Sequence
  Description of Artificial Sequence: Synthetic oligonucleotide
  Target: LAMA2; (-) strand; PAM type: NRG; PAM sequence: TGG
gagggagtggtgggtccagg

SEQ ID NO: 57827 - DNA, 20 bp, Artificial Sequence
  Description of Artificial Sequence: Synthetic oligonucleotide
  Target: LAMA2; (-) strand; PAM type: NRG; PAM sequence: AGG
gatgagggagtggtgggtcc

SEQ ID NO: 57828 - DNA, 20 bp, Artificial Sequence
  Description of Artificial Sequence: Synthetic oligonucleotide
  Target: LAMA2; (-) strand; PAM type: NRG; PAM sequence: CAG
ggatgagggagtggtgggtc

SEQ ID NO: 57829 - DNA, 20 bp, Artificial Sequence
  Description of Artificial Sequence: Synthetic oligonucleotide
  Target: LAMA2; (-) strand; PAM type: NRG; PAM sequence: GGG
ccgcaggatgagggagtggt

SEQ ID NO: 57830 - DNA, 20 bp, Artificial Sequence
  Description of Artificial Sequence: Synthetic oligonucleotide
  Target: LAMA2; (-) strand; PAM type: NRG; PAM sequence: TGG
tccgcaggatgagggagtgg

SEQ ID NO: 57831 - DNA, 20 bp, Artificial Sequence
  Description of Artificial Sequence: Synthetic oligonucleotide
  Target: LAMA2; (-) strand; PAM type: NRG; PAM sequence: TGG
gcctccgcaggatgagggag

SEQ ID NO: 57832 - DNA, 20 bp, Artificial Sequence
  Description of Artificial Sequence: Synthetic oligonucleotide
  Target: LAMA2; (-) strand; PAM type: NRG; PAM sequence: GAG
atcgcctccgcaggatgagg

SEQ ID NO: 57833 - DNA, 20 bp, Artificial Sequence
  Description of Artificial Sequence: Synthetic oligonucleotide
  Target: LAMA2; (-) strand; PAM type: NRG; PAM sequence: GGG
agatcgcctccgcaggatga

SEQ ID NO: 57834 - DNA, 20 bp, Artificial Sequence
  Description of Artificial Sequence: Synthetic oligonucleotide
  Target: LAMA2; (-) strand; PAM type: NRG; PAM sequence: AGG
aagatcgcctccgcaggatg

SEQ ID NO: 57835 - DNA, 20 bp, Artificial Sequence
  Description of Artificial Sequence: Synthetic oligonucleotide
  Target: LAMA2; (-) strand; PAM type: NRG; PAM sequence: GAG
aaagatcgcctccgcaggat

SEQ ID NO: 57836 - DNA, 20 bp, Artificial Sequence
  Description of Artificial Sequence: Synthetic oligonucleotide
  Target: LAMA2; (-) strand; PAM type: NRG; PAM sequence: AGG
tgcgcaaagatcgcctccgc

SEQ ID NO: 57837 - DNA, 20 bp, Artificial Sequence
  Description of Artificial Sequence: Synthetic oligonucleotide
  Target: LAMA2; (-) strand; PAM type: NRG; PAM sequence: CAG
gtgcgcaaagatcgcctccg

SEQ ID NO: 57838 - DNA, 20 bp, Artificial Sequence
  Description of Artificial Sequence: Synthetic oligonucleotide
  Target: LAMA2; (-) strand; PAM type: NRG; PAM sequence: AAG
ggataacgccgccgtgcgca

SEQ ID NO: 57839 - DNA, 20 bp, Artificial Sequence
  Description of Artificial Sequence: Synthetic oligonucleotide
  Target: LAMA2; (-) strand; PAM type: NRG; PAM sequence: GGG
aacgccgaggctggcagcgt

SEQ ID NO: 57840 - DNA, 20 bp, Artificial Sequence
  Description of Artificial Sequence: Synthetic oligonucleotide
  Target: LAMA2; (-) strand; PAM type: NRG; PAM sequence: TGG
caacgccgaggctggcagcg

SEQ ID NO: 57841 - DNA, 20 bp, Artificial Sequence
  Description of Artificial Sequence: Synthetic oligonucleotide
  Target: LAMA2; (-) strand; PAM type: NRG; PAM sequence: CAG
ctctgcaacgccgaggctgg

SEQ ID NO: 57842 - DNA, 20 bp, Artificial Sequence
  Description of Artificial Sequence: Synthetic oligonucleotide
  Target: LAMA2; (-) strand; PAM type: NRG; PAM sequence: TGG
gtgctctgcaacgccgaggc

SEQ ID NO: 57843 - DNA, 20 bp, Artificial Sequence
  Description of Artificial Sequence: Synthetic oligonucleotide
  Target: LAMA2; (-) strand; PAM type: NRG; PAM sequence: AGG
ccccgtgctctgcaacgccg

SEQ ID NO: 57844 - DNA, 20 bp, Artificial Sequence
  Description of Artificial Sequence: Synthetic oligonucleotide
  Target: LAMA2; (-) strand; PAM type: NRG; PAM sequence: GAG
gccccgtgctctgcaacgcc

SEQ ID NO: 57845 - DNA, 20 bp, Artificial Sequence
  Description of Artificial Sequence: Synthetic oligonucleotide
  Target: LAMA2; (-) strand; PAM type: NRG; PAM sequence: CGG
ctgcagggctgcgggcgcca

SEQ ID NO: 57846 - DNA, 20 bp, Artificial Sequence
  Description of Artificial Sequence: Synthetic oligonucleotide
  Target: LAMA2; (-) strand; PAM type: NRG; PAM sequence: GGG
ggccggccctgcagggctgc

SEQ ID NO: 57847 - DNA, 20 bp, Artificial Sequence
  Description of Artificial Sequence: Synthetic oligonucleotide
  Target: LAMA2; (-) strand; PAM type: NRG; PAM sequence: CGG
cggccggccctgcagggctg

SEQ ID NO: 57848 - DNA, 20 bp, Artificial Sequence
  Description of Artificial Sequence: Synthetic oligonucleotide
  Target: LAMA2; (-) strand; PAM type: NRG; PAM sequence: GGG
cgctgccggccggccctgca

SEQ ID NO: 57849 - DNA, 20 bp, Artificial Sequence
  Description of Artificial Sequence: Synthetic oligonucleotide
  Target: LAMA2; (-) strand; PAM type: NRG; PAM sequence: AGG
ccgctgccggccggccctgc

SEQ ID NO: 57850 - DNA, 20 bp, Artificial Sequence
  Description of Artificial Sequence: Synthetic oligonucleotide
  Target: LAMA2; (-) strand; PAM type: NRG; PAM sequence: CAG
cccgctgccggccggccctg

SEQ ID NO: 57851 - DNA, 20 bp, Artificial Sequence
  Description of Artificial Sequence: Synthetic oligonucleotide
  Target: LAMA2; (-) strand; PAM type: NRG; PAM sequence: CGG
attgagaccccgctgccggc

SEQ ID NO: 57852 - DNA, 20 bp, Artificial Sequence
  Description of Artificial Sequence: Synthetic oligonucleotide
  Target: LAMA2; (-) strand; PAM type: NRG; PAM sequence: CGG
gctgattgagaccccgctgc

SEQ ID NO: 57853 - DNA, 20 bp, Artificial Sequence
  Description of Artificial Sequence: Synthetic oligonucleotide
  Target: LAMA2; (-) strand; PAM type: NRG; PAM sequence: GAG
cgggctgtgggctgctgatt

SEQ ID NO: 57854 - DNA, 20 bp, Artificial Sequence
  Description of Artificial Sequence: Synthetic oligonucleotide
  Target: LAMA2; (-) strand; PAM type: NRG; PAM sequence: GGG
cgccgccctgtgcgggctgt

SEQ ID NO: 57855 - DNA, 20 bp, Artificial Sequence
  Description of Artificial Sequence: Synthetic oligonucleotide
  Target: LAMA2; (-) strand; PAM type: NRG; PAM sequence: TGG
gcgccgccctgtgcgggctg

SEQ ID NO: 57856 - DNA, 20 bp, Artificial Sequence
  Description of Artificial Sequence: Synthetic oligonucleotide
  Target: LAMA2; (-) strand; PAM type: NRG; PAM sequence: GGG
ggcgcggcgccgccctgtgc

SEQ ID NO: 57857 - DNA, 20 bp, Artificial Sequence
  Description of Artificial Sequence: Synthetic oligonucleotide
  Target: LAMA2; (-) strand; PAM type: NRG; PAM sequence: CGG
gggcgcggcgccgccctgtg

SEQ ID NO: 57858 - DNA, 20 bp, Artificial Sequence
  Description of Artificial Sequence: Synthetic oligonucleotide
  Target: LAMA2; (-) strand; PAM type: NRG; PAM sequence: CGG
gtggctgtagctgccgggcg

SEQ ID NO: 57859 - DNA, 20 bp, Artificial Sequence
  Description of Artificial Sequence: Synthetic oligonucleotide
  Target: LAMA2; (-) strand; PAM type: NRG; PAM sequence: GGG
tcagagtggctgtagctgcc

SEQ ID NO: 57860 - DNA, 20 bp, Artificial Sequence
  Description of Artificial Sequence: Synthetic oligonucleotide
  Target: LAMA2; (-) strand; PAM type: NRG; PAM sequence: CGG
gtcagagtggctgtagctgc

SEQ ID NO: 57861 - DNA, 20 bp, Artificial Sequence
  Description of Artificial Sequence: Synthetic oligonucleotide
  Target: LAMA2; (-) strand; PAM type: NRG; PAM sequence: TAG
cgtgcacgtcagagtggctg

SEQ ID NO: 57862 - DNA, 20 bp, Artificial Sequence
  Description of Artificial Sequence: Synthetic oligonucleotide
  Target: LAMA2; (-) strand; PAM type: NRG; PAM sequence: TGG
tgccgccgtgcacgtcagag

SEQ ID NO: 57863 - DNA, 20 bp, Artificial Sequence
  Description of Artificial Sequence: Synthetic oligonucleotide
  Target: LAMA2; (-) strand; PAM type: NRG; PAM sequence: GAG
cagtgccgccgtgcacgtca

SEQ ID NO: 57864 - DNA, 20 bp, Artificial Sequence
  Description of Artificial Sequence: Synthetic oligonucleotide
  Target: LAMA2; (-) strand; PAM type: NRG; PAM sequence: CAG
cgcagtgccgccgtgcacgt

SEQ ID NO: 57865 - DNA, 20 bp, Artificial Sequence
  Description of Artificial Sequence: Synthetic oligonucleotide
  Target: LAMA2; (-) strand; PAM type: NRG; PAM sequence: CAG
gcagtcgcgcctagcaaacg

SEQ ID NO: 57866 - DNA, 20 bp, Artificial Sequence
  Description of Artificial Sequence: Synthetic oligonucleotide
  Target: LAMA2; (-) strand; PAM type: NRG; PAM sequence: TAG
tcccttgtggcagtcgcgcc

SEQ ID NO: 57867 - DNA, 20 bp, Artificial Sequence
  Description of Artificial Sequence: Synthetic oligonucleotide
  Target: LAMA2; (-) strand; PAM type: NRG; PAM sequence: CAG
cccgggcacttcccttgtgg

SEQ ID NO: 57868 - DNA, 20 bp, Artificial Sequence
  Description of Artificial Sequence: Synthetic oligonucleotide
  Target: LAMA2; (-) strand; PAM type: NRG; PAM sequence: TGG
acacccgggcacttcccttg

SEQ ID NO: 57869 - DNA, 20 bp, Artificial Sequence
  Description of Artificial Sequence: Synthetic oligonucleotide
  Target: LAMA2; (-) strand; PAM type: NRG; PAM sequence: GGG
ccacggcaaccagcacaccc

SEQ ID NO: 57870 - DNA, 20 bp, Artificial Sequence
  Description of Artificial Sequence: Synthetic oligonucleotide
  Target: LAMA2; (-) strand; PAM type: NRG; PAM sequence: CGG
gccacggcaaccagcacacc

SEQ ID NO: 57871 - DNA, 20 bp, Artificial Sequence
  Description of Artificial Sequence: Synthetic oligonucleotide
  Target: LAMA2; (-) strand; PAM type: NRG; PAM sequence: CAG
gaaatagaggccacggcaac

SEQ ID NO: 57872 - DNA, 20 bp, Artificial Sequence
  Description of Artificial Sequence: Synthetic oligonucleotide
  Target: LAMA2; (-) strand; PAM type: NRG; PAM sequence: CGG
tactttagaaatagaggcca

SEQ ID NO: 57873 - DNA, 20 bp, Artificial Sequence
  Description of Artificial Sequence: Synthetic oligonucleotide
  Target: LAMA2; (-) strand; PAM type: NRG; PAM sequence: AGG
aagaaatactttagaaatag

SEQ ID NO: 57874 - DNA, 20 bp, Artificial Sequence
  Description of Artificial Sequence: Synthetic oligonucleotide
  Target: LAMA2; (-) strand; PAM type: NRG; PAM sequence: GAG
taagaaatactttagaaata

SEQ ID NO: 57875 - DNA, 20 bp, Artificial Sequence
  Description of Artificial Sequence: Synthetic oligonucleotide
  Target: LAMA2; (-) strand; PAM type: NRG; PAM sequence: TAG
tataagaaatactttagaaa

SEQ ID NO: 57876 - DNA, 20 bp, Artificial Sequence
  Description of Artificial Sequence: Synthetic oligonucleotide
  Target: LAMA2; (-) strand; PAM type: NRG; PAM sequence: TAG
ggaaaatataagaaatactt

SEQ ID NO: 57877 - DNA, 20 bp, Artificial Sequence
  Description of Artificial Sequence: Synthetic oligonucleotide
  Target: LAMA2; (-) strand; PAM type: NRG; PAM sequence: AAG
gaaaagaaataggaaaatat

SEQ ID NO: 57878 - DNA, 20 bp, Artificial Sequence
  Description of Artificial Sequence: Synthetic oligonucleotide
  Target: LAMA2; (-) strand; PAM type: NRG; PAM sequence: AGG
cagtaggaatgaaaagaaat

SEQ ID NO: 57879 - DNA, 20 bp, Artificial Sequence
  Description of Artificial Sequence: Synthetic oligonucleotide
  Target: LAMA2; (-) strand; PAM type: NRG; PAM sequence: TAG
gcagtaggaatgaaaagaaa

SEQ ID NO: 57880 - DNA, 20 bp, Artificial Sequence
  Description of Artificial Sequence: Synthetic oligonucleotide
  Target: LAMA2; (-) strand; PAM type: NRG; PAM sequence: AAG
gtgtaagcagtaggaatgaa

SEQ ID NO: 57881 - DNA, 20 bp, Artificial Sequence
  Description of Artificial Sequence: Synthetic oligonucleotide
  Target: LAMA2; (-) strand; PAM type: NRG; PAM sequence: AGG
tcaatgagggtgtaagcagt

SEQ ID NO: 57882 - DNA, 20 bp, Artificial Sequence
  Description of Artificial Sequence: Synthetic oligonucleotide
  Target: LAMA2; (-) strand; PAM type: NRG; PAM sequence: TAG
gtcaatgagggtgtaagcag

SEQ ID NO: 57883 - DNA, 20 bp, Artificial Sequence
  Description of Artificial Sequence: Synthetic oligonucleotide
  Target: LAMA2; (-) strand; PAM type: NRG; PAM sequence: CAG
tcagtcaatgagggtgtaag

SEQ ID NO: 57884 - DNA, 20 bp, Artificial Sequence
  Description of Artificial Sequence: Synthetic oligonucleotide
  Target: LAMA2; (-) strand; PAM type: NRG; PAM sequence: AAG
agttcagtcaatgagggtgt

SEQ ID NO: 57885 - DNA, 20 bp, Artificial Sequence
  Description of Artificial Sequence: Synthetic oligonucleotide
  Target: LAMA2; (-) strand; PAM type: NRG; PAM sequence: GGG
tgcaatagttcagtcaatga

SEQ ID NO: 57886 - DNA, 20 bp, Artificial Sequence
  Description of Artificial Sequence: Synthetic oligonucleotide
  Target: LAMA2; (-) strand; PAM type: NRG; PAM sequence: AGG
ttgcaatagttcagtcaatg

SEQ ID NO: 57887 - DNA, 20 bp, Artificial Sequence
  Description of Artificial Sequence: Synthetic oligonucleotide
  Target: LAMA2; (-) strand; PAM type: NRG; PAM sequence: GAG
gttgcaatagttcagtcaat

SEQ ID NO: 57888 - DNA, 20 bp, Artificial Sequence
  Description of Artificial Sequence: Synthetic oligonucleotide
  Target: LAMA2; (-) strand; PAM type: NRG; PAM sequence: CAG
aagaggcggttgcaatagtt

SEQ ID NO: 57889 - DNA, 20 bp, Artificial Sequence
  Description of Artificial Sequence: Synthetic oligonucleotide
  Target: LAMA2; (-) strand; PAM type: NRG; PAM sequence: TAG
acctcaagaggcggttgcaa

SEQ ID NO: 57890 - DNA, 20 bp, Artificial Sequence
  Description of Artificial Sequence: Synthetic oligonucleotide
  Target: LAMA2; (-) strand; PAM type: NRG; PAM sequence: CGG
atttcagtcacctcaagagg

SEQ ID NO: 57891 - DNA, 20 bp, Artificial Sequence
  Description of Artificial Sequence: Synthetic oligonucleotide
  Target: LAMA2; (-) strand; PAM type: NRG; PAM sequence: AGG
aatatttcagtcacctcaag

SEQ ID NO: 57892 - DNA, 20 bp, Artificial Sequence
  Description of Artificial Sequence: Synthetic oligonucleotide
  Target: LAMA2; (-) strand; PAM type: NRG; PAM sequence: GAG
gaatatttcagtcacctcaa

SEQ ID NO: 57893 - DNA, 20 bp, Artificial Sequence
  Description of Artificial Sequence: Synthetic oligonucleotide
  Target: LAMA2; (-) strand; PAM type: NRG; PAM sequence: AAG
atgaatatttcagtcacctc

SEQ ID NO: 57894 - DNA, 20 bp, Artificial Sequence
  Description of Artificial Sequence: Synthetic oligonucleotide
  Target: LAMA2; (-) strand; PAM type: NRG; PAM sequence: CAG
tgcaatatctatgaatattt

SEQ ID NO: 57895 - DNA, 20 bp, Artificial Sequence
  Description of Artificial Sequence: Synthetic oligonucleotide
  Target: LAMA2; (-) strand; PAM type: NRG; PAM sequence: GAG
tcctactatatgcccaaaag

SEQ ID NO: 57896 - DNA, 20 bp, Artificial Sequence
  Description of Artificial Sequence: Synthetic oligonucleotide
  Target: LAMA2; (-) strand; PAM type: NRG; PAM sequence: AGG
aatcctactatatgcccaaa

SEQ ID NO: 57897 - DNA, 20 bp, Artificial Sequence
  Description of Artificial Sequence: Synthetic oligonucleotide
  Target: LAMA2; (-) strand; PAM type: NRG; PAM sequence: AAG
taatcctactatatgcccaa

SEQ ID NO: 57898 - DNA, 20 bp, Artificial Sequence
  Description of Artificial Sequence: Synthetic oligonucleotide
  Target: LAMA2; (-) strand; PAM type: NRG; PAM sequence: GAG
ctatgcctaatttcaggggt

SEQ ID NO: 57899 - DNA, 20 bp, Artificial Sequence
  Description of Artificial Sequence: Synthetic oligonucleotide
  Target: LAMA2; (-) strand; PAM type: NRG; PAM sequence: GGG
gtgtctatgcctaatttcag

SEQ ID NO: 57900 - DNA, 20 bp, Artificial Sequence
  Description of Artificial Sequence: Synthetic oligonucleotide
  Target: LAMA2; (-) strand; PAM type: NRG; PAM sequence: GGG
ggtgtctatgcctaatttca

SEQ ID NO: 57901 - DNA, 20 bp, Artificial Sequence
  Description of Artificial Sequence: Synthetic oligonucleotide
  Target: LAMA2; (-) strand; PAM type: NRG; PAM sequence: AGG
cggtgtctatgcctaatttc

SEQ ID NO: 57902 - DNA, 20 bp, Artificial Sequence
  Description of Artificial Sequence: Synthetic oligonucleotide
  Target: LAMA2; (-) strand; PAM type: NRG; PAM sequence: CAG
acggtgtctatgcctaattt

SEQ ID NO: 57903 - DNA, 20 bp, Artificial Sequence
  Description of Artificial Sequence: Synthetic oligonucleotide
  Target: LAMA2; (-) strand; PAM type: NRG; PAM sequence: CGG
ttctgttcacatttcattga

SEQ ID NO: 57904 - DNA, 20 bp, Artificial Sequence
  Description of Artificial Sequence: Synthetic oligonucleotide
  Target: LAMA2; (-) strand; PAM type: NRG; PAM sequence: CAG
aatctaagagtaaagcatgt

SEQ ID NO: 57905 - DNA, 20 bp, Artificial Sequence
  Description of Artificial Sequence: Synthetic oligonucleotide
  Target: LAMA2; (-) strand; PAM type: NRG; PAM sequence: AAG
tcgtattcaatctaagagta

SEQ ID NO: 57906 - DNA, 20 bp, Artificial Sequence
  Description of Artificial Sequence: Synthetic oligonucleotide
  Target: LAMA2; (-) strand; PAM type: NRG; PAM sequence: GAG
aaaactcgtattcaatctaa

SEQ ID NO: 57907 - DNA, 20 bp, Artificial Sequence
  Description of Artificial Sequence: Synthetic oligonucleotide
  Target: LAMA2; (-) strand; PAM type: NRG; PAM sequence: AAG
gtaaaactcgtattcaatct

SEQ ID NO: 57908 - DNA, 20 bp, Artificial Sequence
  Description of Artificial Sequence: Synthetic oligonucleotide
  Target: LAMA2; (-) strand; PAM type: NRG; PAM sequence: TGG
tagcatggcgaattatgcac

SEQ ID NO: 57909 - DNA, 20 bp, Artificial Sequence
  Description of Artificial Sequence: Synthetic oligonucleotide
  Target: LAMA2; (-) strand; PAM type: NRG; PAM sequence: TGG
gatcatctgtctctatagca

SEQ ID NO: 57910 - DNA, 20 bp, Artificial Sequence
  Description of Artificial Sequence: Synthetic oligonucleotide
  Target: LAMA2; (-) strand; PAM type: NRG; PAM sequence: TAG
tggaagatcatctgtctcta

SEQ ID NO: 57911 - DNA, 20 bp, Artificial Sequence
  Description of Artificial Sequence: Synthetic oligonucleotide
  Target: LAMA2; (-) strand; PAM type: NRG; PAM sequence: AAG
acactcaggcatccatctgg

SEQ ID NO: 57912 - DNA, 20 bp, Artificial Sequence
  Description of Artificial Sequence: Synthetic oligonucleotide
  Target: LAMA2; (-) strand; PAM type: NRG; PAM sequence: TGG
tctacactcaggcatccatc

SEQ ID NO: 57913 - DNA, 20 bp, Artificial Sequence
  Description of Artificial Sequence: Synthetic oligonucleotide
  Target: LAMA2; (-) strand; PAM type: NRG; PAM sequence: AGG
gatctatatattctacactc

SEQ ID NO: 57914 - DNA, 20 bp, Artificial Sequence
  Description of Artificial Sequence: Synthetic oligonucleotide
  Target: LAMA2; (-) strand; PAM type: NRG; PAM sequence: CAG
tgatctatatattctacact

SEQ ID NO: 57915 - DNA, 20 bp, Artificial Sequence
  Description of Artificial Sequence: Synthetic oligonucleotide
  Target: LAMA2; (-) strand; PAM type: NRG; PAM sequence: GGG
gcccatgtgtgaagggtggg

SEQ ID NO: 57916 - DNA, 20 bp, Artificial Sequence
  Description of Artificial Sequence: Synthetic oligonucleotide
  Target: LAMA2; (-) strand; PAM type: NRG; PAM sequence: GGG
ggcccatgtgtgaagggtgg

SEQ ID NO: 57917 - DNA, 20 bp, Artificial Sequence
  Description of Artificial Sequence: Synthetic oligonucleotide
  Target: LAMA2; (-) strand; PAM type: NRG; PAM sequence: GGG
gggcccatgtgtgaagggtg

SEQ ID NO: 57918 - DNA, 20 bp, Artificial Sequence
  Description of Artificial Sequence: Synthetic oligonucleotide
  Target: LAMA2; (-) strand; PAM type: NRG; PAM sequence: GGG
tgggcccatgtgtgaagggt

SEQ ID NO: 57919 - DNA, 20 bp, Artificial Sequence
  Description of Artificial Sequence: Synthetic oligonucleotide
  Target: LAMA2; (-) strand; PAM type: NRG; PAM sequence: TGG
ttgggcccatgtgtgaaggg

SEQ ID NO: 57920 - DNA, 20 bp, Artificial Sequence
  Description of Artificial Sequence: Synthetic oligonucleotide
  Target: LAMA2; (-) strand; PAM type: NRG; PAM sequence: GGG
attttgggcccatgtgtgaa

SEQ ID NO: 57921 - DNA, 20 bp, Artificial Sequence
  Description of Artificial Sequence: Synthetic oligonucleotide
  Target: LAMA2; (-) strand; PAM type: NRG; PAM sequence: AGG
cattttgggcccatgtgtga

SEQ ID NO: 57922 - DNA, 20 bp, Artificial Sequence
  Description of Artificial Sequence: Synthetic oligonucleotide
  Target: LAMA2; (-) strand; PAM type: NRG; PAM sequence: AAG
acattttgggcccatgtgtg

SEQ ID NO: 57923 - DNA, 20 bp, Artificial Sequence
  Description of Artificial Sequence: Synthetic oligonucleotide
  Target: LAMA2; (-) strand; PAM type: NRG; PAM sequence: GGG
tcctgctccgtgtacatttt

SEQ ID NO: 57924 - DNA, 20 bp, Artificial Sequence
  Description of Artificial Sequence: Synthetic oligonucleotide
  Target: LAMA2; (-) strand; PAM type: NRG; PAM sequence: TGG
ctcctgctccgtgtacattt

SEQ ID NO: 57925 - DNA, 20 bp, Artificial Sequence
  Description of Artificial Sequence: Synthetic oligonucleotide
  Target: LAMA2; (-) strand; PAM type: NRG; PAM sequence: AGG
ttaaactaacaaagatagca

SEQ ID NO: 57926 - DNA, 20 bp, Artificial Sequence
  Description of Artificial Sequence: Synthetic oligonucleotide
  Target: LAMA2; (-) strand; PAM type: NRG; PAM sequence: AAG
attaaactaacaaagatagc

SEQ ID NO: 57927 - DNA, 20 bp, Artificial Sequence
  Description of Artificial Sequence: Synthetic oligonucleotide
  Target: LAMA2; (-) strand; PAM type: NRG; PAM sequence: TAG
gtggattaaactaacaaaga

SEQ ID NO: 57928 - DNA, 20 bp, Artificial Sequence
  Description of Artificial Sequence: Synthetic oligonucleotide
  Target: LAMA2; (-) strand; PAM type: NRG; PAM sequence: AAG
ctctgtggattaaactaaca

SEQ ID NO: 57929 - DNA, 20 bp, Artificial Sequence
  Description of Artificial Sequence: Synthetic oligonucleotide
  Target: LAMA2; (-) strand; PAM type: NRG; PAM sequence: TGG
tgcagactccaaagtctctg

SEQ ID NO: 57930 - DNA, 20 bp, Artificial Sequence
  Description of Artificial Sequence: Synthetic oligonucleotide
  Target: LAMA2; (-) strand; PAM type: NRG; PAM sequence: AAG
ctgtataactgcagactcca

SEQ ID NO: 57931 - DNA, 20 bp, Artificial Sequence
  Description of Artificial Sequence: Synthetic oligonucleotide
  Target: LAMA2; (-) strand; PAM type: NRG; PAM sequence: CAG
gctaggatgctgtataactg

SEQ ID NO: 57932 - DNA, 20 bp, Artificial Sequence
  Description of Artificial Sequence: Synthetic oligonucleotide
  Target: LAMA2; (-) strand; PAM type: NRG; PAM sequence: AGG
catatcagtcaggacaggct

SEQ ID NO: 57933 - DNA, 20 bp, Artificial Sequence
  Description of Artificial Sequence: Synthetic oligonucleotide
  Target: LAMA2; (-) strand; PAM type: NRG; PAM sequence: TAG
tcatatcagtcaggacaggc

SEQ ID NO: 57934 - DNA, 20 bp, Artificial Sequence
  Description of Artificial Sequence: Synthetic oligonucleotide
  Target: LAMA2; (-) strand; PAM type: NRG; PAM sequence: AGG
gggatcatatcagtcaggac

SEQ ID NO: 57935 - DNA, 20 bp, Artificial Sequence
  Description of Artificial Sequence: Synthetic oligonucleotide
  Target: LAMA2; (-) strand; PAM type: NRG; PAM sequence: CAG
agggatcatatcagtcagga

SEQ ID NO: 57936 - DNA, 20 bp, Artificial Sequence
  Description of Artificial Sequence: Synthetic oligonucleotide
  Target: LAMA2; (-) strand; PAM type: NRG; PAM sequence: AGG
gttaagggatcatatcagtc

SEQ ID NO: 57937 - DNA, 20 bp, Artificial Sequence
  Description of Artificial Sequence: Synthetic oligonucleotide
  Target: LAMA2; (-) strand; PAM type: NRG; PAM sequence: CAG
agttaagggatcatatcagt

SEQ ID NO: 57938 - DNA, 20 bp, Artificial Sequence
  Description of Artificial Sequence: Synthetic oligonucleotide
  Target: LAMA2; (-) strand; PAM type: NRG; PAM sequence: CAG
aatcagttaagggatcatat

SEQ ID NO: 57939 - DNA, 20 bp, Artificial Sequence
  Description of Artificial Sequence: Synthetic oligonucleotide
  Target: LAMA2; (-) strand; PAM type: NRG; PAM sequence: GGG
tgagtagaaaaatcagttaa

SEQ ID NO: 57940 - DNA, 20 bp, Artificial Sequence
  Description of Artificial Sequence: Synthetic oligonucleotide
  Target: LAMA2; (-) strand; PAM type: NRG; PAM sequence: AGG
ttgagtagaaaaatcagtta

SEQ ID NO: 57941 - DNA, 20 bp, Artificial Sequence
  Description of Artificial Sequence: Synthetic oligonucleotide
  Target: LAMA2; (-) strand; PAM type: NRG; PAM sequence: AAG
tttgagtagaaaaatcagtt

SEQ ID NO: 57942 - DNA, 20 bp, Artificial Sequence
  Description of Artificial Sequence: Synthetic oligonucleotide
  Target: LAMA2; (-) strand; PAM type: NRG; PAM sequence: CAG
gagactttgagtagaaaaat

SEQ ID NO: 57943 - DNA, 20 bp, Artificial Sequence
  Description of Artificial Sequence: Synthetic oligonucleotide
  Target: LAMA2; (-) strand; PAM type: NRG; PAM sequence: TAG
gagggagaagagactttgag

SEQ ID NO: 57944 - DNA, 20 bp, Artificial Sequence
  Description of Artificial Sequence: Synthetic oligonucleotide
  Target: LAMA2; (-) strand; PAM type: NRG; PAM sequence: GAG
tcggagggagaagagacttt

SEQ ID NO: 57945 - DNA, 20 bp, Artificial Sequence
  Description of Artificial Sequence: Synthetic oligonucleotide
  Target: LAMA2; (-) strand; PAM type: NRG; PAM sequence: GAG
tagaataatcggagggagaa

SEQ ID NO: 57946 - DNA, 20 bp, Artificial Sequence
  Description of Artificial Sequence: Synthetic oligonucleotide
  Target: LAMA2; (-) strand; PAM type: NRG; PAM sequence: AAG
tgtagaataatcggagggag

SEQ ID NO: 57947 - DNA, 20 bp, Artificial Sequence
  Description of Artificial Sequence: Synthetic oligonucleotide
  Target: LAMA2; (-) strand; PAM type: NRG; PAM sequence: GAG
tgatgtagaataatcggagg

SEQ ID NO: 57948 - DNA, 20 bp, Artificial Sequence
  Description of Artificial Sequence: Synthetic oligonucleotide
  Target: LAMA2; (-) strand; PAM type: NRG; PAM sequence: GGG
agtgatgtagaataatcgga

SEQ ID NO: 57949 - DNA, 20 bp, Artificial Sequence
  Description of Artificial Sequence: Synthetic oligonucleotide
  Target: LAMA2; (-) strand; PAM type: NRG; PAM sequence: AGG
tagtgatgtagaataatcgg

SEQ ID NO: 57950 - DNA, 20 bp, Artificial Sequence
  Description of Artificial Sequence: Synthetic oligonucleotide
  Target: LAMA2; (-) strand; PAM type: NRG; PAM sequence: GAG
atagtgatgtagaataatcg

SEQ ID NO: 57951 - DNA, 20 bp, Artificial Sequence
  Description of Artificial Sequence: Synthetic oligonucleotide
  Target: LAMA2; (-) strand; PAM type: NRG; PAM sequence: CGG
tgatagtgatgtagaataat

SEQ ID NO: 57952 - DNA, 20 bp, Artificial Sequence
  Description of Artificial Sequence: Synthetic oligonucleotide
  Target: LAMA2; (-) strand; PAM type: NRG; PAM sequence: TAG
agattaatatgatagtgatg

SEQ ID NO: 57953 - DNA, 20 bp, Artificial Sequence
  Description of Artificial Sequence: Synthetic oligonucleotide
  Target: LAMA2; (-) strand; PAM type: NRG; PAM sequence: TAG
tttcagaaagattaatatga

SEQ ID NO: 57954 - DNA, 20 bp, Artificial Sequence
  Description of Artificial Sequence: Synthetic oligonucleotide
  Target: LAMA2; (-) strand; PAM type: NRG; PAM sequence: AAG
aattagagttctatttcaga

SEQ ID NO: 57955 - DNA, 20 bp, Artificial Sequence
  Description of Artificial Sequence: Synthetic oligonucleotide
  Target: LAMA2; (-) strand; PAM type: NRG; PAM sequence: CAG
atataattagagttctattt

SEQ ID NO: 57956 - DNA, 20 bp, Artificial Sequence
  Description of Artificial Sequence: Synthetic oligonucleotide
  Target: LAMA2; (-) strand; PAM type: NRG; PAM sequence: GAG
ataaggaatttatataatta

SEQ ID NO: 57957 - DNA, 20 bp, Artificial Sequence
  Description of Artificial Sequence: Synthetic oligonucleotide
  Target: LAMA2; (-) strand; PAM type: NRG; PAM sequence: TAG
tcataaggaatttatataat

SEQ ID NO: 57958 - DNA, 20 bp, Artificial Sequence
  Description of Artificial Sequence: Synthetic oligonucleotide
  Target: LAMA2; (-) strand; PAM type: NRG; PAM sequence: AGG
aatattcaaagattttcata

SEQ ID NO: 57959 - DNA, 20 bp, Artificial Sequence
  Description of Artificial Sequence: Synthetic oligonucleotide
  Target: LAMA2; (-) strand; PAM type: NRG; PAM sequence: AAG
aaatattcaaagattttcat

SEQ ID NO: 57960 - DNA, 20 bp, Artificial Sequence
  Description of Artificial Sequence: Synthetic oligonucleotide
  Target: LAMA2; (-) strand; PAM type: NRG; PAM sequence: AAG
agataacagggaaatattca

SEQ ID NO: 57961 - DNA, 20 bp, Artificial Sequence
  Description of Artificial Sequence: Synthetic oligonucleotide
  Target: LAMA2; (-) strand; PAM type: NRG; PAM sequence: GGG
gaaagccagtgaagataaca

SEQ ID NO: 57962 - DNA, 20 bp, Artificial Sequence
  Description of Artificial Sequence: Synthetic oligonucleotide
  Target: LAMA2; (-) strand; PAM type: NRG; PAM sequence: AGG
tgaaagccagtgaagataac

SEQ ID NO: 57963 - DNA, 20 bp, Artificial Sequence
  Description of Artificial Sequence: Synthetic oligonucleotide
  Target: LAMA2; (-) strand; PAM type: NRG; PAM sequence: CAG
ttgaaagccagtgaagataa

SEQ ID NO: 57964 - DNA, 20 bp, Artificial Sequence
  Description of Artificial Sequence: Synthetic oligonucleotide
  Target: LAMA2; (-) strand; PAM type: NRG; PAM sequence: AAG
gatggtcttgaaagccagtg

SEQ ID NO: 57965 - DNA, 20 bp, Artificial Sequence
  Description of Artificial Sequence: Synthetic oligonucleotide
  Target: LAMA2; (-) strand; PAM type: NRG; PAM sequence: CAG
actgtgatggtcttgaaagc

SEQ ID NO: 57966 - DNA, 20 bp, Artificial Sequence
  Description of Artificial Sequence: Synthetic oligonucleotide
  Target: LAMA2; (-) strand; PAM type: NRG; PAM sequence: AAG
gcacactgtgatggtcttga

SEQ ID NO: 57967 - DNA, 20 bp, Artificial Sequence
  Description of Artificial Sequence: Synthetic oligonucleotide
  Target: LAMA2; (-) strand; PAM type: NRG; PAM sequence: TGG
agttgagatgcacactgtga

SEQ ID NO: 57968 - DNA, 20 bp, Artificial Sequence
  Description of Artificial Sequence: Synthetic oligonucleotide
  Target: LAMA2; (-) strand; PAM type: NRG; PAM sequence: GAG
gggtgttttaaaaggaagtt

SEQ ID NO: 57969 - DNA, 20 bp, Artificial Sequence
  Description of Artificial Sequence: Synthetic oligonucleotide
  Target: LAMA2; (-) strand; PAM type: NRG; PAM sequence: AAG
accgtgggtgttttaaaagg

SEQ ID NO: 57970 - DNA, 20 bp, Artificial Sequence
  Description of Artificial Sequence: Synthetic oligonucleotide
  Target: LAMA2; (-) strand; PAM type: NRG; PAM sequence: AGG
gaaaccgtgggtgttttaaa

SEQ ID NO: 57971 - DNA, 20 bp, Artificial Sequence
  Description of Artificial Sequence: Synthetic oligonucleotide
  Target: LAMA2; (-) strand; PAM type: NRG; PAM sequence: AAG
ggaaaccgtgggtgttttaa

SEQ ID NO: 57972 - DNA, 20 bp, Artificial Sequence
  Description of Artificial Sequence: Synthetic oligonucleotide
  Target: LAMA2; (-) strand; PAM type: NRG; PAM sequence: GGG
tgtacacgtagggaaaccgt

SEQ ID NO: 57973 - DNA, 20 bp, Artificial Sequence
  Description of Artificial Sequence: Synthetic oligonucleotide
  Target: LAMA2; (-) strand; PAM type: NRG; PAM sequence: TGG
gtgtacacgtagggaaaccg

SEQ ID NO: 57974 - DNA, 20 bp, Artificial Sequence
  Description of Artificial Sequence: Synthetic oligonucleotide
  Target: LAMA2; (-) strand; PAM type: NRG; PAM sequence: GGG
aaagtgtgtgtgtacacgta

SEQ ID NO: 57975 - DNA, 20 bp, Artificial Sequence
  Description of Artificial Sequence: Synthetic oligonucleotide
  Target: LAMA2; (-) strand; PAM type: NRG; PAM sequence: AGG
gaaagtgtgtgtgtacacgt

SEQ ID NO: 57976 - DNA, 20 bp, Artificial Sequence
  Description of Artificial Sequence: Synthetic oligonucleotide
  Target: LAMA2; (-) strand; PAM type: NRG; PAM sequence: TAG
agaaagtgtgtgtgtacacg

SEQ ID NO: 57977 - DNA, 20 bp, Artificial Sequence
  Description of Artificial Sequence: Synthetic oligonucleotide
  Target: LAMA2; (-) strand; PAM type: NRG; PAM sequence: AAG
agaaaagcgaacgtgttaga

SEQ ID NO: 57978 - DNA, 20 bp, Artificial Sequence
  Description of Artificial Sequence: Synthetic oligonucleotide
  Target: LAMA2; (-) strand; PAM type: NRG; PAM sequence: TAG
gaacagaaaagcgaacgtgt

SEQ ID NO: 57979 - DNA, 20 bp, Artificial Sequence
  Description of Artificial Sequence: Synthetic oligonucleotide
  Target: LAMA2; (-) strand; PAM type: NRG; PAM sequence: AAG
ttagaatcataggaacagaa

SEQ ID NO: 57980 - DNA, 20 bp, Artificial Sequence
  Description of Artificial Sequence: Synthetic oligonucleotide
  Target: LAMA2; (-) strand; PAM type: NRG; PAM sequence: CAG
gcatcttagaatcataggaa

SEQ ID NO: 57981 - DNA, 20 bp, Artificial Sequence
  Description of Artificial Sequence: Synthetic oligonucleotide
  Target: LAMA2; (-) strand; PAM type: NRG; PAM sequence: AGG
agagagcatcttagaatcat

SEQ ID NO: 57982 - DNA, 20 bp, Artificial Sequence
  Description of Artificial Sequence: Synthetic oligonucleotide
  Target: LAMA2; (-) strand; PAM type: NRG; PAM sequence: TAG
cagagagcatcttagaatca

SEQ ID NO: 57983 - DNA, 20 bp, Artificial Sequence
  Description of Artificial Sequence: Synthetic oligonucleotide
  Target: LAMA2; (-) strand; PAM type: NRG; PAM sequence: TAG
aggactagcagagagcatct

SEQ ID NO: 57984 - DNA, 20 bp, Artificial Sequence
  Description of Artificial Sequence: Synthetic oligonucleotide
  Target: LAMA2; (-) strand; PAM type: NRG; PAM sequence: GAG
acttagacaggactagcaga

SEQ ID NO: 57985 - DNA, 20 bp, Artificial Sequence
  Description of Artificial Sequence: Synthetic oligonucleotide
  Target: LAMA2; (-) strand; PAM type: NRG; PAM sequence: GAG
gcacttagacaggactagca

SEQ ID NO: 57986 - DNA, 20 bp, Artificial Sequence
  Description of Artificial Sequence: Synthetic oligonucleotide
  Target: LAMA2; (-) strand; PAM type: NRG; PAM sequence: CAG
tagcacttagacaggactag

SEQ ID NO: 57987 - DNA, 20 bp, Artificial Sequence
  Description of Artificial Sequence: Synthetic oligonucleotide
  Target: LAMA2; (-) strand; PAM type: NRG; PAM sequence: TAG
aggtagcacttagacaggac

SEQ ID NO: 57988 - DNA, 20 bp, Artificial Sequence
  Description of Artificial Sequence: Synthetic oligonucleotide
  Target: LAMA2; (-) strand; PAM type: NRG; PAM sequence: AGG
agaataggtagcacttagac

SEQ ID NO: 57989 - DNA, 20 bp, Artificial Sequence
  Description of Artificial Sequence: Synthetic oligonucleotide
  Target: LAMA2; (-) strand; PAM type: NRG; PAM sequence: CAG
aagaataggtagcacttaga

SEQ ID NO: 57990 - DNA, 20 bp, Artificial Sequence
  Description of Artificial Sequence: Synthetic oligonucleotide
  Target: LAMA2; (-) strand; PAM type: NRG; PAM sequence: TAG
acttaagaataggtagcact

SEQ ID NO: 57991 - DNA, 20 bp, Artificial Sequence
  Description of Artificial Sequence: Synthetic oligonucleotide
  Target: LAMA2; (-) strand; PAM type: NRG; PAM sequence: TAG
aactgttacttaagaatagg

SEQ ID NO: 57992 - DNA, 20 bp, Artificial Sequence
  Description of Artificial Sequence: Synthetic oligonucleotide
  Target: LAMA2; (-) strand; PAM type: NRG; PAM sequence: AGG
ttgaactgttacttaagaat

SEQ ID NO: 57993 - DNA, 20 bp, Artificial Sequence
  Description of Artificial Sequence: Synthetic oligonucleotide
  Target: LAMA2; (-) strand; PAM type: NRG; PAM sequence: TAG
tttgaactgttacttaagaa

SEQ ID NO: 57994 - DNA, 20 bp, Artificial Sequence
  Description of Artificial Sequence: Synthetic oligonucleotide
  Target: LAMA2; (-) strand; PAM type: NRG; PAM sequence: AAG
tggcatttgaactgttactt

SEQ ID NO: 57995 - DNA, 20 bp, Artificial Sequence
  Description of Artificial Sequence: Synthetic oligonucleotide
  Target: LAMA2; (-) strand; PAM type: NRG; PAM sequence: TGG
aaaaagcctcatagagatac

SEQ ID NO: 57996 - DNA, 20 bp, Artificial Sequence
  Description of Artificial Sequence: Synthetic oligonucleotide
  Target: LAMA2; (-) strand; PAM type: NRG; PAM sequence: GAG
gatccagaaaaagcctcata

SEQ ID NO: 57997 - DNA, 20 bp, Artificial Sequence
  Description of Artificial Sequence: Synthetic oligonucleotide
  Target: LAMA2; (-) strand; PAM type: NRG; PAM sequence: TAG
gagatccagaaaaagcctca

SEQ ID NO: 57998 - DNA, 20 bp, Artificial Sequence
  Description of Artificial Sequence: Synthetic oligonucleotide
  Target: LAMA2; (-) strand; PAM type: NRG; PAM sequence: AAG
tttttgcagagatccagaaa

SEQ ID NO: 57999 - DNA, 20 bp, Artificial Sequence
  Description of Artificial Sequence: Synthetic oligonucleotide
  Target: LAMA2; (-) strand; PAM type: NRG; PAM sequence: CAG
cctttttttttgcagagatc

SEQ ID NO: 58000 - DNA, 20 bp, Artificial Sequence
  Description of Artificial Sequence: Synthetic oligonucleotide
  Target: LAMA2; (-) strand; PAM type: NRG; PAM sequence: GAG
cttgtccctttttttttgca

SEQ ID NO: 58001 - DNA, 20 bp, Artificial Sequence
  Description of Artificial Sequence: Synthetic oligonucleotide
  Target: LAMA2; (-) strand; PAM type: NRG; PAM sequence: CAG
ttcttgtccctttttttttg

SEQ ID NO: 58002 - DNA, 20 bp, Artificial Sequence
  Description of Artificial Sequence: Synthetic oligonucleotide
  Target: LAMA2; (-) strand; PAM type: NRG; PAM sequence: AGG
tctttgttcctttgggagga

SEQ ID NO: 58003 - DNA, 20 bp, Artificial Sequence
  Description of Artificial Sequence: Synthetic oligonucleotide
  Target: LAMA2; (-) strand; PAM type: NRG; PAM sequence: AAG
ttctttgttcctttgggagg

SEQ ID NO: 58004 - DNA, 20 bp, Artificial Sequence
  Description of Artificial Sequence: Synthetic oligonucleotide
  Target: LAMA2; (-) strand; PAM type: NRG; PAM sequence: AGG
ccattctttgttcctttggg

SEQ ID NO: 58005 - DNA, 20 bp, Artificial Sequence
  Description of Artificial Sequence: Synthetic oligonucleotide
  Target: LAMA2; (-) strand; PAM type: NRG; PAM sequence: GAG
gccattctttgttcctttgg

SEQ ID NO: 58006 - DNA, 20 bp, Artificial Sequence
  Description of Artificial Sequence: Synthetic oligonucleotide
  Target: LAMA2; (-) strand; PAM type: NRG; PAM sequence: GGG
ttgccattctttgttccttt

SEQ ID NO: 58007 - DNA, 20 bp, Artificial Sequence
  Description of Artificial Sequence: Synthetic oligonucleotide
  Target: LAMA2; (-) strand; PAM type: NRG; PAM sequence: TGG
attgccattctttgttcctt

SEQ ID NO: 58008 - DNA, 20 bp, Artificial Sequence
  Description of Artificial Sequence: Synthetic oligonucleotide
  Target: LAMA2; (-) strand; PAM type: NRG; PAM sequence: AAG
ctaaaatctggcttacttat

SEQ ID NO: 58009 - DNA, 20 bp, Artificial Sequence
  Description of Artificial Sequence: Synthetic oligonucleotide
  Target: LAMA2; (-) strand; PAM type: NRG; PAM sequence: TGG
atggtccaattgctaaaatc

SEQ ID NO: 58010 - DNA, 20 bp, Artificial Sequence
  Description of Artificial Sequence: Synthetic oligonucleotide
  Target: LAMA2; (-) strand; PAM type: NRG; PAM sequence: TGG
agttatatttaagacaaaaa

SEQ ID NO: 58011 - DNA, 20 bp, Artificial Sequence
  Description of Artificial Sequence: Synthetic oligonucleotide
  Target: LAMA2; (-) strand; PAM type: NRG; PAM sequence: AAG
gagacaggttagttatattt

SEQ ID NO: 58012 - DNA, 20 bp, Artificial Sequence
  Description of Artificial Sequence: Synthetic oligonucleotide
  Target: LAMA2; (-) strand; PAM type: NRG; PAM sequence: TAG
tgtaagctatagagacaggt

SEQ ID NO: 58013 - DNA, 20 bp, Artificial Sequence
  Description of Artificial Sequence: Synthetic oligonucleotide
  Target: LAMA2; (-) strand; PAM type: NRG; PAM sequence: AGG
accttgtaagctatagagac

SEQ ID NO: 58014 - DNA, 20 bp, Artificial Sequence
  Description of Artificial Sequence: Synthetic oligonucleotide
  Target: LAMA2; (-) strand; PAM type: NRG; PAM sequence: CAG
taccttgtaagctatagaga

SEQ ID NO: 58015 - DNA, 20 bp, Artificial Sequence
  Description of Artificial Sequence: Synthetic oligonucleotide
  Target: LAMA2; (-) strand; PAM type: NRG; PAM sequence: GAG
tgaataccttgtaagctata

SEQ ID NO: 58016 - DNA, 20 bp, Artificial Sequence
  Description of Artificial Sequence: Synthetic oligonucleotide
  Target: LAMA2; (-) strand; PAM type: NRG; PAM sequence: TAG
tatgaataccttgtaagcta

SEQ ID NO: 58017 - DNA, 20 bp, Artificial Sequence
  Description of Artificial Sequence: Synthetic oligonucleotide
  Target: LAMA2; (-) strand; PAM type: NRG; PAM sequence: AAG
agaatttatgaataccttgt

SEQ ID NO: 58018 - DNA, 20 bp, Artificial Sequence
  Description of Artificial Sequence: Synthetic oligonucleotide
  Target: LAMA2; (-) strand; PAM type: NRG; PAM sequence: AAG
tgataaatttcttttgtttg

SEQ ID NO: 58019 - DNA, 20 bp, Artificial Sequence
  Description of Artificial Sequence: Synthetic oligonucleotide
  Target: LAMA2; (-) strand; PAM type: NRG; PAM sequence: CAG
ttattttttaaacaatttca

SEQ ID NO: 58020 - DNA, 20 bp, Artificial Sequence
  Description of Artificial Sequence: Synthetic oligonucleotide
  Target: LAMA2; (-) strand; PAM type: NRG; PAM sequence: TAG
catttgggaattcatttatt

SEQ ID NO: 58021 - DNA, 20 bp, Artificial Sequence
  Description of Artificial Sequence: Synthetic oligonucleotide
  Target: LAMA2; (-) strand; PAM type: NRG; PAM sequence: GGG
ataaagactcaaaatcattt

SEQ ID NO: 58022 - DNA, 20 bp, Artificial Sequence
  Description of Artificial Sequence: Synthetic oligonucleotide
  Target: LAMA2; (-) strand; PAM type: NRG; PAM sequence: TGG
aataaagactcaaaatcatt

SEQ ID NO: 58023 - DNA, 20 bp, Artificial Sequence
  Description of Artificial Sequence: Synthetic oligonucleotide
  Target: LAMA2; (-) strand; PAM type: NRG; PAM sequence: AAG
gtgtgataagaactacaata

SEQ ID NO: 58024 - DNA, 20 bp, Artificial Sequence
  Description of Artificial Sequence: Synthetic oligonucleotide
  Target: LAMA2; (-) strand; PAM type: NRG; PAM sequence: AAG
tggccactgcaaagtgtgat

SEQ ID NO: 58025 - DNA, 20 bp, Artificial Sequence
  Description of Artificial Sequence: Synthetic oligonucleotide
  Target: LAMA2; (-) strand; PAM type: NRG; PAM sequence: AAG
tgctagaaatggccactgca

SEQ ID NO: 58026 - DNA, 20 bp, Artificial Sequence
  Description of Artificial Sequence: Synthetic oligonucleotide
  Target: LAMA2; (-) strand; PAM type: NRG; PAM sequence: TGG
tgcctgaaaagtgctagaaa

SEQ ID NO: 58027 - DNA, 20 bp, Artificial Sequence
  Description of Artificial Sequence: Synthetic oligonucleotide
  Target: LAMA2; (-) strand; PAM type: NRG; PAM sequence: TAG
atttattgcctgaaaagtgc

SEQ ID NO: 58028 - DNA, 20 bp, Artificial Sequence
  Description of Artificial Sequence: Synthetic oligonucleotide
  Target: LAMA2; (-) strand; PAM type: NRG; PAM sequence: AAG
aagaccatttattgcctgaa

SEQ ID NO: 58029 - DNA, 20 bp, Artificial Sequence
  Description of Artificial Sequence: Synthetic oligonucleotide
  Target: LAMA2; (-) strand; PAM type: NRG; PAM sequence: AAG
caataatatggaagtgaaag

SEQ ID NO: 58030 - DNA, 20 bp, Artificial Sequence
  Description of Artificial Sequence: Synthetic oligonucleotide
  Target: LAMA2; (-) strand; PAM type: NRG; PAM sequence: AAG
tttcaataatatggaagtga

SEQ ID NO: 58031 - DNA, 20 bp, Artificial Sequence
  Description of Artificial Sequence: Synthetic oligonucleotide
  Target: LAMA2; (-) strand; PAM type: NRG; PAM sequence: AAG
aagaattttcaataatatgg

SEQ ID NO: 58032 - DNA, 20 bp, Artificial Sequence
  Description of Artificial Sequence: Synthetic oligonucleotide
  Target: LAMA2; (-) strand; PAM type: NRG; PAM sequence: TGG
caaaagaattttcaataata

SEQ ID NO: 58033 - DNA, 20 bp, Artificial Sequence
  Description of Artificial Sequence: Synthetic oligonucleotide
  Target: LAMA2; (-) strand; PAM type: NRG; PAM sequence: AAG
atttgctaggcattatgcaa

SEQ ID NO: 58034 - DNA, 20 bp, Artificial Sequence
  Description of Artificial Sequence: Synthetic oligonucleotide
  Target: LAMA2; (-) strand; PAM type: NRG; PAM sequence: AGG
tcaacattaagatatttgct

SEQ ID NO: 58035 - DNA, 20 bp, Artificial Sequence
  Description of Artificial Sequence: Synthetic oligonucleotide
  Target: LAMA2; (-) strand; PAM type: NRG; PAM sequence: TAG
ttcaacattaagatatttgc

SEQ ID NO: 58036 - DNA, 20 bp, Artificial Sequence
  Description of Artificial Sequence: Synthetic oligonucleotide
  Target: LAMA2; (-) strand; PAM type: NRG; PAM sequence: AAG
tcattcagatattcaacatt

SEQ ID NO: 58037 - DNA, 20 bp, Artificial Sequence
  Description of Artificial Sequence: Synthetic oligonucleotide
  Target: LAMA2; (-) strand; PAM type: NRG; PAM sequence: CAG
cattcattcattcattcatt

SEQ ID NO: 58038 - DNA, 20 bp, Artificial Sequence
  Description of Artificial Sequence: Synthetic oligonucleotide
  Target: LAMA2; (-) strand; PAM type: NRG; PAM sequence: TAG
atttctgaagaaaaaaacgg

SEQ ID NO: 58039 - DNA, 20 bp, Artificial Sequence
  Description of Artificial Sequence: Synthetic oligonucleotide
  Target: LAMA2; (-) strand; PAM type: NRG; PAM sequence: CGG
gtgatttctgaagaaaaaaa

SEQ ID NO: 58040 - DNA, 20 bp, Artificial Sequence
  Description of Artificial Sequence: Synthetic oligonucleotide
  Target: LAMA2; (-) strand; PAM type: NRG; PAM sequence: AAG
ttgcctcgttgtgatttctg

SEQ ID NO: 58041 - DNA, 20 bp, Artificial Sequence
  Description of Artificial Sequence: Synthetic oligonucleotide
  Target: LAMA2; (-) strand; PAM type: NRG; PAM sequence: TGG
taacttaataactattttat

SEQ ID NO: 58042 - DNA, 20 bp, Artificial Sequence
  Description of Artificial Sequence: Synthetic oligonucleotide
  Target: LAMA2; (-) strand; PAM type: NRG; PAM sequence: CAG
ccttttctcagttcatttct

SEQ ID NO: 58043 - DNA, 20 bp, Artificial Sequence
  Description of Artificial Sequence: Synthetic oligonucleotide
  Target: LAMA2; (-) strand; PAM type: NRG; PAM sequence: CAG
gtaaggatttctccttttct

SEQ ID NO: 58044 - DNA, 20 bp, Artificial Sequence
  Description of Artificial Sequence: Synthetic oligonucleotide
  Target: LAMA2; (-) strand; PAM type: NRG; PAM sequence: AGG
tgtaccattcatgtcctgta

SEQ ID NO: 58045 - DNA, 20 bp, Artificial Sequence
  Description of Artificial Sequence: Synthetic oligonucleotide
  Target: LAMA2; (-) strand; PAM type: NRG; PAM sequence: AAG
ctgtaccattcatgtcctgt

SEQ ID NO: 58046 - DNA, 20 bp, Artificial Sequence
  Description of Artificial Sequence: Synthetic oligonucleotide
  Target: LAMA2; (-) strand; PAM type: NRG; PAM sequence: GAG
atcccacaagctgtgaccca

SEQ ID NO: 58047 - DNA, 20 bp, Artificial Sequence
  Description of Artificial Sequence: Synthetic oligonucleotide
  Target: LAMA2; (-) strand; PAM type: NRG; PAM sequence: CAG
tgatcccacaagctgtgacc

SEQ ID NO: 58048 - DNA, 20 bp, Artificial Sequence
  Description of Artificial Sequence: Synthetic oligonucleotide
  Target: LAMA2; (-) strand; PAM type: NRG; PAM sequence: AAG
atgttcttgcctgatcccac

SEQ ID NO: 58049 - DNA, 20 bp, Artificial Sequence
  Description of Artificial Sequence: Synthetic oligonucleotide
  Target: LAMA2; (-) strand; PAM type: NRG; PAM sequence: TAG
attatttgaaagactatgac

SEQ ID NO: 58050 - DNA, 20 bp, Artificial Sequence
  Description of Artificial Sequence: Synthetic oligonucleotide
  Target: LAMA2; (-) strand; PAM type: NRG; PAM sequence: AAG
tttttaataagattatttga

SEQ ID NO: 58051 - DNA, 20 bp, Artificial Sequence
  Description of Artificial Sequence: Synthetic oligonucleotide
  Target: LAMA2; (-) strand; PAM type: NRG; PAM sequence: AAG
tagaaaaaataatttttaat

SEQ ID NO: 58052 - DNA, 20 bp, Artificial Sequence
  Description of Artificial Sequence: Synthetic oligonucleotide
  Target: LAMA2; (-) strand; PAM type: NRG; PAM sequence: TAG
aaaagagtaaaagtggatct

SEQ ID NO: 58053 - DNA, 20 bp, Artificial Sequence
  Description of Artificial Sequence: Synthetic oligonucleotide
  Target: LAMA2; (-) strand; PAM type: NRG; PAM sequence: TGG
gtcagagaaaagagtaaaag

SEQ ID NO: 58054 - DNA, 20 bp, Artificial Sequence
  Description of Artificial Sequence: Synthetic oligonucleotide
  Target: LAMA2; (-) strand; PAM type: NRG; PAM sequence: AAG
ttagtcagagaaaagagtaa

SEQ ID NO: 58055 - DNA, 20 bp, Artificial Sequence
  Description of Artificial Sequence: Synthetic oligonucleotide
  Target: LAMA2; (-) strand; PAM type: NRG; PAM sequence: GAG
ataaaattagtcagagaaaa

SEQ ID NO: 58056 - DNA, 20 bp, Artificial Sequence
  Description of Artificial Sequence: Synthetic oligonucleotide
  Target: LAMA2; (-) strand; PAM type: NRG; PAM sequence: AAG
aaataaaattagtcagagaa

SEQ ID NO: 58057 - DNA, 20 bp, Artificial Sequence
  Description of Artificial Sequence: Synthetic oligonucleotide
  Target: LAMA2; (-) strand; PAM type: NRG; PAM sequence: GAG
aagctaaataaaattagtca

SEQ ID NO: 58058 - DNA, 20 bp, Artificial Sequence
  Description of Artificial Sequence: Synthetic oligonucleotide
  Target: LAMA2; (-) strand; PAM type: NRG; PAM sequence: CAG
gaaagctaaataaaattagt

SEQ ID NO: 58059 - DNA, 20 bp, Artificial Sequence
  Description of Artificial Sequence: Synthetic oligonucleotide
  Target: LAMA2; (-) strand; PAM type: NRG; PAM sequence: TAG
gcttgaaagctaaataaaat

SEQ ID NO: 58060 - DNA, 20 bp, Artificial Sequence
  Description of Artificial Sequence: Synthetic oligonucleotide
  Target: LAMA2; (-) strand; PAM type: NRG; PAM sequence: AAG
agccacaaagaaatgcttga

SEQ ID NO: 58061 - DNA, 20 bp, Artificial Sequence
  Description of Artificial Sequence: Synthetic oligonucleotide
  Target: LAMA2; (-) strand; PAM type: NRG; PAM sequence: AAG
aagtcaaaactgaagccaca

SEQ ID NO: 58062 - DNA, 20 bp, Artificial Sequence
  Description of Artificial Sequence: Synthetic oligonucleotide
  Target: LAMA2; (-) strand; PAM type: NRG; PAM sequence: AAG
aaaaactgaagtcaaaactg

SEQ ID NO: 58063 - DNA, 20 bp, Artificial Sequence
  Description of Artificial Sequence: Synthetic oligonucleotide
  Target: LAMA2; (-) strand; PAM type: NRG; PAM sequence: AAG
tttaaattgtttaaaaactg

SEQ ID NO: 58064 - DNA, 20 bp, Artificial Sequence
  Description of Artificial Sequence: Synthetic oligonucleotide
  Target: LAMA2; (-) strand; PAM type: NRG; PAM sequence: AAG
cgtggaaagtaagagtttaa

SEQ ID NO: 58065 - DNA, 20 bp, Artificial Sequence
  Description of Artificial Sequence: Synthetic oligonucleotide
  Target: LAMA2; (-) strand; PAM type: NRG; PAM sequence: GAG
acagtccccgtggaaagtaa

SEQ ID NO: 58066 - DNA, 20 bp, Artificial Sequence
  Description of Artificial Sequence: Synthetic oligonucleotide
  Target: LAMA2; (-) strand; PAM type: NRG; PAM sequence: AAG
taacagtccccgtggaaagt

SEQ ID NO: 58067 - DNA, 20 bp, Artificial Sequence
  Description of Artificial Sequence: Synthetic oligonucleotide
  Target: LAMA2; (-) strand; PAM type: NRG; PAM sequence: AAG
acaataacagtccccgtgga

SEQ ID NO: 58068 - DNA, 20 bp, Artificial Sequence
  Description of Artificial Sequence: Synthetic oligonucleotide
  Target: LAMA2; (-) strand; PAM type: NRG; PAM sequence: TGG
ttttacaataacagtccccg

SEQ ID NO: 58069 - DNA, 20 bp, Artificial Sequence
  Description of Artificial Sequence: Synthetic oligonucleotide
  Target: LAMA2; (-) strand; PAM type: NRG; PAM sequence: CAG
aagaacagattttacaataa

SEQ ID NO: 58070 - DNA, 20 bp, Artificial Sequence
  Description of Artificial Sequence: Synthetic oligonucleotide
  Target: LAMA2; (-) strand; PAM type: NRG; PAM sequence: CAG
ttaaattaaaagaataagaa

SEQ ID NO: 58071 - DNA, 20 bp, Artificial Sequence
  Description of Artificial Sequence: Synthetic oligonucleotide
  Target: LAMA2; (-) strand; PAM type: NRG; PAM sequence: AAG
tggagttaaattaaaagaat

SEQ ID NO: 58072 - DNA, 20 bp, Artificial Sequence
  Description of Artificial Sequence: Synthetic oligonucleotide
  Target: LAMA2; (-) strand; PAM type: NRG; PAM sequence: AAG
aaataatggagttaaattaa

SEQ ID NO: 58073 - DNA, 20 bp, Artificial Sequence
  Description of Artificial Sequence: Synthetic oligonucleotide
  Target: LAMA2; (-) strand; PAM type: NRG; PAM sequence: GAG
acatttaaaacaaaataatg

SEQ ID NO: 58074 - DNA, 20 bp, Artificial Sequence
  Description of Artificial Sequence: Synthetic oligonucleotide
  Target: LAMA2; (-) strand; PAM type: NRG; PAM sequence: TGG
ttacatttaaaacaaaataa

SEQ ID NO: 58075 - DNA, 20 bp, Artificial Sequence
  Description of Artificial Sequence: Synthetic oligonucleotide
  Target: LAMA2; (-) strand; PAM type: NRG; PAM sequence: GAG
tggtgcttttaaagcagttg

SEQ ID NO: 58076 - DNA, 20 bp, Artificial Sequence
  Description of Artificial Sequence: Synthetic oligonucleotide
  Target: LAMA2; (-) strand; PAM type: NRG; PAM sequence: TGG
attggtgcttttaaagcagt

SEQ ID NO: 58077 - DNA, 20 bp, Artificial Sequence
  Description of Artificial Sequence: Synthetic oligonucleotide
  Target: LAMA2; (-) strand; PAM type: NRG; PAM sequence: CAG
aaggattggtgcttttaaag

SEQ ID NO: 58078 - DNA, 20 bp, Artificial Sequence
  Description of Artificial Sequence: Synthetic oligonucleotide
  Target: LAMA2; (-) strand; PAM type: NRG; PAM sequence: AAG
aagaaggattggtgctttta

SEQ ID NO: 58079 - DNA, 20 bp, Artificial Sequence
  Description of Artificial Sequence: Synthetic oligonucleotide
  Target: LAMA2; (-) strand; PAM type: NRG; PAM sequence: TGG
catatacagcaaagaaggat

SEQ ID NO: 58080 - DNA, 20 bp, Artificial Sequence
  Description of Artificial Sequence: Synthetic oligonucleotide
  Target: LAMA2; (-) strand; PAM type: NRG; PAM sequence: AGG
tgatacatatacagcaaaga

SEQ ID NO: 58081 - DNA, 20 bp, Artificial Sequence
  Description of Artificial Sequence: Synthetic oligonucleotide
  Target: LAMA2; (-) strand; PAM type: NRG; PAM sequence: AAG
ttgatacatatacagcaaag

SEQ ID NO: 58082 - DNA, 20 bp, Artificial Sequence
  Description of Artificial Sequence: Synthetic oligonucleotide
  Target: LAMA2; (-) strand; PAM type: NRG; PAM sequence: AAG
actttgatacatatacagca

SEQ ID NO: 58083 - DNA, 20 bp, Artificial Sequence
  Description of Artificial Sequence: Synthetic oligonucleotide
  Target: LAMA2; (-) strand; PAM type: NRG; PAM sequence: CAG
tatggactttgatacatata

SEQ ID NO: 58084 - DNA, 20 bp, Artificial Sequence
  Description of Artificial Sequence: Synthetic oligonucleotide
  Target: LAMA2; (-) strand; PAM type: NRG; PAM sequence: TGG
ataatgtcaaagaatattta

SEQ ID NO: 58085 - DNA, 20 bp, Artificial Sequence
  Description of Artificial Sequence: Synthetic oligonucleotide
  Target: LAMA2; (-) strand; PAM type: NRG; PAM sequence: AAG
tcaaggctaggataatgtca

SEQ ID NO: 58086 - DNA, 20 bp, Artificial Sequence
  Description of Artificial Sequence: Synthetic oligonucleotide
  Target: LAMA2; (-) strand; PAM type: NRG; PAM sequence: AGG
tccttttattattcaaggct

SEQ ID NO: 58087 - DNA, 20 bp, Artificial Sequence
  Description of Artificial Sequence: Synthetic oligonucleotide
  Target: LAMA2; (-) strand; PAM type: NRG; PAM sequence: TAG
ttccttttattattcaaggc

SEQ ID NO: 58088 - DNA, 20 bp, Artificial Sequence
  Description of Artificial Sequence: Synthetic oligonucleotide
  Target: LAMA2; (-) strand; PAM type: NRG; PAM sequence: AGG
ttttttccttttattattca

SEQ ID NO: 58089 - DNA, 20 bp, Artificial Sequence
  Description of Artificial Sequence: Synthetic oligonucleotide
  Target: LAMA2; (-) strand; PAM type: NRG; PAM sequence: AAG
tttttttccttttattattc

SEQ ID NO: 58090 - DNA, 20 bp, Artificial Sequence
  Description of Artificial Sequence: Synthetic oligonucleotide
  Target: LAMA2; (-) strand; PAM type: NRG; PAM sequence: AGG
gtagaataaaaagttgtgag

SEQ ID NO: 58091 - DNA, 20 bp, Artificial Sequence
  Description of Artificial Sequence: Synthetic oligonucleotide
  Target: LAMA2; (-) strand; PAM type: NRG; PAM sequence: GAG
tgtagaataaaaagttgtga

SEQ ID NO: 58092 - DNA, 20 bp, Artificial Sequence
  Description of Artificial Sequence: Synthetic oligonucleotide
  Target: LAMA2; (-) strand; PAM type: NRG; PAM sequence: GAG
tttgtagaataaaaagttgt

SEQ ID NO: 58093 - DNA, 20 bp, Artificial Sequence
  Description of Artificial Sequence: Synthetic oligonucleotide
  Target: LAMA2; (-) strand; PAM type: NRG; PAM sequence: AAG
atattattttgtagaataaa

SEQ ID NO: 58094 - DNA, 20 bp, Artificial Sequence
  Description of Artificial Sequence: Synthetic oligonucleotide
  Target: LAMA2; (-) strand; PAM type: NRG; PAM sequence: TAG
catattttaatattattttg

SEQ ID NO: 58095 - DNA, 20 bp, Artificial Sequence
  Description of Artificial Sequence: Synthetic oligonucleotide
  Target: LAMA2; (-) strand; PAM type: NRG; PAM sequence: GGG
tacatttacagtaaaaatag

SEQ ID NO: 58096 - DNA, 20 bp, Artificial Sequence
  Description of Artificial Sequence: Synthetic oligonucleotide
  Target: LAMA2; (-) strand; PAM type: NRG; PAM sequence: GGG
ttacatttacagtaaaaata

SEQ ID NO: 58097 - DNA, 20 bp, Artificial Sequence
  Description of Artificial Sequence: Synthetic oligonucleotide
  Target: LAMA2; (-) strand; PAM type: NRG; PAM sequence: AGG
attacatttacagtaaaaat

SEQ ID NO: 58098 - DNA, 20 bp, Artificial Sequence
  Description of Artificial Sequence: Synthetic oligonucleotide
  Target: LAMA2; (-) strand; PAM type: NRG; PAM sequence: TAG
gattacatttacagtaaaaa

SEQ ID NO: 58099 - DNA, 20 bp, Artificial Sequence
  Description of Artificial Sequence: Synthetic oligonucleotide
  Target: LAMA2; (-) strand; PAM type: NRG; PAM sequence: CAG
tgctgtgaagattacattta

SEQ ID NO: 58100 - DNA, 20 bp, Artificial Sequence
  Description of Artificial Sequence: Synthetic oligonucleotide
  Target: LAMA2; (-) strand; PAM type: NRG; PAM sequence: AAG
ttctcttgactgttgctgtg

SEQ ID NO: 58101 - DNA, 20 bp, Artificial Sequence
  Description of Artificial Sequence: Synthetic oligonucleotide
  Target: LAMA2; (-) strand; PAM type: NRG; PAM sequence: CAG
atgtgtgatgaagaatgact

SEQ ID NO: 58102 - DNA, 20 bp, Artificial Sequence
  Description of Artificial Sequence: Synthetic oligonucleotide
  Target: LAMA2; (-) strand; PAM type: NRG; PAM sequence: AAG
agcccttgcaatgtgtgatg

SEQ ID NO: 58103 - DNA, 20 bp, Artificial Sequence
  Description of Artificial Sequence: Synthetic oligonucleotide
  Target: LAMA2; (-) strand; PAM type: NRG; PAM sequence: TAG
tcctcacaacagaggagaca

SEQ ID NO: 58104 - DNA, 20 bp, Artificial Sequence
  Description of Artificial Sequence: Synthetic oligonucleotide
  Target: LAMA2; (-) strand; PAM type: NRG; PAM sequence: GAG
atattctcctcacaacagag

SEQ ID NO: 58105 - DNA, 20 bp, Artificial Sequence
  Description of Artificial Sequence: Synthetic oligonucleotide
  Target: LAMA2; (-) strand; PAM type: NRG; PAM sequence: AGG
caatattctcctcacaacag

SEQ ID NO: 58106 - DNA, 20 bp, Artificial Sequence
  Description of Artificial Sequence: Synthetic oligonucleotide
  Target: LAMA2; (-) strand; PAM type: NRG; PAM sequence: GAG
gcaatattctcctcacaaca

SEQ ID NO: 58107 - DNA, 20 bp, Artificial Sequence
  Description of Artificial Sequence: Synthetic oligonucleotide
  Target: LAMA2; (-) strand; PAM type: NRG; PAM sequence: CAG
gggcaatattctcctcacaa

SEQ ID NO: 58108 - DNA, 20 bp, Artificial Sequence
  Description of Artificial Sequence: Synthetic oligonucleotide
  Target: LAMA2; (-) strand; PAM type: NRG; PAM sequence: GGG
cttgtgagaatattgctgca

SEQ ID NO: 58109 - DNA, 20 bp, Artificial Sequence
  Description of Artificial Sequence: Synthetic oligonucleotide
  Target: LAMA2; (-) strand; PAM type: NRG; PAM sequence: AGG
acttgtgagaatattgctgc

SEQ ID NO: 58110 - DNA, 20 bp, Artificial Sequence
  Description of Artificial Sequence: Synthetic oligonucleotide
  Target: LAMA2; (-) strand; PAM type: NRG; PAM sequence: CAG
cacttgtgagaatattgctg

SEQ ID NO: 58111 - DNA, 20 bp, Artificial Sequence
  Description of Artificial Sequence: Synthetic oligonucleotide
  Target: LAMA2; (-) strand; PAM type: NRG; PAM sequence: GAG
tgacccagagctccacttgt

SEQ ID NO: 58112 - DNA, 20 bp, Artificial Sequence
  Description of Artificial Sequence: Synthetic oligonucleotide
  Target: LAMA2; (-) strand; PAM type: NRG; PAM sequence: GAG
aaagtgcagtcaatgaccca

SEQ ID NO: 58113 - DNA, 20 bp, Artificial Sequence
  Description of Artificial Sequence: Synthetic oligonucleotide
  Target: LAMA2; (-) strand; PAM type: NRG; PAM sequence: CAG
caaaagtgcagtcaatgacc

SEQ ID NO: 58114 - DNA, 20 bp, Artificial Sequence
  Description of Artificial Sequence: Synthetic oligonucleotide
  Target: LAMA2; (-) strand; PAM type: NRG; PAM sequence: CAG
atttcttattagcaaaagtg

SEQ ID NO: 58115 - DNA, 20 bp, Artificial Sequence
  Description of Artificial Sequence: Synthetic oligonucleotide
  Target: LAMA2; (-) strand; PAM type: NRG; PAM sequence: AAG
tgaagatttcttattagcaa

SEQ ID NO: 58116 - DNA, 20 bp, Artificial Sequence
  Description of Artificial Sequence: Synthetic oligonucleotide
  Target: LAMA2; (-) strand; PAM type: NRG; PAM sequence: TAG
tcctactgaagatttcttat

SEQ ID NO: 58117 - DNA, 20 bp, Artificial Sequence
  Description of Artificial Sequence: Synthetic oligonucleotide
  Target: LAMA2; (-) strand; PAM type: NRG; PAM sequence: AAG
aggcccagtcactcctactg

SEQ ID NO: 58118 - DNA, 20 bp, Artificial Sequence
  Description of Artificial Sequence: Synthetic oligonucleotide
  Target: LAMA2; (-) strand; PAM type: NRG; PAM sequence: CAG
ggagagatttgcacaaggcc

SEQ ID NO: 58119 - DNA, 20 bp, Artificial Sequence
  Description of Artificial Sequence: Synthetic oligonucleotide
  Target: LAMA2; (-) strand; PAM type: NRG; PAM sequence: AGG
ctactggagagatttgcaca

SEQ ID NO: 58120 - DNA, 20 bp, Artificial Sequence
  Description of Artificial Sequence: Synthetic oligonucleotide
  Target: LAMA2; (-) strand; PAM type: NRG; PAM sequence: AAG
actactggagagatttgcac

SEQ ID NO: 58121 - DNA, 20 bp, Artificial Sequence
  Description of Artificial Sequence: Synthetic oligonucleotide
  Target: LAMA2; (-) strand; PAM type: NRG; PAM sequence: GAG
tagtggaagaaactactgga

SEQ ID NO: 58122 - DNA, 20 bp, Artificial Sequence
  Description of Artificial Sequence: Synthetic oligonucleotide
  Target: LAMA2; (-) strand; PAM type: NRG; PAM sequence: GAG
actagtggaagaaactactg

SEQ ID NO: 58123 - DNA, 20 bp, Artificial Sequence
  Description of Artificial Sequence: Synthetic oligonucleotide
  Target: LAMA2; (-) strand; PAM type: NRG; PAM sequence: TGG
tcactagtggaagaaactac

SEQ ID NO: 58124 - DNA, 20 bp, Artificial Sequence
  Description of Artificial Sequence: Synthetic oligonucleotide
  Target: LAMA2; (-) strand; PAM type: NRG; PAM sequence: AAG
ctctaatgcgtcactagtgg

SEQ ID NO: 58125 - DNA, 20 bp, Artificial Sequence
  Description of Artificial Sequence: Synthetic oligonucleotide
  Target: LAMA2; (-) strand; PAM type: NRG; PAM sequence: TGG
aggctctaatgcgtcactag

SEQ ID NO: 58126 - DNA, 20 bp, Artificial Sequence
  Description of Artificial Sequence: Synthetic oligonucleotide
  Target: LAMA2; (-) strand; PAM type: NRG; PAM sequence: TAG
ctgaggctctaatgcgtcac

SEQ ID NO: 58127 - DNA, 20 bp, Artificial Sequence
  Description of Artificial Sequence: Synthetic oligonucleotide
  Target: LAMA2; (-) strand; PAM type: NRG; PAM sequence: AGG
ttgttgagtgattgattctg

SEQ ID NO: 58128 - DNA, 20 bp, Artificial Sequence
  Description of Artificial Sequence: Synthetic oligonucleotide
  Target: LAMA2; (-) strand; PAM type: NRG; PAM sequence: GAG
cttgttgagtgattgattct

SEQ ID NO: 58129 - DNA, 20 bp, Artificial Sequence
  Description of Artificial Sequence: Synthetic oligonucleotide
  Target: LAMA2; (-) strand; PAM type: NRG; PAM sequence: GAG
gctttcagtaaacacttgtt

SEQ ID NO: 58130 - DNA, 20 bp, Artificial Sequence
  Description of Artificial Sequence: Synthetic oligonucleotide
  Target: LAMA2; (-) strand; PAM type: NRG; PAM sequence: CAG
tctgggtatcagtaagcttt

SEQ ID NO: 58131 - DNA, 20 bp, Artificial Sequence
  Description of Artificial Sequence: Synthetic oligonucleotide
  Target: LAMA2; (-) strand; PAM type: NRG; PAM sequence: AAG
tttaaggtctgggtatcagt

SEQ ID NO: 58132 - DNA, 20 bp, Artificial Sequence
  Description of Artificial Sequence: Synthetic oligonucleotide
  Target: LAMA2; (-) strand; PAM type: NRG; PAM sequence: CAG
acagtttaaggtctgggtat

SEQ ID NO: 58133 - DNA, 20 bp, Artificial Sequence
  Description of Artificial Sequence: Synthetic oligonucleotide
  Target: LAMA2; (-) strand; PAM type: NRG; PAM sequence: GGG
ttggtaacagtttaaggtct

SEQ ID NO: 58134 - DNA, 20 bp, Artificial Sequence
  Description of Artificial Sequence: Synthetic oligonucleotide
  Target: LAMA2; (-) strand; PAM type: NRG; PAM sequence: TGG
tttggtaacagtttaaggtc

SEQ ID NO: 58135 - DNA, 20 bp, Artificial Sequence
  Description of Artificial Sequence: Synthetic oligonucleotide
  Target: LAMA2; (-) strand; PAM type: NRG; PAM sequence: AGG
ttctgtttggtaacagttta

SEQ ID NO: 58136 - DNA, 20 bp, Artificial Sequence
  Description of Artificial Sequence: Synthetic oligonucleotide
  Target: LAMA2; (-) strand; PAM type: NRG; PAM sequence: AAG
attctgtttggtaacagttt

SEQ ID NO: 58137 - DNA, 20 bp, Artificial Sequence
  Description of Artificial Sequence: Synthetic oligonucleotide
  Target: LAMA2; (-) strand; PAM type: NRG; PAM sequence: CAG
tctggcattctgtttggtaa

SEQ ID NO: 58138 - DNA, 20 bp, Artificial Sequence
  Description of Artificial Sequence: Synthetic oligonucleotide
  Target: LAMA2; (-) strand; PAM type: NRG; PAM sequence: TGG
cccatatctggcattctgtt

SEQ ID NO: 58139 - DNA, 20 bp, Artificial Sequence
  Description of Artificial Sequence: Synthetic oligonucleotide
  Target: LAMA2; (-) strand; PAM type: NRG; PAM sequence: TGG
ctggaattatatcccatatc

SEQ ID NO: 58140 - DNA, 20 bp, Artificial Sequence
  Description of Artificial Sequence: Synthetic oligonucleotide
  Target: LAMA2; (-) strand; PAM type: NRG; PAM sequence: TGG
tgagcataaactcttcaggc

SEQ ID NO: 58141 - DNA, 20 bp, Artificial Sequence
  Description of Artificial Sequence: Synthetic oligonucleotide
  Target: LAMA2; (-) strand; PAM type: NRG; PAM sequence: AGG
gtcttgagcataaactcttc

SEQ ID NO: 58142 - DNA, 20 bp, Artificial Sequence
  Description of Artificial Sequence: Synthetic oligonucleotide
  Target: LAMA2; (-) strand; PAM type: NRG; PAM sequence: CAG
tgtcttgagcataaactctt

SEQ ID NO: 58143 - DNA, 20 bp, Artificial Sequence
  Description of Artificial Sequence: Synthetic oligonucleotide
  Target: LAMA2; (-) strand; PAM type: NRG; PAM sequence: GAG
atatatgtaagtcttgtctt

SEQ ID NO: 58144 - DNA, 20 bp, Artificial Sequence
  Description of Artificial Sequence: Synthetic oligonucleotide
  Target: LAMA2; (-) strand; PAM type: NRG; PAM sequence: AAG
cgcttctctgtaatatatgt

SEQ ID NO: 58145 - DNA, 20 bp, Artificial Sequence
  Description of Artificial Sequence: Synthetic oligonucleotide
  Target: LAMA2; (-) strand; PAM type: NRG; PAM sequence: TAG
ttagggtgtacagtgaaact

SEQ ID NO: 58146 - DNA, 20 bp, Artificial Sequence
  Description of Artificial Sequence: Synthetic oligonucleotide
  Target: LAMA2; (-) strand; PAM type: NRG; PAM sequence: CAG
ctccttttttttagggtgta

SEQ ID NO: 58147 - DNA, 20 bp, Artificial Sequence
  Description of Artificial Sequence: Synthetic oligonucleotide
  Target: LAMA2; (-) strand; PAM type: NRG; PAM sequence: GGG
tcaatttctcctttttttta

SEQ ID NO: 58148 - DNA, 20 bp, Artificial Sequence
  Description of Artificial Sequence: Synthetic oligonucleotide
  Target: LAMA2; (-) strand; PAM type: NRG; PAM sequence: AGG
atcaatttctcctttttttt

SEQ ID NO: 58149 - DNA, 20 bp, Artificial Sequence
  Description of Artificial Sequence: Synthetic oligonucleotide
  Target: LAMA2; (-) strand; PAM type: NRG; PAM sequence: TAG
tatcaatttctccttttttt

SEQ ID NO: 58150 - DNA, 20 bp, Artificial Sequence
  Description of Artificial Sequence: Synthetic oligonucleotide
  Target: LAMA2; (-) strand; PAM type: NRG; PAM sequence: AGG
tctcatgtctggccttccta

SEQ ID NO: 58151 - DNA, 20 bp, Artificial Sequence
  Description of Artificial Sequence: Synthetic oligonucleotide
  Target: LAMA2; (-) strand; PAM type: NRG; PAM sequence: AAG
ctctcatgtctggccttcct

SEQ ID NO: 58152 - DNA, 20 bp, Artificial Sequence
  Description of Artificial Sequence: Synthetic oligonucleotide
  Target: LAMA2; (-) strand; PAM type: NRG; PAM sequence: TGG
agagctcaccctctcatgtc

SEQ ID NO: 58153 - DNA, 20 bp, Artificial Sequence
  Description of Artificial Sequence: Synthetic oligonucleotide
  Target: LAMA2; (-) strand; PAM type: NRG; PAM sequence: GAG
atcctacaggtggtcaccta

SEQ ID NO: 58154 - DNA, 20 bp, Artificial Sequence
  Description of Artificial Sequence: Synthetic oligonucleotide
  Target: LAMA2; (-) strand; PAM type: NRG; PAM sequence: TAG
tgatcctacaggtggtcacc

SEQ ID NO: 58155 - DNA, 20 bp, Artificial Sequence
  Description of Artificial Sequence: Synthetic oligonucleotide
  Target: LAMA2; (-) strand; PAM type: NRG; PAM sequence: TGG
ttctttcctgatcctacagg

SEQ ID NO: 58156 - DNA, 20 bp, Artificial Sequence
  Description of Artificial Sequence: Synthetic oligonucleotide
  Target: LAMA2; (-) strand; PAM type: NRG; PAM sequence: AGG
atgttctttcctgatcctac

SEQ ID NO: 58157 - DNA, 20 bp, Artificial Sequence
  Description of Artificial Sequence: Synthetic oligonucleotide
  Target: LAMA2; (-) strand; PAM type: NRG; PAM sequence: CAG
tatgttctttcctgatccta

SEQ ID NO: 58158 - DNA, 20 bp, Artificial Sequence
  Description of Artificial Sequence: Synthetic oligonucleotide
  Target: LAMA2; (-) strand; PAM type: NRG; PAM sequence: TAG
agaaatcttaactccaggac

SEQ ID NO: 58159 - DNA, 20 bp, Artificial Sequence
  Description of Artificial Sequence: Synthetic oligonucleotide
  Target: LAMA2; (-) strand; PAM type: NRG; PAM sequence: AGG
aaaatagaaatcttaactcc

SEQ ID NO: 58160 - DNA, 20 bp, Artificial Sequence
  Description of Artificial Sequence: Synthetic oligonucleotide
  Target: LAMA2; (-) strand; PAM type: NRG; PAM sequence: CAG
aaaaatagaaatcttaactc

SEQ ID NO: 58161 - DNA, 20 bp, Artificial Sequence
  Description of Artificial Sequence: Synthetic oligonucleotide
  Target: LAMA2; (-) strand; PAM type: NRG; PAM sequence: TAG
ctctataaatctagaaaaaa

SEQ ID NO: 58162 - DNA, 20 bp, Artificial Sequence
  Description of Artificial Sequence: Synthetic oligonucleotide
  Target: LAMA2; (-) strand; PAM type: NRG; PAM sequence: TAG
caattatacctctataaatc

SEQ ID NO: 58163 - DNA, 20 bp, Artificial Sequence
  Description of Artificial Sequence: Synthetic oligonucleotide
  Target: LAMA2; (-) strand; PAM type: NRG; PAM sequence: TAG
attaaatcgtcatgcatatc

SEQ ID NO: 58164 - DNA, 20 bp, Artificial Sequence
  Description of Artificial Sequence: Synthetic oligonucleotide
  Target: LAMA2; (-) strand; PAM type: NRG; PAM sequence: TGG
cgtattaattaatttggttg

SEQ ID NO: 58165 - DNA, 20 bp, Artificial Sequence
  Description of Artificial Sequence: Synthetic oligonucleotide
  Target: LAMA2; (-) strand; PAM type: NRG; PAM sequence: TGG
gatacacgtattaattaatt

SEQ ID NO: 58166 - DNA, 20 bp, Artificial Sequence
  Description of Artificial Sequence: Synthetic oligonucleotide
  Target: LAMA2; (-) strand; PAM type: NRG; PAM sequence: AGG
cacaaagtgataactatgtg

SEQ ID NO: 58167 - DNA, 20 bp, Artificial Sequence
  Description of Artificial Sequence: Synthetic oligonucleotide
  Target: LAMA2; (-) strand; PAM type: NRG; PAM sequence: GAG
acacaaagtgataactatgt

SEQ ID NO: 58168 - DNA, 20 bp, Artificial Sequence
  Description of Artificial Sequence: Synthetic oligonucleotide
  Target: LAMA2; (-) strand; PAM type: NRG; PAM sequence: AAG
taaacaaacacgcacacaca

SEQ ID NO: 58169 - DNA, 20 bp, Artificial Sequence
  Description of Artificial Sequence: Synthetic oligonucleotide
  Target: LAMA2; (-) strand; PAM type: NRG; PAM sequence: CAG
tatttggaattttccaaaca

SEQ ID NO: 58170 - DNA, 20 bp, Artificial Sequence
  Description of Artificial Sequence: Synthetic oligonucleotide
  Target: LAMA2; (-) strand; PAM type: NRG; PAM sequence: TGG
ataatattgtactgtttatt

SEQ ID NO: 58171 - DNA, 20 bp, Artificial Sequence
  Description of Artificial Sequence: Synthetic oligonucleotide
  Target: LAMA2; (-) strand; PAM type: NRG; PAM sequence: TAG
aatgtacagaatagtaacta

SEQ ID NO: 58172 - DNA, 20 bp, Artificial Sequence
  Description of Artificial Sequence: Synthetic oligonucleotide
  Target: LAMA2; (-) strand; PAM type: NRG; PAM sequence: TAG
tagggatctaatgtacagaa

SEQ ID NO: 58173 - DNA, 20 bp, Artificial Sequence
  Description of Artificial Sequence: Synthetic oligonucleotide
  Target: LAMA2; (-) strand; PAM type: NRG; PAM sequence: CAG
agttctagggatctaatgta

SEQ ID NO: 58174 - DNA, 20 bp, Artificial Sequence
  Description of Artificial Sequence: Synthetic oligonucleotide
  Target: LAMA2; (-) strand; PAM type: NRG; PAM sequence: GGG
tataagatgaataagttcta

SEQ ID NO: 58175 - DNA, 20 bp, Artificial Sequence
  Description of Artificial Sequence: Synthetic oligonucleotide
  Target: LAMA2; (-) strand; PAM type: NRG; PAM sequence: AGG
ttataagatgaataagttct

SEQ ID NO: 58176 - DNA, 20 bp, Artificial Sequence
  Description of Artificial Sequence: Synthetic oligonucleotide
  Target: LAMA2; (-) strand; PAM type: NRG; PAM sequence: TAG
gttataagatgaataagttc

SEQ ID NO: 58177 - DNA, 20 bp, Artificial Sequence
  Description of Artificial Sequence: Synthetic oligonucleotide
  Target: LAMA2; (-) strand; PAM type: NRG; PAM sequence: AAG
gtttcagttataagatgaat

SEQ ID NO: 58178 - DNA, 20 bp, Artificial Sequence
  Description of Artificial Sequence: Synthetic oligonucleotide
  Target: LAMA2; (-) strand; PAM type: NRG; PAM sequence: AAG
gggtacacagtttcagttat

SEQ ID NO: 58179 - DNA, 20 bp, Artificial Sequence
  Description of Artificial Sequence: Synthetic oligonucleotide
  Target: LAMA2; (-) strand; PAM type: NRG; PAM sequence: CAG
ggtcaaagggtacacagttt

SEQ ID NO: 58180 - DNA, 20 bp, Artificial Sequence
  Description of Artificial Sequence: Synthetic oligonucleotide
  Target: LAMA2; (-) strand; PAM type: NRG; PAM sequence: CAG
ggtttgggtcaaagggtaca

SEQ ID NO: 58181 - DNA, 20 bp, Artificial Sequence
  Description of Artificial Sequence: Synthetic oligonucleotide
  Target: LAMA2; (-) strand; PAM type: NRG; PAM sequence: GGG
aatgagaggtttgggtcaaa

SEQ ID NO: 58182 - DNA, 20 bp, Artificial Sequence
  Description of Artificial Sequence: Synthetic oligonucleotide
  Target: LAMA2; (-) strand; PAM type: NRG; PAM sequence: AGG
aaatgagaggtttgggtcaa

SEQ ID NO: 58183 - DNA, 20 bp, Artificial Sequence
  Description of Artificial Sequence: Synthetic oligonucleotide
  Target: LAMA2; (-) strand; PAM type: NRG; PAM sequence: AAG
taaatgagaggtttgggtca

SEQ ID NO: 58184 - DNA, 20 bp, Artificial Sequence
  Description of Artificial Sequence: Synthetic oligonucleotide
  Target: LAMA2; (-) strand; PAM type: NRG; PAM sequence: GGG
ttggggtaaatgagaggttt

SEQ ID NO: 58185 - DNA, 20 bp, Artificial Sequence
  Description of Artificial Sequence: Synthetic oligonucleotide
  Target: LAMA2; (-) strand; PAM type: NRG; PAM sequence: TGG
attggggtaaatgagaggtt

SEQ ID NO: 58186 - DNA, 20 bp, Artificial Sequence
  Description of Artificial Sequence: Synthetic oligonucleotide
  Target: LAMA2; (-) strand; PAM type: NRG; PAM sequence: AGG
caggaattggggtaaatgag

SEQ ID NO: 58187 - DNA, 20 bp, Artificial Sequence
  Description of Artificial Sequence: Synthetic oligonucleotide
  Target: LAMA2; (-) strand; PAM type: NRG; PAM sequence: GAG
ccaggaattggggtaaatga

SEQ ID NO: 58188 - DNA, 20 bp, Artificial Sequence
  Description of Artificial Sequence: Synthetic oligonucleotide
  Target: LAMA2; (-) strand; PAM type: NRG; PAM sequence: GAG
tgccaggaattggggtaaat

SEQ ID NO: 58189 - DNA, 20 bp, Artificial Sequence
  Description of Artificial Sequence: Synthetic oligonucleotide
  Target: LAMA2; (-) strand; PAM type: NRG; PAM sequence: GGG
atggtggttgccaggaattg

SEQ ID NO: 58190 - DNA, 20 bp, Artificial Sequence
  Description of Artificial Sequence: Synthetic oligonucleotide
  Target: LAMA2; (-) strand; PAM type: NRG; PAM sequence: GGG
aatggtggttgccaggaatt

SEQ ID NO: 58191 - DNA, 20 bp, Artificial Sequence
  Description of Artificial Sequence: Synthetic oligonucleotide
  Target: LAMA2; (-) strand; PAM type: NRG; PAM sequence: TGG
gaatggtggttgccaggaat

SEQ ID NO: 58192 - DNA, 20 bp, Artificial Sequence
  Description of Artificial Sequence: Synthetic oligonucleotide
  Target: LAMA2; (-) strand; PAM type: NRG; PAM sequence: AGG
tggaatgaatggtggttgcc

SEQ ID NO: 58193 - DNA, 20 bp, Artificial Sequence
  Description of Artificial Sequence: Synthetic oligonucleotide
  Target: LAMA2; (-) strand; PAM type: NRG; PAM sequence: CAG
gtggaatgaatggtggttgc

SEQ ID NO: 58194 - DNA, 20 bp, Artificial Sequence
  Description of Artificial Sequence: Synthetic oligonucleotide
  Target: LAMA2; (-) strand; PAM type: NRG; PAM sequence: TGG
tagaatggtggaatgaatgg

SEQ ID NO: 58195 - DNA, 20 bp, Artificial Sequence
  Description of Artificial Sequence: Synthetic oligonucleotide
  Target: LAMA2; (-) strand; PAM type: NRG; PAM sequence: TGG
gagtagaatggtggaatgaa

SEQ ID NO: 58196 - DNA, 20 bp, Artificial Sequence
  Description of Artificial Sequence: Synthetic oligonucleotide
  Target: LAMA2; (-) strand; PAM type: NRG; PAM sequence: TGG
agaagcagagagtagaatgg

SEQ ID NO: 58197 - DNA, 20 bp, Artificial Sequence
  Description of Artificial Sequence: Synthetic oligonucleotide
  Target: LAMA2; (-) strand; PAM type: NRG; PAM sequence: TGG
catagaagcagagagtagaa

SEQ ID NO: 58198 - DNA, 20 bp, Artificial Sequence
  Description of Artificial Sequence: Synthetic oligonucleotide
  Target: LAMA2; (-) strand; PAM type: NRG; PAM sequence: TAG
gaactcatagaagcagagag

SEQ ID NO: 58199 - DNA, 20 bp, Artificial Sequence
  Description of Artificial Sequence: Synthetic oligonucleotide
  Target: LAMA2; (-) strand; PAM type: NRG; PAM sequence: GAG
gttgaactcatagaagcaga

SEQ ID NO: 58200 - DNA, 20 bp, Artificial Sequence
  Description of Artificial Sequence: Synthetic oligonucleotide
  Target: LAMA2; (-) strand; PAM type: NRG; PAM sequence: GAG
aagttgaactcatagaagca

SEQ ID NO: 58201 - DNA, 20 bp, Artificial Sequence
  Description of Artificial Sequence: Synthetic oligonucleotide
  Target: LAMA2; (-) strand; PAM type: NRG; PAM sequence: CAG
aaaagttgaactcatagaag

SEQ ID NO: 58202 - DNA, 20 bp, Artificial Sequence
  Description of Artificial Sequence: Synthetic oligonucleotide
  Target: LAMA2; (-) strand; PAM type: NRG; PAM sequence: AAG
ctaaaaagttgaactcatag

SEQ ID NO: 58203 - DNA, 20 bp, Artificial Sequence
  Description of Artificial Sequence: Synthetic oligonucleotide
  Target: LAMA2; (-) strand; PAM type: NRG; PAM sequence: TAG
aatctaaaaagttgaactca

SEQ ID NO: 58204 - DNA, 20 bp, Artificial Sequence
  Description of Artificial Sequence: Synthetic oligonucleotide
  Target: LAMA2; (-) strand; PAM type: NRG; PAM sequence: AAG
actcacatgtggaatctaaa

SEQ ID NO: 58205 - DNA, 20 bp, Artificial Sequence
  Description of Artificial Sequence: Synthetic oligonucleotide
  Target: LAMA2; (-) strand; PAM type: NRG; PAM sequence: TGG
agtatgatctcactcacatg

SEQ ID NO: 58206 - DNA, 20 bp, Artificial Sequence
  Description of Artificial Sequence: Synthetic oligonucleotide
  Target: LAMA2; (-) strand; PAM type: NRG; PAM sequence: CAG
cacacatagaaaaacaaata

SEQ ID NO: 58207 - DNA, 20 bp, Artificial Sequence
  Description of Artificial Sequence: Synthetic oligonucleotide
  Target: LAMA2; (-) strand; PAM type: NRG; PAM sequence: TAG
taggtgagataagccacaca

SEQ ID NO: 58208 - DNA, 20 bp, Artificial Sequence
  Description of Artificial Sequence: Synthetic oligonucleotide
  Target: LAMA2; (-) strand; PAM type: NRG; PAM sequence: AAG
ggcattgtgctaggtgagat

SEQ ID NO: 58209 - DNA, 20 bp, Artificial Sequence
  Description of Artificial Sequence: Synthetic oligonucleotide
  Target: LAMA2; (-) strand; PAM type: NRG; PAM sequence: GAG
tgaagggcattgtgctaggt

SEQ ID NO: 58210 - DNA, 20 bp, Artificial Sequence
  Description of Artificial Sequence: Synthetic oligonucleotide
  Target: LAMA2; (-) strand; PAM type: NRG; PAM sequence: AGG
agcctgaagggcattgtgct

SEQ ID NO: 58211 - DNA, 20 bp, Artificial Sequence
  Description of Artificial Sequence: Synthetic oligonucleotide
  Target: LAMA2; (-) strand; PAM type: NRG; PAM sequence: TAG
aagcctgaagggcattgtgc

SEQ ID NO: 58212 - DNA, 20 bp, Artificial Sequence
  Description of Artificial Sequence: Synthetic oligonucleotide
  Target: LAMA2; (-) strand; PAM type: NRG; PAM sequence: GGG
atgacatggataagcctgaa

SEQ ID NO: 58213 - DNA, 20 bp, Artificial Sequence
  Description of Artificial Sequence: Synthetic oligonucleotide
  Target: LAMA2; (-) strand; PAM type: NRG; PAM sequence: AGG
aatgacatggataagcctga

SEQ ID NO: 58214 - DNA, 20 bp, Artificial Sequence
  Description of Artificial Sequence: Synthetic oligonucleotide
  Target: LAMA2; (-) strand; PAM type: NRG; PAM sequence: AAG
caatgacatggataagcctg

SEQ ID NO: 58215 - DNA, 20 bp, Artificial Sequence
  Description of Artificial Sequence: Synthetic oligonucleotide
  Target: LAMA2; (-) strand; PAM type: NRG; PAM sequence: AAG
ctatttgcaatgacatggat

SEQ ID NO: 58216 - DNA, 20 bp, Artificial Sequence
  Description of Artificial Sequence: Synthetic oligonucleotide
  Target: LAMA2; (-) strand; PAM type: NRG; PAM sequence: TGG
tcctgctatttgcaatgaca

SEQ ID NO: 58217 - DNA, 20 bp, Artificial Sequence
  Description of Artificial Sequence: Synthetic oligonucleotide
  Target: LAMA2; (-) strand; PAM type: NRG; PAM sequence: AGG
ttattcagccataaaagaga

SEQ ID NO: 58218 - DNA, 20 bp, Artificial Sequence
  Description of Artificial Sequence: Synthetic oligonucleotide
  Target: LAMA2; (-) strand; PAM type: NRG; PAM sequence: AAG
attattcagccataaaagag

SEQ ID NO: 58219 - DNA, 20 bp, Artificial Sequence
  Description of Artificial Sequence: Synthetic oligonucleotide
  Target: LAMA2; (-) strand; PAM type: NRG; PAM sequence: GAG
aatattattcagccataaaa

SEQ ID NO: 58220 - DNA, 20 bp, Artificial Sequence
  Description of Artificial Sequence: Synthetic oligonucleotide
  Target: LAMA2; (-) strand; PAM type: NRG; PAM sequence: AAG
ggaatattattcagccataa

SEQ ID NO: 58221 - DNA, 20 bp, Artificial Sequence
  Description of Artificial Sequence: Synthetic oligonucleotide
  Target: LAMA2; (-) strand; PAM type: NRG; PAM sequence: CAG
ggagatagaggaatattatt

SEQ ID NO: 58222 - DNA, 20 bp, Artificial Sequence
  Description of Artificial Sequence: Synthetic oligonucleotide
  Target: LAMA2; (-) strand; PAM type: NRG; PAM sequence: AGG
agagggagagagggagatag

SEQ ID NO: 58223 - DNA, 20 bp, Artificial Sequence
  Description of Artificial Sequence: Synthetic oligonucleotide
  Target: LAMA2; (-) strand; PAM type: NRG; PAM sequence: GAG
gagagggagagagggagata

SEQ ID NO: 58224 - DNA, 20 bp, Artificial Sequence
  Description of Artificial Sequence: Synthetic oligonucleotide
  Target: LAMA2; (-) strand; PAM type: NRG; PAM sequence: TAG
aagagagggagagagggaga

SEQ ID NO: 58225 - DNA, 20 bp, Artificial Sequence
  Description of Artificial Sequence: Synthetic oligonucleotide
  Target: LAMA2; (-) strand; PAM type: NRG; PAM sequence: GAG
cagaaagagagggagagagg

SEQ ID NO: 58226 - DNA, 20 bp, Artificial Sequence
  Description of Artificial Sequence: Synthetic oligonucleotide
  Target: LAMA2; (-) strand; PAM type: NRG; PAM sequence: GGG
cacagaaagagagggagaga

SEQ ID NO: 58227 - DNA, 20 bp, Artificial Sequence
  Description of Artificial Sequence: Synthetic oligonucleotide
  Target: LAMA2; (-) strand; PAM type: NRG; PAM sequence: AGG
acacagaaagagagggagag

SEQ ID NO: 58228 - DNA, 20 bp, Artificial Sequence
  Description of Artificial Sequence: Synthetic oligonucleotide
  Target: LAMA2; (-) strand; PAM type: NRG; PAM sequence: GAG
cacacagaaagagagggaga

SEQ ID NO: 58229 - DNA, 20 bp, Artificial Sequence
  Description of Artificial Sequence: Synthetic oligonucleotide
  Target: LAMA2; (-) strand; PAM type: NRG; PAM sequence: GAG
cacacacagaaagagaggga

SEQ ID NO: 58230 - DNA, 20 bp, Artificial Sequence
  Description of Artificial Sequence: Synthetic oligonucleotide
  Target: LAMA2; (-) strand; PAM type: NRG; PAM sequence: GAG
cacacacacagaaagagagg

SEQ ID NO: 58231 - DNA, 20 bp, Artificial Sequence
  Description of Artificial Sequence: Synthetic oligonucleotide
  Target: LAMA2; (-) strand; PAM type: NRG; PAM sequence: GGG
cacacacacacagaaagaga

SEQ ID NO: 58232 - DNA, 20 bp, Artificial Sequence
  Description of Artificial Sequence: Synthetic oligonucleotide
  Target: LAMA2; (-) strand; PAM type: NRG; PAM sequence: AGG
acacacacacacagaaagag

SEQ ID NO: 58233 - DNA, 20 bp, Artificial Sequence
  Description of Artificial Sequence: Synthetic oligonucleotide
  Target: LAMA2; (-) strand; PAM type: NRG; PAM sequence: GAG
cacacacacacacagaaaga

SEQ ID NO: 58234 - DNA, 20 bp, Artificial Sequence
  Description of Artificial Sequence: Synthetic oligonucleotide
  Target: LAMA2; (-) strand; PAM type: NRG; PAM sequence: GAG
cacacacacacacacagaaa

SEQ ID NO: 58235 - DNA, 20 bp, Artificial Sequence
  Description of Artificial Sequence: Synthetic oligonucleotide
  Target: LAMA2; (-) strand; PAM type: NRG; PAM sequence: AAG
cacacacacacacacacaga

SEQ ID NO: 58236 - DNA, 20 bp, Artificial Sequence
  Description of Artificial Sequence: Synthetic oligonucleotide
  Target: LAMA2; (-) strand; PAM type: NRG; PAM sequence: CAG
cacacacacacacacacaca

SEQ ID NO: 58237 - DNA, 20 bp, Artificial Sequence
  Description of Artificial Sequence: Synthetic oligonucleotide
  Target: LAMA2; (-) strand; PAM type: NRG; PAM sequence: CAG
tacacacatacacagacaca

SEQ ID NO: 58238 - DNA, 20 bp, Artificial Sequence
  Description of Artificial Sequence: Synthetic oligonucleotide
  Target: LAMA2; (-) strand; PAM type: NRG; PAM sequence: CAG
atatagtatacacacataca

SEQ ID NO: 58239 - DNA, 20 bp, Artificial Sequence
  Description of Artificial Sequence: Synthetic oligonucleotide
  Target: LAMA2; (-) strand; PAM type: NRG; PAM sequence: TAG
atgaatggataaagtaaata

SEQ ID NO: 58240 - DNA, 20 bp, Artificial Sequence
  Description of Artificial Sequence: Synthetic oligonucleotide
  Target: LAMA2; (-) strand; PAM type: NRG; PAM sequence: AAG
catcagtgaatgaatggata

SEQ ID NO: 58241 - DNA, 20 bp, Artificial Sequence
  Description of Artificial Sequence: Synthetic oligonucleotide
  Target: LAMA2; (-) strand; PAM type: NRG; PAM sequence: TGG
agtatccatcagtgaatgaa

SEQ ID NO: 58242 - DNA, 20 bp, Artificial Sequence
  Description of Artificial Sequence: Synthetic oligonucleotide
  Target: LAMA2; (-) strand; PAM type: NRG; PAM sequence: CAG
taaatggcctaagtatccat

SEQ ID NO: 58243 - DNA, 20 bp, Artificial Sequence
  Description of Artificial Sequence: Synthetic oligonucleotide
  Target: LAMA2; (-) strand; PAM type: NRG; PAM sequence: AAG
tcaagataaataaatggcct

SEQ ID NO: 58244 - DNA, 20 bp, Artificial Sequence
  Description of Artificial Sequence: Synthetic oligonucleotide
  Target: LAMA2; (-) strand; PAM type: NRG; PAM sequence: TGG
caacagtcaagataaataaa

SEQ ID NO: 58245 - DNA, 20 bp, Artificial Sequence
  Description of Artificial Sequence: Synthetic oligonucleotide
  Target: LAMA2; (-) strand; PAM type: NRG; PAM sequence: AAG
cagcatcattcacaacagtc

SEQ ID NO: 58246 - DNA, 20 bp, Artificial Sequence
  Description of Artificial Sequence: Synthetic oligonucleotide
  Target: LAMA2; (-) strand; PAM type: NRG; PAM sequence: CAG
catagcagcatcattcacaa

SEQ ID NO: 58247 - DNA, 20 bp, Artificial Sequence
  Description of Artificial Sequence: Synthetic oligonucleotide
  Target: LAMA2; (-) strand; PAM type: NRG; PAM sequence: CAG
ctgcatccacatgttcatag

SEQ ID NO: 58248 - DNA, 20 bp, Artificial Sequence
  Description of Artificial Sequence: Synthetic oligonucleotide
  Target: LAMA2; (-) strand; PAM type: NRG; PAM sequence: TAG
tatctgcatccacatgttca

SEQ ID NO: 58249 - DNA, 20 bp, Artificial Sequence
  Description of Artificial Sequence: Synthetic oligonucleotide
  Target: LAMA2; (-) strand; PAM type: NRG; PAM sequence: GAG
ggtgatatcagtatctcaag

SEQ ID NO: 58250 - DNA, 20 bp, Artificial Sequence
  Description of Artificial Sequence: Synthetic oligonucleotide
  Target: LAMA2; (-) strand; PAM type: NRG; PAM sequence: AGG
aaggtgatatcagtatctca

SEQ ID NO: 58251 - DNA, 20 bp, Artificial Sequence
  Description of Artificial Sequence: Synthetic oligonucleotide
  Target: LAMA2; (-) strand; PAM type: NRG; PAM sequence: AAG
aaaggtgatatcagtatctc

SEQ ID NO: 58252 - DNA, 20 bp, Artificial Sequence
  Description of Artificial Sequence: Synthetic oligonucleotide
  Target: LAMA2; (-) strand; PAM type: NRG; PAM sequence: CAG
tatattttaaaaggtgatat

SEQ ID NO: 58253 - DNA, 20 bp, Artificial Sequence
  Description of Artificial Sequence: Synthetic oligonucleotide
  Target: LAMA2; (-) strand; PAM type: NRG; PAM sequence: AGG
ttctagctatatattttaaa

SEQ ID NO: 58254 - DNA, 20 bp, Artificial Sequence
  Description of Artificial Sequence: Synthetic oligonucleotide
  Target: LAMA2; (-) strand; PAM type: NRG; PAM sequence: AAG
tttctagctatatattttaa

SEQ ID NO: 58255 - DNA, 20 bp, Artificial Sequence
  Description of Artificial Sequence: Synthetic oligonucleotide
  Target: LAMA2; (-) strand; PAM type: NRG; PAM sequence: TAG
tgacccagcaatcccatttc

SEQ ID NO: 58256 - DNA, 20 bp, Artificial Sequence
  Description of Artificial Sequence: Synthetic oligonucleotide
  Target: LAMA2; (-) strand; PAM type: NRG; PAM sequence: CAG
aatagtactacaatatgacc

SEQ ID NO: 58257 - DNA, 20 bp, Artificial Sequence
  Description of Artificial Sequence: Synthetic oligonucleotide
  Target: LAMA2; (-) strand; PAM type: NRG; PAM sequence: TAG
gattcttccaaaaatgaaaa

SEQ ID NO: 58258 - DNA, 20 bp, Artificial Sequence
  Description of Artificial Sequence: Synthetic oligonucleotide
  Target: LAMA2; (-) strand; PAM type: NRG; PAM sequence: GAG
ggaaaacagcattaagcata

SEQ ID NO: 58259 - DNA, 20 bp, Artificial Sequence
  Description of Artificial Sequence: Synthetic oligonucleotide
  Target: LAMA2; (-) strand; PAM type: NRG; PAM sequence: TAG
atggaaaacagcattaagca

SEQ ID NO: 58260 - DNA, 20 bp, Artificial Sequence
  Description of Artificial Sequence: Synthetic oligonucleotide
  Target: LAMA2; (-) strand; PAM type: NRG; PAM sequence: AAG
ccactatggaaaacagcatt

SEQ ID NO: 58261 - DNA, 20 bp, Artificial Sequence
  Description of Artificial Sequence: Synthetic oligonucleotide
  Target: LAMA2; (-) strand; PAM type: NRG; PAM sequence: CAG
ggcatagccactatggaaaa

SEQ ID NO: 58262 - DNA, 20 bp, Artificial Sequence
  Description of Artificial Sequence: Synthetic oligonucleotide
  Target: LAMA2; (-) strand; PAM type: NRG; PAM sequence: TGG
gtaaataggcatagccacta

SEQ ID NO: 58263 - DNA, 20 bp, Artificial Sequence
  Description of Artificial Sequence: Synthetic oligonucleotide
  Target: LAMA2; (-) strand; PAM type: NRG; PAM sequence: TAG
ggtgggaatgtaaataggca

SEQ ID NO: 58264 - DNA, 20 bp, Artificial Sequence
  Description of Artificial Sequence: Synthetic oligonucleotide
  Target: LAMA2; (-) strand; PAM type: NRG; PAM sequence: AGG
cttttggtgggaatgtaaat

SEQ ID NO: 58265 - DNA, 20 bp, Artificial Sequence
  Description of Artificial Sequence: Synthetic oligonucleotide
  Target: LAMA2; (-) strand; PAM type: NRG; PAM sequence: TAG
acttttggtgggaatgtaaa

SEQ ID NO: 58266 - DNA, 20 bp, Artificial Sequence
  Description of Artificial Sequence: Synthetic oligonucleotide
  Target: LAMA2; (-) strand; PAM type: NRG; PAM sequence: GGG
aacccttctacacttttggt

SEQ ID NO: 58267 - DNA, 20 bp, Artificial Sequence
  Description of Artificial Sequence: Synthetic oligonucleotide
  Target: LAMA2; (-) strand; PAM type: NRG; PAM sequence: TGG
aaacccttctacacttttgg

SEQ ID NO: 58268 - DNA, 20 bp, Artificial Sequence
  Description of Artificial Sequence: Synthetic oligonucleotide
  Target: LAMA2; (-) strand; PAM type: NRG; PAM sequence: TGG
aagaaacccttctacacttt

SEQ ID NO: 58269 - DNA, 20 bp, Artificial Sequence
  Description of Artificial Sequence: Synthetic oligonucleotide
  Target: LAMA2; (-) strand; PAM type: NRG; PAM sequence: AAG
ttggtgaggaaacagagaaa

SEQ ID NO: 58270 - DNA, 20 bp, Artificial Sequence
  Description of Artificial Sequence: Synthetic oligonucleotide
  Target: LAMA2; (-) strand; PAM type: NRG; PAM sequence: GAG
cacatgttggtgaggaaaca

SEQ ID NO: 58271 - DNA, 20 bp, Artificial Sequence
  Description of Artificial Sequence: Synthetic oligonucleotide
  Target: LAMA2; (-) strand; PAM type: NRG; PAM sequence: CAG
aacacatgttggtgaggaaa

SEQ ID NO: 58272 - DNA, 20 bp, Artificial Sequence
  Description of Artificial Sequence: Synthetic oligonucleotide
  Target: LAMA2; (-) strand; PAM type: NRG; PAM sequence: AGG
aaagataacacatgttggtg

SEQ ID NO: 58273 - DNA, 20 bp, Artificial Sequence
  Description of Artificial Sequence: Synthetic oligonucleotide
  Target: LAMA2; (-) strand; PAM type: NRG; PAM sequence: GAG
aaaagataacacatgttggt

SEQ ID NO: 58274 - DNA, 20 bp, Artificial Sequence
  Description of Artificial Sequence: Synthetic oligonucleotide
  Target: LAMA2; (-) strand; PAM type: NRG; PAM sequence: TGG
agacaaaagataacacatgt

SEQ ID NO: 58275 - DNA, 20 bp, Artificial Sequence
  Description of Artificial Sequence: Synthetic oligonucleotide
  Target: LAMA2; (-) strand; PAM type: NRG; PAM sequence: AAG
ggctattatataaaagacaa

SEQ ID NO: 58276 - DNA, 20 bp, Artificial Sequence
  Description of Artificial Sequence: Synthetic oligonucleotide
  Target: LAMA2; (-) strand; PAM type: NRG; PAM sequence: AAG
ttagcatggctattatataa

SEQ ID NO: 58277 - DNA, 20 bp, Artificial Sequence
  Description of Artificial Sequence: Synthetic oligonucleotide
  Target: LAMA2; (-) strand; PAM type: NRG; PAM sequence: TGG
tcacctcatacctattagca

SEQ ID NO: 58278 - DNA, 20 bp, Artificial Sequence
  Description of Artificial Sequence: Synthetic oligonucleotide
  Target: LAMA2; (-) strand; PAM type: NRG; PAM sequence: TAG
agatatcacctcatacctat

SEQ ID NO: 58279 - DNA, 20 bp, Artificial Sequence
  Description of Artificial Sequence: Synthetic oligonucleotide
  Target: LAMA2; (-) strand; PAM type: NRG; PAM sequence: GAG
atacaaatcaaaaccacagt

SEQ ID NO: 58280 - DNA, 20 bp, Artificial Sequence
  Description of Artificial Sequence: Synthetic oligonucleotide
  Target: LAMA2; (-) strand; PAM type: NRG; PAM sequence: CAG
ggaaatacaaatcaaaacca

SEQ ID NO: 58281 - DNA, 20 bp, Artificial Sequence
  Description of Artificial Sequence: Synthetic oligonucleotide
  Target: LAMA2; (-) strand; PAM type: NRG; PAM sequence: GGG
ttcaacatcattaatcatca

SEQ ID NO: 58282 - DNA, 20 bp, Artificial Sequence
  Description of Artificial Sequence: Synthetic oligonucleotide
  Target: LAMA2; (-) strand; PAM type: NRG; PAM sequence: AGG
gttcaacatcattaatcatc

SEQ ID NO: 58283 - DNA, 20 bp, Artificial Sequence
  Description of Artificial Sequence: Synthetic oligonucleotide
  Target: LAMA2; (-) strand; PAM type: NRG; PAM sequence: CAG
tgttcaacatcattaatcat

SEQ ID NO: 58284 - DNA, 20 bp, Artificial Sequence
  Description of Artificial Sequence: Synthetic oligonucleotide
  Target: LAMA2; (-) strand; PAM type: NRG; PAM sequence: AAG
tggccaacaggtatattaaa

SEQ ID NO: 58285 - DNA, 20 bp, Artificial Sequence
  Description of Artificial Sequence: Synthetic oligonucleotide
  Target: LAMA2; (-) strand; PAM type: NRG; PAM sequence: AGG
gagacatacaaatggccaac

SEQ ID NO: 58286 - DNA, 20 bp, Artificial Sequence
  Description of Artificial Sequence: Synthetic oligonucleotide
  Target: LAMA2; (-) strand; PAM type: NRG; PAM sequence: CAG
agagacatacaaatggccaa

SEQ ID NO: 58287 - DNA, 20 bp, Artificial Sequence
  Description of Artificial Sequence: Synthetic oligonucleotide
  Target: LAMA2; (-) strand; PAM type: NRG; PAM sequence: TGG
tccaaaaagagacatacaaa

SEQ ID NO: 58288 - DNA, 20 bp, Artificial Sequence
  Description of Artificial Sequence: Synthetic oligonucleotide
  Target: LAMA2; (-) strand; PAM type: NRG; PAM sequence: GAG
aatagacatgtttccaaaaa

SEQ ID NO: 58289 - DNA, 20 bp, Artificial Sequence
  Description of Artificial Sequence: Synthetic oligonucleotide
  Target: LAMA2; (-) strand; PAM type: NRG; PAM sequence: AAG
aaaatagacatgtttccaaa

SEQ ID NO: 58290 - DNA, 20 bp, Artificial Sequence
  Description of Artificial Sequence: Synthetic oligonucleotide
  Target: LAMA2; (-) strand; PAM type: NRG; PAM sequence: TAG
acctaaacatatctaaaaaa

SEQ ID NO: 58291 - DNA, 20 bp, Artificial Sequence
  Description of Artificial Sequence: Synthetic oligonucleotide
  Target: LAMA2; (-) strand; PAM type: NRG; PAM sequence: AGG
gccaatttcaaaatggacaa

SEQ ID NO: 58292 - DNA, 20 bp, Artificial Sequence
  Description of Artificial Sequence: Synthetic oligonucleotide
  Target: LAMA2; (-) strand; PAM type: NRG; PAM sequence: AAG
agccaatttcaaaatggaca

SEQ ID NO: 58293 - DNA, 20 bp, Artificial Sequence
  Description of Artificial Sequence: Synthetic oligonucleotide
  Target: LAMA2; (-) strand; PAM type: NRG; PAM sequence: TGG
aaaataagccaatttcaaaa

SEQ ID NO: 58294 - DNA, 20 bp, Artificial Sequence
  Description of Artificial Sequence: Synthetic oligonucleotide
  Target: LAMA2; (-) strand; PAM type: NRG; PAM sequence: AAG
atagcaagaaaacacaaaat

SEQ ID NO: 58295 - DNA, 20 bp, Artificial Sequence
  Description of Artificial Sequence: Synthetic oligonucleotide
  Target: LAMA2; (-) strand; PAM type: NRG; PAM sequence: AAG
aattcatacaactcaatagc

SEQ ID NO: 58296 - DNA, 20 bp, Artificial Sequence
  Description of Artificial Sequence: Synthetic oligonucleotide
  Target: LAMA2; (-) strand; PAM type: NRG; PAM sequence: TAG
aaggaattcatacaactcaa

SEQ ID NO: 58297 - DNA, 20 bp, Artificial Sequence
  Description of Artificial Sequence: Synthetic oligonucleotide
  Target: LAMA2; (-) strand; PAM type: NRG; PAM sequence: AGG
gttaatattcaaaatatata

SEQ ID NO: 58298 - DNA, 20 bp, Artificial Sequence
  Description of Artificial Sequence: Synthetic oligonucleotide
  Target: LAMA2; (-) strand; PAM type: NRG; PAM sequence: AAG
agttaatattcaaaatatat

SEQ ID NO: 58299 - DNA, 20 bp, Artificial Sequence
  Description of Artificial Sequence: Synthetic oligonucleotide
  Target: LAMA2; (-) strand; PAM type: NRG; PAM sequence: GAG
caaaccatatatatgatcag

SEQ ID NO: 58300 - DNA, 20 bp, Artificial Sequence
  Description of Artificial Sequence: Synthetic oligonucleotide
  Target: LAMA2; (-) strand; PAM type: NRG; PAM sequence: AGG
ggcaaaccatatatatgatc

SEQ ID NO: 58301 - DNA, 20 bp, Artificial Sequence
  Description of Artificial Sequence: Synthetic oligonucleotide
  Target: LAMA2; (-) strand; PAM type: NRG; PAM sequence: CAG
tggcaaaccatatatatgat

SEQ ID NO: 58302 - DNA, 20 bp, Artificial Sequence
  Description of Artificial Sequence: Synthetic oligonucleotide
  Target: LAMA2; (-) strand; PAM type: NRG; PAM sequence: TGG
tgtggtatgggataatatat

SEQ ID NO: 58303 - DNA, 20 bp, Artificial Sequence
  Description of Artificial Sequence: Synthetic oligonucleotide
  Target: LAMA2; (-) strand; PAM type: NRG; PAM sequence: GGG
aaaaaggcaagttgtggtat

SEQ ID NO: 58304 - DNA, 20 bp, Artificial Sequence
  Description of Artificial Sequence: Synthetic oligonucleotide
  Target: LAMA2; (-) strand; PAM type: NRG; PAM sequence: TGG
taaaaaggcaagttgtggta

SEQ ID NO: 58305 - DNA, 20 bp, Artificial Sequence
  Description of Artificial Sequence: Synthetic oligonucleotide
  Target: LAMA2; (-) strand; PAM type: NRG; PAM sequence: TGG
caaaataaaaaggcaagttg

SEQ ID NO: 58306 - DNA, 20 bp, Artificial Sequence
  Description of Artificial Sequence: Synthetic oligonucleotide
  Target: LAMA2; (-) strand; PAM type: NRG; PAM sequence: AAG
aatcaacaaaataaaaaggc

SEQ ID NO: 58307 - DNA, 20 bp, Artificial Sequence
  Description of Artificial Sequence: Synthetic oligonucleotide
  Target: LAMA2; (-) strand; PAM type: NRG; PAM sequence: AGG
atacaatcaacaaaataaaa

SEQ ID NO: 58308 - DNA, 20 bp, Artificial Sequence
  Description of Artificial Sequence: Synthetic oligonucleotide
  Target: LAMA2; (-) strand; PAM type: NRG; PAM sequence: AAG
gatacaatcaacaaaataaa

SEQ ID NO: 58309 - DNA, 20 bp, Artificial Sequence
  Description of Artificial Sequence: Synthetic oligonucleotide
  Target: LAMA2; (-) strand; PAM type: NRG; PAM sequence: AGG
actaaaaacttctacagcag

SEQ ID NO: 58310 - DNA, 20 bp, Artificial Sequence
  Description of Artificial Sequence: Synthetic oligonucleotide
  Target: LAMA2; (-) strand; PAM type: NRG; PAM sequence: GAG
aactaaaaacttctacagca

SEQ ID NO: 58311 - DNA, 20 bp, Artificial Sequence
  Description of Artificial Sequence: Synthetic oligonucleotide
  Target: LAMA2; (-) strand; PAM type: NRG; PAM sequence: CAG
caaactaaaaacttctacag

SEQ ID NO: 58312 - DNA, 20 bp, Artificial Sequence
  Description of Artificial Sequence: Synthetic oligonucleotide
  Target: LAMA2; (-) strand; PAM type: NRG; PAM sequence: CAG
cagcaaactaaaaacttcta

SEQ ID NO: 58313 - DNA, 20 bp, Artificial Sequence
  Description of Artificial Sequence: Synthetic oligonucleotide
  Target: LAMA2; (-) strand; PAM type: NRG; PAM sequence: CAG
aaaacaaagaagtgtaactg

SEQ ID NO: 58314 - DNA, 20 bp, Artificial Sequence
  Description of Artificial Sequence: Synthetic oligonucleotide
  Target: LAMA2; (-) strand; PAM type: NRG; PAM sequence: AAG
caatgaaagcaaaaacaaag

SEQ ID NO: 58315 - DNA, 20 bp, Artificial Sequence
  Description of Artificial Sequence: Synthetic oligonucleotide
  Target: LAMA2; (-) strand; PAM type: NRG; PAM sequence: AAG
aggcaatgaaagcaaaaaca

SEQ ID NO: 58316 - DNA, 20 bp, Artificial Sequence
  Description of Artificial Sequence: Synthetic oligonucleotide
  Target: LAMA2; (-) strand; PAM type: NRG; PAM sequence: AAG
acccgaagcacaggcaatga

SEQ ID NO: 58317 - DNA, 20 bp, Artificial Sequence
  Description of Artificial Sequence: Synthetic oligonucleotide
  Target: LAMA2; (-) strand; PAM type: NRG; PAM sequence: AGG
gggtacgacacccgaagcac

SEQ ID NO: 58318 - DNA, 20 bp, Artificial Sequence
  Description of Artificial Sequence: Synthetic oligonucleotide
  Target: LAMA2; (-) strand; PAM type: NRG; PAM sequence: CAG
ggggtacgacacccgaagca

SEQ ID NO: 58319 - DNA, 20 bp, Artificial Sequence
  Description of Artificial Sequence: Synthetic oligonucleotide
  Target: LAMA2; (-) strand; PAM type: NRG; PAM sequence: AAG
tttttggggtacgacacccg

SEQ ID NO: 58320 - DNA, 20 bp, Artificial Sequence
  Description of Artificial Sequence: Synthetic oligonucleotide
  Target: LAMA2; (-) strand; PAM type: NRG; PAM sequence: GGG
agtcttggtcatgatttttg

SEQ ID NO: 58321 - DNA, 20 bp, Artificial Sequence
  Description of Artificial Sequence: Synthetic oligonucleotide
  Target: LAMA2; (-) strand; PAM type: NRG; PAM sequence: GGG
cagtcttggtcatgattttt

SEQ ID NO: 58322 - DNA, 20 bp, Artificial Sequence
  Description of Artificial Sequence: Synthetic oligonucleotide
  Target: LAMA2; (-) strand; PAM type: NRG; PAM sequence: TGG
tcagtcttggtcatgatttt

SEQ ID NO: 58323 - DNA, 20 bp, Artificial Sequence
  Description of Artificial Sequence: Synthetic oligonucleotide
  Target: LAMA2; (-) strand; PAM type: NRG; PAM sequence: TGG
aggctccttgccatcagtct

SEQ ID NO: 58324 - DNA, 20 bp, Artificial Sequence
  Description of Artificial Sequence: Synthetic oligonucleotide
  Target: LAMA2; (-) strand; PAM type: NRG; PAM sequence: CAG
aagaaaaggctccttgccat

SEQ ID NO: 58325 - DNA, 20 bp, Artificial Sequence
  Description of Artificial Sequence: Synthetic oligonucleotide
  Target: LAMA2; (-) strand; PAM type: NRG; PAM sequence: AGG
ctaaaataaatataaagaaa

SEQ ID NO: 58326 - DNA, 20 bp, Artificial Sequence
  Description of Artificial Sequence: Synthetic oligonucleotide
  Target: LAMA2; (-) strand; PAM type: NRG; PAM sequence: AAG
tctaaaataaatataaagaa

SEQ ID NO: 58327 - DNA, 20 bp, Artificial Sequence
  Description of Artificial Sequence: Synthetic oligonucleotide
  Target: LAMA2; (-) strand; PAM type: NRG; PAM sequence: AAG
aagcttctaaaataaatata

SEQ ID NO: 58328 - DNA, 20 bp, Artificial Sequence
  Description of Artificial Sequence: Synthetic oligonucleotide
  Target: LAMA2; (-) strand; PAM type: NRG; PAM sequence: AAG
atgtatgacctgaaaccata

SEQ ID NO: 58329 - DNA, 20 bp, Artificial Sequence
  Description of Artificial Sequence: Synthetic oligonucleotide
  Target: LAMA2; (-) strand; PAM type: NRG; PAM sequence: AAG
aatcaactgaaaatggattc

SEQ ID NO: 58330 - DNA, 20 bp, Artificial Sequence
  Description of Artificial Sequence: Synthetic oligonucleotide
  Target: LAMA2; (-) strand; PAM type: NRG; PAM sequence: TGG
atacaaaaatcaactgaaaa

SEQ ID NO: 58331 - DNA, 20 bp, Artificial Sequence
  Description of Artificial Sequence: Synthetic oligonucleotide
  Target: LAMA2; (-) strand; PAM type: NRG; PAM sequence: TGG
cacatgcaaaagaatgattt

SEQ ID NO: 58332 - DNA, 20 bp, Artificial Sequence
  Description of Artificial Sequence: Synthetic oligonucleotide
  Target: LAMA2; (-) strand; PAM type: NRG; PAM sequence: AAG
aactagatatccacatgcaa

SEQ ID NO: 58333 - DNA, 20 bp, Artificial Sequence
  Description of Artificial Sequence: Synthetic oligonucleotide
  Target: LAMA2; (-) strand; PAM type: NRG; PAM sequence: TAG
ataaactgtattggggaaac

SEQ ID NO: 58334 - DNA, 20 bp, Artificial Sequence
  Description of Artificial Sequence: Synthetic oligonucleotide
  Target: LAMA2; (-) strand; PAM type: NRG; PAM sequence: GGG
cttttcaataaactgtattg

SEQ ID NO: 58335 - DNA, 20 bp, Artificial Sequence
  Description of Artificial Sequence: Synthetic oligonucleotide
  Target: LAMA2; (-) strand; PAM type: NRG; PAM sequence: GGG
tcttttcaataaactgtatt

SEQ ID NO: 58336 - DNA, 20 bp, Artificial Sequence
  Description of Artificial Sequence: Synthetic oligonucleotide
  Target: LAMA2; (-) strand; PAM type: NRG; PAM sequence: TGG
gtcttttcaataaactgtat

SEQ ID NO: 58337 - DNA, 20 bp, Artificial Sequence
  Description of Artificial Sequence: Synthetic oligonucleotide
  Target: LAMA2; (-) strand; PAM type: NRG; PAM sequence: TAG
actacacaatggggaacaaa

SEQ ID NO: 58338 - DNA, 20 bp, Artificial Sequence
  Description of Artificial Sequence: Synthetic oligonucleotide
  Target: LAMA2; (-) strand; PAM type: NRG; PAM sequence: GGG
gccattaaaactacacaatg

SEQ ID NO: 58339 - DNA, 20 bp, Artificial Sequence
  Description of Artificial Sequence: Synthetic oligonucleotide
  Target: LAMA2; (-) strand; PAM type: NRG; PAM sequence: GGG
ggccattaaaactacacaat

SEQ ID NO: 58340 - DNA, 20 bp, Artificial Sequence
  Description of Artificial Sequence: Synthetic oligonucleotide
  Target: LAMA2; (-) strand; PAM type: NRG; PAM sequence: TGG
aggccattaaaactacacaa

SEQ ID NO: 58341 - DNA, 20 bp, Artificial Sequence
  Description of Artificial Sequence: Synthetic oligonucleotide
  Target: LAMA2; (-) strand; PAM type: NRG; PAM sequence: AGG
tggccaactaatctttgact

SEQ ID NO: 58342 - DNA, 20 bp, Artificial Sequence
  Description of Artificial Sequence: Synthetic oligonucleotide
  Target: LAMA2; (-) strand; PAM type: NRG; PAM sequence: TAG
atggccaactaatctttgac

SEQ ID NO: 58343 - DNA, 20 bp, Artificial Sequence
  Description of Artificial Sequence: Synthetic oligonucleotide
  Target: LAMA2; (-) strand; PAM type: NRG; PAM sequence: TGG
gaaataaacccacaaatata

SEQ ID NO: 58344 - DNA, 20 bp, Artificial Sequence
  Description of Artificial Sequence: Synthetic oligonucleotide
  Target: LAMA2; (-) strand; PAM type: NRG; PAM sequence: CAG
accaatgaaacggaatagcc

SEQ ID NO: 58345 - DNA, 20 bp, Artificial Sequence
  Description of Artificial Sequence: Synthetic oligonucleotide
  Target: LAMA2; (-) strand; PAM type: NRG; PAM sequence: TAG
tatagaccaatgaaacggaa

SEQ ID NO: 58346 - DNA, 20 bp, Artificial Sequence
  Description of Artificial Sequence: Synthetic oligonucleotide
  Target: LAMA2; (-) strand; PAM type: NRG; PAM sequence: CGG
agacatatagaccaatgaaa

SEQ ID NO: 58347 - DNA, 20 bp, Artificial Sequence
  Description of Artificial Sequence: Synthetic oligonucleotide
  Target: LAMA2; (-) strand; PAM type: NRG; PAM sequence: TAG
gtgctataaaaacagacata

SEQ ID NO: 58348 - DNA, 20 bp, Artificial Sequence
  Description of Artificial Sequence: Synthetic oligonucleotide
  Target: LAMA2; (-) strand; PAM type: NRG; PAM sequence: CAG
gtgtgatagtgctataaaaa

SEQ ID NO: 58349 - DNA, 20 bp, Artificial Sequence
  Description of Artificial Sequence: Synthetic oligonucleotide
  Target: LAMA2; (-) strand; PAM type: NRG; PAM sequence: TAG
tggtaatcaaaacagtgtga

SEQ ID NO: 58350 - DNA, 20 bp, Artificial Sequence
  Description of Artificial Sequence: Synthetic oligonucleotide
  Target: LAMA2; (-) strand; PAM type: NRG; PAM sequence: CAG
caaagccatggtaatcaaaa

SEQ ID NO: 58351 - DNA, 20 bp, Artificial Sequence
  Description of Artificial Sequence: Synthetic oligonucleotide
  Target: LAMA2; (-) strand; PAM type: NRG; PAM sequence: TGG
tcaaactatatacaaagcca

SEQ ID NO: 58352 - DNA, 20 bp, Artificial Sequence
  Description of Artificial Sequence: Synthetic oligonucleotide
  Target: LAMA2; (-) strand; PAM type: NRG; PAM sequence: AAG
ctgatttcaaactatataca

SEQ ID NO: 58353 - DNA, 20 bp, Artificial Sequence
  Description of Artificial Sequence: Synthetic oligonucleotide
  Target: LAMA2; (-) strand; PAM type: NRG; PAM sequence: GGG
gacaaagccagaagcaccat

SEQ ID NO: 58354 - DNA, 20 bp, Artificial Sequence
  Description of Artificial Sequence: Synthetic oligonucleotide
  Target: LAMA2; (-) strand; PAM type: NRG; PAM sequence: TGG
ggacaaagccagaagcacca

SEQ ID NO: 58355 - DNA, 20 bp, Artificial Sequence
  Description of Artificial Sequence: Synthetic oligonucleotide
  Target: LAMA2; (-) strand; PAM type: NRG; PAM sequence: AAG
agaaagaaggacaaagccag

SEQ ID NO: 58356 - DNA, 20 bp, Artificial Sequence
  Description of Artificial Sequence: Synthetic oligonucleotide
  Target: LAMA2; (-) strand; PAM type: NRG; PAM sequence: CAG
ttaagaaagaaggacaaagc

SEQ ID NO: 58357 - DNA, 20 bp, Artificial Sequence
  Description of Artificial Sequence: Synthetic oligonucleotide
  Target: LAMA2; (-) strand; PAM type: NRG; PAM sequence: AAG
aatcttaagaaagaaggaca

SEQ ID NO: 58358 - DNA, 20 bp, Artificial Sequence
  Description of Artificial Sequence: Synthetic oligonucleotide
  Target: LAMA2; (-) strand; PAM type: NRG; PAM sequence: AGG
caaagcaatcttaagaaaga

SEQ ID NO: 58359 - DNA, 20 bp, Artificial Sequence
  Description of Artificial Sequence: Synthetic oligonucleotide
  Target: LAMA2; (-) strand; PAM type: NRG; PAM sequence: AAG
ccaaagcaatcttaagaaag

SEQ ID NO: 58360 - DNA, 20 bp, Artificial Sequence
  Description of Artificial Sequence: Synthetic oligonucleotide
  Target: LAMA2; (-) strand; PAM type: NRG; PAM sequence: AAG
tatccaaagcaatcttaaga

SEQ ID NO: 58361 - DNA, 20 bp, Artificial Sequence
  Description of Artificial Sequence: Synthetic oligonucleotide
  Target: LAMA2; (-) strand; PAM type: NRG; PAM sequence: AAG
aaaatatccaaagcaatctt

SEQ ID NO: 58362 - DNA, 20 bp, Artificial Sequence
  Description of Artificial Sequence: Synthetic oligonucleotide
  Target: LAMA2; (-) strand; PAM type: NRG; PAM sequence: AAG
caaatgacccaaaatatcca

SEQ ID NO: 58363 - DNA, 20 bp, Artificial Sequence
  Description of Artificial Sequence: Synthetic oligonucleotide
  Target: LAMA2; (-) strand; PAM type: NRG; PAM sequence: AAG
acagttctaaaaaaaagaat

SEQ ID NO: 58364 - DNA, 20 bp, Artificial Sequence
  Description of Artificial Sequence: Synthetic oligonucleotide
  Target: LAMA2; (-) strand; PAM type: NRG; PAM sequence: AAG
gaaaaaacagttctaaaaaa

SEQ ID NO: 58365 - DNA, 20 bp, Artificial Sequence
  Description of Artificial Sequence: Synthetic oligonucleotide
  Target: LAMA2; (-) strand; PAM type: NRG; PAM sequence: CAG
gaaagaaaatgtagaaaaaa

SEQ ID NO: 58366 - DNA, 20 bp, Artificial Sequence
  Description of Artificial Sequence: Synthetic oligonucleotide
  Target: LAMA2; (-) strand; PAM type: NRG; PAM sequence: TAG
agaaaaaaagaaagaaaatg

SEQ ID NO: 58367 - DNA, 20 bp, Artificial Sequence
  Description of Artificial Sequence: Synthetic oligonucleotide
  Target: LAMA2; (-) strand; PAM type: NRG; PAM sequence: AAG
aaaaaagaaagaaaaaaaga

SEQ ID NO: 58368 - DNA, 20 bp, Artificial Sequence
  Description of Artificial Sequence: Synthetic oligonucleotide
  Target: LAMA2; (-) strand; PAM type: NRG; PAM sequence: AAG
agaaaaaaaagaaagaaaaa

SEQ ID NO: 58369 - DNA, 20 bp, Artificial Sequence
  Description of Artificial Sequence: Synthetic oligonucleotide
  Target: LAMA2; (-) strand; PAM type: NRG; PAM sequence: AAG
tccacctcagaaaaaaaaga

SEQ ID NO: 58370 - DNA, 20 bp, Artificial Sequence
  Description of Artificial Sequence: Synthetic oligonucleotide
  Target: LAMA2; (-) strand; PAM type: NRG; PAM sequence: AAG
aaattccacctcagaaaaaa

SEQ ID NO: 58371 - DNA, 20 bp, Artificial Sequence
  Description of Artificial Sequence: Synthetic oligonucleotide
  Target: LAMA2; (-) strand; PAM type: NRG; PAM sequence: CAG
aaaagagggaaattccacct

SEQ ID NO: 58372 - DNA, 20 bp, Artificial Sequence
  Description of Artificial Sequence: Synthetic oligonucleotide
  Target: LAMA2; (-) strand; PAM type: NRG; PAM sequence: GGG
ctccaccttgagcgaaaaga

SEQ ID NO: 58373 - DNA, 20 bp, Artificial Sequence
  Description of Artificial Sequence: Synthetic oligonucleotide
  Target: LAMA2; (-) strand; PAM type: NRG; PAM sequence: AGG
actccaccttgagcgaaaag

SEQ ID NO: 58374 - DNA, 20 bp, Artificial Sequence
  Description of Artificial Sequence: Synthetic oligonucleotide
  Target: LAMA2; (-) strand; PAM type: NRG; PAM sequence: GAG
cactccaccttgagcgaaaa

SEQ ID NO: 58375 - DNA, 20 bp, Artificial Sequence
  Description of Artificial Sequence: Synthetic oligonucleotide
  Target: LAMA2; (-) strand; PAM type: NRG; PAM sequence: AAG
tgcactccaccttgagcgaa

SEQ ID NO: 58376 - DNA, 20 bp, Artificial Sequence
  Description of Artificial Sequence: Synthetic oligonucleotide
  Target: LAMA2; (-) strand; PAM type: NRG; PAM sequence: GAG
gcaccattgcactccacctt

SEQ ID NO: 58377 - DNA, 20 bp, Artificial Sequence
  Description of Artificial Sequence: Synthetic oligonucleotide
  Target: LAMA2; (-) strand; PAM type: NRG; PAM sequence: GAG
gacggaggttgcagtgagct

SEQ ID NO: 58378 - DNA, 20 bp, Artificial Sequence
  Description of Artificial Sequence: Synthetic oligonucleotide
  Target: LAMA2; (-) strand; PAM type: NRG; PAM sequence: GAG
caggagacggaggttgcagt

SEQ ID NO: 58379 - DNA, 20 bp, Artificial Sequence
  Description of Artificial Sequence: Synthetic oligonucleotide
  Target: LAMA2; (-) strand; PAM type: NRG; PAM sequence: CAG
aacccaggagacggaggttg

SEQ ID NO: 58380 - DNA, 20 bp, Artificial Sequence
  Description of Artificial Sequence: Synthetic oligonucleotide
  Target: LAMA2; (-) strand; PAM type: NRG; PAM sequence: AGG
cacttgaacccaggagacgg

SEQ ID NO: 58381 - DNA, 20 bp, Artificial Sequence
  Description of Artificial Sequence: Synthetic oligonucleotide
  Target: LAMA2; (-) strand; PAM type: NRG; PAM sequence: GAG
tcacttgaacccaggagacg

SEQ ID NO: 58382 - DNA, 20 bp, Artificial Sequence
  Description of Artificial Sequence: Synthetic oligonucleotide
  Target: LAMA2; (-) strand; PAM type: NRG; PAM sequence: CGG
aatcacttgaacccaggaga

SEQ ID NO: 58383 - DNA, 20 bp, Artificial Sequence
  Description of Artificial Sequence: Synthetic oligonucleotide
  Target: LAMA2; (-) strand; PAM type: NRG; PAM sequence: GAG
ggagaatcacttgaacccag

SEQ ID NO: 58384 - DNA, 20 bp, Artificial Sequence
  Description of Artificial Sequence: Synthetic oligonucleotide
  Target: LAMA2; (-) strand; PAM type: NRG; PAM sequence: AGG
caggagaatcacttgaaccc

SEQ ID NO: 58385 - DNA, 20 bp, Artificial Sequence
  Description of Artificial Sequence: Synthetic oligonucleotide
  Target: LAMA2; (-) strand; PAM type: NRG; PAM sequence: CAG
gcaggagaatcacttgaacc

SEQ ID NO: 58386 - DNA, 20 bp, Artificial Sequence
  Description of Artificial Sequence: Synthetic oligonucleotide
  Target: LAMA2; (-) strand; PAM type: NRG; PAM sequence: GAG
tactcaggaggctgaggcag

SEQ ID NO: 58387 - DNA, 20 bp, Artificial Sequence
  Description of Artificial Sequence: Synthetic oligonucleotide
  Target: LAMA2; (-) strand; PAM type: NRG; PAM sequence: AGG
gctactcaggaggctgaggc

SEQ ID NO: 58388 - DNA, 20 bp, Artificial Sequence
  Description of Artificial Sequence: Synthetic oligonucleotide
  Target: LAMA2; (-) strand; PAM type: NRG; PAM sequence: CAG
agctactcaggaggctgagg

SEQ ID NO: 58389 - DNA, 20 bp, Artificial Sequence
  Description of Artificial Sequence: Synthetic oligonucleotide
  Target: LAMA2; (-) strand; PAM type: NRG; PAM sequence: AGG
ctcagctactcaggaggctg

SEQ ID NO: 58390 - DNA, 20 bp, Artificial Sequence
  Description of Artificial Sequence: Synthetic oligonucleotide
  Target: LAMA2; (-) strand; PAM type: NRG; PAM sequence: GAG
tctcagctactcaggaggct

SEQ ID NO: 58391 - DNA, 20 bp, Artificial Sequence
  Description of Artificial Sequence: Synthetic oligonucleotide
  Target: LAMA2; (-) strand; PAM type: NRG; PAM sequence: AGG
tgtaatctcagctactcagg

SEQ ID NO: 58392 - DNA, 20 bp, Artificial Sequence
  Description of Artificial Sequence: Synthetic oligonucleotide
  Target: LAMA2; (-) strand; PAM type: NRG; PAM sequence: GAG
ctgtaatctcagctactcag

SEQ ID NO: 58393 - DNA, 20 bp, Artificial Sequence
  Description of Artificial Sequence: Synthetic oligonucleotide
  Target: LAMA2; (-) strand; PAM type: NRG; PAM sequence: AGG
acctgtaatctcagctactc

SEQ ID NO: 58394 - DNA, 20 bp, Artificial Sequence
  Description of Artificial Sequence: Synthetic oligonucleotide
  Target: LAMA2; (-) strand; PAM type: NRG; PAM sequence: CAG
cacctgtaatctcagctact

SEQ ID NO: 58395 - DNA, 20 bp, Artificial Sequence
  Description of Artificial Sequence: Synthetic oligonucleotide
  Target: LAMA2; (-) strand; PAM type: NRG; PAM sequence: CAG
gtggtgtgcacctgtaatct

SEQ ID NO: 58396 - DNA, 20 bp, Artificial Sequence
  Description of Artificial Sequence: Synthetic oligonucleotide
  Target: LAMA2; (-) strand; PAM type: NRG; PAM sequence: TGG
ataaaattggctgggcatgg

SEQ ID NO: 58397 - DNA, 20 bp, Artificial Sequence
  Description of Artificial Sequence: Synthetic oligonucleotide
  Target: LAMA2; (-) strand; PAM type: NRG; PAM sequence: TGG
aaaataaaattggctgggca

SEQ ID NO: 58398 - DNA, 20 bp, Artificial Sequence
  Description of Artificial Sequence: Synthetic oligonucleotide
  Target: LAMA2; (-) strand; PAM type: NRG; PAM sequence: GGG
tacaaaaaataaaattggct

SEQ ID NO: 58399 - DNA, 20 bp, Artificial Sequence
  Description of Artificial Sequence: Synthetic oligonucleotide
  Target: LAMA2; (-) strand; PAM type: NRG; PAM sequence: TGG
atacaaaaaataaaattggc

SEQ ID NO: 58400 - DNA, 20 bp, Artificial Sequence
  Description of Artificial Sequence: Synthetic oligonucleotide
  Target: LAMA2; (-) strand; PAM type: NRG; PAM sequence: TGG
agaaatacaaaaaataaaat

SEQ ID NO: 58401 - DNA, 20 bp, Artificial Sequence
  Description of Artificial Sequence: Synthetic oligonucleotide
  Target: LAMA2; (-) strand; PAM type: NRG; PAM sequence: AAG
agcaaaaccccatctctact

SEQ ID NO: 58402 - DNA, 20 bp, Artificial Sequence
  Description of Artificial Sequence: Synthetic oligonucleotide
  Target: LAMA2; (-) strand; PAM type: NRG; PAM sequence: TAG
tgagaccagcctgtccaaca

SEQ ID NO: 58403 - DNA, 20 bp, Artificial Sequence
  Description of Artificial Sequence: Synthetic oligonucleotide
  Target: LAMA2; (-) strand; PAM type: NRG; PAM sequence: CAG
tgaggtcaggagtttgagac

SEQ ID NO: 58404 - DNA, 20 bp, Artificial Sequence
  Description of Artificial Sequence: Synthetic oligonucleotide
  Target: LAMA2; (-) strand; PAM type: NRG; PAM sequence: GAG
ttacctgaggtcaggagttt

SEQ ID NO: 58405 - DNA, 20 bp, Artificial Sequence
  Description of Artificial Sequence: Synthetic oligonucleotide
  Target: LAMA2; (-) strand; PAM type: NRG; PAM sequence: GAG
ggcagattacctgaggtcag

SEQ ID NO: 58406 - DNA, 20 bp, Artificial Sequence
  Description of Artificial Sequence: Synthetic oligonucleotide
  Target: LAMA2; (-) strand; PAM type: NRG; PAM sequence: AGG
tgggcagattacctgaggtc

SEQ ID NO: 58407 - DNA, 20 bp, Artificial Sequence
  Description of Artificial Sequence: Synthetic oligonucleotide
  Target: LAMA2; (-) strand; PAM type: NRG; PAM sequence: CAG
gtgggcagattacctgaggt

SEQ ID NO: 58408 - DNA, 20 bp, Artificial Sequence
  Description of Artificial Sequence: Synthetic oligonucleotide
  Target: LAMA2; (-) strand; PAM type: NRG; PAM sequence: AGG
tgaggtgggcagattacctg

SEQ ID NO: 58409 - DNA, 20 bp, Artificial Sequence
  Description of Artificial Sequence: Synthetic oligonucleotide
  Target: LAMA2; (-) strand; PAM type: NRG; PAM sequence: GAG
ctgaggtgggcagattacct

SEQ ID NO: 58410 - DNA, 20 bp, Artificial Sequence
  Description of Artificial Sequence: Synthetic oligonucleotide
  Target: LAMA2; (-) strand; PAM type: NRG; PAM sequence: CAG
ctttgggaggctgaggtggg

SEQ ID NO: 58411 - DNA, 20 bp, Artificial Sequence
  Description of Artificial Sequence: Synthetic oligonucleotide
  Target: LAMA2; (-) strand; PAM type: NRG; PAM sequence: GGG
gcactttgggaggctgaggt

SEQ ID NO: 58412 - DNA, 20 bp, Artificial Sequence
  Description of Artificial Sequence: Synthetic oligonucleotide
  Target: LAMA2; (-) strand; PAM type: NRG; PAM sequence: TGG
agcactttgggaggctgagg

SEQ ID NO: 58413 - DNA, 20 bp, Artificial Sequence
  Description of Artificial Sequence: Synthetic oligonucleotide
  Target: LAMA2; (-) strand; PAM type: NRG; PAM sequence: AGG
cccagcactttgggaggctg

SEQ ID NO: 58414 - DNA, 20 bp, Artificial Sequence
  Description of Artificial Sequence: Synthetic oligonucleotide
  Target: LAMA2; (-) strand; PAM type: NRG; PAM sequence: GAG
tcccagcactttgggaggct

SEQ ID NO: 58415 - DNA, 20 bp, Artificial Sequence
  Description of Artificial Sequence: Synthetic oligonucleotide
  Target: LAMA2; (-) strand; PAM type: NRG; PAM sequence: AGG
tgtaatcccagcactttggg

SEQ ID NO: 58416 - DNA, 20 bp, Artificial Sequence
  Description of Artificial Sequence: Synthetic oligonucleotide
  Target: LAMA2; (-) strand; PAM type: NRG; PAM sequence: GAG
ctgtaatcccagcactttgg

SEQ ID NO: 58417 - DNA, 20 bp, Artificial Sequence
  Description of Artificial Sequence: Synthetic oligonucleotide
  Target: LAMA2; (-) strand; PAM type: NRG; PAM sequence: GGG
gcctgtaatcccagcacttt

SEQ ID NO: 58418 - DNA, 20 bp, Artificial Sequence
  Description of Artificial Sequence: Synthetic oligonucleotide
  Target: LAMA2; (-) strand; PAM type: NRG; PAM sequence: TGG
tgcctgtaatcccagcactt

SEQ ID NO: 58419 - DNA, 20 bp, Artificial Sequence
  Description of Artificial Sequence: Synthetic oligonucleotide
  Target: LAMA2; (-) strand; PAM type: NRG; PAM sequence: CAG
gtggcttatgcctgtaatcc

SEQ ID NO: 58420 - DNA, 20 bp, Artificial Sequence
  Description of Artificial Sequence: Synthetic oligonucleotide
  Target: LAMA2; (-) strand; PAM type: NRG; PAM sequence: TGG
gaaaaaatggccgggtgtag

SEQ ID NO: 58421 - DNA, 20 bp, Artificial Sequence
  Description of Artificial Sequence: Synthetic oligonucleotide
  Target: LAMA2; (-) strand; PAM type: NRG; PAM sequence: TAG
gtagaaaaaatggccgggtg

SEQ ID NO: 58422 - DNA, 20 bp, Artificial Sequence
  Description of Artificial Sequence: Synthetic oligonucleotide
  Target: LAMA2; (-) strand; PAM type: NRG; PAM sequence: GGG
aaaatgtagaaaaaatggcc

SEQ ID NO: 58423 - DNA, 20 bp, Artificial Sequence
  Description of Artificial Sequence: Synthetic oligonucleotide
  Target: LAMA2; (-) strand; PAM type: NRG; PAM sequence: CGG
gaaaatgtagaaaaaatggc

SEQ ID NO: 58424 - DNA, 20 bp, Artificial Sequence
  Description of Artificial Sequence: Synthetic oligonucleotide
  Target: LAMA2; (-) strand; PAM type: NRG; PAM sequence: TGG
tttagaaaatgtagaaaaaa

SEQ ID NO: 58425 - DNA, 20 bp, Artificial Sequence
  Description of Artificial Sequence: Synthetic oligonucleotide
  Target: LAMA2; (-) strand; PAM type: NRG; PAM sequence: TAG
tggcaattttttagaaaatg

SEQ ID NO: 58426 - DNA, 20 bp, Artificial Sequence
  Description of Artificial Sequence: Synthetic oligonucleotide
  Target: LAMA2; (-) strand; PAM type: NRG; PAM sequence: TAG
acatttcaatggcaattttt

SEQ ID NO: 58427 - DNA, 20 bp, Artificial Sequence
  Description of Artificial Sequence: Synthetic oligonucleotide
  Target: LAMA2; (-) strand; PAM type: NRG; PAM sequence: TGG
gcagtcactcaacatttcaa

SEQ ID NO: 58428 - DNA, 20 bp, Artificial Sequence
  Description of Artificial Sequence: Synthetic oligonucleotide
  Target: LAMA2; (-) strand; PAM type: NRG; PAM sequence: CAG
aatgatctacagagtcaatg

SEQ ID NO: 58429 - DNA, 20 bp, Artificial Sequence
  Description of Artificial Sequence: Synthetic oligonucleotide
  Target: LAMA2; (-) strand; PAM type: NRG; PAM sequence: GAG
attacccaaaatgatctaca

SEQ ID NO: 58430 - DNA, 20 bp, Artificial Sequence
  Description of Artificial Sequence: Synthetic oligonucleotide
  Target: LAMA2; (-) strand; PAM type: NRG; PAM sequence: CAG
acattacccaaaatgatcta

SEQ ID NO: 58431 - DNA, 20 bp, Artificial Sequence
  Description of Artificial Sequence: Synthetic oligonucleotide
  Target: LAMA2; (-) strand; PAM type: NRG; PAM sequence: AAG
tttctgtgttcatgaattgg

SEQ ID NO: 58432 - DNA, 20 bp, Artificial Sequence
  Description of Artificial Sequence: Synthetic oligonucleotide
  Target: LAMA2; (-) strand; PAM type: NRG; PAM sequence: TGG
gactttctgtgttcatgaat

SEQ ID NO: 58433 - DNA, 20 bp, Artificial Sequence
  Description of Artificial Sequence: Synthetic oligonucleotide
  Target: LAMA2; (-) strand; PAM type: NRG; PAM sequence: AAG
agacaacacaaataaatgga

SEQ ID NO: 58434 - DNA, 20 bp, Artificial Sequence
  Description of Artificial Sequence: Synthetic oligonucleotide
  Target: LAMA2; (-) strand; PAM type: NRG; PAM sequence: TGG
tggaagacaacacaaataaa

SEQ ID NO: 58435 - DNA, 20 bp, Artificial Sequence
  Description of Artificial Sequence: Synthetic oligonucleotide
  Target: LAMA2; (-) strand; PAM type: NRG; PAM sequence: AAG
gacattgaagaaagaaatgg

SEQ ID NO: 58436 - DNA, 20 bp, Artificial Sequence
  Description of Artificial Sequence: Synthetic oligonucleotide
  Target: LAMA2; (-) strand; PAM type: NRG; PAM sequence: TGG
taagacattgaagaaagaaa

SEQ ID NO: 58437 - DNA, 20 bp, Artificial Sequence
  Description of Artificial Sequence: Synthetic oligonucleotide
  Target: LAMA2; (-) strand; PAM type: NRG; PAM sequence: AAG
aaactataagacattgaaga

SEQ ID NO: 58438 - DNA, 20 bp, Artificial Sequence
  Description of Artificial Sequence: Synthetic oligonucleotide
  Target: LAMA2; (-) strand; PAM type: NRG; PAM sequence: AAG
ctgaaaactataagacattg

SEQ ID NO: 58439 - DNA, 20 bp, Artificial Sequence
  Description of Artificial Sequence: Synthetic oligonucleotide
  Target: LAMA2; (-) strand; PAM type: NRG; PAM sequence: AAG
atctgtacactgaaaactat

SEQ ID NO: 58440 - DNA, 20 bp, Artificial Sequence
  Description of Artificial Sequence: Synthetic oligonucleotide
  Target: LAMA2; (-) strand; PAM type: NRG; PAM sequence: AAG
aaatttaaccaaggaggtga

SEQ ID NO: 58441 - DNA, 20 bp, Artificial Sequence
  Description of Artificial Sequence: Synthetic oligonucleotide
  Target: LAMA2; (-) strand; PAM type: NRG; PAM sequence: AGG
acgaataaatttaaccaagg

SEQ ID NO: 58442 - DNA, 20 bp, Artificial Sequence
  Description of Artificial Sequence: Synthetic oligonucleotide
  Target: LAMA2; (-) strand; PAM type: NRG; PAM sequence: GAG
tacgaataaatttaaccaag

SEQ ID NO: 58443 - DNA, 20 bp, Artificial Sequence
  Description of Artificial Sequence: Synthetic oligonucleotide
  Target: LAMA2; (-) strand; PAM type: NRG; PAM sequence: AGG
tatacgaataaatttaacca

SEQ ID NO: 58444 - DNA, 20 bp, Artificial Sequence
  Description of Artificial Sequence: Synthetic oligonucleotide
  Target: LAMA2; (-) strand; PAM type: NRG; PAM sequence: AAG
atatacgaataaatttaacc

SEQ ID NO: 58445 - DNA, 20 bp, Artificial Sequence
  Description of Artificial Sequence: Synthetic oligonucleotide
  Target: LAMA2; (-) strand; PAM type: NRG; PAM sequence: TAG
ataataagaaaccaaagcaa

SEQ ID NO: 58446 - DNA, 20 bp, Artificial Sequence
  Description of Artificial Sequence: Synthetic oligonucleotide
  Target: LAMA2; (-) strand; PAM type: NRG; PAM sequence: AAG
ataataataataagaaacca

SEQ ID NO: 58447 - DNA, 20 bp, Artificial Sequence
  Description of Artificial Sequence: Synthetic oligonucleotide
  Target: LAMA2; (-) strand; PAM type: NRG; PAM sequence: AAG
actcaaagtataataataat

SEQ ID NO: 58448 - DNA, 20 bp, Artificial Sequence
  Description of Artificial Sequence: Synthetic oligonucleotide
  Target: LAMA2; (-) strand; PAM type: NRG; PAM sequence: AAG
cacaagtaccctagaactca

SEQ ID NO: 58449 - DNA, 20 bp, Artificial Sequence
  Description of Artificial Sequence: Synthetic oligonucleotide
  Target: LAMA2; (-) strand; PAM type: NRG; PAM sequence: TAG
cacattgtgcacaagtaccc

SEQ ID NO: 58450 - DNA, 20 bp, Artificial Sequence
  Description of Artificial Sequence: Synthetic oligonucleotide
  Target: LAMA2; (-) strand; PAM type: NRG; PAM sequence: AAG
caaacctgcacattgtgcac

SEQ ID NO: 58451 - DNA, 20 bp, Artificial Sequence
  Description of Artificial Sequence: Synthetic oligonucleotide
  Target: LAMA2; (-) strand; PAM type: NRG; PAM sequence: TGG
acgggtgcggcaaaccaaca

SEQ ID NO: 58452 - DNA, 20 bp, Artificial Sequence
  Description of Artificial Sequence: Synthetic oligonucleotide
  Target: LAMA2; (-) strand; PAM type: NRG; PAM sequence: CGG
aaatgatgagttgacgggtg

SEQ ID NO: 58453 - DNA, 20 bp, Artificial Sequence
  Description of Artificial Sequence: Synthetic oligonucleotide
  Target: LAMA2; (-) strand; PAM type: NRG; PAM sequence: GGG
aatgtaaatgatgagttgac

SEQ ID NO: 58454 - DNA, 20 bp, Artificial Sequence
  Description of Artificial Sequence: Synthetic oligonucleotide
  Target: LAMA2; (-) strand; PAM type: NRG; PAM sequence: CGG
taatgtaaatgatgagttga

SEQ ID NO: 58455 - DNA, 20 bp, Artificial Sequence
  Description of Artificial Sequence: Synthetic oligonucleotide
  Target: LAMA2; (-) strand; PAM type: NRG; PAM sequence: GAG
aaatacctaatgtaaatgat

SEQ ID NO: 58456 - DNA, 20 bp, Artificial Sequence
  Description of Artificial Sequence: Synthetic oligonucleotide
  Target: LAMA2; (-) strand; PAM type: NRG; PAM sequence: AGG
gctgggggagggatagcatt

SEQ ID NO: 58457 - DNA, 20 bp, Artificial Sequence
  Description of Artificial Sequence: Synthetic oligonucleotide
  Target: LAMA2; (-) strand; PAM type: NRG; PAM sequence: TAG
ggctgggggagggatagcat

SEQ ID NO: 58458 - DNA, 20 bp, Artificial Sequence
  Description of Artificial Sequence: Synthetic oligonucleotide
  Target: LAMA2; (-) strand; PAM type: NRG; PAM sequence: TAG
gtgtggggctgggggaggga

SEQ ID NO: 58459 - DNA, 20 bp, Artificial Sequence
  Description of Artificial Sequence: Synthetic oligonucleotide
  Target: LAMA2; (-) strand; PAM type: NRG; PAM sequence: GGG
gggggtgtggggctggggga

SEQ ID NO: 58460 - DNA, 20 bp, Artificial Sequence
  Description of Artificial Sequence: Synthetic oligonucleotide
  Target: LAMA2; (-) strand; PAM type: NRG; PAM sequence: AGG
ggggggtgtggggctggggg

SEQ ID NO: 58461 - DNA, 20 bp, Artificial Sequence
  Description of Artificial Sequence: Synthetic oligonucleotide
  Target: LAMA2; (-) strand; PAM type: NRG; PAM sequence: GAG
gggggggtgtggggctgggg

SEQ ID NO: 58462 - DNA, 20 bp, Artificial Sequence
  Description of Artificial Sequence: Synthetic oligonucleotide
  Target: LAMA2; (-) strand; PAM type: NRG; PAM sequence: GGG
tggggggggtgtggggctgg

SEQ ID NO: 58463 - DNA, 20 bp, Artificial Sequence
  Description of Artificial Sequence: Synthetic oligonucleotide
  Target: LAMA2; (-) strand; PAM type: NRG; PAM sequence: GGG
ttggggggggtgtggggctg

SEQ ID NO: 58464 - DNA, 20 bp, Artificial Sequence
  Description of Artificial Sequence: Synthetic oligonucleotide
  Target: LAMA2; (-) strand; PAM type: NRG; PAM sequence: GGG
gttggggggggtgtggggct

SEQ ID NO: 58465 - DNA, 20 bp, Artificial Sequence
  Description of Artificial Sequence: Synthetic oligonucleotide
  Target: LAMA2; (-) strand; PAM type: NRG; PAM sequence: TGG
tgttggggggggtgtggggc

SEQ ID NO: 58466 - DNA, 20 bp, Artificial Sequence
  Description of Artificial Sequence: Synthetic oligonucleotide
  Target: LAMA2; (-) strand; PAM type: NRG; PAM sequence: GGG
ggtctgttggggggggtgtg

SEQ ID NO: 58467 - DNA, 20 bp, Artificial Sequence
  Description of Artificial Sequence: Synthetic oligonucleotide
  Target: LAMA2; (-) strand; PAM type: NRG; PAM sequence: GGG
gggtctgttggggggggtgt

SEQ ID NO: 58468 - DNA, 20 bp, Artificial Sequence
  Description of Artificial Sequence: Synthetic oligonucleotide
  Target: LAMA2; (-) strand; PAM type: NRG; PAM sequence: TGG
ggggtctgttggggggggtg

SEQ ID NO: 58469 - DNA, 20 bp, Artificial Sequence
  Description of Artificial Sequence: Synthetic oligonucleotide
  Target: LAMA2; (-) strand; PAM type: NRG; PAM sequence: GGG
acattggggtctgttggggg

SEQ ID NO: 58470 - DNA, 20 bp, Artificial Sequence
  Description of Artificial Sequence: Synthetic oligonucleotide
  Target: LAMA2; (-) strand; PAM type: NRG; PAM sequence: GGG
cacattggggtctgttgggg

SEQ ID NO: 58471 - DNA, 20 bp, Artificial Sequence
  Description of Artificial Sequence: Synthetic oligonucleotide
  Target: LAMA2; (-) strand; PAM type: NRG; PAM sequence: GGG
acacattggggtctgttggg

SEQ ID NO: 58472 - DNA, 20 bp, Artificial Sequence
  Description of Artificial Sequence: Synthetic oligonucleotide
  Target: LAMA2; (-) strand; PAM type: NRG; PAM sequence: GGG
tacacattggggtctgttgg

SEQ ID NO: 58473 - DNA, 20 bp, Artificial Sequence
  Description of Artificial Sequence: Synthetic oligonucleotide
  Target: LAMA2; (-) strand; PAM type: NRG; PAM sequence: GGG
ttacacattggggtctgttg

SEQ ID NO: 58474 - DNA, 20 bp, Artificial Sequence
  Description of Artificial Sequence: Synthetic oligonucleotide
  Target: LAMA2; (-) strand; PAM type: NRG; PAM sequence: GGG
attacacattggggtctgtt

SEQ ID NO: 58475 - DNA, 20 bp, Artificial Sequence
  Description of Artificial Sequence: Synthetic oligonucleotide
  Target: LAMA2; (-) strand; PAM type: NRG; PAM sequence: TGG
cattacacattggggtctgt

SEQ ID NO: 58476 - DNA, 20 bp, Artificial Sequence
  Description of Artificial Sequence: Synthetic oligonucleotide
  Target: LAMA2; (-) strand; PAM type: NRG; PAM sequence: GGG
gaggggaacattacacattg

SEQ ID NO: 58477 - DNA, 20 bp, Artificial Sequence
  Description of Artificial Sequence: Synthetic oligonucleotide
  Target: LAMA2; (-) strand; PAM type: NRG; PAM sequence: GGG
ggaggggaacattacacatt

SEQ ID NO: 58478 - DNA, 20 bp, Artificial Sequence
  Description of Artificial Sequence: Synthetic oligonucleotide
  Target: LAMA2; (-) strand; PAM type: NRG; PAM sequence: TGG
gggaggggaacattacacat

SEQ ID NO: 58479 - DNA, 20 bp, Artificial Sequence
  Description of Artificial Sequence: Synthetic oligonucleotide
  Target: LAMA2; (-) strand; PAM type: NRG; PAM sequence: GGG
gaacacatggacacagggag

SEQ ID NO: 58480 - DNA, 20 bp, Artificial Sequence
  Description of Artificial Sequence: Synthetic oligonucleotide
  Target: LAMA2; (-) strand; PAM type: NRG; PAM sequence: GGG
agaacacatggacacaggga

SEQ ID NO: 58481 - DNA, 20 bp, Artificial Sequence
  Description of Artificial Sequence: Synthetic oligonucleotide
  Target: LAMA2; (-) strand; PAM type: NRG; PAM sequence: AGG
gagaacacatggacacaggg

SEQ ID NO: 58482 - DNA, 20 bp, Artificial Sequence
  Description of Artificial Sequence: Synthetic oligonucleotide
  Target: LAMA2; (-) strand; PAM type: NRG; PAM sequence: GAG
tgagaacacatggacacagg

SEQ ID NO: 58483 - DNA, 20 bp, Artificial Sequence
  Description of Artificial Sequence: Synthetic oligonucleotide
  Target: LAMA2; (-) strand; PAM type: NRG; PAM sequence: GGG
aatgagaacacatggacaca

SEQ ID NO: 58484 - DNA, 20 bp, Artificial Sequence
  Description of Artificial Sequence: Synthetic oligonucleotide
  Target: LAMA2; (-) strand; PAM type: NRG; PAM sequence: AGG
caatgagaacacatggacac

SEQ ID NO: 58485 - DNA, 20 bp, Artificial Sequence
  Description of Artificial Sequence: Synthetic oligonucleotide
  Target: LAMA2; (-) strand; PAM type: NRG; PAM sequence: CAG
acaatgagaacacatggaca

SEQ ID NO: 58486 - DNA, 20 bp, Artificial Sequence
  Description of Artificial Sequence: Synthetic oligonucleotide
  Target: LAMA2; (-) strand; PAM type: NRG; PAM sequence: TGG
agttgaacaatgagaacaca

SEQ ID NO: 58487 - DNA, 20 bp, Artificial Sequence
  Description of Artificial Sequence: Synthetic oligonucleotide
  Target: LAMA2; (-) strand; PAM type: NRG; PAM sequence: GAG
ataagtgggagttgaacaat

SEQ ID NO: 58488 - DNA, 20 bp, Artificial Sequence
  Description of Artificial Sequence: Synthetic oligonucleotide
  Target: LAMA2; (-) strand; PAM type: NRG; PAM sequence: GAG
gtgttctcactcataagtgg

SEQ ID NO: 58489 - DNA, 20 bp, Artificial Sequence
  Description of Artificial Sequence: Synthetic oligonucleotide
  Target: LAMA2; (-) strand; PAM type: NRG; PAM sequence: GGG
gtgtgttctcactcataagt

SEQ ID NO: 58490 - DNA, 20 bp, Artificial Sequence
  Description of Artificial Sequence: Synthetic oligonucleotide
  Target: LAMA2; (-) strand; PAM type: NRG; PAM sequence: TGG
tgtgtgttctcactcataag

SEQ ID NO: 58491 - DNA, 20 bp, Artificial Sequence
  Description of Artificial Sequence: Synthetic oligonucleotide
  Target: LAMA2; (-) strand; PAM type: NRG; PAM sequence: AAG
cagtgtgtgttctcactcat

SEQ ID NO: 58492 - DNA, 20 bp, Artificial Sequence
  Description of Artificial Sequence: Synthetic oligonucleotide
  Target: LAMA2; (-) strand; PAM type: NRG; PAM sequence: CAG
cacaaggacagaaaaccaaa

SEQ ID NO: 58493 - DNA, 20 bp, Artificial Sequence
  Description of Artificial Sequence: Synthetic oligonucleotide
  Target: LAMA2; (-) strand; PAM type: NRG; PAM sequence: CAG
tcagcaaaatatcacaagga

SEQ ID NO: 58494 - DNA, 20 bp, Artificial Sequence
  Description of Artificial Sequence: Synthetic oligonucleotide
  Target: LAMA2; (-) strand; PAM type: NRG; PAM sequence: AGG
attctcagcaaaatatcaca

SEQ ID NO: 58495 - DNA, 20 bp, Artificial Sequence
  Description of Artificial Sequence: Synthetic oligonucleotide
  Target: LAMA2; (-) strand; PAM type: NRG; PAM sequence: AAG
cattctcagcaaaatatcac

SEQ ID NO: 58496 - DNA, 20 bp, Artificial Sequence
  Description of Artificial Sequence: Synthetic oligonucleotide
  Target: LAMA2; (-) strand; PAM type: NRG; PAM sequence: CAG
aagctggaaaccaacattct

SEQ ID NO: 58497 - DNA, 20 bp, Artificial Sequence
  Description of Artificial Sequence: Synthetic oligonucleotide
  Target: LAMA2; (-) strand; PAM type: NRG; PAM sequence: TGG
tgcagggacatggatgaagc

SEQ ID NO: 58498 - DNA, 20 bp, Artificial Sequence
  Description of Artificial Sequence: Synthetic oligonucleotide
  Target: LAMA2; (-) strand; PAM type: NRG; PAM sequence: AAG
cctttgcagggacatggatg

SEQ ID NO: 58499 - DNA, 20 bp, Artificial Sequence
  Description of Artificial Sequence: Synthetic oligonucleotide
  Target: LAMA2; (-) strand; PAM type: NRG; PAM sequence: TGG
ttatgtcctttgcagggaca

SEQ ID NO: 58500 - DNA, 20 bp, Artificial Sequence
  Description of Artificial Sequence: Synthetic oligonucleotide
  Target: LAMA2; (-) strand; PAM type: NRG; PAM sequence: GGG
atgagtttatgtcctttgca

SEQ ID NO: 58501 - DNA, 20 bp, Artificial Sequence
  Description of Artificial Sequence: Synthetic oligonucleotide
  Target: LAMA2; (-) strand; PAM type: NRG; PAM sequence: AGG
gatgagtttatgtcctttgc

SEQ ID NO: 58502 - DNA, 20 bp, Artificial Sequence
  Description of Artificial Sequence: Synthetic oligonucleotide
  Target: LAMA2; (-) strand; PAM type: NRG; PAM sequence: CAG
agatgagtttatgtcctttg

SEQ ID NO: 58503 - DNA, 20 bp, Artificial Sequence
  Description of Artificial Sequence: Synthetic oligonucleotide
  Target: LAMA2; (-) strand; PAM type: NRG; PAM sequence: GAG
tacagagtcataaaaaagat

SEQ ID NO: 58504 - DNA, 20 bp, Artificial Sequence
  Description of Artificial Sequence: Synthetic oligonucleotide
  Target: LAMA2; (-) strand; PAM type: NRG; PAM sequence: AAG
aatactacagagtcataaaa

SEQ ID NO: 58505 - DNA, 20 bp, Artificial Sequence
  Description of Artificial Sequence: Synthetic oligonucleotide
  Target: LAMA2; (-) strand; PAM type: NRG; PAM sequence: GAG
atacaccatggaatactaca

SEQ ID NO: 58506 - DNA, 20 bp, Artificial Sequence
  Description of Artificial Sequence: Synthetic oligonucleotide
  Target: LAMA2; (-) strand; PAM type: NRG; PAM sequence: CAG
atatacaccatggaatacta

SEQ ID NO: 58507 - DNA, 20 bp, Artificial Sequence
  Description of Artificial Sequence: Synthetic oligonucleotide
  Target: LAMA2; (-) strand; PAM type: NRG; PAM sequence: TGG
aatgtggcacatatacacca

SEQ ID NO: 58508 - DNA, 20 bp, Artificial Sequence
  Description of Artificial Sequence: Synthetic oligonucleotide
  Target: LAMA2; (-) strand; PAM type: NRG; PAM sequence: TGG
tagactggataaagaaaatg

SEQ ID NO: 58509 - DNA, 20 bp, Artificial Sequence
  Description of Artificial Sequence: Synthetic oligonucleotide
  Target: LAMA2; (-) strand; PAM type: NRG; PAM sequence: AAG
catcaataatagactggata

SEQ ID NO: 58510 - DNA, 20 bp, Artificial Sequence
  Description of Artificial Sequence: Synthetic oligonucleotide
  Target: LAMA2; (-) strand; PAM type: NRG; PAM sequence: TGG
aatgtccatcaataatagac

SEQ ID NO: 58511 - DNA, 20 bp, Artificial Sequence
  Description of Artificial Sequence: Synthetic oligonucleotide
  Target: LAMA2; (-) strand; PAM type: NRG; PAM sequence: TAG
acccaaatgtccatcaataa

SEQ ID NO: 58512 - DNA, 20 bp, Artificial Sequence
  Description of Artificial Sequence: Synthetic oligonucleotide
  Target: LAMA2; (-) strand; PAM type: NRG; PAM sequence: TGG
tattcacaatagcaaagact

SEQ ID NO: 58513 - DNA, 20 bp, Artificial Sequence
  Description of Artificial Sequence: Synthetic oligonucleotide
  Target: LAMA2; (-) strand; PAM type: NRG; PAM sequence: AAG
cagcactattcacaatagca

SEQ ID NO: 58514 - DNA, 20 bp, Artificial Sequence
  Description of Artificial Sequence: Synthetic oligonucleotide
  Target: LAMA2; (-) strand; PAM type: NRG; PAM sequence: TAG
tactgcagcactattcacaa

SEQ ID NO: 58515 - DNA, 20 bp, Artificial Sequence
  Description of Artificial Sequence: Synthetic oligonucleotide
  Target: LAMA2; (-) strand; PAM type: NRG; PAM sequence: CAG
atgtacatgtatgtttactg

SEQ ID NO: 58516 - DNA, 20 bp, Artificial Sequence
  Description of Artificial Sequence: Synthetic oligonucleotide
  Target: LAMA2; (-) strand; PAM type: NRG; PAM sequence: AAG
ttataaatcatgctactata

SEQ ID NO: 58517 - DNA, 20 bp, Artificial Sequence
  Description of Artificial Sequence: Synthetic oligonucleotide
  Target: LAMA2; (-) strand; PAM type: NRG; PAM sequence: AGG
aaaaagaattaagtacccaa

SEQ ID NO: 58518 - DNA, 20 bp, Artificial Sequence
  Description of Artificial Sequence: Synthetic oligonucleotide
  Target: LAMA2; (-) strand; PAM type: NRG; PAM sequence: AAG
aaaaaagaattaagtaccca

SEQ ID NO: 58519 - DNA, 20 bp, Artificial Sequence
  Description of Artificial Sequence: Synthetic oligonucleotide
  Target: LAMA2; (-) strand; PAM type: NRG; PAM sequence: AAG
aaattatccaaaaaagaatt

SEQ ID NO: 58520 - DNA, 20 bp, Artificial Sequence
  Description of Artificial Sequence: Synthetic oligonucleotide
  Target: LAMA2; (-) strand; PAM type: NRG; PAM sequence: AAG
taacaacaaattatccaaaa

SEQ ID NO: 58521 - DNA, 20 bp, Artificial Sequence
  Description of Artificial Sequence: Synthetic oligonucleotide
  Target: LAMA2; (-) strand; PAM type: NRG; PAM sequence: CAG
tgaaatcaacatatgaaaat

SEQ ID NO: 58522 - DNA, 20 bp, Artificial Sequence
  Description of Artificial Sequence: Synthetic oligonucleotide
  Target: LAMA2; (-) strand; PAM type: NRG; PAM sequence: AGG
aagaaattcaataaagttgc

SEQ ID NO: 58523 - DNA, 20 bp, Artificial Sequence
  Description of Artificial Sequence: Synthetic oligonucleotide
  Target: LAMA2; (-) strand; PAM type: NRG; PAM sequence: CAG
aaagaaattcaataaagttg

SEQ ID NO: 58524 - DNA, 20 bp, Artificial Sequence
  Description of Artificial Sequence: Synthetic oligonucleotide
  Target: LAMA2; (-) strand; PAM type: NRG; PAM sequence: AAG
gctaataaagaaattcaata

SEQ ID NO: 58525 - DNA, 20 bp, Artificial Sequence
  Description of Artificial Sequence: Synthetic oligonucleotide
  Target: LAMA2; (-) strand; PAM type: NRG; PAM sequence: AAG
agtgctattagaagctaata

SEQ ID NO: 58526 - DNA, 20 bp, Artificial Sequence
  Description of Artificial Sequence: Synthetic oligonucleotide
  Target: LAMA2; (-) strand; PAM type: NRG; PAM sequence: AAG
tccatctaaagtgctattag

SEQ ID NO: 58527 - DNA, 20 bp, Artificial Sequence
  Description of Artificial Sequence: Synthetic oligonucleotide
  Target: LAMA2; (-) strand; PAM type: NRG; PAM sequence: TAG
aactccatctaaagtgctat

SEQ ID NO: 58528 - DNA, 20 bp, Artificial Sequence
  Description of Artificial Sequence: Synthetic oligonucleotide
  Target: LAMA2; (-) strand; PAM type: NRG; PAM sequence: AAG
gaaaccctaaactccatcta

SEQ ID NO: 58529 - DNA, 20 bp, Artificial Sequence
  Description of Artificial Sequence: Synthetic oligonucleotide
  Target: LAMA2; (-) strand; PAM type: NRG; PAM sequence: AGG
gatgacatgatcttatatga

SEQ ID NO: 58530 - DNA, 20 bp, Artificial Sequence
  Description of Artificial Sequence: Synthetic oligonucleotide
  Target: LAMA2; (-) strand; PAM type: NRG; PAM sequence: AAG
agatgacatgatcttatatg

SEQ ID NO: 58531 - DNA, 20 bp, Artificial Sequence
  Description of Artificial Sequence: Synthetic oligonucleotide
  Target: LAMA2; (-) strand; PAM type: NRG; PAM sequence: CAG
aggtaaattgtctctgtttg

SEQ ID NO: 58532 - DNA, 20 bp, Artificial Sequence
  Description of Artificial Sequence: Synthetic oligonucleotide
  Target: LAMA2; (-) strand; PAM type: NRG; PAM sequence: AGG
atctaaattggaaaggaaga

SEQ ID NO: 58533 - DNA, 20 bp, Artificial Sequence
  Description of Artificial Sequence: Synthetic oligonucleotide
  Target: LAMA2; (-) strand; PAM type: NRG; PAM sequence: AAG
catctaaattggaaaggaag

SEQ ID NO: 58534 - DNA, 20 bp, Artificial Sequence
  Description of Artificial Sequence: Synthetic oligonucleotide
  Target: LAMA2; (-) strand; PAM type: NRG; PAM sequence: AAG
attcatctaaattggaaagg

SEQ ID NO: 58535 - DNA, 20 bp, Artificial Sequence
  Description of Artificial Sequence: Synthetic oligonucleotide
  Target: LAMA2; (-) strand; PAM type: NRG; PAM sequence: AGG
aacattcatctaaattggaa

SEQ ID NO: 58536 - DNA, 20 bp, Artificial Sequence
  Description of Artificial Sequence: Synthetic oligonucleotide
  Target: LAMA2; (-) strand; PAM type: NRG; PAM sequence: AAG
taacattcatctaaattgga

SEQ ID NO: 58537 - DNA, 20 bp, Artificial Sequence
  Description of Artificial Sequence: Synthetic oligonucleotide
  Target: LAMA2; (-) strand; PAM type: NRG; PAM sequence: TGG
gatataacattcatctaaat

SEQ ID NO: 58538 - DNA, 20 bp, Artificial Sequence
  Description of Artificial Sequence: Synthetic oligonucleotide
  Target: LAMA2; (-) strand; PAM type: NRG; PAM sequence: AAG
cagagcaattcggcaagaaa

SEQ ID NO: 58539 - DNA, 20 bp, Artificial Sequence
  Description of Artificial Sequence: Synthetic oligonucleotide
  Target: LAMA2; (-) strand; PAM type: NRG; PAM sequence: AAG
cctagtcagagcaattcggc

SEQ ID NO: 58540 - DNA, 20 bp, Artificial Sequence
  Description of Artificial Sequence: Synthetic oligonucleotide
  Target: LAMA2; (-) strand; PAM type: NRG; PAM sequence: CGG
gagtcctagtcagagcaatt

SEQ ID NO: 58541 - DNA, 20 bp, Artificial Sequence
  Description of Artificial Sequence: Synthetic oligonucleotide
  Target: LAMA2; (-) strand; PAM type: NRG; PAM sequence: GAG
agtactatgagtcctagtca

SEQ ID NO: 58542 - DNA, 20 bp, Artificial Sequence
  Description of Artificial Sequence: Synthetic oligonucleotide
  Target: LAMA2; (-) strand; PAM type: NRG; PAM sequence: CAG
atagtactatgagtcctagt

SEQ ID NO: 58543 - DNA, 20 bp, Artificial Sequence
  Description of Artificial Sequence: Synthetic oligonucleotide
  Target: LAMA2; (-) strand; PAM type: NRG; PAM sequence: TAG
caacatagtactatgagtcc

SEQ ID NO: 58544 - DNA, 20 bp, Artificial Sequence
  Description of Artificial Sequence: Synthetic oligonucleotide
  Target: LAMA2; (-) strand; PAM type: NRG; PAM sequence: GAG
cccaatcaacatagtactat

SEQ ID NO: 58545 - DNA, 20 bp, Artificial Sequence
  Description of Artificial Sequence: Synthetic oligonucleotide
  Target: LAMA2; (-) strand; PAM type: NRG; PAM sequence: TAG
cttaccactcccaatcaaca

SEQ ID NO: 58546 - DNA, 20 bp, Artificial Sequence
  Description of Artificial Sequence: Synthetic oligonucleotide
  Target: LAMA2; (-) strand; PAM type: NRG; PAM sequence: CAG
gcctaaccttatcaggtgcc

SEQ ID NO: 58547 - DNA, 20 bp, Artificial Sequence
  Description of Artificial Sequence: Synthetic oligonucleotide
  Target: LAMA2; (-) strand; PAM type: NRG; PAM sequence: AGG
acataaagcctaaccttatc

SEQ ID NO: 58548 - DNA, 20 bp, Artificial Sequence
  Description of Artificial Sequence: Synthetic oligonucleotide
  Target: LAMA2; (-) strand; PAM type: NRG; PAM sequence: CAG
gacataaagcctaaccttat

SEQ ID NO: 58549 - DNA, 20 bp, Artificial Sequence
  Description of Artificial Sequence: Synthetic oligonucleotide
  Target: LAMA2; (-) strand; PAM type: NRG; PAM sequence: AAG
gagatttgggtggggacata

SEQ ID NO: 58550 - DNA, 20 bp, Artificial Sequence
  Description of Artificial Sequence: Synthetic oligonucleotide
  Target: LAMA2; (-) strand; PAM type: NRG; PAM sequence: GGG
ctgaagatgagatttgggtg

SEQ ID NO: 58551 - DNA, 20 bp, Artificial Sequence
  Description of Artificial Sequence: Synthetic oligonucleotide
  Target: LAMA2; (-) strand; PAM type: NRG; PAM sequence: GGG
actgaagatgagatttgggt

SEQ ID NO: 58552 - DNA, 20 bp, Artificial Sequence
  Description of Artificial Sequence: Synthetic oligonucleotide
  Target: LAMA2; (-) strand; PAM type: NRG; PAM sequence: TGG
aactgaagatgagatttggg

SEQ ID NO: 58553 - DNA, 20 bp, Artificial Sequence
  Description of Artificial Sequence: Synthetic oligonucleotide
  Target: LAMA2; (-) strand; PAM type: NRG; PAM sequence: GGG
tacaactgaagatgagattt

SEQ ID NO: 58554 - DNA, 20 bp, Artificial Sequence
  Description of Artificial Sequence: Synthetic oligonucleotide
  Target: LAMA2; (-) strand; PAM type: NRG; PAM sequence: TGG
ttacaactgaagatgagatt

SEQ ID NO: 58555 - DNA, 20 bp, Artificial Sequence
  Description of Artificial Sequence: Synthetic oligonucleotide
  Target: LAMA2; (-) strand; PAM type: NRG; PAM sequence: GAG
tgagggttacaactgaagat

SEQ ID NO: 58556 - DNA, 20 bp, Artificial Sequence
  Description of Artificial Sequence: Synthetic oligonucleotide
  Target: LAMA2; (-) strand; PAM type: NRG; PAM sequence: AAG
gatgatgagggttacaactg

SEQ ID NO: 58557 - DNA, 20 bp, Artificial Sequence
  Description of Artificial Sequence: Synthetic oligonucleotide
  Target: LAMA2; (-) strand; PAM type: NRG; PAM sequence: GGG
ggggattatggggatgatga

SEQ ID NO: 58558 - DNA, 20 bp, Artificial Sequence
  Description of Artificial Sequence: Synthetic oligonucleotide
  Target: LAMA2; (-) strand; PAM type: NRG; PAM sequence: AGG
tggggattatggggatgatg

SEQ ID NO: 58559 - DNA, 20 bp, Artificial Sequence
  Description of Artificial Sequence: Synthetic oligonucleotide
  Target: LAMA2; (-) strand; PAM type: NRG; PAM sequence: GAG
ttggggattatggggatgat

SEQ ID NO: 58560 - DNA, 20 bp, Artificial Sequence
  Description of Artificial Sequence: Synthetic oligonucleotide
  Target: LAMA2; (-) strand; PAM type: NRG; PAM sequence: GGG
tttgacatttggggattatg

SEQ ID NO: 58561 - DNA, 20 bp, Artificial Sequence
  Description of Artificial Sequence: Synthetic oligonucleotide
  Target: LAMA2; (-) strand; PAM type: NRG; PAM sequence: GGG
ctttgacatttggggattat

SEQ ID NO: 58562 - DNA, 20 bp, Artificial Sequence
  Description of Artificial Sequence: Synthetic oligonucleotide
  Target: LAMA2; (-) strand; PAM type: NRG; PAM sequence: TGG
cctttgacatttggggatta

SEQ ID NO: 58563 - DNA, 20 bp, Artificial Sequence
  Description of Artificial Sequence: Synthetic oligonucleotide
  Target: LAMA2; (-) strand; PAM type: NRG; PAM sequence: GGG
ctggtttcctttgacatttg

SEQ ID NO: 58564 - DNA, 20 bp, Artificial Sequence
  Description of Artificial Sequence: Synthetic oligonucleotide
  Target: LAMA2; (-) strand; PAM type: NRG; PAM sequence: GGG
tctggtttcctttgacattt

SEQ ID NO: 58565 - DNA, 20 bp, Artificial Sequence
  Description of Artificial Sequence: Synthetic oligonucleotide
  Target: LAMA2; (-) strand; PAM type: NRG; PAM sequence: TGG
atctggtttcctttgacatt

SEQ ID NO: 58566 - DNA, 20 bp, Artificial Sequence
  Description of Artificial Sequence: Synthetic oligonucleotide
  Target: LAMA2; (-) strand; PAM type: NRG; PAM sequence: TGG
atgattcaattaccttcatc

SEQ ID NO: 58567 - DNA, 20 bp, Artificial Sequence
  Description of Artificial Sequence: Synthetic oligonucleotide
  Target: LAMA2; (-) strand; PAM type: NRG; PAM sequence: TGG
aagaaaagcatcggggaaac

SEQ ID NO: 58568 - DNA, 20 bp, Artificial Sequence
  Description of Artificial Sequence: Synthetic oligonucleotide
  Target: LAMA2; (-) strand; PAM type: NRG; PAM sequence: GGG
ctatcacaagaaaagcatcg

SEQ ID NO: 58569 - DNA, 20 bp, Artificial Sequence
  Description of Artificial Sequence: Synthetic oligonucleotide
  Target: LAMA2; (-) strand; PAM type: NRG; PAM sequence: GGG
actatcacaagaaaagcatc

SEQ ID NO: 58570 - DNA, 20 bp, Artificial Sequence
  Description of Artificial Sequence: Synthetic oligonucleotide
  Target: LAMA2; (-) strand; PAM type: NRG; PAM sequence: CGG
cactatcacaagaaaagcat

SEQ ID NO: 58571 - DNA, 20 bp, Artificial Sequence
  Description of Artificial Sequence: Synthetic oligonucleotide
  Target: LAMA2; (-) strand; PAM type: NRG; PAM sequence: AAG
ctcactcactatcacaagaa

SEQ ID NO: 58572 - DNA, 20 bp, Artificial Sequence
  Description of Artificial Sequence: Synthetic oligonucleotide
  Target: LAMA2; (-) strand; PAM type: NRG; PAM sequence: AAG
gagaactcactcactatcac

SEQ ID NO: 58573 - DNA, 20 bp, Artificial Sequence
  Description of Artificial Sequence: Synthetic oligonucleotide
  Target: LAMA2; (-) strand; PAM type: NRG; PAM sequence: GAG
ataaaactatcagagctcat

SEQ ID NO: 58574 - DNA, 20 bp, Artificial Sequence
  Description of Artificial Sequence: Synthetic oligonucleotide
  Target: LAMA2; (-) strand; PAM type: NRG; PAM sequence: GAG
agccccttataaaactatca

SEQ ID NO: 58575 - DNA, 20 bp, Artificial Sequence
  Description of Artificial Sequence: Synthetic oligonucleotide
  Target: LAMA2; (-) strand; PAM type: NRG; PAM sequence: CAG
agagccccttataaaactat

SEQ ID NO: 58576 - DNA, 20 bp, Artificial Sequence
  Description of Artificial Sequence: Synthetic oligonucleotide
  Target: LAMA2; (-) strand; PAM type: NRG; PAM sequence: GAG
agtgccaagcgaagggggaa

SEQ ID NO: 58577 - DNA, 20 bp, Artificial Sequence
  Description of Artificial Sequence: Synthetic oligonucleotide
  Target: LAMA2; (-) strand; PAM type: NRG; PAM sequence: AAG
gaagtgccaagcgaaggggg

SEQ ID NO: 58578 - DNA, 20 bp, Artificial Sequence
  Description of Artificial Sequence: Synthetic oligonucleotide
  Target: LAMA2; (-) strand; PAM type: NRG; PAM sequence: GGG
gaagaagtgccaagcgaagg

SEQ ID NO: 58579 - DNA, 20 bp, Artificial Sequence
  Description of Artificial Sequence: Synthetic oligonucleotide
  Target: LAMA2; (-) strand; PAM type: NRG; PAM sequence: GGG
agaagaagtgccaagcgaag

SEQ ID NO: 58580 - DNA, 20 bp, Artificial Sequence
  Description of Artificial Sequence: Synthetic oligonucleotide
  Target: LAMA2; (-) strand; PAM type: NRG; PAM sequence: GGG
aagaagaagtgccaagcgaa

SEQ ID NO: 58581 - DNA, 20 bp, Artificial Sequence
  Description of Artificial Sequence: Synthetic oligonucleotide
  Target: LAMA2; (-) strand; PAM type: NRG; PAM sequence: AGG
gaagaagaagtgccaagcga

SEQ ID NO: 58582 - DNA, 20 bp, Artificial Sequence
  Description of Artificial Sequence: Synthetic oligonucleotide
  Target: LAMA2; (-) strand; PAM type: NRG; PAM sequence: AAG
ggaagaagaagtgccaagcg

SEQ ID NO: 58583 - DNA, 20 bp, Artificial Sequence
  Description of Artificial Sequence: Synthetic oligonucleotide
  Target: LAMA2; (-) strand; PAM type: NRG; PAM sequence: AAG
cagcaggaagaagaagtgcc

SEQ ID NO: 58584 - DNA, 20 bp, Artificial Sequence
  Description of Artificial Sequence: Synthetic oligonucleotide
  Target: LAMA2; (-) strand; PAM type: NRG; PAM sequence: AAG
cacaaggcagcaggaagaag

SEQ ID NO: 58585 - DNA, 20 bp, Artificial Sequence
  Description of Artificial Sequence: Synthetic oligonucleotide
  Target: LAMA2; (-) strand; PAM type: NRG; PAM sequence: AAG
cctcacaaggcagcaggaag

SEQ ID NO: 58586 - DNA, 20 bp, Artificial Sequence
  Description of Artificial Sequence: Synthetic oligonucleotide
  Target: LAMA2; (-) strand; PAM type: NRG; PAM sequence: AAG
cttcctcacaaggcagcagg

SEQ ID NO: 58587 - DNA, 20 bp, Artificial Sequence
  Description of Artificial Sequence: Synthetic oligonucleotide
  Target: LAMA2; (-) strand; PAM type: NRG; PAM sequence: AGG
taccttcctcacaaggcagc

SEQ ID NO: 58588 - DNA, 20 bp, Artificial Sequence
  Description of Artificial Sequence: Synthetic oligonucleotide
  Target: LAMA2; (-) strand; PAM type: NRG; PAM sequence: CAG
gtaccttcctcacaaggcag

SEQ ID NO: 58589 - DNA, 20 bp, Artificial Sequence
  Description of Artificial Sequence: Synthetic oligonucleotide
  Target: LAMA2; (-) strand; PAM type: NRG; PAM sequence: CAG
aaggtaccttcctcacaagg

SEQ ID NO: 58590 - DNA, 20 bp, Artificial Sequence
  Description of Artificial Sequence: Synthetic oligonucleotide
  Target: LAMA2; (-) strand; PAM type: NRG; PAM sequence: AGG
agcaaggtaccttcctcaca

SEQ ID NO: 58591 - DNA, 20 bp, Artificial Sequence
  Description of Artificial Sequence: Synthetic oligonucleotide
  Target: LAMA2; (-) strand; PAM type: NRG; PAM sequence: AAG
aagcaaggtaccttcctcac

SEQ ID NO: 58592 - DNA, 20 bp, Artificial Sequence
  Description of Artificial Sequence: Synthetic oligonucleotide
  Target: LAMA2; (-) strand; PAM type: NRG; PAM sequence: AGG
cagaaggccaaggggaagca

SEQ ID NO: 58593 - DNA, 20 bp, Artificial Sequence
  Description of Artificial Sequence: Synthetic oligonucleotide
  Target: LAMA2; (-) strand; PAM type: NRG; PAM sequence: AAG
gcagaaggccaaggggaagc

SEQ ID NO: 58594 - DNA, 20 bp, Artificial Sequence
  Description of Artificial Sequence: Synthetic oligonucleotide
  Target: LAMA2; (-) strand; PAM type: NRG; PAM sequence: AAG
cgtggcagaaggccaagggg

SEQ ID NO: 58595 - DNA, 20 bp, Artificial Sequence
  Description of Artificial Sequence: Synthetic oligonucleotide
  Target: LAMA2; (-) strand; PAM type: NRG; PAM sequence: GGG
aaccgtggcagaaggccaag

SEQ ID NO: 58596 - DNA, 20 bp, Artificial Sequence
  Description of Artificial Sequence: Synthetic oligonucleotide
  Target: LAMA2; (-) strand; PAM type: NRG; PAM sequence: GGG
caaccgtggcagaaggccaa

SEQ ID NO: 58597 - DNA, 20 bp, Artificial Sequence
  Description of Artificial Sequence: Synthetic oligonucleotide
  Target: LAMA2; (-) strand; PAM type: NRG; PAM sequence: AGG
acaaccgtggcagaaggcca

SEQ ID NO: 58598 - DNA, 20 bp, Artificial Sequence
  Description of Artificial Sequence: Synthetic oligonucleotide
  Target: LAMA2; (-) strand; PAM type: NRG; PAM sequence: AAG
tacaaccgtggcagaaggcc

SEQ ID NO: 58599 - DNA, 20 bp, Artificial Sequence
  Description of Artificial Sequence: Synthetic oligonucleotide
  Target: LAMA2; (-) strand; PAM type: NRG; PAM sequence: AGG
aagcttacaaccgtggcaga

SEQ ID NO: 58600 - DNA, 20 bp, Artificial Sequence
  Description of Artificial Sequence: Synthetic oligonucleotide
  Target: LAMA2; (-) strand; PAM type: NRG; PAM sequence: AAG
gaagcttacaaccgtggcag

SEQ ID NO: 58601 - DNA, 20 bp, Artificial Sequence
  Description of Artificial Sequence: Synthetic oligonucleotide
  Target: LAMA2; (-) strand; PAM type: NRG; PAM sequence: CAG
caggaagcttacaaccgtgg

SEQ ID NO: 58602 - DNA, 20 bp, Artificial Sequence
  Description of Artificial Sequence: Synthetic oligonucleotide
  Target: LAMA2; (-) strand; PAM type: NRG; PAM sequence: TGG
cctcaggaagcttacaaccg

SEQ ID NO: 58603 - DNA, 20 bp, Artificial Sequence
  Description of Artificial Sequence: Synthetic oligonucleotide
  Target: LAMA2; (-) strand; PAM type: NRG; PAM sequence: AAG
acggctggggagacctcagg

SEQ ID NO: 58604 - DNA, 20 bp, Artificial Sequence
  Description of Artificial Sequence: Synthetic oligonucleotide
  Target: LAMA2; (-) strand; PAM type: NRG; PAM sequence: AGG
agcacggctggggagacctc

SEQ ID NO: 58605 - DNA, 20 bp, Artificial Sequence
  Description of Artificial Sequence: Synthetic oligonucleotide
  Target: LAMA2; (-) strand; PAM type: NRG; PAM sequence: CAG
cagcacggctggggagacct

SEQ ID NO: 58606 - DNA, 20 bp, Artificial Sequence
  Description of Artificial Sequence: Synthetic oligonucleotide
  Target: LAMA2; (-) strand; PAM type: NRG; PAM sequence: GAG
cacagttcagcacggctggg

SEQ ID NO: 58607 - DNA, 20 bp, Artificial Sequence
  Description of Artificial Sequence: Synthetic oligonucleotide
  Target: LAMA2; (-) strand; PAM type: NRG; PAM sequence: GGG
atcacagttcagcacggctg

SEQ ID NO: 58608 - DNA, 20 bp, Artificial Sequence
  Description of Artificial Sequence: Synthetic oligonucleotide
  Target: LAMA2; (-) strand; PAM type: NRG; PAM sequence: GGG
aatcacagttcagcacggct

SEQ ID NO: 58609 - DNA, 20 bp, Artificial Sequence
  Description of Artificial Sequence: Synthetic oligonucleotide
  Target: LAMA2; (-) strand; PAM type: NRG; PAM sequence: TGG
gaatcacagttcagcacggc

SEQ ID NO: 58610 - DNA, 20 bp, Artificial Sequence
  Description of Artificial Sequence: Synthetic oligonucleotide
  Target: LAMA2; (-) strand; PAM type: NRG; PAM sequence: CGG
aattgaatcacagttcagca

SEQ ID NO: 58611 - DNA, 20 bp, Artificial Sequence
  Description of Artificial Sequence: Synthetic oligonucleotide
  Target: LAMA2; (-) strand; PAM type: NRG; PAM sequence: CAG
gttttaattgaatcacagtt

SEQ ID NO: 58612 - DNA, 20 bp, Artificial Sequence
  Description of Artificial Sequence: Synthetic oligonucleotide
  Target: LAMA2; (-) strand; PAM type: NRG; PAM sequence: CAG
aaaaagttttaattgaatca

SEQ ID NO: 58613 - DNA, 20 bp, Artificial Sequence
  Description of Artificial Sequence: Synthetic oligonucleotide
  Target: LAMA2; (-) strand; PAM type: NRG; PAM sequence: AAG
tgggtgatttataaaggaaa

SEQ ID NO: 58614 - DNA, 20 bp, Artificial Sequence
  Description of Artificial Sequence: Synthetic oligonucleotide
  Target: LAMA2; (-) strand; PAM type: NRG; PAM sequence: AGG
cgaaactgggtgatttataa

SEQ ID NO: 58615 - DNA, 20 bp, Artificial Sequence
  Description of Artificial Sequence: Synthetic oligonucleotide
  Target: LAMA2; (-) strand; PAM type: NRG; PAM sequence: AAG
ccgaaactgggtgatttata

SEQ ID NO: 58616 - DNA, 20 bp, Artificial Sequence
  Description of Artificial Sequence: Synthetic oligonucleotide
  Target: LAMA2; (-) strand; PAM type: NRG; PAM sequence: GGG
ataaagaactgcccgaaact

SEQ ID NO: 58617 - DNA, 20 bp, Artificial Sequence
  Description of Artificial Sequence: Synthetic oligonucleotide
  Target: LAMA2; (-) strand; PAM type: NRG; PAM sequence: TGG
tataaagaactgcccgaaac

SEQ ID NO: 58618 - DNA, 20 bp, Artificial Sequence
  Description of Artificial Sequence: Synthetic oligonucleotide
  Target: LAMA2; (-) strand; PAM type: NRG; PAM sequence: AAG
gtcgttttcacaaggctata

SEQ ID NO: 58619 - DNA, 20 bp, Artificial Sequence
  Description of Artificial Sequence: Synthetic oligonucleotide
  Target: LAMA2; (-) strand; PAM type: NRG; PAM sequence: AGG
ctgtattagtcgttttcaca

SEQ ID NO: 58620 - DNA, 20 bp, Artificial Sequence
  Description of Artificial Sequence: Synthetic oligonucleotide
  Target: LAMA2; (-) strand; PAM type: NRG; PAM sequence: AAG
gctgtattagtcgttttcac

SEQ ID NO: 58621 - DNA, 20 bp, Artificial Sequence
  Description of Artificial Sequence: Synthetic oligonucleotide
  Target: LAMA2; (-) strand; PAM type: NRG; PAM sequence: TAG
ataagataagggtgctgtat

SEQ ID NO: 58622 - DNA, 20 bp, Artificial Sequence
  Description of Artificial Sequence: Synthetic oligonucleotide
  Target: LAMA2; (-) strand; PAM type: NRG; PAM sequence: GGG
tgagattaggaataagataa

SEQ ID NO: 58623 - DNA, 20 bp, Artificial Sequence
  Description of Artificial Sequence: Synthetic oligonucleotide
  Target: LAMA2; (-) strand; PAM type: NRG; PAM sequence: AGG
ctgagattaggaataagata

SEQ ID NO: 58624 - DNA, 20 bp, Artificial Sequence
  Description of Artificial Sequence: Synthetic oligonucleotide
  Target: LAMA2; (-) strand; PAM type: NRG; PAM sequence: AAG
tctgagattaggaataagat

SEQ ID NO: 58625 - DNA, 20 bp, Artificial Sequence
  Description of Artificial Sequence: Synthetic oligonucleotide
  Target: LAMA2; (-) strand; PAM type: NRG; PAM sequence: AAG
gcttttctgagattaggaat

SEQ ID NO: 58626 - DNA, 20 bp, Artificial Sequence
  Description of Artificial Sequence: Synthetic oligonucleotide
  Target: LAMA2; (-) strand; PAM type: NRG; PAM sequence: AGG
ttgaaagcttttctgagatt

SEQ ID NO: 58627 - DNA, 20 bp, Artificial Sequence
  Description of Artificial Sequence: Synthetic oligonucleotide
  Target: LAMA2; (-) strand; PAM type: NRG; PAM sequence: TAG
gttgaaagcttttctgagat

SEQ ID NO: 58628 - DNA, 20 bp, Artificial Sequence
  Description of Artificial Sequence: Synthetic oligonucleotide
  Target: LAMA2; (-) strand; PAM type: NRG; PAM sequence: GAG
gaaaagttgaaagcttttct

SEQ ID NO: 58629 - DNA, 20 bp, Artificial Sequence
  Description of Artificial Sequence: Synthetic oligonucleotide
  Target: LAMA2; (-) strand; PAM type: NRG; PAM sequence: AAG
actgaatagtgaaaagttga

SEQ ID NO: 58630 - DNA, 20 bp, Artificial Sequence
  Description of Artificial Sequence: Synthetic oligonucleotide
  Target: LAMA2; (-) strand; PAM type: NRG; PAM sequence: AAG
atgtcatactgaatagtgaa

SEQ ID NO: 58631 - DNA, 20 bp, Artificial Sequence
  Description of Artificial Sequence: Synthetic oligonucleotide
  Target: LAMA2; (-) strand; PAM type: NRG; PAM sequence: TAG
acagctgatgtcatactgaa

SEQ ID NO: 58632 - DNA, 20 bp, Artificial Sequence
  Description of Artificial Sequence: Synthetic oligonucleotide
  Target: LAMA2; (-) strand; PAM type: NRG; PAM sequence: CAG
ggacatatatgacaagtcta

SEQ ID NO: 58633 - DNA, 20 bp, Artificial Sequence
  Description of Artificial Sequence: Synthetic oligonucleotide
  Target: LAMA2; (-) strand; PAM type: NRG; PAM sequence: AAG
taataaaggacatatatgac

SEQ ID NO: 58634 - DNA, 20 bp, Artificial Sequence
  Description of Artificial Sequence: Synthetic oligonucleotide
  Target: LAMA2; (-) strand; PAM type: NRG; PAM sequence: AGG
aatgtatctgaacataataa

SEQ ID NO: 58635 - DNA, 20 bp, Artificial Sequence
  Description of Artificial Sequence: Synthetic oligonucleotide
  Target: LAMA2; (-) strand; PAM type: NRG; PAM sequence: AAG
aaatgtatctgaacataata

SEQ ID NO: 58636 - DNA, 20 bp, Artificial Sequence
  Description of Artificial Sequence: Synthetic oligonucleotide
  Target: LAMA2; (-) strand; PAM type: NRG; PAM sequence: TAG
agctcccaacaaattaggta

SEQ ID NO: 58637 - DNA, 20 bp, Artificial Sequence
  Description of Artificial Sequence: Synthetic oligonucleotide
  Target: LAMA2; (-) strand; PAM type: NRG; PAM sequence: AGG
ataaaagctcccaacaaatt

SEQ ID NO: 58638 - DNA, 20 bp, Artificial Sequence
  Description of Artificial Sequence: Synthetic oligonucleotide
  Target: LAMA2; (-) strand; PAM type: NRG; PAM sequence: TAG
gataaaagctcccaacaaat

SEQ ID NO: 58639 - DNA, 20 bp, Artificial Sequence
  Description of Artificial Sequence: Synthetic oligonucleotide
  Target: LAMA2; (-) strand; PAM type: NRG; PAM sequence: AAG
tcaacatcctgtcatgataa

SEQ ID NO: 58640 - DNA, 20 bp, Artificial Sequence
  Description of Artificial Sequence: Synthetic oligonucleotide
  Target: LAMA2; (-) strand; PAM type: NRG; PAM sequence: AAG
tatcatctcagatgtagaaa

SEQ ID NO: 58641 - DNA, 20 bp, Artificial Sequence
  Description of Artificial Sequence: Synthetic oligonucleotide
  Target: LAMA2; (-) strand; PAM type: NRG; PAM sequence: TAG
tcatattatcatctcagatg

SEQ ID NO: 58642 - DNA, 20 bp, Artificial Sequence
  Description of Artificial Sequence: Synthetic oligonucleotide
  Target: LAMA2; (-) strand; PAM type: NRG; PAM sequence: CAG
taaaaatcatattatcatct

SEQ ID NO: 58643 - DNA, 20 bp, Artificial Sequence
  Description of Artificial Sequence: Synthetic oligonucleotide
  Target: LAMA2; (-) strand; PAM type: NRG; PAM sequence: AAG
tataccactttcacagaata

SEQ ID NO: 58644 - DNA, 20 bp, Artificial Sequence
  Description of Artificial Sequence: Synthetic oligonucleotide
  Target: LAMA2; (-) strand; PAM type: NRG; PAM sequence: CAG
actactgtataccactttca

SEQ ID NO: 58645 - DNA, 20 bp, Artificial Sequence
  Description of Artificial Sequence: Synthetic oligonucleotide
  Target: LAMA2; (-) strand; PAM type: NRG; PAM sequence: GGG
gtatcccccatgcataaagg

SEQ ID NO: 58646 - DNA, 20 bp, Artificial Sequence
  Description of Artificial Sequence: Synthetic oligonucleotide
  Target: LAMA2; (-) strand; PAM type: NRG; PAM sequence: GGG
tgtatcccccatgcataaag

SEQ ID NO: 58647 - DNA, 20 bp, Artificial Sequence
  Description of Artificial Sequence: Synthetic oligonucleotide
  Target: LAMA2; (-) strand; PAM type: NRG; PAM sequence: GGG
atgtatcccccatgcataaa

SEQ ID NO: 58648 - DNA, 20 bp, Artificial Sequence
  Description of Artificial Sequence: Synthetic oligonucleotide
  Target: LAMA2; (-) strand; PAM type: NRG; PAM sequence: AGG
aatgtatcccccatgcataa

SEQ ID NO: 58649 - DNA, 20 bp, Artificial Sequence
  Description of Artificial Sequence: Synthetic oligonucleotide
  Target: LAMA2; (-) strand; PAM type: NRG; PAM sequence: AAG
gaatgtatcccccatgcata

SEQ ID NO: 58650 - DNA, 20 bp, Artificial Sequence
  Description of Artificial Sequence: Synthetic oligonucleotide
  Target: LAMA2; (-) strand; PAM type: NRG; PAM sequence: TGG
cagacatactctgggggtcc

SEQ ID NO: 58651 - DNA, 20 bp, Artificial Sequence
  Description of Artificial Sequence: Synthetic oligonucleotide
  Target: LAMA2; (-) strand; PAM type: NRG; PAM sequence: GGG
cagtttcagacatactctgg

SEQ ID NO: 58652 - DNA, 20 bp, Artificial Sequence
  Description of Artificial Sequence: Synthetic oligonucleotide
  Target: LAMA2; (-) strand; PAM type: NRG; PAM sequence: GGG
gcagtttcagacatactctg

SEQ ID NO: 58653 - DNA, 20 bp, Artificial Sequence
  Description of Artificial Sequence: Synthetic oligonucleotide
  Target: LAMA2; (-) strand; PAM type: NRG; PAM sequence: GGG
tgcagtttcagacatactct

SEQ ID NO: 58654 - DNA, 20 bp, Artificial Sequence
  Description of Artificial Sequence: Synthetic oligonucleotide
  Target: LAMA2; (-) strand; PAM type: NRG; PAM sequence: TGG
ctgcagtttcagacatactc

SEQ ID NO: 58655 - DNA, 20 bp, Artificial Sequence
  Description of Artificial Sequence: Synthetic oligonucleotide
  Target: LAMA2; (-) strand; PAM type: NRG; PAM sequence: CAG
gtcagtacaatctgcagttt

SEQ ID NO: 58656 - DNA, 20 bp, Artificial Sequence
  Description of Artificial Sequence: Synthetic oligonucleotide
  Target: LAMA2; (-) strand; PAM type: NRG; PAM sequence: CAG
gtaggtgtcagtacaatctg

SEQ ID NO: 58657 - DNA, 20 bp, Artificial Sequence
  Description of Artificial Sequence: Synthetic oligonucleotide
  Target: LAMA2; (-) strand; PAM type: NRG; PAM sequence: CAG
agcatactatatgtaggtgt

SEQ ID NO: 58658 - DNA, 20 bp, Artificial Sequence
  Description of Artificial Sequence: Synthetic oligonucleotide
  Target: LAMA2; (-) strand; PAM type: NRG; PAM sequence: AGG
ataaaaagcatactatatgt

SEQ ID NO: 58659 - DNA, 20 bp, Artificial Sequence
  Description of Artificial Sequence: Synthetic oligonucleotide
  Target: LAMA2; (-) strand; PAM type: NRG; PAM sequence: TAG
aataaaaagcatactatatg

SEQ ID NO: 58660 - DNA, 20 bp, Artificial Sequence
  Description of Artificial Sequence: Synthetic oligonucleotide
  Target: LAMA2; (-) strand; PAM type: NRG; PAM sequence: AAG
aggtatatacatagaataaa

SEQ ID NO: 58661 - DNA, 20 bp, Artificial Sequence
  Description of Artificial Sequence: Synthetic oligonucleotide
  Target: LAMA2; (-) strand; PAM type: NRG; PAM sequence: TAG
ctttttcataggtatataca

SEQ ID NO: 58662 - DNA, 20 bp, Artificial Sequence
  Description of Artificial Sequence: Synthetic oligonucleotide
  Target: LAMA2; (-) strand; PAM type: NRG; PAM sequence: AGG
cataaattaaactttttcat

SEQ ID NO: 58663 - DNA, 20 bp, Artificial Sequence
  Description of Artificial Sequence: Synthetic oligonucleotide
  Target: LAMA2; (-) strand; PAM type: NRG; PAM sequence: TAG
acataaattaaactttttca

SEQ ID NO: 58664 - DNA, 20 bp, Artificial Sequence
  Description of Artificial Sequence: Synthetic oligonucleotide
  Target: LAMA2; (-) strand; PAM type: NRG; PAM sequence: TAG
cattcacataactcttatta

SEQ ID NO: 58665 - DNA, 20 bp, Artificial Sequence
  Description of Artificial Sequence: Synthetic oligonucleotide
  Target: LAMA2; (-) strand; PAM type: NRG; PAM sequence: GAG
tattttgagggggagtgaga

SEQ ID NO: 58666 - DNA, 20 bp, Artificial Sequence
  Description of Artificial Sequence: Synthetic oligonucleotide
  Target: LAMA2; (-) strand; PAM type: NRG; PAM sequence: GAG
gatattttgagggggagtga

SEQ ID NO: 58667 - DNA, 20 bp, Artificial Sequence
  Description of Artificial Sequence: Synthetic oligonucleotide
  Target: LAMA2; (-) strand; PAM type: NRG; PAM sequence: GAG
aagatattttgagggggagt

SEQ ID NO: 58668 - DNA, 20 bp, Artificial Sequence
  Description of Artificial Sequence: Synthetic oligonucleotide
  Target: LAMA2; (-) strand; PAM type: NRG; PAM sequence: GAG
caataagatattttgagggg

SEQ ID NO: 58669 - DNA, 20 bp, Artificial Sequence
  Description of Artificial Sequence: Synthetic oligonucleotide
  Target: LAMA2; (-) strand; PAM type: NRG; PAM sequence: GGG
tacaataagatattttgagg

SEQ ID NO: 58670 - DNA, 20 bp, Artificial Sequence
  Description of Artificial Sequence: Synthetic oligonucleotide
  Target: LAMA2; (-) strand; PAM type: NRG; PAM sequence: GGG
atacaataagatattttgag

SEQ ID NO: 58671 - DNA, 20 bp, Artificial Sequence
  Description of Artificial Sequence: Synthetic oligonucleotide
  Target: LAMA2; (-) strand; PAM type: NRG; PAM sequence: GGG
aatacaataagatattttga

SEQ ID NO: 58672 - DNA, 20 bp, Artificial Sequence
  Description of Artificial Sequence: Synthetic oligonucleotide
  Target: LAMA2; (-) strand; PAM type: NRG; PAM sequence: AGG
taatacaataagatattttg

SEQ ID NO: 58673 - DNA, 20 bp, Artificial Sequence
  Description of Artificial Sequence: Synthetic oligonucleotide
  Target: LAMA2; (-) strand; PAM type: NRG; PAM sequence: GAG
ataatacaataagatatttt

SEQ ID NO: 58674 - DNA, 20 bp, Artificial Sequence
  Description of Artificial Sequence: Synthetic oligonucleotide
  Target: LAMA2; (-) strand; PAM type: NRG; PAM sequence: AAG
aaagatgagtataatacaat

SEQ ID NO: 58675 - DNA, 20 bp, Artificial Sequence
  Description of Artificial Sequence: Synthetic oligonucleotide
  Target: LAMA2; (-) strand; PAM type: NRG; PAM sequence: GAG
atcatcacaaggagaaagat

SEQ ID NO: 58676 - DNA, 20 bp, Artificial Sequence
  Description of Artificial Sequence: Synthetic oligonucleotide
  Target: LAMA2; (-) strand; PAM type: NRG; PAM sequence: AAG
ctcacatcatcacaaggaga

SEQ ID NO: 58677 - DNA, 20 bp, Artificial Sequence
  Description of Artificial Sequence: Synthetic oligonucleotide
  Target: LAMA2; (-) strand; PAM type: NRG; PAM sequence: GAG
tcatctcacatcatcacaag

SEQ ID NO: 58678 - DNA, 20 bp, Artificial Sequence
  Description of Artificial Sequence: Synthetic oligonucleotide
  Target: LAMA2; (-) strand; PAM type: NRG; PAM sequence: AGG
tatcatctcacatcatcaca

SEQ ID NO: 58679 - DNA, 20 bp, Artificial Sequence
  Description of Artificial Sequence: Synthetic oligonucleotide
  Target: LAMA2; (-) strand; PAM type: NRG; PAM sequence: AAG
ttatcatctcacatcatcac

SEQ ID NO: 58680 - DNA, 20 bp, Artificial Sequence
  Description of Artificial Sequence: Synthetic oligonucleotide
  Target: LAMA2; (-) strand; PAM type: NRG; PAM sequence: TGG
catatttcatctaatcatgg

SEQ ID NO: 58681 - DNA, 20 bp, Artificial Sequence
  Description of Artificial Sequence: Synthetic oligonucleotide
  Target: LAMA2; (-) strand; PAM type: NRG; PAM sequence: TGG
caccatatttcatctaatca

SEQ ID NO: 58682 - DNA, 20 bp, Artificial Sequence
  Description of Artificial Sequence: Synthetic oligonucleotide
  Target: LAMA2; (-) strand; PAM type: NRG; PAM sequence: CAG
tcttccttctgatgcatcat

SEQ ID NO: 58683 - DNA, 20 bp, Artificial Sequence
  Description of Artificial Sequence: Synthetic oligonucleotide
  Target: LAMA2; (-) strand; PAM type: NRG; PAM sequence: TGG
caagggtcgctcaaagcaga

SEQ ID NO: 58684 - DNA, 20 bp, Artificial Sequence
  Description of Artificial Sequence: Synthetic oligonucleotide
  Target: LAMA2; (-) strand; PAM type: NRG; PAM sequence: CAG
taatcaagggtcgctcaaag

SEQ ID NO: 58685 - DNA, 20 bp, Artificial Sequence
  Description of Artificial Sequence: Synthetic oligonucleotide
  Target: LAMA2; (-) strand; PAM type: NRG; PAM sequence: AAG
caataatcaagggtcgctca

SEQ ID NO: 58686 - DNA, 20 bp, Artificial Sequence
  Description of Artificial Sequence: Synthetic oligonucleotide
  Target: LAMA2; (-) strand; PAM type: NRG; PAM sequence: GGG
tgtcatagctcaataatcaa

SEQ ID NO: 58687 - DNA, 20 bp, Artificial Sequence
  Description of Artificial Sequence: Synthetic oligonucleotide
  Target: LAMA2; (-) strand; PAM type: NRG; PAM sequence: AGG
ttgtcatagctcaataatca

SEQ ID NO: 58688 - DNA, 20 bp, Artificial Sequence
  Description of Artificial Sequence: Synthetic oligonucleotide
  Target: LAMA2; (-) strand; PAM type: NRG; PAM sequence: AAG
attgtcatagctcaataatc

SEQ ID NO: 58689 - DNA, 20 bp, Artificial Sequence
  Description of Artificial Sequence: Synthetic oligonucleotide
  Target: LAMA2; (-) strand; PAM type: NRG; PAM sequence: TAG
tccaaccatcaacattgtca

SEQ ID NO: 58690 - DNA, 20 bp, Artificial Sequence
  Description of Artificial Sequence: Synthetic oligonucleotide
  Target: LAMA2; (-) strand; PAM type: NRG; PAM sequence: TGG
acattgatatcatatgcacc

SEQ ID NO: 58691 - DNA, 20 bp, Artificial Sequence
  Description of Artificial Sequence: Synthetic oligonucleotide
  Target: LAMA2; (-) strand; PAM type: NRG; PAM sequence: TGG
ctgtatcacaaccgacctgt

SEQ ID NO: 58692 - DNA, 20 bp, Artificial Sequence
  Description of Artificial Sequence: Synthetic oligonucleotide
  Target: LAMA2; (-) strand; PAM type: NRG; PAM sequence: GGG
atgaaccattcctttttcta

SEQ ID NO: 58693 - DNA, 20 bp, Artificial Sequence
  Description of Artificial Sequence: Synthetic oligonucleotide
  Target: LAMA2; (-) strand; PAM type: NRG; PAM sequence: AGG
gatgaaccattcctttttct

SEQ ID NO: 58694 - DNA, 20 bp, Artificial Sequence
  Description of Artificial Sequence: Synthetic oligonucleotide
  Target: LAMA2; (-) strand; PAM type: NRG; PAM sequence: TAG
agatgaaccattcctttttc

SEQ ID NO: 58695 - DNA, 20 bp, Artificial Sequence
  Description of Artificial Sequence: Synthetic oligonucleotide
  Target: LAMA2; (-) strand; PAM type: NRG; PAM sequence: GAG
tcctgtttcctcccacccag

SEQ ID NO: 58696 - DNA, 20 bp, Artificial Sequence
  Description of Artificial Sequence: Synthetic oligonucleotide
  Target: LAMA2; (-) strand; PAM type: NRG; PAM sequence: AGG
tgtcctgtttcctcccaccc

SEQ ID NO: 58697 - DNA, 20 bp, Artificial Sequence
  Description of Artificial Sequence: Synthetic oligonucleotide
  Target: LAMA2; (-) strand; PAM type: NRG; PAM sequence: CAG
ctgtcctgtttcctcccacc

SEQ ID NO: 58698 - DNA, 20 bp, Artificial Sequence
  Description of Artificial Sequence: Synthetic oligonucleotide
  Target: LAMA2; (-) strand; PAM type: NRG; PAM sequence: AGG
aattgtgcattttgagtagc

SEQ ID NO: 58699 - DNA, 20 bp, Artificial Sequence
  Description of Artificial Sequence: Synthetic oligonucleotide
  Target: LAMA2; (-) strand; PAM type: NRG; PAM sequence: CAG
gaattgtgcattttgagtag

SEQ ID NO: 58700 - DNA, 20 bp, Artificial Sequence
  Description of Artificial Sequence: Synthetic oligonucleotide
  Target: LAMA2; (-) strand; PAM type: NRG; PAM sequence: TAG
tttgaattgtgcattttgag

SEQ ID NO: 58701 - DNA, 20 bp, Artificial Sequence
  Description of Artificial Sequence: Synthetic oligonucleotide
  Target: LAMA2; (-) strand; PAM type: NRG; PAM sequence: GAG
agttttgaattgtgcatttt

SEQ ID NO: 58702 - DNA, 20 bp, Artificial Sequence
  Description of Artificial Sequence: Synthetic oligonucleotide
  Target: LAMA2; (-) strand; PAM type: NRG; PAM sequence: AAG
atttcagaaaaacaattcat

SEQ ID NO: 58703 - DNA, 20 bp, Artificial Sequence
  Description of Artificial Sequence: Synthetic oligonucleotide
  Target: LAMA2; (-) strand; PAM type: NRG; PAM sequence: CAG
aaatattaagtggaaaattt

SEQ ID NO: 58704 - DNA, 20 bp, Artificial Sequence
  Description of Artificial Sequence: Synthetic oligonucleotide
  Target: LAMA2; (-) strand; PAM type: NRG; PAM sequence: TGG
catggtctgaaaatattaag

SEQ ID NO: 58705 - DNA, 20 bp, Artificial Sequence
  Description of Artificial Sequence: Synthetic oligonucleotide
  Target: LAMA2; (-) strand; PAM type: NRG; PAM sequence: AAG
aatcatggtctgaaaatatt

SEQ ID NO: 58706 - DNA, 20 bp, Artificial Sequence
  Description of Artificial Sequence: Synthetic oligonucleotide
  Target: LAMA2; (-) strand; PAM type: NRG; PAM sequence: TGG
cagttacctgtactcaatca

SEQ ID NO: 58707 - DNA, 20 bp, Artificial Sequence
  Description of Artificial Sequence: Synthetic oligonucleotide
  Target: LAMA2; (-) strand; PAM type: NRG; PAM sequence: CAG
tgtttcactttccatggttt

SEQ ID NO: 58708 - DNA, 20 bp, Artificial Sequence
  Description of Artificial Sequence: Synthetic oligonucleotide
  Target: LAMA2; (-) strand; PAM type: NRG; PAM sequence: TGG
atgctttgtttcactttcca

SEQ ID NO: 58709 - DNA, 20 bp, Artificial Sequence
  Description of Artificial Sequence: Synthetic oligonucleotide
  Target: LAMA2; (-) strand; PAM type: NRG; PAM sequence: TAG
atgagtcgataaatgtgata

SEQ ID NO: 58710 - DNA, 20 bp, Artificial Sequence
  Description of Artificial Sequence: Synthetic oligonucleotide
  Target: LAMA2; (-) strand; PAM type: NRG; PAM sequence: GAG
atggataattcaacatacat

SEQ ID NO: 58711 - DNA, 20 bp, Artificial Sequence
  Description of Artificial Sequence: Synthetic oligonucleotide
  Target: LAMA2; (-) strand; PAM type: NRG; PAM sequence: TGG
ggatttatccttggaataaa

SEQ ID NO: 58712 - DNA, 20 bp, Artificial Sequence
  Description of Artificial Sequence: Synthetic oligonucleotide
  Target: LAMA2; (-) strand; PAM type: NRG; PAM sequence: TGG
gattaagagggatttatcct

SEQ ID NO: 58713 - DNA, 20 bp, Artificial Sequence
  Description of Artificial Sequence: Synthetic oligonucleotide
  Target: LAMA2; (-) strand; PAM type: NRG; PAM sequence: GGG
aacattcaccatgattaaga

SEQ ID NO: 58714 - DNA, 20 bp, Artificial Sequence
  Description of Artificial Sequence: Synthetic oligonucleotide
  Target: LAMA2; (-) strand; PAM type: NRG; PAM sequence: AGG
gaacattcaccatgattaag

SEQ ID NO: 58715 - DNA, 20 bp, Artificial Sequence
  Description of Artificial Sequence: Synthetic oligonucleotide
  Target: LAMA2; (-) strand; PAM type: NRG; PAM sequence: GAG
ggaacattcaccatgattaa

SEQ ID NO: 58716 - DNA, 20 bp, Artificial Sequence
  Description of Artificial Sequence: Synthetic oligonucleotide
  Target: LAMA2; (-) strand; PAM type: NRG; PAM sequence: AAG
aaggaacattcaccatgatt

SEQ ID NO: 58717 - DNA, 20 bp, Artificial Sequence
  Description of Artificial Sequence: Synthetic oligonucleotide
  Target: LAMA2; (-) strand; PAM type: NRG; PAM sequence: AGG
aaattcaacggcatatcaaa

SEQ ID NO: 58718 - DNA, 20 bp, Artificial Sequence
  Description of Artificial Sequence: Synthetic oligonucleotide
  Target: LAMA2; (-) strand; PAM type: NRG; PAM sequence: AAG
caaattcaacggcatatcaa

SEQ ID NO: 58719 - DNA, 20 bp, Artificial Sequence
  Description of Artificial Sequence: Synthetic oligonucleotide
  Target: LAMA2; (-) strand; PAM type: NRG; PAM sequence: CGG
tactagcaaatcaaattcaa

SEQ ID NO: 58720 - DNA, 20 bp, Artificial Sequence
  Description of Artificial Sequence: Synthetic oligonucleotide
  Target: LAMA2; (-) strand; PAM type: NRG; PAM sequence: TAG
aaaaatcctcaaaaaaatac

SEQ ID NO: 58721 - DNA, 20 bp, Artificial Sequence
  Description of Artificial Sequence: Synthetic oligonucleotide
  Target: LAMA2; (-) strand; PAM type: NRG; PAM sequence: CAG
gccaatatctctgaagaaca

SEQ ID NO: 58722 - DNA, 20 bp, Artificial Sequence
  Description of Artificial Sequence: Synthetic oligonucleotide
  Target: LAMA2; (-) strand; PAM type: NRG; PAM sequence: AAG
attacaggccaatatctctg

SEQ ID NO: 58723 - DNA, 20 bp, Artificial Sequence
  Description of Artificial Sequence: Synthetic oligonucleotide
  Target: LAMA2; (-) strand; PAM type: NRG; PAM sequence: AGG
ctacaaataaagaaaattac

SEQ ID NO: 58724 - DNA, 20 bp, Artificial Sequence
  Description of Artificial Sequence: Synthetic oligonucleotide
  Target: LAMA2; (-) strand; PAM type: NRG; PAM sequence: CAG
actacaaataaagaaaatta

SEQ ID NO: 58725 - DNA, 20 bp, Artificial Sequence
  Description of Artificial Sequence: Synthetic oligonucleotide
  Target: LAMA2; (-) strand; PAM type: NRG; PAM sequence: AAG
agataaggacactacaaata

SEQ ID NO: 58726 - DNA, 20 bp, Artificial Sequence
  Description of Artificial Sequence: Synthetic oligonucleotide
  Target: LAMA2; (-) strand; PAM type: NRG; PAM sequence: AGG
atacaatgctaacccagata

SEQ ID NO: 58727 - DNA, 20 bp, Artificial Sequence
  Description of Artificial Sequence: Synthetic oligonucleotide
  Target: LAMA2; (-) strand; PAM type: NRG; PAM sequence: AAG
tatacaatgctaacccagat

SEQ ID NO: 58728 - DNA, 20 bp, Artificial Sequence
  Description of Artificial Sequence: Synthetic oligonucleotide
  Target: LAMA2; (-) strand; PAM type: NRG; PAM sequence: CAG
actattatacaatgctaacc

SEQ ID NO: 58729 - DNA, 20 bp, Artificial Sequence
  Description of Artificial Sequence: Synthetic oligonucleotide
  Target: LAMA2; (-) strand; PAM type: NRG; PAM sequence: AGG
acttccaatctcattatatg

SEQ ID NO: 58730 - DNA, 20 bp, Artificial Sequence
  Description of Artificial Sequence: Synthetic oligonucleotide
  Target: LAMA2; (-) strand; PAM type: NRG; PAM sequence: GAG
cacttccaatctcattatat

SEQ ID NO: 58731 - DNA, 20 bp, Artificial Sequence
  Description of Artificial Sequence: Synthetic oligonucleotide
  Target: LAMA2; (-) strand; PAM type: NRG; PAM sequence: GGG
ttcaagaccagacacttgga

SEQ ID NO: 58732 - DNA, 20 bp, Artificial Sequence
  Description of Artificial Sequence: Synthetic oligonucleotide
  Target: LAMA2; (-) strand; PAM type: NRG; PAM sequence: AGG
gttcaagaccagacacttgg

SEQ ID NO: 58733 - DNA, 20 bp, Artificial Sequence
  Description of Artificial Sequence: Synthetic oligonucleotide
  Target: LAMA2; (-) strand; PAM type: NRG; PAM sequence: GAG
agttcaagaccagacacttg

SEQ ID NO: 58734 - DNA, 20 bp, Artificial Sequence
  Description of Artificial Sequence: Synthetic oligonucleotide
  Target: LAMA2; (-) strand; PAM type: NRG; PAM sequence: TGG
aaagttcaagaccagacact

SEQ ID NO: 58735 - DNA, 20 bp, Artificial Sequence
  Description of Artificial Sequence: Synthetic oligonucleotide
  Target: LAMA2; (-) strand; PAM type: NRG; PAM sequence: CAG
aataaagaaaagttcaagac

SEQ ID NO: 58736 - DNA, 20 bp, Artificial Sequence
  Description of Artificial Sequence: Synthetic oligonucleotide
  Target: LAMA2; (-) strand; PAM type: NRG; PAM sequence: AAG
ctcccaataaagaaaagttc

SEQ ID NO: 58737 - DNA, 20 bp, Artificial Sequence
  Description of Artificial Sequence: Synthetic oligonucleotide
  Target: LAMA2; (-) strand; PAM type: NRG; PAM sequence: AAG
aaaaatctcccaataaagaa

SEQ ID NO: 58738 - DNA, 20 bp, Artificial Sequence
  Description of Artificial Sequence: Synthetic oligonucleotide
  Target: LAMA2; (-) strand; PAM type: NRG; PAM sequence: AAG
gaaaaaaaaatctcccaata

SEQ ID NO: 58739 - DNA, 20 bp, Artificial Sequence
  Description of Artificial Sequence: Synthetic oligonucleotide
  Target: LAMA2; (-) strand; PAM type: NRG; PAM sequence: CAG
aatgagtaaggagaataaat

SEQ ID NO: 58740 - DNA, 20 bp, Artificial Sequence
  Description of Artificial Sequence: Synthetic oligonucleotide
  Target: LAMA2; (-) strand; PAM type: NRG; PAM sequence: GAG
agtacctgataatgagtaag

SEQ ID NO: 58741 - DNA, 20 bp, Artificial Sequence
  Description of Artificial Sequence: Synthetic oligonucleotide
  Target: LAMA2; (-) strand; PAM type: NRG; PAM sequence: AGG
tgagtacctgataatgagta

SEQ ID NO: 58742 - DNA, 20 bp, Artificial Sequence
  Description of Artificial Sequence: Synthetic oligonucleotide
  Target: LAMA2; (-) strand; PAM type: NRG; PAM sequence: AAG
atgagtacctgataatgagt

SEQ ID NO: 58743 - DNA, 20 bp, Artificial Sequence
  Description of Artificial Sequence: Synthetic oligonucleotide
  Target: LAMA2; (-) strand; PAM type: NRG; PAM sequence: GAG
ggtaatgagtacctgataat

SEQ ID NO: 58744 - DNA, 20 bp, Artificial Sequence
  Description of Artificial Sequence: Synthetic oligonucleotide
  Target: LAMA2; (-) strand; PAM type: NRG; PAM sequence: GAG
tctgaacaaatttgggtaat

SEQ ID NO: 58745 - DNA, 20 bp, Artificial Sequence
  Description of Artificial Sequence: Synthetic oligonucleotide
  Target: LAMA2; (-) strand; PAM type: NRG; PAM sequence: GGG
tagaaaatctgaacaaattt

SEQ ID NO: 58746 - DNA, 20 bp, Artificial Sequence
  Description of Artificial Sequence: Synthetic oligonucleotide
  Target: LAMA2; (-) strand; PAM type: NRG; PAM sequence: TGG
atagaaaatctgaacaaatt

SEQ ID NO: 58747 - DNA, 20 bp, Artificial Sequence
  Description of Artificial Sequence: Synthetic oligonucleotide
  Target: LAMA2; (-) strand; PAM type: NRG; PAM sequence: TAG
aagactgaatgatgaagaaa

SEQ ID NO: 58748 - DNA, 20 bp, Artificial Sequence
  Description of Artificial Sequence: Synthetic oligonucleotide
  Target: LAMA2; (-) strand; PAM type: NRG; PAM sequence: AAG
tcgaccaagactgaatgatg

SEQ ID NO: 58749 - DNA, 20 bp, Artificial Sequence
  Description of Artificial Sequence: Synthetic oligonucleotide
  Target: LAMA2; (-) strand; PAM type: NRG; PAM sequence: AAG
ctagacacatagaatcgacc

SEQ ID NO: 58750 - DNA, 20 bp, Artificial Sequence
  Description of Artificial Sequence: Synthetic oligonucleotide
  Target: LAMA2; (-) strand; PAM type: NRG; PAM sequence: TAG
gttgataaaggctagacaca

SEQ ID NO: 58751 - DNA, 20 bp, Artificial Sequence
  Description of Artificial Sequence: Synthetic oligonucleotide
  Target: LAMA2; (-) strand; PAM type: NRG; PAM sequence: TAG
tacaagaagttgataaaggc

SEQ ID NO: 58752 - DNA, 20 bp, Artificial Sequence
  Description of Artificial Sequence: Synthetic oligonucleotide
  Target: LAMA2; (-) strand; PAM type: NRG; PAM sequence: AGG
aacctacaagaagttgataa

SEQ ID NO: 58753 - DNA, 20 bp, Artificial Sequence
  Description of Artificial Sequence: Synthetic oligonucleotide
  Target: LAMA2; (-) strand; PAM type: NRG; PAM sequence: AAG
taacctacaagaagttgata

SEQ ID NO: 58754 - DNA, 20 bp, Artificial Sequence
  Description of Artificial Sequence: Synthetic oligonucleotide
  Target: LAMA2; (-) strand; PAM type: NRG; PAM sequence: AAG
taaatacaataacctacaag

SEQ ID NO: 58755 - DNA, 20 bp, Artificial Sequence
  Description of Artificial Sequence: Synthetic oligonucleotide
  Target: LAMA2; (-) strand; PAM type: NRG; PAM sequence: AAG
caataaatacaataacctac

SEQ ID NO: 58756 - DNA, 20 bp, Artificial Sequence
  Description of Artificial Sequence: Synthetic oligonucleotide
  Target: LAMA2; (-) strand; PAM type: NRG; PAM sequence: GAG
agaaataaaaaaggatcata

SEQ ID NO: 58757 - DNA, 20 bp, Artificial Sequence
  Description of Artificial Sequence: Synthetic oligonucleotide
  Target: LAMA2; (-) strand; PAM type: NRG; PAM sequence: TAG
acagaaataaaaaaggatca

SEQ ID NO: 58758 - DNA, 20 bp, Artificial Sequence
  Description of Artificial Sequence: Synthetic oligonucleotide
  Target: LAMA2; (-) strand; PAM type: NRG; PAM sequence: AGG
cattgcaacagaaataaaaa

SEQ ID NO: 58759 - DNA, 20 bp, Artificial Sequence
  Description of Artificial Sequence: Synthetic oligonucleotide
  Target: LAMA2; (-) strand; PAM type: NRG; PAM sequence: AAG
acattgcaacagaaataaaa

SEQ ID NO: 58760 - DNA, 20 bp, Artificial Sequence
  Description of Artificial Sequence: Synthetic oligonucleotide
  Target: LAMA2; (-) strand; PAM type: NRG; PAM sequence: CAG
ttaaagaggagacattgcaa

SEQ ID NO: 58761 - DNA, 20 bp, Artificial Sequence
  Description of Artificial Sequence: Synthetic oligonucleotide
  Target: LAMA2; (-) strand; PAM type: NRG; PAM sequence: GAG
taaaattataaattaaagag

SEQ ID NO: 58762 - DNA, 20 bp, Artificial Sequence
  Description of Artificial Sequence: Synthetic oligonucleotide
  Target: LAMA2; (-) strand; PAM type: NRG; PAM sequence: AGG
aataaaattataaattaaag

SEQ ID NO: 58763 - DNA, 20 bp, Artificial Sequence
  Description of Artificial Sequence: Synthetic oligonucleotide
  Target: LAMA2; (-) strand; PAM type: NRG; PAM sequence: GAG
aaataaaattataaattaaa

SEQ ID NO: 58764 - DNA, 20 bp, Artificial Sequence
  Description of Artificial Sequence: Synthetic oligonucleotide
  Target: LAMA2; (-) strand; PAM type: NRG; PAM sequence: AAG
ctaaataaaattataaatta

SEQ ID NO: 58765 - DNA, 20 bp, Artificial Sequence
  Description of Artificial Sequence: Synthetic oligonucleotide
  Target: LAMA2; (-) strand; PAM type: NRG; PAM sequence: AGG
aaactaagaaaaaaggaatg

SEQ ID NO: 58766 - DNA, 20 bp, Artificial Sequence
  Description of Artificial Sequence: Synthetic oligonucleotide
  Target: LAMA2; (-) strand; PAM type: NRG; PAM sequence: GAG
caaactaagaaaaaaggaat

SEQ ID NO: 58767 - DNA, 20 bp, Artificial Sequence
  Description of Artificial Sequence: Synthetic oligonucleotide
  Target: LAMA2; (-) strand; PAM type: NRG; PAM sequence: AGG
ttcagccaaactaagaaaaa

SEQ ID NO: 58768 - DNA, 20 bp, Artificial Sequence
  Description of Artificial Sequence: Synthetic oligonucleotide
  Target: LAMA2; (-) strand; PAM type: NRG; PAM sequence: AAG
cttcagccaaactaagaaaa

SEQ ID NO: 58769 - DNA, 20 bp, Artificial Sequence
  Description of Artificial Sequence: Synthetic oligonucleotide
  Target: LAMA2; (-) strand; PAM type: NRG; PAM sequence: AAG
gacaaaccttcagccaaact

SEQ ID NO: 58770 - DNA, 20 bp, Artificial Sequence
  Description of Artificial Sequence: Synthetic oligonucleotide
  Target: LAMA2; (-) strand; PAM type: NRG; PAM sequence: CAG
aaacaaaattgacaaacctt

SEQ ID NO: 58771 - DNA, 20 bp, Artificial Sequence
  Description of Artificial Sequence: Synthetic oligonucleotide
  Target: LAMA2; (-) strand; PAM type: NRG; PAM sequence: AAG
aagtaagaattgttttttta

SEQ ID NO: 58772 - DNA, 20 bp, Artificial Sequence
  Description of Artificial Sequence: Synthetic oligonucleotide
  Target: LAMA2; (-) strand; PAM type: NRG; PAM sequence: AAG
tagaaaagatcaatataagt

SEQ ID NO: 58773 - DNA, 20 bp, Artificial Sequence
  Description of Artificial Sequence: Synthetic oligonucleotide
  Target: LAMA2; (-) strand; PAM type: NRG; PAM sequence: AAG
agaatagaaaagatcaatat

SEQ ID NO: 58774 - DNA, 20 bp, Artificial Sequence
  Description of Artificial Sequence: Synthetic oligonucleotide
  Target: LAMA2; (-) strand; PAM type: NRG; PAM sequence: AAG
tgactagaaagagaatagaa

SEQ ID NO: 58775 - DNA, 20 bp, Artificial Sequence
  Description of Artificial Sequence: Synthetic oligonucleotide
  Target: LAMA2; (-) strand; PAM type: NRG; PAM sequence: TAG
aattgtgactagaaagagaa

SEQ ID NO: 58776 - DNA, 20 bp, Artificial Sequence
  Description of Artificial Sequence: Synthetic oligonucleotide
  Target: LAMA2; (-) strand; PAM type: NRG; PAM sequence: GAG
aatgaaattgtgactagaaa

SEQ ID NO: 58777 - DNA, 20 bp, Artificial Sequence
  Description of Artificial Sequence: Synthetic oligonucleotide
  Target: LAMA2; (-) strand; PAM type: NRG; PAM sequence: AAG
taaatgaaattgtgactaga

SEQ ID NO: 58778 - DNA, 20 bp, Artificial Sequence
  Description of Artificial Sequence: Synthetic oligonucleotide
  Target: LAMA2; (-) strand; PAM type: NRG; PAM sequence: TAG
taaataaatgaaattgtgac

SEQ ID NO: 58779 - DNA, 20 bp, Artificial Sequence
  Description of Artificial Sequence: Synthetic oligonucleotide
  Target: LAMA2; (-) strand; PAM type: NRG; PAM sequence: GAG
gaagggaataatacatatta

SEQ ID NO: 58780 - DNA, 20 bp, Artificial Sequence
  Description of Artificial Sequence: Synthetic oligonucleotide
  Target: LAMA2; (-) strand; PAM type: NRG; PAM sequence: TAG
gggaagggaataatacatat

SEQ ID NO: 58781 - DNA, 20 bp, Artificial Sequence
  Description of Artificial Sequence: Synthetic oligonucleotide
  Target: LAMA2; (-) strand; PAM type: NRG; PAM sequence: GGG
gacaaagatagaaaagggaa

SEQ ID NO: 58782 - DNA, 20 bp, Artificial Sequence
  Description of Artificial Sequence: Synthetic oligonucleotide
  Target: LAMA2; (-) strand; PAM type: NRG; PAM sequence: AGG
agacaaagatagaaaaggga

SEQ ID NO: 58783 - DNA, 20 bp, Artificial Sequence
  Description of Artificial Sequence: Synthetic oligonucleotide
  Target: LAMA2; (-) strand; PAM type: NRG; PAM sequence: AAG
aagacaaagatagaaaaggg

SEQ ID NO: 58784 - DNA, 20 bp, Artificial Sequence
  Description of Artificial Sequence: Synthetic oligonucleotide
  Target: LAMA2; (-) strand; PAM type: NRG; PAM sequence: GGG
actaagacaaagatagaaaa

SEQ ID NO: 58785 - DNA, 20 bp, Artificial Sequence
  Description of Artificial Sequence: Synthetic oligonucleotide
  Target: LAMA2; (-) strand; PAM type: NRG; PAM sequence: AGG
aactaagacaaagatagaaa

SEQ ID NO: 58786 - DNA, 20 bp, Artificial Sequence
  Description of Artificial Sequence: Synthetic oligonucleotide
  Target: LAMA2; (-) strand; PAM type: NRG; PAM sequence: AAG
aaactaagacaaagatagaa

SEQ ID NO: 58787 - DNA, 20 bp, Artificial Sequence
  Description of Artificial Sequence: Synthetic oligonucleotide
  Target: LAMA2; (-) strand; PAM type: NRG; PAM sequence: TAG
aaaaaaaactaagacaaaga

SEQ ID NO: 58788 - DNA, 20 bp, Artificial Sequence
  Description of Artificial Sequence: Synthetic oligonucleotide
  Target: LAMA2; (-) strand; PAM type: NRG; PAM sequence: AAG
ggaaaaaaaaaactaagaca

SEQ ID NO: 58789 - DNA, 20 bp, Artificial Sequence
  Description of Artificial Sequence: Synthetic oligonucleotide
  Target: LAMA2; (-) strand; PAM type: NRG; PAM sequence: AAG
gaaataggaaaaaaaaaact

SEQ ID NO: 58790 - DNA, 20 bp, Artificial Sequence
  Description of Artificial Sequence: Synthetic oligonucleotide
  Target: LAMA2; (-) strand; PAM type: NRG; PAM sequence: AGG
actttatacctcaaggaaat

SEQ ID NO: 58791 - DNA, 20 bp, Artificial Sequence
  Description of Artificial Sequence: Synthetic oligonucleotide
  Target: LAMA2; (-) strand; PAM type: NRG; PAM sequence: TAG
aactttatacctcaaggaaa

SEQ ID NO: 58792 - DNA, 20 bp, Artificial Sequence
  Description of Artificial Sequence: Synthetic oligonucleotide
  Target: LAMA2; (-) strand; PAM type: NRG; PAM sequence: AGG
caacttaactttatacctca

SEQ ID NO: 58793 - DNA, 20 bp, Artificial Sequence
  Description of Artificial Sequence: Synthetic oligonucleotide
  Target: LAMA2; (-) strand; PAM type: NRG; PAM sequence: AAG
acaacttaactttatacctc

SEQ ID NO: 58794 - DNA, 20 bp, Artificial Sequence
  Description of Artificial Sequence: Synthetic oligonucleotide
  Target: LAMA2; (-) strand; PAM type: NRG; PAM sequence: AAG
aaatgcctatattaaaaaaa

SEQ ID NO: 58795 - DNA, 20 bp, Artificial Sequence
  Description of Artificial Sequence: Synthetic oligonucleotide
  Target: LAMA2; (-) strand; PAM type: NRG; PAM sequence: AAG
caaaagacgttctaagagag

SEQ ID NO: 58796 - DNA, 20 bp, Artificial Sequence
  Description of Artificial Sequence: Synthetic oligonucleotide
  Target: LAMA2; (-) strand; PAM type: NRG; PAM sequence: GAG
cagcaaaagacgttctaaga

SEQ ID NO: 58797 - DNA, 20 bp, Artificial Sequence
  Description of Artificial Sequence: Synthetic oligonucleotide
  Target: LAMA2; (-) strand; PAM type: NRG; PAM sequence: GAG
tgcagcaaaagacgttctaa

SEQ ID NO: 58798 - DNA, 20 bp, Artificial Sequence
  Description of Artificial Sequence: Synthetic oligonucleotide
  Target: LAMA2; (-) strand; PAM type: NRG; PAM sequence: AAG
gatgcagcaaaagacgttct

SEQ ID NO: 58799 - DNA, 20 bp, Artificial Sequence
  Description of Artificial Sequence: Synthetic oligonucleotide
  Target: LAMA2; (-) strand; PAM type: NRG; PAM sequence: AAG
aaacttctgggatgcagcaa

SEQ ID NO: 58800 - DNA, 20 bp, Artificial Sequence
  Description of Artificial Sequence: Synthetic oligonucleotide
  Target: LAMA2; (-) strand; PAM type: NRG; PAM sequence: CAG
acaccaaaacttctgggatg

SEQ ID NO: 58801 - DNA, 20 bp, Artificial Sequence
  Description of Artificial Sequence: Synthetic oligonucleotide
  Target: LAMA2; (-) strand; PAM type: NRG; PAM sequence: GGG
tacaacacaccaaaacttct

SEQ ID NO: 58802 - DNA, 20 bp, Artificial Sequence
  Description of Artificial Sequence: Synthetic oligonucleotide
  Target: LAMA2; (-) strand; PAM type: NRG; PAM sequence: TGG
atacaacacaccaaaacttc

SEQ ID NO: 58803 - DNA, 20 bp, Artificial Sequence
  Description of Artificial Sequence: Synthetic oligonucleotide
  Target: LAMA2; (-) strand; PAM type: NRG; PAM sequence: GAG
agagaaatcaaaagtatctt

SEQ ID NO: 58804 - DNA, 20 bp, Artificial Sequence
  Description of Artificial Sequence: Synthetic oligonucleotide
  Target: LAMA2; (-) strand; PAM type: NRG; PAM sequence: AAG
gaaatccaaagagaaatcaa

SEQ ID NO: 58805 - DNA, 20 bp, Artificial Sequence
  Description of Artificial Sequence: Synthetic oligonucleotide
  Target: LAMA2; (-) strand; PAM type: NRG; PAM sequence: GAG
ggtcaaagaagaaatccaaa

SEQ ID NO: 58806 - DNA, 20 bp, Artificial Sequence
  Description of Artificial Sequence: Synthetic oligonucleotide
  Target: LAMA2; (-) strand; PAM type: NRG; PAM sequence: AAG
tgggtcaaagaagaaatcca

SEQ ID NO: 58807 - DNA, 20 bp, Artificial Sequence
  Description of Artificial Sequence: Synthetic oligonucleotide
  Target: LAMA2; (-) strand; PAM type: NRG; PAM sequence: AAG
aaatgaccaatgggtcaaag

SEQ ID NO: 58808 - DNA, 20 bp, Artificial Sequence
  Description of Artificial Sequence: Synthetic oligonucleotide
  Target: LAMA2; (-) strand; PAM type: NRG; PAM sequence: AAG
ccaaaatgaccaatgggtca

SEQ ID NO: 58809 - DNA, 20 bp, Artificial Sequence
  Description of Artificial Sequence: Synthetic oligonucleotide
  Target: LAMA2; (-) strand; PAM type: NRG; PAM sequence: GGG
cacactccaaaatgaccaat

SEQ ID NO: 58810 - DNA, 20 bp, Artificial Sequence
  Description of Artificial Sequence: Synthetic oligonucleotide
  Target: LAMA2; (-) strand; PAM type: NRG; PAM sequence: TGG
acacactccaaaatgaccaa

SEQ ID NO: 58811 - DNA, 20 bp, Artificial Sequence
  Description of Artificial Sequence: Synthetic oligonucleotide
  Target: LAMA2; (-) strand; PAM type: NRG; PAM sequence: AAG
agcacagatatatggaaagt

SEQ ID NO: 58812 - DNA, 20 bp, Artificial Sequence
  Description of Artificial Sequence: Synthetic oligonucleotide
  Target: LAMA2; (-) strand; PAM type: NRG; PAM sequence: AAG
tcccagcacagatatatgga

SEQ ID NO: 58813 - DNA, 20 bp, Artificial Sequence
  Description of Artificial Sequence: Synthetic oligonucleotide
  Target: LAMA2; (-) strand; PAM type: NRG; PAM sequence: TGG
ttaatcccagcacagatata

SEQ ID NO: 58814 - DNA, 20 bp, Artificial Sequence
  Description of Artificial Sequence: Synthetic oligonucleotide
  Target: LAMA2; (-) strand; PAM type: NRG; PAM sequence: CAG
cagaaatattaatcccagca

SEQ ID NO: 58815 - DNA, 20 bp, Artificial Sequence
  Description of Artificial Sequence: Synthetic oligonucleotide
  Target: LAMA2; (-) strand; PAM type: NRG; PAM sequence: CAG
aaagtcagaaatattaatcc

SEQ ID NO: 58816 - DNA, 20 bp, Artificial Sequence
  Description of Artificial Sequence: Synthetic oligonucleotide
  Target: LAMA2; (-) strand; PAM type: NRG; PAM sequence: CAG
aggcagcctggctaaaaagt

SEQ ID NO: 58817 - DNA, 20 bp, Artificial Sequence
  Description of Artificial Sequence: Synthetic oligonucleotide
  Target: LAMA2; (-) strand; PAM type: NRG; PAM sequence: AAG
atacaggcagcctggctaaa

SEQ ID NO: 58818 - DNA, 20 bp, Artificial Sequence
  Description of Artificial Sequence: Synthetic oligonucleotide
  Target: LAMA2; (-) strand; PAM type: NRG; PAM sequence: TGG
taattagaatacaggcagcc

SEQ ID NO: 58819 - DNA, 20 bp, Artificial Sequence
  Description of Artificial Sequence: Synthetic oligonucleotide
  Target: LAMA2; (-) strand; PAM type: NRG; PAM sequence: CAG
agttgtaattagaatacagg

SEQ ID NO: 58820 - DNA, 20 bp, Artificial Sequence
  Description of Artificial Sequence: Synthetic oligonucleotide
  Target: LAMA2; (-) strand; PAM type: NRG; PAM sequence: AGG
tgaagttgtaattagaatac

SEQ ID NO: 58821 - DNA, 20 bp, Artificial Sequence
  Description of Artificial Sequence: Synthetic oligonucleotide
  Target: LAMA2; (-) strand; PAM type: NRG; PAM sequence: CAG
gtgaagttgtaattagaata

SEQ ID NO: 58822 - DNA, 20 bp, Artificial Sequence
  Description of Artificial Sequence: Synthetic oligonucleotide
  Target: LAMA2; (-) strand; PAM type: NRG; PAM sequence: TAG
gtaagtggtgaagttgtaat

SEQ ID NO: 58823 - DNA, 20 bp, Artificial Sequence
  Description of Artificial Sequence: Synthetic oligonucleotide
  Target: LAMA2; (-) strand; PAM type: NRG; PAM sequence: AAG
taaataccttgtaagtggtg

SEQ ID NO: 58824 - DNA, 20 bp, Artificial Sequence
  Description of Artificial Sequence: Synthetic oligonucleotide
  Target: LAMA2; (-) strand; PAM type: NRG; PAM sequence: TGG
aaagctaaataccttgtaag

SEQ ID NO: 58825 - DNA, 20 bp, Artificial Sequence
  Description of Artificial Sequence: Synthetic oligonucleotide
  Target: LAMA2; (-) strand; PAM type: NRG; PAM sequence: AAG
cctaaagctaaataccttgt

SEQ ID NO: 58826 - DNA, 20 bp, Artificial Sequence
  Description of Artificial Sequence: Synthetic oligonucleotide
  Target: LAMA2; (-) strand; PAM type: NRG; PAM sequence: AAG
gagtttaaatggcttaccta

SEQ ID NO: 58827 - DNA, 20 bp, Artificial Sequence
  Description of Artificial Sequence: Synthetic oligonucleotide
  Target: LAMA2; (-) strand; PAM type: NRG; PAM sequence: TGG
tgaggcactgagagtttaaa

SEQ ID NO: 58828 - DNA, 20 bp, Artificial Sequence
  Description of Artificial Sequence: Synthetic oligonucleotide
  Target: LAMA2; (-) strand; PAM type: NRG; PAM sequence: GAG
taaggggactgaggcactga

SEQ ID NO: 58829 - DNA, 20 bp, Artificial Sequence
  Description of Artificial Sequence: Synthetic oligonucleotide
  Target: LAMA2; (-) strand; PAM type: NRG; PAM sequence: GAG
gataaggggactgaggcact

SEQ ID NO: 58830 - DNA, 20 bp, Artificial Sequence
  Description of Artificial Sequence: Synthetic oligonucleotide
  Target: LAMA2; (-) strand; PAM type: NRG; PAM sequence: AGG
ttttacagataaggggactg

SEQ ID NO: 58831 - DNA, 20 bp, Artificial Sequence
  Description of Artificial Sequence: Synthetic oligonucleotide
  Target: LAMA2; (-) strand; PAM type: NRG; PAM sequence: GAG
tttttacagataaggggact

SEQ ID NO: 58832 - DNA, 20 bp, Artificial Sequence
  Description of Artificial Sequence: Synthetic oligonucleotide
  Target: LAMA2; (-) strand; PAM type: NRG; PAM sequence: GGG
tactcatttttacagataag

SEQ ID NO: 58833 - DNA, 20 bp, Artificial Sequence
  Description of Artificial Sequence: Synthetic oligonucleotide
  Target: LAMA2; (-) strand; PAM type: NRG; PAM sequence: GGG
ttactcatttttacagataa

SEQ ID NO: 58834 - DNA, 20 bp, Artificial Sequence
  Description of Artificial Sequence: Synthetic oligonucleotide
  Target: LAMA2; (-) strand; PAM type: NRG; PAM sequence: AGG
attactcatttttacagata

SEQ ID NO: 58835 - DNA, 20 bp, Artificial Sequence
  Description of Artificial Sequence: Synthetic oligonucleotide
  Target: LAMA2; (-) strand; PAM type: NRG; PAM sequence: AAG
tattactcatttttacagat

SEQ ID NO: 58836 - DNA, 20 bp, Artificial Sequence
  Description of Artificial Sequence: Synthetic oligonucleotide
  Target: LAMA2; (-) strand; PAM type: NRG; PAM sequence: CAG
cactgtattactcattttta

SEQ ID NO: 58837 - DNA, 20 bp, Artificial Sequence
  Description of Artificial Sequence: Synthetic oligonucleotide
  Target: LAMA2; (-) strand; PAM type: NRG; PAM sequence: TAG
ttcacaatcagtcagggagg

SEQ ID NO: 58838 - DNA, 20 bp, Artificial Sequence
  Description of Artificial Sequence: Synthetic oligonucleotide
  Target: LAMA2; (-) strand; PAM type: NRG; PAM sequence: AGG
atcttcacaatcagtcaggg

SEQ ID NO: 58839 - DNA, 20 bp, Artificial Sequence
  Description of Artificial Sequence: Synthetic oligonucleotide
  Target: LAMA2; (-) strand; PAM type: NRG; PAM sequence: GAG
catcttcacaatcagtcagg

SEQ ID NO: 58840 - DNA, 20 bp, Artificial Sequence
  Description of Artificial Sequence: Synthetic oligonucleotide
  Target: LAMA2; (-) strand; PAM type: NRG; PAM sequence: GGG
ttcatcttcacaatcagtca

SEQ ID NO: 58841 - DNA, 20 bp, Artificial Sequence
  Description of Artificial Sequence: Synthetic oligonucleotide
  Target: LAMA2; (-) strand; PAM type: NRG; PAM sequence: AGG
tttcatcttcacaatcagtc

SEQ ID NO: 58842 - DNA, 20 bp, Artificial Sequence
  Description of Artificial Sequence: Synthetic oligonucleotide
  Target: LAMA2; (-) strand; PAM type: NRG; PAM sequence: CAG
atttcatcttcacaatcagt

SEQ ID NO: 58843 - DNA, 20 bp, Artificial Sequence
  Description of Artificial Sequence: Synthetic oligonucleotide
  Target: LAMA2; (-) strand; PAM type: NRG; PAM sequence: CAG
tttcatttcatcttcacaat

SEQ ID NO: 58844 - DNA, 20 bp, Artificial Sequence
  Description of Artificial Sequence: Synthetic oligonucleotide
  Target: LAMA2; (-) strand; PAM type: NRG; PAM sequence: TAG
ctaaggacctcataaaacat

SEQ ID NO: 58845 - DNA, 20 bp, Artificial Sequence
  Description of Artificial Sequence: Synthetic oligonucleotide
  Target: LAMA2; (-) strand; PAM type: NRG; PAM sequence: AGG
aaacagtgtctagcactcta

SEQ ID NO: 58846 - DNA, 20 bp, Artificial Sequence
  Description of Artificial Sequence: Synthetic oligonucleotide
  Target: LAMA2; (-) strand; PAM type: NRG; PAM sequence: AAG
caaacagtgtctagcactct

SEQ ID NO: 58847 - DNA, 20 bp, Artificial Sequence
  Description of Artificial Sequence: Synthetic oligonucleotide
  Target: LAMA2; (-) strand; PAM type: NRG; PAM sequence: TAG
taattcatgcaaacagtgtc

SEQ ID NO: 58848 - DNA, 20 bp, Artificial Sequence
  Description of Artificial Sequence: Synthetic oligonucleotide
  Target: LAMA2; (-) strand; PAM type: NRG; PAM sequence: CAG
tataaaataattcatgcaaa

SEQ ID NO: 58849 - DNA, 20 bp, Artificial Sequence
  Description of Artificial Sequence: Synthetic oligonucleotide
  Target: LAMA2; (-) strand; PAM type: NRG; PAM sequence: GAG
cttttttataaggttgtggt

SEQ ID NO: 58850 - DNA, 20 bp, Artificial Sequence
  Description of Artificial Sequence: Synthetic oligonucleotide
  Target: LAMA2; (-) strand; PAM type: NRG; PAM sequence: TGG
aaaacttttttataaggttg

SEQ ID NO: 58851 - DNA, 20 bp, Artificial Sequence
  Description of Artificial Sequence: Synthetic oligonucleotide
  Target: LAMA2; (-) strand; PAM type: NRG; PAM sequence: AGG
acaataaaaacttttttata

SEQ ID NO: 58852 - DNA, 20 bp, Artificial Sequence
  Description of Artificial Sequence: Synthetic oligonucleotide
  Target: LAMA2; (-) strand; PAM type: NRG; PAM sequence: AAG
gacaataaaaacttttttat

SEQ ID NO: 58853 - DNA, 20 bp, Artificial Sequence
  Description of Artificial Sequence: Synthetic oligonucleotide
  Target: LAMA2; (-) strand; PAM type: NRG; PAM sequence: CGG
aactacgccgtctaaaacat

SEQ ID NO: 58854 - DNA, 20 bp, Artificial Sequence
  Description of Artificial Sequence: Synthetic oligonucleotide
  Target: LAMA2; (-) strand; PAM type: NRG; PAM sequence: TGG
gcttctctatatacaactgg

SEQ ID NO: 58855 - DNA, 20 bp, Artificial Sequence
  Description of Artificial Sequence: Synthetic oligonucleotide
  Target: LAMA2; (-) strand; PAM type: NRG; PAM sequence: TGG
gcagcttctctatatacaac

SEQ ID NO: 58856 - DNA, 20 bp, Artificial Sequence
  Description of Artificial Sequence: Synthetic oligonucleotide
  Target: LAMA2; (-) strand; PAM type: NRG; PAM sequence: CAG
aaaatcttatgtttgcctag

SEQ ID NO: 58857 - DNA, 20 bp, Artificial Sequence
  Description of Artificial Sequence: Synthetic oligonucleotide
  Target: LAMA2; (-) strand; PAM type: NRG; PAM sequence: TAG
aaaaaaatcttatgtttgcc

SEQ ID NO: 58858 - DNA, 20 bp, Artificial Sequence
  Description of Artificial Sequence: Synthetic oligonucleotide
  Target: LAMA2; (-) strand; PAM type: NRG; PAM sequence: TAG
taaagttcaggtccttgtgc

SEQ ID NO: 58859 - DNA, 20 bp, Artificial Sequence
  Description of Artificial Sequence: Synthetic oligonucleotide
  Target: LAMA2; (-) strand; PAM type: NRG; PAM sequence: AGG
agacagatgtggtaaagttc

SEQ ID NO: 58860 - DNA, 20 bp, Artificial Sequence
  Description of Artificial Sequence: Synthetic oligonucleotide
  Target: LAMA2; (-) strand; PAM type: NRG; PAM sequence: CAG
gagacagatgtggtaaagtt

SEQ ID NO: 58861 - DNA, 20 bp, Artificial Sequence
  Description of Artificial Sequence: Synthetic oligonucleotide
  Target: LAMA2; (-) strand; PAM type: NRG; PAM sequence: AAG
caggggagacagatgtggta

SEQ ID NO: 58862 - DNA, 20 bp, Artificial Sequence
  Description of Artificial Sequence: Synthetic oligonucleotide
  Target: LAMA2; (-) strand; PAM type: NRG; PAM sequence: TGG
gtcaacaggggagacagatg

SEQ ID NO: 58863 - DNA, 20 bp, Artificial Sequence
  Description of Artificial Sequence: Synthetic oligonucleotide
  Target: LAMA2; (-) strand; PAM type: NRG; PAM sequence: CAG
ttgatagtcaacaggggaga

SEQ ID NO: 58864 - DNA, 20 bp, Artificial Sequence
  Description of Artificial Sequence: Synthetic oligonucleotide
  Target: LAMA2; (-) strand; PAM type: NRG; PAM sequence: GAG
tgaattgatagtcaacaggg

SEQ ID NO: 58865 - DNA, 20 bp, Artificial Sequence
  Description of Artificial Sequence: Synthetic oligonucleotide
  Target: LAMA2; (-) strand; PAM type: NRG; PAM sequence: GGG
attgaattgatagtcaacag

SEQ ID NO: 58866 - DNA, 20 bp, Artificial Sequence
  Description of Artificial Sequence: Synthetic oligonucleotide
  Target: LAMA2; (-) strand; PAM type: NRG; PAM sequence: GGG
cattgaattgatagtcaaca

SEQ ID NO: 58867 - DNA, 20 bp, Artificial Sequence
  Description of Artificial Sequence: Synthetic oligonucleotide
  Target: LAMA2; (-) strand; PAM type: NRG; PAM sequence: AGG
gcattgaattgatagtcaac

SEQ ID NO: 58868 - DNA, 20 bp, Artificial Sequence
  Description of Artificial Sequence: Synthetic oligonucleotide
  Target: LAMA2; (-) strand; PAM type: NRG; PAM sequence: CAG
ggcattgaattgatagtcaa

SEQ ID NO: 58869 - DNA, 20 bp, Artificial Sequence
  Description of Artificial Sequence: Synthetic oligonucleotide
  Target: LAMA2; (-) strand; PAM type: NRG; PAM sequence: TAG
ggacctaggcattgaattga

SEQ ID NO: 58870 - DNA, 20 bp, Artificial Sequence
  Description of Artificial Sequence: Synthetic oligonucleotide
  Target: LAMA2; (-) strand; PAM type: NRG; PAM sequence: AGG
acccttccctcatgggacct

SEQ ID NO: 58871 - DNA, 20 bp, Artificial Sequence
  Description of Artificial Sequence: Synthetic oligonucleotide
  Target: LAMA2; (-) strand; PAM type: NRG; PAM sequence: TAG
gacccttccctcatgggacc

SEQ ID NO: 58872 - DNA, 20 bp, Artificial Sequence
  Description of Artificial Sequence: Synthetic oligonucleotide
  Target: LAMA2; (-) strand; PAM type: NRG; PAM sequence: GGG
tgctttgacccttccctcat

SEQ ID NO: 58873 - DNA, 20 bp, Artificial Sequence
  Description of Artificial Sequence: Synthetic oligonucleotide
  Target: LAMA2; (-) strand; PAM type: NRG; PAM sequence: TGG
atgctttgacccttccctca

SEQ ID NO: 58874 - DNA, 20 bp, Artificial Sequence
  Description of Artificial Sequence: Synthetic oligonucleotide
  Target: LAMA2; (-) strand; PAM type: NRG; PAM sequence: AAG
tccgaaggacatcctctgag

SEQ ID NO: 58875 - DNA, 20 bp, Artificial Sequence
  Description of Artificial Sequence: Synthetic oligonucleotide
  Target: LAMA2; (-) strand; PAM type: NRG; PAM sequence: GAG
ttctccgaaggacatcctct

SEQ ID NO: 58876 - DNA, 20 bp, Artificial Sequence
  Description of Artificial Sequence: Synthetic oligonucleotide
  Target: LAMA2; (-) strand; PAM type: NRG; PAM sequence: AGG
gagaaagaatacttctccga

SEQ ID NO: 58877 - DNA, 20 bp, Artificial Sequence
  Description of Artificial Sequence: Synthetic oligonucleotide
  Target: LAMA2; (-) strand; PAM type: NRG; PAM sequence: AAG
agagaaagaatacttctccg

SEQ ID NO: 58878 - DNA, 20 bp, Artificial Sequence
  Description of Artificial Sequence: Synthetic oligonucleotide
  Target: LAMA2; (-) strand; PAM type: NRG; PAM sequence: AAG
aacaaaacataagtaagaga

SEQ ID NO: 58879 - DNA, 20 bp, Artificial Sequence
  Description of Artificial Sequence: Synthetic oligonucleotide
  Target: LAMA2; (-) strand; PAM type: NRG; PAM sequence: GAG
aattaacaaaacataagtaa

SEQ ID NO: 58880 - DNA, 20 bp, Artificial Sequence
  Description of Artificial Sequence: Synthetic oligonucleotide
  Target: LAMA2; (-) strand; PAM type: NRG; PAM sequence: AAG
aaaattaacaaaacataagt

SEQ ID NO: 58881 - DNA, 20 bp, Artificial Sequence
  Description of Artificial Sequence: Synthetic oligonucleotide
  Target: LAMA2; (-) strand; PAM type: NRG; PAM sequence: AAG
agcaaaaattaacaaaacat

SEQ ID NO: 58882 - DNA, 20 bp, Artificial Sequence
  Description of Artificial Sequence: Synthetic oligonucleotide
  Target: LAMA2; (-) strand; PAM type: NRG; PAM sequence: AAG
tgatgtctacaatcaaaacc

SEQ ID NO: 58883 - DNA, 20 bp, Artificial Sequence
  Description of Artificial Sequence: Synthetic oligonucleotide
  Target: LAMA2; (-) strand; PAM type: NRG; PAM sequence: AGG
tcttaaatgttggtactccc

SEQ ID NO: 58884 - DNA, 20 bp, Artificial Sequence
  Description of Artificial Sequence: Synthetic oligonucleotide
  Target: LAMA2; (-) strand; PAM type: NRG; PAM sequence: CAG
ctcttaaatgttggtactcc

SEQ ID NO: 58885 - DNA, 20 bp, Artificial Sequence
  Description of Artificial Sequence: Synthetic oligonucleotide
  Target: LAMA2; (-) strand; PAM type: NRG; PAM sequence: TGG
ttttggtcactcttaaatgt

SEQ ID NO: 58886 - DNA, 20 bp, Artificial Sequence
  Description of Artificial Sequence: Synthetic oligonucleotide
  Target: LAMA2; (-) strand; PAM type: NRG; PAM sequence: TGG
tttgctggcttccattcttt

SEQ ID NO: 58887 - DNA, 20 bp, Artificial Sequence
  Description of Artificial Sequence: Synthetic oligonucleotide
  Target: LAMA2; (-) strand; PAM type: NRG; PAM sequence: TGG
tagaattctatcccttttgc

SEQ ID NO: 58888 - DNA, 20 bp, Artificial Sequence
  Description of Artificial Sequence: Synthetic oligonucleotide
  Target: LAMA2; (-) strand; PAM type: NRG; PAM sequence: TAG
aggtttgggagtcaagatga

SEQ ID NO: 58889 - DNA, 20 bp, Artificial Sequence
  Description of Artificial Sequence: Synthetic oligonucleotide
  Target: LAMA2; (-) strand; PAM type: NRG; PAM sequence: AAG
atggagtaggtttgggagtc

SEQ ID NO: 58890 - DNA, 20 bp, Artificial Sequence
  Description of Artificial Sequence: Synthetic oligonucleotide
  Target: LAMA2; (-) strand; PAM type: NRG; PAM sequence: GAG
tcaacatggagtaggtttgg

SEQ ID NO: 58891 - DNA, 20 bp, Artificial Sequence
  Description of Artificial Sequence: Synthetic oligonucleotide
  Target: LAMA2; (-) strand; PAM type: NRG; PAM sequence: GGG
tatcaacatggagtaggttt

SEQ ID NO: 58892 - DNA, 20 bp, Artificial Sequence
  Description of Artificial Sequence: Synthetic oligonucleotide
  Target: LAMA2; (-) strand; PAM type: NRG; PAM sequence: TGG
ctatcaacatggagtaggtt

SEQ ID NO: 58893 - DNA, 20 bp, Artificial Sequence
  Description of Artificial Sequence: Synthetic oligonucleotide
  Target: LAMA2; (-) strand; PAM type: NRG; PAM sequence: AGG
taagactatcaacatggagt

SEQ ID NO: 58894 - DNA, 20 bp, Artificial Sequence
  Description of Artificial Sequence: Synthetic oligonucleotide
  Target: LAMA2; (-) strand; PAM type: NRG; PAM sequence: TAG
ttaagactatcaacatggag

SEQ ID NO: 58895 - DNA, 20 bp, Artificial Sequence
  Description of Artificial Sequence: Synthetic oligonucleotide
  Target: LAMA2; (-) strand; PAM type: NRG; PAM sequence: GAG
agattaagactatcaacatg

SEQ ID NO: 58896 - DNA, 20 bp, Artificial Sequence
  Description of Artificial Sequence: Synthetic oligonucleotide
  Target: LAMA2; (-) strand; PAM type: NRG; PAM sequence: TGG
taagattaagactatcaaca

SEQ ID NO: 58897 - DNA, 20 bp, Artificial Sequence
  Description of Artificial Sequence: Synthetic oligonucleotide
  Target: LAMA2; (-) strand; PAM type: NRG; PAM sequence: AAG
agggatcattaactaagatt

SEQ ID NO: 58898 - DNA, 20 bp, Artificial Sequence
  Description of Artificial Sequence: Synthetic oligonucleotide
  Target: LAMA2; (-) strand; PAM type: NRG; PAM sequence: AAG
agcagcagggatcattaact

SEQ ID NO: 58899 - DNA, 20 bp, Artificial Sequence
  Description of Artificial Sequence: Synthetic oligonucleotide
  Target: LAMA2; (-) strand; PAM type: NRG; PAM sequence: GGG
ggtttttggatcaagcagca

SEQ ID NO: 58900 - DNA, 20 bp, Artificial Sequence
  Description of Artificial Sequence: Synthetic oligonucleotide
  Target: LAMA2; (-) strand; PAM type: NRG; PAM sequence: AGG
aggtttttggatcaagcagc

SEQ ID NO: 58901 - DNA, 20 bp, Artificial Sequence
  Description of Artificial Sequence: Synthetic oligonucleotide
  Target: LAMA2; (-) strand; PAM type: NRG; PAM sequence: CAG
taggtttttggatcaagcag

SEQ ID NO: 58902 - DNA, 20 bp, Artificial Sequence
  Description of Artificial Sequence: Synthetic oligonucleotide
  Target: LAMA2; (-) strand; PAM type: NRG; PAM sequence: CAG
tgttaggtttttggatcaag

SEQ ID NO: 58903 - DNA, 20 bp, Artificial Sequence
  Description of Artificial Sequence: Synthetic oligonucleotide
  Target: LAMA2; (-) strand; PAM type: NRG; PAM sequence: AAG
cattgttaggtttttggatc

SEQ ID NO: 58904 - DNA, 20 bp, Artificial Sequence
  Description of Artificial Sequence: Synthetic oligonucleotide
  Target: LAMA2; (-) strand; PAM type: NRG; PAM sequence: TGG
tgaagtcattgttaggtttt

SEQ ID NO: 58905 - DNA, 20 bp, Artificial Sequence
  Description of Artificial Sequence: Synthetic oligonucleotide
  Target: LAMA2; (-) strand; PAM type: NRG; PAM sequence: AGG
aaatgagtgaagtcattgtt

SEQ ID NO: 58906 - DNA, 20 bp, Artificial Sequence
  Description of Artificial Sequence: Synthetic oligonucleotide
  Target: LAMA2; (-) strand; PAM type: NRG; PAM sequence: TAG
gaaatgagtgaagtcattgt

SEQ ID NO: 58907 - DNA, 20 bp, Artificial Sequence
  Description of Artificial Sequence: Synthetic oligonucleotide
  Target: LAMA2; (-) strand; PAM type: NRG; PAM sequence: AAG
cagaaggagggaaatgagtg

SEQ ID NO: 58908 - DNA, 20 bp, Artificial Sequence
  Description of Artificial Sequence: Synthetic oligonucleotide
  Target: LAMA2; (-) strand; PAM type: NRG; PAM sequence: GAG
cagtgcagaaggagggaaat

SEQ ID NO: 58909 - DNA, 20 bp, Artificial Sequence
  Description of Artificial Sequence: Synthetic oligonucleotide
  Target: LAMA2; (-) strand; PAM type: NRG; PAM sequence: GGG
gtaacaacagtgcagaagga

SEQ ID NO: 58910 - DNA, 20 bp, Artificial Sequence
  Description of Artificial Sequence: Synthetic oligonucleotide
  Target: LAMA2; (-) strand; PAM type: NRG; PAM sequence: AGG
ggtaacaacagtgcagaagg

SEQ ID NO: 58911 - DNA, 20 bp, Artificial Sequence
  Description of Artificial Sequence: Synthetic oligonucleotide
  Target: LAMA2; (-) strand; PAM type: NRG; PAM sequence: GAG
aggtaacaacagtgcagaag

SEQ ID NO: 58912 - DNA, 20 bp, Artificial Sequence
  Description of Artificial Sequence: Synthetic oligonucleotide
  Target: LAMA2; (-) strand; PAM type: NRG; PAM sequence: AGG
agaggtaacaacagtgcaga

SEQ ID NO: 58913 - DNA, 20 bp, Artificial Sequence
  Description of Artificial Sequence: Synthetic oligonucleotide
  Target: LAMA2; (-) strand; PAM type: NRG; PAM sequence: AAG
aagaggtaacaacagtgcag

SEQ ID NO: 58914 - DNA, 20 bp, Artificial Sequence
  Description of Artificial Sequence: Synthetic oligonucleotide
  Target: LAMA2; (-) strand; PAM type: NRG; PAM sequence: CAG
ctgaagaggtaacaacagtg

SEQ ID NO: 58915 - DNA, 20 bp, Artificial Sequence
  Description of Artificial Sequence: Synthetic oligonucleotide
  Target: LAMA2; (-) strand; PAM type: NRG; PAM sequence: CAG
tgtccctgaagaggtaacaa

SEQ ID NO: 58916 - DNA, 20 bp, Artificial Sequence
  Description of Artificial Sequence: Synthetic oligonucleotide
  Target: LAMA2; (-) strand; PAM type: NRG; PAM sequence: AGG
ttgaaattttgtccctgaag

SEQ ID NO: 58917 - DNA, 20 bp, Artificial Sequence
  Description of Artificial Sequence: Synthetic oligonucleotide
  Target: LAMA2; (-) strand; PAM type: NRG; PAM sequence: GAG
attgaaattttgtccctgaa

SEQ ID NO: 58918 - DNA, 20 bp, Artificial Sequence
  Description of Artificial Sequence: Synthetic oligonucleotide
  Target: LAMA2; (-) strand; PAM type: NRG; PAM sequence: AAG
gtattgaaattttgtccctg

SEQ ID NO: 58919 - DNA, 20 bp, Artificial Sequence
  Description of Artificial Sequence: Synthetic oligonucleotide
  Target: LAMA2; (-) strand; PAM type: NRG; PAM sequence: AAG
gtagtgaaagtctaagtgga

SEQ ID NO: 58920 - DNA, 20 bp, Artificial Sequence
  Description of Artificial Sequence: Synthetic oligonucleotide
  Target: LAMA2; (-) strand; PAM type: NRG; PAM sequence: TGG
gtcagtagtgaaagtctaag

SEQ ID NO: 58921 - DNA, 20 bp, Artificial Sequence
  Description of Artificial Sequence: Synthetic oligonucleotide
  Target: LAMA2; (-) strand; PAM type: NRG; PAM sequence: AAG
gaagtcagtagtgaaagtct

SEQ ID NO: 58922 - DNA, 20 bp, Artificial Sequence
  Description of Artificial Sequence: Synthetic oligonucleotide
  Target: LAMA2; (-) strand; PAM type: NRG; PAM sequence: AAG
gagttagaagtcagtagtga

SEQ ID NO: 58923 - DNA, 20 bp, Artificial Sequence
  Description of Artificial Sequence: Synthetic oligonucleotide
  Target: LAMA2; (-) strand; PAM type: NRG; PAM sequence: TAG
aaagatgagttagaagtcag

SEQ ID NO: 58924 - DNA, 20 bp, Artificial Sequence
  Description of Artificial Sequence: Synthetic oligonucleotide
  Target: LAMA2; (-) strand; PAM type: NRG; PAM sequence: CAG
caaaaagatgagttagaagt

SEQ ID NO: 58925 - DNA, 20 bp, Artificial Sequence
  Description of Artificial Sequence: Synthetic oligonucleotide
  Target: LAMA2; (-) strand; PAM type: NRG; PAM sequence: AAG
aaagcaaaaagatgagttag

SEQ ID NO: 58926 - DNA, 20 bp, Artificial Sequence
  Description of Artificial Sequence: Synthetic oligonucleotide
  Target: LAMA2; (-) strand; PAM type: NRG; PAM sequence: TAG
gagaaagcaaaaagatgagt

SEQ ID NO: 58927 - DNA, 20 bp, Artificial Sequence
  Description of Artificial Sequence: Synthetic oligonucleotide
  Target: LAMA2; (-) strand; PAM type: NRG; PAM sequence: GAG
ataagagaaagcaaaaagat

SEQ ID NO: 58928 - DNA, 20 bp, Artificial Sequence
  Description of Artificial Sequence: Synthetic oligonucleotide
  Target: LAMA2; (-) strand; PAM type: NRG; PAM sequence: AAG
tccaaataagagaaagcaaa

SEQ ID NO: 58929 - DNA, 20 bp, Artificial Sequence
  Description of Artificial Sequence: Synthetic oligonucleotide
  Target: LAMA2; (-) strand; PAM type: NRG; PAM sequence: AAG
taactgttccaaataagaga

SEQ ID NO: 58930 - DNA, 20 bp, Artificial Sequence
  Description of Artificial Sequence: Synthetic oligonucleotide
  Target: LAMA2; (-) strand; PAM type: NRG; PAM sequence: GAG
tgaataactgttccaaataa

SEQ ID NO: 58931 - DNA, 20 bp, Artificial Sequence
  Description of Artificial Sequence: Synthetic oligonucleotide
  Target: LAMA2; (-) strand; PAM type: NRG; PAM sequence: AAG
gctgaataactgttccaaat

SEQ ID NO: 58932 - DNA, 20 bp, Artificial Sequence
  Description of Artificial Sequence: Synthetic oligonucleotide
  Target: LAMA2; (-) strand; PAM type: NRG; PAM sequence: AAG
attcactctggacttagggt

SEQ ID NO: 58933 - DNA, 20 bp, Artificial Sequence
  Description of Artificial Sequence: Synthetic oligonucleotide
  Target: LAMA2; (-) strand; PAM type: NRG; PAM sequence: GGG
ggaaattcactctggactta

SEQ ID NO: 58934 - DNA, 20 bp, Artificial Sequence
  Description of Artificial Sequence: Synthetic oligonucleotide
  Target: LAMA2; (-) strand; PAM type: NRG; PAM sequence: AGG
tggaaattcactctggactt

SEQ ID NO: 58935 - DNA, 20 bp, Artificial Sequence
  Description of Artificial Sequence: Synthetic oligonucleotide
  Target: LAMA2; (-) strand; PAM type: NRG; PAM sequence: TAG
ttggaaattcactctggact

SEQ ID NO: 58936 - DNA, 20 bp, Artificial Sequence
  Description of Artificial Sequence: Synthetic oligonucleotide
  Target: LAMA2; (-) strand; PAM type: NRG; PAM sequence: TGG
gattttttggaaattcactc

SEQ ID NO: 58937 - DNA, 20 bp, Artificial Sequence
  Description of Artificial Sequence: Synthetic oligonucleotide
  Target: LAMA2; (-) strand; PAM type: NRG; PAM sequence: TGG
ttgcagaacctttgattttt

SEQ ID NO: 58938 - DNA, 20 bp, Artificial Sequence
  Description of Artificial Sequence: Synthetic oligonucleotide
  Target: LAMA2; (-) strand; PAM type: NRG; PAM sequence: CAG
tgaagagaaatgaaaagttg

SEQ ID NO: 58939 - DNA, 20 bp, Artificial Sequence
  Description of Artificial Sequence: Synthetic oligonucleotide
  Target: LAMA2; (-) strand; PAM type: NRG; PAM sequence: AAG
tggaattgaagagaaatgaa

SEQ ID NO: 58940 - DNA, 20 bp, Artificial Sequence
  Description of Artificial Sequence: Synthetic oligonucleotide
  Target: LAMA2; (-) strand; PAM type: NRG; PAM sequence: GAG
gaacctgagttggaattgaa

SEQ ID NO: 58941 - DNA, 20 bp, Artificial Sequence
  Description of Artificial Sequence: Synthetic oligonucleotide
  Target: LAMA2; (-) strand; PAM type: NRG; PAM sequence: AAG
gtgaacctgagttggaattg

SEQ ID NO: 58942 - DNA, 20 bp, Artificial Sequence
  Description of Artificial Sequence: Synthetic oligonucleotide
  Target: LAMA2; (-) strand; PAM type: NRG; PAM sequence: TGG
ataaacgtgtgaacctgagt

SEQ ID NO: 58943 - DNA, 20 bp, Artificial Sequence
  Description of Artificial Sequence: Synthetic oligonucleotide
  Target: LAMA2; (-) strand; PAM type: NRG; PAM sequence: GAG
ggtgataaacgtgtgaacct

SEQ ID NO: 58944 - DNA, 20 bp, Artificial Sequence
  Description of Artificial Sequence: Synthetic oligonucleotide
  Target: LAMA2; (-) strand; PAM type: NRG; PAM sequence: AGG
gaggaaagcccttctacact

SEQ ID NO: 58945 - DNA, 20 bp, Artificial Sequence
  Description of Artificial Sequence: Synthetic oligonucleotide
  Target: LAMA2; (-) strand; PAM type: NRG; PAM sequence: TAG
ggaggaaagcccttctacac

SEQ ID NO: 58946 - DNA, 20 bp, Artificial Sequence
  Description of Artificial Sequence: Synthetic oligonucleotide
  Target: LAMA2; (-) strand; PAM type: NRG; PAM sequence: AAG
ccaagcaaaactgtggagga

SEQ ID NO: 58947 - DNA, 20 bp, Artificial Sequence
  Description of Artificial Sequence: Synthetic oligonucleotide
  Target: LAMA2; (-) strand; PAM type: NRG; PAM sequence: AGG
tttgccaagcaaaactgtgg

SEQ ID NO: 58948 - DNA, 20 bp, Artificial Sequence
  Description of Artificial Sequence: Synthetic oligonucleotide
  Target: LAMA2; (-) strand; PAM type: NRG; PAM sequence: GAG
gtttgccaagcaaaactgtg

SEQ ID NO: 58949 - DNA, 20 bp, Artificial Sequence
  Description of Artificial Sequence: Synthetic oligonucleotide
  Target: LAMA2; (-) strand; PAM type: NRG; PAM sequence: TGG
gagtttgccaagcaaaactg

SEQ ID NO: 58950 - DNA, 20 bp, Artificial Sequence
  Description of Artificial Sequence: Synthetic oligonucleotide
  Target: LAMA2; (-) strand; PAM type: NRG; PAM sequence: AAG
aggatgaaaaggagtttgcc

SEQ ID NO: 58951 - DNA, 20 bp, Artificial Sequence
  Description of Artificial Sequence: Synthetic oligonucleotide
  Target: LAMA2; (-) strand; PAM type: NRG; PAM sequence: GAG
gagtcttgaaggatgaaaag

SEQ ID NO: 58952 - DNA, 20 bp, Artificial Sequence
  Description of Artificial Sequence: Synthetic oligonucleotide
  Target: LAMA2; (-) strand; PAM type: NRG; PAM sequence: AGG
ttgagtcttgaaggatgaaa

SEQ ID NO: 58953 - DNA, 20 bp, Artificial Sequence
  Description of Artificial Sequence: Synthetic oligonucleotide
  Target: LAMA2; (-) strand; PAM type: NRG; PAM sequence: AAG
gttgagtcttgaaggatgaa

SEQ ID NO: 58954 - DNA, 20 bp, Artificial Sequence
  Description of Artificial Sequence: Synthetic oligonucleotide
  Target: LAMA2; (-) strand; PAM type: NRG; PAM sequence: AGG
acaattttgttgagtcttga

SEQ ID NO: 58955 - DNA, 20 bp, Artificial Sequence
  Description of Artificial Sequence: Synthetic oligonucleotide
  Target: LAMA2; (-) strand; PAM type: NRG; PAM sequence: AAG
aacaattttgttgagtcttg

SEQ ID NO: 58956 - DNA, 20 bp, Artificial Sequence
  Description of Artificial Sequence: Synthetic oligonucleotide
  Target: LAMA2; (-) strand; PAM type: NRG; PAM sequence: GAG
gaaaaggcaacaattttgtt

SEQ ID NO: 58957 - DNA, 20 bp, Artificial Sequence
  Description of Artificial Sequence: Synthetic oligonucleotide
  Target: LAMA2; (-) strand; PAM type: NRG; PAM sequence: AGG
gagtatcctttttcatgaaa

SEQ ID NO: 58958 - DNA, 20 bp, Artificial Sequence
  Description of Artificial Sequence: Synthetic oligonucleotide
  Target: LAMA2; (-) strand; PAM type: NRG; PAM sequence: AAG
agagtatcctttttcatgaa

SEQ ID NO: 58959 - DNA, 20 bp, Artificial Sequence
  Description of Artificial Sequence: Synthetic oligonucleotide
  Target: LAMA2; (-) strand; PAM type: NRG; PAM sequence: GAG
ttaatatcagaaggatggaa

SEQ ID NO: 58960 - DNA, 20 bp, Artificial Sequence
  Description of Artificial Sequence: Synthetic oligonucleotide
  Target: LAMA2; (-) strand; PAM type: NRG; PAM sequence: AAG
tattaatatcagaaggatgg

SEQ ID NO: 58961 - DNA, 20 bp, Artificial Sequence
  Description of Artificial Sequence: Synthetic oligonucleotide
  Target: LAMA2; (-) strand; PAM type: NRG; PAM sequence: TGG
aattattaatatcagaagga

SEQ ID NO: 58962 - DNA, 20 bp, Artificial Sequence
  Description of Artificial Sequence: Synthetic oligonucleotide
  Target: LAMA2; (-) strand; PAM type: NRG; PAM sequence: AGG
aaaaaattattaatatcaga

SEQ ID NO: 58963 - DNA, 20 bp, Artificial Sequence
  Description of Artificial Sequence: Synthetic oligonucleotide
  Target: LAMA2; (-) strand; PAM type: NRG; PAM sequence: AAG
caaaaaattattaatatcag

SEQ ID NO: 58964 - DNA, 20 bp, Artificial Sequence
  Description of Artificial Sequence: Synthetic oligonucleotide
  Target: LAMA2; (-) strand; PAM type: NRG; PAM sequence: CAG
gaacaaaaaattattaatat

SEQ ID NO: 58965 - DNA, 20 bp, Artificial Sequence
  Description of Artificial Sequence: Synthetic oligonucleotide
  Target: LAMA2; (-) strand; PAM type: NRG; PAM sequence: AAG
acaaagtctatcatggacac

SEQ ID NO: 58966 - DNA, 20 bp, Artificial Sequence
  Description of Artificial Sequence: Synthetic oligonucleotide
  Target: LAMA2; (-) strand; PAM type: NRG; PAM sequence: TGG
cattatgacaaagtctatca

SEQ ID NO: 58967 - DNA, 20 bp, Artificial Sequence
  Description of Artificial Sequence: Synthetic oligonucleotide
  Target: LAMA2; (-) strand; PAM type: NRG; PAM sequence: AAG
aactgtaatacattatgaca

SEQ ID NO: 58968 - DNA, 20 bp, Artificial Sequence
  Description of Artificial Sequence: Synthetic oligonucleotide
  Target: LAMA2; (-) strand; PAM type: NRG; PAM sequence: AGG
gtcttgtggtgctttcctcc

SEQ ID NO: 58969 - DNA, 20 bp, Artificial Sequence
  Description of Artificial Sequence: Synthetic oligonucleotide
  Target: LAMA2; (-) strand; PAM type: NRG; PAM sequence: CAG
ggtcttgtggtgctttcctc

SEQ ID NO: 58970 - DNA, 20 bp, Artificial Sequence
  Description of Artificial Sequence: Synthetic oligonucleotide
  Target: LAMA2; (-) strand; PAM type: NRG; PAM sequence: TGG
aaaggaaactcttggtcttg

SEQ ID NO: 58971 - DNA, 20 bp, Artificial Sequence
  Description of Artificial Sequence: Synthetic oligonucleotide
  Target: LAMA2; (-) strand; PAM type: NRG; PAM sequence: TGG
aaaaaaaaaaaggaaactct

SEQ ID NO: 58972 - DNA, 20 bp, Artificial Sequence
  Description of Artificial Sequence: Synthetic oligonucleotide
  Target: LAMA2; (-) strand; PAM type: NRG; PAM sequence: AGG
cattgggatgaaaaaaaaaa

SEQ ID NO: 58973 - DNA, 20 bp, Artificial Sequence
  Description of Artificial Sequence: Synthetic oligonucleotide
  Target: LAMA2; (-) strand; PAM type: NRG; PAM sequence: AAG
gcattgggatgaaaaaaaaa

SEQ ID NO: 58974 - DNA, 20 bp, Artificial Sequence
  Description of Artificial Sequence: Synthetic oligonucleotide
  Target: LAMA2; (-) strand; PAM type: NRG; PAM sequence: GGG
gctactatgtatcaagcatt

SEQ ID NO: 58975 - DNA, 20 bp, Artificial Sequence
  Description of Artificial Sequence: Synthetic oligonucleotide
  Target: LAMA2; (-) strand; PAM type: NRG; PAM sequence: TGG
ggctactatgtatcaagcat

SEQ ID NO: 58976 - DNA, 20 bp, Artificial Sequence
  Description of Artificial Sequence: Synthetic oligonucleotide
  Target: LAMA2; (-) strand; PAM type: NRG; PAM sequence: AAG
tcaaatggctactatgtatc

SEQ ID NO: 58977 - DNA, 20 bp, Artificial Sequence
  Description of Artificial Sequence: Synthetic oligonucleotide
  Target: LAMA2; (-) strand; PAM type: NRG; PAM sequence: TGG
ttcaacatgtacttatcaaa

SEQ ID NO: 58978 - DNA, 20 bp, Artificial Sequence
  Description of Artificial Sequence: Synthetic oligonucleotide
  Target: LAMA2; (-) strand; PAM type: NRG; PAM sequence: AGG
tgaaactccaagtcaggtga

SEQ ID NO: 58979 - DNA, 20 bp, Artificial Sequence
  Description of Artificial Sequence: Synthetic oligonucleotide
  Target: LAMA2; (-) strand; PAM type: NRG; PAM sequence: AAG
atgaaactccaagtcaggtg

SEQ ID NO: 58980 - DNA, 20 bp, Artificial Sequence
  Description of Artificial Sequence: Synthetic oligonucleotide
  Target: LAMA2; (-) strand; PAM type: NRG; PAM sequence: AGG
tccttatgaaactccaagtc

SEQ ID NO: 58981 - DNA, 20 bp, Artificial Sequence
  Description of Artificial Sequence: Synthetic oligonucleotide
  Target: LAMA2; (-) strand; PAM type: NRG; PAM sequence: CAG
ttccttatgaaactccaagt

SEQ ID NO: 58982 - DNA, 20 bp, Artificial Sequence
  Description of Artificial Sequence: Synthetic oligonucleotide
  Target: LAMA2; (-) strand; PAM type: NRG; PAM sequence: AAG
tgcattccttatgaaactcc

SEQ ID NO: 58983 - DNA, 20 bp, Artificial Sequence
  Description of Artificial Sequence: Synthetic oligonucleotide
  Target: LAMA2; (-) strand; PAM type: NRG; PAM sequence: AAG
aaagaaagtaaatgaattgg

SEQ ID NO: 58984 - DNA, 20 bp, Artificial Sequence
  Description of Artificial Sequence: Synthetic oligonucleotide
  Target: LAMA2; (-) strand; PAM type: NRG; PAM sequence: TGG
caaaaagaaagtaaatgaat

SEQ ID NO: 58985 - DNA, 20 bp, Artificial Sequence
  Description of Artificial Sequence: Synthetic oligonucleotide
  Target: LAMA2; (-) strand; PAM type: NRG; PAM sequence: AAG
tactttgttaagcaaaaaga

SEQ ID NO: 58986 - DNA, 20 bp, Artificial Sequence
  Description of Artificial Sequence: Synthetic oligonucleotide
  Target: LAMA2; (-) strand; PAM type: NRG; PAM sequence: AAG
cagatactttgttaagcaaa

SEQ ID NO: 58987 - DNA, 20 bp, Artificial Sequence
  Description of Artificial Sequence: Synthetic oligonucleotide
  Target: LAMA2; (-) strand; PAM type: NRG; PAM sequence: AAG
tatgtgtcagatactttgtt

SEQ ID NO: 58988 - DNA, 20 bp, Artificial Sequence
  Description of Artificial Sequence: Synthetic oligonucleotide
  Target: LAMA2; (-) strand; PAM type: NRG; PAM sequence: CAG
ttaacttttgtactatgtgt

SEQ ID NO: 58989 - DNA, 20 bp, Artificial Sequence
  Description of Artificial Sequence: Synthetic oligonucleotide
  Target: LAMA2; (-) strand; PAM type: NRG; PAM sequence: TGG
tcatcgttgggtggaattcc

SEQ ID NO: 58990 - DNA, 20 bp, Artificial Sequence
  Description of Artificial Sequence: Synthetic oligonucleotide
  Target: LAMA2; (-) strand; PAM type: NRG; PAM sequence: TGG
ataggtctttcatcgttggg

SEQ ID NO: 58991 - DNA, 20 bp, Artificial Sequence
  Description of Artificial Sequence: Synthetic oligonucleotide
  Target: LAMA2; (-) strand; PAM type: NRG; PAM sequence: GGG
cctataggtctttcatcgtt

SEQ ID NO: 58992 - DNA, 20 bp, Artificial Sequence
  Description of Artificial Sequence: Synthetic oligonucleotide
  Target: LAMA2; (-) strand; PAM type: NRG; PAM sequence: TGG
gcctataggtctttcatcgt

SEQ ID NO: 58993 - DNA, 20 bp, Artificial Sequence
  Description of Artificial Sequence: Synthetic oligonucleotide
  Target: LAMA2; (-) strand; PAM type: NRG; PAM sequence: AGG
acctacttgtaaccgcctat

SEQ ID NO: 58994 - DNA, 20 bp, Artificial Sequence
  Description of Artificial Sequence: Synthetic oligonucleotide
  Target: LAMA2; (-) strand; PAM type: NRG; PAM sequence: TAG
tacctacttgtaaccgccta

SEQ ID NO: 58995 - DNA, 20 bp, Artificial Sequence
  Description of Artificial Sequence: Synthetic oligonucleotide
  Target: LAMA2; (-) strand; PAM type: NRG; PAM sequence: TGG
ttgaaaatgaccctacattt

SEQ ID NO: 58996 - DNA, 20 bp, Artificial Sequence
  Description of Artificial Sequence: Synthetic oligonucleotide
  Target: LAMA2; (-) strand; PAM type: NRG; PAM sequence: GAG
cgtctctactcaagctcctt

SEQ ID NO: 58997 - DNA, 20 bp, Artificial Sequence
  Description of Artificial Sequence: Synthetic oligonucleotide
  Target: LAMA2; (-) strand; PAM type: NRG; PAM sequence: AAG
gcctattcccgtctctactc

SEQ ID NO: 58998 - DNA, 20 bp, Artificial Sequence
  Description of Artificial Sequence: Synthetic oligonucleotide
  Target: LAMA2; (-) strand; PAM type: NRG; PAM sequence: GAG
tcagccaataagataataaa

SEQ ID NO: 58999 - DNA, 20 bp, Artificial Sequence
  Description of Artificial Sequence: Synthetic oligonucleotide
  Target: LAMA2; (-) strand; PAM type: NRG; PAM sequence: AAG
aatcagccaataagataata

SEQ ID NO: 59000 - DNA, 20 bp, Artificial Sequence
  Description of Artificial Sequence: Synthetic oligonucleotide
  Target: LAMA2; (-) strand; PAM type: NRG; PAM sequence: AAG
agaagtataaatcagccaat

SEQ ID NO: 59001 - DNA, 20 bp, Artificial Sequence
  Description of Artificial Sequence: Synthetic oligonucleotide
  Target: LAMA2; (-) strand; PAM type: NRG; PAM sequence: CAG
attttacaagaagtataaat

SEQ ID NO: 59002 - DNA, 20 bp, Artificial Sequence
  Description of Artificial Sequence: Synthetic oligonucleotide
  Target: LAMA2; (-) strand; PAM type: NRG; PAM sequence: AAG
taagctaattattttacaag

SEQ ID NO: 59003 - DNA, 20 bp, Artificial Sequence
  Description of Artificial Sequence: Synthetic oligonucleotide
  Target: LAMA2; (-) strand; PAM type: NRG; PAM sequence: AAG
gcttaagctaattattttac

SEQ ID NO: 59004 - DNA, 20 bp, Artificial Sequence
  Description of Artificial Sequence: Synthetic oligonucleotide
  Target: LAMA2; (-) strand; PAM type: NRG; PAM sequence: AAG
gtttcttagataattagctt

SEQ ID NO: 59005 - DNA, 20 bp, Artificial Sequence
  Description of Artificial Sequence: Synthetic oligonucleotide
  Target: LAMA2; (-) strand; PAM type: NRG; PAM sequence: TAG
attcttgtttcttagataat

SEQ ID NO: 59006 - DNA, 20 bp, Artificial Sequence
  Description of Artificial Sequence: Synthetic oligonucleotide
  Target: LAMA2; (-) strand; PAM type: NRG; PAM sequence: TAG
taggagagattcttgtttct

SEQ ID NO: 59007 - DNA, 20 bp, Artificial Sequence
  Description of Artificial Sequence: Synthetic oligonucleotide
  Target: LAMA2; (-) strand; PAM type: NRG; PAM sequence: GAG
gcaactgaatctgcctagga

SEQ ID NO: 59008 - DNA, 20 bp, Artificial Sequence
  Description of Artificial Sequence: Synthetic oligonucleotide
  Target: LAMA2; (-) strand; PAM type: NRG; PAM sequence: GAG
aggcaactgaatctgcctag

SEQ ID NO: 59009 - DNA, 20 bp, Artificial Sequence
  Description of Artificial Sequence: Synthetic oligonucleotide
  Target: LAMA2; (-) strand; PAM type: NRG; PAM sequence: AGG
aaaggcaactgaatctgcct

SEQ ID NO: 59010 - DNA, 20 bp, Artificial Sequence
  Description of Artificial Sequence: Synthetic oligonucleotide
  Target: LAMA2; (-) strand; PAM type: NRG; PAM sequence: TAG
gaaaggcaactgaatctgcc

SEQ ID NO: 59011 - DNA, 20 bp, Artificial Sequence
  Description of Artificial Sequence: Synthetic oligonucleotide
  Target: LAMA2; (-) strand; PAM type: NRG; PAM sequence: AGG
cactcagggagaaccaggaa

SEQ ID NO: 59012 - DNA, 20 bp, Artificial Sequence
  Description of Artificial Sequence: Synthetic oligonucleotide
  Target: LAMA2; (-) strand; PAM type: NRG; PAM sequence: AAG
gcactcagggagaaccagga

SEQ ID NO: 59013 - DNA, 20 bp, Artificial Sequence
  Description of Artificial Sequence: Synthetic oligonucleotide
  Target: LAMA2; (-) strand; PAM type: NRG; PAM sequence: AGG
cagagcactcagggagaacc

SEQ ID NO: 59014 - DNA, 20 bp, Artificial Sequence
  Description of Artificial Sequence: Synthetic oligonucleotide
  Target: LAMA2; (-) strand; PAM type: NRG; PAM sequence: CAG
tcagagcactcagggagaac

SEQ ID NO: 59015 - DNA, 20 bp, Artificial Sequence
  Description of Artificial Sequence: Synthetic oligonucleotide
  Target: LAMA2; (-) strand; PAM type: NRG; PAM sequence: GAG
gcttactcagagcactcagg

SEQ ID NO: 59016 - DNA, 20 bp, Artificial Sequence
  Description of Artificial Sequence: Synthetic oligonucleotide
  Target: LAMA2; (-) strand; PAM type: NRG; PAM sequence: GGG
gggcttactcagagcactca

SEQ ID NO: 59017 - DNA, 20 bp, Artificial Sequence
  Description of Artificial Sequence: Synthetic oligonucleotide
  Target: LAMA2; (-) strand; PAM type: NRG; PAM sequence: AGG
ggggcttactcagagcactc

SEQ ID NO: 59018 - DNA, 20 bp, Artificial Sequence
  Description of Artificial Sequence: Synthetic oligonucleotide
  Target: LAMA2; (-) strand; PAM type: NRG; PAM sequence: CAG
tggggcttactcagagcact

SEQ ID NO: 59019 - DNA, 20 bp, Artificial Sequence
  Description of Artificial Sequence: Synthetic oligonucleotide
  Target: LAMA2; (-) strand; PAM type: NRG; PAM sequence: GAG
gcaatggtggggcttactca

SEQ ID NO: 59020 - DNA, 20 bp, Artificial Sequence
  Description of Artificial Sequence: Synthetic oligonucleotide
  Target: LAMA2; (-) strand; PAM type: NRG; PAM sequence: CAG
aggcaatggtggggcttact

SEQ ID NO: 59021 - DNA, 20 bp, Artificial Sequence
  Description of Artificial Sequence: Synthetic oligonucleotide
  Target: LAMA2; (-) strand; PAM type: NRG; PAM sequence: GGG
ttttctagaaggcaatggtg

SEQ ID NO: 59022 - DNA, 20 bp, Artificial Sequence
  Description of Artificial Sequence: Synthetic oligonucleotide
  Target: LAMA2; (-) strand; PAM type: NRG; PAM sequence: GGG
tttttctagaaggcaatggt

SEQ ID NO: 59023 - DNA, 20 bp, Artificial Sequence
  Description of Artificial Sequence: Synthetic oligonucleotide
  Target: LAMA2; (-) strand; PAM type: NRG; PAM sequence: TGG
gtttttctagaaggcaatgg

SEQ ID NO: 59024 - DNA, 20 bp, Artificial Sequence
  Description of Artificial Sequence: Synthetic oligonucleotide
  Target: LAMA2; (-) strand; PAM type: NRG; PAM sequence: TGG
aaagtttttctagaaggcaa

SEQ ID NO: 59025 - DNA, 20 bp, Artificial Sequence
  Description of Artificial Sequence: Synthetic oligonucleotide
  Target: LAMA2; (-) strand; PAM type: NRG; PAM sequence: AGG
agaaagaaagtttttctaga

SEQ ID NO: 59026 - DNA, 20 bp, Artificial Sequence
  Description of Artificial Sequence: Synthetic oligonucleotide
  Target: LAMA2; (-) strand; PAM type: NRG; PAM sequence: AAG
aagaaagaaagtttttctag

SEQ ID NO: 59027 - DNA, 20 bp, Artificial Sequence
  Description of Artificial Sequence: Synthetic oligonucleotide
  Target: LAMA2; (-) strand; PAM type: NRG; PAM sequence: TAG
aagaagaaagaaagtttttc

SEQ ID NO: 59028 - DNA, 20 bp, Artificial Sequence
  Description of Artificial Sequence: Synthetic oligonucleotide
  Target: LAMA2; (-) strand; PAM type: NRG; PAM sequence: AAG
tgggcaagaaagaagaaaga

SEQ ID NO: 59029 - DNA, 20 bp, Artificial Sequence
  Description of Artificial Sequence: Synthetic oligonucleotide
  Target: LAMA2; (-) strand; PAM type: NRG; PAM sequence: AAG
ggagtgggcaagaaagaaga

SEQ ID NO: 59030 - DNA, 20 bp, Artificial Sequence
  Description of Artificial Sequence: Synthetic oligonucleotide
  Target: LAMA2; (-) strand; PAM type: NRG; PAM sequence: AAG
gatgggagtgggcaagaaag

SEQ ID NO: 59031 - DNA, 20 bp, Artificial Sequence
  Description of Artificial Sequence: Synthetic oligonucleotide
  Target: LAMA2; (-) strand; PAM type: NRG; PAM sequence: AAG
tcagatgggagtgggcaaga

SEQ ID NO: 59032 - DNA, 20 bp, Artificial Sequence
  Description of Artificial Sequence: Synthetic oligonucleotide
  Target: LAMA2; (-) strand; PAM type: NRG; PAM sequence: AAG
gggatcagatgggagtgggc

SEQ ID NO: 59033 - DNA, 20 bp, Artificial Sequence
  Description of Artificial Sequence: Synthetic oligonucleotide
  Target: LAMA2; (-) strand; PAM type: NRG; PAM sequence: GGG
tgaagggatcagatgggagt

SEQ ID NO: 59034 - DNA, 20 bp, Artificial Sequence
  Description of Artificial Sequence: Synthetic oligonucleotide
  Target: LAMA2; (-) strand; PAM type: NRG; PAM sequence: TGG
gtgaagggatcagatgggag

SEQ ID NO: 59035 - DNA, 20 bp, Artificial Sequence
  Description of Artificial Sequence: Synthetic oligonucleotide
  Target: LAMA2; (-) strand; PAM type: NRG; PAM sequence: GAG
gccgtgaagggatcagatgg

SEQ ID NO: 59036 - DNA, 20 bp, Artificial Sequence
  Description of Artificial Sequence: Synthetic oligonucleotide
  Target: LAMA2; (-) strand; PAM type: NRG; PAM sequence: GGG
atgccgtgaagggatcagat

SEQ ID NO: 59037 - DNA, 20 bp, Artificial Sequence
  Description of Artificial Sequence: Synthetic oligonucleotide
  Target: LAMA2; (-) strand; PAM type: NRG; PAM sequence: TGG
gatgccgtgaagggatcaga

SEQ ID NO: 59038 - DNA, 20 bp, Artificial Sequence
  Description of Artificial Sequence: Synthetic oligonucleotide
  Target: LAMA2; (-) strand; PAM type: NRG; PAM sequence: CAG
tctggatgccgtgaagggat

SEQ ID NO: 59039 - DNA, 20 bp, Artificial Sequence
  Description of Artificial Sequence: Synthetic oligonucleotide
  Target: LAMA2; (-) strand; PAM type: NRG; PAM sequence: GGG
atcattctggatgccgtgaa

SEQ ID NO: 59040 - DNA, 20 bp, Artificial Sequence
  Description of Artificial Sequence: Synthetic oligonucleotide
  Target: LAMA2; (-) strand; PAM type: NRG; PAM sequence: AGG
catcattctggatgccgtga

SEQ ID NO: 59041 - DNA, 20 bp, Artificial Sequence
  Description of Artificial Sequence: Synthetic oligonucleotide
  Target: LAMA2; (-) strand; PAM type: NRG; PAM sequence: AAG
tcatcattctggatgccgtg

SEQ ID NO: 59042 - DNA, 20 bp, Artificial Sequence
  Description of Artificial Sequence: Synthetic oligonucleotide
  Target: LAMA2; (-) strand; PAM type: NRG; PAM sequence: TGG
aaacttttggatcatcattc

SEQ ID NO: 59043 - DNA, 20 bp, Artificial Sequence
  Description of Artificial Sequence: Synthetic oligonucleotide
  Target: LAMA2; (-) strand; PAM type: NRG; PAM sequence: TGG
cacatttggacccaaacttt

SEQ ID NO: 59044 - DNA, 20 bp, Artificial Sequence
  Description of Artificial Sequence: Synthetic oligonucleotide
  Target: LAMA2; (-) strand; PAM type: NRG; PAM sequence: TGG
gtaaacttttgcatcacatt

SEQ ID NO: 59045 - DNA, 20 bp, Artificial Sequence
  Description of Artificial Sequence: Synthetic oligonucleotide
  Target: LAMA2; (-) strand; PAM type: NRG; PAM sequence: TAG
tttttgtaaaggaaccatgg

SEQ ID NO: 59046 - DNA, 20 bp, Artificial Sequence
  Description of Artificial Sequence: Synthetic oligonucleotide
  Target: LAMA2; (-) strand; PAM type: NRG; PAM sequence: TGG
ctttttttgtaaaggaacca

SEQ ID NO: 59047 - DNA, 20 bp, Artificial Sequence
  Description of Artificial Sequence: Synthetic oligonucleotide
  Target: LAMA2; (-) strand; PAM type: NRG; PAM sequence: AGG
tttttggtctttttttgtaa

SEQ ID NO: 59048 - DNA, 20 bp, Artificial Sequence
  Description of Artificial Sequence: Synthetic oligonucleotide
  Target: LAMA2; (-) strand; PAM type: NRG; PAM sequence: AAG
atttttggtctttttttgta

SEQ ID NO: 59049 - DNA, 20 bp, Artificial Sequence
  Description of Artificial Sequence: Synthetic oligonucleotide
  Target: LAMA2; (-) strand; PAM type: NRG; PAM sequence: TGG
caagaatggcagaacatttt

SEQ ID NO: 59050 - DNA, 20 bp, Artificial Sequence
  Description of Artificial Sequence: Synthetic oligonucleotide
  Target: LAMA2; (-) strand; PAM type: NRG; PAM sequence: CAG
atcatgatgagcaagaatgg

SEQ ID NO: 59051 - DNA, 20 bp, Artificial Sequence
  Description of Artificial Sequence: Synthetic oligonucleotide
  Target: LAMA2; (-) strand; PAM type: NRG; PAM sequence: TGG
aaaatcatgatgagcaagaa

SEQ ID NO: 59052 - DNA, 20 bp, Artificial Sequence
  Description of Artificial Sequence: Synthetic oligonucleotide
  Target: LAMA2; (-) strand; PAM type: NRG; PAM sequence: AAG
gaggcaaaatcatgatgagc

SEQ ID NO: 59053 - DNA, 20 bp, Artificial Sequence
  Description of Artificial Sequence: Synthetic oligonucleotide
  Target: LAMA2; (-) strand; PAM type: NRG; PAM sequence: GAG
aactgaggcaaaatcatgat

SEQ ID NO: 59054 - DNA, 20 bp, Artificial Sequence
  Description of Artificial Sequence: Synthetic oligonucleotide
  Target: LAMA2; (-) strand; PAM type: NRG; PAM sequence: AGG
aaacataacttgaaaaactg

SEQ ID NO: 59055 - DNA, 20 bp, Artificial Sequence
  Description of Artificial Sequence: Synthetic oligonucleotide
  Target: LAMA2; (-) strand; PAM type: NRG; PAM sequence: GAG
aaaacataacttgaaaaact

SEQ ID NO: 59056 - DNA, 20 bp, Artificial Sequence
  Description of Artificial Sequence: Synthetic oligonucleotide
  Target: LAMA2; (-) strand; PAM type: NRG; PAM sequence: CAG
tagaaggaacagaacacatt

SEQ ID NO: 59057 - DNA, 20 bp, Artificial Sequence
  Description of Artificial Sequence: Synthetic oligonucleotide
  Target: LAMA2; (-) strand; PAM type: NRG; PAM sequence: CAG
ttttaaggcagtagaaggaa

SEQ ID NO: 59058 - DNA, 20 bp, Artificial Sequence
  Description of Artificial Sequence: Synthetic oligonucleotide
  Target: LAMA2; (-) strand; PAM type: NRG; PAM sequence: AGG
gggctttttaaggcagtaga

SEQ ID NO: 59059 - DNA, 20 bp, Artificial Sequence
  Description of Artificial Sequence: Synthetic oligonucleotide
  Target: LAMA2; (-) strand; PAM type: NRG; PAM sequence: AAG
agggctttttaaggcagtag

SEQ ID NO: 59060 - DNA, 20 bp, Artificial Sequence
  Description of Artificial Sequence: Synthetic oligonucleotide
  Target: LAMA2; (-) strand; PAM type: NRG; PAM sequence: TAG
atgagggctttttaaggcag

SEQ ID NO: 59061 - DNA, 20 bp, Artificial Sequence
  Description of Artificial Sequence: Synthetic oligonucleotide
  Target: LAMA2; (-) strand; PAM type: NRG; PAM sequence: CAG
gtgatgagggctttttaagg

SEQ ID NO: 59062 - DNA, 20 bp, Artificial Sequence
  Description of Artificial Sequence: Synthetic oligonucleotide
  Target: LAMA2; (-) strand; PAM type: NRG; PAM sequence: AGG
tcagtgatgagggcttttta

SEQ ID NO: 59063 - DNA, 20 bp, Artificial Sequence
  Description of Artificial Sequence: Synthetic oligonucleotide
  Target: LAMA2; (-) strand; PAM type: NRG; PAM sequence: AAG
ctcagtgatgagggcttttt

SEQ ID NO: 59064 - DNA, 20 bp, Artificial Sequence
  Description of Artificial Sequence: Synthetic oligonucleotide
  Target: LAMA2; (-) strand; PAM type: NRG; PAM sequence: GGG
gtaggaagactcagtgatga

SEQ ID NO: 59065 - DNA, 20 bp, Artificial Sequence
  Description of Artificial Sequence: Synthetic oligonucleotide
  Target: LAMA2; (-) strand; PAM type: NRG; PAM sequence: AGG
agtaggaagactcagtgatg

SEQ ID NO: 59066 - DNA, 20 bp, Artificial Sequence
  Description of Artificial Sequence: Synthetic oligonucleotide
  Target: LAMA2; (-) strand; PAM type: NRG; PAM sequence: GAG
tagtaggaagactcagtgat

SEQ ID NO: 59067 - DNA, 20 bp, Artificial Sequence
  Description of Artificial Sequence: Synthetic oligonucleotide
  Target: LAMA2; (-) strand; PAM type: NRG; PAM sequence: CAG
agggaagtagtaggaagact

SEQ ID NO: 59068 - DNA, 20 bp, Artificial Sequence
  Description of Artificial Sequence: Synthetic oligonucleotide
  Target: LAMA2; (-) strand; PAM type: NRG; PAM sequence: AAG
gaggtgagggaagtagtagg

SEQ ID NO: 59069 - DNA, 20 bp, Artificial Sequence
  Description of Artificial Sequence: Synthetic oligonucleotide
  Target: LAMA2; (-) strand; PAM type: NRG; PAM sequence: AGG
gtggaggtgagggaagtagt

SEQ ID NO: 59070 - DNA, 20 bp, Artificial Sequence
  Description of Artificial Sequence: Synthetic oligonucleotide
  Target: LAMA2; (-) strand; PAM type: NRG; PAM sequence: TAG
agtggaggtgagggaagtag

SEQ ID NO: 59071 - DNA, 20 bp, Artificial Sequence
  Description of Artificial Sequence: Synthetic oligonucleotide
  Target: LAMA2; (-) strand; PAM type: NRG; PAM sequence: TAG
gtaagtggaggtgagggaag

SEQ ID NO: 59072 - DNA, 20 bp, Artificial Sequence
  Description of Artificial Sequence: Synthetic oligonucleotide
  Target: LAMA2; (-) strand; PAM type: NRG; PAM sequence: AAG
agggtaagtggaggtgaggg

SEQ ID NO: 59073 - DNA, 20 bp, Artificial Sequence
  Description of Artificial Sequence: Synthetic oligonucleotide
  Target: LAMA2; (-) strand; PAM type: NRG; PAM sequence: GGG
agtagggtaagtggaggtga

SEQ ID NO: 59074 - DNA, 20 bp, Artificial Sequence
  Description of Artificial Sequence: Synthetic oligonucleotide
  Target: LAMA2; (-) strand; PAM type: NRG; PAM sequence: AGG
cagtagggtaagtggaggtg

SEQ ID NO: 59075 - DNA, 20 bp, Artificial Sequence
  Description of Artificial Sequence: Synthetic oligonucleotide
  Target: LAMA2; (-) strand; PAM type: NRG; PAM sequence: GAG
tcagtagggtaagtggaggt

SEQ ID NO: 59076 - DNA, 20 bp, Artificial Sequence
  Description of Artificial Sequence: Synthetic oligonucleotide
  Target: LAMA2; (-) strand; PAM type: NRG; PAM sequence: AGG
aaattcagtagggtaagtgg

SEQ ID NO: 59077 - DNA, 20 bp, Artificial Sequence
  Description of Artificial Sequence: Synthetic oligonucleotide
  Target: LAMA2; (-) strand; PAM type: NRG; PAM sequence: GAG
aaaattcagtagggtaagtg

SEQ ID NO: 59078 - DNA, 20 bp, Artificial Sequence
  Description of Artificial Sequence: Synthetic oligonucleotide
  Target: LAMA2; (-) strand; PAM type: NRG; PAM sequence: TGG
tgaaaattcagtagggtaag

SEQ ID NO: 59079 - DNA, 20 bp, Artificial Sequence
  Description of Artificial Sequence: Synthetic oligonucleotide
  Target: LAMA2; (-) strand; PAM type: NRG; PAM sequence: AAG
gtttgaaaattcagtagggt

SEQ ID NO: 59080 - DNA, 20 bp, Artificial Sequence
  Description of Artificial Sequence: Synthetic oligonucleotide
  Target: LAMA2; (-) strand; PAM type: NRG; PAM sequence: GGG
tgcagtttgaaaattcagta

SEQ ID NO: 59081 - DNA, 20 bp, Artificial Sequence
  Description of Artificial Sequence: Synthetic oligonucleotide
  Target: LAMA2; (-) strand; PAM type: NRG; PAM sequence: AGG
ttgcagtttgaaaattcagt

SEQ ID NO: 59082 - DNA, 20 bp, Artificial Sequence
  Description of Artificial Sequence: Synthetic oligonucleotide
  Target: LAMA2; (-) strand; PAM type: NRG; PAM sequence: TAG
cttgcagtttgaaaattcag

SEQ ID NO: 59083 - DNA, 20 bp, Artificial Sequence
  Description of Artificial Sequence: Synthetic oligonucleotide
  Target: LAMA2; (-) strand; PAM type: NRG; PAM sequence: CAG
tgacttgcagtttgaaaatt

SEQ ID NO: 59084 - DNA, 20 bp, Artificial Sequence
  Description of Artificial Sequence: Synthetic oligonucleotide
  Target: LAMA2; (-) strand; PAM type: NRG; PAM sequence: CAG
aggaagtaatatttgacttg

SEQ ID NO: 59085 - DNA, 20 bp, Artificial Sequence
  Description of Artificial Sequence: Synthetic oligonucleotide
  Target: LAMA2; (-) strand; PAM type: NRG; PAM sequence: AAG
ctgatgagattcccctaagg

SEQ ID NO: 59086 - DNA, 20 bp, Artificial Sequence
  Description of Artificial Sequence: Synthetic oligonucleotide
  Target: LAMA2; (-) strand; PAM type: NRG; PAM sequence: AGG
agtctgatgagattccccta

SEQ ID NO: 59087 - DNA, 20 bp, Artificial Sequence
  Description of Artificial Sequence: Synthetic oligonucleotide
  Target: LAMA2; (-) strand; PAM type: NRG; PAM sequence: AAG
cagtctgatgagattcccct

SEQ ID NO: 59088 - DNA, 20 bp, Artificial Sequence
  Description of Artificial Sequence: Synthetic oligonucleotide
  Target: LAMA2; (-) strand; PAM type: NRG; PAM sequence: GAG
gtctagggagacagtctgat

SEQ ID NO: 59089 - DNA, 20 bp, Artificial Sequence
  Description of Artificial Sequence: Synthetic oligonucleotide
  Target: LAMA2; (-) strand; PAM type: NRG; PAM sequence: CAG
ggtgtggtggtctagggaga

SEQ ID NO: 59090 - DNA, 20 bp, Artificial Sequence
  Description of Artificial Sequence: Synthetic oligonucleotide
  Target: LAMA2; (-) strand; PAM type: NRG; PAM sequence: GAG
gtggggtgtggtggtctagg

SEQ ID NO: 59091 - DNA, 20 bp, Artificial Sequence
  Description of Artificial Sequence: Synthetic oligonucleotide
  Target: LAMA2; (-) strand; PAM type: NRG; PAM sequence: GGG
gggtggggtgtggtggtcta

SEQ ID NO: 59092 - DNA, 20 bp, Artificial Sequence
  Description of Artificial Sequence: Synthetic oligonucleotide
  Target: LAMA2; (-) strand; PAM type: NRG; PAM sequence: AGG
tgggtggggtgtggtggtct

SEQ ID NO: 59093 - DNA, 20 bp, Artificial Sequence
  Description of Artificial Sequence: Synthetic oligonucleotide
  Target: LAMA2; (-) strand; PAM type: NRG; PAM sequence: TAG
ttgggtggggtgtggtggtc

SEQ ID NO: 59094 - DNA, 20 bp, Artificial Sequence
  Description of Artificial Sequence: Synthetic oligonucleotide
  Target: LAMA2; (-) strand; PAM type: NRG; PAM sequence: TGG
agttgttgggtggggtgtgg

SEQ ID NO: 59095 - DNA, 20 bp, Artificial Sequence
  Description of Artificial Sequence: Synthetic oligonucleotide
  Target: LAMA2; (-) strand; PAM type: NRG; PAM sequence: TGG
tctagttgttgggtggggtg

SEQ ID NO: 59096 - DNA, 20 bp, Artificial Sequence
  Description of Artificial Sequence: Synthetic oligonucleotide
  Target: LAMA2; (-) strand; PAM type: NRG; PAM sequence: GGG
tgtgatctagttgttgggtg

SEQ ID NO: 59097 - DNA, 20 bp, Artificial Sequence
  Description of Artificial Sequence: Synthetic oligonucleotide
  Target: LAMA2; (-) strand; PAM type: NRG; PAM sequence: GGG
atgtgatctagttgttgggt

SEQ ID NO: 59098 - DNA, 20 bp, Artificial Sequence
  Description of Artificial Sequence: Synthetic oligonucleotide
  Target: LAMA2; (-) strand; PAM type: NRG; PAM sequence: TGG
gatgtgatctagttgttggg

SEQ ID NO: 59099 - DNA, 20 bp, Artificial Sequence
  Description of Artificial Sequence: Synthetic oligonucleotide
  Target: LAMA2; (-) strand; PAM type: NRG; PAM sequence: GGG
agggatgtgatctagttgtt

SEQ ID NO: 59100 - DNA, 20 bp, Artificial Sequence
  Description of Artificial Sequence: Synthetic oligonucleotide
  Target: LAMA2; (-) strand; PAM type: NRG; PAM sequence: TGG
aagggatgtgatctagttgt

SEQ ID NO: 59101 - DNA, 20 bp, Artificial Sequence
  Description of Artificial Sequence: Synthetic oligonucleotide
  Target: LAMA2; (-) strand; PAM type: NRG; PAM sequence: TAG
cctaataaagggatgtgatc

SEQ ID NO: 59102 - DNA, 20 bp, Artificial Sequence
  Description of Artificial Sequence: Synthetic oligonucleotide
  Target: LAMA2; (-) strand; PAM type: NRG; PAM sequence: GGG
aacatagtacccctaataaa

SEQ ID NO: 59103 - DNA, 20 bp, Artificial Sequence
  Description of Artificial Sequence: Synthetic oligonucleotide
  Target: LAMA2; (-) strand; PAM type: NRG; PAM sequence: AGG
aaacatagtacccctaataa

SEQ ID NO: 59104 - DNA, 20 bp, Artificial Sequence
  Description of Artificial Sequence: Synthetic oligonucleotide
  Target: LAMA2; (-) strand; PAM type: NRG; PAM sequence: AAG
aaaacatagtacccctaata

SEQ ID NO: 59105 - DNA, 20 bp, Artificial Sequence
  Description of Artificial Sequence: Synthetic oligonucleotide
  Target: LAMA2; (-) strand; PAM type: NRG; PAM sequence: TAG
ttgcaattatactgaaaaca

SEQ ID NO: 59106 - DNA, 20 bp, Artificial Sequence
  Description of Artificial Sequence: Synthetic oligonucleotide
  Target: LAMA2; (-) strand; PAM type: NRG; PAM sequence: GGG
catgaatcaactcattcaat

SEQ ID NO: 59107 - DNA, 20 bp, Artificial Sequence
  Description of Artificial Sequence: Synthetic oligonucleotide
  Target: LAMA2; (-) strand; PAM type: NRG; PAM sequence: TGG
acatgaatcaactcattcaa

SEQ ID NO: 59108 - DNA, 20 bp, Artificial Sequence
  Description of Artificial Sequence: Synthetic oligonucleotide
  Target: LAMA2; (-) strand; PAM type: NRG; PAM sequence: GGG
agcttataataaagaaggaa

SEQ ID NO: 59109 - DNA, 20 bp, Artificial Sequence
  Description of Artificial Sequence: Synthetic oligonucleotide
  Target: LAMA2; (-) strand; PAM type: NRG; PAM sequence: AGG
aagcttataataaagaagga

SEQ ID NO: 59110 - DNA, 20 bp, Artificial Sequence
  Description of Artificial Sequence: Synthetic oligonucleotide
  Target: LAMA2; (-) strand; PAM type: NRG; PAM sequence: AAG
aaagcttataataaagaagg

SEQ ID NO: 59111 - DNA, 20 bp, Artificial Sequence
  Description of Artificial Sequence: Synthetic oligonucleotide
  Target: LAMA2; (-) strand; PAM type: NRG; PAM sequence: AGG
cttaaagcttataataaaga

SEQ ID NO: 59112 - DNA, 20 bp, Artificial Sequence
  Description of Artificial Sequence: Synthetic oligonucleotide
  Target: LAMA2; (-) strand; PAM type: NRG; PAM sequence: AAG
tcttaaagcttataataaag

SEQ ID NO: 59113 - DNA, 20 bp, Artificial Sequence
  Description of Artificial Sequence: Synthetic oligonucleotide
  Target: LAMA2; (-) strand; PAM type: NRG; PAM sequence: AAG
ccctcttaaagcttataata

SEQ ID NO: 59114 - DNA, 20 bp, Artificial Sequence
  Description of Artificial Sequence: Synthetic oligonucleotide
  Target: LAMA2; (-) strand; PAM type: NRG; PAM sequence: AAG
aaatagtttttgccctctta

SEQ ID NO: 59115 - DNA, 20 bp, Artificial Sequence
  Description of Artificial Sequence: Synthetic oligonucleotide
  Target: LAMA2; (-) strand; PAM type: NRG; PAM sequence: TAG
gatggtaagaaaaacagaaa

SEQ ID NO: 59116 - DNA, 20 bp, Artificial Sequence
  Description of Artificial Sequence: Synthetic oligonucleotide
  Target: LAMA2; (-) strand; PAM type: NRG; PAM sequence: CAG
gggaaagatggtaagaaaaa

SEQ ID NO: 59117 - DNA, 20 bp, Artificial Sequence
  Description of Artificial Sequence: Synthetic oligonucleotide
  Target: LAMA2; (-) strand; PAM type: NRG; PAM sequence: AAG
actaaagagggaaagatggt

SEQ ID NO: 59118 - DNA, 20 bp, Artificial Sequence
  Description of Artificial Sequence: Synthetic oligonucleotide
  Target: LAMA2; (-) strand; PAM type: NRG; PAM sequence: TGG
aagcactaaagagggaaaga

SEQ ID NO: 59119 - DNA, 20 bp, Artificial Sequence
  Description of Artificial Sequence: Synthetic oligonucleotide
  Target: LAMA2; (-) strand; PAM type: NRG; PAM sequence: AAG
gtggaagcactaaagaggga

SEQ ID NO: 59120 - DNA, 20 bp, Artificial Sequence
  Description of Artificial Sequence: Synthetic oligonucleotide
  Target: LAMA2; (-) strand; PAM type: NRG; PAM sequence: GGG
caatgtggaagcactaaaga

SEQ ID NO: 59121 - DNA, 20 bp, Artificial Sequence
  Description of Artificial Sequence: Synthetic oligonucleotide
  Target: LAMA2; (-) strand; PAM type: NRG; PAM sequence: AGG
acaatgtggaagcactaaag

SEQ ID NO: 59122 - DNA, 20 bp, Artificial Sequence
  Description of Artificial Sequence: Synthetic oligonucleotide
  Target: LAMA2; (-) strand; PAM type: NRG; PAM sequence: GAG
gacaatgtggaagcactaaa

SEQ ID NO: 59123 - DNA, 20 bp, Artificial Sequence
  Description of Artificial Sequence: Synthetic oligonucleotide
  Target: LAMA2; (-) strand; PAM type: NRG; PAM sequence: AAG
cagacaatgtggaagcacta

SEQ ID NO: 59124 - DNA, 20 bp, Artificial Sequence
  Description of Artificial Sequence: Synthetic oligonucleotide
  Target: LAMA2; (-) strand; PAM type: NRG; PAM sequence: AAG
caatgtaccagacaatgtgg

SEQ ID NO: 59125 - DNA, 20 bp, Artificial Sequence
  Description of Artificial Sequence: Synthetic oligonucleotide
  Target: LAMA2; (-) strand; PAM type: NRG; PAM sequence: TGG
ctgcaatgtaccagacaatg

SEQ ID NO: 59126 - DNA, 20 bp, Artificial Sequence
  Description of Artificial Sequence: Synthetic oligonucleotide
  Target: LAMA2; (-) strand; PAM type: NRG; PAM sequence: CAG
attagatgtctgcaatgtac

SEQ ID NO: 59127 - DNA, 20 bp, Artificial Sequence
  Description of Artificial Sequence: Synthetic oligonucleotide
  Target: LAMA2; (-) strand; PAM type: NRG; PAM sequence: TAG
tccttccgacaaatatttat

SEQ ID NO: 59128 - DNA, 20 bp, Artificial Sequence
  Description of Artificial Sequence: Synthetic oligonucleotide
  Target: LAMA2; (-) strand; PAM type: NRG; PAM sequence: AGG
ctctttgtttcagtcattga

SEQ ID NO: 59129 - DNA, 20 bp, Artificial Sequence
  Description of Artificial Sequence: Synthetic oligonucleotide
  Target: LAMA2; (-) strand; PAM type: NRG; PAM sequence: AAG
actctttgtttcagtcattg

SEQ ID NO: 59130 - DNA, 20 bp, Artificial Sequence
  Description of Artificial Sequence: Synthetic oligonucleotide
  Target: LAMA2; (-) strand; PAM type: NRG; PAM sequence: CAG
ggatatggaactctttgttt

SEQ ID NO: 59131 - DNA, 20 bp, Artificial Sequence
  Description of Artificial Sequence: Synthetic oligonucleotide
  Target: LAMA2; (-) strand; PAM type: NRG; PAM sequence: TGG
tcaggtcatatttcaggata

SEQ ID NO: 59132 - DNA, 20 bp, Artificial Sequence
  Description of Artificial Sequence: Synthetic oligonucleotide
  Target: LAMA2; (-) strand; PAM type: NRG; PAM sequence: AGG
tggctttcaggtcatatttc

SEQ ID NO: 59133 - DNA, 20 bp, Artificial Sequence
  Description of Artificial Sequence: Synthetic oligonucleotide
  Target: LAMA2; (-) strand; PAM type: NRG; PAM sequence: CAG
atggctttcaggtcatattt

SEQ ID NO: 59134 - DNA, 20 bp, Artificial Sequence
  Description of Artificial Sequence: Synthetic oligonucleotide
  Target: LAMA2; (-) strand; PAM type: NRG; PAM sequence: AGG
cctttcattccatggctttc

SEQ ID NO: 59135 - DNA, 20 bp, Artificial Sequence
  Description of Artificial Sequence: Synthetic oligonucleotide
  Target: LAMA2; (-) strand; PAM type: NRG; PAM sequence: CAG
acctttcattccatggcttt

SEQ ID NO: 59136 - DNA, 20 bp, Artificial Sequence
  Description of Artificial Sequence: Synthetic oligonucleotide
  Target: LAMA2; (-) strand; PAM type: NRG; PAM sequence: TGG
ttatcaaacctttcattcca

SEQ ID NO: 59137 - DNA, 20 bp, Artificial Sequence
  Description of Artificial Sequence: Synthetic oligonucleotide
  Target: LAMA2; (-) strand; PAM type: NRG; PAM sequence: CAG
caggtgtgagctaccacgtc

SEQ ID NO: 59138 - DNA, 20 bp, Artificial Sequence
  Description of Artificial Sequence: Synthetic oligonucleotide
  Target: LAMA2; (-) strand; PAM type: NRG; PAM sequence: GAG
aatgctgggatcacaggtgt

SEQ ID NO: 59139 - DNA, 20 bp, Artificial Sequence
  Description of Artificial Sequence: Synthetic oligonucleotide
  Target: LAMA2; (-) strand; PAM type: NRG; PAM sequence: AGG
tctagaaatgctgggatcac

SEQ ID NO: 59140 - DNA, 20 bp, Artificial Sequence
  Description of Artificial Sequence: Synthetic oligonucleotide
  Target: LAMA2; (-) strand; PAM type: NRG; PAM sequence: CAG
ctctagaaatgctgggatca

SEQ ID NO: 59141 - DNA, 20 bp, Artificial Sequence
  Description of Artificial Sequence: Synthetic oligonucleotide
  Target: LAMA2; (-) strand; PAM type: NRG; PAM sequence: GGG
ccctggtctctagaaatgct

SEQ ID NO: 59142 - DNA, 20 bp, Artificial Sequence
  Description of Artificial Sequence: Synthetic oligonucleotide
  Target: LAMA2; (-) strand; PAM type: NRG; PAM sequence: TGG
accctggtctctagaaatgc

SEQ ID NO: 59143 - DNA, 20 bp, Artificial Sequence
  Description of Artificial Sequence: Synthetic oligonucleotide
  Target: LAMA2; (-) strand; PAM type: NRG; PAM sequence: TAG
gattctctcaccctggtctc

SEQ ID NO: 59144 - DNA, 20 bp, Artificial Sequence
  Description of Artificial Sequence: Synthetic oligonucleotide
  Target: LAMA2; (-) strand; PAM type: NRG; PAM sequence: TGG
ctcaagcgattctctcaccc

SEQ ID NO: 59145 - DNA, 20 bp, Artificial Sequence
  Description of Artificial Sequence: Synthetic oligonucleotide
  Target: LAMA2; (-) strand; PAM type: NRG; PAM sequence: AAG
ggccttgaacttctgagctc

SEQ ID NO: 59146 - DNA, 20 bp, Artificial Sequence
  Description of Artificial Sequence: Synthetic oligonucleotide
  Target: LAMA2; (-) strand; PAM type: NRG; PAM sequence: GAG
caggctggccttgaacttct

SEQ ID NO: 59147 - DNA, 20 bp, Artificial Sequence
  Description of Artificial Sequence: Synthetic oligonucleotide
  Target: LAMA2; (-) strand; PAM type: NRG; PAM sequence: TGG
aggtattgtgctacccaggc

SEQ ID NO: 59148 - DNA, 20 bp, Artificial Sequence
  Description of Artificial Sequence: Synthetic oligonucleotide
  Target: LAMA2; (-) strand; PAM type: NRG; PAM sequence: AGG
gacaaggtattgtgctaccc

SEQ ID NO: 59149 - DNA, 20 bp, Artificial Sequence
  Description of Artificial Sequence: Synthetic oligonucleotide
  Target: LAMA2; (-) strand; PAM type: NRG; PAM sequence: CAG
agacaaggtattgtgctacc

SEQ ID NO: 59150 - DNA, 20 bp, Artificial Sequence
  Description of Artificial Sequence: Synthetic oligonucleotide
  Target: LAMA2; (-) strand; PAM type: NRG; PAM sequence: AGG
tttctttttttgtagagaca

SEQ ID NO: 59151 - DNA, 20 bp, Artificial Sequence
  Description of Artificial Sequence: Synthetic oligonucleotide
  Target: LAMA2; (-) strand; PAM type: NRG; PAM sequence: AAG
gtttctttttttgtagagac

SEQ ID NO: 59152 - DNA, 20 bp, Artificial Sequence
  Description of Artificial Sequence: Synthetic oligonucleotide
  Target: LAMA2; (-) strand; PAM type: NRG; PAM sequence: GAG
attttgtttctttttttgta

SEQ ID NO: 59153 - DNA, 20 bp, Artificial Sequence
  Description of Artificial Sequence: Synthetic oligonucleotide
  Target: LAMA2; (-) strand; PAM type: NRG; PAM sequence: TAG
taattttgtttctttttttg

SEQ ID NO: 59154 - DNA, 20 bp, Artificial Sequence
  Description of Artificial Sequence: Synthetic oligonucleotide
  Target: LAMA2; (-) strand; PAM type: NRG; PAM sequence: AGG
tttggagtaggtgggactac

SEQ ID NO: 59155 - DNA, 20 bp, Artificial Sequence
  Description of Artificial Sequence: Synthetic oligonucleotide
  Target: LAMA2; (-) strand; PAM type: NRG; PAM sequence: CAG
ctttggagtaggtgggacta

SEQ ID NO: 59156 - DNA, 20 bp, Artificial Sequence
  Description of Artificial Sequence: Synthetic oligonucleotide
  Target: LAMA2; (-) strand; PAM type: NRG; PAM sequence: GGG
cttcagcctttggagtaggt

SEQ ID NO: 59157 - DNA, 20 bp, Artificial Sequence
  Description of Artificial Sequence: Synthetic oligonucleotide
  Target: LAMA2; (-) strand; PAM type: NRG; PAM sequence: TGG
acttcagcctttggagtagg

SEQ ID NO: 59158 - DNA, 20 bp, Artificial Sequence
  Description of Artificial Sequence: Synthetic oligonucleotide
  Target: LAMA2; (-) strand; PAM type: NRG; PAM sequence: AGG
cccacttcagcctttggagt

SEQ ID NO: 59159 - DNA, 20 bp, Artificial Sequence
  Description of Artificial Sequence: Synthetic oligonucleotide
  Target: LAMA2; (-) strand; PAM type: NRG; PAM sequence: TAG
tcccacttcagcctttggag

SEQ ID NO: 59160 - DNA, 20 bp, Artificial Sequence
  Description of Artificial Sequence: Synthetic oligonucleotide
  Target: LAMA2; (-) strand; PAM type: NRG; PAM sequence: GAG
tcctcccacttcagcctttg

SEQ ID NO: 59161 - DNA, 20 bp, Artificial Sequence
  Description of Artificial Sequence: Synthetic oligonucleotide
  Target: LAMA2; (-) strand; PAM type: NRG; PAM sequence: TGG
aatcctcccacttcagcctt

SEQ ID NO: 59162 - DNA, 20 bp, Artificial Sequence
  Description of Artificial Sequence: Synthetic oligonucleotide
  Target: LAMA2; (-) strand; PAM type: NRG; PAM sequence: CAG
ctcatgcaatcctcccactt

SEQ ID NO: 59163 - DNA, 20 bp, Artificial Sequence
  Description of Artificial Sequence: Synthetic oligonucleotide
  Target: LAMA2; (-) strand; PAM type: NRG; PAM sequence: GGG
cgctgcagcctggaactcct

SEQ ID NO: 59164 - DNA, 20 bp, Artificial Sequence
  Description of Artificial Sequence: Synthetic oligonucleotide
  Target: LAMA2; (-) strand; PAM type: NRG; PAM sequence: TGG
acgctgcagcctggaactcc

SEQ ID NO: 59165 - DNA, 20 bp, Artificial Sequence
  Description of Artificial Sequence: Synthetic oligonucleotide
  Target: LAMA2; (-) strand; PAM type: NRG; PAM sequence: TGG
gatctcagcacgctgcagcc

SEQ ID NO: 59166 - DNA, 20 bp, Artificial Sequence
  Description of Artificial Sequence: Synthetic oligonucleotide
  Target: LAMA2; (-) strand; PAM type: NRG; PAM sequence: CAG
ggcatgatctcagcacgctg

SEQ ID NO: 59167 - DNA, 20 bp, Artificial Sequence
  Description of Artificial Sequence: Synthetic oligonucleotide
  Target: LAMA2; (-) strand; PAM type: NRG; PAM sequence: CAG
ggagcacagtggcatgatct

SEQ ID NO: 59168 - DNA, 20 bp, Artificial Sequence
  Description of Artificial Sequence: Synthetic oligonucleotide
  Target: LAMA2; (-) strand; PAM type: NRG; PAM sequence: TGG
tcacccagcctggagcacag

SEQ ID NO: 59169 - DNA, 20 bp, Artificial Sequence
  Description of Artificial Sequence: Synthetic oligonucleotide
  Target: LAMA2; (-) strand; PAM type: NRG; PAM sequence: CAG
ctgtcacccagcctggagca

SEQ ID NO: 59170 - DNA, 20 bp, Artificial Sequence
  Description of Artificial Sequence: Synthetic oligonucleotide
  Target: LAMA2; (-) strand; PAM type: NRG; PAM sequence: GAG
ttgctctgtcacccagcctg

SEQ ID NO: 59171 - DNA, 20 bp, Artificial Sequence
  Description of Artificial Sequence: Synthetic oligonucleotide
  Target: LAMA2; (-) strand; PAM type: NRG; PAM sequence: TGG
tcttgctctgtcacccagcc

SEQ ID NO: 59172 - DNA, 20 bp, Artificial Sequence
  Description of Artificial Sequence: Synthetic oligonucleotide
  Target: LAMA2; (-) strand; PAM type: NRG; PAM sequence: CAG
caggctcttgctctgtcacc

SEQ ID NO: 59173 - DNA, 20 bp, Artificial Sequence
  Description of Artificial Sequence: Synthetic oligonucleotide
  Target: LAMA2; (-) strand; PAM type: NRG; PAM sequence: AGG
aaaaaaattttgggggggac

SEQ ID NO: 59174 - DNA, 20 bp, Artificial Sequence
  Description of Artificial Sequence: Synthetic oligonucleotide
  Target: LAMA2; (-) strand; PAM type: NRG; PAM sequence: CAG
taaaaaaattttggggggga

SEQ ID NO: 59175 - DNA, 20 bp, Artificial Sequence
  Description of Artificial Sequence: Synthetic oligonucleotide
  Target: LAMA2; (-) strand; PAM type: NRG; PAM sequence: GGG
tatttaaaaaaattttgggg

SEQ ID NO: 59176 - DNA, 20 bp, Artificial Sequence
  Description of Artificial Sequence: Synthetic oligonucleotide
  Target: LAMA2; (-) strand; PAM type: NRG; PAM sequence: GGG
ttatttaaaaaaattttggg

SEQ ID NO: 59177 - DNA, 20 bp, Artificial Sequence
  Description of Artificial Sequence: Synthetic oligonucleotide
  Target: LAMA2; (-) strand; PAM type: NRG; PAM sequence: GGG
cttatttaaaaaaattttgg

SEQ ID NO: 59178 - DNA, 20 bp, Artificial Sequence
  Description of Artificial Sequence: Synthetic oligonucleotide
  Target: LAMA2; (-) strand; PAM type: NRG; PAM sequence: GGG
tcttatttaaaaaaattttg

SEQ ID NO: 59179 - DNA, 20 bp, Artificial Sequence
  Description of Artificial Sequence: Synthetic oligonucleotide
  Target: LAMA2; (-) strand; PAM type: NRG; PAM sequence: GGG
ttcttatttaaaaaaatttt

SEQ ID NO: 59180 - DNA, 20 bp, Artificial Sequence
  Description of Artificial Sequence: Synthetic oligonucleotide
  Target: LAMA2; (-) strand; PAM type: NRG; PAM sequence: TGG
tttcttatttaaaaaaattt

SEQ ID NO: 59181 - DNA, 20 bp, Artificial Sequence
  Description of Artificial Sequence: Synthetic oligonucleotide
  Target: LAMA2; (-) strand; PAM type: NRG; PAM sequence: TGG
ttcttcctttatggaataca

SEQ ID NO: 59182 - DNA, 20 bp, Artificial Sequence
  Description of Artificial Sequence: Synthetic oligonucleotide
  Target: LAMA2; (-) strand; PAM type: NRG; PAM sequence: TGG
gctcttaacttcttccttta

SEQ ID NO: 59183 - DNA, 20 bp, Artificial Sequence
  Description of Artificial Sequence: Synthetic oligonucleotide
  Target: LAMA2; (-) strand; PAM type: NRG; PAM sequence: AAG
cttttcagacaagttcttaa

SEQ ID NO: 59184 - DNA, 20 bp, Artificial Sequence
  Description of Artificial Sequence: Synthetic oligonucleotide
  Target: LAMA2; (-) strand; PAM type: NRG; PAM sequence: AAG
agaatatcctcttttcagac

SEQ ID NO: 59185 - DNA, 20 bp, Artificial Sequence
  Description of Artificial Sequence: Synthetic oligonucleotide
  Target: LAMA2; (-) strand; PAM type: NRG; PAM sequence: CAG
accaaagaatatcctctttt

SEQ ID NO: 59186 - DNA, 20 bp, Artificial Sequence
  Description of Artificial Sequence: Synthetic oligonucleotide
  Target: LAMA2; (-) strand; PAM type: NRG; PAM sequence: AAG
attttttcaactattgacca

SEQ ID NO: 59187 - DNA, 20 bp, Artificial Sequence
  Description of Artificial Sequence: Synthetic oligonucleotide
  Target: LAMA2; (-) strand; PAM type: NRG; PAM sequence: AGG
tgacttgctccactccagca

SEQ ID NO: 59188 - DNA, 20 bp, Artificial Sequence
  Description of Artificial Sequence: Synthetic oligonucleotide
  Target: LAMA2; (-) strand; PAM type: NRG; PAM sequence: AAG
ttgacttgctccactccagc

SEQ ID NO: 59189 - DNA, 20 bp, Artificial Sequence
  Description of Artificial Sequence: Synthetic oligonucleotide
  Target: LAMA2; (-) strand; PAM type: NRG; PAM sequence: CAG
tccattgacttgctccactc

SEQ ID NO: 59190 - DNA, 20 bp, Artificial Sequence
  Description of Artificial Sequence: Synthetic oligonucleotide
  Target: LAMA2; (-) strand; PAM type: NRG; PAM sequence: AGG
aatgctccacctaactgtga

SEQ ID NO: 59191 - DNA, 20 bp, Artificial Sequence
  Description of Artificial Sequence: Synthetic oligonucleotide
  Target: LAMA2; (-) strand; PAM type: NRG; PAM sequence: AAG
aaatgctccacctaactgtg

SEQ ID NO: 59192 - DNA, 20 bp, Artificial Sequence
  Description of Artificial Sequence: Synthetic oligonucleotide
  Target: LAMA2; (-) strand; PAM type: NRG; PAM sequence: TAG
atgttcgaaataaagtcatt

SEQ ID NO: 59193 - DNA, 20 bp, Artificial Sequence
  Description of Artificial Sequence: Synthetic oligonucleotide
  Target: LAMA2; (-) strand; PAM type: NRG; PAM sequence: AAG
tttgttgaatgttcgaaata

SEQ ID NO: 59194 - DNA, 20 bp, Artificial Sequence
  Description of Artificial Sequence: Synthetic oligonucleotide
  Target: LAMA2; (-) strand; PAM type: NRG; PAM sequence: CAG
gtaaccaatagacaatcagt

SEQ ID NO: 59195 - DNA, 20 bp, Artificial Sequence
  Description of Artificial Sequence: Synthetic oligonucleotide
  Target: LAMA2; (-) strand; PAM type: NRG; PAM sequence: CAG
gcgggtaaccaatagacaat

SEQ ID NO: 59196 - DNA, 20 bp, Artificial Sequence
  Description of Artificial Sequence: Synthetic oligonucleotide
  Target: LAMA2; (-) strand; PAM type: NRG; PAM sequence: TAG
attatatggcgggtaaccaa

SEQ ID NO: 59197 - DNA, 20 bp, Artificial Sequence
  Description of Artificial Sequence: Synthetic oligonucleotide
  Target: LAMA2; (-) strand; PAM type: NRG; PAM sequence: GGG
agcacctaacattatatggc

SEQ ID NO: 59198 - DNA, 20 bp, Artificial Sequence
  Description of Artificial Sequence: Synthetic oligonucleotide
  Target: LAMA2; (-) strand; PAM type: NRG; PAM sequence: CGG
cagcacctaacattatatgg

SEQ ID NO: 59199 - DNA, 20 bp, Artificial Sequence
  Description of Artificial Sequence: Synthetic oligonucleotide
  Target: LAMA2; (-) strand; PAM type: NRG; PAM sequence: TGG
ccccagcacctaacattata

SEQ ID NO: 59200 - DNA, 20 bp, Artificial Sequence
  Description of Artificial Sequence: Synthetic oligonucleotide
  Target: LAMA2; (-) strand; PAM type: NRG; PAM sequence: CAG
tctacttacttctatttccc

SEQ ID NO: 59201 - DNA, 20 bp, Artificial Sequence
  Description of Artificial Sequence: Synthetic oligonucleotide
  Target: LAMA2; (-) strand; PAM type: NRG; PAM sequence: CAG
attttcctttccaagagcca

SEQ ID NO: 59202 - DNA, 20 bp, Artificial Sequence
  Description of Artificial Sequence: Synthetic oligonucleotide
  Target: LAMA2; (-) strand; PAM type: NRG; PAM sequence: GAG
ttatgtattttcctttccaa

SEQ ID NO: 59203 - DNA, 20 bp, Artificial Sequence
  Description of Artificial Sequence: Synthetic oligonucleotide
  Target: LAMA2; (-) strand; PAM type: NRG; PAM sequence: AAG
gattatgtattttcctttcc

SEQ ID NO: 59204 - DNA, 20 bp, Artificial Sequence
  Description of Artificial Sequence: Synthetic oligonucleotide
  Target: LAMA2; (-) strand; PAM type: NRG; PAM sequence: CAG
atccatttttcaaaagcctt

SEQ ID NO: 59205 - DNA, 20 bp, Artificial Sequence
  Description of Artificial Sequence: Synthetic oligonucleotide
  Target: LAMA2; (-) strand; PAM type: NRG; PAM sequence: AAG
atcccagatccatttttcaa

SEQ ID NO: 59206 - DNA, 20 bp, Artificial Sequence
  Description of Artificial Sequence: Synthetic oligonucleotide
  Target: LAMA2; (-) strand; PAM type: NRG; PAM sequence: CAG
aacaaacatcctccctatcc

SEQ ID NO: 59207 - DNA, 20 bp, Artificial Sequence
  Description of Artificial Sequence: Synthetic oligonucleotide
  Target: LAMA2; (-) strand; PAM type: NRG; PAM sequence: TGG
gattagtttattgaattaat

SEQ ID NO: 59208 - DNA, 20 bp, Artificial Sequence
  Description of Artificial Sequence: Synthetic oligonucleotide
  Target: LAMA2; (-) strand; PAM type: NRG; PAM sequence: TAG
atactcactaaaatcatgat

SEQ ID NO: 59209 - DNA, 20 bp, Artificial Sequence
  Description of Artificial Sequence: Synthetic oligonucleotide
  Target: LAMA2; (-) strand; PAM type: NRG; PAM sequence: TAG
tcaaactaagtgagggttca

SEQ ID NO: 59210 - DNA, 20 bp, Artificial Sequence
  Description of Artificial Sequence: Synthetic oligonucleotide
  Target: LAMA2; (-) strand; PAM type: NRG; PAM sequence: GGG
aaggtaatcaaactaagtga

SEQ ID NO: 59211 - DNA, 20 bp, Artificial Sequence
  Description of Artificial Sequence: Synthetic oligonucleotide
  Target: LAMA2; (-) strand; PAM type: NRG; PAM sequence: AGG
caaggtaatcaaactaagtg

SEQ ID NO: 59212 - DNA, 20 bp, Artificial Sequence
  Description of Artificial Sequence: Synthetic oligonucleotide
  Target: LAMA2; (-) strand; PAM type: NRG; PAM sequence: GAG
tcaaggtaatcaaactaagt

SEQ ID NO: 59213 - DNA, 20 bp, Artificial Sequence
  Description of Artificial Sequence: Synthetic oligonucleotide
  Target: LAMA2; (-) strand; PAM type: NRG; PAM sequence: AAG
acagtcaaggtaatcaaact

SEQ ID NO: 59214 - DNA, 20 bp, Artificial Sequence
  Description of Artificial Sequence: Synthetic oligonucleotide
  Target: LAMA2; (-) strand; PAM type: NRG; PAM sequence: AGG
aaagttaaatgtcacagtca

SEQ ID NO: 59215 - DNA, 20 bp, Artificial Sequence
  Description of Artificial Sequence: Synthetic oligonucleotide
  Target: LAMA2; (-) strand; PAM type: NRG; PAM sequence: AAG
caaagttaaatgtcacagtc

SEQ ID NO: 59216 - DNA, 20 bp, Artificial Sequence
  Description of Artificial Sequence: Synthetic oligonucleotide
  Target: LAMA2; (-) strand; PAM type: NRG; PAM sequence: CAG
aaatacaaagttaaatgtca

SEQ ID NO: 59217 - DNA, 20 bp, Artificial Sequence
  Description of Artificial Sequence: Synthetic oligonucleotide
  Target: LAMA2; (-) strand; PAM type: NRG; PAM sequence: AAG
caaagaagtagtgaaataca

SEQ ID NO: 59218 - DNA, 20 bp, Artificial Sequence
  Description of Artificial Sequence: Synthetic oligonucleotide
  Target: LAMA2; (-) strand; PAM type: NRG; PAM sequence: TAG
atgtaagagaagcaaagaag

SEQ ID NO: 59219 - DNA, 20 bp, Artificial Sequence
  Description of Artificial Sequence: Synthetic oligonucleotide
  Target: LAMA2; (-) strand; PAM type: NRG; PAM sequence: AAG
tgaatgtaagagaagcaaag

SEQ ID NO: 59220 - DNA, 20 bp, Artificial Sequence
  Description of Artificial Sequence: Synthetic oligonucleotide
  Target: LAMA2; (-) strand; PAM type: NRG; PAM sequence: AAG
aactgaatgtaagagaagca

SEQ ID NO: 59221 - DNA, 20 bp, Artificial Sequence
  Description of Artificial Sequence: Synthetic oligonucleotide
  Target: LAMA2; (-) strand; PAM type: NRG; PAM sequence: AAG
tttttaactgaatgtaagag

SEQ ID NO: 59222 - DNA, 20 bp, Artificial Sequence
  Description of Artificial Sequence: Synthetic oligonucleotide
  Target: LAMA2; (-) strand; PAM type: NRG; PAM sequence: GAG
atatttttaactgaatgtaa

SEQ ID NO: 59223 - DNA, 20 bp, Artificial Sequence
  Description of Artificial Sequence: Synthetic oligonucleotide
  Target: LAMA2; (-) strand; PAM type: NRG; PAM sequence: AAG
aaatatttttaactgaatgt

SEQ ID NO: 59224 - DNA, 20 bp, Artificial Sequence
  Description of Artificial Sequence: Synthetic oligonucleotide
  Target: LAMA2; (-) strand; PAM type: NRG; PAM sequence: CAG
ctgagcacatctattttttc

SEQ ID NO: 59225 - DNA, 20 bp, Artificial Sequence
  Description of Artificial Sequence: Synthetic oligonucleotide
  Target: LAMA2; (-) strand; PAM type: NRG; PAM sequence: GAG
tatttttattttttagttct

SEQ ID NO: 59226 - DNA, 20 bp, Artificial Sequence
  Description of Artificial Sequence: Synthetic oligonucleotide
  Target: LAMA2; (-) strand; PAM type: NRG; PAM sequence: TAG
tctccattatttttattttt

SEQ ID NO: 59227 - DNA, 20 bp, Artificial Sequence
  Description of Artificial Sequence: Synthetic oligonucleotide
  Target: LAMA2; (-) strand; PAM type: NRG; PAM sequence: TGG
tcacgtgagaatatatttaa

SEQ ID NO: 59228 - DNA, 20 bp, Artificial Sequence
  Description of Artificial Sequence: Synthetic oligonucleotide
  Target: LAMA2; (-) strand; PAM type: NRG; PAM sequence: GAG
gaaattactttggatcacgt

SEQ ID NO: 59229 - DNA, 20 bp, Artificial Sequence
  Description of Artificial Sequence: Synthetic oligonucleotide
  Target: LAMA2; (-) strand; PAM type: NRG; PAM sequence: TGG
cacagagaacgaaattactt

SEQ ID NO: 59230 - DNA, 20 bp, Artificial Sequence
  Description of Artificial Sequence: Synthetic oligonucleotide
  Target: LAMA2; (-) strand; PAM type: NRG; PAM sequence: GAG
ataccaactcgctgggcaca

SEQ ID NO: 59231 - DNA, 20 bp, Artificial Sequence
  Description of Artificial Sequence: Synthetic oligonucleotide
  Target: LAMA2; (-) strand; PAM type: NRG; PAM sequence: CAG
agataccaactcgctgggca

SEQ ID NO: 59232 - DNA, 20 bp, Artificial Sequence
  Description of Artificial Sequence: Synthetic oligonucleotide
  Target: LAMA2; (-) strand; PAM type: NRG; PAM sequence: GGG
tcagtagataccaactcgct

SEQ ID NO: 59233 - DNA, 20 bp, Artificial Sequence
  Description of Artificial Sequence: Synthetic oligonucleotide
  Target: LAMA2; (-) strand; PAM type: NRG; PAM sequence: TGG
atcagtagataccaactcgc

SEQ ID NO: 59234 - DNA, 20 bp, Artificial Sequence
  Description of Artificial Sequence: Synthetic oligonucleotide
  Target: LAMA2; (-) strand; PAM type: NRG; PAM sequence: TAG
atttgaaaaaccaccatcag

SEQ ID NO: 59235 - DNA, 20 bp, Artificial Sequence
  Description of Artificial Sequence: Synthetic oligonucleotide
  Target: LAMA2; (-) strand; PAM type: NRG; PAM sequence: CAG
tgcatttgaaaaaccaccat

SEQ ID NO: 59236 - DNA, 20 bp, Artificial Sequence
  Description of Artificial Sequence: Synthetic oligonucleotide
  Target: LAMA2; (-) strand; PAM type: NRG; PAM sequence: CGG
agtgatgacgtctaactgca

SEQ ID NO: 59237 - DNA, 20 bp, Artificial Sequence
  Description of Artificial Sequence: Synthetic oligonucleotide
  Target: LAMA2; (-) strand; PAM type: NRG; PAM sequence: CAG
gaggtctattattgaggtct

SEQ ID NO: 59238 - DNA, 20 bp, Artificial Sequence
  Description of Artificial Sequence: Synthetic oligonucleotide
  Target: LAMA2; (-) strand; PAM type: NRG; PAM sequence: AGG
gtgatggaggtctattattg

SEQ ID NO: 59239 - DNA, 20 bp, Artificial Sequence
  Description of Artificial Sequence: Synthetic oligonucleotide
  Target: LAMA2; (-) strand; PAM type: NRG; PAM sequence: GAG
agtgatggaggtctattatt

SEQ ID NO: 59240 - DNA, 20 bp, Artificial Sequence
  Description of Artificial Sequence: Synthetic oligonucleotide
  Target: LAMA2; (-) strand; PAM type: NRG; PAM sequence: AGG
tctgaacttctcagtgatgg

SEQ ID NO: 59241 - DNA, 20 bp, Artificial Sequence
  Description of Artificial Sequence: Synthetic oligonucleotide
  Target: LAMA2; (-) strand; PAM type: NRG; PAM sequence: GAG
ctctgaacttctcagtgatg

SEQ ID NO: 59242 - DNA, 20 bp, Artificial Sequence
  Description of Artificial Sequence: Synthetic oligonucleotide
  Target: LAMA2; (-) strand; PAM type: NRG; PAM sequence: TGG
acctctgaacttctcagtga

SEQ ID NO: 59243 - DNA, 20 bp, Artificial Sequence
  Description of Artificial Sequence: Synthetic oligonucleotide
  Target: LAMA2; (-) strand; PAM type: NRG; PAM sequence: CAG
tcttctacctctgaacttct

SEQ ID NO: 59244 - DNA, 20 bp, Artificial Sequence
  Description of Artificial Sequence: Synthetic oligonucleotide
  Target: LAMA2; (-) strand; PAM type: NRG; PAM sequence: AGG
tttcaagctaagattaatgc

SEQ ID NO: 59245 - DNA, 20 bp, Artificial Sequence
  Description of Artificial Sequence: Synthetic oligonucleotide
  Target: LAMA2; (-) strand; PAM type: NRG; PAM sequence: CAG
ttttcaagctaagattaatg

SEQ ID NO: 59246 - DNA, 20 bp, Artificial Sequence
  Description of Artificial Sequence: Synthetic oligonucleotide
  Target: LAMA2; (-) strand; PAM type: NRG; PAM sequence: AAG
aaagatcctcttttcaagct

SEQ ID NO: 59247 - DNA, 20 bp, Artificial Sequence
  Description of Artificial Sequence: Synthetic oligonucleotide
  Target: LAMA2; (-) strand; PAM type: NRG; PAM sequence: AAG
tatctaaagatcctcttttc

SEQ ID NO: 59248 - DNA, 20 bp, Artificial Sequence
  Description of Artificial Sequence: Synthetic oligonucleotide
  Target: LAMA2; (-) strand; PAM type: NRG; PAM sequence: AAG
aatttagatagtgttatcta

SEQ ID NO: 59249 - DNA, 20 bp, Artificial Sequence
  Description of Artificial Sequence: Synthetic oligonucleotide
  Target: LAMA2; (-) strand; PAM type: NRG; PAM sequence: TAG
tgaacacagctaaatttaga

SEQ ID NO: 59250 - DNA, 20 bp, Artificial Sequence
  Description of Artificial Sequence: Synthetic oligonucleotide
  Target: LAMA2; (-) strand; PAM type: NRG; PAM sequence: TAG
attttgaacacagctaaatt

SEQ ID NO: 59251 - DNA, 20 bp, Artificial Sequence
  Description of Artificial Sequence: Synthetic oligonucleotide
  Target: LAMA2; (-) strand; PAM type: NRG; PAM sequence: CAG
gtggtggagcattttgaaca

SEQ ID NO: 59252 - DNA, 20 bp, Artificial Sequence
  Description of Artificial Sequence: Synthetic oligonucleotide
  Target: LAMA2; (-) strand; PAM type: NRG; PAM sequence: GAG
tttgctgctcttctgtggtg

SEQ ID NO: 59253 - DNA, 20 bp, Artificial Sequence
  Description of Artificial Sequence: Synthetic oligonucleotide
  Target: LAMA2; (-) strand; PAM type: NRG; PAM sequence: TGG
tttttgctgctcttctgtgg

SEQ ID NO: 59254 - DNA, 20 bp, Artificial Sequence
  Description of Artificial Sequence: Synthetic oligonucleotide
  Target: LAMA2; (-) strand; PAM type: NRG; PAM sequence: TGG
tgctttttgctgctcttctg

SEQ ID NO: 59255 - DNA, 20 bp, Artificial Sequence
  Description of Artificial Sequence: Synthetic oligonucleotide
  Target: LAMA2; (-) strand; PAM type: NRG; PAM sequence: GAG
ttttctgagcttgttttaat

SEQ ID NO: 59256 - DNA, 20 bp, Artificial Sequence
  Description of Artificial Sequence: Synthetic oligonucleotide
  Target: LAMA2; (-) strand; PAM type: NRG; PAM sequence: GAG
atatcttggaattgttttct

SEQ ID NO: 59257 - DNA, 20 bp, Artificial Sequence
  Description of Artificial Sequence: Synthetic oligonucleotide
  Target: LAMA2; (-) strand; PAM type: NRG; PAM sequence: TGG
ttgcttttactcatatatct

SEQ ID NO: 59258 - DNA, 20 bp, Artificial Sequence
  Description of Artificial Sequence: Synthetic oligonucleotide
  Target: LAMA2; (-) strand; PAM type: NRG; PAM sequence: TAG
ctatttgtgcttccgttgtt

SEQ ID NO: 59259 - DNA, 20 bp, Artificial Sequence
  Description of Artificial Sequence: Synthetic oligonucleotide
  Target: LAMA2; (-) strand; PAM type: NRG; PAM sequence: AGG
tgcaagtagaagtcaagaga

SEQ ID NO: 59260 - DNA, 20 bp, Artificial Sequence
  Description of Artificial Sequence: Synthetic oligonucleotide
  Target: LAMA2; (-) strand; PAM type: NRG; PAM sequence: AAG
gtgcaagtagaagtcaagag

SEQ ID NO: 59261 - DNA, 20 bp, Artificial Sequence
  Description of Artificial Sequence: Synthetic oligonucleotide
  Target: LAMA2; (-) strand; PAM type: NRG; PAM sequence: GAG
gctgtgcaagtagaagtcaa

SEQ ID NO: 59262 - DNA, 20 bp, Artificial Sequence
  Description of Artificial Sequence: Synthetic oligonucleotide
  Target: LAMA2; (-) strand; PAM type: NRG; PAM sequence: AAG
gagctgtgcaagtagaagtc

SEQ ID NO: 59263 - DNA, 20 bp, Artificial Sequence
  Description of Artificial Sequence: Synthetic oligonucleotide
  Target: LAMA2; (-) strand; PAM type: NRG; PAM sequence: AAG
aagtagagctgtgcaagtag

SEQ ID NO: 59264 - DNA, 20 bp, Artificial Sequence
  Description of Artificial Sequence: Synthetic oligonucleotide
  Target: LAMA2; (-) strand; PAM type: NRG; PAM sequence: TAG
aataagtagagctgtgcaag

SEQ ID NO: 59265 - DNA, 20 bp, Artificial Sequence
  Description of Artificial Sequence: Synthetic oligonucleotide
  Target: LAMA2; (-) strand; PAM type: NRG; PAM sequence: AAG
ttgaataagtagagctgtgc

SEQ ID NO: 59266 - DNA, 20 bp, Artificial Sequence
  Description of Artificial Sequence: Synthetic oligonucleotide
  Target: LAMA2; (-) strand; PAM type: NRG; PAM sequence: GAG
aaacagagcttgaataagta

SEQ ID NO: 59267 - DNA, 20 bp, Artificial Sequence
  Description of Artificial Sequence: Synthetic oligonucleotide
  Target: LAMA2; (-) strand; PAM type: NRG; PAM sequence: TAG
cgaaacagagcttgaataag

SEQ ID NO: 59268 - DNA, 20 bp, Artificial Sequence
  Description of Artificial Sequence: Synthetic oligonucleotide
  Target: LAMA2; (-) strand; PAM type: NRG; PAM sequence: AAG
gtccgaaacagagcttgaat

SEQ ID NO: 59269 - DNA, 20 bp, Artificial Sequence
  Description of Artificial Sequence: Synthetic oligonucleotide
  Target: LAMA2; (-) strand; PAM type: NRG; PAM sequence: GAG
aaagcttaatgtccgaaaca

SEQ ID NO: 59270 - DNA, 20 bp, Artificial Sequence
  Description of Artificial Sequence: Synthetic oligonucleotide
  Target: LAMA2; (-) strand; PAM type: NRG; PAM sequence: CAG
aaaaagcttaatgtccgaaa

SEQ ID NO: 59271 - DNA, 20 bp, Artificial Sequence
  Description of Artificial Sequence: Synthetic oligonucleotide
  Target: LAMA2; (-) strand; PAM type: NRG; PAM sequence: AAG
gaaagttatggctatgaaaa

SEQ ID NO: 59272 - DNA, 20 bp, Artificial Sequence
  Description of Artificial Sequence: Synthetic oligonucleotide
  Target: LAMA2; (-) strand; PAM type: NRG; PAM sequence: TGG
tggaaaaaacacgaaagtta

SEQ ID NO: 59273 - DNA, 20 bp, Artificial Sequence
  Description of Artificial Sequence: Synthetic oligonucleotide
  Target: LAMA2; (-) strand; PAM type: NRG; PAM sequence: AAG
ggatgatggaaaaaacacga

SEQ ID NO: 59274 - DNA, 20 bp, Artificial Sequence
  Description of Artificial Sequence: Synthetic oligonucleotide
  Target: LAMA2; (-) strand; PAM type: NRG; PAM sequence: TGG
aaatataatagacaggatga

SEQ ID NO: 59275 - DNA, 20 bp, Artificial Sequence
  Description of Artificial Sequence: Synthetic oligonucleotide
  Target: LAMA2; (-) strand; PAM type: NRG; PAM sequence: AGG
aaaggggaaatataatagac

SEQ ID NO: 59276 - DNA, 20 bp, Artificial Sequence
  Description of Artificial Sequence: Synthetic oligonucleotide
  Target: LAMA2; (-) strand; PAM type: NRG; PAM sequence: CAG
aaaaggggaaatataataga

SEQ ID NO: 59277 - DNA, 20 bp, Artificial Sequence
  Description of Artificial Sequence: Synthetic oligonucleotide
  Target: LAMA2; (-) strand; PAM type: NRG; PAM sequence: TAG
agataaaaggggaaatataa

SEQ ID NO: 59278 - DNA, 20 bp, Artificial Sequence
  Description of Artificial Sequence: Synthetic oligonucleotide
  Target: LAMA2; (-) strand; PAM type: NRG; PAM sequence: GGG
aactcaataaaagataaaag

SEQ ID NO: 59279 - DNA, 20 bp, Artificial Sequence
  Description of Artificial Sequence: Synthetic oligonucleotide
  Target: LAMA2; (-) strand; PAM type: NRG; PAM sequence: GGG
gaactcaataaaagataaaa

SEQ ID NO: 59280 - DNA, 20 bp, Artificial Sequence
  Description of Artificial Sequence: Synthetic oligonucleotide
  Target: LAMA2; (-) strand; PAM type: NRG; PAM sequence: AGG
agaactcaataaaagataaa

SEQ ID NO: 59281 - DNA, 20 bp, Artificial Sequence
  Description of Artificial Sequence: Synthetic oligonucleotide
  Target: LAMA2; (-) strand; PAM type: NRG; PAM sequence: AAG
aagaactcaataaaagataa

SEQ ID NO: 59282 - DNA, 20 bp, Artificial Sequence
  Description of Artificial Sequence: Synthetic oligonucleotide
  Target: LAMA2; (-) strand; PAM type: NRG; PAM sequence: AAG
ctcctaaaagaactcaataa

SEQ ID NO: 59283 - DNA, 20 bp, Artificial Sequence
  Description of Artificial Sequence: Synthetic oligonucleotide
  Target: LAMA2; (-) strand; PAM type: NRG; PAM sequence: AAG
ttttttcaagtttctcctaa

SEQ ID NO: 59284 - DNA, 20 bp, Artificial Sequence
  Description of Artificial Sequence: Synthetic oligonucleotide
  Target: LAMA2; (-) strand; PAM type: NRG; PAM sequence: AAG
tttatagagatttttttttc

SEQ ID NO: 59285 - DNA, 20 bp, Artificial Sequence
  Description of Artificial Sequence: Synthetic oligonucleotide
  Target: LAMA2; (-) strand; PAM type: NRG; PAM sequence: GAG
gtaaaaaacctccatttata

SEQ ID NO: 59286 - DNA, 20 bp, Artificial Sequence
  Description of Artificial Sequence: Synthetic oligonucleotide
  Target: LAMA2; (-) strand; PAM type: NRG; PAM sequence: TAG
gagtaaaaaacctccattta

SEQ ID NO: 59287 - DNA, 20 bp, Artificial Sequence
  Description of Artificial Sequence: Synthetic oligonucleotide
  Target: LAMA2; (-) strand; PAM type: NRG; PAM sequence: GAG
ctgttattttaaaagctctt

SEQ ID NO: 59288 - DNA, 20 bp, Artificial Sequence
  Description of Artificial Sequence: Synthetic oligonucleotide
  Target: LAMA2; (-) strand; PAM type: NRG; PAM sequence: AAG
gtgatgtactgttattttaa

SEQ ID NO: 59289 - DNA, 20 bp, Artificial Sequence
  Description of Artificial Sequence: Synthetic oligonucleotide
  Target: LAMA2; (-) strand; PAM type: NRG; PAM sequence: TGG
aacactttttaaaaatgatc

SEQ ID NO: 59290 - DNA, 20 bp, Artificial Sequence
  Description of Artificial Sequence: Synthetic oligonucleotide
  Target: LAMA2; (-) strand; PAM type: NRG; PAM sequence: TAG
aaatattcacttaactacaa

SEQ ID NO: 59291 - DNA, 20 bp, Artificial Sequence
  Description of Artificial Sequence: Synthetic oligonucleotide
  Target: LAMA2; (-) strand; PAM type: NRG; PAM sequence: GAG
gtagtcttcaatgggaagac

SEQ ID NO: 59292 - DNA, 20 bp, Artificial Sequence
  Description of Artificial Sequence: Synthetic oligonucleotide
  Target: LAMA2; (-) strand; PAM type: NRG; PAM sequence: AAG
tttctgtagtcttcaatggg

SEQ ID NO: 59293 - DNA, 20 bp, Artificial Sequence
  Description of Artificial Sequence: Synthetic oligonucleotide
  Target: LAMA2; (-) strand; PAM type: NRG; PAM sequence: GGG
agatttctgtagtcttcaat

SEQ ID NO: 59294 - DNA, 20 bp, Artificial Sequence
  Description of Artificial Sequence: Synthetic oligonucleotide
  Target: LAMA2; (-) strand; PAM type: NRG; PAM sequence: TGG
gagatttctgtagtcttcaa

SEQ ID NO: 59295 - DNA, 20 bp, Artificial Sequence
  Description of Artificial Sequence: Synthetic oligonucleotide
  Target: LAMA2; (-) strand; PAM type: NRG; PAM sequence: TAG
ctggaagaaagagatttctg

SEQ ID NO: 59296 - DNA, 20 bp, Artificial Sequence
  Description of Artificial Sequence: Synthetic oligonucleotide
  Target: LAMA2; (-) strand; PAM type: NRG; PAM sequence: GAG
ttgagctcaactggaagaaa

SEQ ID NO: 59297 - DNA, 20 bp, Artificial Sequence
  Description of Artificial Sequence: Synthetic oligonucleotide
  Target: LAMA2; (-) strand; PAM type: NRG; PAM sequence: AAG
ttttgagctcaactggaaga

SEQ ID NO: 59298 - DNA, 20 bp, Artificial Sequence
  Description of Artificial Sequence: Synthetic oligonucleotide
  Target: LAMA2; (-) strand; PAM type: NRG; PAM sequence: AAG
ttccttttgagctcaactgg

SEQ ID NO: 59299 - DNA, 20 bp, Artificial Sequence
  Description of Artificial Sequence: Synthetic oligonucleotide
  Target: LAMA2; (-) strand; PAM type: NRG; PAM sequence: TGG
cttttccttttgagctcaac

SEQ ID NO: 59300 - DNA, 20 bp, Artificial Sequence
  Description of Artificial Sequence: Synthetic oligonucleotide
  Target: LAMA2; (-) strand; PAM type: NRG; PAM sequence: GAG
ctttttttgcttttcctttt

SEQ ID NO: 59301 - DNA, 20 bp, Artificial Sequence
  Description of Artificial Sequence: Synthetic oligonucleotide
  Target: LAMA2; (-) strand; PAM type: NRG; PAM sequence: TGG
actaatttattcagcatttc

SEQ ID NO: 59302 - DNA, 20 bp, Artificial Sequence
  Description of Artificial Sequence: Synthetic oligonucleotide
  Target: LAMA2; (-) strand; PAM type: NRG; PAM sequence: CAG
aaaaaggacactaatttatt

SEQ ID NO: 59303 - DNA, 20 bp, Artificial Sequence
  Description of Artificial Sequence: Synthetic oligonucleotide
  Target: LAMA2; (-) strand; PAM type: NRG; PAM sequence: AGG
tttttaaaaagtaaataaaa

SEQ ID NO: 59304 - DNA, 20 bp, Artificial Sequence
  Description of Artificial Sequence: Synthetic oligonucleotide
  Target: LAMA2; (-) strand; PAM type: NRG; PAM sequence: AAG
gtttttaaaaagtaaataaa

SEQ ID NO: 59305 - DNA, 20 bp, Artificial Sequence
  Description of Artificial Sequence: Synthetic oligonucleotide
  Target: LAMA2; (-) strand; PAM type: NRG; PAM sequence: AAG
gccaattcatagtttttaaa

SEQ ID NO: 59306 - DNA, 20 bp, Artificial Sequence
  Description of Artificial Sequence: Synthetic oligonucleotide
  Target: LAMA2; (-) strand; PAM type: NRG; PAM sequence: TAG
tatttaaatgagccaattca

SEQ ID NO: 59307 - DNA, 20 bp, Artificial Sequence
  Description of Artificial Sequence: Synthetic oligonucleotide
  Target: LAMA2; (-) strand; PAM type: NRG; PAM sequence: GAG
cttttagaatctatttaaat

SEQ ID NO: 59308 - DNA, 20 bp, Artificial Sequence
  Description of Artificial Sequence: Synthetic oligonucleotide
  Target: LAMA2; (-) strand; PAM type: NRG; PAM sequence: TAG
gacccacatacaaatacttt

SEQ ID NO: 59309 - DNA, 20 bp, Artificial Sequence
  Description of Artificial Sequence: Synthetic oligonucleotide
  Target: LAMA2; (-) strand; PAM type: NRG; PAM sequence: CAG
atctccatgacaacagtgtt

SEQ ID NO: 59310 - DNA, 20 bp, Artificial Sequence
  Description of Artificial Sequence: Synthetic oligonucleotide
  Target: LAMA2; (-) strand; PAM type: NRG; PAM sequence: CAG
tgttttaatctccatgacaa

SEQ ID NO: 59311 - DNA, 20 bp, Artificial Sequence
  Description of Artificial Sequence: Synthetic oligonucleotide
  Target: LAMA2; (-) strand; PAM type: NRG; PAM sequence: AAG
tctacagaagcatcaactag

SEQ ID NO: 59312 - DNA, 20 bp, Artificial Sequence
  Description of Artificial Sequence: Synthetic oligonucleotide
  Target: LAMA2; (-) strand; PAM type: NRG; PAM sequence: TAG
tattctacagaagcatcaac

SEQ ID NO: 59313 - DNA, 20 bp, Artificial Sequence
  Description of Artificial Sequence: Synthetic oligonucleotide
  Target: LAMA2; (-) strand; PAM type: NRG; PAM sequence: AAG
cttttttttttattctacag

SEQ ID NO: 59314 - DNA, 20 bp, Artificial Sequence
  Description of Artificial Sequence: Synthetic oligonucleotide
  Target: LAMA2; (-) strand; PAM type: NRG; PAM sequence: CAG
aaacttttttttttattcta

SEQ ID NO: 59315 - DNA, 20 bp, Artificial Sequence
  Description of Artificial Sequence: Synthetic oligonucleotide
  Target: LAMA2; (-) strand; PAM type: NRG; PAM sequence: CAG
ccattaagacctacctttct

SEQ ID NO: 59316 - DNA, 20 bp, Artificial Sequence
  Description of Artificial Sequence: Synthetic oligonucleotide
  Target: LAMA2; (-) strand; PAM type: NRG; PAM sequence: AAG
tacatattaacaattccatt

SEQ ID NO: 59317 - DNA, 20 bp, Artificial Sequence
  Description of Artificial Sequence: Synthetic oligonucleotide
  Target: LAMA2; (-) strand; PAM type: NRG; PAM sequence: AAG
tttaaaatgtcatccaaaat

SEQ ID NO: 59318 - DNA, 20 bp, Artificial Sequence
  Description of Artificial Sequence: Synthetic oligonucleotide
  Target: LAMA2; (-) strand; PAM type: NRG; PAM sequence: AAG
aatccacagattaaatacgt

SEQ ID NO: 59319 - DNA, 20 bp, Artificial Sequence
  Description of Artificial Sequence: Synthetic oligonucleotide
  Target: LAMA2; (-) strand; PAM type: NRG; PAM sequence: CAG
ccagcatgctctacaatcca

SEQ ID NO: 59320 - DNA, 20 bp, Artificial Sequence
  Description of Artificial Sequence: Synthetic oligonucleotide
  Target: LAMA2; (-) strand; PAM type: NRG; PAM sequence: CAG
caatggaattgataacttcc

SEQ ID NO: 59321 - DNA, 20 bp, Artificial Sequence
  Description of Artificial Sequence: Synthetic oligonucleotide
  Target: LAMA2; (-) strand; PAM type: NRG; PAM sequence: TGG
gcaactgaggcaggtaccaa

SEQ ID NO: 59322 - DNA, 20 bp, Artificial Sequence
  Description of Artificial Sequence: Synthetic oligonucleotide
  Target: LAMA2; (-) strand; PAM type: NRG; PAM sequence: AGG
ggctgaactgcaactgaggc

SEQ ID NO: 59323 - DNA, 20 bp, Artificial Sequence
  Description of Artificial Sequence: Synthetic oligonucleotide
  Target: LAMA2; (-) strand; PAM type: NRG; PAM sequence: CAG
aggctgaactgcaactgagg

SEQ ID NO: 59324 - DNA, 20 bp, Artificial Sequence
  Description of Artificial Sequence: Synthetic oligonucleotide
  Target: LAMA2; (-) strand; PAM type: NRG; PAM sequence: AGG
ttaaggctgaactgcaactg

SEQ ID NO: 59325 - DNA, 20 bp, Artificial Sequence
  Description of Artificial Sequence: Synthetic oligonucleotide
  Target: LAMA2; (-) strand; PAM type: NRG; PAM sequence: GAG
cttaaggctgaactgcaact

SEQ ID NO: 59326 - DNA, 20 bp, Artificial Sequence
  Description of Artificial Sequence: Synthetic oligonucleotide
  Target: LAMA2; (-) strand; PAM type: NRG; PAM sequence: AGG
ctccctttggtaagtactta

SEQ ID NO: 59327 - DNA, 20 bp, Artificial Sequence
  Description of Artificial Sequence: Synthetic oligonucleotide
  Target: LAMA2; (-) strand; PAM type: NRG; PAM sequence: AAG
gctccctttggtaagtactt

SEQ ID NO: 59328 - DNA, 20 bp, Artificial Sequence
  Description of Artificial Sequence: Synthetic oligonucleotide
  Target: LAMA2; (-) strand; PAM type: NRG; PAM sequence: AAG
ccaaatgagctccctttggt

SEQ ID NO: 59329 - DNA, 20 bp, Artificial Sequence
  Description of Artificial Sequence: Synthetic oligonucleotide
  Target: LAMA2; (-) strand; PAM type: NRG; PAM sequence: TGG
caccccaaatgagctccctt

SEQ ID NO: 59330 - DNA, 20 bp, Artificial Sequence
  Description of Artificial Sequence: Synthetic oligonucleotide
  Target: LAMA2; (-) strand; PAM type: NRG; PAM sequence: GAG
ttacccctgccaccccaaat

SEQ ID NO: 59331 - DNA, 20 bp, Artificial Sequence
  Description of Artificial Sequence: Synthetic oligonucleotide
  Target: LAMA2; (-) strand; PAM type: NRG; PAM sequence: CGG
acctcagctcccacactttt

SEQ ID NO: 59332 - DNA, 20 bp, Artificial Sequence
  Description of Artificial Sequence: Synthetic oligonucleotide
  Target: LAMA2; (-) strand; PAM type: NRG; PAM sequence: CAG
caggctctcaaacaatacct

SEQ ID NO: 59333 - DNA, 20 bp, Artificial Sequence
  Description of Artificial Sequence: Synthetic oligonucleotide
  Target: LAMA2; (-) strand; PAM type: NRG; PAM sequence: AGG
ggagcagtcacactgcccac

SEQ ID NO: 59334 - DNA, 20 bp, Artificial Sequence
  Description of Artificial Sequence: Synthetic oligonucleotide
  Target: LAMA2; (-) strand; PAM type: NRG; PAM sequence: CAG
tggagcagtcacactgccca

SEQ ID NO: 59335 - DNA, 20 bp, Artificial Sequence
  Description of Artificial Sequence: Synthetic oligonucleotide
  Target: LAMA2; (-) strand; PAM type: NRG; PAM sequence: CAG
cactgaaactacgattggag

SEQ ID NO: 59336 - DNA, 20 bp, Artificial Sequence
  Description of Artificial Sequence: Synthetic oligonucleotide
  Target: LAMA2; (-) strand; PAM type: NRG; PAM sequence: GAG
cctcactgaaactacgattg

SEQ ID NO: 59337 - DNA, 20 bp, Artificial Sequence
  Description of Artificial Sequence: Synthetic oligonucleotide
  Target: LAMA2; (-) strand; PAM type: NRG; PAM sequence: TGG
ttcctcactgaaactacgat

SEQ ID NO: 59338 - DNA, 20 bp, Artificial Sequence
  Description of Artificial Sequence: Synthetic oligonucleotide
  Target: LAMA2; (-) strand; PAM type: NRG; PAM sequence: TGG
ctgagaaaatcttgcacaga

SEQ ID NO: 59339 - DNA, 20 bp, Artificial Sequence
  Description of Artificial Sequence: Synthetic oligonucleotide
  Target: LAMA2; (-) strand; PAM type: NRG; PAM sequence: CAG
acatctgagaaaatcttgca

SEQ ID NO: 59340 - DNA, 20 bp, Artificial Sequence
  Description of Artificial Sequence: Synthetic oligonucleotide
  Target: LAMA2; (-) strand; PAM type: NRG; PAM sequence: GAG
aagtcttatagaggacatct

SEQ ID NO: 59341 - DNA, 20 bp, Artificial Sequence
  Description of Artificial Sequence: Synthetic oligonucleotide
  Target: LAMA2; (-) strand; PAM type: NRG; PAM sequence: AGG
tgacaatgaaagtcttatag

SEQ ID NO: 59342 - DNA, 20 bp, Artificial Sequence
  Description of Artificial Sequence: Synthetic oligonucleotide
  Target: LAMA2; (-) strand; PAM type: NRG; PAM sequence: GAG
atgacaatgaaagtcttata

SEQ ID NO: 59343 - DNA, 20 bp, Artificial Sequence
  Description of Artificial Sequence: Synthetic oligonucleotide
  Target: LAMA2; (-) strand; PAM type: NRG; PAM sequence: TAG
tgatgacaatgaaagtctta

SEQ ID NO: 59344 - DNA, 20 bp, Artificial Sequence
  Description of Artificial Sequence: Synthetic oligonucleotide
  Target: LAMA2; (-) strand; PAM type: NRG; PAM sequence: AAG
catagaactgatgacaatga

SEQ ID NO: 59345 - DNA, 20 bp, Artificial Sequence
  Description of Artificial Sequence: Synthetic oligonucleotide
  Target: LAMA2; (-) strand; PAM type: NRG; PAM sequence: TAG
agcaatgatttgagagcaca

SEQ ID NO: 59346 - DNA, 20 bp, Artificial Sequence
  Description of Artificial Sequence: Synthetic oligonucleotide
  Target: LAMA2; (-) strand; PAM type: NRG; PAM sequence: GAG
aagaaaaagcaatgatttga

SEQ ID NO: 59347 - DNA, 20 bp, Artificial Sequence
  Description of Artificial Sequence: Synthetic oligonucleotide
  Target: LAMA2; (-) strand; PAM type: NRG; PAM sequence: GAG
agaagaaaaagcaatgattt

SEQ ID NO: 59348 - DNA, 20 bp, Artificial Sequence
  Description of Artificial Sequence: Synthetic oligonucleotide
  Target: LAMA2; (-) strand; PAM type: NRG; PAM sequence: AAG
tgtgcaaaataaagaagaaa

SEQ ID NO: 59349 - DNA, 20 bp, Artificial Sequence
  Description of Artificial Sequence: Synthetic oligonucleotide
  Target: LAMA2; (-) strand; PAM type: NRG; PAM sequence: AAG
agcttatgtgcaaaataaag

SEQ ID NO: 59350 - DNA, 20 bp, Artificial Sequence
  Description of Artificial Sequence: Synthetic oligonucleotide
  Target: LAMA2; (-) strand; PAM type: NRG; PAM sequence: AAG
tatagcttatgtgcaaaata

SEQ ID NO: 59351 - DNA, 20 bp, Artificial Sequence
  Description of Artificial Sequence: Synthetic oligonucleotide
  Target: LAMA2; (-) strand; PAM type: NRG; PAM sequence: TAG
atgtcttaaaaaatagctta

SEQ ID NO: 59352 - DNA, 20 bp, Artificial Sequence
  Description of Artificial Sequence: Synthetic oligonucleotide
  Target: LAMA2; (-) strand; PAM type: NRG; PAM sequence: TAG
aacctatatgtcttaaaaaa

SEQ ID NO: 59353 - DNA, 20 bp, Artificial Sequence
  Description of Artificial Sequence: Synthetic oligonucleotide
  Target: LAMA2; (-) strand; PAM type: NRG; PAM sequence: CAG
agacatagtttttgatcaca

SEQ ID NO: 59354 - DNA, 20 bp, Artificial Sequence
  Description of Artificial Sequence: Synthetic oligonucleotide
  Target: LAMA2; (-) strand; PAM type: NRG; PAM sequence: TAG
agtagaagttgcccgagaca

SEQ ID NO: 59355 - DNA, 20 bp, Artificial Sequence
  Description of Artificial Sequence: Synthetic oligonucleotide
  Target: LAMA2; (-) strand; PAM type: NRG; PAM sequence: GAG
ccaaaaagtagaagttgccc

SEQ ID NO: 59356 - DNA, 20 bp, Artificial Sequence
  Description of Artificial Sequence: Synthetic oligonucleotide
  Target: LAMA2; (-) strand; PAM type: NRG; PAM sequence: AAG
ttgttaattccaaaaagtag

SEQ ID NO: 59357 - DNA, 20 bp, Artificial Sequence
  Description of Artificial Sequence: Synthetic oligonucleotide
  Target: LAMA2; (-) strand; PAM type: NRG; PAM sequence: TAG
taattgttaattccaaaaag

SEQ ID NO: 59358 - DNA, 20 bp, Artificial Sequence
  Description of Artificial Sequence: Synthetic oligonucleotide
  Target: LAMA2; (-) strand; PAM type: NRG; PAM sequence: AAG
aaataattgttaattccaaa

SEQ ID NO: 59359 - DNA, 20 bp, Artificial Sequence
  Description of Artificial Sequence: Synthetic oligonucleotide
  Target: LAMA2; (-) strand; PAM type: NRG; PAM sequence: AAG
cacacacacacaagaccaca

SEQ ID NO: 59360 - DNA, 20 bp, Artificial Sequence
  Description of Artificial Sequence: Synthetic oligonucleotide
  Target: LAMA2; (-) strand; PAM type: NRG; PAM sequence: AAG
atatatatacacacacacac

SEQ ID NO: 59361 - DNA, 20 bp, Artificial Sequence
  Description of Artificial Sequence: Synthetic oligonucleotide
  Target: LAMA2; (-) strand; PAM type: NRG; PAM sequence: CAG
tatatatacaaacagagaga

SEQ ID NO: 59362 - DNA, 20 bp, Artificial Sequence
  Description of Artificial Sequence: Synthetic oligonucleotide
  Target: LAMA2; (-) strand; PAM type: NRG; PAM sequence: GAG
tatgtatatatacaaacaga

SEQ ID NO: 59363 - DNA, 20 bp, Artificial Sequence
  Description of Artificial Sequence: Synthetic oligonucleotide
  Target: LAMA2; (-) strand; PAM type: NRG; PAM sequence: GAG
tgtatgtatatatacaaaca

SEQ ID NO: 59364 - DNA, 20 bp, Artificial Sequence
  Description of Artificial Sequence: Synthetic oligonucleotide
  Target: LAMA2; (-) strand; PAM type: NRG; PAM sequence: CAG
cgtgtatgtatatatacaaa

SEQ ID NO: 59365 - DNA, 20 bp, Artificial Sequence
  Description of Artificial Sequence: Synthetic oligonucleotide
  Target: LAMA2; (-) strand; PAM type: NRG; PAM sequence: AAG
ccccagctggttaacagagc

SEQ ID NO: 59366 - DNA, 20 bp, Artificial Sequence
  Description of Artificial Sequence: Synthetic oligonucleotide
  Target: LAMA2; (-) strand; PAM type: NRG; PAM sequence: GAG
agcaccccagctggttaaca

SEQ ID NO: 59367 - DNA, 20 bp, Artificial Sequence
  Description of Artificial Sequence: Synthetic oligonucleotide
  Target: LAMA2; (-) strand; PAM type: NRG; PAM sequence: CAG
acagcaccccagctggttaa

SEQ ID NO: 59368 - DNA, 20 bp, Artificial Sequence
  Description of Artificial Sequence: Synthetic oligonucleotide
  Target: LAMA2; (-) strand; PAM type: NRG; PAM sequence: TGG
ttgcaccacagcaccccagc

SEQ ID NO: 59369 - DNA, 20 bp, Artificial Sequence
  Description of Artificial Sequence: Synthetic oligonucleotide
  Target: LAMA2; (-) strand; PAM type: NRG; PAM sequence: CAG
ataattgcaccacagcaccc

SEQ ID NO: 59370 - DNA, 20 bp, Artificial Sequence
  Description of Artificial Sequence: Synthetic oligonucleotide
  Target: LAMA2; (-) strand; PAM type: NRG; PAM sequence: CAG
agtgagccataattgcacca

SEQ ID NO: 59371 - DNA, 20 bp, Artificial Sequence
  Description of Artificial Sequence: Synthetic oligonucleotide
  Target: LAMA2; (-) strand; PAM type: NRG; PAM sequence: GAG
tgggaggtggaggctccagt

SEQ ID NO: 59372 - DNA, 20 bp, Artificial Sequence
  Description of Artificial Sequence: Synthetic oligonucleotide
  Target: LAMA2; (-) strand; PAM type: NRG; PAM sequence: CAG
agtctgggaggtggaggctc

SEQ ID NO: 59373 - DNA, 20 bp, Artificial Sequence
  Description of Artificial Sequence: Synthetic oligonucleotide
  Target: LAMA2; (-) strand; PAM type: NRG; PAM sequence: AGG
tgcttgagtctgggaggtgg

SEQ ID NO: 59374 - DNA, 20 bp, Artificial Sequence
  Description of Artificial Sequence: Synthetic oligonucleotide
  Target: LAMA2; (-) strand; PAM type: NRG; PAM sequence: GAG
ttgcttgagtctgggaggtg

SEQ ID NO: 59375 - DNA, 20 bp, Artificial Sequence
  Description of Artificial Sequence: Synthetic oligonucleotide
  Target: LAMA2; (-) strand; PAM type: NRG; PAM sequence: TGG
aattgcttgagtctgggagg

SEQ ID NO: 59376 - DNA, 20 bp, Artificial Sequence
  Description of Artificial Sequence: Synthetic oligonucleotide
  Target: LAMA2; (-) strand; PAM type: NRG; PAM sequence: AGG
gagaattgcttgagtctggg

SEQ ID NO: 59377 - DNA, 20 bp, Artificial Sequence
  Description of Artificial Sequence: Synthetic oligonucleotide
  Target: LAMA2; (-) strand; PAM type: NRG; PAM sequence: GAG
tgagaattgcttgagtctgg

SEQ ID NO: 59378 - DNA, 20 bp, Artificial Sequence
  Description of Artificial Sequence: Synthetic oligonucleotide
  Target: LAMA2; (-) strand; PAM type: NRG; PAM sequence: GGG
catgagaattgcttgagtct

SEQ ID NO: 59379 - DNA, 20 bp, Artificial Sequence
  Description of Artificial Sequence: Synthetic oligonucleotide
  Target: LAMA2; (-) strand; PAM type: NRG; PAM sequence: TGG
gcatgagaattgcttgagtc

SEQ ID NO: 59380 - DNA, 20 bp, Artificial Sequence
  Description of Artificial Sequence: Synthetic oligonucleotide
  Target: LAMA2; (-) strand; PAM type: NRG; PAM sequence: GAG
ctgaggcatgagaattgctt

SEQ ID NO: 59381 - DNA, 20 bp, Artificial Sequence
  Description of Artificial Sequence: Synthetic oligonucleotide
  Target: LAMA2; (-) strand; PAM type: NRG; PAM sequence: GAG
cactcagaaggctgaggcat

SEQ ID NO: 59382 - DNA, 20 bp, Artificial Sequence
  Description of Artificial Sequence: Synthetic oligonucleotide
  Target: LAMA2; (-) strand; PAM type: NRG; PAM sequence: AGG
cccagccactcagaaggctg

SEQ ID NO: 59383 - DNA, 20 bp, Artificial Sequence
  Description of Artificial Sequence: Synthetic oligonucleotide
  Target: LAMA2; (-) strand; PAM type: NRG; PAM sequence: GAG
tcccagccactcagaaggct

SEQ ID NO: 59384 - DNA, 20 bp, Artificial Sequence
  Description of Artificial Sequence: Synthetic oligonucleotide
  Target: LAMA2; (-) strand; PAM type: NRG; PAM sequence: AGG
gggagtcccagccactcaga

SEQ ID NO: 59385 - DNA, 20 bp, Artificial Sequence
  Description of Artificial Sequence: Synthetic oligonucleotide
  Target: LAMA2; (-) strand; PAM type: NRG; PAM sequence: AAG
tgggagtcccagccactcag

SEQ ID NO: 59386 - DNA, 20 bp, Artificial Sequence
  Description of Artificial Sequence: Synthetic oligonucleotide
  Target: LAMA2; (-) strand; PAM type: NRG; PAM sequence: CAG
tgctgggagtcccagccact

SEQ ID NO: 59387 - DNA, 20 bp, Artificial Sequence
  Description of Artificial Sequence: Synthetic oligonucleotide
  Target: LAMA2; (-) strand; PAM type: NRG; PAM sequence: CAG
gtggtgaatgctgggagtcc

SEQ ID NO: 59388 - DNA, 20 bp, Artificial Sequence
  Description of Artificial Sequence: Synthetic oligonucleotide
  Target: LAMA2; (-) strand; PAM type: NRG; PAM sequence: GAG
ggtgtggtggtgaatgctgg

SEQ ID NO: 59389 - DNA, 20 bp, Artificial Sequence
  Description of Artificial Sequence: Synthetic oligonucleotide
  Target: LAMA2; (-) strand; PAM type: NRG; PAM sequence: GGG
tgggtgtggtggtgaatgct

SEQ ID NO: 59390 - DNA, 20 bp, Artificial Sequence
  Description of Artificial Sequence: Synthetic oligonucleotide
  Target: LAMA2; (-) strand; PAM type: NRG; PAM sequence: TGG
ctgggtgtggtggtgaatgc

SEQ ID NO: 59391 - DNA, 20 bp, Artificial Sequence
  Description of Artificial Sequence: Synthetic oligonucleotide
  Target: LAMA2; (-) strand; PAM type: NRG; PAM sequence: TGG
caataactaactgggtgtgg

SEQ ID NO: 59392 - DNA, 20 bp, Artificial Sequence
  Description of Artificial Sequence: Synthetic oligonucleotide
  Target: LAMA2; (-) strand; PAM type: NRG; PAM sequence: TGG
gtacaataactaactgggtg

SEQ ID NO: 59393 - DNA, 20 bp, Artificial Sequence
  Description of Artificial Sequence: Synthetic oligonucleotide
  Target: LAMA2; (-) strand; PAM type: NRG; PAM sequence: GGG
aaaaagtacaataactaact

SEQ ID NO: 59394 - DNA, 20 bp, Artificial Sequence
  Description of Artificial Sequence: Synthetic oligonucleotide
  Target: LAMA2; (-) strand; PAM type: NRG; PAM sequence: TGG
aaaaaagtacaataactaac

SEQ ID NO: 59395 - DNA, 20 bp, Artificial Sequence
  Description of Artificial Sequence: Synthetic oligonucleotide
  Target: LAMA2; (-) strand; PAM type: NRG; PAM sequence: AAG
tgtctcttcaaaaaaaaaaa

SEQ ID NO: 59396 - DNA, 20 bp, Artificial Sequence
  Description of Artificial Sequence: Synthetic oligonucleotide
  Target: LAMA2; (-) strand; PAM type: NRG; PAM sequence: CAG
caagatcagcttgggcaaca

SEQ ID NO: 59397 - DNA, 20 bp, Artificial Sequence
  Description of Artificial Sequence: Synthetic oligonucleotide
  Target: LAMA2; (-) strand; PAM type: NRG; PAM sequence: GGG
caggagttcaagatcagctt

SEQ ID NO: 59398 - DNA, 20 bp, Artificial Sequence
  Description of Artificial Sequence: Synthetic oligonucleotide
  Target: LAMA2; (-) strand; PAM type: NRG; PAM sequence: TGG
ccaggagttcaagatcagct

SEQ ID NO: 59399 - DNA, 20 bp, Artificial Sequence
  Description of Artificial Sequence: Synthetic oligonucleotide
  Target: LAMA2; (-) strand; PAM type: NRG; PAM sequence: CAG
gaggtccaggagttcaagat

SEQ ID NO: 59400 - DNA, 20 bp, Artificial Sequence
  Description of Artificial Sequence: Synthetic oligonucleotide
  Target: LAMA2; (-) strand; PAM type: NRG; PAM sequence: AAG
tgctggaggtccaggagttc

SEQ ID NO: 59401 - DNA, 20 bp, Artificial Sequence
  Description of Artificial Sequence: Synthetic oligonucleotide
  Target: LAMA2; (-) strand; PAM type: NRG; PAM sequence: GAG
gagaattgctggaggtccag

SEQ ID NO: 59402 - DNA, 20 bp, Artificial Sequence
  Description of Artificial Sequence: Synthetic oligonucleotide
  Target: LAMA2; (-) strand; PAM type: NRG; PAM sequence: AGG
aggagaattgctggaggtcc

SEQ ID NO: 59403 - DNA, 20 bp, Artificial Sequence
  Description of Artificial Sequence: Synthetic oligonucleotide
  Target: LAMA2; (-) strand; PAM type: NRG; PAM sequence: CAG
caggagaattgctggaggtc

SEQ ID NO: 59404 - DNA, 20 bp, Artificial Sequence
  Description of Artificial Sequence: Synthetic oligonucleotide
  Target: LAMA2; (-) strand; PAM type: NRG; PAM sequence: AGG
caagccaggagaattgctgg

SEQ ID NO: 59405 - DNA, 20 bp, Artificial Sequence
  Description of Artificial Sequence: Synthetic oligonucleotide
  Target: LAMA2; (-) strand; PAM type: NRG; PAM sequence: GAG
ccaagccaggagaattgctg

SEQ ID NO: 59406 - DNA, 20 bp, Artificial Sequence
  Description of Artificial Sequence: Synthetic oligonucleotide
  Target: LAMA2; (-) strand; PAM type: NRG; PAM sequence: TGG
agccaagccaggagaattgc

SEQ ID NO: 59407 - DNA, 20 bp, Artificial Sequence
  Description of Artificial Sequence: Synthetic oligonucleotide
  Target: LAMA2; (-) strand; PAM type: NRG; PAM sequence: GAG
atattgagaagccaagccag

SEQ ID NO: 59408 - DNA, 20 bp, Artificial Sequence
  Description of Artificial Sequence: Synthetic oligonucleotide
  Target: LAMA2; (-) strand; PAM type: NRG; PAM sequence: AGG
gcatattgagaagccaagcc

SEQ ID NO: 59409 - DNA, 20 bp, Artificial Sequence
  Description of Artificial Sequence: Synthetic oligonucleotide
  Target: LAMA2; (-) strand; PAM type: NRG; PAM sequence: CAG
agcatattgagaagccaagc

SEQ ID NO: 59410 - DNA, 20 bp, Artificial Sequence
  Description of Artificial Sequence: Synthetic oligonucleotide
  Target: LAMA2; (-) strand; PAM type: NRG; PAM sequence: AAG
tttcagcatattgagaagcc

SEQ ID NO: 59411 - DNA, 20 bp, Artificial Sequence
  Description of Artificial Sequence: Synthetic oligonucleotide
  Target: LAMA2; (-) strand; PAM type: NRG; PAM sequence: AAG
tataatttcagcatattgag

SEQ ID NO: 59412 - DNA, 20 bp, Artificial Sequence
  Description of Artificial Sequence: Synthetic oligonucleotide
  Target: LAMA2; (-) strand; PAM type: NRG; PAM sequence: GAG
gcctataatttcagcatatt

SEQ ID NO: 59413 - DNA, 20 bp, Artificial Sequence
  Description of Artificial Sequence: Synthetic oligonucleotide
  Target: LAMA2; (-) strand; PAM type: NRG; PAM sequence: CAG
gtggcttacgcctataattt

SEQ ID NO: 59414 - DNA, 20 bp, Artificial Sequence
  Description of Artificial Sequence: Synthetic oligonucleotide
  Target: LAMA2; (-) strand; PAM type: NRG; PAM sequence: TGG
tggacgatggtcaggcaagg

SEQ ID NO: 59415 - DNA, 20 bp, Artificial Sequence
  Description of Artificial Sequence: Synthetic oligonucleotide
  Target: LAMA2; (-) strand; PAM type: NRG; PAM sequence: AGG
atatggacgatggtcaggca

SEQ ID NO: 59416 - DNA, 20 bp, Artificial Sequence
  Description of Artificial Sequence: Synthetic oligonucleotide
  Target: LAMA2; (-) strand; PAM type: NRG; PAM sequence: AAG
tatatggacgatggtcaggc

SEQ ID NO: 59417 - DNA, 20 bp, Artificial Sequence
  Description of Artificial Sequence: Synthetic oligonucleotide
  Target: LAMA2; (-) strand; PAM type: NRG; PAM sequence: AGG
aaaatatatggacgatggtc

SEQ ID NO: 59418 - DNA, 20 bp, Artificial Sequence
  Description of Artificial Sequence: Synthetic oligonucleotide
  Target: LAMA2; (-) strand; PAM type: NRG; PAM sequence: CAG
aaaaatatatggacgatggt

SEQ ID NO: 59419 - DNA, 20 bp, Artificial Sequence
  Description of Artificial Sequence: Synthetic oligonucleotide
  Target: LAMA2; (-) strand; PAM type: NRG; PAM sequence: TGG
tttcaaaaatatatggacga

SEQ ID NO: 59420 - DNA, 20 bp, Artificial Sequence
  Description of Artificial Sequence: Synthetic oligonucleotide
  Target: LAMA2; (-) strand; PAM type: NRG; PAM sequence: TGG
aggtcattttcaaaaatata

SEQ ID NO: 59421 - DNA, 20 bp, Artificial Sequence
  Description of Artificial Sequence: Synthetic oligonucleotide
  Target: LAMA2; (-) strand; PAM type: NRG; PAM sequence: AGG
caaaaagtctcattgttcct

SEQ ID NO: 59422 - DNA, 20 bp, Artificial Sequence
  Description of Artificial Sequence: Synthetic oligonucleotide
  Target: LAMA2; (-) strand; PAM type: NRG; PAM sequence: TAG
tcaaaaagtctcattgttcc

SEQ ID NO: 59423 - DNA, 20 bp, Artificial Sequence
  Description of Artificial Sequence: Synthetic oligonucleotide
  Target: LAMA2; (-) strand; PAM type: NRG; PAM sequence: AAG
caaacggaaaaaacttcaaa

SEQ ID NO: 59424 - DNA, 20 bp, Artificial Sequence
  Description of Artificial Sequence: Synthetic oligonucleotide
  Target: LAMA2; (-) strand; PAM type: NRG; PAM sequence: CGG
ttctctgataagttagcaaa

SEQ ID NO: 59425 - DNA, 20 bp, Artificial Sequence
  Description of Artificial Sequence: Synthetic oligonucleotide
  Target: LAMA2; (-) strand; PAM type: NRG; PAM sequence: TAG
actagttttctctgataagt

SEQ ID NO: 59426 - DNA, 20 bp, Artificial Sequence
  Description of Artificial Sequence: Synthetic oligonucleotide
  Target: LAMA2; (-) strand; PAM type: NRG; PAM sequence: AAG
ttccactagttttctctgat

SEQ ID NO: 59427 - DNA, 20 bp, Artificial Sequence
  Description of Artificial Sequence: Synthetic oligonucleotide
  Target: LAMA2; (-) strand; PAM type: NRG; PAM sequence: TAG
ctttttgatattatttccac

SEQ ID NO: 59428 - DNA, 20 bp, Artificial Sequence
  Description of Artificial Sequence: Synthetic oligonucleotide
  Target: LAMA2; (-) strand; PAM type: NRG; PAM sequence: TAG
tcttgtacattatccatggg

SEQ ID NO: 59429 - DNA, 20 bp, Artificial Sequence
  Description of Artificial Sequence: Synthetic oligonucleotide
  Target: LAMA2; (-) strand; PAM type: NRG; PAM sequence: GGG
ttttcttgtacattatccat

SEQ ID NO: 59430 - DNA, 20 bp, Artificial Sequence
  Description of Artificial Sequence: Synthetic oligonucleotide
  Target: LAMA2; (-) strand; PAM type: NRG; PAM sequence: TGG
gttttcttgtacattatcca

SEQ ID NO: 59431 - DNA, 20 bp, Artificial Sequence
  Description of Artificial Sequence: Synthetic oligonucleotide
  Target: LAMA2; (-) strand; PAM type: NRG; PAM sequence: GAG
ctgtgccaaataattttgct

SEQ ID NO: 59432 - DNA, 20 bp, Artificial Sequence
  Description of Artificial Sequence: Synthetic oligonucleotide
  Target: LAMA2; (-) strand; PAM type: NRG; PAM sequence: CAG
actatggtattctcacaaag

SEQ ID NO: 59433 - DNA, 20 bp, Artificial Sequence
  Description of Artificial Sequence: Synthetic oligonucleotide
  Target: LAMA2; (-) strand; PAM type: NRG; PAM sequence: AAG
cctactatggtattctcaca

SEQ ID NO: 59434 - DNA, 20 bp, Artificial Sequence
  Description of Artificial Sequence: Synthetic oligonucleotide
  Target: LAMA2; (-) strand; PAM type: NRG; PAM sequence: TGG
cctgtctgaaggacctacta

SEQ ID NO: 59435 - DNA, 20 bp, Artificial Sequence
  Description of Artificial Sequence: Synthetic oligonucleotide
  Target: LAMA2; (-) strand; PAM type: NRG; PAM sequence: AGG
ataaagtacctcctgtctga

SEQ ID NO: 59436 - DNA, 20 bp, Artificial Sequence
  Description of Artificial Sequence: Synthetic oligonucleotide
  Target: LAMA2; (-) strand; PAM type: NRG; PAM sequence: AAG
aataaagtacctcctgtctg

SEQ ID NO: 59437 - DNA, 20 bp, Artificial Sequence
  Description of Artificial Sequence: Synthetic oligonucleotide
  Target: LAMA2; (-) strand; PAM type: NRG; PAM sequence: AAG
agaattgctccttcttaata

SEQ ID NO: 59438 - DNA, 20 bp, Artificial Sequence
  Description of Artificial Sequence: Synthetic oligonucleotide
  Target: LAMA2; (-) strand; PAM type: NRG; PAM sequence: GAG
ctctctaaatctttattaat

SEQ ID NO: 59439 - DNA, 20 bp, Artificial Sequence
  Description of Artificial Sequence: Synthetic oligonucleotide
  Target: LAMA2; (-) strand; PAM type: NRG; PAM sequence: AAG
ctgccataaatacatcttat

SEQ ID NO: 59440 - DNA, 20 bp, Artificial Sequence
  Description of Artificial Sequence: Synthetic oligonucleotide
  Target: LAMA2; (-) strand; PAM type: NRG; PAM sequence: GAG
catacatacatgtaccaaat

SEQ ID NO: 59441 - DNA, 20 bp, Artificial Sequence
  Description of Artificial Sequence: Synthetic oligonucleotide
  Target: LAMA2; (-) strand; PAM type: NRG; PAM sequence: CAG
ctaaccgatgaaaatctttt

SEQ ID NO: 59442 - DNA, 20 bp, Artificial Sequence
  Description of Artificial Sequence: Synthetic oligonucleotide
  Target: LAMA2; (-) strand; PAM type: NRG; PAM sequence: CAG
cacaattaattgcatcataa

SEQ ID NO: 59443 - DNA, 20 bp, Artificial Sequence
  Description of Artificial Sequence: Synthetic oligonucleotide
  Target: LAMA2; (-) strand; PAM type: NRG; PAM sequence: CAG
gagaacaaatctccagtaga

SEQ ID NO: 59444 - DNA, 20 bp, Artificial Sequence
  Description of Artificial Sequence: Synthetic oligonucleotide
  Target: LAMA2; (-) strand; PAM type: NRG; PAM sequence: TAG
tttggagaacaaatctccag

SEQ ID NO: 59445 - DNA, 20 bp, Artificial Sequence
  Description of Artificial Sequence: Synthetic oligonucleotide
  Target: LAMA2; (-) strand; PAM type: NRG; PAM sequence: CAG
ggttttggagaacaaatctc

SEQ ID NO: 59446 - DNA, 20 bp, Artificial Sequence
  Description of Artificial Sequence: Synthetic oligonucleotide
  Target: LAMA2; (-) strand; PAM type: NRG; PAM sequence: GAG
tactagattgtcaggttttg

SEQ ID NO: 59447 - DNA, 20 bp, Artificial Sequence
  Description of Artificial Sequence: Synthetic oligonucleotide
  Target: LAMA2; (-) strand; PAM type: NRG; PAM sequence: TGG
agtactagattgtcaggttt

SEQ ID NO: 59448 - DNA, 20 bp, Artificial Sequence
  Description of Artificial Sequence: Synthetic oligonucleotide
  Target: LAMA2; (-) strand; PAM type: NRG; PAM sequence: AGG
ctacaaagtactagattgtc

SEQ ID NO: 59449 - DNA, 20 bp, Artificial Sequence
  Description of Artificial Sequence: Synthetic oligonucleotide
  Target: LAMA2; (-) strand; PAM type: NRG; PAM sequence: CAG
cctacaaagtactagattgt

SEQ ID NO: 59450 - DNA, 20 bp, Artificial Sequence
  Description of Artificial Sequence: Synthetic oligonucleotide
  Target: LAMA2; (-) strand; PAM type: NRG; PAM sequence: TAG
cattagttcctacaaagtac

SEQ ID NO: 59451 - DNA, 20 bp, Artificial Sequence
  Description of Artificial Sequence: Synthetic oligonucleotide
  Target: LAMA2; (-) strand; PAM type: NRG; PAM sequence: AAG
tatacacattagttcctaca

SEQ ID NO: 59452 - DNA, 20 bp, Artificial Sequence
  Description of Artificial Sequence: Synthetic oligonucleotide
  Target: LAMA2; (-) strand; PAM type: NRG; PAM sequence: TAG
ccccctaagattatacacat

SEQ ID NO: 59453 - DNA, 20 bp, Artificial Sequence
  Description of Artificial Sequence: Synthetic oligonucleotide
  Target: LAMA2; (-) strand; PAM type: NRG; PAM sequence: AAG
ttctgtccactaagccccct

SEQ ID NO: 59454 - DNA, 20 bp, Artificial Sequence
  Description of Artificial Sequence: Synthetic oligonucleotide
  Target: LAMA2; (-) strand; PAM type: NRG; PAM sequence: AAG
taatgaactttctgtccact

SEQ ID NO: 59455 - DNA, 20 bp, Artificial Sequence
  Description of Artificial Sequence: Synthetic oligonucleotide
  Target: LAMA2; (-) strand; PAM type: NRG; PAM sequence: CGG
ttcccctatcacagtaccaa

SEQ ID NO: 59456 - DNA, 20 bp, Artificial Sequence
  Description of Artificial Sequence: Synthetic oligonucleotide
  Target: LAMA2; (-) strand; PAM type: NRG; PAM sequence: CAG
atttgctttttcccctatca

SEQ ID NO: 59457 - DNA, 20 bp, Artificial Sequence
  Description of Artificial Sequence: Synthetic oligonucleotide
  Target: LAMA2; (-) strand; PAM type: NRG; PAM sequence: AGG
atgtctattcatattgttta

SEQ ID NO: 59458 - DNA, 20 bp, Artificial Sequence
  Description of Artificial Sequence: Synthetic oligonucleotide
  Target: LAMA2; (-) strand; PAM type: NRG; PAM sequence: AAG
catgtctattcatattgttt

SEQ ID NO: 59459 - DNA, 20 bp, Artificial Sequence
  Description of Artificial Sequence: Synthetic oligonucleotide
  Target: LAMA2; (-) strand; PAM type: NRG; PAM sequence: GAG
tgaaccatagactattcttt

SEQ ID NO: 59460 - DNA, 20 bp, Artificial Sequence
  Description of Artificial Sequence: Synthetic oligonucleotide
  Target: LAMA2; (-) strand; PAM type: NRG; PAM sequence: TAG
atgtgtgctcaggtgaacca

SEQ ID NO: 59461 - DNA, 20 bp, Artificial Sequence
  Description of Artificial Sequence: Synthetic oligonucleotide
  Target: LAMA2; (-) strand; PAM type: NRG; PAM sequence: AGG
atcctttgtgatgtgtgctc

SEQ ID NO: 59462 - DNA, 20 bp, Artificial Sequence
  Description of Artificial Sequence: Synthetic oligonucleotide
  Target: LAMA2; (-) strand; PAM type: NRG; PAM sequence: CAG
catcctttgtgatgtgtgct

SEQ ID NO: 59463 - DNA, 20 bp, Artificial Sequence
  Description of Artificial Sequence: Synthetic oligonucleotide
  Target: LAMA2; (-) strand; PAM type: NRG; PAM sequence: CAG
gtaccttaactgtgcattgt

SEQ ID NO: 59464 - DNA, 20 bp, Artificial Sequence
  Description of Artificial Sequence: Synthetic oligonucleotide
  Target: LAMA2; (-) strand; PAM type: NRG; PAM sequence: GGG
taattcatttaatctaggtg

SEQ ID NO: 59465 - DNA, 20 bp, Artificial Sequence
  Description of Artificial Sequence: Synthetic oligonucleotide
  Target: LAMA2; (-) strand; PAM type: NRG; PAM sequence: GGG
ttaattcatttaatctaggt

SEQ ID NO: 59466 - DNA, 20 bp, Artificial Sequence
  Description of Artificial Sequence: Synthetic oligonucleotide
  Target: LAMA2; (-) strand; PAM type: NRG; PAM sequence: TGG
attaattcatttaatctagg

SEQ ID NO: 59467 - DNA, 20 bp, Artificial Sequence
  Description of Artificial Sequence: Synthetic oligonucleotide
  Target: LAMA2; (-) strand; PAM type: NRG; PAM sequence: AGG
aaaattaattcatttaatct

SEQ ID NO: 59468 - DNA, 20 bp, Artificial Sequence
  Description of Artificial Sequence: Synthetic oligonucleotide
  Target: LAMA2; (-) strand; PAM type: NRG; PAM sequence: TAG
caaaattaattcatttaatc

SEQ ID NO: 59469 - DNA, 20 bp, Artificial Sequence
  Description of Artificial Sequence: Synthetic oligonucleotide
  Target: LAMA2; (-) strand; PAM type: NRG; PAM sequence: AAG
aaatgtaaatatctaaaccc

SEQ ID NO: 59470 - DNA, 20 bp, Artificial Sequence
  Description of Artificial Sequence: Synthetic oligonucleotide
  Target: LAMA2; (-) strand; PAM type: NRG; PAM sequence: AAG
aactttggggtgaacataag

SEQ ID NO: 59471 - DNA, 20 bp, Artificial Sequence
  Description of Artificial Sequence: Synthetic oligonucleotide
  Target: LAMA2; (-) strand; PAM type: NRG; PAM sequence: AAG
gcaaactttggggtgaacat

SEQ ID NO: 59472 - DNA, 20 bp, Artificial Sequence
  Description of Artificial Sequence: Synthetic oligonucleotide
  Target: LAMA2; (-) strand; PAM type: NRG; PAM sequence: GGG
tgagcattttgcaaactttg

SEQ ID NO: 59473 - DNA, 20 bp, Artificial Sequence
  Description of Artificial Sequence: Synthetic oligonucleotide
  Target: LAMA2; (-) strand; PAM type: NRG; PAM sequence: GGG
atgagcattttgcaaacttt

SEQ ID NO: 59474 - DNA, 20 bp, Artificial Sequence
  Description of Artificial Sequence: Synthetic oligonucleotide
  Target: LAMA2; (-) strand; PAM type: NRG; PAM sequence: TGG
gatgagcattttgcaaactt

SEQ ID NO: 59475 - DNA, 20 bp, Artificial Sequence
  Description of Artificial Sequence: Synthetic oligonucleotide
  Target: LAMA2; (-) strand; PAM type: NRG; PAM sequence: GAG
tcatctttcttattttagat

SEQ ID NO: 59476 - DNA, 20 bp, Artificial Sequence
  Description of Artificial Sequence: Synthetic oligonucleotide
  Target: LAMA2; (-) strand; PAM type: NRG; PAM sequence: TAG
gcctatcatctttcttattt

SEQ ID NO: 59477 - DNA, 20 bp, Artificial Sequence
  Description of Artificial Sequence: Synthetic oligonucleotide
  Target: LAMA2; (-) strand; PAM type: NRG; PAM sequence: AGG
tagtaaacagaagatggatc

SEQ ID NO: 59478 - DNA, 20 bp, Artificial Sequence
  Description of Artificial Sequence: Synthetic oligonucleotide
  Target: LAMA2; (-) strand; PAM type: NRG; PAM sequence: CAG
ctagtaaacagaagatggat

SEQ ID NO: 59479 - DNA, 20 bp, Artificial Sequence
  Description of Artificial Sequence: Synthetic oligonucleotide
  Target: LAMA2; (-) strand; PAM type: NRG; PAM sequence: TGG
ttaacctagtaaacagaaga

SEQ ID NO: 59480 - DNA, 20 bp, Artificial Sequence
  Description of Artificial Sequence: Synthetic oligonucleotide
  Target: LAMA2; (-) strand; PAM type: NRG; PAM sequence: AAG
agatttaacctagtaaacag

SEQ ID NO: 59481 - DNA, 20 bp, Artificial Sequence
  Description of Artificial Sequence: Synthetic oligonucleotide
  Target: LAMA2; (-) strand; PAM type: NRG; PAM sequence: CAG
tccagatttaacctagtaaa

SEQ ID NO: 59482 - DNA, 20 bp, Artificial Sequence
  Description of Artificial Sequence: Synthetic oligonucleotide
  Target: LAMA2; (-) strand; PAM type: NRG; PAM sequence: TAG
tatattttccagatttaacc

SEQ ID NO: 59483 - DNA, 20 bp, Artificial Sequence
  Description of Artificial Sequence: Synthetic oligonucleotide
  Target: LAMA2; (-) strand; PAM type: NRG; PAM sequence: CAG
cacctgaggtttatattttc

SEQ ID NO: 59484 - DNA, 20 bp, Artificial Sequence
  Description of Artificial Sequence: Synthetic oligonucleotide
  Target: LAMA2; (-) strand; PAM type: NRG; PAM sequence: AGG
cctctgaagtctggcacctg

SEQ ID NO: 59485 - DNA, 20 bp, Artificial Sequence
  Description of Artificial Sequence: Synthetic oligonucleotide
  Target: LAMA2; (-) strand; PAM type: NRG; PAM sequence: GAG
ccctctgaagtctggcacct

SEQ ID NO: 59486 - DNA, 20 bp, Artificial Sequence
  Description of Artificial Sequence: Synthetic oligonucleotide
  Target: LAMA2; (-) strand; PAM type: NRG; PAM sequence: TGG
ttctatatccctctgaagtc

SEQ ID NO: 59487 - DNA, 20 bp, Artificial Sequence
  Description of Artificial Sequence: Synthetic oligonucleotide
  Target: LAMA2; (-) strand; PAM type: NRG; PAM sequence: AAG
tgtttttctatatccctctg

SEQ ID NO: 59488 - DNA, 20 bp, Artificial Sequence
  Description of Artificial Sequence: Synthetic oligonucleotide
  Target: LAMA2; (-) strand; PAM type: NRG; PAM sequence: AAG
caagaatggactaatgcaaa

SEQ ID NO: 59489 - DNA, 20 bp, Artificial Sequence
  Description of Artificial Sequence: Synthetic oligonucleotide
  Target: LAMA2; (-) strand; PAM type: NRG; PAM sequence: TGG
ggattttagcaatgcaagaa

SEQ ID NO: 59490 - DNA, 20 bp, Artificial Sequence
  Description of Artificial Sequence: Synthetic oligonucleotide
  Target: LAMA2; (-) strand; PAM type: NRG; PAM sequence: AAG
ctttaggattttagcaatgc

SEQ ID NO: 59491 - DNA, 20 bp, Artificial Sequence
  Description of Artificial Sequence: Synthetic oligonucleotide
  Target: LAMA2; (-) strand; PAM type: NRG; PAM sequence: TAG
ttatccagtctttaggattt

SEQ ID NO: 59492 - DNA, 20 bp, Artificial Sequence
  Description of Artificial Sequence: Synthetic oligonucleotide
  Target: LAMA2; (-) strand; PAM type: NRG; PAM sequence: AGG
ttagaaattatccagtcttt

SEQ ID NO: 59493 - DNA, 20 bp, Artificial Sequence
  Description of Artificial Sequence: Synthetic oligonucleotide
  Target: LAMA2; (-) strand; PAM type: NRG; PAM sequence: TAG
tttagaaattatccagtctt

SEQ ID NO: 59494 - DNA, 20 bp, Artificial Sequence
  Description of Artificial Sequence: Synthetic oligonucleotide
  Target: LAMA2; (-) strand; PAM type: NRG; PAM sequence: CAG
tcttttctttagaaattatc

SEQ ID NO: 59495 - DNA, 20 bp, Artificial Sequence
  Description of Artificial Sequence: Synthetic oligonucleotide
  Target: LAMA2; (-) strand; PAM type: NRG; PAM sequence: TAG
cgccttaatcatcttttctt

SEQ ID NO: 59496 - DNA, 20 bp, Artificial Sequence
  Description of Artificial Sequence: Synthetic oligonucleotide
  Target: LAMA2; (-) strand; PAM type: NRG; PAM sequence: GAG
aatcctgggattacaggcgt

SEQ ID NO: 59497 - DNA, 20 bp, Artificial Sequence
  Description of Artificial Sequence: Synthetic oligonucleotide
  Target: LAMA2; (-) strand; PAM type: NRG; PAM sequence: AGG
tcccaaaatcctgggattac

SEQ ID NO: 59498 - DNA, 20 bp, Artificial Sequence
  Description of Artificial Sequence: Synthetic oligonucleotide
  Target: LAMA2; (-) strand; PAM type: NRG; PAM sequence: CAG
ctcccaaaatcctgggatta

SEQ ID NO: 59499 - DNA, 20 bp, Artificial Sequence
  Description of Artificial Sequence: Synthetic oligonucleotide
  Target: LAMA2; (-) strand; PAM type: NRG; PAM sequence: GGG
cctcggcctcccaaaatcct

SEQ ID NO: 59500 - DNA, 20 bp, Artificial Sequence
  Description of Artificial Sequence: Synthetic oligonucleotide
  Target: LAMA2; (-) strand; PAM type: NRG; PAM sequence: TGG
acctcggcctcccaaaatcc

SEQ ID NO: 59501 - DNA, 20 bp, Artificial Sequence
  Description of Artificial Sequence: Synthetic oligonucleotide
  Target: LAMA2; (-) strand; PAM type: NRG; PAM sequence: CGG
acatcgtggtctgctcacct

SEQ ID NO: 59502 - DNA, 20 bp, Artificial Sequence
  Description of Artificial Sequence: Synthetic oligonucleotide
  Target: LAMA2; (-) strand; PAM type: NRG; PAM sequence: TGG
gtcttgaactcctgacatcg

SEQ ID NO: 59503 - DNA, 20 bp, Artificial Sequence
  Description of Artificial Sequence: Synthetic oligonucleotide
  Target: LAMA2; (-) strand; PAM type: NRG; PAM sequence: TGG
tttcaccatgttggccaggc

SEQ ID NO: 59504 - DNA, 20 bp, Artificial Sequence
  Description of Artificial Sequence: Synthetic oligonucleotide
  Target: LAMA2; (-) strand; PAM type: NRG; PAM sequence: AGG
gaggtttcaccatgttggcc

SEQ ID NO: 59505 - DNA, 20 bp, Artificial Sequence
  Description of Artificial Sequence: Synthetic oligonucleotide
  Target: LAMA2; (-) strand; PAM type: NRG; PAM sequence: CAG
cgaggtttcaccatgttggc

SEQ ID NO: 59506 - DNA, 20 bp, Artificial Sequence
  Description of Artificial Sequence: Synthetic oligonucleotide
  Target: LAMA2; (-) strand; PAM type: NRG; PAM sequence: TGG
gagacgaggtttcaccatgt

SEQ ID NO: 59507 - DNA, 20 bp, Artificial Sequence
  Description of Artificial Sequence: Synthetic oligonucleotide
  Target: LAMA2; (-) strand; PAM type: NRG; PAM sequence: AGG
ttctacttttagcagagacg

SEQ ID NO: 59508 - DNA, 20 bp, Artificial Sequence
  Description of Artificial Sequence: Synthetic oligonucleotide
  Target: LAMA2; (-) strand; PAM type: NRG; PAM sequence: GAG
tttctacttttagcagagac

SEQ ID NO: 59509 - DNA, 20 bp, Artificial Sequence
  Description of Artificial Sequence: Synthetic oligonucleotide
  Target: LAMA2; (-) strand; PAM type: NRG; PAM sequence: GAG
ttttttttctacttttagca

SEQ ID NO: 59510 - DNA, 20 bp, Artificial Sequence
  Description of Artificial Sequence: Synthetic oligonucleotide
  Target: LAMA2; (-) strand; PAM type: NRG; PAM sequence: CAG
ttttttttttctacttttag

SEQ ID NO: 59511 - DNA, 20 bp, Artificial Sequence
  Description of Artificial Sequence: Synthetic oligonucleotide
  Target: LAMA2; (-) strand; PAM type: NRG; PAM sequence: TAG
tttttttttttttctacttt

SEQ ID NO: 59512 - DNA, 20 bp, Artificial Sequence
  Description of Artificial Sequence: Synthetic oligonucleotide
  Target: LAMA2; (-) strand; PAM type: NRG; PAM sequence: TAG
cctgtacagcctgtagaatc

SEQ ID NO: 59513 - DNA, 20 bp, Artificial Sequence
  Description of Artificial Sequence: Synthetic oligonucleotide
  Target: LAMA2; (-) strand; PAM type: NRG; PAM sequence: TAG
tgtgcttcctgtacagcctg

SEQ ID NO: 59514 - DNA, 20 bp, Artificial Sequence
  Description of Artificial Sequence: Synthetic oligonucleotide
  Target: LAMA2; (-) strand; PAM type: NRG; PAM sequence: CAG
atgctgttgtgcttcctgta

SEQ ID NO: 59515 - DNA, 20 bp, Artificial Sequence
  Description of Artificial Sequence: Synthetic oligonucleotide
  Target: LAMA2; (-) strand; PAM type: NRG; PAM sequence: CAG
tcctgaggcctccccagagg

SEQ ID NO: 59516 - DNA, 20 bp, Artificial Sequence
  Description of Artificial Sequence: Synthetic oligonucleotide
  Target: LAMA2; (-) strand; PAM type: NRG; PAM sequence: AGG
gcttcctgaggcctccccag

SEQ ID NO: 59517 - DNA, 20 bp, Artificial Sequence
  Description of Artificial Sequence: Synthetic oligonucleotide
  Target: LAMA2; (-) strand; PAM type: NRG; PAM sequence: GAG
agcttcctgaggcctcccca

SEQ ID NO: 59518 - DNA, 20 bp, Artificial Sequence
  Description of Artificial Sequence: Synthetic oligonucleotide
  Target: LAMA2; (-) strand; PAM type: NRG; PAM sequence: CAG
gaagcttcctgaggcctccc

SEQ ID NO: 59519 - DNA, 20 bp, Artificial Sequence
  Description of Artificial Sequence: Synthetic oligonucleotide
  Target: LAMA2; (-) strand; PAM type: NRG; PAM sequence: AGG
ccatgattggaagcttcctg

SEQ ID NO: 59520 - DNA, 20 bp, Artificial Sequence
  Description of Artificial Sequence: Synthetic oligonucleotide
  Target: LAMA2; (-) strand; PAM type: NRG; PAM sequence: GAG
gccatgattggaagcttcct

SEQ ID NO: 59521 - DNA, 20 bp, Artificial Sequence
  Description of Artificial Sequence: Synthetic oligonucleotide
  Target: LAMA2; (-) strand; PAM type: NRG; PAM sequence: AAG
taaccttctgccatgattgg

SEQ ID NO: 59522 - DNA, 20 bp, Artificial Sequence
  Description of Artificial Sequence: Synthetic oligonucleotide
  Target: LAMA2; (-) strand; PAM type: NRG; PAM sequence: TGG
ccttaaccttctgccatgat

SEQ ID NO: 59523 - DNA, 20 bp, Artificial Sequence
  Description of Artificial Sequence: Synthetic oligonucleotide
  Target: LAMA2; (-) strand; PAM type: NRG; PAM sequence: TGG
ttgctcctgtttatgcagtg

SEQ ID NO: 59524 - DNA, 20 bp, Artificial Sequence
  Description of Artificial Sequence: Synthetic oligonucleotide
  Target: LAMA2; (-) strand; PAM type: NRG; PAM sequence: CAG
ctctcttgctcctgtttatg

SEQ ID NO: 59525 - DNA, 20 bp, Artificial Sequence
  Description of Artificial Sequence: Synthetic oligonucleotide
  Target: LAMA2; (-) strand; PAM type: NRG; PAM sequence: TAG
tgaggtcattttaaagtatg

SEQ ID NO: 59526 - DNA, 20 bp, Artificial Sequence
  Description of Artificial Sequence: Synthetic oligonucleotide
  Target: LAMA2; (-) strand; PAM type: NRG; PAM sequence: AAG
gttctcatgaggtcatttta

SEQ ID NO: 59527 - DNA, 20 bp, Artificial Sequence
  Description of Artificial Sequence: Synthetic oligonucleotide
  Target: LAMA2; (-) strand; PAM type: NRG; PAM sequence: AGG
catgacagtgagttctcatg

SEQ ID NO: 59528 - DNA, 20 bp, Artificial Sequence
  Description of Artificial Sequence: Synthetic oligonucleotide
  Target: LAMA2; (-) strand; PAM type: NRG; PAM sequence: GAG
tcatgacagtgagttctcat

SEQ ID NO: 59529 - DNA, 20 bp, Artificial Sequence
  Description of Artificial Sequence: Synthetic oligonucleotide
  Target: LAMA2; (-) strand; PAM type: NRG; PAM sequence: GAG
ggaactgtcctcatgacagt

SEQ ID NO: 59530 - DNA, 20 bp, Artificial Sequence
  Description of Artificial Sequence: Synthetic oligonucleotide
  Target: LAMA2; (-) strand; PAM type: NRG; PAM sequence: CAG
ccttggaactgtcctcatga

SEQ ID NO: 59531 - DNA, 20 bp, Artificial Sequence
  Description of Artificial Sequence: Synthetic oligonucleotide
  Target: LAMA2; (-) strand; PAM type: NRG; PAM sequence: TGG
tggtttagcaccatccccct

SEQ ID NO: 59532 - DNA, 20 bp, Artificial Sequence
  Description of Artificial Sequence: Synthetic oligonucleotide
  Target: LAMA2; (-) strand; PAM type: NRG; PAM sequence: TAG
ctgatttctcataagtggtt

SEQ ID NO: 59533 - DNA, 20 bp, Artificial Sequence
  Description of Artificial Sequence: Synthetic oligonucleotide
  Target: LAMA2; (-) strand; PAM type: NRG; PAM sequence: TGG
aggggctgatttctcataag

SEQ ID NO: 59534 - DNA, 20 bp, Artificial Sequence
  Description of Artificial Sequence: Synthetic oligonucleotide
  Target: LAMA2; (-) strand; PAM type: NRG; PAM sequence: AAG
aataggggctgatttctcat

SEQ ID NO: 59535 - DNA, 20 bp, Artificial Sequence
  Description of Artificial Sequence: Synthetic oligonucleotide
  Target: LAMA2; (-) strand; PAM type: NRG; PAM sequence: GGG
gggagatgattggagaatag

SEQ ID NO: 59536 - DNA, 20 bp, Artificial Sequence
  Description of Artificial Sequence: Synthetic oligonucleotide
  Target: LAMA2; (-) strand; PAM type: NRG; PAM sequence: GGG
tgggagatgattggagaata

SEQ ID NO: 59537 - DNA, 20 bp, Artificial Sequence
  Description of Artificial Sequence: Synthetic oligonucleotide
  Target: LAMA2; (-) strand; PAM type: NRG; PAM sequence: AGG
gtgggagatgattggagaat

SEQ ID NO: 59538 - DNA, 20 bp, Artificial Sequence
  Description of Artificial Sequence: Synthetic oligonucleotide
  Target: LAMA2; (-) strand; PAM type: NRG; PAM sequence: TAG
ggtgggagatgattggagaa

SEQ ID NO: 59539 - DNA, 20 bp, Artificial Sequence
  Description of Artificial Sequence: Synthetic oligonucleotide
  Target: LAMA2; (-) strand; PAM type: NRG; PAM sequence: GAG
ggcctggtgggagatgattg

SEQ ID NO: 59540 - DNA, 20 bp, Artificial Sequence
  Description of Artificial Sequence: Synthetic oligonucleotide
  Target: LAMA2; (-) strand; PAM type: NRG; PAM sequence: TGG
ggggcctggtgggagatgat

SEQ ID NO: 59541 - DNA, 20 bp, Artificial Sequence
  Description of Artificial Sequence: Synthetic oligonucleotide
  Target: LAMA2; (-) strand; PAM type: NRG; PAM sequence: GAG
ttaggggaggggcctggtgg

SEQ ID NO: 59542 - DNA, 20 bp, Artificial Sequence
  Description of Artificial Sequence: Synthetic oligonucleotide
  Target: LAMA2; (-) strand; PAM type: NRG; PAM sequence: GGG
tgttaggggaggggcctggt

SEQ ID NO: 59543 - DNA, 20 bp, Artificial Sequence
  Description of Artificial Sequence: Synthetic oligonucleotide
  Target: LAMA2; (-) strand; PAM type: NRG; PAM sequence: TGG
atgttaggggaggggcctgg

SEQ ID NO: 59544 - DNA, 20 bp, Artificial Sequence
  Description of Artificial Sequence: Synthetic oligonucleotide
  Target: LAMA2; (-) strand; PAM type: NRG; PAM sequence: TGG
ccaatgttaggggaggggcc

SEQ ID NO: 59545 - DNA, 20 bp, Artificial Sequence
  Description of Artificial Sequence: Synthetic oligonucleotide
  Target: LAMA2; (-) strand; PAM type: NRG; PAM sequence: GGG
aatctccaatgttaggggag

SEQ ID NO: 59546 - DNA, 20 bp, Artificial Sequence
  Description of Artificial Sequence: Synthetic oligonucleotide
  Target: LAMA2; (-) strand; PAM type: NRG; PAM sequence: GGG
taatctccaatgttagggga

SEQ ID NO: 59547 - DNA, 20 bp, Artificial Sequence
  Description of Artificial Sequence: Synthetic oligonucleotide
  Target: LAMA2; (-) strand; PAM type: NRG; PAM sequence: AGG
gtaatctccaatgttagggg

SEQ ID NO: 59548 - DNA, 20 bp, Artificial Sequence
  Description of Artificial Sequence: Synthetic oligonucleotide
  Target: LAMA2; (-) strand; PAM type: NRG; PAM sequence: GAG
tgtaatctccaatgttaggg

SEQ ID NO: 59549 - DNA, 20 bp, Artificial Sequence
  Description of Artificial Sequence: Synthetic oligonucleotide
  Target: LAMA2; (-) strand; PAM type: NRG; PAM sequence: GGG
aatgtaatctccaatgttag

SEQ ID NO: 59550 - DNA, 20 bp, Artificial Sequence
  Description of Artificial Sequence: Synthetic oligonucleotide
  Target: LAMA2; (-) strand; PAM type: NRG; PAM sequence: GGG
aaatgtaatctccaatgtta

SEQ ID NO: 59551 - DNA, 20 bp, Artificial Sequence
  Description of Artificial Sequence: Synthetic oligonucleotide
  Target: LAMA2; (-) strand; PAM type: NRG; PAM sequence: AGG
gaaatgtaatctccaatgtt

SEQ ID NO: 59552 - DNA, 20 bp, Artificial Sequence
  Description of Artificial Sequence: Synthetic oligonucleotide
  Target: LAMA2; (-) strand; PAM type: NRG; PAM sequence: TAG
tgaaatgtaatctccaatgt

SEQ ID NO: 59553 - DNA, 20 bp, Artificial Sequence
  Description of Artificial Sequence: Synthetic oligonucleotide
  Target: LAMA2; (-) strand; PAM type: NRG; PAM sequence: AGG
tctttctccaaaagtgatat

SEQ ID NO: 59554 - DNA, 20 bp, Artificial Sequence
  Description of Artificial Sequence: Synthetic oligonucleotide
  Target: LAMA2; (-) strand; PAM type: NRG; PAM sequence: TAG
ctctttctccaaaagtgata

SEQ ID NO: 59555 - DNA, 20 bp, Artificial Sequence
  Description of Artificial Sequence: Synthetic oligonucleotide
  Target: LAMA2; (-) strand; PAM type: NRG; PAM sequence: AAG
tacctccactctttctccaa

SEQ ID NO: 59556 - DNA, 20 bp, Artificial Sequence
  Description of Artificial Sequence: Synthetic oligonucleotide
  Target: LAMA2; (-) strand; PAM type: NRG; PAM sequence: GAG
tgtgatgtaacaaaccttca

SEQ ID NO: 59557 - DNA, 20 bp, Artificial Sequence
  Description of Artificial Sequence: Synthetic oligonucleotide
  Target: LAMA2; (-) strand; PAM type: NRG; PAM sequence: CAG
gctgtgatgtaacaaacctt

SEQ ID NO: 59558 - DNA, 20 bp, Artificial Sequence
  Description of Artificial Sequence: Synthetic oligonucleotide
  Target: LAMA2; (-) strand; PAM type: NRG; PAM sequence: CAG
tatgatatttgccatcaccc

SEQ ID NO: 59559 - DNA, 20 bp, Artificial Sequence
  Description of Artificial Sequence: Synthetic oligonucleotide
  Target: LAMA2; (-) strand; PAM type: NRG; PAM sequence: TGG
ctcagatatttgaaaacaac

SEQ ID NO: 59560 - DNA, 20 bp, Artificial Sequence
  Description of Artificial Sequence: Synthetic oligonucleotide
  Target: LAMA2; (-) strand; PAM type: NRG; PAM sequence: CAG
tcttcttactgatattttct

SEQ ID NO: 59561 - DNA, 20 bp, Artificial Sequence
  Description of Artificial Sequence: Synthetic oligonucleotide
  Target: LAMA2; (-) strand; PAM type: NRG; PAM sequence: AGG
tcaaaatgtttaggcaagtg

SEQ ID NO: 59562 - DNA, 20 bp, Artificial Sequence
  Description of Artificial Sequence: Synthetic oligonucleotide
  Target: LAMA2; (-) strand; PAM type: NRG; PAM sequence: GAG
atcaaaatgtttaggcaagt

SEQ ID NO: 59563 - DNA, 20 bp, Artificial Sequence
  Description of Artificial Sequence: Synthetic oligonucleotide
  Target: LAMA2; (-) strand; PAM type: NRG; PAM sequence: AAG
tttaatcaaaatgtttaggc

SEQ ID NO: 59564 - DNA, 20 bp, Artificial Sequence
  Description of Artificial Sequence: Synthetic oligonucleotide
  Target: LAMA2; (-) strand; PAM type: NRG; PAM sequence: AGG
catttttaatcaaaatgttt

SEQ ID NO: 59565 - DNA, 20 bp, Artificial Sequence
  Description of Artificial Sequence: Synthetic oligonucleotide
  Target: LAMA2; (-) strand; PAM type: NRG; PAM sequence: TAG
gcatttttaatcaaaatgtt

SEQ ID NO: 59566 - DNA, 20 bp, Artificial Sequence
  Description of Artificial Sequence: Synthetic oligonucleotide
  Target: LAMA2; (-) strand; PAM type: NRG; PAM sequence: AGG
agatggtcaccagaggaaaa

SEQ ID NO: 59567 - DNA, 20 bp, Artificial Sequence
  Description of Artificial Sequence: Synthetic oligonucleotide
  Target: LAMA2; (-) strand; PAM type: NRG; PAM sequence: AAG
cagatggtcaccagaggaaa

SEQ ID NO: 59568 - DNA, 20 bp, Artificial Sequence
  Description of Artificial Sequence: Synthetic oligonucleotide
  Target: LAMA2; (-) strand; PAM type: NRG; PAM sequence: AGG
ttttaacagatggtcaccag

SEQ ID NO: 59569 - DNA, 20 bp, Artificial Sequence
  Description of Artificial Sequence: Synthetic oligonucleotide
  Target: LAMA2; (-) strand; PAM type: NRG; PAM sequence: GAG
tttttaacagatggtcacca

SEQ ID NO: 59570 - DNA, 20 bp, Artificial Sequence
  Description of Artificial Sequence: Synthetic oligonucleotide
  Target: LAMA2; (-) strand; PAM type: NRG; PAM sequence: CAG
aatttttaacagatggtcac

SEQ ID NO: 59571 - DNA, 20 bp, Artificial Sequence
  Description of Artificial Sequence: Synthetic oligonucleotide
  Target: LAMA2; (-) strand; PAM type: NRG; PAM sequence: TGG
ttttaaaaatttttaacaga

SEQ ID NO: 59572 - DNA, 20 bp, Artificial Sequence
  Description of Artificial Sequence: Synthetic oligonucleotide
  Target: LAMA2; (-) strand; PAM type: NRG; PAM sequence: CAG
aaggttttaaaaatttttaa

SEQ ID NO: 59573 - DNA, 20 bp, Artificial Sequence
  Description of Artificial Sequence: Synthetic oligonucleotide
  Target: LAMA2; (-) strand; PAM type: NRG; PAM sequence: AGG
acaaattttttcataggtca

SEQ ID NO: 59574 - DNA, 20 bp, Artificial Sequence
  Description of Artificial Sequence: Synthetic oligonucleotide
  Target: LAMA2; (-) strand; PAM type: NRG; PAM sequence: AAG
gacaaattttttcataggtc

SEQ ID NO: 59575 - DNA, 20 bp, Artificial Sequence
  Description of Artificial Sequence: Synthetic oligonucleotide
  Target: LAMA2; (-) strand; PAM type: NRG; PAM sequence: AGG
ttactgacaaattttttcat

SEQ ID NO: 59576 - DNA, 20 bp, Artificial Sequence
  Description of Artificial Sequence: Synthetic oligonucleotide
  Target: LAMA2; (-) strand; PAM type: NRG; PAM sequence: TAG
cttactgacaaattttttca

SEQ ID NO: 59577 - DNA, 20 bp, Artificial Sequence
  Description of Artificial Sequence: Synthetic oligonucleotide
  Target: LAMA2; (-) strand; PAM type: NRG; PAM sequence: TGG
aagtccagaactgagaagtt

SEQ ID NO: 59578 - DNA, 20 bp, Artificial Sequence
  Description of Artificial Sequence: Synthetic oligonucleotide
  Target: LAMA2; (-) strand; PAM type: NRG; PAM sequence: AAG
ttaaaaagtccagaactgag

SEQ ID NO: 59579 - DNA, 20 bp, Artificial Sequence
  Description of Artificial Sequence: Synthetic oligonucleotide
  Target: LAMA2; (-) strand; PAM type: NRG; PAM sequence: GAG
tgattaaaaagtccagaact

SEQ ID NO: 59580 - DNA, 20 bp, Artificial Sequence
  Description of Artificial Sequence: Synthetic oligonucleotide
  Target: LAMA2; (-) strand; PAM type: NRG; PAM sequence: CAG
actacactgattaaaaagtc

SEQ ID NO: 59581 - DNA, 20 bp, Artificial Sequence
  Description of Artificial Sequence: Synthetic oligonucleotide
  Target: LAMA2; (-) strand; PAM type: NRG; PAM sequence: AAG
tggcaactacactgattaaa

SEQ ID NO: 59582 - DNA, 20 bp, Artificial Sequence
  Description of Artificial Sequence: Synthetic oligonucleotide
  Target: LAMA2; (-) strand; PAM type: NRG; PAM sequence: TGG
aagctggtgggtgagtccga

SEQ ID NO: 59583 - DNA, 20 bp, Artificial Sequence
  Description of Artificial Sequence: Synthetic oligonucleotide
  Target: LAMA2; (-) strand; PAM type: NRG; PAM sequence: GAG
tagcaggcaagctggtgggt

SEQ ID NO: 59584 - DNA, 20 bp, Artificial Sequence
  Description of Artificial Sequence: Synthetic oligonucleotide
  Target: LAMA2; (-) strand; PAM type: NRG; PAM sequence: GGG
ggattagcaggcaagctggt

SEQ ID NO: 59585 - DNA, 20 bp, Artificial Sequence
  Description of Artificial Sequence: Synthetic oligonucleotide
  Target: LAMA2; (-) strand; PAM type: NRG; PAM sequence: TGG
tggattagcaggcaagctgg

SEQ ID NO: 59586 - DNA, 20 bp, Artificial Sequence
  Description of Artificial Sequence: Synthetic oligonucleotide
  Target: LAMA2; (-) strand; PAM type: NRG; PAM sequence: TGG
agatggattagcaggcaagc

SEQ ID NO: 59587 - DNA, 20 bp, Artificial Sequence
  Description of Artificial Sequence: Synthetic oligonucleotide
  Target: LAMA2; (-) strand; PAM type: NRG; PAM sequence: AAG
gatcagatggattagcaggc

SEQ ID NO: 59588 - DNA, 20 bp, Artificial Sequence
  Description of Artificial Sequence: Synthetic oligonucleotide
  Target: LAMA2; (-) strand; PAM type: NRG; PAM sequence: AGG
cacagatcagatggattagc

SEQ ID NO: 59589 - DNA, 20 bp, Artificial Sequence
  Description of Artificial Sequence: Synthetic oligonucleotide
  Target: LAMA2; (-) strand; PAM type: NRG; PAM sequence: CAG
acacagatcagatggattag

SEQ ID NO: 59590 - DNA, 20 bp, Artificial Sequence
  Description of Artificial Sequence: Synthetic oligonucleotide
  Target: LAMA2; (-) strand; PAM type: NRG; PAM sequence: TAG
gtgacacagatcagatggat

SEQ ID NO: 59591 - DNA, 20 bp, Artificial Sequence
  Description of Artificial Sequence: Synthetic oligonucleotide
  Target: LAMA2; (-) strand; PAM type: NRG; PAM sequence: TGG
tttgagtgacacagatcaga

SEQ ID NO: 59592 - DNA, 20 bp, Artificial Sequence
  Description of Artificial Sequence: Synthetic oligonucleotide
  Target: LAMA2; (-) strand; PAM type: NRG; PAM sequence: CAG
tgtatttgagtgacacagat

SEQ ID NO: 59593 - DNA, 20 bp, Artificial Sequence
  Description of Artificial Sequence: Synthetic oligonucleotide
  Target: LAMA2; (-) strand; PAM type: NRG; PAM sequence: CAG
cctgctgtatttgagtgaca

SEQ ID NO: 59594 - DNA, 20 bp, Artificial Sequence
  Description of Artificial Sequence: Synthetic oligonucleotide
  Target: LAMA2; (-) strand; PAM type: NRG; PAM sequence: GAG
cttcactgcctgctgtattt

SEQ ID NO: 59595 - DNA, 20 bp, Artificial Sequence
  Description of Artificial Sequence: Synthetic oligonucleotide
  Target: LAMA2; (-) strand; PAM type: NRG; PAM sequence: CAG
gagaatgaaataagaaaaag

SEQ ID NO: 59596 - DNA, 20 bp, Artificial Sequence
  Description of Artificial Sequence: Synthetic oligonucleotide
  Target: LAMA2; (-) strand; PAM type: NRG; PAM sequence: AAG
aaggagaatgaaataagaaa

SEQ ID NO: 59597 - DNA, 20 bp, Artificial Sequence
  Description of Artificial Sequence: Synthetic oligonucleotide
  Target: LAMA2; (-) strand; PAM type: NRG; PAM sequence: AAG
agatagaaggagaatgaaat

SEQ ID NO: 59598 - DNA, 20 bp, Artificial Sequence
  Description of Artificial Sequence: Synthetic oligonucleotide
  Target: LAMA2; (-) strand; PAM type: NRG; PAM sequence: GAG
gattttatgacagatagaag

SEQ ID NO: 59599 - DNA, 20 bp, Artificial Sequence
  Description of Artificial Sequence: Synthetic oligonucleotide
  Target: LAMA2; (-) strand; PAM type: NRG; PAM sequence: AGG
tggattttatgacagataga

SEQ ID NO: 59600 - DNA, 20 bp, Artificial Sequence
  Description of Artificial Sequence: Synthetic oligonucleotide
  Target: LAMA2; (-) strand; PAM type: NRG; PAM sequence: AAG
ctggattttatgacagatag

SEQ ID NO: 59601 - DNA, 20 bp, Artificial Sequence
  Description of Artificial Sequence: Synthetic oligonucleotide
  Target: LAMA2; (-) strand; PAM type: NRG; PAM sequence: TAG
tacctggattttatgacaga

SEQ ID NO: 59602 - DNA, 20 bp, Artificial Sequence
  Description of Artificial Sequence: Synthetic oligonucleotide
  Target: LAMA2; (-) strand; PAM type: NRG; PAM sequence: CAG
ttggtacctggattttatga

SEQ ID NO: 59603 - DNA, 20 bp, Artificial Sequence
  Description of Artificial Sequence: Synthetic oligonucleotide
  Target: LAMA2; (-) strand; PAM type: NRG; PAM sequence: TGG
tatccctagttattggtacc

SEQ ID NO: 59604 - DNA, 20 bp, Artificial Sequence
  Description of Artificial Sequence: Synthetic oligonucleotide
  Target: LAMA2; (-) strand; PAM type: NRG; PAM sequence: TGG
aaacacttatccctagttat

SEQ ID NO: 59605 - DNA, 20 bp, Artificial Sequence
  Description of Artificial Sequence: Synthetic oligonucleotide
  Target: LAMA2; (-) strand; PAM type: NRG; PAM sequence: TAG
cttggtaaaacacttatccc

SEQ ID NO: 59606 - DNA, 20 bp, Artificial Sequence
  Description of Artificial Sequence: Synthetic oligonucleotide
  Target: LAMA2; (-) strand; PAM type: NRG; PAM sequence: TGG
gctattgaaataactgctct

SEQ ID NO: 59607 - DNA, 20 bp, Artificial Sequence
  Description of Artificial Sequence: Synthetic oligonucleotide
  Target: LAMA2; (-) strand; PAM type: NRG; PAM sequence: AAG
ttaatctggtatttaagttc

SEQ ID NO: 59608 - DNA, 20 bp, Artificial Sequence
  Description of Artificial Sequence: Synthetic oligonucleotide
  Target: LAMA2; (-) strand; PAM type: NRG; PAM sequence: AAG
tgaaaattaatctggtattt

SEQ ID NO: 59609 - DNA, 20 bp, Artificial Sequence
  Description of Artificial Sequence: Synthetic oligonucleotide
  Target: LAMA2; (-) strand; PAM type: NRG; PAM sequence: TGG
ttattctgtgaaaattaatc

SEQ ID NO: 59610 - DNA, 20 bp, Artificial Sequence
  Description of Artificial Sequence: Synthetic oligonucleotide
  Target: LAMA2; (-) strand; PAM type: NRG; PAM sequence: AAG
accacaacttaaaagtcacc

SEQ ID NO: 59611 - DNA, 20 bp, Artificial Sequence
  Description of Artificial Sequence: Synthetic oligonucleotide
  Target: LAMA2; (-) strand; PAM type: NRG; PAM sequence: AAG
aaaaagcaaccacaacttaa

SEQ ID NO: 59612 - DNA, 20 bp, Artificial Sequence
  Description of Artificial Sequence: Synthetic oligonucleotide
  Target: LAMA2; (-) strand; PAM type: NRG; PAM sequence: AAG
aaacagagaagtcatttaaa

SEQ ID NO: 59613 - DNA, 20 bp, Artificial Sequence
  Description of Artificial Sequence: Synthetic oligonucleotide
  Target: LAMA2; (-) strand; PAM type: NRG; PAM sequence: AAG
cacaaagtcctcaaacagag

SEQ ID NO: 59614 - DNA, 20 bp, Artificial Sequence
  Description of Artificial Sequence: Synthetic oligonucleotide
  Target: LAMA2; (-) strand; PAM type: NRG; PAM sequence: GAG
atacacaaagtcctcaaaca

SEQ ID NO: 59615 - DNA, 20 bp, Artificial Sequence
  Description of Artificial Sequence: Synthetic oligonucleotide
  Target: LAMA2; (-) strand; PAM type: NRG; PAM sequence: CAG
gtatacacaaagtcctcaaa

SEQ ID NO: 59616 - DNA, 20 bp, Artificial Sequence
  Description of Artificial Sequence: Synthetic oligonucleotide
  Target: LAMA2; (-) strand; PAM type: NRG; PAM sequence: AAG
ataggaaatgtgtatacaca

SEQ ID NO: 59617 - DNA, 20 bp, Artificial Sequence
  Description of Artificial Sequence: Synthetic oligonucleotide
  Target: LAMA2; (-) strand; PAM type: NRG; PAM sequence: AGG
cttcctaccacaaatgtgat

SEQ ID NO: 59618 - DNA, 20 bp, Artificial Sequence
  Description of Artificial Sequence: Synthetic oligonucleotide
  Target: LAMA2; (-) strand; PAM type: NRG; PAM sequence: TAG
tcttcctaccacaaatgtga

SEQ ID NO: 59619 - DNA, 20 bp, Artificial Sequence
  Description of Artificial Sequence: Synthetic oligonucleotide
  Target: LAMA2; (-) strand; PAM type: NRG; PAM sequence: TAG
gtgaatcttgagggtcatct

SEQ ID NO: 59620 - DNA, 20 bp, Artificial Sequence
  Description of Artificial Sequence: Synthetic oligonucleotide
  Target: LAMA2; (-) strand; PAM type: NRG; PAM sequence: GGG
ccagaggttgtgaatcttga

SEQ ID NO: 59621 - DNA, 20 bp, Artificial Sequence
  Description of Artificial Sequence: Synthetic oligonucleotide
  Target: LAMA2; (-) strand; PAM type: NRG; PAM sequence: AGG
cccagaggttgtgaatcttg

SEQ ID NO: 59622 - DNA, 20 bp, Artificial Sequence
  Description of Artificial Sequence: Synthetic oligonucleotide
  Target: LAMA2; (-) strand; PAM type: NRG; PAM sequence: GAG
ccccagaggttgtgaatctt

SEQ ID NO: 59623 - DNA, 20 bp, Artificial Sequence
  Description of Artificial Sequence: Synthetic oligonucleotide
  Target: LAMA2; (-) strand; PAM type: NRG; PAM sequence: AGG
atataggatgtgtaccccag

SEQ ID NO: 59624 - DNA, 20 bp, Artificial Sequence
  Description of Artificial Sequence: Synthetic oligonucleotide
  Target: LAMA2; (-) strand; PAM type: NRG; PAM sequence: GAG
catataggatgtgtacccca

SEQ ID NO: 59625 - DNA, 20 bp, Artificial Sequence
  Description of Artificial Sequence: Synthetic oligonucleotide
  Target: LAMA2; (-) strand; PAM type: NRG; PAM sequence: CAG
atcatataggatgtgtaccc

SEQ ID NO: 59626 - DNA, 20 bp, Artificial Sequence
  Description of Artificial Sequence: Synthetic oligonucleotide
  Target: LAMA2; (-) strand; PAM type: NRG; PAM sequence: AGG
tcaacaggaggggatcatat

SEQ ID NO: 59627 - DNA, 20 bp, Artificial Sequence
  Description of Artificial Sequence: Synthetic oligonucleotide
  Target: LAMA2; (-) strand; PAM type: NRG; PAM sequence: TAG
ctcaacaggaggggatcata

SEQ ID NO: 59628 - DNA, 20 bp, Artificial Sequence
  Description of Artificial Sequence: Synthetic oligonucleotide
  Target: LAMA2; (-) strand; PAM type: NRG; PAM sequence: GGG
ccaatcacactcaacaggag

SEQ ID NO: 59629 - DNA, 20 bp, Artificial Sequence
  Description of Artificial Sequence: Synthetic oligonucleotide
  Target: LAMA2; (-) strand; PAM type: NRG; PAM sequence: GGG
tccaatcacactcaacagga

SEQ ID NO: 59630 - DNA, 20 bp, Artificial Sequence
  Description of Artificial Sequence: Synthetic oligonucleotide
  Target: LAMA2; (-) strand; PAM type: NRG; PAM sequence: AGG
ctccaatcacactcaacagg

SEQ ID NO: 59631 - DNA, 20 bp, Artificial Sequence
  Description of Artificial Sequence: Synthetic oligonucleotide
  Target: LAMA2; (-) strand; PAM type: NRG; PAM sequence: GAG
gctccaatcacactcaacag

SEQ ID NO: 59632 - DNA, 20 bp, Artificial Sequence
  Description of Artificial Sequence: Synthetic oligonucleotide
  Target: LAMA2; (-) strand; PAM type: NRG; PAM sequence: AGG
aggctccaatcacactcaac

SEQ ID NO: 59633 - DNA, 20 bp, Artificial Sequence
  Description of Artificial Sequence: Synthetic oligonucleotide
  Target: LAMA2; (-) strand; PAM type: NRG; PAM sequence: CAG
caggctccaatcacactcaa

SEQ ID NO: 59634 - DNA, 20 bp, Artificial Sequence
  Description of Artificial Sequence: Synthetic oligonucleotide
  Target: LAMA2; (-) strand; PAM type: NRG; PAM sequence: AGG
tgatgtcccatcatattcac

SEQ ID NO: 59635 - DNA, 20 bp, Artificial Sequence
  Description of Artificial Sequence: Synthetic oligonucleotide
  Target: LAMA2; (-) strand; PAM type: NRG; PAM sequence: CAG
atgatgtcccatcatattca

SEQ ID NO: 59636 - DNA, 20 bp, Artificial Sequence
  Description of Artificial Sequence: Synthetic oligonucleotide
  Target: LAMA2; (-) strand; PAM type: NRG; PAM sequence: GGG
gtaaaatgttacctaatcat

SEQ ID NO: 59637 - DNA, 20 bp, Artificial Sequence
  Description of Artificial Sequence: Synthetic oligonucleotide
  Target: LAMA2; (-) strand; PAM type: NRG; PAM sequence: TGG
tgtaaaatgttacctaatca

SEQ ID NO: 59638 - DNA, 20 bp, Artificial Sequence
  Description of Artificial Sequence: Synthetic oligonucleotide
  Target: LAMA2; (-) strand; PAM type: NRG; PAM sequence: GAG
gaaaactaatttagccacct

SEQ ID NO: 59639 - DNA, 20 bp, Artificial Sequence
  Description of Artificial Sequence: Synthetic oligonucleotide
  Target: LAMA2; (-) strand; PAM type: NRG; PAM sequence: TAG
tagcttgaagaaaactaatt

SEQ ID NO: 59640 - DNA, 20 bp, Artificial Sequence
  Description of Artificial Sequence: Synthetic oligonucleotide
  Target: LAMA2; (-) strand; PAM type: NRG; PAM sequence: AAG
tcttccttttgagtagcttg

SEQ ID NO: 59641 - DNA, 20 bp, Artificial Sequence
  Description of Artificial Sequence: Synthetic oligonucleotide
  Target: LAMA2; (-) strand; PAM type: NRG; PAM sequence: TAG
agaataatcttccttttgag

SEQ ID NO: 59642 - DNA, 20 bp, Artificial Sequence
  Description of Artificial Sequence: Synthetic oligonucleotide
  Target: LAMA2; (-) strand; PAM type: NRG; PAM sequence: GAG
ctcagaataatcttcctttt

SEQ ID NO: 59643 - DNA, 20 bp, Artificial Sequence
  Description of Artificial Sequence: Synthetic oligonucleotide
  Target: LAMA2; (-) strand; PAM type: NRG; PAM sequence: CAG
ttgattaagttgggtgccct

SEQ ID NO: 59644 - DNA, 20 bp, Artificial Sequence
  Description of Artificial Sequence: Synthetic oligonucleotide
  Target: LAMA2; (-) strand; PAM type: NRG; PAM sequence: GGG
ggagttcacttgattaagtt

SEQ ID NO: 59645 - DNA, 20 bp, Artificial Sequence
  Description of Artificial Sequence: Synthetic oligonucleotide
  Target: LAMA2; (-) strand; PAM type: NRG; PAM sequence: TGG
aggagttcacttgattaagt

SEQ ID NO: 59646 - DNA, 20 bp, Artificial Sequence
  Description of Artificial Sequence: Synthetic oligonucleotide
  Target: LAMA2; (-) strand; PAM type: NRG; PAM sequence: AAG
ttttaggagttcacttgatt

SEQ ID NO: 59647 - DNA, 20 bp, Artificial Sequence
  Description of Artificial Sequence: Synthetic oligonucleotide
  Target: LAMA2; (-) strand; PAM type: NRG; PAM sequence: GAG
agaactagacactcttttag

SEQ ID NO: 59648 - DNA, 20 bp, Artificial Sequence
  Description of Artificial Sequence: Synthetic oligonucleotide
  Target: LAMA2; (-) strand; PAM type: NRG; PAM sequence: AGG
tgagaactagacactctttt

SEQ ID NO: 59649 - DNA, 20 bp, Artificial Sequence
  Description of Artificial Sequence: Synthetic oligonucleotide
  Target: LAMA2; (-) strand; PAM type: NRG; PAM sequence: TAG
ctgagaactagacactcttt

SEQ ID NO: 59650 - DNA, 20 bp, Artificial Sequence
  Description of Artificial Sequence: Synthetic oligonucleotide
  Target: LAMA2; (-) strand; PAM type: NRG; PAM sequence: TAG
aggaaaagctctctgagaac

SEQ ID NO: 59651 - DNA, 20 bp, Artificial Sequence
  Description of Artificial Sequence: Synthetic oligonucleotide
  Target: LAMA2; (-) strand; PAM type: NRG; PAM sequence: GAG
aagagcaggaaaagctctct

SEQ ID NO: 59652 - DNA, 20 bp, Artificial Sequence
  Description of Artificial Sequence: Synthetic oligonucleotide
  Target: LAMA2; (-) strand; PAM type: NRG; PAM sequence: AAG
tgcttcttcaagagcaggaa

SEQ ID NO: 59653 - DNA, 20 bp, Artificial Sequence
  Description of Artificial Sequence: Synthetic oligonucleotide
  Target: LAMA2; (-) strand; PAM type: NRG; PAM sequence: AGG
ttatttgcttcttcaagagc

SEQ ID NO: 59654 - DNA, 20 bp, Artificial Sequence
  Description of Artificial Sequence: Synthetic oligonucleotide
  Target: LAMA2; (-) strand; PAM type: NRG; PAM sequence: CAG
attatttgcttcttcaagag

SEQ ID NO: 59655 - DNA, 20 bp, Artificial Sequence
  Description of Artificial Sequence: Synthetic oligonucleotide
  Target: LAMA2; (-) strand; PAM type: NRG; PAM sequence: GAG
atgattatttgcttcttcaa

SEQ ID NO: 59656 - DNA, 20 bp, Artificial Sequence
  Description of Artificial Sequence: Synthetic oligonucleotide
  Target: LAMA2; (-) strand; PAM type: NRG; PAM sequence: AAG
acatgattatttgcttcttc

SEQ ID NO: 59657 - DNA, 20 bp, Artificial Sequence
  Description of Artificial Sequence: Synthetic oligonucleotide
  Target: LAMA2; (-) strand; PAM type: NRG; PAM sequence: TGG
ctcctaagcctcttgctgtg

SEQ ID NO: 59658 - DNA, 20 bp, Artificial Sequence
  Description of Artificial Sequence: Synthetic oligonucleotide
  Target: LAMA2; (-) strand; PAM type: NRG; PAM sequence: AAG
tcagcttctagaggcctcct

SEQ ID NO: 59659 - DNA, 20 bp, Artificial Sequence
  Description of Artificial Sequence: Synthetic oligonucleotide
  Target: LAMA2; (-) strand; PAM type: NRG; PAM sequence: AGG
gtgctgctctcagcttctag

SEQ ID NO: 59660 - DNA, 20 bp, Artificial Sequence
  Description of Artificial Sequence: Synthetic oligonucleotide
  Target: LAMA2; (-) strand; PAM type: NRG; PAM sequence: GAG
agtgctgctctcagcttcta

SEQ ID NO: 59661 - DNA, 20 bp, Artificial Sequence
  Description of Artificial Sequence: Synthetic oligonucleotide
  Target: LAMA2; (-) strand; PAM type: NRG; PAM sequence: TAG
ccagtgctgctctcagcttc

SEQ ID NO: 59662 - DNA, 20 bp, Artificial Sequence
  Description of Artificial Sequence: Synthetic oligonucleotide
  Target: LAMA2; (-) strand; PAM type: NRG; PAM sequence: CAG
tatcaatccagtgctgctct

SEQ ID NO: 59663 - DNA, 20 bp, Artificial Sequence
  Description of Artificial Sequence: Synthetic oligonucleotide
  Target: LAMA2; (-) strand; PAM type: NRG; PAM sequence: CAG
tttcttgctgattatcaatc

SEQ ID NO: 59664 - DNA, 20 bp, Artificial Sequence
  Description of Artificial Sequence: Synthetic oligonucleotide
  Target: LAMA2; (-) strand; PAM type: NRG; PAM sequence: CAG
ctgcagtctccatgttagct

SEQ ID NO: 59665 - DNA, 20 bp, Artificial Sequence
  Description of Artificial Sequence: Synthetic oligonucleotide
  Target: LAMA2; (-) strand; PAM type: NRG; PAM sequence: TAG
agaggctgcagtctccatgt

SEQ ID NO: 59666 - DNA, 20 bp, Artificial Sequence
  Description of Artificial Sequence: Synthetic oligonucleotide
  Target: LAMA2; (-) strand; PAM type: NRG; PAM sequence: CAG
ctgtcgacctagagaggctg

SEQ ID NO: 59667 - DNA, 20 bp, Artificial Sequence
  Description of Artificial Sequence: Synthetic oligonucleotide
  Target: LAMA2; (-) strand; PAM type: NRG; PAM sequence: AGG
cagttcctgtcgacctagag

SEQ ID NO: 59668 - DNA, 20 bp, Artificial Sequence
  Description of Artificial Sequence: Synthetic oligonucleotide
  Target: LAMA2; (-) strand; PAM type: NRG; PAM sequence: GAG
tcagttcctgtcgacctaga

SEQ ID NO: 59669 - DNA, 20 bp, Artificial Sequence
  Description of Artificial Sequence: Synthetic oligonucleotide
  Target: LAMA2; (-) strand; PAM type: NRG; PAM sequence: GAG
aatcagttcctgtcgaccta

SEQ ID NO: 59670 - DNA, 20 bp, Artificial Sequence
  Description of Artificial Sequence: Synthetic oligonucleotide
  Target: LAMA2; (-) strand; PAM type: NRG; PAM sequence: TAG
ataatcagttcctgtcgacc

SEQ ID NO: 59671 - DNA, 20 bp, Artificial Sequence
  Description of Artificial Sequence: Synthetic oligonucleotide
  Target: LAMA2; (-) strand; PAM type: NRG; PAM sequence: CAG
aaacaacattcattgataat

SEQ ID NO: 59672 - DNA, 20 bp, Artificial Sequence
  Description of Artificial Sequence: Synthetic oligonucleotide
  Target: LAMA2; (-) strand; PAM type: NRG; PAM sequence: TAG
ataataaattatcacaaacg

SEQ ID NO: 59673 - DNA, 20 bp, Artificial Sequence
  Description of Artificial Sequence: Synthetic oligonucleotide
  Target: LAMA2; (-) strand; PAM type: NRG; PAM sequence: TGG
tctttttaatcttttgtatt

SEQ ID NO: 59674 - DNA, 20 bp, Artificial Sequence
  Description of Artificial Sequence: Synthetic oligonucleotide
  Target: LAMA2; (-) strand; PAM type: NRG; PAM sequence: TAG
ggtttaagatatcttcaact

SEQ ID NO: 59675 - DNA, 20 bp, Artificial Sequence
  Description of Artificial Sequence: Synthetic oligonucleotide
  Target: LAMA2; (-) strand; PAM type: NRG; PAM sequence: AAG
tattaaatgcaattcggttt

SEQ ID NO: 59676 - DNA, 20 bp, Artificial Sequence
  Description of Artificial Sequence: Synthetic oligonucleotide
  Target: LAMA2; (-) strand; PAM type: NRG; PAM sequence: CGG
taggtgtattaaatgcaatt

SEQ ID NO: 59677 - DNA, 20 bp, Artificial Sequence
  Description of Artificial Sequence: Synthetic oligonucleotide
  Target: LAMA2; (-) strand; PAM type: NRG; PAM sequence: AGG
actatgatgttcagtaggtt

SEQ ID NO: 59678 - DNA, 20 bp, Artificial Sequence
  Description of Artificial Sequence: Synthetic oligonucleotide
  Target: LAMA2; (-) strand; PAM type: NRG; PAM sequence: TAG
aactatgatgttcagtaggt

SEQ ID NO: 59679 - DNA, 20 bp, Artificial Sequence
  Description of Artificial Sequence: Synthetic oligonucleotide
  Target: LAMA2; (-) strand; PAM type: NRG; PAM sequence: AGG
gctaaactatgatgttcagt

SEQ ID NO: 59680 - DNA, 20 bp, Artificial Sequence
  Description of Artificial Sequence: Synthetic oligonucleotide
  Target: LAMA2; (-) strand; PAM type: NRG; PAM sequence: TAG
ggctaaactatgatgttcag

SEQ ID NO: 59681 - DNA, 20 bp, Artificial Sequence
  Description of Artificial Sequence: Synthetic oligonucleotide
  Target: LAMA2; (-) strand; PAM type: NRG; PAM sequence: CAG
ctaggctaaactatgatgtt

SEQ ID NO: 59682 - DNA, 20 bp, Artificial Sequence
  Description of Artificial Sequence: Synthetic oligonucleotide
  Target: LAMA2; (-) strand; PAM type: NRG; PAM sequence: AGG
gagtatgttaaaggtaggct

SEQ ID NO: 59683 - DNA, 20 bp, Artificial Sequence
  Description of Artificial Sequence: Synthetic oligonucleotide
  Target: LAMA2; (-) strand; PAM type: NRG; PAM sequence: TAG
tgagtatgttaaaggtaggc

SEQ ID NO: 59684 - DNA, 20 bp, Artificial Sequence
  Description of Artificial Sequence: Synthetic oligonucleotide
  Target: LAMA2; (-) strand; PAM type: NRG; PAM sequence: AGG
gttctgagtatgttaaaggt

SEQ ID NO: 59685 - DNA, 20 bp, Artificial Sequence
  Description of Artificial Sequence: Synthetic oligonucleotide
  Target: LAMA2; (-) strand; PAM type: NRG; PAM sequence: TAG
tgttctgagtatgttaaagg

SEQ ID NO: 59686 - DNA, 20 bp, Artificial Sequence
  Description of Artificial Sequence: Synthetic oligonucleotide
  Target: LAMA2; (-) strand; PAM type: NRG; PAM sequence: AGG
gagtgttctgagtatgttaa

SEQ ID NO: 59687 - DNA, 20 bp, Artificial Sequence
  Description of Artificial Sequence: Synthetic oligonucleotide
  Target: LAMA2; (-) strand; PAM type: NRG; PAM sequence: AAG
tgagtgttctgagtatgtta

SEQ ID NO: 59688 - DNA, 20 bp, Artificial Sequence
  Description of Artificial Sequence: Synthetic oligonucleotide
  Target: LAMA2; (-) strand; PAM type: NRG; PAM sequence: GAG
tgggctaatgtgagtgttct

SEQ ID NO: 59689 - DNA, 20 bp, Artificial Sequence
  Description of Artificial Sequence: Synthetic oligonucleotide
  Target: LAMA2; (-) strand; PAM type: NRG; PAM sequence: GAG
gtccaactgtgggctaatgt

SEQ ID NO: 59690 - DNA, 20 bp, Artificial Sequence
  Description of Artificial Sequence: Synthetic oligonucleotide
  Target: LAMA2; (-) strand; PAM type: NRG; PAM sequence: GGG
aggtaattttgtccaactgt

SEQ ID NO: 59691 - DNA, 20 bp, Artificial Sequence
  Description of Artificial Sequence: Synthetic oligonucleotide
  Target: LAMA2; (-) strand; PAM type: NRG; PAM sequence: TGG
caggtaattttgtccaactg

SEQ ID NO: 59692 - DNA, 20 bp, Artificial Sequence
  Description of Artificial Sequence: Synthetic oligonucleotide
  Target: LAMA2; (-) strand; PAM type: NRG; PAM sequence: AGG
ccacagtgtactgtgttgcc

SEQ ID NO: 59693 - DNA, 20 bp, Artificial Sequence
  Description of Artificial Sequence: Synthetic oligonucleotide
  Target: LAMA2; (-) strand; PAM type: NRG; PAM sequence: CAG
tccacagtgtactgtgttgc

SEQ ID NO: 59694 - DNA, 20 bp, Artificial Sequence
  Description of Artificial Sequence: Synthetic oligonucleotide
  Target: LAMA2; (-) strand; PAM type: NRG; PAM sequence: CAG
ggtgaaccaacaatattcca

SEQ ID NO: 59695 - DNA, 20 bp, Artificial Sequence
  Description of Artificial Sequence: Synthetic oligonucleotide
  Target: LAMA2; (-) strand; PAM type: NRG; PAM sequence: GGG
agtccaccacatgttcatga

SEQ ID NO: 59696 - DNA, 20 bp, Artificial Sequence
  Description of Artificial Sequence: Synthetic oligonucleotide
  Target: LAMA2; (-) strand; PAM type: NRG; PAM sequence: AGG
cagtccaccacatgttcatg

SEQ ID NO: 59697 - DNA, 20 bp, Artificial Sequence
  Description of Artificial Sequence: Synthetic oligonucleotide
  Target: LAMA2; (-) strand; PAM type: NRG; PAM sequence: GAG
ccagtccaccacatgttcat

SEQ ID NO: 59698 - DNA, 20 bp, Artificial Sequence
  Description of Artificial Sequence: Synthetic oligonucleotide
  Target: LAMA2; (-) strand; PAM type: NRG; PAM sequence: CAG
gggcagcaagctgaggatcc

SEQ ID NO: 59699 - DNA, 20 bp, Artificial Sequence
  Description of Artificial Sequence: Synthetic oligonucleotide
  Target: LAMA2; (-) strand; PAM type: NRG; PAM sequence: AGG
tgggcaggggcagcaagctg

SEQ ID NO: 59700 - DNA, 20 bp, Artificial Sequence
  Description of Artificial Sequence: Synthetic oligonucleotide
  Target: LAMA2; (-) strand; PAM type: NRG; PAM sequence: GAG
ctgggcaggggcagcaagct

SEQ ID NO: 59701 - DNA, 20 bp, Artificial Sequence
  Description of Artificial Sequence: Synthetic oligonucleotide
  Target: LAMA2; (-) strand; PAM type: NRG; PAM sequence: AAG
tgatgctgggcaggggcagc

SEQ ID NO: 59702 - DNA, 20 bp, Artificial Sequence
  Description of Artificial Sequence: Synthetic oligonucleotide
  Target: LAMA2; (-) strand; PAM type: NRG; PAM sequence: CAG
tctgtgatgctgggcagggg

SEQ ID NO: 59703 - DNA, 20 bp, Artificial Sequence
  Description of Artificial Sequence: Synthetic oligonucleotide
  Target: LAMA2; (-) strand; PAM type: NRG; PAM sequence: GGG
ctctctgtgatgctgggcag

SEQ ID NO: 59704 - DNA, 20 bp, Artificial Sequence
  Description of Artificial Sequence: Synthetic oligonucleotide
  Target: LAMA2; (-) strand; PAM type: NRG; PAM sequence: GGG
tctctctgtgatgctgggca

SEQ ID NO: 59705 - DNA, 20 bp, Artificial Sequence
  Description of Artificial Sequence: Synthetic oligonucleotide
  Target: LAMA2; (-) strand; PAM type: NRG; PAM sequence: AGG
ttctctctgtgatgctgggc

SEQ ID NO: 59706 - DNA, 20 bp, Artificial Sequence
  Description of Artificial Sequence: Synthetic oligonucleotide
  Target: LAMA2; (-) strand; PAM type: NRG; PAM sequence: CAG
tttctctctgtgatgctggg

SEQ ID NO: 59707 - DNA, 20 bp, Artificial Sequence
  Description of Artificial Sequence: Synthetic oligonucleotide
  Target: LAMA2; (-) strand; PAM type: NRG; PAM sequence: GGG
acatttctctctgtgatgct

SEQ ID NO: 59708 - DNA, 20 bp, Artificial Sequence
  Description of Artificial Sequence: Synthetic oligonucleotide
  Target: LAMA2; (-) strand; PAM type: NRG; PAM sequence: TGG
cacatttctctctgtgatgc

SEQ ID NO: 59709 - DNA, 20 bp, Artificial Sequence
  Description of Artificial Sequence: Synthetic oligonucleotide
  Target: LAMA2; (-) strand; PAM type: NRG; PAM sequence: AAG
ttttccaggctagtgatatg

SEQ ID NO: 59710 - DNA, 20 bp, Artificial Sequence
  Description of Artificial Sequence: Synthetic oligonucleotide
  Target: LAMA2; (-) strand; PAM type: NRG; PAM sequence: TAG
attttgatatttttccaggc

SEQ ID NO: 59711 - DNA, 20 bp, Artificial Sequence
  Description of Artificial Sequence: Synthetic oligonucleotide
  Target: LAMA2; (-) strand; PAM type: NRG; PAM sequence: AGG
ttgaattttgatatttttcc

SEQ ID NO: 59712 - DNA, 20 bp, Artificial Sequence
  Description of Artificial Sequence: Synthetic oligonucleotide
  Target: LAMA2; (-) strand; PAM type: NRG; PAM sequence: CAG
tttgaattttgatatttttc

SEQ ID NO: 59713 - DNA, 20 bp, Artificial Sequence
  Description of Artificial Sequence: Synthetic oligonucleotide
  Target: LAMA2; (-) strand; PAM type: NRG; PAM sequence: TAG
gatagtgccaaagcaataca

SEQ ID NO: 59714 - DNA, 20 bp, Artificial Sequence
  Description of Artificial Sequence: Synthetic oligonucleotide
  Target: LAMA2; (-) strand; PAM type: NRG; PAM sequence: AAG
tcgattttgtgatagtgcca

SEQ ID NO: 59715 - DNA, 20 bp, Artificial Sequence
  Description of Artificial Sequence: Synthetic oligonucleotide
  Target: LAMA2; (-) strand; PAM type: NRG; PAM sequence: TAG
cgtatttttcgattttgtga

SEQ ID NO: 59716 - DNA, 20 bp, Artificial Sequence
  Description of Artificial Sequence: Synthetic oligonucleotide
  Target: LAMA2; (-) strand; PAM type: NRG; PAM sequence: CGG
agatagtcatcaatttatga

SEQ ID NO: 59717 - DNA, 20 bp, Artificial Sequence
  Description of Artificial Sequence: Synthetic oligonucleotide
  Target: LAMA2; (-) strand; PAM type: NRG; PAM sequence: TAG
gggctatttggtggtacaga

SEQ ID NO: 59718 - DNA, 20 bp, Artificial Sequence
  Description of Artificial Sequence: Synthetic oligonucleotide
  Target: LAMA2; (-) strand; PAM type: NRG; PAM sequence: CAG
taatgggctatttggtggta

SEQ ID NO: 59719 - DNA, 20 bp, Artificial Sequence
  Description of Artificial Sequence: Synthetic oligonucleotide
  Target: LAMA2; (-) strand; PAM type: NRG; PAM sequence: TGG
ttgagtaatgggctatttgg

SEQ ID NO: 59720 - DNA, 20 bp, Artificial Sequence
  Description of Artificial Sequence: Synthetic oligonucleotide
  Target: LAMA2; (-) strand; PAM type: NRG; PAM sequence: TGG
gatttgagtaatgggctatt

SEQ ID NO: 59721 - DNA, 20 bp, Artificial Sequence
  Description of Artificial Sequence: Synthetic oligonucleotide
  Target: LAMA2; (-) strand; PAM type: NRG; PAM sequence: GGG
aagttgaggatttgagtaat

SEQ ID NO: 59722 - DNA, 20 bp, Artificial Sequence
  Description of Artificial Sequence: Synthetic oligonucleotide
  Target: LAMA2; (-) strand; PAM type: NRG; PAM sequence: TGG
aaagttgaggatttgagtaa

SEQ ID NO: 59723 - DNA, 20 bp, Artificial Sequence
  Description of Artificial Sequence: Synthetic oligonucleotide
  Target: LAMA2; (-) strand; PAM type: NRG; PAM sequence: GAG
agagaaaaagttgaggattt

SEQ ID NO: 59724 - DNA, 20 bp, Artificial Sequence
  Description of Artificial Sequence: Synthetic oligonucleotide
  Target: LAMA2; (-) strand; PAM type: NRG; PAM sequence: AGG
acattgaagagaaaaagttg

SEQ ID NO: 59725 - DNA, 20 bp, Artificial Sequence
  Description of Artificial Sequence: Synthetic oligonucleotide
  Target: LAMA2; (-) strand; PAM type: NRG; PAM sequence: GAG
tacattgaagagaaaaagtt

SEQ ID NO: 59726 - DNA, 20 bp, Artificial Sequence
  Description of Artificial Sequence: Synthetic oligonucleotide
  Target: LAMA2; (-) strand; PAM type: NRG; PAM sequence: AAG
tcacatacattgaagagaaa

SEQ ID NO: 59727 - DNA, 20 bp, Artificial Sequence
  Description of Artificial Sequence: Synthetic oligonucleotide
  Target: LAMA2; (-) strand; PAM type: NRG; PAM sequence: GAG
tagaggtcacatacattgaa

SEQ ID NO: 59728 - DNA, 20 bp, Artificial Sequence
  Description of Artificial Sequence: Synthetic oligonucleotide
  Target: LAMA2; (-) strand; PAM type: NRG; PAM sequence: AAG
aatagaggtcacatacattg

SEQ ID NO: 59729 - DNA, 20 bp, Artificial Sequence
  Description of Artificial Sequence: Synthetic oligonucleotide
  Target: LAMA2; (-) strand; PAM type: NRG; PAM sequence: AGG
agtattgactatataaatag

SEQ ID NO: 59730 - DNA, 20 bp, Artificial Sequence
  Description of Artificial Sequence: Synthetic oligonucleotide
  Target: LAMA2; (-) strand; PAM type: NRG; PAM sequence: GAG
aagtattgactatataaata

SEQ ID NO: 59731 - DNA, 20 bp, Artificial Sequence
  Description of Artificial Sequence: Synthetic oligonucleotide
  Target: LAMA2; (-) strand; PAM type: NRG; PAM sequence: TAG
agaagtattgactatataaa

SEQ ID NO: 59732 - DNA, 20 bp, Artificial Sequence
  Description of Artificial Sequence: Synthetic oligonucleotide
  Target: LAMA2; (-) strand; PAM type: NRG; PAM sequence: AAG
caatcctttttcaaatcaag

SEQ ID NO: 59733 - DNA, 20 bp, Artificial Sequence
  Description of Artificial Sequence: Synthetic oligonucleotide
  Target: LAMA2; (-) strand; PAM type: NRG; PAM sequence: AAG
atccaatcctttttcaaatc

SEQ ID NO: 59734 - DNA, 20 bp, Artificial Sequence
  Description of Artificial Sequence: Synthetic oligonucleotide
  Target: LAMA2; (-) strand; PAM type: NRG; PAM sequence: GAG
agataaagaaaaagaaaaat

SEQ ID NO: 59735 - DNA, 20 bp, Artificial Sequence
  Description of Artificial Sequence: Synthetic oligonucleotide
  Target: LAMA2; (-) strand; PAM type: NRG; PAM sequence: AAG
ctggtttatagataaagaaa

SEQ ID NO: 59736 - DNA, 20 bp, Artificial Sequence
  Description of Artificial Sequence: Synthetic oligonucleotide
  Target: LAMA2; (-) strand; PAM type: NRG; PAM sequence: AAG
tgggcgctggtttatagata

SEQ ID NO: 59737 - DNA, 20 bp, Artificial Sequence
  Description of Artificial Sequence: Synthetic oligonucleotide
  Target: LAMA2; (-) strand; PAM type: NRG; PAM sequence: TAG
tccaactgggcgctggttta

SEQ ID NO: 59738 - DNA, 20 bp, Artificial Sequence
  Description of Artificial Sequence: Synthetic oligonucleotide
  Target: LAMA2; (-) strand; PAM type: NRG; PAM sequence: TGG
gaaatgttccaactgggcgc

SEQ ID NO: 59739 - DNA, 20 bp, Artificial Sequence
  Description of Artificial Sequence: Synthetic oligonucleotide
  Target: LAMA2; (-) strand; PAM type: NRG; PAM sequence: GGG
aatatggaaatgttccaact

SEQ ID NO: 59740 - DNA, 20 bp, Artificial Sequence
  Description of Artificial Sequence: Synthetic oligonucleotide
  Target: LAMA2; (-) strand; PAM type: NRG; PAM sequence: TGG
aaatatggaaatgttccaac

SEQ ID NO: 59741 - DNA, 20 bp, Artificial Sequence
  Description of Artificial Sequence: Synthetic oligonucleotide
  Target: LAMA2; (-) strand; PAM type: NRG; PAM sequence: TGG
acaaccttagaactaaaata

SEQ ID NO: 59742 - DNA, 20 bp, Artificial Sequence
  Description of Artificial Sequence: Synthetic oligonucleotide
  Target: LAMA2; (-) strand; PAM type: NRG; PAM sequence: TAG
ctttcagcaatttacaacct

SEQ ID NO: 59743 - DNA, 20 bp, Artificial Sequence
  Description of Artificial Sequence: Synthetic oligonucleotide
  Target: LAMA2; (-) strand; PAM type: NRG; PAM sequence: CAG
aataagaaaacctaaacttt

SEQ ID NO: 59744 - DNA, 20 bp, Artificial Sequence
  Description of Artificial Sequence: Synthetic oligonucleotide
  Target: LAMA2; (-) strand; PAM type: NRG; PAM sequence: AAG
gttagcagagaatcatcaat

SEQ ID NO: 59745 - DNA, 20 bp, Artificial Sequence
  Description of Artificial Sequence: Synthetic oligonucleotide
  Target: LAMA2; (-) strand; PAM type: NRG; PAM sequence: GAG
ctacttatcaaatgttagca

SEQ ID NO: 59746 - DNA, 20 bp, Artificial Sequence
  Description of Artificial Sequence: Synthetic oligonucleotide
  Target: LAMA2; (-) strand; PAM type: NRG; PAM sequence: CAG
acctacttatcaaatgttag

SEQ ID NO: 59747 - DNA, 20 bp, Artificial Sequence
  Description of Artificial Sequence: Synthetic oligonucleotide
  Target: LAMA2; (-) strand; PAM type: NRG; PAM sequence: TAG
gggacctacttatcaaatgt

SEQ ID NO: 59748 - DNA, 20 bp, Artificial Sequence
  Description of Artificial Sequence: Synthetic oligonucleotide
  Target: LAMA2; (-) strand; PAM type: NRG; PAM sequence: GGG
gattaattgtgatattcaat

SEQ ID NO: 59749 - DNA, 20 bp, Artificial Sequence
  Description of Artificial Sequence: Synthetic oligonucleotide
  Target: LAMA2; (-) strand; PAM type: NRG; PAM sequence: TGG
agattaattgtgatattcaa

SEQ ID NO: 59750 - DNA, 20 bp, Artificial Sequence
  Description of Artificial Sequence: Synthetic oligonucleotide
  Target: LAMA2; (-) strand; PAM type: NRG; PAM sequence: TAG
tatctctcaaccttcttaaa

SEQ ID NO: 59751 - DNA, 20 bp, Artificial Sequence
  Description of Artificial Sequence: Synthetic oligonucleotide
  Target: LAMA2; (-) strand; PAM type: NRG; PAM sequence: CAG
ccattttccctttggtttaa

SEQ ID NO: 59752 - DNA, 20 bp, Artificial Sequence
  Description of Artificial Sequence: Synthetic oligonucleotide
  Target: LAMA2; (-) strand; PAM type: NRG; PAM sequence: TGG
ttcatttaccattttccctt

SEQ ID NO: 59753 - DNA, 20 bp, Artificial Sequence
  Description of Artificial Sequence: Synthetic oligonucleotide
  Target: LAMA2; (-) strand; PAM type: NRG; PAM sequence: GGG
attcaatgcccatgaattag

SEQ ID NO: 59754 - DNA, 20 bp, Artificial Sequence
  Description of Artificial Sequence: Synthetic oligonucleotide
  Target: LAMA2; (-) strand; PAM type: NRG; PAM sequence: GGG
tattcaatgcccatgaatta

SEQ ID NO: 59755 - DNA, 20 bp, Artificial Sequence
  Description of Artificial Sequence: Synthetic oligonucleotide
  Target: LAMA2; (-) strand; PAM type: NRG; PAM sequence: AGG
atattcaatgcccatgaatt

SEQ ID NO: 59756 - DNA, 20 bp, Artificial Sequence
  Description of Artificial Sequence: Synthetic oligonucleotide
  Target: LAMA2; (-) strand; PAM type: NRG; PAM sequence: TAG
aatattcaatgcccatgaat

SEQ ID NO: 59757 - DNA, 20 bp, Artificial Sequence
  Description of Artificial Sequence: Synthetic oligonucleotide
  Target: LAMA2; (-) strand; PAM type: NRG; PAM sequence: AAG
agctacaagtgcagaccact

SEQ ID NO: 59758 - DNA, 20 bp, Artificial Sequence
  Description of Artificial Sequence: Synthetic oligonucleotide
  Target: LAMA2; (-) strand; PAM type: NRG; PAM sequence: CAG
caattaacaagctacaagtg

SEQ ID NO: 59759 - DNA, 20 bp, Artificial Sequence
  Description of Artificial Sequence: Synthetic oligonucleotide
  Target: LAMA2; (-) strand; PAM type: NRG; PAM sequence: AAG
tcaaacaattaacaagctac

SEQ ID NO: 59760 - DNA, 20 bp, Artificial Sequence
  Description of Artificial Sequence: Synthetic oligonucleotide
  Target: LAMA2; (-) strand; PAM type: NRG; PAM sequence: AAG
ctagatgtcaaacaattaac

SEQ ID NO: 59761 - DNA, 20 bp, Artificial Sequence
  Description of Artificial Sequence: Synthetic oligonucleotide
  Target: LAMA2; (-) strand; PAM type: NRG; PAM sequence: TAG
ataacactttacttttcagc

SEQ ID NO: 59762 - DNA, 20 bp, Artificial Sequence
  Description of Artificial Sequence: Synthetic oligonucleotide
  Target: LAMA2; (-) strand; PAM type: NRG; PAM sequence: CAG
tgatataacactttactttt

SEQ ID NO: 59763 - DNA, 20 bp, Artificial Sequence
  Description of Artificial Sequence: Synthetic oligonucleotide
  Target: LAMA2; (-) strand; PAM type: NRG; PAM sequence: AAG
tgatgtgtttgcaattagaa

SEQ ID NO: 59764 - DNA, 20 bp, Artificial Sequence
  Description of Artificial Sequence: Synthetic oligonucleotide
  Target: LAMA2; (-) strand; PAM type: NRG; PAM sequence: TAG
cagggtgatgtgtttgcaat

SEQ ID NO: 59765 - DNA, 20 bp, Artificial Sequence
  Description of Artificial Sequence: Synthetic oligonucleotide
  Target: LAMA2; (-) strand; PAM type: NRG; PAM sequence: GGG
agtgaaccaatgaataaaca

SEQ ID NO: 59766 - DNA, 20 bp, Artificial Sequence
  Description of Artificial Sequence: Synthetic oligonucleotide
  Target: LAMA2; (-) strand; PAM type: NRG; PAM sequence: AGG
tagtgaaccaatgaataaac

SEQ ID NO: 59767 - DNA, 20 bp, Artificial Sequence
  Description of Artificial Sequence: Synthetic oligonucleotide
  Target: LAMA2; (-) strand; PAM type: NRG; PAM sequence: CAG
ttagtgaaccaatgaataaa

SEQ ID NO: 59768 - DNA, 20 bp, Artificial Sequence
  Description of Artificial Sequence: Synthetic oligonucleotide
  Target: LAMA2; (-) strand; PAM type: NRG; PAM sequence: TAG
atagatacctaattaaggct

SEQ ID NO: 59769 - DNA, 20 bp, Artificial Sequence
  Description of Artificial Sequence: Synthetic oligonucleotide
  Target: LAMA2; (-) strand; PAM type: NRG; PAM sequence: AGG
acaggatagatacctaatta

SEQ ID NO: 59770 - DNA, 20 bp, Artificial Sequence
  Description of Artificial Sequence: Synthetic oligonucleotide
  Target: LAMA2; (-) strand; PAM type: NRG; PAM sequence: AAG
tacaggatagatacctaatt

SEQ ID NO: 59771 - DNA, 20 bp, Artificial Sequence
  Description of Artificial Sequence: Synthetic oligonucleotide
  Target: LAMA2; (-) strand; PAM type: NRG; PAM sequence: TAG
gcataccatttggtacagga

SEQ ID NO: 59772 - DNA, 20 bp, Artificial Sequence
  Description of Artificial Sequence: Synthetic oligonucleotide
  Target: LAMA2; (-) strand; PAM type: NRG; PAM sequence: AGG
cctggcataccatttggtac

SEQ ID NO: 59773 - DNA, 20 bp, Artificial Sequence
  Description of Artificial Sequence: Synthetic oligonucleotide
  Target: LAMA2; (-) strand; PAM type: NRG; PAM sequence: CAG
ccctggcataccatttggta

SEQ ID NO: 59774 - DNA, 20 bp, Artificial Sequence
  Description of Artificial Sequence: Synthetic oligonucleotide
  Target: LAMA2; (-) strand; PAM type: NRG; PAM sequence: TGG
ctcacccctggcataccatt

SEQ ID NO: 59775 - DNA, 20 bp, Artificial Sequence
  Description of Artificial Sequence: Synthetic oligonucleotide
  Target: LAMA2; (-) strand; PAM type: NRG; PAM sequence: TGG
tatctttgtatcctcacccc

SEQ ID NO: 59776 - DNA, 20 bp, Artificial Sequence
  Description of Artificial Sequence: Synthetic oligonucleotide
  Target: LAMA2; (-) strand; PAM type: NRG; PAM sequence: AAG
tttcttcacattgtactaaa

SEQ ID NO: 59777 - DNA, 20 bp, Artificial Sequence
  Description of Artificial Sequence: Synthetic oligonucleotide
  Target: LAMA2; (-) strand; PAM type: NRG; PAM sequence: CAG
tggtagttaaaatacttcag

SEQ ID NO: 59778 - DNA, 20 bp, Artificial Sequence
  Description of Artificial Sequence: Synthetic oligonucleotide
  Target: LAMA2; (-) strand; PAM type: NRG; PAM sequence: CAG
acctggtagttaaaatactt

SEQ ID NO: 59779 - DNA, 20 bp, Artificial Sequence
  Description of Artificial Sequence: Synthetic oligonucleotide
  Target: LAMA2; (-) strand; PAM type: NRG; PAM sequence: TAG
aagtcaacgtgcaaacctgg

SEQ ID NO: 59780 - DNA, 20 bp, Artificial Sequence
  Description of Artificial Sequence: Synthetic oligonucleotide
  Target: LAMA2; (-) strand; PAM type: NRG; PAM sequence: TGG
aagaagtcaacgtgcaaacc

SEQ ID NO: 59781 - DNA, 20 bp, Artificial Sequence
  Description of Artificial Sequence: Synthetic oligonucleotide
  Target: LAMA2; (-) strand; PAM type: NRG; PAM sequence: AAG
aatccaaatgaagcataaag

SEQ ID NO: 59782 - DNA, 20 bp, Artificial Sequence
  Description of Artificial Sequence: Synthetic oligonucleotide
  Target: LAMA2; (-) strand; PAM type: NRG; PAM sequence: AAG
gaaaatccaaatgaagcata

SEQ ID NO: 59783 - DNA, 20 bp, Artificial Sequence
  Description of Artificial Sequence: Synthetic oligonucleotide
  Target: LAMA2; (-) strand; PAM type: NRG; PAM sequence: AAG
agcctcagaaaatccaaatg

SEQ ID NO: 59784 - DNA, 20 bp, Artificial Sequence
  Description of Artificial Sequence: Synthetic oligonucleotide
  Target: LAMA2; (-) strand; PAM type: NRG; PAM sequence: CAG
aacggaaaacgttaaagcct

SEQ ID NO: 59785 - DNA, 20 bp, Artificial Sequence
  Description of Artificial Sequence: Synthetic oligonucleotide
  Target: LAMA2; (-) strand; PAM type: NRG; PAM sequence: AAG
cttaaaaacggaaaacgtta

SEQ ID NO: 59786 - DNA, 20 bp, Artificial Sequence
  Description of Artificial Sequence: Synthetic oligonucleotide
  Target: LAMA2; (-) strand; PAM type: NRG; PAM sequence: CGG
cttgagcttagtcttaaaaa

SEQ ID NO: 59787 - DNA, 20 bp, Artificial Sequence
  Description of Artificial Sequence: Synthetic oligonucleotide
  Target: LAMA2; (-) strand; PAM type: NRG; PAM sequence: TAG
aaagagttgacccttgagct

SEQ ID NO: 59788 - DNA, 20 bp, Artificial Sequence
  Description of Artificial Sequence: Synthetic oligonucleotide
  Target: LAMA2; (-) strand; PAM type: NRG; PAM sequence: GAG
tcatgaaagagttgaccctt

SEQ ID NO: 59789 - DNA, 20 bp, Artificial Sequence
  Description of Artificial Sequence: Synthetic oligonucleotide
  Target: LAMA2; (-) strand; PAM type: NRG; PAM sequence: GAG
agcaattaattttcatgaaa

SEQ ID NO: 59790 - DNA, 20 bp, Artificial Sequence
  Description of Artificial Sequence: Synthetic oligonucleotide
  Target: LAMA2; (-) strand; PAM type: NRG; PAM sequence: AAG
atagcaattaattttcatga

SEQ ID NO: 59791 - DNA, 20 bp, Artificial Sequence
  Description of Artificial Sequence: Synthetic oligonucleotide
  Target: LAMA2; (-) strand; PAM type: NRG; PAM sequence: TAG
cttatagatggaaacataaa

SEQ ID NO: 59792 - DNA, 20 bp, Artificial Sequence
  Description of Artificial Sequence: Synthetic oligonucleotide
  Target: LAMA2; (-) strand; PAM type: NRG; PAM sequence: TGG
tatttcactcttcttataga

SEQ ID NO: 59793 - DNA, 20 bp, Artificial Sequence
  Description of Artificial Sequence: Synthetic oligonucleotide
  Target: LAMA2; (-) strand; PAM type: NRG; PAM sequence: TAG
tgtttatttcactcttctta

SEQ ID NO: 59794 - DNA, 20 bp, Artificial Sequence
  Description of Artificial Sequence: Synthetic oligonucleotide
  Target: LAMA2; (-) strand; PAM type: NRG; PAM sequence: TAG
aaagcacttttcagtgtcat

SEQ ID NO: 59795 - DNA, 20 bp, Artificial Sequence
  Description of Artificial Sequence: Synthetic oligonucleotide
  Target: LAMA2; (-) strand; PAM type: NRG; PAM sequence: CAG
agtacattgaaagcactttt

SEQ ID NO: 59796 - DNA, 20 bp, Artificial Sequence
  Description of Artificial Sequence: Synthetic oligonucleotide
  Target: LAMA2; (-) strand; PAM type: NRG; PAM sequence: AAG
cccactcaacagtacattga

SEQ ID NO: 59797 - DNA, 20 bp, Artificial Sequence
  Description of Artificial Sequence: Synthetic oligonucleotide
  Target: LAMA2; (-) strand; PAM type: NRG; PAM sequence: CAG
atgtggcttttcccactcaa

SEQ ID NO: 59798 - DNA, 20 bp, Artificial Sequence
  Description of Artificial Sequence: Synthetic oligonucleotide
  Target: LAMA2; (-) strand; PAM type: NRG; PAM sequence: TGG
gaatatacaagttaaaaatg

SEQ ID NO: 59799 - DNA, 20 bp, Artificial Sequence
  Description of Artificial Sequence: Synthetic oligonucleotide
  Target: LAMA2; (-) strand; PAM type: NRG; PAM sequence: AAG
tgggatcacactgaatatac

SEQ ID NO: 59800 - DNA, 20 bp, Artificial Sequence
  Description of Artificial Sequence: Synthetic oligonucleotide
  Target: LAMA2; (-) strand; PAM type: NRG; PAM sequence: GGG
gagagtaaaattataaaatt

SEQ ID NO: 59801 - DNA, 20 bp, Artificial Sequence
  Description of Artificial Sequence: Synthetic oligonucleotide
  Target: LAMA2; (-) strand; PAM type: NRG; PAM sequence: TGG
tgagagtaaaattataaaat

SEQ ID NO: 59802 - DNA, 20 bp, Artificial Sequence
  Description of Artificial Sequence: Synthetic oligonucleotide
  Target: LAMA2; (-) strand; PAM type: NRG; PAM sequence: GAG
tattcacatatatggattga

SEQ ID NO: 59803 - DNA, 20 bp, Artificial Sequence
  Description of Artificial Sequence: Synthetic oligonucleotide
  Target: LAMA2; (-) strand; PAM type: NRG; PAM sequence: GAG
tatattcacatatatggatt

SEQ ID NO: 59804 - DNA, 20 bp, Artificial Sequence
  Description of Artificial Sequence: Synthetic oligonucleotide
  Target: LAMA2; (-) strand; PAM type: NRG; PAM sequence: TGG
atgtattatattcacatata

SEQ ID NO: 59805 - DNA, 20 bp, Artificial Sequence
  Description of Artificial Sequence: Synthetic oligonucleotide
  Target: LAMA2; (-) strand; PAM type: NRG; PAM sequence: GAG
aatcacacacaatctcatct

SEQ ID NO: 59806 - DNA, 20 bp, Artificial Sequence
  Description of Artificial Sequence: Synthetic oligonucleotide
  Target: LAMA2; (-) strand; PAM type: NRG; PAM sequence: TAG
agtaataaatgcttattagg

SEQ ID NO: 59807 - DNA, 20 bp, Artificial Sequence
  Description of Artificial Sequence: Synthetic oligonucleotide
  Target: LAMA2; (-) strand; PAM type: NRG; PAM sequence: AGG
aaaagtaataaatgcttatt

SEQ ID NO: 59808 - DNA, 20 bp, Artificial Sequence
  Description of Artificial Sequence: Synthetic oligonucleotide
  Target: LAMA2; (-) strand; PAM type: NRG; PAM sequence: TAG
taaaagtaataaatgcttat

SEQ ID NO: 59809 - DNA, 20 bp, Artificial Sequence
  Description of Artificial Sequence: Synthetic oligonucleotide
  Target: LAMA2; (-) strand; PAM type: NRG; PAM sequence: AAG
gtttatctctcaggttataa

SEQ ID NO: 59810 - DNA, 20 bp, Artificial Sequence
  Description of Artificial Sequence: Synthetic oligonucleotide
  Target: LAMA2; (-) strand; PAM type: NRG; PAM sequence: AGG
ttcaataatgtttatctctc

SEQ ID NO: 59811 - DNA, 20 bp, Artificial Sequence
  Description of Artificial Sequence: Synthetic oligonucleotide
  Target: LAMA2; (-) strand; PAM type: NRG; PAM sequence: CAG
tttcaataatgtttatctct

SEQ ID NO: 59812 - DNA, 20 bp, Artificial Sequence
  Description of Artificial Sequence: Synthetic oligonucleotide
  Target: LAMA2; (-) strand; PAM type: NRG; PAM sequence: CAG
aaaaaaatatgtaacagcca

SEQ ID NO: 59813 - DNA, 20 bp, Artificial Sequence
  Description of Artificial Sequence: Synthetic oligonucleotide
  Target: LAMA2; (-) strand; PAM type: NRG; PAM sequence: CAG
caaaccaaaaaaatatgtaa

SEQ ID NO: 59814 - DNA, 20 bp, Artificial Sequence
  Description of Artificial Sequence: Synthetic oligonucleotide
  Target: LAMA2; (-) strand; PAM type: NRG; PAM sequence: AGG
cctctttgccttcttaacca

SEQ ID NO: 59815 - DNA, 20 bp, Artificial Sequence
  Description of Artificial Sequence: Synthetic oligonucleotide
  Target: LAMA2; (-) strand; PAM type: NRG; PAM sequence: AAG
ccctctttgccttcttaacc

SEQ ID NO: 59816 - DNA, 20 bp, Artificial Sequence
  Description of Artificial Sequence: Synthetic oligonucleotide
  Target: LAMA2; (-) strand; PAM type: NRG; PAM sequence: AGG
ataacactgtaactgtcctc

SEQ ID NO: 59817 - DNA, 20 bp, Artificial Sequence
  Description of Artificial Sequence: Synthetic oligonucleotide
  Target: LAMA2; (-) strand; PAM type: NRG; PAM sequence: CAG
tataacactgtaactgtcct

SEQ ID NO: 59818 - DNA, 20 bp, Artificial Sequence
  Description of Artificial Sequence: Synthetic oligonucleotide
  Target: LAMA2; (-) strand; PAM type: NRG; PAM sequence: AAG
ctcatattataatgatactt

SEQ ID NO: 59819 - DNA, 20 bp, Artificial Sequence
  Description of Artificial Sequence: Synthetic oligonucleotide
  Target: LAMA2; (-) strand; PAM type: NRG; PAM sequence: TAG
ttatcgtctcccttccattt

SEQ ID NO: 59820 - DNA, 20 bp, Artificial Sequence
  Description of Artificial Sequence: Synthetic oligonucleotide
  Target: LAMA2; (-) strand; PAM type: NRG; PAM sequence: GAG
gcttccctaaaaaccttgct

SEQ ID NO: 59821 - DNA, 20 bp, Artificial Sequence
  Description of Artificial Sequence: Synthetic oligonucleotide
  Target: LAMA2; (-) strand; PAM type: NRG; PAM sequence: GAG
gtcacctatatttcaaatct

SEQ ID NO: 59822 - DNA, 20 bp, Artificial Sequence
  Description of Artificial Sequence: Synthetic oligonucleotide
  Target: LAMA2; (-) strand; PAM type: NRG; PAM sequence: AGG
tcttttctttctcctcctta

SEQ ID NO: 59823 - DNA, 20 bp, Artificial Sequence
  Description of Artificial Sequence: Synthetic oligonucleotide
  Target: LAMA2; (-) strand; PAM type: NRG; PAM sequence: AAG
atcttttctttctcctcctt

SEQ ID NO: 59824 - DNA, 20 bp, Artificial Sequence
  Description of Artificial Sequence: Synthetic oligonucleotide
  Target: LAMA2; (-) strand; PAM type: NRG; PAM sequence: AAG
ctcctttcttatagtctcaa

SEQ ID NO: 59825 - DNA, 20 bp, Artificial Sequence
  Description of Artificial Sequence: Synthetic oligonucleotide
  Target: LAMA2; (-) strand; PAM type: NRG; PAM sequence: TAG
aactctcacctcctttctta

SEQ ID NO: 59826 - DNA, 20 bp, Artificial Sequence
  Description of Artificial Sequence: Synthetic oligonucleotide
  Target: LAMA2; (-) strand; PAM type: NRG; PAM sequence: TGG
tttcatctctgtatttttta

SEQ ID NO: 59827 - DNA, 20 bp, Artificial Sequence
  Description of Artificial Sequence: Synthetic oligonucleotide
  Target: LAMA2; (-) strand; PAM type: NRG; PAM sequence: AGG
agaatttaggctacatacac

SEQ ID NO: 59828 - DNA, 20 bp, Artificial Sequence
  Description of Artificial Sequence: Synthetic oligonucleotide
  Target: LAMA2; (-) strand; PAM type: NRG; PAM sequence: CAG
aagaatttaggctacataca

SEQ ID NO: 59829 - DNA, 20 bp, Artificial Sequence
  Description of Artificial Sequence: Synthetic oligonucleotide
  Target: LAMA2; (-) strand; PAM type: NRG; PAM sequence: AGG
ctagttcatagcaagaattt

SEQ ID NO: 59830 - DNA, 20 bp, Artificial Sequence
  Description of Artificial Sequence: Synthetic oligonucleotide
  Target: LAMA2; (-) strand; PAM type: NRG; PAM sequence: TAG
tctagttcatagcaagaatt

SEQ ID NO: 59831 - DNA, 20 bp, Artificial Sequence
  Description of Artificial Sequence: Synthetic oligonucleotide
  Target: LAMA2; (-) strand; PAM type: NRG; PAM sequence: AAG
ctggctttctagttcatagc

SEQ ID NO: 59832 - DNA, 20 bp, Artificial Sequence
  Description of Artificial Sequence: Synthetic oligonucleotide
  Target: LAMA2; (-) strand; PAM type: NRG; PAM sequence: TAG
tgacctggctttctagttca

SEQ ID NO: 59833 - DNA, 20 bp, Artificial Sequence
  Description of Artificial Sequence: Synthetic oligonucleotide
  Target: LAMA2; (-) strand; PAM type: NRG; PAM sequence: TAG
cggctaatgacctggctttc

SEQ ID NO: 59834 - DNA, 20 bp, Artificial Sequence
  Description of Artificial Sequence: Synthetic oligonucleotide
  Target: LAMA2; (-) strand; PAM type: NRG; PAM sequence: TGG
gtcaatttcggctaatgacc

SEQ ID NO: 59835 - DNA, 20 bp, Artificial Sequence
  Description of Artificial Sequence: Synthetic oligonucleotide
  Target: LAMA2; (-) strand; PAM type: NRG; PAM sequence: CGG
ccctatcccattgtcaattt

SEQ ID NO: 59836 - DNA, 20 bp, Artificial Sequence
  Description of Artificial Sequence: Synthetic oligonucleotide
  Target: LAMA2; (-) strand; PAM type: NRG; PAM sequence: AAG
tttctagccttaacctcccc

SEQ ID NO: 59837 - DNA, 20 bp, Artificial Sequence
  Description of Artificial Sequence: Synthetic oligonucleotide
  Target: LAMA2; (-) strand; PAM type: NRG; PAM sequence: TAG
ctgctttgcttggatttttc

SEQ ID NO: 59838 - DNA, 20 bp, Artificial Sequence
  Description of Artificial Sequence: Synthetic oligonucleotide
  Target: LAMA2; (-) strand; PAM type: NRG; PAM sequence: TGG
ctcttgttacctgctttgct

SEQ ID NO: 59839 - DNA, 20 bp, Artificial Sequence
  Description of Artificial Sequence: Synthetic oligonucleotide
  Target: LAMA2; (-) strand; PAM type: NRG; PAM sequence: AAG
tctgttcacagtctggaatc

SEQ ID NO: 59840 - DNA, 20 bp, Artificial Sequence
  Description of Artificial Sequence: Synthetic oligonucleotide
  Target: LAMA2; (-) strand; PAM type: NRG; PAM sequence: TGG
cctcaaatctgttcacagtc

SEQ ID NO: 59841 - DNA, 20 bp, Artificial Sequence
  Description of Artificial Sequence: Synthetic oligonucleotide
  Target: LAMA2; (-) strand; PAM type: NRG; PAM sequence: CAG
ccctgcctcaaatctgttca

SEQ ID NO: 59842 - DNA, 20 bp, Artificial Sequence
  Description of Artificial Sequence: Synthetic oligonucleotide
  Target: LAMA2; (-) strand; PAM type: NRG; PAM sequence: TGG
atagcactgaaatttcaggg

SEQ ID NO: 59843 - DNA, 20 bp, Artificial Sequence
  Description of Artificial Sequence: Synthetic oligonucleotide
  Target: LAMA2; (-) strand; PAM type: NRG; PAM sequence: GGG
tttatagcactgaaatttca

SEQ ID NO: 59844 - DNA, 20 bp, Artificial Sequence
  Description of Artificial Sequence: Synthetic oligonucleotide
  Target: LAMA2; (-) strand; PAM type: NRG; PAM sequence: AGG
gtttatagcactgaaatttc

SEQ ID NO: 59845 - DNA, 20 bp, Artificial Sequence
  Description of Artificial Sequence: Synthetic oligonucleotide
  Target: LAMA2; (-) strand; PAM type: NRG; PAM sequence: CAG
ggtttatagcactgaaattt

SEQ ID NO: 59846 - DNA, 20 bp, Artificial Sequence
  Description of Artificial Sequence: Synthetic oligonucleotide
  Target: LAMA2; (-) strand; PAM type: NRG; PAM sequence: TAG
gagttcccactacaggttta

SEQ ID NO: 59847 - DNA, 20 bp, Artificial Sequence
  Description of Artificial Sequence: Synthetic oligonucleotide
  Target: LAMA2; (-) strand; PAM type: NRG; PAM sequence: AGG
tcctatagagttcccactac

SEQ ID NO: 59848 - DNA, 20 bp, Artificial Sequence
  Description of Artificial Sequence: Synthetic oligonucleotide
  Target: LAMA2; (-) strand; PAM type: NRG; PAM sequence: CAG
ttcctatagagttcccacta

SEQ ID NO: 59849 - DNA, 20 bp, Artificial Sequence
  Description of Artificial Sequence: Synthetic oligonucleotide
  Target: LAMA2; (-) strand; PAM type: NRG; PAM sequence: GAG
gagaaattagtattcctata

SEQ ID NO: 59850 - DNA, 20 bp, Artificial Sequence
  Description of Artificial Sequence: Synthetic oligonucleotide
  Target: LAMA2; (-) strand; PAM type: NRG; PAM sequence: TAG
gggagaaattagtattccta

SEQ ID NO: 59851 - DNA, 20 bp, Artificial Sequence
  Description of Artificial Sequence: Synthetic oligonucleotide
  Target: LAMA2; (-) strand; PAM type: NRG; PAM sequence: TAG
ttgttgatgaagggagaaat

SEQ ID NO: 59852 - DNA, 20 bp, Artificial Sequence
  Description of Artificial Sequence: Synthetic oligonucleotide
  Target: LAMA2; (-) strand; PAM type: NRG; PAM sequence: GAG
aatatctttgttgatgaagg

SEQ ID NO: 59853 - DNA, 20 bp, Artificial Sequence
  Description of Artificial Sequence: Synthetic oligonucleotide
  Target: LAMA2; (-) strand; PAM type: NRG; PAM sequence: GGG
ataatatctttgttgatgaa

SEQ ID NO: 59854 - DNA, 20 bp, Artificial Sequence
  Description of Artificial Sequence: Synthetic oligonucleotide
  Target: LAMA2; (-) strand; PAM type: NRG; PAM sequence: AGG
tataatatctttgttgatga

SEQ ID NO: 59855 - DNA, 20 bp, Artificial Sequence
  Description of Artificial Sequence: Synthetic oligonucleotide
  Target: LAMA2; (-) strand; PAM type: NRG; PAM sequence: AAG
gtataatatctttgttgatg

SEQ ID NO: 59856 - DNA, 20 bp, Artificial Sequence
  Description of Artificial Sequence: Synthetic oligonucleotide
  Target: LAMA2; (-) strand; PAM type: NRG; PAM sequence: CAG
actaagcctcttcacaggac

SEQ ID NO: 59857 - DNA, 20 bp, Artificial Sequence
  Description of Artificial Sequence: Synthetic oligonucleotide
  Target: LAMA2; (-) strand; PAM type: NRG; PAM sequence: AGG
aagtgactaagcctcttcac

SEQ ID NO: 59858 - DNA, 20 bp, Artificial Sequence
  Description of Artificial Sequence: Synthetic oligonucleotide
  Target: LAMA2; (-) strand; PAM type: NRG; PAM sequence: CAG
gaagtgactaagcctcttca

SEQ ID NO: 59859 - DNA, 20 bp, Artificial Sequence
  Description of Artificial Sequence: Synthetic oligonucleotide
  Target: LAMA2; (-) strand; PAM type: NRG; PAM sequence: AAG
acataaactgggaagtgact

SEQ ID NO: 59860 - DNA, 20 bp, Artificial Sequence
  Description of Artificial Sequence: Synthetic oligonucleotide
  Target: LAMA2; (-) strand; PAM type: NRG; PAM sequence: AAG
cttgaaatacataaactggg

SEQ ID NO: 59861 - DNA, 20 bp, Artificial Sequence
  Description of Artificial Sequence: Synthetic oligonucleotide
  Target: LAMA2; (-) strand; PAM type: NRG; PAM sequence: GGG
aatcttgaaatacataaact

SEQ ID NO: 59862 - DNA, 20 bp, Artificial Sequence
  Description of Artificial Sequence: Synthetic oligonucleotide
  Target: LAMA2; (-) strand; PAM type: NRG; PAM sequence: TGG
taatcttgaaatacataaac

SEQ ID NO: 59863 - DNA, 20 bp, Artificial Sequence
  Description of Artificial Sequence: Synthetic oligonucleotide
  Target: LAMA2; (-) strand; PAM type: NRG; PAM sequence: AGG
ctgaaaaacttctgtgtttt

SEQ ID NO: 59864 - DNA, 20 bp, Artificial Sequence
  Description of Artificial Sequence: Synthetic oligonucleotide
  Target: LAMA2; (-) strand; PAM type: NRG; PAM sequence: TAG
actgaaaaacttctgtgttt

SEQ ID NO: 59865 - DNA, 20 bp, Artificial Sequence
  Description of Artificial Sequence: Synthetic oligonucleotide
  Target: LAMA2; (-) strand; PAM type: NRG; PAM sequence: GGG
ggtagactggggtcaggtta

SEQ ID NO: 59866 - DNA, 20 bp, Artificial Sequence
  Description of Artificial Sequence: Synthetic oligonucleotide
  Target: LAMA2; (-) strand; PAM type: NRG; PAM sequence: AGG
aggtagactggggtcaggtt

SEQ ID NO: 59867 - DNA, 20 bp, Artificial Sequence
  Description of Artificial Sequence: Synthetic oligonucleotide
  Target: LAMA2; (-) strand; PAM type: NRG; PAM sequence: TAG
caggtagactggggtcaggt

SEQ ID NO: 59868 - DNA, 20 bp, Artificial Sequence
  Description of Artificial Sequence: Synthetic oligonucleotide
  Target: LAMA2; (-) strand; PAM type: NRG; PAM sequence: AGG
gaaacaggtagactggggtc

SEQ ID NO: 59869 - DNA, 20 bp, Artificial Sequence
  Description of Artificial Sequence: Synthetic oligonucleotide
  Target: LAMA2; (-) strand; PAM type: NRG; PAM sequence: CAG
ggaaacaggtagactggggt

SEQ ID NO: 59870 - DNA, 20 bp, Artificial Sequence
  Description of Artificial Sequence: Synthetic oligonucleotide
  Target: LAMA2; (-) strand; PAM type: NRG; PAM sequence: GGG
ggatggaaacaggtagactg

SEQ ID NO: 59871 - DNA, 20 bp, Artificial Sequence
  Description of Artificial Sequence: Synthetic oligonucleotide
  Target: LAMA2; (-) strand; PAM type: NRG; PAM sequence: GGG
tggatggaaacaggtagact

SEQ ID NO: 59872 - DNA, 20 bp, Artificial Sequence
  Description of Artificial Sequence: Synthetic oligonucleotide
  Target: LAMA2; (-) strand; PAM type: NRG; PAM sequence: TGG
ttggatggaaacaggtagac

SEQ ID NO: 59873 - DNA, 20 bp, Artificial Sequence
  Description of Artificial Sequence: Synthetic oligonucleotide
  Target: LAMA2; (-) strand; PAM type: NRG; PAM sequence: TAG
tagtcttggatggaaacagg

SEQ ID NO: 59874 - DNA, 20 bp, Artificial Sequence
  Description of Artificial Sequence: Synthetic oligonucleotide
  Target: LAMA2; (-) strand; PAM type: NRG; PAM sequence: AGG
tgatagtcttggatggaaac

SEQ ID NO: 59875 - DNA, 20 bp, Artificial Sequence
  Description of Artificial Sequence: Synthetic oligonucleotide
  Target: LAMA2; (-) strand; PAM type: NRG; PAM sequence: CAG
gtgatagtcttggatggaaa

SEQ ID NO: 59876 - DNA, 20 bp, Artificial Sequence
  Description of Artificial Sequence: Synthetic oligonucleotide
  Target: LAMA2; (-) strand; PAM type: NRG; PAM sequence: TGG
gtggtagtgatagtcttgga

SEQ ID NO: 59877 - DNA, 20 bp, Artificial Sequence
  Description of Artificial Sequence: Synthetic oligonucleotide
  Target: LAMA2; (-) strand; PAM type: NRG; PAM sequence: TGG
agaagtggtagtgatagtct

SEQ ID NO: 59878 - DNA, 20 bp, Artificial Sequence
  Description of Artificial Sequence: Synthetic oligonucleotide
  Target: LAMA2; (-) strand; PAM type: NRG; PAM sequence: TAG
tggtttagaagtggtagtga

SEQ ID NO: 59879 - DNA, 20 bp, Artificial Sequence
  Description of Artificial Sequence: Synthetic oligonucleotide
  Target: LAMA2; (-) strand; PAM type: NRG; PAM sequence: TAG
tggaggtggtttagaagtgg

SEQ ID NO: 59880 - DNA, 20 bp, Artificial Sequence
  Description of Artificial Sequence: Synthetic oligonucleotide
  Target: LAMA2; (-) strand; PAM type: NRG; PAM sequence: TGG
ggctggaggtggtttagaag

SEQ ID NO: 59881 - DNA, 20 bp, Artificial Sequence
  Description of Artificial Sequence: Synthetic oligonucleotide
  Target: LAMA2; (-) strand; PAM type: NRG; PAM sequence: AAG
tgtggctggaggtggtttag

SEQ ID NO: 59882 - DNA, 20 bp, Artificial Sequence
  Description of Artificial Sequence: Synthetic oligonucleotide
  Target: LAMA2; (-) strand; PAM type: NRG; PAM sequence: TAG
ttgtgtggctggaggtggtt

SEQ ID NO: 59883 - DNA, 20 bp, Artificial Sequence
  Description of Artificial Sequence: Synthetic oligonucleotide
  Target: LAMA2; (-) strand; PAM type: NRG; PAM sequence: TGG
gttttttgtgtggctggagg

SEQ ID NO: 59884 - DNA, 20 bp, Artificial Sequence
  Description of Artificial Sequence: Synthetic oligonucleotide
  Target: LAMA2; (-) strand; PAM type: NRG; PAM sequence: AGG
tgtgttttttgtgtggctgg

SEQ ID NO: 59885 - DNA, 20 bp, Artificial Sequence
  Description of Artificial Sequence: Synthetic oligonucleotide
  Target: LAMA2; (-) strand; PAM type: NRG; PAM sequence: GAG
gtgtgttttttgtgtggctg

SEQ ID NO: 59886 - DNA, 20 bp, Artificial Sequence
  Description of Artificial Sequence: Synthetic oligonucleotide
  Target: LAMA2; (-) strand; PAM type: NRG; PAM sequence: TGG
gtgtgtgttttttgtgtggc

SEQ ID NO: 59887 - DNA, 20 bp, Artificial Sequence
  Description of Artificial Sequence: Synthetic oligonucleotide
  Target: LAMA2; (-) strand; PAM type: NRG; PAM sequence: TGG
catagtgtgtgttttttgtg

SEQ ID NO: 59888 - DNA, 20 bp, Artificial Sequence
  Description of Artificial Sequence: Synthetic oligonucleotide
  Target: LAMA2; (-) strand; PAM type: NRG; PAM sequence: TAG
aatttggaatgactcaagca

SEQ ID NO: 59889 - DNA, 20 bp, Artificial Sequence
  Description of Artificial Sequence: Synthetic oligonucleotide
  Target: LAMA2; (-) strand; PAM type: NRG; PAM sequence: AAG
tgtgtaatttggaatgactc

SEQ ID NO: 59890 - DNA, 20 bp, Artificial Sequence
  Description of Artificial Sequence: Synthetic oligonucleotide
  Target: LAMA2; (-) strand; PAM type: NRG; PAM sequence: TGG
ttagaggaaggtgtgtaatt

SEQ ID NO: 59891 - DNA, 20 bp, Artificial Sequence
  Description of Artificial Sequence: Synthetic oligonucleotide
  Target: LAMA2; (-) strand; PAM type: NRG; PAM sequence: AGG
tcacactaatgtttagagga

SEQ ID NO: 59892 - DNA, 20 bp, Artificial Sequence
  Description of Artificial Sequence: Synthetic oligonucleotide
  Target: LAMA2; (-) strand; PAM type: NRG; PAM sequence: AAG
ttcacactaatgtttagagg

SEQ ID NO: 59893 - DNA, 20 bp, Artificial Sequence
  Description of Artificial Sequence: Synthetic oligonucleotide
  Target: LAMA2; (-) strand; PAM type: NRG; PAM sequence: AGG
aatttcacactaatgtttag

SEQ ID NO: 59894 - DNA, 20 bp, Artificial Sequence
  Description of Artificial Sequence: Synthetic oligonucleotide
  Target: LAMA2; (-) strand; PAM type: NRG; PAM sequence: GAG
taatttcacactaatgttta

SEQ ID NO: 59895 - DNA, 20 bp, Artificial Sequence
  Description of Artificial Sequence: Synthetic oligonucleotide
  Target: LAMA2; (-) strand; PAM type: NRG; PAM sequence: TAG
cctaatttcacactaatgtt

SEQ ID NO: 59896 - DNA, 20 bp, Artificial Sequence
  Description of Artificial Sequence: Synthetic oligonucleotide
  Target: LAMA2; (-) strand; PAM type: NRG; PAM sequence: GGG
ttcaacatgcgatttgaagg

SEQ ID NO: 59897 - DNA, 20 bp, Artificial Sequence
  Description of Artificial Sequence: Synthetic oligonucleotide
  Target: LAMA2; (-) strand; PAM type: NRG; PAM sequence: GGG
tttcaacatgcgatttgaag

SEQ ID NO: 59898 - DNA, 20 bp, Artificial Sequence
  Description of Artificial Sequence: Synthetic oligonucleotide
  Target: LAMA2; (-) strand; PAM type: NRG; PAM sequence: GGG
atttcaacatgcgatttgaa

SEQ ID NO: 59899 - DNA, 20 bp, Artificial Sequence
  Description of Artificial Sequence: Synthetic oligonucleotide
  Target: LAMA2; (-) strand; PAM type: NRG; PAM sequence: AGG
catttcaacatgcgatttga

SEQ ID NO: 59900 - DNA, 20 bp, Artificial Sequence
  Description of Artificial Sequence: Synthetic oligonucleotide
  Target: LAMA2; (-) strand; PAM type: NRG; PAM sequence: AAG
ccatttcaacatgcgatttg

SEQ ID NO: 59901 - DNA, 20 bp, Artificial Sequence
  Description of Artificial Sequence: Synthetic oligonucleotide
  Target: LAMA2; (-) strand; PAM type: NRG; PAM sequence: GGG
cagtccccacgtccaatact

SEQ ID NO: 59902 - DNA, 20 bp, Artificial Sequence
  Description of Artificial Sequence: Synthetic oligonucleotide
  Target: LAMA2; (-) strand; PAM type: NRG; PAM sequence: TGG
ccagtccccacgtccaatac

SEQ ID NO: 59903 - DNA, 20 bp, Artificial Sequence
  Description of Artificial Sequence: Synthetic oligonucleotide
  Target: LAMA2; (-) strand; PAM type: NRG; PAM sequence: CAG
atgatccaatcacctcccac

SEQ ID NO: 59904 - DNA, 20 bp, Artificial Sequence
  Description of Artificial Sequence: Synthetic oligonucleotide
  Target: LAMA2; (-) strand; PAM type: NRG; PAM sequence: GGG
tggtgctacaccattcatga

SEQ ID NO: 59905 - DNA, 20 bp, Artificial Sequence
  Description of Artificial Sequence: Synthetic oligonucleotide
  Target: LAMA2; (-) strand; PAM type: NRG; PAM sequence: AGG
atggtgctacaccattcatg

SEQ ID NO: 59906 - DNA, 20 bp, Artificial Sequence
  Description of Artificial Sequence: Synthetic oligonucleotide
  Target: LAMA2; (-) strand; PAM type: NRG; PAM sequence: GAG
gatggtgctacaccattcat

SEQ ID NO: 59907 - DNA, 20 bp, Artificial Sequence
  Description of Artificial Sequence: Synthetic oligonucleotide
  Target: LAMA2; (-) strand; PAM type: NRG; PAM sequence: TGG
ctcacttatcaccaagggga

SEQ ID NO: 59908 - DNA, 20 bp, Artificial Sequence
  Description of Artificial Sequence: Synthetic oligonucleotide
  Target: LAMA2; (-) strand; PAM type: NRG; PAM sequence: GGG
agaactcacttatcaccaag

SEQ ID NO: 59909 - DNA, 20 bp, Artificial Sequence
  Description of Artificial Sequence: Synthetic oligonucleotide
  Target: LAMA2; (-) strand; PAM type: NRG; PAM sequence: GGG
gagaactcacttatcaccaa

SEQ ID NO: 59910 - DNA, 20 bp, Artificial Sequence
  Description of Artificial Sequence: Synthetic oligonucleotide
  Target: LAMA2; (-) strand; PAM type: NRG; PAM sequence: AGG
ggagaactcacttatcacca

SEQ ID NO: 59911 - DNA, 20 bp, Artificial Sequence
  Description of Artificial Sequence: Synthetic oligonucleotide
  Target: LAMA2; (-) strand; PAM type: NRG; PAM sequence: AAG
gggagaactcacttatcacc

SEQ ID NO: 59912 - DNA, 20 bp, Artificial Sequence
  Description of Artificial Sequence: Synthetic oligonucleotide
  Target: LAMA2; (-) strand; PAM type: NRG; PAM sequence: GAG
agatctcatgggaactaagg

SEQ ID NO: 59913 - DNA, 20 bp, Artificial Sequence
  Description of Artificial Sequence: Synthetic oligonucleotide
  Target: LAMA2; (-) strand; PAM type: NRG; PAM sequence: GGG
ccagatctcatgggaactaa

SEQ ID NO: 59914 - DNA, 20 bp, Artificial Sequence
  Description of Artificial Sequence: Synthetic oligonucleotide
  Target: LAMA2; (-) strand; PAM type: NRG; PAM sequence: AGG
accagatctcatgggaacta

SEQ ID NO: 59915 - DNA, 20 bp, Artificial Sequence
  Description of Artificial Sequence: Synthetic oligonucleotide
  Target: LAMA2; (-) strand; PAM type: NRG; PAM sequence: AAG
aaccagatctcatgggaact

SEQ ID NO: 59916 - DNA, 20 bp, Artificial Sequence
  Description of Artificial Sequence: Synthetic oligonucleotide
  Target: LAMA2; (-) strand; PAM type: NRG; PAM sequence: GGG
tttaaacaaccagatctcat

SEQ ID NO: 59917 - DNA, 20 bp, Artificial Sequence
  Description of Artificial Sequence: Synthetic oligonucleotide
  Target: LAMA2; (-) strand; PAM type: NRG; PAM sequence: TGG
ttttaaacaaccagatctca

SEQ ID NO: 59918 - DNA, 20 bp, Artificial Sequence
  Description of Artificial Sequence: Synthetic oligonucleotide
  Target: LAMA2; (-) strand; PAM type: NRG; PAM sequence: CAG
cccaatttcttttaaacaac

SEQ ID NO: 59919 - DNA, 20 bp, Artificial Sequence
  Description of Artificial Sequence: Synthetic oligonucleotide
  Target: LAMA2; (-) strand; PAM type: NRG; PAM sequence: GAG
ggagcaagagagagcagggg

SEQ ID NO: 59920 - DNA, 20 bp, Artificial Sequence
  Description of Artificial Sequence: Synthetic oligonucleotide
  Target: LAMA2; (-) strand; PAM type: NRG; PAM sequence: GGG
tgggagcaagagagagcagg

SEQ ID NO: 59921 - DNA, 20 bp, Artificial Sequence
  Description of Artificial Sequence: Synthetic oligonucleotide
  Target: LAMA2; (-) strand; PAM type: NRG; PAM sequence: GGG
gtgggagcaagagagagcag

SEQ ID NO: 59922 - DNA, 20 bp, Artificial Sequence
  Description of Artificial Sequence: Synthetic oligonucleotide
  Target: LAMA2; (-) strand; PAM type: NRG; PAM sequence: GGG
agtgggagcaagagagagca

SEQ ID NO: 59923 - DNA, 20 bp, Artificial Sequence
  Description of Artificial Sequence: Synthetic oligonucleotide
  Target: LAMA2; (-) strand; PAM type: NRG; PAM sequence: AGG
gagtgggagcaagagagagc

SEQ ID NO: 59924 - DNA, 20 bp, Artificial Sequence
  Description of Artificial Sequence: Synthetic oligonucleotide
  Target: LAMA2; (-) strand; PAM type: NRG; PAM sequence: CAG
ggagtgggagcaagagagag

SEQ ID NO: 59925 - DNA, 20 bp, Artificial Sequence
  Description of Artificial Sequence: Synthetic oligonucleotide
  Target: LAMA2; (-) strand; PAM type: NRG; PAM sequence: GAG
gagggagtgggagcaagaga

SEQ ID NO: 59926 - DNA, 20 bp, Artificial Sequence
  Description of Artificial Sequence: Synthetic oligonucleotide
  Target: LAMA2; (-) strand; PAM type: NRG; PAM sequence: GAG
tggagggagtgggagcaaga

SEQ ID NO: 59927 - DNA, 20 bp, Artificial Sequence
  Description of Artificial Sequence: Synthetic oligonucleotide
  Target: LAMA2; (-) strand; PAM type: NRG; PAM sequence: GAG
catggagggagtgggagcaa

SEQ ID NO: 59928 - DNA, 20 bp, Artificial Sequence
  Description of Artificial Sequence: Synthetic oligonucleotide
  Target: LAMA2; (-) strand; PAM type: NRG; PAM sequence: AAG
cacatggagggagtgggagc

SEQ ID NO: 59929 - DNA, 20 bp, Artificial Sequence
  Description of Artificial Sequence: Synthetic oligonucleotide
  Target: LAMA2; (-) strand; PAM type: NRG; PAM sequence: GAG
atgtcacatggagggagtgg

SEQ ID NO: 59930 - DNA, 20 bp, Artificial Sequence
  Description of Artificial Sequence: Synthetic oligonucleotide
  Target: LAMA2; (-) strand; PAM type: NRG; PAM sequence: GGG
acatgtcacatggagggagt

SEQ ID NO: 59931 - DNA, 20 bp, Artificial Sequence
  Description of Artificial Sequence: Synthetic oligonucleotide
  Target: LAMA2; (-) strand; PAM type: NRG; PAM sequence: TGG
cacatgtcacatggagggag

SEQ ID NO: 59932 - DNA, 20 bp, Artificial Sequence
  Description of Artificial Sequence: Synthetic oligonucleotide
  Target: LAMA2; (-) strand; PAM type: NRG; PAM sequence: GAG
gcacacatgtcacatggagg

SEQ ID NO: 59933 - DNA, 20 bp, Artificial Sequence
  Description of Artificial Sequence: Synthetic oligonucleotide
  Target: LAMA2; (-) strand; PAM type: NRG; PAM sequence: GGG
gagcacacatgtcacatgga

SEQ ID NO: 59934 - DNA, 20 bp, Artificial Sequence
  Description of Artificial Sequence: Synthetic oligonucleotide
  Target: LAMA2; (-) strand; PAM type: NRG; PAM sequence: AGG
ggagcacacatgtcacatgg

SEQ ID NO: 59935 - DNA, 20 bp, Artificial Sequence
  Description of Artificial Sequence: Synthetic oligonucleotide
  Target: LAMA2; (-) strand; PAM type: NRG; PAM sequence: GAG
tggagcacacatgtcacatg

SEQ ID NO: 59936 - DNA, 20 bp, Artificial Sequence
  Description of Artificial Sequence: Synthetic oligonucleotide
  Target: LAMA2; (-) strand; PAM type: NRG; PAM sequence: TGG
gctggagcacacatgtcaca

SEQ ID NO: 59937 - DNA, 20 bp, Artificial Sequence
  Description of Artificial Sequence: Synthetic oligonucleotide
  Target: LAMA2; (-) strand; PAM type: NRG; PAM sequence: GAG
catggcagaagataaagctg

SEQ ID NO: 59938 - DNA, 20 bp, Artificial Sequence
  Description of Artificial Sequence: Synthetic oligonucleotide
  Target: LAMA2; (-) strand; PAM type: NRG; PAM sequence: TGG
gtcatggcagaagataaagc

SEQ ID NO: 59939 - DNA, 20 bp, Artificial Sequence
  Description of Artificial Sequence: Synthetic oligonucleotide
  Target: LAMA2; (-) strand; PAM type: NRG; PAM sequence: AAG
tccagtcatggcagaagata

SEQ ID NO: 59940 - DNA, 20 bp, Artificial Sequence
  Description of Artificial Sequence: Synthetic oligonucleotide
  Target: LAMA2; (-) strand; PAM type: NRG; PAM sequence: AAG
gaagcttccagtcatggcag

SEQ ID NO: 59941 - DNA, 20 bp, Artificial Sequence
  Description of Artificial Sequence: Synthetic oligonucleotide
  Target: LAMA2; (-) strand; PAM type: NRG; PAM sequence: CAG
caggaagcttccagtcatgg

SEQ ID NO: 59942 - DNA, 20 bp, Artificial Sequence
  Description of Artificial Sequence: Synthetic oligonucleotide
  Target: LAMA2; (-) strand; PAM type: NRG; PAM sequence: TGG
cctcaggaagcttccagtca

SEQ ID NO: 59943 - DNA, 20 bp, Artificial Sequence
  Description of Artificial Sequence: Synthetic oligonucleotide
  Target: LAMA2; (-) strand; PAM type: NRG; PAM sequence: CAG
tgagggcctcaggaagcttc

SEQ ID NO: 59944 - DNA, 20 bp, Artificial Sequence
  Description of Artificial Sequence: Synthetic oligonucleotide
  Target: LAMA2; (-) strand; PAM type: NRG; PAM sequence: AAG
attctggtgagggcctcagg

SEQ ID NO: 59945 - DNA, 20 bp, Artificial Sequence
  Description of Artificial Sequence: Synthetic oligonucleotide
  Target: LAMA2; (-) strand; PAM type: NRG; PAM sequence: AGG
ctgattctggtgagggcctc

SEQ ID NO: 59946 - DNA, 20 bp, Artificial Sequence
  Description of Artificial Sequence: Synthetic oligonucleotide
  Target: LAMA2; (-) strand; PAM type: NRG; PAM sequence: CAG
tctgattctggtgagggcct

SEQ ID NO: 59947 - DNA, 20 bp, Artificial Sequence
  Description of Artificial Sequence: Synthetic oligonucleotide
  Target: LAMA2; (-) strand; PAM type: NRG; PAM sequence: GGG
cagacatctgattctggtga

SEQ ID NO: 59948 - DNA, 20 bp, Artificial Sequence
  Description of Artificial Sequence: Synthetic oligonucleotide
  Target: LAMA2; (-) strand; PAM type: NRG; PAM sequence: AGG
gcagacatctgattctggtg

SEQ ID NO: 59949 - DNA, 20 bp, Artificial Sequence
  Description of Artificial Sequence: Synthetic oligonucleotide
  Target: LAMA2; (-) strand; PAM type: NRG; PAM sequence: GAG
tgcagacatctgattctggt

SEQ ID NO: 59950 - DNA, 20 bp, Artificial Sequence
  Description of Artificial Sequence: Synthetic oligonucleotide
  Target: LAMA2; (-) strand; PAM type: NRG; PAM sequence: TGG
atggtgcagacatctgattc

SEQ ID NO: 59951 - DNA, 20 bp, Artificial Sequence
  Description of Artificial Sequence: Synthetic oligonucleotide
  Target: LAMA2; (-) strand; PAM type: NRG; PAM sequence: CAG
gctgtacaggaaccatggtg

SEQ ID NO: 59952 - DNA, 20 bp, Artificial Sequence
  Description of Artificial Sequence: Synthetic oligonucleotide
  Target: LAMA2; (-) strand; PAM type: NRG; PAM sequence: TGG
tgcaggctgtacaggaacca

SEQ ID NO: 59953 - DNA, 20 bp, Artificial Sequence
  Description of Artificial Sequence: Synthetic oligonucleotide
  Target: LAMA2; (-) strand; PAM type: NRG; PAM sequence: AGG
ctctgttctgcaggctgtac

SEQ ID NO: 59954 - DNA, 20 bp, Artificial Sequence
  Description of Artificial Sequence: Synthetic oligonucleotide
  Target: LAMA2; (-) strand; PAM type: NRG; PAM sequence: CAG
tctctgttctgcaggctgta

SEQ ID NO: 59955 - DNA, 20 bp, Artificial Sequence
  Description of Artificial Sequence: Synthetic oligonucleotide
  Target: LAMA2; (-) strand; PAM type: NRG; PAM sequence: AGG
taattggttctctgttctgc

SEQ ID NO: 59956 - DNA, 20 bp, Artificial Sequence
  Description of Artificial Sequence: Synthetic oligonucleotide
  Target: LAMA2; (-) strand; PAM type: NRG; PAM sequence: CAG
ttaattggttctctgttctg

SEQ ID NO: 59957 - DNA, 20 bp, Artificial Sequence
  Description of Artificial Sequence: Synthetic oligonucleotide
  Target: LAMA2; (-) strand; PAM type: NRG; PAM sequence: TGG
ataaagaaaagatatttaat

SEQ ID NO: 59958 - DNA, 20 bp, Artificial Sequence
  Description of Artificial Sequence: Synthetic oligonucleotide
  Target: LAMA2; (-) strand; PAM type: NRG; PAM sequence: AAG
gctgggtaatttataaagaa

SEQ ID NO: 59959 - DNA, 20 bp, Artificial Sequence
  Description of Artificial Sequence: Synthetic oligonucleotide
  Target: LAMA2; (-) strand; PAM type: NRG; PAM sequence: AAG
ctgaggctgggtaatttata

SEQ ID NO: 59960 - DNA, 20 bp, Artificial Sequence
  Description of Artificial Sequence: Synthetic oligonucleotide
  Target: LAMA2; (-) strand; PAM type: NRG; PAM sequence: GGG
tttaagaaacatctgaggct

SEQ ID NO: 59961 - DNA, 20 bp, Artificial Sequence
  Description of Artificial Sequence: Synthetic oligonucleotide
  Target: LAMA2; (-) strand; PAM type: NRG; PAM sequence: TGG
ttttaagaaacatctgaggc

SEQ ID NO: 59962 - DNA, 20 bp, Artificial Sequence
  Description of Artificial Sequence: Synthetic oligonucleotide
  Target: LAMA2; (-) strand; PAM type: NRG; PAM sequence: AGG
ctgcttttaagaaacatctg

SEQ ID NO: 59963 - DNA, 20 bp, Artificial Sequence
  Description of Artificial Sequence: Synthetic oligonucleotide
  Target: LAMA2; (-) strand; PAM type: NRG; PAM sequence: GAG
actgcttttaagaaacatct

SEQ ID NO: 59964 - DNA, 20 bp, Artificial Sequence
  Description of Artificial Sequence: Synthetic oligonucleotide
  Target: LAMA2; (-) strand; PAM type: NRG; PAM sequence: AAG
ccattttttgcactgctttt

SEQ ID NO: 59965 - DNA, 20 bp, Artificial Sequence
  Description of Artificial Sequence: Synthetic oligonucleotide
  Target: LAMA2; (-) strand; PAM type: NRG; PAM sequence: AAG
ataccaaatatcacagtgtt

SEQ ID NO: 59966 - DNA, 20 bp, Artificial Sequence
  Description of Artificial Sequence: Synthetic oligonucleotide
  Target: LAMA2; (-) strand; PAM type: NRG; PAM sequence: CAG
ctagaaaataccaaatatca

SEQ ID NO: 59967 - DNA, 20 bp, Artificial Sequence
  Description of Artificial Sequence: Synthetic oligonucleotide
  Target: LAMA2; (-) strand; PAM type: NRG; PAM sequence: TAG
ggggatgtgcactaatggac

SEQ ID NO: 59968 - DNA, 20 bp, Artificial Sequence
  Description of Artificial Sequence: Synthetic oligonucleotide
  Target: LAMA2; (-) strand; PAM type: NRG; PAM sequence: TGG
atcggggggatgtgcactaa

SEQ ID NO: 59969 - DNA, 20 bp, Artificial Sequence
  Description of Artificial Sequence: Synthetic oligonucleotide
  Target: LAMA2; (-) strand; PAM type: NRG; PAM sequence: GGG
catatttatcctacatcggg

SEQ ID NO: 59970 - DNA, 20 bp, Artificial Sequence
  Description of Artificial Sequence: Synthetic oligonucleotide
  Target: LAMA2; (-) strand; PAM type: NRG; PAM sequence: GGG
ccatatttatcctacatcgg

SEQ ID NO: 59971 - DNA, 20 bp, Artificial Sequence
  Description of Artificial Sequence: Synthetic oligonucleotide
  Target: LAMA2; (-) strand; PAM type: NRG; PAM sequence: GGG
accatatttatcctacatcg

SEQ ID NO: 59972 - DNA, 20 bp, Artificial Sequence
  Description of Artificial Sequence: Synthetic oligonucleotide
  Target: LAMA2; (-) strand; PAM type: NRG; PAM sequence: GGG
taccatatttatcctacatc

SEQ ID NO: 59973 - DNA, 20 bp, Artificial Sequence
  Description of Artificial Sequence: Synthetic oligonucleotide
  Target: LAMA2; (-) strand; PAM type: NRG; PAM sequence: CGG
ataccatatttatcctacat

SEQ ID NO: 59974 - DNA, 20 bp, Artificial Sequence
  Description of Artificial Sequence: Synthetic oligonucleotide
  Target: LAMA2; (-) strand; PAM type: NRG; PAM sequence: AAG
tggagttgtgataattcaat

SEQ ID NO: 59975 - DNA, 20 bp, Artificial Sequence
  Description of Artificial Sequence: Synthetic oligonucleotide
  Target: LAMA2; (-) strand; PAM type: NRG; PAM sequence: GAG
aaattagacttatctcactg

SEQ ID NO: 59976 - DNA, 20 bp, Artificial Sequence
  Description of Artificial Sequence: Synthetic oligonucleotide
  Target: LAMA2; (-) strand; PAM type: NRG; PAM sequence: TGG
taaaattagacttatctcac

SEQ ID NO: 59977 - DNA, 20 bp, Artificial Sequence
  Description of Artificial Sequence: Synthetic oligonucleotide
  Target: LAMA2; (-) strand; PAM type: NRG; PAM sequence: TAG
ctttctaatgatattaaaat

SEQ ID NO: 59978 - DNA, 20 bp, Artificial Sequence
  Description of Artificial Sequence: Synthetic oligonucleotide
  Target: LAMA2; (-) strand; PAM type: NRG; PAM sequence: TGG
gagaaattagtagccctcgc

SEQ ID NO: 59979 - DNA, 20 bp, Artificial Sequence
  Description of Artificial Sequence: Synthetic oligonucleotide
  Target: LAMA2; (-) strand; PAM type: NRG; PAM sequence: TAG
gcgtgtccttgagaaattag

SEQ ID NO: 59980 - DNA, 20 bp, Artificial Sequence
  Description of Artificial Sequence: Synthetic oligonucleotide
  Target: LAMA2; (-) strand; PAM type: NRG; PAM sequence: TAG
tgagcgtgtccttgagaaat

SEQ ID NO: 59981 - DNA, 20 bp, Artificial Sequence
  Description of Artificial Sequence: Synthetic oligonucleotide
  Target: LAMA2; (-) strand; PAM type: NRG; PAM sequence: GAG
atgaggatgagcgtgtcctt

SEQ ID NO: 59982 - DNA, 20 bp, Artificial Sequence
  Description of Artificial Sequence: Synthetic oligonucleotide
  Target: LAMA2; (-) strand; PAM type: NRG; PAM sequence: GAG
tccagctctcacatgaggat

SEQ ID NO: 59983 - DNA, 20 bp, Artificial Sequence
  Description of Artificial Sequence: Synthetic oligonucleotide
  Target: LAMA2; (-) strand; PAM type: NRG; PAM sequence: AGG
tgagttccagctctcacatg

SEQ ID NO: 59984 - DNA, 20 bp, Artificial Sequence
  Description of Artificial Sequence: Synthetic oligonucleotide
  Target: LAMA2; (-) strand; PAM type: NRG; PAM sequence: GAG
ttgagttccagctctcacat

SEQ ID NO: 59985 - DNA, 20 bp, Artificial Sequence
  Description of Artificial Sequence: Synthetic oligonucleotide
  Target: LAMA2; (-) strand; PAM type: NRG; PAM sequence: CAG
caaggtctggttttgagttc

SEQ ID NO: 59986 - DNA, 20 bp, Artificial Sequence
  Description of Artificial Sequence: Synthetic oligonucleotide
  Target: LAMA2; (-) strand; PAM type: NRG; PAM sequence: GAG
caaagtcaaggtctggtttt

SEQ ID NO: 59987 - DNA, 20 bp, Artificial Sequence
  Description of Artificial Sequence: Synthetic oligonucleotide
  Target: LAMA2; (-) strand; PAM type: NRG; PAM sequence: TGG
attttgacaaagtcaaggtc

SEQ ID NO: 59988 - DNA, 20 bp, Artificial Sequence
  Description of Artificial Sequence: Synthetic oligonucleotide
  Target: LAMA2; (-) strand; PAM type: NRG; PAM sequence: AGG
agtgcattttgacaaagtca

SEQ ID NO: 59989 - DNA, 20 bp, Artificial Sequence
  Description of Artificial Sequence: Synthetic oligonucleotide
  Target: LAMA2; (-) strand; PAM type: NRG; PAM sequence: AAG
aagtgcattttgacaaagtc

SEQ ID NO: 59990 - DNA, 20 bp, Artificial Sequence
  Description of Artificial Sequence: Synthetic oligonucleotide
  Target: LAMA2; (-) strand; PAM type: NRG; PAM sequence: AAG
accaaaagtgcattttgaca

SEQ ID NO: 59991 - DNA, 20 bp, Artificial Sequence
  Description of Artificial Sequence: Synthetic oligonucleotide
  Target: LAMA2; (-) strand; PAM type: NRG; PAM sequence: AAG
aatatcagattgggaaccaa

SEQ ID NO: 59992 - DNA, 20 bp, Artificial Sequence
  Description of Artificial Sequence: Synthetic oligonucleotide
  Target: LAMA2; (-) strand; PAM type: NRG; PAM sequence: GGG
tctgcacctaatatcagatt

SEQ ID NO: 59993 - DNA, 20 bp, Artificial Sequence
  Description of Artificial Sequence: Synthetic oligonucleotide
  Target: LAMA2; (-) strand; PAM type: NRG; PAM sequence: TGG
atctgcacctaatatcagat

SEQ ID NO: 59994 - DNA, 20 bp, Artificial Sequence
  Description of Artificial Sequence: Synthetic oligonucleotide
  Target: LAMA2; (-) strand; PAM type: NRG; PAM sequence: CAG
gaagaatctgcacctaatat

SEQ ID NO: 59995 - DNA, 20 bp, Artificial Sequence
  Description of Artificial Sequence: Synthetic oligonucleotide
  Target: LAMA2; (-) strand; PAM type: NRG; PAM sequence: AAG
ggcccttggttaaagaagag

SEQ ID NO: 59996 - DNA, 20 bp, Artificial Sequence
  Description of Artificial Sequence: Synthetic oligonucleotide
  Target: LAMA2; (-) strand; PAM type: NRG; PAM sequence: GAG
tttggcccttggttaaagaa

SEQ ID NO: 59997 - DNA, 20 bp, Artificial Sequence
  Description of Artificial Sequence: Synthetic oligonucleotide
  Target: LAMA2; (-) strand; PAM type: NRG; PAM sequence: AAG
tatttggcccttggttaaag

SEQ ID NO: 59998 - DNA, 20 bp, Artificial Sequence
  Description of Artificial Sequence: Synthetic oligonucleotide
  Target: LAMA2; (-) strand; PAM type: NRG; PAM sequence: AAG
tattatttggcccttggtta

SEQ ID NO: 59999 - DNA, 20 bp, Artificial Sequence
  Description of Artificial Sequence: Synthetic oligonucleotide
  Target: LAMA2; (-) strand; PAM type: NRG; PAM sequence: TGG
tggctgtattatttggccct

SEQ ID NO: 60000 - DNA, 20 bp, Artificial Sequence
  Description of Artificial Sequence: Synthetic oligonucleotide
  Target: LAMA2; (-) strand; PAM type: NRG; PAM sequence: TGG
gggtgggtggctgtattatt

SEQ ID NO: 60001 - DNA, 20 bp, Artificial Sequence
  Description of Artificial Sequence: Synthetic oligonucleotide
  Target: LAMA2; (-) strand; PAM type: NRG; PAM sequence: TGG
ctggggcagggtggggtggg

SEQ ID NO: 60002 - DNA, 20 bp, Artificial Sequence
  Description of Artificial Sequence: Synthetic oligonucleotide
  Target: LAMA2; (-) strand; PAM type: NRG; PAM sequence: GGG
gagctggggcagggtggggt

SEQ ID NO: 60003 - DNA, 20 bp, Artificial Sequence
  Description of Artificial Sequence: Synthetic oligonucleotide
  Target: LAMA2; (-) strand; PAM type: NRG; PAM sequence: TGG
agagctggggcagggtgggg

SEQ ID NO: 60004 - DNA, 20 bp, Artificial Sequence
  Description of Artificial Sequence: Synthetic oligonucleotide
  Target: LAMA2; (-) strand; PAM type: NRG; PAM sequence: GGG
aggagagctggggcagggtg

SEQ ID NO: 60005 - DNA, 20 bp, Artificial Sequence
  Description of Artificial Sequence: Synthetic oligonucleotide
  Target: LAMA2; (-) strand; PAM type: NRG; PAM sequence: GGG
aaggagagctggggcagggt

SEQ ID NO: 60006 - DNA, 20 bp, Artificial Sequence
  Description of Artificial Sequence: Synthetic oligonucleotide
  Target: LAMA2; (-) strand; PAM type: NRG; PAM sequence: TGG
aaaggagagctggggcaggg

SEQ ID NO: 60007 - DNA, 20 bp, Artificial Sequence
  Description of Artificial Sequence: Synthetic oligonucleotide
  Target: LAMA2; (-) strand; PAM type: NRG; PAM sequence: GGG
ctaaaaggagagctggggca

SEQ ID NO: 60008 - DNA, 20 bp, Artificial Sequence
  Description of Artificial Sequence: Synthetic oligonucleotide
  Target: LAMA2; (-) strand; PAM type: NRG; PAM sequence: AGG
tctaaaaggagagctggggc

SEQ ID NO: 60009 - DNA, 20 bp, Artificial Sequence
  Description of Artificial Sequence: Synthetic oligonucleotide
  Target: LAMA2; (-) strand; PAM type: NRG; PAM sequence: CAG
ttctaaaaggagagctgggg

SEQ ID NO: 60010 - DNA, 20 bp, Artificial Sequence
  Description of Artificial Sequence: Synthetic oligonucleotide
  Target: LAMA2; (-) strand; PAM type: NRG; PAM sequence: GGG
tggttctaaaaggagagctg

SEQ ID NO: 60011 - DNA, 20 bp, Artificial Sequence
  Description of Artificial Sequence: Synthetic oligonucleotide
  Target: LAMA2; (-) strand; PAM type: NRG; PAM sequence: GGG
ttggttctaaaaggagagct

SEQ ID NO: 60012 - DNA, 20 bp, Artificial Sequence
  Description of Artificial Sequence: Synthetic oligonucleotide
  Target: LAMA2; (-) strand; PAM type: NRG; PAM sequence: TGG
tttggttctaaaaggagagc

SEQ ID NO: 60013 - DNA, 20 bp, Artificial Sequence
  Description of Artificial Sequence: Synthetic oligonucleotide
  Target: LAMA2; (-) strand; PAM type: NRG; PAM sequence: GAG
acagtttggttctaaaagga

SEQ ID NO: 60014 - DNA, 20 bp, Artificial Sequence
  Description of Artificial Sequence: Synthetic oligonucleotide
  Target: LAMA2; (-) strand; PAM type: NRG; PAM sequence: GAG
caacagtttggttctaaaag

SEQ ID NO: 60015 - DNA, 20 bp, Artificial Sequence
  Description of Artificial Sequence: Synthetic oligonucleotide
  Target: LAMA2; (-) strand; PAM type: NRG; PAM sequence: AGG
agcaacagtttggttctaaa

SEQ ID NO: 60016 - DNA, 20 bp, Artificial Sequence
  Description of Artificial Sequence: Synthetic oligonucleotide
  Target: LAMA2; (-) strand; PAM type: NRG; PAM sequence: AAG
gagcaacagtttggttctaa

SEQ ID NO: 60017 - DNA, 20 bp, Artificial Sequence
  Description of Artificial Sequence: Synthetic oligonucleotide
  Target: LAMA2; (-) strand; PAM type: NRG; PAM sequence: TGG
aaagtgagagagcaacagtt

SEQ ID NO: 60018 - DNA, 20 bp, Artificial Sequence
  Description of Artificial Sequence: Synthetic oligonucleotide
  Target: LAMA2; (-) strand; PAM type: NRG; PAM sequence: CAG
tcactaaagtgagagagcaa

SEQ ID NO: 60019 - DNA, 20 bp, Artificial Sequence
  Description of Artificial Sequence: Synthetic oligonucleotide
  Target: LAMA2; (-) strand; PAM type: NRG; PAM sequence: GAG
tccacctcactaaagtgaga

SEQ ID NO: 60020 - DNA, 20 bp, Artificial Sequence
  Description of Artificial Sequence: Synthetic oligonucleotide
  Target: LAMA2; (-) strand; PAM type: NRG; PAM sequence: GAG
cttccacctcactaaagtga

SEQ ID NO: 60021 - DNA, 20 bp, Artificial Sequence
  Description of Artificial Sequence: Synthetic oligonucleotide
  Target: LAMA2; (-) strand; PAM type: NRG; PAM sequence: GAG
tccttccacctcactaaagt

SEQ ID NO: 60022 - DNA, 20 bp, Artificial Sequence
  Description of Artificial Sequence: Synthetic oligonucleotide
  Target: LAMA2; (-) strand; PAM type: NRG; PAM sequence: AAG
gtcttccttccacctcacta

SEQ ID NO: 60023 - DNA, 20 bp, Artificial Sequence
  Description of Artificial Sequence: Synthetic oligonucleotide
  Target: LAMA2; (-) strand; PAM type: NRG; PAM sequence: TAG
attcatcagtcaatttgaaa

SEQ ID NO: 60024 - DNA, 20 bp, Artificial Sequence
  Description of Artificial Sequence: Synthetic oligonucleotide
  Target: LAMA2; (-) strand; PAM type: NRG; PAM sequence: CAG
cttcgatagggttaattcat

SEQ ID NO: 60025 - DNA, 20 bp, Artificial Sequence
  Description of Artificial Sequence: Synthetic oligonucleotide
  Target: LAMA2; (-) strand; PAM type: NRG; PAM sequence: GGG
catttttctgaccttcgata

SEQ ID NO: 60026 - DNA, 20 bp, Artificial Sequence
  Description of Artificial Sequence: Synthetic oligonucleotide
  Target: LAMA2; (-) strand; PAM type: NRG; PAM sequence: AGG
acatttttctgaccttcgat

SEQ ID NO: 60027 - DNA, 20 bp, Artificial Sequence
  Description of Artificial Sequence: Synthetic oligonucleotide
  Target: LAMA2; (-) strand; PAM type: NRG; PAM sequence: TAG
aacatttttctgaccttcga

SEQ ID NO: 60028 - DNA, 20 bp, Artificial Sequence
  Description of Artificial Sequence: Synthetic oligonucleotide
  Target: LAMA2; (-) strand; PAM type: NRG; PAM sequence: AAG
attttctttttttccccctt

SEQ ID NO: 60029 - DNA, 20 bp, Artificial Sequence
  Description of Artificial Sequence: Synthetic oligonucleotide
  Target: LAMA2; (-) strand; PAM type: NRG; PAM sequence: AAG
tgcaaagagacatccttcat

SEQ ID NO: 60030 - DNA, 20 bp, Artificial Sequence
  Description of Artificial Sequence: Synthetic oligonucleotide
  Target: LAMA2; (-) strand; PAM type: NRG; PAM sequence: GAG
aattcacactcagttgcaaa

SEQ ID NO: 60031 - DNA, 20 bp, Artificial Sequence
  Description of Artificial Sequence: Synthetic oligonucleotide
  Target: LAMA2; (-) strand; PAM type: NRG; PAM sequence: AAG
taaattcacactcagttgca

SEQ ID NO: 60032 - DNA, 20 bp, Artificial Sequence
  Description of Artificial Sequence: Synthetic oligonucleotide
  Target: LAMA2; (-) strand; PAM type: NRG; PAM sequence: CAG
atcccatctaaattcacact

SEQ ID NO: 60033 - DNA, 20 bp, Artificial Sequence
  Description of Artificial Sequence: Synthetic oligonucleotide
  Target: LAMA2; (-) strand; PAM type: NRG; PAM sequence: AAG
acttgtgaaataaaaacaga

SEQ ID NO: 60034 - DNA, 20 bp, Artificial Sequence
  Description of Artificial Sequence: Synthetic oligonucleotide
  Target: LAMA2; (-) strand; PAM type: NRG; PAM sequence: CAG
aaagacttgtgaaataaaaa

SEQ ID NO: 60035 - DNA, 20 bp, Artificial Sequence
  Description of Artificial Sequence: Synthetic oligonucleotide
  Target: LAMA2; (-) strand; PAM type: NRG; PAM sequence: AAG
aactctaaaataagttacaa

SEQ ID NO: 60036 - DNA, 20 bp, Artificial Sequence
  Description of Artificial Sequence: Synthetic oligonucleotide
  Target: LAMA2; (-) strand; PAM type: NRG; PAM sequence: AAG
aagttttaaaactctaaaat

SEQ ID NO: 60037 - DNA, 20 bp, Artificial Sequence
  Description of Artificial Sequence: Synthetic oligonucleotide
  Target: LAMA2; (-) strand; PAM type: NRG; PAM sequence: AAG
acattttaaatatgtctaca

SEQ ID NO: 60038 - DNA, 20 bp, Artificial Sequence
  Description of Artificial Sequence: Synthetic oligonucleotide
  Target: LAMA2; (-) strand; PAM type: NRG; PAM sequence: TAG
gtttaaaaatgtgattgttt

SEQ ID NO: 60039 - DNA, 20 bp, Artificial Sequence
  Description of Artificial Sequence: Synthetic oligonucleotide
  Target: LAMA2; (-) strand; PAM type: NRG; PAM sequence: AGG
aacacttggtggcaaatgtt

SEQ ID NO: 60040 - DNA, 20 bp, Artificial Sequence
  Description of Artificial Sequence: Synthetic oligonucleotide
  Target: LAMA2; (-) strand; PAM type: NRG; PAM sequence: TAG
taacacttggtggcaaatgt

SEQ ID NO: 60041 - DNA, 20 bp, Artificial Sequence
  Description of Artificial Sequence: Synthetic oligonucleotide
  Target: LAMA2; (-) strand; PAM type: NRG; PAM sequence: TGG
ggttcatctttaacacttgg

SEQ ID NO: 60042 - DNA, 20 bp, Artificial Sequence
  Description of Artificial Sequence: Synthetic oligonucleotide
  Target: LAMA2; (-) strand; PAM type: NRG; PAM sequence: TGG
actggttcatctttaacact

SEQ ID NO: 60043 - DNA, 20 bp, Artificial Sequence
  Description of Artificial Sequence: Synthetic oligonucleotide
  Target: LAMA2; (-) strand; PAM type: NRG; PAM sequence: TGG
cgtctagttaaaattaaaac

SEQ ID NO: 60044 - DNA, 20 bp, Artificial Sequence
  Description of Artificial Sequence: Synthetic oligonucleotide
  Target: LAMA2; (-) strand; PAM type: NRG; PAM sequence: TAG
caaaaaagtttcaaatcgtc

SEQ ID NO: 60045 - DNA, 20 bp, Artificial Sequence
  Description of Artificial Sequence: Synthetic oligonucleotide
  Target: LAMA2; (-) strand; PAM type: NRG; PAM sequence: AAG
aattctcaagtatatcaaaa

SEQ ID NO: 60046 - DNA, 20 bp, Artificial Sequence
  Description of Artificial Sequence: Synthetic oligonucleotide
  Target: LAMA2; (-) strand; PAM type: NRG; PAM sequence: AAG
tttggtagtcccaaattctc

SEQ ID NO: 60047 - DNA, 20 bp, Artificial Sequence
  Description of Artificial Sequence: Synthetic oligonucleotide
  Target: LAMA2; (-) strand; PAM type: NRG; PAM sequence: TAG
catatttaggggttttttgg

SEQ ID NO: 60048 - DNA, 20 bp, Artificial Sequence
  Description of Artificial Sequence: Synthetic oligonucleotide
  Target: LAMA2; (-) strand; PAM type: NRG; PAM sequence: TGG
gatcatatttaggggttttt

SEQ ID NO: 60049 - DNA, 20 bp, Artificial Sequence
  Description of Artificial Sequence: Synthetic oligonucleotide
  Target: LAMA2; (-) strand; PAM type: NRG; PAM sequence: GGG
atataaaggatcatatttag

SEQ ID NO: 60050 - DNA, 20 bp, Artificial Sequence
  Description of Artificial Sequence: Synthetic oligonucleotide
  Target: LAMA2; (-) strand; PAM type: NRG; PAM sequence: GGG
aatataaaggatcatattta

SEQ ID NO: 60051 - DNA, 20 bp, Artificial Sequence
  Description of Artificial Sequence: Synthetic oligonucleotide
  Target: LAMA2; (-) strand; PAM type: NRG; PAM sequence: AGG
aaatataaaggatcatattt

SEQ ID NO: 60052 - DNA, 20 bp, Artificial Sequence
  Description of Artificial Sequence: Synthetic oligonucleotide
  Target: LAMA2; (-) strand; PAM type: NRG; PAM sequence: TAG
aaaatataaaggatcatatt

SEQ ID NO: 60053 - DNA, 20 bp, Artificial Sequence
  Description of Artificial Sequence: Synthetic oligonucleotide
  Target: LAMA2; (-) strand; PAM type: NRG; PAM sequence: AGG
agaagtaataaaaaatataa

SEQ ID NO: 60054 - DNA, 20 bp, Artificial Sequence
  Description of Artificial Sequence: Synthetic oligonucleotide
  Target: LAMA2; (-) strand; PAM type: NRG; PAM sequence: AAG
tagaagtaataaaaaatata

SEQ ID NO: 60055 - DNA, 20 bp, Artificial Sequence
  Description of Artificial Sequence: Synthetic oligonucleotide
  Target: LAMA2; (-) strand; PAM type: NRG; PAM sequence: AAG
ttagaatcaaaatattttag

SEQ ID NO: 60056 - DNA, 20 bp, Artificial Sequence
  Description of Artificial Sequence: Synthetic oligonucleotide
  Target: LAMA2; (-) strand; PAM type: NRG; PAM sequence: TAG
tgtttagaatcaaaatattt

SEQ ID NO: 60057 - DNA, 20 bp, Artificial Sequence
  Description of Artificial Sequence: Synthetic oligonucleotide
  Target: LAMA2; (-) strand; PAM type: NRG; PAM sequence: TAG
agtatttacatatatttgtt

SEQ ID NO: 60058 - DNA, 20 bp, Artificial Sequence
  Description of Artificial Sequence: Synthetic oligonucleotide
  Target: LAMA2; (-) strand; PAM type: NRG; PAM sequence: TAG
tagtatctaaattctccaca

SEQ ID NO: 60059 - DNA, 20 bp, Artificial Sequence
  Description of Artificial Sequence: Synthetic oligonucleotide
  Target: LAMA2; (-) strand; PAM type: NRG; PAM sequence: TAG
caatatttgacttaaatttt

SEQ ID NO: 60060 - DNA, 20 bp, Artificial Sequence
  Description of Artificial Sequence: Synthetic oligonucleotide
  Target: LAMA2; (-) strand; PAM type: NRG; PAM sequence: AAG
tacagtcccgggcatattgt

SEQ ID NO: 60061 - DNA, 20 bp, Artificial Sequence
  Description of Artificial Sequence: Synthetic oligonucleotide
  Target: LAMA2; (-) strand; PAM type: NRG; PAM sequence: GGG
ttagcatcatgtacagtccc

SEQ ID NO: 60062 - DNA, 20 bp, Artificial Sequence
  Description of Artificial Sequence: Synthetic oligonucleotide
  Target: LAMA2; (-) strand; PAM type: NRG; PAM sequence: CGG
tttagcatcatgtacagtcc

SEQ ID NO: 60063 - DNA, 20 bp, Artificial Sequence
  Description of Artificial Sequence: Synthetic oligonucleotide
  Target: LAMA2; (-) strand; PAM type: NRG; PAM sequence: CAG
gctacttttagcatcatgta

SEQ ID NO: 60064 - DNA, 20 bp, Artificial Sequence
  Description of Artificial Sequence: Synthetic oligonucleotide
  Target: LAMA2; (-) strand; PAM type: NRG; PAM sequence: TAG
ccattgcatctggctacttt

SEQ ID NO: 60065 - DNA, 20 bp, Artificial Sequence
  Description of Artificial Sequence: Synthetic oligonucleotide
  Target: LAMA2; (-) strand; PAM type: NRG; PAM sequence: TGG
aagtcagtaaccattgcatc

SEQ ID NO: 60066 - DNA, 20 bp, Artificial Sequence
  Description of Artificial Sequence: Synthetic oligonucleotide
  Target: LAMA2; (-) strand; PAM type: NRG; PAM sequence: CAG
aaaaagatgccactcgaagt

SEQ ID NO: 60067 - DNA, 20 bp, Artificial Sequence
  Description of Artificial Sequence: Synthetic oligonucleotide
  Target: LAMA2; (-) strand; PAM type: NRG; PAM sequence: AAG
tttcaaaaagatgccactcg

SEQ ID NO: 60068 - DNA, 20 bp, Artificial Sequence
  Description of Artificial Sequence: Synthetic oligonucleotide
  Target: LAMA2; (-) strand; PAM type: NRG; PAM sequence: AAG
tttctgccctctgtttcaaa

SEQ ID NO: 60069 - DNA, 20 bp, Artificial Sequence
  Description of Artificial Sequence: Synthetic oligonucleotide
  Target: LAMA2; (-) strand; PAM type: NRG; PAM sequence: CAG
aagctcacatcatgttatct

SEQ ID NO: 60070 - DNA, 20 bp, Artificial Sequence
  Description of Artificial Sequence: Synthetic oligonucleotide
  Target: LAMA2; (-) strand; PAM type: NRG; PAM sequence: AAG
cccattctccagtatggaac

SEQ ID NO: 60071 - DNA, 20 bp, Artificial Sequence
  Description of Artificial Sequence: Synthetic oligonucleotide
  Target: LAMA2; (-) strand; PAM type: NRG; PAM sequence: TGG
gagtgccccattctccagta

SEQ ID NO: 60072 - DNA, 20 bp, Artificial Sequence
  Description of Artificial Sequence: Synthetic oligonucleotide
  Target: LAMA2; (-) strand; PAM type: NRG; PAM sequence: CAG
tctctgagtgccccattctc

SEQ ID NO: 60073 - DNA, 20 bp, Artificial Sequence
  Description of Artificial Sequence: Synthetic oligonucleotide
  Target: LAMA2; (-) strand; PAM type: NRG; PAM sequence: GAG
ttgcacacactcttttctct

SEQ ID NO: 60074 - DNA, 20 bp, Artificial Sequence
  Description of Artificial Sequence: Synthetic oligonucleotide
  Target: LAMA2; (-) strand; PAM type: NRG; PAM sequence: CAG
ccaaagcttctccccacctg

SEQ ID NO: 60075 - DNA, 20 bp, Artificial Sequence
  Description of Artificial Sequence: Synthetic oligonucleotide
  Target: LAMA2; (-) strand; PAM type: NRG; PAM sequence: AAG
ttcctggagtgccaaaccca

SEQ ID NO: 60076 - DNA, 20 bp, Artificial Sequence
  Description of Artificial Sequence: Synthetic oligonucleotide
  Target: LAMA2; (-) strand; PAM type: NRG; PAM sequence: GAG
gctttgaacatatcttcctg

SEQ ID NO: 60077 - DNA, 20 bp, Artificial Sequence
  Description of Artificial Sequence: Synthetic oligonucleotide
  Target: LAMA2; (-) strand; PAM type: NRG; PAM sequence: TGG
ctgctttgaacatatcttcc

SEQ ID NO: 60078 - DNA, 20 bp, Artificial Sequence
  Description of Artificial Sequence: Synthetic oligonucleotide
  Target: LAMA2; (-) strand; PAM type: NRG; PAM sequence: CAG
actcacttttcttgaacaat

SEQ ID NO: 60079 - DNA, 20 bp, Artificial Sequence
  Description of Artificial Sequence: Synthetic oligonucleotide
  Target: LAMA2; (-) strand; PAM type: NRG; PAM sequence: CAG
tctgaaataatgaccctttc

SEQ ID NO: 60080 - DNA, 20 bp, Artificial Sequence
  Description of Artificial Sequence: Synthetic oligonucleotide
  Target: LAMA2; (-) strand; PAM type: NRG; PAM sequence: TGG
ctcttttcctgcctccttct

SEQ ID NO: 60081 - DNA, 20 bp, Artificial Sequence
  Description of Artificial Sequence: Synthetic oligonucleotide
  Target: LAMA2; (-) strand; PAM type: NRG; PAM sequence: TGG
caagttctacccacgtggcc

SEQ ID NO: 60082 - DNA, 20 bp, Artificial Sequence
  Description of Artificial Sequence: Synthetic oligonucleotide
  Target: LAMA2; (-) strand; PAM type: NRG; PAM sequence: TGG
atactcaagttctacccacg

SEQ ID NO: 60083 - DNA, 20 bp, Artificial Sequence
  Description of Artificial Sequence: Synthetic oligonucleotide
  Target: LAMA2; (-) strand; PAM type: NRG; PAM sequence: AAG
ggagaaatattatgatactc

SEQ ID NO: 60084 - DNA, 20 bp, Artificial Sequence
  Description of Artificial Sequence: Synthetic oligonucleotide
  Target: LAMA2; (-) strand; PAM type: NRG; PAM sequence: GAG
gtcctagtagaatttagatg

SEQ ID NO: 60085 - DNA, 20 bp, Artificial Sequence
  Description of Artificial Sequence: Synthetic oligonucleotide
  Target: LAMA2; (-) strand; PAM type: NRG; PAM sequence: TGG
tagtcctagtagaatttaga

SEQ ID NO: 60086 - DNA, 20 bp, Artificial Sequence
  Description of Artificial Sequence: Synthetic oligonucleotide
  Target: LAMA2; (-) strand; PAM type: NRG; PAM sequence: TAG
cttctagtcctagtagaatt

SEQ ID NO: 60087 - DNA, 20 bp, Artificial Sequence
  Description of Artificial Sequence: Synthetic oligonucleotide
  Target: LAMA2; (-) strand; PAM type: NRG; PAM sequence: TAG
cataagacttctagtcctag

SEQ ID NO: 60088 - DNA, 20 bp, Artificial Sequence
  Description of Artificial Sequence: Synthetic oligonucleotide
  Target: LAMA2; (-) strand; PAM type: NRG; PAM sequence: TAG
gtccataagacttctagtcc

SEQ ID NO: 60089 - DNA, 20 bp, Artificial Sequence
  Description of Artificial Sequence: Synthetic oligonucleotide
  Target: LAMA2; (-) strand; PAM type: NRG; PAM sequence: TAG
taaaatgtccataagacttc

SEQ ID NO: 60090 - DNA, 20 bp, Artificial Sequence
  Description of Artificial Sequence: Synthetic oligonucleotide
  Target: LAMA2; (-) strand; PAM type: NRG; PAM sequence: AAG
agagtaaataaaatgtccat

SEQ ID NO: 60091 - DNA, 20 bp, Artificial Sequence
  Description of Artificial Sequence: Synthetic oligonucleotide
  Target: LAMA2; (-) strand; PAM type: NRG; PAM sequence: GAG
actgacgtgggcactttgta

SEQ ID NO: 60092 - DNA, 20 bp, Artificial Sequence
  Description of Artificial Sequence: Synthetic oligonucleotide
  Target: LAMA2; (-) strand; PAM type: NRG; PAM sequence: TAG
tcactgacgtgggcactttg

SEQ ID NO: 60093 - DNA, 20 bp, Artificial Sequence
  Description of Artificial Sequence: Synthetic oligonucleotide
  Target: LAMA2; (-) strand; PAM type: NRG; PAM sequence: GGG
tctttatctgtcactgacgt

SEQ ID NO: 60094 - DNA, 20 bp, Artificial Sequence
  Description of Artificial Sequence: Synthetic oligonucleotide
  Target: LAMA2; (-) strand; PAM type: NRG; PAM sequence: TGG
ctctttatctgtcactgacg

SEQ ID NO: 60095 - DNA, 20 bp, Artificial Sequence
  Description of Artificial Sequence: Synthetic oligonucleotide
  Target: LAMA2; (-) strand; PAM type: NRG; PAM sequence: CAG
gaacccacctaagctactcc

SEQ ID NO: 60096 - DNA, 20 bp, Artificial Sequence
  Description of Artificial Sequence: Synthetic oligonucleotide
  Target: LAMA2; (-) strand; PAM type: NRG; PAM sequence: AAG
gggccatgtggaacccacct

SEQ ID NO: 60097 - DNA, 20 bp, Artificial Sequence
  Description of Artificial Sequence: Synthetic oligonucleotide
  Target: LAMA2; (-) strand; PAM type: NRG; PAM sequence: TGG
aggttcaatcctgggccatg

SEQ ID NO: 60098 - DNA, 20 bp, Artificial Sequence
  Description of Artificial Sequence: Synthetic oligonucleotide
  Target: LAMA2; (-) strand; PAM type: NRG; PAM sequence: GGG
agagaaagaggttcaatcct

SEQ ID NO: 60099 - DNA, 20 bp, Artificial Sequence
  Description of Artificial Sequence: Synthetic oligonucleotide
  Target: LAMA2; (-) strand; PAM type: NRG; PAM sequence: TGG
gagagaaagaggttcaatcc

SEQ ID NO: 60100 - DNA, 20 bp, Artificial Sequence
  Description of Artificial Sequence: Synthetic oligonucleotide
  Target: LAMA2; (-) strand; PAM type: NRG; PAM sequence: AGG
agctaagaagggagagaaag

SEQ ID NO: 60101 - DNA, 20 bp, Artificial Sequence
  Description of Artificial Sequence: Synthetic oligonucleotide
  Target: LAMA2; (-) strand; PAM type: NRG; PAM sequence: GAG
cagctaagaagggagagaaa

SEQ ID NO: 60102 - DNA, 20 bp, Artificial Sequence
  Description of Artificial Sequence: Synthetic oligonucleotide
  Target: LAMA2; (-) strand; PAM type: NRG; PAM sequence: AAG
aacagctaagaagggagaga

SEQ ID NO: 60103 - DNA, 20 bp, Artificial Sequence
  Description of Artificial Sequence: Synthetic oligonucleotide
  Target: LAMA2; (-) strand; PAM type: NRG; PAM sequence: GAG
gtcaaacagctaagaaggga

SEQ ID NO: 60104 - DNA, 20 bp, Artificial Sequence
  Description of Artificial Sequence: Synthetic oligonucleotide
  Target: LAMA2; (-) strand; PAM type: NRG; PAM sequence: GAG
aggtcaaacagctaagaagg

SEQ ID NO: 60105 - DNA, 20 bp, Artificial Sequence
  Description of Artificial Sequence: Synthetic oligonucleotide
  Target: LAMA2; (-) strand; PAM type: NRG; PAM sequence: GGG
tgaggtcaaacagctaagaa

SEQ ID NO: 60106 - DNA, 20 bp, Artificial Sequence
  Description of Artificial Sequence: Synthetic oligonucleotide
  Target: LAMA2; (-) strand; PAM type: NRG; PAM sequence: AGG
ctgaggtcaaacagctaaga

SEQ ID NO: 60107 - DNA, 20 bp, Artificial Sequence
  Description of Artificial Sequence: Synthetic oligonucleotide
  Target: LAMA2; (-) strand; PAM type: NRG; PAM sequence: AAG
actgaggtcaaacagctaag

SEQ ID NO: 60108 - DNA, 20 bp, Artificial Sequence
  Description of Artificial Sequence: Synthetic oligonucleotide
  Target: LAMA2; (-) strand; PAM type: NRG; PAM sequence: AAG
ttgactgaggtcaaacagct

SEQ ID NO: 60109 - DNA, 20 bp, Artificial Sequence
  Description of Artificial Sequence: Synthetic oligonucleotide
  Target: LAMA2; (-) strand; PAM type: NRG; PAM sequence: CAG
ataacttgactgaggtcaaa

SEQ ID NO: 60110 - DNA, 20 bp, Artificial Sequence
  Description of Artificial Sequence: Synthetic oligonucleotide
  Target: LAMA2; (-) strand; PAM type: NRG; PAM sequence: AGG
gaggtgacataacttgactg

SEQ ID NO: 60111 - DNA, 20 bp, Artificial Sequence
  Description of Artificial Sequence: Synthetic oligonucleotide
  Target: LAMA2; (-) strand; PAM type: NRG; PAM sequence: GAG
agaggtgacataacttgact

SEQ ID NO: 60112 - DNA, 20 bp, Artificial Sequence
  Description of Artificial Sequence: Synthetic oligonucleotide
  Target: LAMA2; (-) strand; PAM type: NRG; PAM sequence: AGG
caagaaaacagaggcatgag

SEQ ID NO: 60113 - DNA, 20 bp, Artificial Sequence
  Description of Artificial Sequence: Synthetic oligonucleotide
  Target: LAMA2; (-) strand; PAM type: NRG; PAM sequence: GAG
acaagaaaacagaggcatga

SEQ ID NO: 60114 - DNA, 20 bp, Artificial Sequence
  Description of Artificial Sequence: Synthetic oligonucleotide
  Target: LAMA2; (-) strand; PAM type: NRG; PAM sequence: GAG
agacaagaaaacagaggcat

SEQ ID NO: 60115 - DNA, 20 bp, Artificial Sequence
  Description of Artificial Sequence: Synthetic oligonucleotide
  Target: LAMA2; (-) strand; PAM type: NRG; PAM sequence: AGG
atttacagacaagaaaacag

SEQ ID NO: 60116 - DNA, 20 bp, Artificial Sequence
  Description of Artificial Sequence: Synthetic oligonucleotide
  Target: LAMA2; (-) strand; PAM type: NRG; PAM sequence: GAG
aatttacagacaagaaaaca

SEQ ID NO: 60117 - DNA, 20 bp, Artificial Sequence
  Description of Artificial Sequence: Synthetic oligonucleotide
  Target: LAMA2; (-) strand; PAM type: NRG; PAM sequence: CAG
ccaatttacagacaagaaaa

SEQ ID NO: 60118 - DNA, 20 bp, Artificial Sequence
  Description of Artificial Sequence: Synthetic oligonucleotide
  Target: LAMA2; (-) strand; PAM type: NRG; PAM sequence: AAG
attattcccaatttacagac

SEQ ID NO: 60119 - DNA, 20 bp, Artificial Sequence
  Description of Artificial Sequence: Synthetic oligonucleotide
  Target: LAMA2; (-) strand; PAM type: NRG; PAM sequence: CAG
accttattattcccaattta

SEQ ID NO: 60120 - DNA, 20 bp, Artificial Sequence
  Description of Artificial Sequence: Synthetic oligonucleotide
  Target: LAMA2; (-) strand; PAM type: NRG; PAM sequence: CAG
atacataataaacatatgtg

SEQ ID NO: 60121 - DNA, 20 bp, Artificial Sequence
  Description of Artificial Sequence: Synthetic oligonucleotide
  Target: LAMA2; (-) strand; PAM type: NRG; PAM sequence: GGG
atataatgtaatatatatat

SEQ ID NO: 60122 - DNA, 20 bp, Artificial Sequence
  Description of Artificial Sequence: Synthetic oligonucleotide
  Target: LAMA2; (-) strand; PAM type: NRG; PAM sequence: TGG
tatataatgtaatatatata

SEQ ID NO: 60123 - DNA, 20 bp, Artificial Sequence
  Description of Artificial Sequence: Synthetic oligonucleotide
  Target: LAMA2; (-) strand; PAM type: NRG; PAM sequence: AAG
ttggtaccagggactctgtt

SEQ ID NO: 60124 - DNA, 20 bp, Artificial Sequence
  Description of Artificial Sequence: Synthetic oligonucleotide
  Target: LAMA2; (-) strand; PAM type: NRG; PAM sequence: GGG
tcagtgcttatttggtacca

SEQ ID NO: 60125 - DNA, 20 bp, Artificial Sequence
  Description of Artificial Sequence: Synthetic oligonucleotide
  Target: LAMA2; (-) strand; PAM type: NRG; PAM sequence: AGG
ttcagtgcttatttggtacc

SEQ ID NO: 60126 - DNA, 20 bp, Artificial Sequence
  Description of Artificial Sequence: Synthetic oligonucleotide
  Target: LAMA2; (-) strand; PAM type: NRG; PAM sequence: CAG
attcagtgcttatttggtac

SEQ ID NO: 60127 - DNA, 20 bp, Artificial Sequence
  Description of Artificial Sequence: Synthetic oligonucleotide
  Target: LAMA2; (-) strand; PAM type: NRG; PAM sequence: TGG
atgttgattcagtgcttatt

SEQ ID NO: 60128 - DNA, 20 bp, Artificial Sequence
  Description of Artificial Sequence: Synthetic oligonucleotide
  Target: LAMA2; (-) strand; PAM type: NRG; PAM sequence: CAG
aataatagttaatgttgatt

SEQ ID NO: 60129 - DNA, 20 bp, Artificial Sequence
  Description of Artificial Sequence: Synthetic oligonucleotide
  Target: LAMA2; (-) strand; PAM type: NRG; PAM sequence: TAG
tcagataaaccaaataataa

SEQ ID NO: 60130 - DNA, 20 bp, Artificial Sequence
  Description of Artificial Sequence: Synthetic oligonucleotide
  Target: LAMA2; (-) strand; PAM type: NRG; PAM sequence: CAG
gctataccatttgaatgttt

SEQ ID NO: 60131 - DNA, 20 bp, Artificial Sequence
  Description of Artificial Sequence: Synthetic oligonucleotide
  Target: LAMA2; (-) strand; PAM type: NRG; PAM sequence: TAG
atgatatttttacatggcct

SEQ ID NO: 60132 - DNA, 20 bp, Artificial Sequence
  Description of Artificial Sequence: Synthetic oligonucleotide
  Target: LAMA2; (-) strand; PAM type: NRG; PAM sequence: TGG
aaatacatgatatttttaca

SEQ ID NO: 60133 - DNA, 20 bp, Artificial Sequence
  Description of Artificial Sequence: Synthetic oligonucleotide
  Target: LAMA2; (-) strand; PAM type: NRG; PAM sequence: AAG
ggatacccaaaaatgtgaaa

SEQ ID NO: 60134 - DNA, 20 bp, Artificial Sequence
  Description of Artificial Sequence: Synthetic oligonucleotide
  Target: LAMA2; (-) strand; PAM type: NRG; PAM sequence: TGG
cttcctccccttctctatcc

SEQ ID NO: 60135 - DNA, 20 bp, Artificial Sequence
  Description of Artificial Sequence: Synthetic oligonucleotide
  Target: LAMA2; (-) strand; PAM type: NRG; PAM sequence: TAG
actctcaaatattatgtgac

SEQ ID NO: 60136 - DNA, 20 bp, Artificial Sequence
  Description of Artificial Sequence: Synthetic oligonucleotide
  Target: LAMA2; (-) strand; PAM type: NRG; PAM sequence: AAG
tacaatcacattattgttga

SEQ ID NO: 60137 - DNA, 20 bp, Artificial Sequence
  Description of Artificial Sequence: Synthetic oligonucleotide
  Target: LAMA2; (-) strand; PAM type: NRG; PAM sequence: CAG
accatcatagaaatctcaca

SEQ ID NO: 60138 - DNA, 20 bp, Artificial Sequence
  Description of Artificial Sequence: Synthetic oligonucleotide
  Target: LAMA2; (-) strand; PAM type: NRG; PAM sequence: TAG
ctccatgaaaatgaccatca

SEQ ID NO: 60139 - DNA, 20 bp, Artificial Sequence
  Description of Artificial Sequence: Synthetic oligonucleotide
  Target: LAMA2; (-) strand; PAM type: NRG; PAM sequence: TGG
tttcaaagtcaatgcttgac

SEQ ID NO: 60140 - DNA, 20 bp, Artificial Sequence
  Description of Artificial Sequence: Synthetic oligonucleotide
  Target: LAMA2; (-) strand; PAM type: NRG; PAM sequence: AAG
ttcatatctgcctaatttca

SEQ ID NO: 60141 - DNA, 20 bp, Artificial Sequence
  Description of Artificial Sequence: Synthetic oligonucleotide
  Target: LAMA2; (-) strand; PAM type: NRG; PAM sequence: GGG
aaggtcaaacggctagtgga

SEQ ID NO: 60142 - DNA, 20 bp, Artificial Sequence
  Description of Artificial Sequence: Synthetic oligonucleotide
  Target: LAMA2; (-) strand; PAM type: NRG; PAM sequence: AGG
caaggtcaaacggctagtgg

SEQ ID NO: 60143 - DNA, 20 bp, Artificial Sequence
  Description of Artificial Sequence: Synthetic oligonucleotide
  Target: LAMA2; (-) strand; PAM type: NRG; PAM sequence: GAG
acaaggtcaaacggctagtg

SEQ ID NO: 60144 - DNA, 20 bp, Artificial Sequence
  Description of Artificial Sequence: Synthetic oligonucleotide
  Target: LAMA2; (-) strand; PAM type: NRG; PAM sequence: TGG
gtacaaggtcaaacggctag

SEQ ID NO: 60145 - DNA, 20 bp, Artificial Sequence
  Description of Artificial Sequence: Synthetic oligonucleotide
  Target: LAMA2; (-) strand; PAM type: NRG; PAM sequence: TAG
cttgtacaaggtcaaacggc

SEQ ID NO: 60146 - DNA, 20 bp, Artificial Sequence
  Description of Artificial Sequence: Synthetic oligonucleotide
  Target: LAMA2; (-) strand; PAM type: NRG; PAM sequence: CGG
gtcacttgtacaaggtcaaa

SEQ ID NO: 60147 - DNA, 20 bp, Artificial Sequence
  Description of Artificial Sequence: Synthetic oligonucleotide
  Target: LAMA2; (-) strand; PAM type: NRG; PAM sequence: AGG
gagttaaagtcacttgtaca

SEQ ID NO: 60148 - DNA, 20 bp, Artificial Sequence
  Description of Artificial Sequence: Synthetic oligonucleotide
  Target: LAMA2; (-) strand; PAM type: NRG; PAM sequence: AAG
tgagttaaagtcacttgtac

SEQ ID NO: 60149 - DNA, 20 bp, Artificial Sequence
  Description of Artificial Sequence: Synthetic oligonucleotide
  Target: LAMA2; (-) strand; PAM type: NRG; PAM sequence: AAG
taataataaaaaatgagtta

SEQ ID NO: 60150 - DNA, 20 bp, Artificial Sequence
  Description of Artificial Sequence: Synthetic oligonucleotide
  Target: LAMA2; (-) strand; PAM type: NRG; PAM sequence: GAG
tttttttaataataaaaaat

SEQ ID NO: 60151 - DNA, 20 bp, Artificial Sequence
  Description of Artificial Sequence: Synthetic oligonucleotide
  Target: LAMA2; (-) strand; PAM type: NRG; PAM sequence: AAG
tcctcttgaaaaatcttaca

SEQ ID NO: 60152 - DNA, 20 bp, Artificial Sequence
  Description of Artificial Sequence: Synthetic oligonucleotide
  Target: LAMA2; (-) strand; PAM type: NRG; PAM sequence: AGG
tctatgacaggccctctaac

SEQ ID NO: 60153 - DNA, 20 bp, Artificial Sequence
  Description of Artificial Sequence: Synthetic oligonucleotide
  Target: LAMA2; (-) strand; PAM type: NRG; PAM sequence: CAG
atctatgacaggccctctaa

SEQ ID NO: 60154 - DNA, 20 bp, Artificial Sequence
  Description of Artificial Sequence: Synthetic oligonucleotide
  Target: LAMA2; (-) strand; PAM type: NRG; PAM sequence: AGG
attgaggatttatctatgac

SEQ ID NO: 60155 - DNA, 20 bp, Artificial Sequence
  Description of Artificial Sequence: Synthetic oligonucleotide
  Target: LAMA2; (-) strand; PAM type: NRG; PAM sequence: CAG
cattgaggatttatctatga

SEQ ID NO: 60156 - DNA, 20 bp, Artificial Sequence
  Description of Artificial Sequence: Synthetic oligonucleotide
  Target: LAMA2; (-) strand; PAM type: NRG; PAM sequence: AGG
gtaacagttacccttcattg

SEQ ID NO: 60157 - DNA, 20 bp, Artificial Sequence
  Description of Artificial Sequence: Synthetic oligonucleotide
  Target: LAMA2; (-) strand; PAM type: NRG; PAM sequence: GAG
agtaacagttacccttcatt

SEQ ID NO: 60158 - DNA, 20 bp, Artificial Sequence
  Description of Artificial Sequence: Synthetic oligonucleotide
  Target: LAMA2; (-) strand; PAM type: NRG; PAM sequence: CAG
ttatatcttccttttagtaa

SEQ ID NO: 60159 - DNA, 20 bp, Artificial Sequence
  Description of Artificial Sequence: Synthetic oligonucleotide
  Target: LAMA2; (-) strand; PAM type: NRG; PAM sequence: TAG
ctctccttatatcttccttt

SEQ ID NO: 60160 - DNA, 20 bp, Artificial Sequence
  Description of Artificial Sequence: Synthetic oligonucleotide
  Target: LAMA2; (-) strand; PAM type: NRG; PAM sequence: TAG
ccagggtttttatttggaag

SEQ ID NO: 60161 - DNA, 20 bp, Artificial Sequence
  Description of Artificial Sequence: Synthetic oligonucleotide
  Target: LAMA2; (-) strand; PAM type: NRG; PAM sequence: AAG
gaaccagggtttttatttgg

SEQ ID NO: 60162 - DNA, 20 bp, Artificial Sequence
  Description of Artificial Sequence: Synthetic oligonucleotide
  Target: LAMA2; (-) strand; PAM type: NRG; PAM sequence: TGG
attgaaccagggtttttatt

SEQ ID NO: 60163 - DNA, 20 bp, Artificial Sequence
  Description of Artificial Sequence: Synthetic oligonucleotide
  Target: LAMA2; (-) strand; PAM type: NRG; PAM sequence: GGG
catgctccaatattgaacca

SEQ ID NO: 60164 - DNA, 20 bp, Artificial Sequence
  Description of Artificial Sequence: Synthetic oligonucleotide
  Target: LAMA2; (-) strand; PAM type: NRG; PAM sequence: AGG
ccatgctccaatattgaacc

SEQ ID NO: 60165 - DNA, 20 bp, Artificial Sequence
  Description of Artificial Sequence: Synthetic oligonucleotide
  Target: LAMA2; (-) strand; PAM type: NRG; PAM sequence: CAG
cccatgctccaatattgaac

SEQ ID NO: 60166 - DNA, 20 bp, Artificial Sequence
  Description of Artificial Sequence: Synthetic oligonucleotide
  Target: LAMA2; (-) strand; PAM type: NRG; PAM sequence: GGG
gaggatgcttctcttaaagg

SEQ ID NO: 60167 - DNA, 20 bp, Artificial Sequence
  Description of Artificial Sequence: Synthetic oligonucleotide
  Target: LAMA2; (-) strand; PAM type: NRG; PAM sequence: GGG
ggaggatgcttctcttaaag

SEQ ID NO: 60168 - DNA, 20 bp, Artificial Sequence
  Description of Artificial Sequence: Synthetic oligonucleotide
  Target: LAMA2; (-) strand; PAM type: NRG; PAM sequence: GGG
gggaggatgcttctcttaaa

SEQ ID NO: 60169 - DNA, 20 bp, Artificial Sequence
  Description of Artificial Sequence: Synthetic oligonucleotide
  Target: LAMA2; (-) strand; PAM type: NRG; PAM sequence: AGG
tgggaggatgcttctcttaa

SEQ ID NO: 60170 - DNA, 20 bp, Artificial Sequence
  Description of Artificial Sequence: Synthetic oligonucleotide
  Target: LAMA2; (-) strand; PAM type: NRG; PAM sequence: AAG
ctgggaggatgcttctctta

SEQ ID NO: 60171 - DNA, 20 bp, Artificial Sequence
  Description of Artificial Sequence: Synthetic oligonucleotide
  Target: LAMA2; (-) strand; PAM type: NRG; PAM sequence: AGG
attttggacattatgctggg

SEQ ID NO: 60172 - DNA, 20 bp, Artificial Sequence
  Description of Artificial Sequence: Synthetic oligonucleotide
  Target: LAMA2; (-) strand; PAM type: NRG; PAM sequence: GAG
cattttggacattatgctgg

SEQ ID NO: 60173 - DNA, 20 bp, Artificial Sequence
  Description of Artificial Sequence: Synthetic oligonucleotide
  Target: LAMA2; (-) strand; PAM type: NRG; PAM sequence: GGG
ttcattttggacattatgct

SEQ ID NO: 60174 - DNA, 20 bp, Artificial Sequence
  Description of Artificial Sequence: Synthetic oligonucleotide
  Target: LAMA2; (-) strand; PAM type: NRG; PAM sequence: TGG
tttcattttggacattatgc

SEQ ID NO: 60175 - DNA, 20 bp, Artificial Sequence
  Description of Artificial Sequence: Synthetic oligonucleotide
  Target: LAMA2; (-) strand; PAM type: NRG; PAM sequence: TGG
caaatgaaatattttcattt

SEQ ID NO: 60176 - DNA, 20 bp, Artificial Sequence
  Description of Artificial Sequence: Synthetic oligonucleotide
  Target: LAMA2; (-) strand; PAM type: NRG; PAM sequence: CGG
agtggactggcttgataagt

SEQ ID NO: 60177 - DNA, 20 bp, Artificial Sequence
  Description of Artificial Sequence: Synthetic oligonucleotide
  Target: LAMA2; (-) strand; PAM type: NRG; PAM sequence: AAG
gttcagtggactggcttgat

SEQ ID NO: 60178 - DNA, 20 bp, Artificial Sequence
  Description of Artificial Sequence: Synthetic oligonucleotide
  Target: LAMA2; (-) strand; PAM type: NRG; PAM sequence: TGG
caagctacagttcagtggac

SEQ ID NO: 60179 - DNA, 20 bp, Artificial Sequence
  Description of Artificial Sequence: Synthetic oligonucleotide
  Target: LAMA2; (-) strand; PAM type: NRG; PAM sequence: TGG
gactccaagctacagttcag

SEQ ID NO: 60180 - DNA, 20 bp, Artificial Sequence
  Description of Artificial Sequence: Synthetic oligonucleotide
  Target: LAMA2; (-) strand; PAM type: NRG; PAM sequence: CAG
tcagactccaagctacagtt

SEQ ID NO: 60181 - DNA, 20 bp, Artificial Sequence
  Description of Artificial Sequence: Synthetic oligonucleotide
  Target: LAMA2; (-) strand; PAM type: NRG; PAM sequence: CAG
gtaactcagactccaagcta

SEQ ID NO: 60182 - DNA, 20 bp, Artificial Sequence
  Description of Artificial Sequence: Synthetic oligonucleotide
  Target: LAMA2; (-) strand; PAM type: NRG; PAM sequence: AAG
tactttgtaactcagactcc

SEQ ID NO: 60183 - DNA, 20 bp, Artificial Sequence
  Description of Artificial Sequence: Synthetic oligonucleotide
  Target: LAMA2; (-) strand; PAM type: NRG; PAM sequence: CAG
ctatagattactttgtaact

SEQ ID NO: 60184 - DNA, 20 bp, Artificial Sequence
  Description of Artificial Sequence: Synthetic oligonucleotide
  Target: LAMA2; (-) strand; PAM type: NRG; PAM sequence: TAG
attactccctcagatcacta

SEQ ID NO: 60185 - DNA, 20 bp, Artificial Sequence
  Description of Artificial Sequence: Synthetic oligonucleotide
  Target: LAMA2; (-) strand; PAM type: NRG; PAM sequence: CAG
tggagtttgtattactccct

SEQ ID NO: 60186 - DNA, 20 bp, Artificial Sequence
  Description of Artificial Sequence: Synthetic oligonucleotide
  Target: LAMA2; (-) strand; PAM type: NRG; PAM sequence: GAG
attctacagtcattaacttg

SEQ ID NO: 60187 - DNA, 20 bp, Artificial Sequence
  Description of Artificial Sequence: Synthetic oligonucleotide
  Target: LAMA2; (-) strand; PAM type: NRG; PAM sequence: TGG
ttattctacagtcattaact

SEQ ID NO: 60188 - DNA, 20 bp, Artificial Sequence
  Description of Artificial Sequence: Synthetic oligonucleotide
  Target: LAMA2; (-) strand; PAM type: NRG; PAM sequence: CAG
tatcagtagaatttattcta

SEQ ID NO: 60189 - DNA, 20 bp, Artificial Sequence
  Description of Artificial Sequence: Synthetic oligonucleotide
  Target: LAMA2; (-) strand; PAM type: NRG; PAM sequence: TAG
cactagactgcaaatatcag

SEQ ID NO: 60190 - DNA, 20 bp, Artificial Sequence
  Description of Artificial Sequence: Synthetic oligonucleotide
  Target: LAMA2; (-) strand; PAM type: NRG; PAM sequence: CAG
tgacactagactgcaaatat

SEQ ID NO: 60191 - DNA, 20 bp, Artificial Sequence
  Description of Artificial Sequence: Synthetic oligonucleotide
  Target: LAMA2; (-) strand; PAM type: NRG; PAM sequence: TAG
agaattagccttgatgacac

SEQ ID NO: 60192 - DNA, 20 bp, Artificial Sequence
  Description of Artificial Sequence: Synthetic oligonucleotide
  Target: LAMA2; (-) strand; PAM type: NRG; PAM sequence: TAG
ttgcctctttaaaggagaat

SEQ ID NO: 60193 - DNA, 20 bp, Artificial Sequence
  Description of Artificial Sequence: Synthetic oligonucleotide
  Target: LAMA2; (-) strand; PAM type: NRG; PAM sequence: GAG
aagcttttgcctctttaaag

SEQ ID NO: 60194 - DNA, 20 bp, Artificial Sequence
  Description of Artificial Sequence: Synthetic oligonucleotide
  Target: LAMA2; (-) strand; PAM type: NRG; PAM sequence: AGG
agaagcttttgcctctttaa

SEQ ID NO: 60195 - DNA, 20 bp, Artificial Sequence
  Description of Artificial Sequence: Synthetic oligonucleotide
  Target: LAMA2; (-) strand; PAM type: NRG; PAM sequence: AAG
aagaagcttttgcctcttta

SEQ ID NO: 60196 - DNA, 20 bp, Artificial Sequence
  Description of Artificial Sequence: Synthetic oligonucleotide
  Target: LAMA2; (-) strand; PAM type: NRG; PAM sequence: AAG
acagttttggggacaataag

SEQ ID NO: 60197 - DNA, 20 bp, Artificial Sequence
  Description of Artificial Sequence: Synthetic oligonucleotide
  Target: LAMA2; (-) strand; PAM type: NRG; PAM sequence: AAG
tcaacagttttggggacaat

SEQ ID NO: 60198 - DNA, 20 bp, Artificial Sequence
  Description of Artificial Sequence: Synthetic oligonucleotide
  Target: LAMA2; (-) strand; PAM type: NRG; PAM sequence: GGG
atactatatcaacagttttg

SEQ ID NO: 60199 - DNA, 20 bp, Artificial Sequence
  Description of Artificial Sequence: Synthetic oligonucleotide
  Target: LAMA2; (-) strand; PAM type: NRG; PAM sequence: GGG
catactatatcaacagtttt

SEQ ID NO: 60200 - DNA, 20 bp, Artificial Sequence
  Description of Artificial Sequence: Synthetic oligonucleotide
  Target: LAMA2; (-) strand; PAM type: NRG; PAM sequence: TGG
acatactatatcaacagttt

SEQ ID NO: 60201 - DNA, 20 bp, Artificial Sequence
  Description of Artificial Sequence: Synthetic oligonucleotide
  Target: LAMA2; (-) strand; PAM type: NRG; PAM sequence: CAG
tgagttacatactatatcaa

SEQ ID NO: 60202 - DNA, 20 bp, Artificial Sequence
  Description of Artificial Sequence: Synthetic oligonucleotide
  Target: LAMA2; (-) strand; PAM type: NRG; PAM sequence: GAG
caacatttctgtgacatgct

SEQ ID NO: 60203 - DNA, 20 bp, Artificial Sequence
  Description of Artificial Sequence: Synthetic oligonucleotide
  Target: LAMA2; (-) strand; PAM type: NRG; PAM sequence: TGG
tttaaacaaaatagccaaag

SEQ ID NO: 60204 - DNA, 20 bp, Artificial Sequence
  Description of Artificial Sequence: Synthetic oligonucleotide
  Target: LAMA2; (-) strand; PAM type: NRG; PAM sequence: AAG
ttttttaaacaaaatagcca

SEQ ID NO: 60205 - DNA, 20 bp, Artificial Sequence
  Description of Artificial Sequence: Synthetic oligonucleotide
  Target: LAMA2; (-) strand; PAM type: NRG; PAM sequence: TAG
aaagttttttttaaacaaaa

SEQ ID NO: 60206 - DNA, 20 bp, Artificial Sequence
  Description of Artificial Sequence: Synthetic oligonucleotide
  Target: LAMA2; (-) strand; PAM type: NRG; PAM sequence: AAG
aataaataaaaagggtagaa

SEQ ID NO: 60207 - DNA, 20 bp, Artificial Sequence
  Description of Artificial Sequence: Synthetic oligonucleotide
  Target: LAMA2; (-) strand; PAM type: NRG; PAM sequence: TAG
aaataaataaataaaaaggg

SEQ ID NO: 60208 - DNA, 20 bp, Artificial Sequence
  Description of Artificial Sequence: Synthetic oligonucleotide
  Target: LAMA2; (-) strand; PAM type: NRG; PAM sequence: GGG
taaaaataaataaataaaaa

SEQ ID NO: 60209 - DNA, 20 bp, Artificial Sequence
  Description of Artificial Sequence: Synthetic oligonucleotide
  Target: LAMA2; (-) strand; PAM type: NRG; PAM sequence: AGG
ttaaaaataaataaataaaa

SEQ ID NO: 60210 - DNA, 20 bp, Artificial Sequence
  Description of Artificial Sequence: Synthetic oligonucleotide
  Target: LAMA2; (-) strand; PAM type: NRG; PAM sequence: AAG
tttaaaaataaataaataaa

SEQ ID NO: 60211 - DNA, 20 bp, Artificial Sequence
  Description of Artificial Sequence: Synthetic oligonucleotide
  Target: LAMA2; (-) strand; PAM type: NRG; PAM sequence: TAG
cttggtttacttatgaaata

SEQ ID NO: 60212 - DNA, 20 bp, Artificial Sequence
  Description of Artificial Sequence: Synthetic oligonucleotide
  Target: LAMA2; (-) strand; PAM type: NRG; PAM sequence: TGG
aaatgccgagtgttgaggct

SEQ ID NO: 60213 - DNA, 20 bp, Artificial Sequence
  Description of Artificial Sequence: Synthetic oligonucleotide
  Target: LAMA2; (-) strand; PAM type: NRG; PAM sequence: AGG
gcctgaaatgccgagtgttg

SEQ ID NO: 60214 - DNA, 20 bp, Artificial Sequence
  Description of Artificial Sequence: Synthetic oligonucleotide
  Target: LAMA2; (-) strand; PAM type: NRG; PAM sequence: GAG
ggcctgaaatgccgagtgtt

SEQ ID NO: 60215 - DNA, 20 bp, Artificial Sequence
  Description of Artificial Sequence: Synthetic oligonucleotide
  Target: LAMA2; (-) strand; PAM type: NRG; PAM sequence: GAG
catacctggcctgaaatgcc

SEQ ID NO: 60216 - DNA, 20 bp, Artificial Sequence
  Description of Artificial Sequence: Synthetic oligonucleotide
  Target: LAMA2; (-) strand; PAM type: NRG; PAM sequence: TGG
cctgtgtgagccaccatacc

SEQ ID NO: 60217 - DNA, 20 bp, Artificial Sequence
  Description of Artificial Sequence: Synthetic oligonucleotide
  Target: LAMA2; (-) strand; PAM type: NRG; PAM sequence: GAG
tgattaccacacacctgtgt

SEQ ID NO: 60218 - DNA, 20 bp, Artificial Sequence
  Description of Artificial Sequence: Synthetic oligonucleotide
  Target: LAMA2; (-) strand; PAM type: NRG; PAM sequence: AAG
cctcctgcacaagcctccca

SEQ ID NO: 60219 - DNA, 20 bp, Artificial Sequence
  Description of Artificial Sequence: Synthetic oligonucleotide
  Target: LAMA2; (-) strand; PAM type: NRG; PAM sequence: AAG
ctcaagcgatcctcctgcac

SEQ ID NO: 60220 - DNA, 20 bp, Artificial Sequence
  Description of Artificial Sequence: Synthetic oligonucleotide
  Target: LAMA2; (-) strand; PAM type: NRG; PAM sequence: AAG
agcctcgaactcctggcctc

SEQ ID NO: 60221 - DNA, 20 bp, Artificial Sequence
  Description of Artificial Sequence: Synthetic oligonucleotide
  Target: LAMA2; (-) strand; PAM type: NRG; PAM sequence: TGG
acaggttagcctcgaactcc

SEQ ID NO: 60222 - DNA, 20 bp, Artificial Sequence
  Description of Artificial Sequence: Synthetic oligonucleotide
  Target: LAMA2; (-) strand; PAM type: NRG; PAM sequence: TAG
tctccccatgttgcacaggt

SEQ ID NO: 60223 - DNA, 20 bp, Artificial Sequence
  Description of Artificial Sequence: Synthetic oligonucleotide
  Target: LAMA2; (-) strand; PAM type: NRG; PAM sequence: AGG
agggtctccccatgttgcac

SEQ ID NO: 60224 - DNA, 20 bp, Artificial Sequence
  Description of Artificial Sequence: Synthetic oligonucleotide
  Target: LAMA2; (-) strand; PAM type: NRG; PAM sequence: CAG
cagggtctccccatgttgca

SEQ ID NO: 60225 - DNA, 20 bp, Artificial Sequence
  Description of Artificial Sequence: Synthetic oligonucleotide
  Target: LAMA2; (-) strand; PAM type: NRG; PAM sequence: GGG
tttcattttctctagaggca

SEQ ID NO: 60226 - DNA, 20 bp, Artificial Sequence
  Description of Artificial Sequence: Synthetic oligonucleotide
  Target: LAMA2; (-) strand; PAM type: NRG; PAM sequence: AGG
ttttcattttctctagaggc

SEQ ID NO: 60227 - DNA, 20 bp, Artificial Sequence
  Description of Artificial Sequence: Synthetic oligonucleotide
  Target: LAMA2; (-) strand; PAM type: NRG; PAM sequence: CAG
tttttcattttctctagagg

SEQ ID NO: 60228 - DNA, 20 bp, Artificial Sequence
  Description of Artificial Sequence: Synthetic oligonucleotide
  Target: LAMA2; (-) strand; PAM type: NRG; PAM sequence: AGG
ttatttttcattttctctag

SEQ ID NO: 60229 - DNA, 20 bp, Artificial Sequence
  Description of Artificial Sequence: Synthetic oligonucleotide
  Target: LAMA2; (-) strand; PAM type: NRG; PAM sequence: GAG
attatttttcattttctcta

SEQ ID NO: 60230 - DNA, 20 bp, Artificial Sequence
  Description of Artificial Sequence: Synthetic oligonucleotide
  Target: LAMA2; (-) strand; PAM type: NRG; PAM sequence: TAG
taattatttttcattttctc

SEQ ID NO: 60231 - DNA, 20 bp, Artificial Sequence
  Description of Artificial Sequence: Synthetic oligonucleotide
  Target: LAMA2; (-) strand; PAM type: NRG; PAM sequence: CAG
ctctcgagtatcagggacta

SEQ ID NO: 60232 - DNA, 20 bp, Artificial Sequence
  Description of Artificial Sequence: Synthetic oligonucleotide
  Target: LAMA2; (-) strand; PAM type: NRG; PAM sequence: GGG
cctcagcctctcgagtatca

SEQ ID NO: 60233 - DNA, 20 bp, Artificial Sequence
  Description of Artificial Sequence: Synthetic oligonucleotide
  Target: LAMA2; (-) strand; PAM type: NRG; PAM sequence: AGG
acctcagcctctcgagtatc

SEQ ID NO: 60234 - DNA, 20 bp, Artificial Sequence
  Description of Artificial Sequence: Synthetic oligonucleotide
  Target: LAMA2; (-) strand; PAM type: NRG; PAM sequence: CAG
cacctcagcctctcgagtat

SEQ ID NO: 60235 - DNA, 20 bp, Artificial Sequence
  Description of Artificial Sequence: Synthetic oligonucleotide
  Target: LAMA2; (-) strand; PAM type: NRG; PAM sequence: GAG
ttctcccacctcagcctctc

SEQ ID NO: 60236 - DNA, 20 bp, Artificial Sequence
  Description of Artificial Sequence: Synthetic oligonucleotide
  Target: LAMA2; (-) strand; PAM type: NRG; PAM sequence: CAG
ctcaagcaattctcccacct

SEQ ID NO: 60237 - DNA, 20 bp, Artificial Sequence
  Description of Artificial Sequence: Synthetic oligonucleotide
  Target: LAMA2; (-) strand; PAM type: NRG; PAM sequence: AAG
agcctcaaactcctggactc

SEQ ID NO: 60238 - DNA, 20 bp, Artificial Sequence
  Description of Artificial Sequence: Synthetic oligonucleotide
  Target: LAMA2; (-) strand; PAM type: NRG; PAM sequence: TGG
tcactgcagcctcaaactcc

SEQ ID NO: 60239 - DNA, 20 bp, Artificial Sequence
  Description of Artificial Sequence: Synthetic oligonucleotide
  Target: LAMA2; (-) strand; PAM type: NRG; PAM sequence: CAG
ggcaagatcatggctcactg

SEQ ID NO: 60240 - DNA, 20 bp, Artificial Sequence
  Description of Artificial Sequence: Synthetic oligonucleotide
  Target: LAMA2; (-) strand; PAM type: NRG; PAM sequence: TGG
ggagcacagtggcaagatca

SEQ ID NO: 60241 - DNA, 20 bp, Artificial Sequence
  Description of Artificial Sequence: Synthetic oligonucleotide
  Target: LAMA2; (-) strand; PAM type: NRG; PAM sequence: AAG
ccaggctggagcacagtggc

SEQ ID NO: 60242 - DNA, 20 bp, Artificial Sequence
  Description of Artificial Sequence: Synthetic oligonucleotide
  Target: LAMA2; (-) strand; PAM type: NRG; PAM sequence: TGG
ttgcccaggctggagcacag

SEQ ID NO: 60243 - DNA, 20 bp, Artificial Sequence
  Description of Artificial Sequence: Synthetic oligonucleotide
  Target: LAMA2; (-) strand; PAM type: NRG; PAM sequence: CAG
ccattgcccaggctggagca

SEQ ID NO: 60244 - DNA, 20 bp, Artificial Sequence
  Description of Artificial Sequence: Synthetic oligonucleotide
  Target: LAMA2; (-) strand; PAM type: NRG; PAM sequence: GAG
ttgctccattgcccaggctg

SEQ ID NO: 60245 - DNA, 20 bp, Artificial Sequence
  Description of Artificial Sequence: Synthetic oligonucleotide
  Target: LAMA2; (-) strand; PAM type: NRG; PAM sequence: TGG
tcttgctccattgcccaggc

SEQ ID NO: 60246 - DNA, 20 bp, Artificial Sequence
  Description of Artificial Sequence: Synthetic oligonucleotide
  Target: LAMA2; (-) strand; PAM type: NRG; PAM sequence: AGG
agggtcttgctccattgccc

SEQ ID NO: 60247 - DNA, 20 bp, Artificial Sequence
  Description of Artificial Sequence: Synthetic oligonucleotide
  Target: LAMA2; (-) strand; PAM type: NRG; PAM sequence: CAG
cagggtcttgctccattgcc

SEQ ID NO: 60248 - DNA, 20 bp, Artificial Sequence
  Description of Artificial Sequence: Synthetic oligonucleotide
  Target: LAMA2; (-) strand; PAM type: NRG; PAM sequence: GGG
tgttttcttttttcaagaca

SEQ ID NO: 60249 - DNA, 20 bp, Artificial Sequence
  Description of Artificial Sequence: Synthetic oligonucleotide
  Target: LAMA2; (-) strand; PAM type: NRG; PAM sequence: AGG
ttgttttcttttttcaagac

SEQ ID NO: 60250 - DNA, 20 bp, Artificial Sequence
  Description of Artificial Sequence: Synthetic oligonucleotide
  Target: LAMA2; (-) strand; PAM type: NRG; PAM sequence: CAG
tttgttttcttttttcaaga

SEQ ID NO: 60251 - DNA, 20 bp, Artificial Sequence
  Description of Artificial Sequence: Synthetic oligonucleotide
  Target: LAMA2; (-) strand; PAM type: NRG; PAM sequence: AAG
tgtttttgttttcttttttc

SEQ ID NO: 60252 - DNA, 20 bp, Artificial Sequence
  Description of Artificial Sequence: Synthetic oligonucleotide
  Target: LAMA2; (-) strand; PAM type: NRG; PAM sequence: TGG
aaatatgtttgaatttgaaa

SEQ ID NO: 60253 - DNA, 20 bp, Artificial Sequence
  Description of Artificial Sequence: Synthetic oligonucleotide
  Target: LAMA2; (-) strand; PAM type: NRG; PAM sequence: CAG
gtattttttcttttttaatt

SEQ ID NO: 60254 - DNA, 20 bp, Artificial Sequence
  Description of Artificial Sequence: Synthetic oligonucleotide
  Target: LAMA2; (-) strand; PAM type: NRG; PAM sequence: GAG
ctttttcatatacttaaaga

SEQ ID NO: 60255 - DNA, 20 bp, Artificial Sequence
  Description of Artificial Sequence: Synthetic oligonucleotide
  Target: LAMA2; (-) strand; PAM type: NRG; PAM sequence: GAG
tgctttttcatatacttaaa

SEQ ID NO: 60256 - DNA, 20 bp, Artificial Sequence
  Description of Artificial Sequence: Synthetic oligonucleotide
  Target: LAMA2; (-) strand; PAM type: NRG; PAM sequence: AAG
tttgctttttcatatactta

SEQ ID NO: 60257 - DNA, 20 bp, Artificial Sequence
  Description of Artificial Sequence: Synthetic oligonucleotide
  Target: LAMA2; (-) strand; PAM type: NRG; PAM sequence: AAG
aaatgtaatatactctagga

SEQ ID NO: 60258 - DNA, 20 bp, Artificial Sequence
  Description of Artificial Sequence: Synthetic oligonucleotide
  Target: LAMA2; (-) strand; PAM type: NRG; PAM sequence: AGG
gttaaaatgtaatatactct

SEQ ID NO: 60259 - DNA, 20 bp, Artificial Sequence
  Description of Artificial Sequence: Synthetic oligonucleotide
  Target: LAMA2; (-) strand; PAM type: NRG; PAM sequence: TAG
tgttaaaatgtaatatactc

SEQ ID NO: 60260 - DNA, 20 bp, Artificial Sequence
  Description of Artificial Sequence: Synthetic oligonucleotide
  Target: LAMA2; (-) strand; PAM type: NRG; PAM sequence: GAG
ccacttaactgaattttcaa

SEQ ID NO: 60261 - DNA, 20 bp, Artificial Sequence
  Description of Artificial Sequence: Synthetic oligonucleotide
  Target: LAMA2; (-) strand; PAM type: NRG; PAM sequence: AAG
gaccacttaactgaattttc

SEQ ID NO: 60262 - DNA, 20 bp, Artificial Sequence
  Description of Artificial Sequence: Synthetic oligonucleotide
  Target: LAMA2; (-) strand; PAM type: NRG; PAM sequence: TAG
atccagattaccacaagcac

SEQ ID NO: 60263 - DNA, 20 bp, Artificial Sequence
  Description of Artificial Sequence: Synthetic oligonucleotide
  Target: LAMA2; (-) strand; PAM type: NRG; PAM sequence: AAG
gctaacatccagattaccac

SEQ ID NO: 60264 - DNA, 20 bp, Artificial Sequence
  Description of Artificial Sequence: Synthetic oligonucleotide
  Target: LAMA2; (-) strand; PAM type: NRG; PAM sequence: CAG
tattcttgttagctaacatc

SEQ ID NO: 60265 - DNA, 20 bp, Artificial Sequence
  Description of Artificial Sequence: Synthetic oligonucleotide
  Target: LAMA2; (-) strand; PAM type: NRG; PAM sequence: TAG
gaattaatttttattcttgt

SEQ ID NO: 60266 - DNA, 20 bp, Artificial Sequence
  Description of Artificial Sequence: Synthetic oligonucleotide
  Target: LAMA2; (-) strand; PAM type: NRG; PAM sequence: TGG
tctttgctgttgataacgta

SEQ ID NO: 60267 - DNA, 20 bp, Artificial Sequence
  Description of Artificial Sequence: Synthetic oligonucleotide
  Target: LAMA2; (-) strand; PAM type: NRG; PAM sequence: TAG
aagcagtttcttatttatgg

SEQ ID NO: 60268 - DNA, 20 bp, Artificial Sequence
  Description of Artificial Sequence: Synthetic oligonucleotide
  Target: LAMA2; (-) strand; PAM type: NRG; PAM sequence: TGG
ctaaagcagtttcttattta

SEQ ID NO: 60269 - DNA, 20 bp, Artificial Sequence
  Description of Artificial Sequence: Synthetic oligonucleotide
  Target: LAMA2; (-) strand; PAM type: NRG; PAM sequence: CAG
tagatctccagcatctaaag

SEQ ID NO: 60270 - DNA, 20 bp, Artificial Sequence
  Description of Artificial Sequence: Synthetic oligonucleotide
  Target: LAMA2; (-) strand; PAM type: NRG; PAM sequence: AAG
atttagatctccagcatcta

SEQ ID NO: 60271 - DNA, 20 bp, Artificial Sequence
  Description of Artificial Sequence: Synthetic oligonucleotide
  Target: LAMA2; (-) strand; PAM type: NRG; PAM sequence: CAG
tcttaccaaatttagatctc

SEQ ID NO: 60272 - DNA, 20 bp, Artificial Sequence
  Description of Artificial Sequence: Synthetic oligonucleotide
  Target: LAMA2; (-) strand; PAM type: NRG; PAM sequence: TAG
aaattatatcttaccaaatt

SEQ ID NO: 60273 - DNA, 20 bp, Artificial Sequence
  Description of Artificial Sequence: Synthetic oligonucleotide
  Target: LAMA2; (-) strand; PAM type: NRG; PAM sequence: GGG
ttaacaaactagatccttga

SEQ ID NO: 60274 - DNA, 20 bp, Artificial Sequence
  Description of Artificial Sequence: Synthetic oligonucleotide
  Target: LAMA2; (-) strand; PAM type: NRG; PAM sequence: AGG
cttaacaaactagatccttg

SEQ ID NO: 60275 - DNA, 20 bp, Artificial Sequence
  Description of Artificial Sequence: Synthetic oligonucleotide
  Target: LAMA2; (-) strand; PAM type: NRG; PAM sequence: GAG
tcttaacaaactagatcctt

SEQ ID NO: 60276 - DNA, 20 bp, Artificial Sequence
  Description of Artificial Sequence: Synthetic oligonucleotide
  Target: LAMA2; (-) strand; PAM type: NRG; PAM sequence: TAG
gcctatgtttcttaacaaac

SEQ ID NO: 60277 - DNA, 20 bp, Artificial Sequence
  Description of Artificial Sequence: Synthetic oligonucleotide
  Target: LAMA2; (-) strand; PAM type: NRG; PAM sequence: AAG
ctttaattttttttgaattc

SEQ ID NO: 60278 - DNA, 20 bp, Artificial Sequence
  Description of Artificial Sequence: Synthetic oligonucleotide
  Target: LAMA2; (-) strand; PAM type: NRG; PAM sequence: AAG
aaattgctttctgaacaatc

SEQ ID NO: 60279 - DNA, 20 bp, Artificial Sequence
  Description of Artificial Sequence: Synthetic oligonucleotide
  Target: LAMA2; (-) strand; PAM type: NRG; PAM sequence: TAG
ctgtaaacatctcctaaata

SEQ ID NO: 60280 - DNA, 20 bp, Artificial Sequence
  Description of Artificial Sequence: Synthetic oligonucleotide
  Target: LAMA2; (-) strand; PAM type: NRG; PAM sequence: CAG
acttgtacaaaaagtgaact

SEQ ID NO: 60281 - DNA, 20 bp, Artificial Sequence
  Description of Artificial Sequence: Synthetic oligonucleotide
  Target: LAMA2; (-) strand; PAM type: NRG; PAM sequence: AAG
gactcttctacttgtacaaa

SEQ ID NO: 60282 - DNA, 20 bp, Artificial Sequence
  Description of Artificial Sequence: Synthetic oligonucleotide
  Target: LAMA2; (-) strand; PAM type: NRG; PAM sequence: AAG
tattatcactattaatataa

SEQ ID NO: 60283 - DNA, 20 bp, Artificial Sequence
  Description of Artificial Sequence: Synthetic oligonucleotide
  Target: LAMA2; (-) strand; PAM type: NRG; PAM sequence: CAG
agtacatggaagaaatccaa

SEQ ID NO: 60284 - DNA, 20 bp, Artificial Sequence
  Description of Artificial Sequence: Synthetic oligonucleotide
  Target: LAMA2; (-) strand; PAM type: NRG; PAM sequence: AAG
atatctaggacagtacatgg

SEQ ID NO: 60285 - DNA, 20 bp, Artificial Sequence
  Description of Artificial Sequence: Synthetic oligonucleotide
  Target: LAMA2; (-) strand; PAM type: NRG; PAM sequence: TGG
aaaatatctaggacagtaca

SEQ ID NO: 60286 - DNA, 20 bp, Artificial Sequence
  Description of Artificial Sequence: Synthetic oligonucleotide
  Target: LAMA2; (-) strand; PAM type: NRG; PAM sequence: CAG
aataagtaaaatatctagga

SEQ ID NO: 60287 - DNA, 20 bp, Artificial Sequence
  Description of Artificial Sequence: Synthetic oligonucleotide
  Target: LAMA2; (-) strand; PAM type: NRG; PAM sequence: AGG
taggaataagtaaaatatct

SEQ ID NO: 60288 - DNA, 20 bp, Artificial Sequence
  Description of Artificial Sequence: Synthetic oligonucleotide
  Target: LAMA2; (-) strand; PAM type: NRG; PAM sequence: TAG
ctaggaataagtaaaatatc

SEQ ID NO: 60289 - DNA, 20 bp, Artificial Sequence
  Description of Artificial Sequence: Synthetic oligonucleotide
  Target: LAMA2; (-) strand; PAM type: NRG; PAM sequence: AAG
ttctataaaattctaggaat

SEQ ID NO: 60290 - DNA, 20 bp, Artificial Sequence
  Description of Artificial Sequence: Synthetic oligonucleotide
  Target: LAMA2; (-) strand; PAM type: NRG; PAM sequence: AGG
gacctattctataaaattct

SEQ ID NO: 60291 - DNA, 20 bp, Artificial Sequence
  Description of Artificial Sequence: Synthetic oligonucleotide
  Target: LAMA2; (-) strand; PAM type: NRG; PAM sequence: TAG
tgacctattctataaaattc

SEQ ID NO: 60292 - DNA, 20 bp, Artificial Sequence
  Description of Artificial Sequence: Synthetic oligonucleotide
  Target: LAMA2; (-) strand; PAM type: NRG; PAM sequence: AAG
ctgcaactgaaggctaacat

SEQ ID NO: 60293 - DNA, 20 bp, Artificial Sequence
  Description of Artificial Sequence: Synthetic oligonucleotide
  Target: LAMA2; (-) strand; PAM type: NRG; PAM sequence: AGG
tttctatcacctgcaactga

SEQ ID NO: 60294 - DNA, 20 bp, Artificial Sequence
  Description of Artificial Sequence: Synthetic oligonucleotide
  Target: LAMA2; (-) strand; PAM type: NRG; PAM sequence: AAG
atttctatcacctgcaactg

SEQ ID NO: 60295 - DNA, 20 bp, Artificial Sequence
  Description of Artificial Sequence: Synthetic oligonucleotide
  Target: LAMA2; (-) strand; PAM type: NRG; PAM sequence: TGG
gtgtcaatagatgctcaatt

SEQ ID NO: 60296 - DNA, 20 bp, Artificial Sequence
  Description of Artificial Sequence: Synthetic oligonucleotide
  Target: LAMA2; (-) strand; PAM type: NRG; PAM sequence: TAG
cagatcaatagaggtgtcaa

SEQ ID NO: 60297 - DNA, 20 bp, Artificial Sequence
  Description of Artificial Sequence: Synthetic oligonucleotide
  Target: LAMA2; (-) strand; PAM type: NRG; PAM sequence: AGG
ttccctggacagatcaatag

SEQ ID NO: 60298 - DNA, 20 bp, Artificial Sequence
  Description of Artificial Sequence: Synthetic oligonucleotide
  Target: LAMA2; (-) strand; PAM type: NRG; PAM sequence: GAG
cttccctggacagatcaata

SEQ ID NO: 60299 - DNA, 20 bp, Artificial Sequence
  Description of Artificial Sequence: Synthetic oligonucleotide
  Target: LAMA2; (-) strand; PAM type: NRG; PAM sequence: TAG
tacttccctggacagatcaa

SEQ ID NO: 60300 - DNA, 20 bp, Artificial Sequence
  Description of Artificial Sequence: Synthetic oligonucleotide
  Target: LAMA2; (-) strand; PAM type: NRG; PAM sequence: CAG
ctcctctgtacttccctgga

SEQ ID NO: 60301 - DNA, 20 bp, Artificial Sequence
  Description of Artificial Sequence: Synthetic oligonucleotide
  Target: LAMA2; (-) strand; PAM type: NRG; PAM sequence: TGG
aggtctcctctgtacttccc

SEQ ID NO: 60302 - DNA, 20 bp, Artificial Sequence
  Description of Artificial Sequence: Synthetic oligonucleotide
  Target: LAMA2; (-) strand; PAM type: NRG; PAM sequence: AGG
ggtcaacagatggctaaggc

SEQ ID NO: 60303 - DNA, 20 bp, Artificial Sequence
  Description of Artificial Sequence: Synthetic oligonucleotide
  Target: LAMA2; (-) strand; PAM type: NRG; PAM sequence: CAG
tggtcaacagatggctaagg

SEQ ID NO: 60304 - DNA, 20 bp, Artificial Sequence
  Description of Artificial Sequence: Synthetic oligonucleotide
  Target: LAMA2; (-) strand; PAM type: NRG; PAM sequence: AGG
ctctggtcaacagatggcta

SEQ ID NO: 60305 - DNA, 20 bp, Artificial Sequence
  Description of Artificial Sequence: Synthetic oligonucleotide
  Target: LAMA2; (-) strand; PAM type: NRG; PAM sequence: AAG
cctctggtcaacagatggct

SEQ ID NO: 60306 - DNA, 20 bp, Artificial Sequence
  Description of Artificial Sequence: Synthetic oligonucleotide
  Target: LAMA2; (-) strand; PAM type: NRG; PAM sequence: TGG
ttggtcctctggtcaacaga

SEQ ID NO: 60307 - DNA, 20 bp, Artificial Sequence
  Description of Artificial Sequence: Synthetic oligonucleotide
  Target: LAMA2; (-) strand; PAM type: NRG; PAM sequence: CAG
gtgattggtcctctggtcaa

SEQ ID NO: 60308 - DNA, 20 bp, Artificial Sequence
  Description of Artificial Sequence: Synthetic oligonucleotide
  Target: LAMA2; (-) strand; PAM type: NRG; PAM sequence: TGG
tgttgatgtgattggtcctc

SEQ ID NO: 60309 - DNA, 20 bp, Artificial Sequence
  Description of Artificial Sequence: Synthetic oligonucleotide
  Target: LAMA2; (-) strand; PAM type: NRG; PAM sequence: TGG
gagagtcctgttgatgtgat

SEQ ID NO: 60310 - DNA, 20 bp, Artificial Sequence
  Description of Artificial Sequence: Synthetic oligonucleotide
  Target: LAMA2; (-) strand; PAM type: NRG; PAM sequence: GAG
agcttagaagagagagggga

SEQ ID NO: 60311 - DNA, 20 bp, Artificial Sequence
  Description of Artificial Sequence: Synthetic oligonucleotide
  Target: LAMA2; (-) strand; PAM type: NRG; PAM sequence: GAG
aaagcttagaagagagaggg

SEQ ID NO: 60312 - DNA, 20 bp, Artificial Sequence
  Description of Artificial Sequence: Synthetic oligonucleotide
  Target: LAMA2; (-) strand; PAM type: NRG; PAM sequence: GGG
ggaaagcttagaagagagag

SEQ ID NO: 60313 - DNA, 20 bp, Artificial Sequence
  Description of Artificial Sequence: Synthetic oligonucleotide
  Target: LAMA2; (-) strand; PAM type: NRG; PAM sequence: GGG
aggaaagcttagaagagaga

SEQ ID NO: 60314 - DNA, 20 bp, Artificial Sequence
  Description of Artificial Sequence: Synthetic oligonucleotide
  Target: LAMA2; (-) strand; PAM type: NRG; PAM sequence: AGG
gaggaaagcttagaagagag

SEQ ID NO: 60315 - DNA, 20 bp, Artificial Sequence
  Description of Artificial Sequence: Synthetic oligonucleotide
  Target: LAMA2; (-) strand; PAM type: NRG; PAM sequence: GAG
agaggaaagcttagaagaga

SEQ ID NO: 60316 - DNA, 20 bp, Artificial Sequence
  Description of Artificial Sequence: Synthetic oligonucleotide
  Target: LAMA2; (-) strand; PAM type: NRG; PAM sequence: GAG
aaagaggaaagcttagaaga

SEQ ID NO: 60317 - DNA, 20 bp, Artificial Sequence
  Description of Artificial Sequence: Synthetic oligonucleotide
  Target: LAMA2; (-) strand; PAM type: NRG; PAM sequence: GAG
acaaagaggaaagcttagaa

SEQ ID NO: 60318 - DNA, 20 bp, Artificial Sequence
  Description of Artificial Sequence: Synthetic oligonucleotide
  Target: LAMA2; (-) strand; PAM type: NRG; PAM sequence: AAG
caacaaagaggaaagcttag

SEQ ID NO: 60319 - DNA, 20 bp, Artificial Sequence
  Description of Artificial Sequence: Synthetic oligonucleotide
  Target: LAMA2; (-) strand; PAM type: NRG; PAM sequence: TAG
agacaacaaagaggaaagct

SEQ ID NO: 60320 - DNA, 20 bp, Artificial Sequence
  Description of Artificial Sequence: Synthetic oligonucleotide
  Target: LAMA2; (-) strand; PAM type: NRG; PAM sequence: AAG
aataaagacaacaaagagga

SEQ ID NO: 60321 - DNA, 20 bp, Artificial Sequence
  Description of Artificial Sequence: Synthetic oligonucleotide
  Target: LAMA2; (-) strand; PAM type: NRG; PAM sequence: AGG
tgaaaataaagacaacaaag

SEQ ID NO: 60322 - DNA, 20 bp, Artificial Sequence
  Description of Artificial Sequence: Synthetic oligonucleotide
  Target: LAMA2; (-) strand; PAM type: NRG; PAM sequence: GAG
gtgaaaataaagacaacaaa

SEQ ID NO: 60323 - DNA, 20 bp, Artificial Sequence
  Description of Artificial Sequence: Synthetic oligonucleotide
  Target: LAMA2; (-) strand; PAM type: NRG; PAM sequence: AAG
tagtgaaaataaagacaaca

SEQ ID NO: 60324 - DNA, 20 bp, Artificial Sequence
  Description of Artificial Sequence: Synthetic oligonucleotide
  Target: LAMA2; (-) strand; PAM type: NRG; PAM sequence: AAG
agaaaaccctagtgaaaata

SEQ ID NO: 60325 - DNA, 20 bp, Artificial Sequence
  Description of Artificial Sequence: Synthetic oligonucleotide
  Target: LAMA2; (-) strand; PAM type: NRG; PAM sequence: TAG
gcaccttacagagaaaaccc

SEQ ID NO: 60326 - DNA, 20 bp, Artificial Sequence
  Description of Artificial Sequence: Synthetic oligonucleotide
  Target: LAMA2; (-) strand; PAM type: NRG; PAM sequence: GAG
gccattttaggcaccttaca

SEQ ID NO: 60327 - DNA, 20 bp, Artificial Sequence
  Description of Artificial Sequence: Synthetic oligonucleotide
  Target: LAMA2; (-) strand; PAM type: NRG; PAM sequence: CAG
tagccattttaggcacctta

SEQ ID NO: 60328 - DNA, 20 bp, Artificial Sequence
  Description of Artificial Sequence: Synthetic oligonucleotide
  Target: LAMA2; (-) strand; PAM type: NRG; PAM sequence: AGG
tagctactagtagccatttt

SEQ ID NO: 60329 - DNA, 20 bp, Artificial Sequence
  Description of Artificial Sequence: Synthetic oligonucleotide
  Target: LAMA2; (-) strand; PAM type: NRG; PAM sequence: TAG
gtagctactagtagccattt

SEQ ID NO: 60330 - DNA, 20 bp, Artificial Sequence
  Description of Artificial Sequence: Synthetic oligonucleotide
  Target: LAMA2; (-) strand; PAM type: NRG; PAM sequence: TAG
cctaaacctgtagctactag

SEQ ID NO: 60331 - DNA, 20 bp, Artificial Sequence
  Description of Artificial Sequence: Synthetic oligonucleotide
  Target: LAMA2; (-) strand; PAM type: NRG; PAM sequence: TAG
ggtcctaaacctgtagctac

SEQ ID NO: 60332 - DNA, 20 bp, Artificial Sequence
  Description of Artificial Sequence: Synthetic oligonucleotide
  Target: LAMA2; (-) strand; PAM type: NRG; PAM sequence: TAG
aggaccaggtcctaaacctg

SEQ ID NO: 60333 - DNA, 20 bp, Artificial Sequence
  Description of Artificial Sequence: Synthetic oligonucleotide
  Target: LAMA2; (-) strand; PAM type: NRG; PAM sequence: AGG
gatttaaactgctaaggacc

SEQ ID NO: 60334 - DNA, 20 bp, Artificial Sequence
  Description of Artificial Sequence: Synthetic oligonucleotide
  Target: LAMA2; (-) strand; PAM type: NRG; PAM sequence: CAG
cgatttaaactgctaaggac

SEQ ID NO: 60335 - DNA, 20 bp, Artificial Sequence
  Description of Artificial Sequence: Synthetic oligonucleotide
  Target: LAMA2; (-) strand; PAM type: NRG; PAM sequence: AGG
tcctccgatttaaactgcta

SEQ ID NO: 60336 - DNA, 20 bp, Artificial Sequence
  Description of Artificial Sequence: Synthetic oligonucleotide
  Target: LAMA2; (-) strand; PAM type: NRG; PAM sequence: AAG
ctcctccgatttaaactgct

SEQ ID NO: 60337 - DNA, 20 bp, Artificial Sequence
  Description of Artificial Sequence: Synthetic oligonucleotide
  Target: LAMA2; (-) strand; PAM type: NRG; PAM sequence: AGG
atagggactttaagaacagg

SEQ ID NO: 60338 - DNA, 20 bp, Artificial Sequence
  Description of Artificial Sequence: Synthetic oligonucleotide
  Target: LAMA2; (-) strand; PAM type: NRG; PAM sequence: GAG
aatagggactttaagaacag

SEQ ID NO: 60339 - DNA, 20 bp, Artificial Sequence
  Description of Artificial Sequence: Synthetic oligonucleotide
  Target: LAMA2; (-) strand; PAM type: NRG; PAM sequence: AGG
ttaatagggactttaagaac

SEQ ID NO: 60340 - DNA, 20 bp, Artificial Sequence
  Description of Artificial Sequence: Synthetic oligonucleotide
  Target: LAMA2; (-) strand; PAM type: NRG; PAM sequence: CAG
attaatagggactttaagaa

SEQ ID NO: 60341 - DNA, 20 bp, Artificial Sequence
  Description of Artificial Sequence: Synthetic oligonucleotide
  Target: LAMA2; (-) strand; PAM type: NRG; PAM sequence: AAG
cagagattaatagggacttt

SEQ ID NO: 60342 - DNA, 20 bp, Artificial Sequence
  Description of Artificial Sequence: Synthetic oligonucleotide
  Target: LAMA2; (-) strand; PAM type: NRG; PAM sequence: GGG
aaggccaacagagattaata

SEQ ID NO: 60343 - DNA, 20 bp, Artificial Sequence
  Description of Artificial Sequence: Synthetic oligonucleotide
  Target: LAMA2; (-) strand; PAM type: NRG; PAM sequence: AGG
caaggccaacagagattaat

SEQ ID NO: 60344 - DNA, 20 bp, Artificial Sequence
  Description of Artificial Sequence: Synthetic oligonucleotide
  Target: LAMA2; (-) strand; PAM type: NRG; PAM sequence: TAG
gcaaggccaacagagattaa

SEQ ID NO: 60345 - DNA, 20 bp, Artificial Sequence
  Description of Artificial Sequence: Synthetic oligonucleotide
  Target: LAMA2; (-) strand; PAM type: NRG; PAM sequence: GAG
tcacccatgcaaggccaaca

SEQ ID NO: 60346 - DNA, 20 bp, Artificial Sequence
  Description of Artificial Sequence: Synthetic oligonucleotide
  Target: LAMA2; (-) strand; PAM type: NRG; PAM sequence: CAG
catcacccatgcaaggccaa

SEQ ID NO: 60347 - DNA, 20 bp, Artificial Sequence
  Description of Artificial Sequence: Synthetic oligonucleotide
  Target: LAMA2; (-) strand; PAM type: NRG; PAM sequence: AGG
ttgggcccatcacccatgca

SEQ ID NO: 60348 - DNA, 20 bp, Artificial Sequence
  Description of Artificial Sequence: Synthetic oligonucleotide
  Target: LAMA2; (-) strand; PAM type: NRG; PAM sequence: AAG
gttgggcccatcacccatgc

SEQ ID NO: 60349 - DNA, 20 bp, Artificial Sequence
  Description of Artificial Sequence: Synthetic oligonucleotide
  Target: LAMA2; (-) strand; PAM type: NRG; PAM sequence: GGG
ccctgtgttcctacatggtt

SEQ ID NO: 60350 - DNA, 20 bp, Artificial Sequence
  Description of Artificial Sequence: Synthetic oligonucleotide
  Target: LAMA2; (-) strand; PAM type: NRG; PAM sequence: TGG
gccctgtgttcctacatggt

SEQ ID NO: 60351 - DNA, 20 bp, Artificial Sequence
  Description of Artificial Sequence: Synthetic oligonucleotide
  Target: LAMA2; (-) strand; PAM type: NRG; PAM sequence: TGG
agctgccctgtgttcctaca

SEQ ID NO: 60352 - DNA, 20 bp, Artificial Sequence
  Description of Artificial Sequence: Synthetic oligonucleotide
  Target: LAMA2; (-) strand; PAM type: NRG; PAM sequence: AAG
tatttatggaaatgtgacct

SEQ ID NO: 60353 - DNA, 20 bp, Artificial Sequence
  Description of Artificial Sequence: Synthetic oligonucleotide
  Target: LAMA2; (-) strand; PAM type: NRG; PAM sequence: TGG
taccacttctctgatattta

SEQ ID NO: 60354 - DNA, 20 bp, Artificial Sequence
  Description of Artificial Sequence: Synthetic oligonucleotide
  Target: LAMA2; (-) strand; PAM type: NRG; PAM sequence: AGG
ctagctatgaaatacatatc

SEQ ID NO: 60355 - DNA, 20 bp, Artificial Sequence
  Description of Artificial Sequence: Synthetic oligonucleotide
  Target: LAMA2; (-) strand; PAM type: NRG; PAM sequence: CAG
gctagctatgaaatacatat

SEQ ID NO: 60356 - DNA, 20 bp, Artificial Sequence
  Description of Artificial Sequence: Synthetic oligonucleotide
  Target: LAMA2; (-) strand; PAM type: NRG; PAM sequence: TAG
caattccagttgtcatttgc

SEQ ID NO: 60357 - DNA, 20 bp, Artificial Sequence
  Description of Artificial Sequence: Synthetic oligonucleotide
  Target: LAMA2; (-) strand; PAM type: NRG; PAM sequence: CAG
agaagcatggacttcaattc

SEQ ID NO: 60358 - DNA, 20 bp, Artificial Sequence
  Description of Artificial Sequence: Synthetic oligonucleotide
  Target: LAMA2; (-) strand; PAM type: NRG; PAM sequence: TGG
gtgatcactcggaagaagca

SEQ ID NO: 60359 - DNA, 20 bp, Artificial Sequence
  Description of Artificial Sequence: Synthetic oligonucleotide
  Target: LAMA2; (-) strand; PAM type: NRG; PAM sequence: AAG
ggacagtgatcactcggaag

SEQ ID NO: 60360 - DNA, 20 bp, Artificial Sequence
  Description of Artificial Sequence: Synthetic oligonucleotide
  Target: LAMA2; (-) strand; PAM type: NRG; PAM sequence: AAG
gagggacagtgatcactcgg

SEQ ID NO: 60361 - DNA, 20 bp, Artificial Sequence
  Description of Artificial Sequence: Synthetic oligonucleotide
  Target: LAMA2; (-) strand; PAM type: NRG; PAM sequence: CGG
ttagagggacagtgatcact

SEQ ID NO: 60362 - DNA, 20 bp, Artificial Sequence
  Description of Artificial Sequence: Synthetic oligonucleotide
  Target: LAMA2; (-) strand; PAM type: NRG; PAM sequence: CAG
aaggtactcaattagaggga

SEQ ID NO: 60363 - DNA, 20 bp, Artificial Sequence
  Description of Artificial Sequence: Synthetic oligonucleotide
  Target: LAMA2; (-) strand; PAM type: NRG; PAM sequence: GGG
ttgaaaggtactcaattaga

SEQ ID NO: 60364 - DNA, 20 bp, Artificial Sequence
  Description of Artificial Sequence: Synthetic oligonucleotide
  Target: LAMA2; (-) strand; PAM type: NRG; PAM sequence: AGG
attgaaaggtactcaattag

SEQ ID NO: 60365 - DNA, 20 bp, Artificial Sequence
  Description of Artificial Sequence: Synthetic oligonucleotide
  Target: LAMA2; (-) strand; PAM type: NRG; PAM sequence: GAG
aattgaaaggtactcaatta

SEQ ID NO: 60366 - DNA, 20 bp, Artificial Sequence
  Description of Artificial Sequence: Synthetic oligonucleotide
  Target: LAMA2; (-) strand; PAM type: NRG; PAM sequence: TAG
tcaattgaaaggtactcaat

SEQ ID NO: 60367 - DNA, 20 bp, Artificial Sequence
  Description of Artificial Sequence: Synthetic oligonucleotide
  Target: LAMA2; (-) strand; PAM type: NRG; PAM sequence: AGG
aggaaacaggttcaattgaa

SEQ ID NO: 60368 - DNA, 20 bp, Artificial Sequence
  Description of Artificial Sequence: Synthetic oligonucleotide
  Target: LAMA2; (-) strand; PAM type: NRG; PAM sequence: AAG
caggaaacaggttcaattga

SEQ ID NO: 60369 - DNA, 20 bp, Artificial Sequence
  Description of Artificial Sequence: Synthetic oligonucleotide
  Target: LAMA2; (-) strand; PAM type: NRG; PAM sequence: AGG
ttaaagtaacgccaggaaac

SEQ ID NO: 60370 - DNA, 20 bp, Artificial Sequence
  Description of Artificial Sequence: Synthetic oligonucleotide
  Target: LAMA2; (-) strand; PAM type: NRG; PAM sequence: CAG
attaaagtaacgccaggaaa

SEQ ID NO: 60371 - DNA, 20 bp, Artificial Sequence
  Description of Artificial Sequence: Synthetic oligonucleotide
  Target: LAMA2; (-) strand; PAM type: NRG; PAM sequence: AGG
cacaaaattaaagtaacgcc

SEQ ID NO: 60372 - DNA, 20 bp, Artificial Sequence
  Description of Artificial Sequence: Synthetic oligonucleotide
  Target: LAMA2; (-) strand; PAM type: NRG; PAM sequence: CAG
acacaaaattaaagtaacgc

SEQ ID NO: 60373 - DNA, 20 bp, Artificial Sequence
  Description of Artificial Sequence: Synthetic oligonucleotide
  Target: LAMA2; (-) strand; PAM type: NRG; PAM sequence: AAG
tagtttttcacacaaaatta

SEQ ID NO: 60374 - DNA, 20 bp, Artificial Sequence
  Description of Artificial Sequence: Synthetic oligonucleotide
  Target: LAMA2; (-) strand; PAM type: NRG; PAM sequence: TAG
tttacttaaaatcaagaaga

SEQ ID NO: 60375 - DNA, 20 bp, Artificial Sequence
  Description of Artificial Sequence: Synthetic oligonucleotide
  Target: LAMA2; (-) strand; PAM type: NRG; PAM sequence: AAG
tgcttttacttaaaatcaag

SEQ ID NO: 60376 - DNA, 20 bp, Artificial Sequence
  Description of Artificial Sequence: Synthetic oligonucleotide
  Target: LAMA2; (-) strand; PAM type: NRG; PAM sequence: AAG
cattgcttttacttaaaatc

SEQ ID NO: 60377 - DNA, 20 bp, Artificial Sequence
  Description of Artificial Sequence: Synthetic oligonucleotide
  Target: LAMA2; (-) strand; PAM type: NRG; PAM sequence: GGG
tgtgagcagaaaatgttaga

SEQ ID NO: 60378 - DNA, 20 bp, Artificial Sequence
  Description of Artificial Sequence: Synthetic oligonucleotide
  Target: LAMA2; (-) strand; PAM type: NRG; PAM sequence: AGG
ttgtgagcagaaaatgttag

SEQ ID NO: 60379 - DNA, 20 bp, Artificial Sequence
  Description of Artificial Sequence: Synthetic oligonucleotide
  Target: LAMA2; (-) strand; PAM type: NRG; PAM sequence: GAG
tttgtgagcagaaaatgtta

SEQ ID NO: 60380 - DNA, 20 bp, Artificial Sequence
  Description of Artificial Sequence: Synthetic oligonucleotide
  Target: LAMA2; (-) strand; PAM type: NRG; PAM sequence: TAG
tttttgtgagcagaaaatgt

SEQ ID NO: 60381 - DNA, 20 bp, Artificial Sequence
  Description of Artificial Sequence: Synthetic oligonucleotide
  Target: LAMA2; (-) strand; PAM type: NRG; PAM sequence: CAG
aaagctaatttttttgtgag

SEQ ID NO: 60382 - DNA, 20 bp, Artificial Sequence
  Description of Artificial Sequence: Synthetic oligonucleotide
  Target: LAMA2; (-) strand; PAM type: NRG; PAM sequence: GAG
tgtaaagctaatttttttgt

SEQ ID NO: 60383 - DNA, 20 bp, Artificial Sequence
  Description of Artificial Sequence: Synthetic oligonucleotide
  Target: LAMA2; (-) strand; PAM type: NRG; PAM sequence: AAG
gatgaagtctactatctgta

SEQ ID NO: 60384 - DNA, 20 bp, Artificial Sequence
  Description of Artificial Sequence: Synthetic oligonucleotide
  Target: LAMA2; (-) strand; PAM type: NRG; PAM sequence: AAG
aaagactgtatctactgatg

SEQ ID NO: 60385 - DNA, 20 bp, Artificial Sequence
  Description of Artificial Sequence: Synthetic oligonucleotide
  Target: LAMA2; (-) strand; PAM type: NRG; PAM sequence: AAG
aactatgtttttcttcctta

SEQ ID NO: 60386 - DNA, 20 bp, Artificial Sequence
  Description of Artificial Sequence: Synthetic oligonucleotide
  Target: LAMA2; (-) strand; PAM type: NRG; PAM sequence: TAG
acattacatagtaaagggta

SEQ ID NO: 60387 - DNA, 20 bp, Artificial Sequence
  Description of Artificial Sequence: Synthetic oligonucleotide
  Target: LAMA2; (-) strand; PAM type: NRG; PAM sequence: GGG
aggagacattacatagtaaa

SEQ ID NO: 60388 - DNA, 20 bp, Artificial Sequence
  Description of Artificial Sequence: Synthetic oligonucleotide
  Target: LAMA2; (-) strand; PAM type: NRG; PAM sequence: AGG
caggagacattacatagtaa

SEQ ID NO: 60389 - DNA, 20 bp, Artificial Sequence
  Description of Artificial Sequence: Synthetic oligonucleotide
  Target: LAMA2; (-) strand; PAM type: NRG; PAM sequence: AAG
ccaggagacattacatagta

SEQ ID NO: 60390 - DNA, 20 bp, Artificial Sequence
  Description of Artificial Sequence: Synthetic oligonucleotide
  Target: LAMA2; (-) strand; PAM type: NRG; PAM sequence: TAG
agaatccaggagacattaca

SEQ ID NO: 60391 - DNA, 20 bp, Artificial Sequence
  Description of Artificial Sequence: Synthetic oligonucleotide
  Target: LAMA2; (-) strand; PAM type: NRG; PAM sequence: GAG
ccaattattatagaatccag

SEQ ID NO: 60392 - DNA, 20 bp, Artificial Sequence
  Description of Artificial Sequence: Synthetic oligonucleotide
  Target: LAMA2; (-) strand; PAM type: NRG; PAM sequence: AGG
caccaattattatagaatcc

SEQ ID NO: 60393 - DNA, 20 bp, Artificial Sequence
  Description of Artificial Sequence: Synthetic oligonucleotide
  Target: LAMA2; (-) strand; PAM type: NRG; PAM sequence: CAG
ccaccaattattatagaatc

SEQ ID NO: 60394 - DNA, 20 bp, Artificial Sequence
  Description of Artificial Sequence: Synthetic oligonucleotide
  Target: LAMA2; (-) strand; PAM type: NRG; PAM sequence: TAG
acacagcccaccaattatta

SEQ ID NO: 60395 - DNA, 20 bp, Artificial Sequence
  Description of Artificial Sequence: Synthetic oligonucleotide
  Target: LAMA2; (-) strand; PAM type: NRG; PAM sequence: CAG
aagatggcaagcagaccaca

SEQ ID NO: 60396 - DNA, 20 bp, Artificial Sequence
  Description of Artificial Sequence: Synthetic oligonucleotide
  Target: LAMA2; (-) strand; PAM type: NRG; PAM sequence: CAG
acatcttggaagatggcaag

SEQ ID NO: 60397 - DNA, 20 bp, Artificial Sequence
  Description of Artificial Sequence: Synthetic oligonucleotide
  Target: LAMA2; (-) strand; PAM type: NRG; PAM sequence: AAG
ggcacatcttggaagatggc

SEQ ID NO: 60398 - DNA, 20 bp, Artificial Sequence
  Description of Artificial Sequence: Synthetic oligonucleotide
  Target: LAMA2; (-) strand; PAM type: NRG; PAM sequence: TGG
aaggggcacatcttggaaga

SEQ ID NO: 60399 - DNA, 20 bp, Artificial Sequence
  Description of Artificial Sequence: Synthetic oligonucleotide
  Target: LAMA2; (-) strand; PAM type: NRG; PAM sequence: AAG
caataaggggcacatcttgg

SEQ ID NO: 60400 - DNA, 20 bp, Artificial Sequence
  Description of Artificial Sequence: Synthetic oligonucleotide
  Target: LAMA2; (-) strand; PAM type: NRG; PAM sequence: TGG
tttcaataaggggcacatct

SEQ ID NO: 60401 - DNA, 20 bp, Artificial Sequence
  Description of Artificial Sequence: Synthetic oligonucleotide
  Target: LAMA2; (-) strand; PAM type: NRG; PAM sequence: GGG
gtttttgttttttcaataag

SEQ ID NO: 60402 - DNA, 20 bp, Artificial Sequence
  Description of Artificial Sequence: Synthetic oligonucleotide
  Target: LAMA2; (-) strand; PAM type: NRG; PAM sequence: GGG
tgtttttgttttttcaataa

SEQ ID NO: 60403 - DNA, 20 bp, Artificial Sequence
  Description of Artificial Sequence: Synthetic oligonucleotide
  Target: LAMA2; (-) strand; PAM type: NRG; PAM sequence: AGG
ttgtttttgttttttcaata

SEQ ID NO: 60404 - DNA, 20 bp, Artificial Sequence
  Description of Artificial Sequence: Synthetic oligonucleotide
  Target: LAMA2; (-) strand; PAM type: NRG; PAM sequence: AAG
tttgtttttgttttttcaat

SEQ ID NO: 60405 - DNA, 20 bp, Artificial Sequence
  Description of Artificial Sequence: Synthetic oligonucleotide
  Target: LAMA2; (-) strand; PAM type: NRG; PAM sequence: AGG
aatatacatactacagacat

SEQ ID NO: 60406 - DNA, 20 bp, Artificial Sequence
  Description of Artificial Sequence: Synthetic oligonucleotide
  Target: LAMA2; (-) strand; PAM type: NRG; PAM sequence: TAG
aaatatacatactacagaca

SEQ ID NO: 60407 - DNA, 20 bp, Artificial Sequence
  Description of Artificial Sequence: Synthetic oligonucleotide
  Target: LAMA2; (-) strand; PAM type: NRG; PAM sequence: CAG
atgcacaaatatacatacta

SEQ ID NO: 60408 - DNA, 20 bp, Artificial Sequence
  Description of Artificial Sequence: Synthetic oligonucleotide
  Target: LAMA2; (-) strand; PAM type: NRG; PAM sequence: GGG
acacacacacacaagtccat

SEQ ID NO: 60409 - DNA, 20 bp, Artificial Sequence
  Description of Artificial Sequence: Synthetic oligonucleotide
  Target: LAMA2; (-) strand; PAM type: NRG; PAM sequence: TGG
cacacacacacacaagtcca

SEQ ID NO: 60410 - DNA, 20 bp, Artificial Sequence
  Description of Artificial Sequence: Synthetic oligonucleotide
  Target: LAMA2; (-) strand; PAM type: NRG; PAM sequence: AAG
acacacacacacacacacac

SEQ ID NO: 60411 - DNA, 20 bp, Artificial Sequence
  Description of Artificial Sequence: Synthetic oligonucleotide
  Target: LAMA2; (-) strand; PAM type: NRG; PAM sequence: TAG
aaacaccatacatatatata

SEQ ID NO: 60412 - DNA, 20 bp, Artificial Sequence
  Description of Artificial Sequence: Synthetic oligonucleotide
  Target: LAMA2; (-) strand; PAM type: NRG; PAM sequence: AAG
ttttattataatatattgat

SEQ ID NO: 60413 - DNA, 20 bp, Artificial Sequence
  Description of Artificial Sequence: Synthetic oligonucleotide
  Target: LAMA2; (-) strand; PAM type: NRG; PAM sequence: TAG
gaagagaacgataaagaaac

SEQ ID NO: 60414 - DNA, 20 bp, Artificial Sequence
  Description of Artificial Sequence: Synthetic oligonucleotide
  Target: LAMA2; (-) strand; PAM type: NRG; PAM sequence: AAG
cagtttggaagagaacgata

SEQ ID NO: 60415 - DNA, 20 bp, Artificial Sequence
  Description of Artificial Sequence: Synthetic oligonucleotide
  Target: LAMA2; (-) strand; PAM type: NRG; PAM sequence: GAG
gtccttttatcagtttggaa

SEQ ID NO: 60416 - DNA, 20 bp, Artificial Sequence
  Description of Artificial Sequence: Synthetic oligonucleotide
  Target: LAMA2; (-) strand; PAM type: NRG; PAM sequence: AAG
ttgtccttttatcagtttgg

SEQ ID NO: 60417 - DNA, 20 bp, Artificial Sequence
  Description of Artificial Sequence: Synthetic oligonucleotide
  Target: LAMA2; (-) strand; PAM type: NRG; PAM sequence: TGG
aaattgtccttttatcagtt

SEQ ID NO: 60418 - DNA, 20 bp, Artificial Sequence
  Description of Artificial Sequence: Synthetic oligonucleotide
  Target: LAMA2; (-) strand; PAM type: NRG; PAM sequence: CAG
accaaaaattgtccttttat

SEQ ID NO: 60419 - DNA, 20 bp, Artificial Sequence
  Description of Artificial Sequence: Synthetic oligonucleotide
  Target: LAMA2; (-) strand; PAM type: NRG; PAM sequence: AAG
tgccctcagtatagggggaa

SEQ ID NO: 60420 - DNA, 20 bp, Artificial Sequence
  Description of Artificial Sequence: Synthetic oligonucleotide
  Target: LAMA2; (-) strand; PAM type: NRG; PAM sequence: GGG
aaaattgccctcagtatagg

SEQ ID NO: 60421 - DNA, 20 bp, Artificial Sequence
  Description of Artificial Sequence: Synthetic oligonucleotide
  Target: LAMA2; (-) strand; PAM type: NRG; PAM sequence: GGG
taaaattgccctcagtatag

SEQ ID NO: 60422 - DNA, 20 bp, Artificial Sequence
  Description of Artificial Sequence: Synthetic oligonucleotide
  Target: LAMA2; (-) strand; PAM type: NRG; PAM sequence: GGG
ttaaaattgccctcagtata

SEQ ID NO: 60423 - DNA, 20 bp, Artificial Sequence
  Description of Artificial Sequence: Synthetic oligonucleotide
  Target: LAMA2; (-) strand; PAM type: NRG; PAM sequence: AGG
tttaaaattgccctcagtat

SEQ ID NO: 60424 - DNA, 20 bp, Artificial Sequence
  Description of Artificial Sequence: Synthetic oligonucleotide
  Target: LAMA2; (-) strand; PAM type: NRG; PAM sequence: TAG
ttttaaaattgccctcagta

SEQ ID NO: 60425 - DNA, 20 bp, Artificial Sequence
  Description of Artificial Sequence: Synthetic oligonucleotide
  Target: LAMA2; (-) strand; PAM type: NRG; PAM sequence: CAG
ccttcttttaaaattgccct

SEQ ID NO: 60426 - DNA, 20 bp, Artificial Sequence
  Description of Artificial Sequence: Synthetic oligonucleotide
  Target: LAMA2; (-) strand; PAM type: NRG; PAM sequence: GAG
cattttgactagaaacacct

SEQ ID NO: 60427 - DNA, 20 bp, Artificial Sequence
  Description of Artificial Sequence: Synthetic oligonucleotide
  Target: LAMA2; (-) strand; PAM type: NRG; PAM sequence: TAG
tgtaggtttgtcattttgac

SEQ ID NO: 60428 - DNA, 20 bp, Artificial Sequence
  Description of Artificial Sequence: Synthetic oligonucleotide
  Target: LAMA2; (-) strand; PAM type: NRG; PAM sequence: AGG
ataatgcaaatgtactttgt

SEQ ID NO: 60429 - DNA, 20 bp, Artificial Sequence
  Description of Artificial Sequence: Synthetic oligonucleotide
  Target: LAMA2; (-) strand; PAM type: NRG; PAM sequence: TAG
aataatgcaaatgtactttg

SEQ ID NO: 60430 - DNA, 20 bp, Artificial Sequence
  Description of Artificial Sequence: Synthetic oligonucleotide
  Target: LAMA2; (-) strand; PAM type: NRG; PAM sequence: AAG
tttaaaggactctatcagta

SEQ ID NO: 60431 - DNA, 20 bp, Artificial Sequence
  Description of Artificial Sequence: Synthetic oligonucleotide
  Target: LAMA2; (-) strand; PAM type: NRG; PAM sequence: CAG
caacatttaaaggactctat

SEQ ID NO: 60432 - DNA, 20 bp, Artificial Sequence
  Description of Artificial Sequence: Synthetic oligonucleotide
  Target: LAMA2; (-) strand; PAM type: NRG; PAM sequence: AGG
agcttgaactcaacatttaa

SEQ ID NO: 60433 - DNA, 20 bp, Artificial Sequence
  Description of Artificial Sequence: Synthetic oligonucleotide
  Target: LAMA2; (-) strand; PAM type: NRG; PAM sequence: AAG
tagcttgaactcaacattta

SEQ ID NO: 60434 - DNA, 20 bp, Artificial Sequence
  Description of Artificial Sequence: Synthetic oligonucleotide
  Target: LAMA2; (-) strand; PAM type: NRG; PAM sequence: TAG
ttttgaagattaagaaaaat

SEQ ID NO: 60435 - DNA, 20 bp, Artificial Sequence
  Description of Artificial Sequence: Synthetic oligonucleotide
  Target: LAMA2; (-) strand; PAM type: NRG; PAM sequence: AAG
ccctaaactttttgaagatt

SEQ ID NO: 60436 - DNA, 20 bp, Artificial Sequence
  Description of Artificial Sequence: Synthetic oligonucleotide
  Target: LAMA2; (-) strand; PAM type: NRG; PAM sequence: AAG
tttgatccctaaactttttg

SEQ ID NO: 60437 - DNA, 20 bp, Artificial Sequence
  Description of Artificial Sequence: Synthetic oligonucleotide
  Target: LAMA2; (-) strand; PAM type: NRG; PAM sequence: AGG
ttagcataacaaaaatctgc

SEQ ID NO: 60438 - DNA, 20 bp, Artificial Sequence
  Description of Artificial Sequence: Synthetic oligonucleotide
  Target: LAMA2; (-) strand; PAM type: NRG; PAM sequence: CAG
tttagcataacaaaaatctg

SEQ ID NO: 60439 - DNA, 20 bp, Artificial Sequence
  Description of Artificial Sequence: Synthetic oligonucleotide
  Target: LAMA2; (-) strand; PAM type: NRG; PAM sequence: TAG
agaagagatgaaatgaaatt

SEQ ID NO: 60440 - DNA, 20 bp, Artificial Sequence
  Description of Artificial Sequence: Synthetic oligonucleotide
  Target: LAMA2; (-) strand; PAM type: NRG; PAM sequence: GAG
tctgtagaactaaagaagaa

SEQ ID NO: 60441 - DNA, 20 bp, Artificial Sequence
  Description of Artificial Sequence: Synthetic oligonucleotide
  Target: LAMA2; (-) strand; PAM type: NRG; PAM sequence: AAG
tctctgtagaactaaagaag

SEQ ID NO: 60442 - DNA, 20 bp, Artificial Sequence
  Description of Artificial Sequence: Synthetic oligonucleotide
  Target: LAMA2; (-) strand; PAM type: NRG; PAM sequence: AAG
acttctctgtagaactaaag

SEQ ID NO: 60443 - DNA, 20 bp, Artificial Sequence
  Description of Artificial Sequence: Synthetic oligonucleotide
  Target: LAMA2; (-) strand; PAM type: NRG; PAM sequence: AAG
ctaacttctctgtagaacta

SEQ ID NO: 60444 - DNA, 20 bp, Artificial Sequence
  Description of Artificial Sequence: Synthetic oligonucleotide
  Target: LAMA2; (-) strand; PAM type: NRG; PAM sequence: TAG
atcttgacctaacttctctg

SEQ ID NO: 60445 - DNA, 20 bp, Artificial Sequence
  Description of Artificial Sequence: Synthetic oligonucleotide
  Target: LAMA2; (-) strand; PAM type: NRG; PAM sequence: AAG
agagacaagtttctggactc

SEQ ID NO: 60446 - DNA, 20 bp, Artificial Sequence
  Description of Artificial Sequence: Synthetic oligonucleotide
  Target: LAMA2; (-) strand; PAM type: NRG; PAM sequence: TGG
tggtcgaagagacaagtttc

SEQ ID NO: 60447 - DNA, 20 bp, Artificial Sequence
  Description of Artificial Sequence: Synthetic oligonucleotide
  Target: LAMA2; (-) strand; PAM type: NRG; PAM sequence: AAG
aatccactggtcgaagagac

SEQ ID NO: 60448 - DNA, 20 bp, Artificial Sequence
  Description of Artificial Sequence: Synthetic oligonucleotide
  Target: LAMA2; (-) strand; PAM type: NRG; PAM sequence: GAG
tagataatccactggtcgaa

SEQ ID NO: 60449 - DNA, 20 bp, Artificial Sequence
  Description of Artificial Sequence: Synthetic oligonucleotide
  Target: LAMA2; (-) strand; PAM type: NRG; PAM sequence: AAG
ggtagataatccactggtcg

SEQ ID NO: 60450 - DNA, 20 bp, Artificial Sequence
  Description of Artificial Sequence: Synthetic oligonucleotide
  Target: LAMA2; (-) strand; PAM type: NRG; PAM sequence: TGG
caaattggtagataatccac

SEQ ID NO: 60451 - DNA, 20 bp, Artificial Sequence
  Description of Artificial Sequence: Synthetic oligonucleotide
  Target: LAMA2; (-) strand; PAM type: NRG; PAM sequence: TAG
gctatattttttcaaattgg

SEQ ID NO: 60452 - DNA, 20 bp, Artificial Sequence
  Description of Artificial Sequence: Synthetic oligonucleotide
  Target: LAMA2; (-) strand; PAM type: NRG; PAM sequence: TGG
catgctatattttttcaaat

SEQ ID NO: 60453 - DNA, 20 bp, Artificial Sequence
  Description of Artificial Sequence: Synthetic oligonucleotide
  Target: LAMA2; (-) strand; PAM type: NRG; PAM sequence: AAG
gacaacatgctgacatgcaa

SEQ ID NO: 60454 - DNA, 20 bp, Artificial Sequence
  Description of Artificial Sequence: Synthetic oligonucleotide
  Target: LAMA2; (-) strand; PAM type: NRG; PAM sequence: AAG
tttatgtttcctttctttga

SEQ ID NO: 60455 - DNA, 20 bp, Artificial Sequence
  Description of Artificial Sequence: Synthetic oligonucleotide
  Target: LAMA2; (-) strand; PAM type: NRG; PAM sequence: GAG
taatatcagacagcattatg

SEQ ID NO: 60456 - DNA, 20 bp, Artificial Sequence
  Description of Artificial Sequence: Synthetic oligonucleotide
  Target: LAMA2; (-) strand; PAM type: NRG; PAM sequence: TGG
aataatatcagacagcatta

SEQ ID NO: 60457 - DNA, 20 bp, Artificial Sequence
  Description of Artificial Sequence: Synthetic oligonucleotide
  Target: LAMA2; (-) strand; PAM type: NRG; PAM sequence: CAG
tcttcaagaataatatcaga

SEQ ID NO: 60458 - DNA, 20 bp, Artificial Sequence
  Description of Artificial Sequence: Synthetic oligonucleotide
  Target: LAMA2; (-) strand; PAM type: NRG; PAM sequence: CAG
gccgtcttcaagaataatat

SEQ ID NO: 60459 - DNA, 20 bp, Artificial Sequence
  Description of Artificial Sequence: Synthetic oligonucleotide
  Target: LAMA2; (-) strand; PAM type: NRG; PAM sequence: AAG
ctaaaatgatagccgtcttc

SEQ ID NO: 60460 - DNA, 20 bp, Artificial Sequence
  Description of Artificial Sequence: Synthetic oligonucleotide
  Target: LAMA2; (-) strand; PAM type: NRG; PAM sequence: TAG
ttttataacagctaaaatga

SEQ ID NO: 60461 - DNA, 20 bp, Artificial Sequence
  Description of Artificial Sequence: Synthetic oligonucleotide
  Target: LAMA2; (-) strand; PAM type: NRG; PAM sequence: CAG
tgttccttcctgttttataa

SEQ ID NO: 60462 - DNA, 20 bp, Artificial Sequence
  Description of Artificial Sequence: Synthetic oligonucleotide
  Target: LAMA2; (-) strand; PAM type: NRG; PAM sequence: TAG
atggtgtgctagtgggacta

SEQ ID NO: 60463 - DNA, 20 bp, Artificial Sequence
  Description of Artificial Sequence: Synthetic oligonucleotide
  Target: LAMA2; (-) strand; PAM type: NRG; PAM sequence: GGG
ttatttaatggtgtgctagt

SEQ ID NO: 60464 - DNA, 20 bp, Artificial Sequence
  Description of Artificial Sequence: Synthetic oligonucleotide
  Target: LAMA2; (-) strand; PAM type: NRG; PAM sequence: TGG
tttatttaatggtgtgctag

SEQ ID NO: 60465 - DNA, 20 bp, Artificial Sequence
  Description of Artificial Sequence: Synthetic oligonucleotide
  Target: LAMA2; (-) strand; PAM type: NRG; PAM sequence: TAG
cactttatttaatggtgtgc

SEQ ID NO: 60466 - DNA, 20 bp, Artificial Sequence
  Description of Artificial Sequence: Synthetic oligonucleotide
  Target: LAMA2; (-) strand; PAM type: NRG; PAM sequence: TGG
cataccttcactttatttaa

SEQ ID NO: 60467 - DNA, 20 bp, Artificial Sequence
  Description of Artificial Sequence: Synthetic oligonucleotide
  Target: LAMA2; (-) strand; PAM type: NRG; PAM sequence: TAG
aatttcttcctgacataata

SEQ ID NO: 60468 - DNA, 20 bp, Artificial Sequence
  Description of Artificial Sequence: Synthetic oligonucleotide
  Target: LAMA2; (-) strand; PAM type: NRG; PAM sequence: GAG
taagacacaaagaatttcca

SEQ ID NO: 60469 - DNA, 20 bp, Artificial Sequence
  Description of Artificial Sequence: Synthetic oligonucleotide
  Target: LAMA2; (-) strand; PAM type: NRG; PAM sequence: CAG
cctaagacacaaagaatttc

SEQ ID NO: 60470 - DNA, 20 bp, Artificial Sequence
  Description of Artificial Sequence: Synthetic oligonucleotide
  Target: LAMA2; (-) strand; PAM type: NRG; PAM sequence: AAG
tctcattttcctaagacaca

SEQ ID NO: 60471 - DNA, 20 bp, Artificial Sequence
  Description of Artificial Sequence: Synthetic oligonucleotide
  Target: LAMA2; (-) strand; PAM type: NRG; PAM sequence: AAG
aaatagaatctcattttcct

SEQ ID NO: 60472 - DNA, 20 bp, Artificial Sequence
  Description of Artificial Sequence: Synthetic oligonucleotide
  Target: LAMA2; (-) strand; PAM type: NRG; PAM sequence: TAG
ttttaaagagctataaaaaa

SEQ ID NO: 60473 - DNA, 20 bp, Artificial Sequence
  Description of Artificial Sequence: Synthetic oligonucleotide
  Target: LAMA2; (-) strand; PAM type: NRG; PAM sequence: GAG
atgcaggtattttttttaaa

SEQ ID NO: 60474 - DNA, 20 bp, Artificial Sequence
  Description of Artificial Sequence: Synthetic oligonucleotide
  Target: LAMA2; (-) strand; PAM type: NRG; PAM sequence: AAG
tgatgcaggtatttttttta

SEQ ID NO: 60475 - DNA, 20 bp, Artificial Sequence
  Description of Artificial Sequence: Synthetic oligonucleotide
  Target: LAMA2; (-) strand; PAM type: NRG; PAM sequence: AGG
taccaattgtctgctgatgc

SEQ ID NO: 60476 - DNA, 20 bp, Artificial Sequence
  Description of Artificial Sequence: Synthetic oligonucleotide
  Target: LAMA2; (-) strand; PAM type: NRG; PAM sequence: CAG
ttaccaattgtctgctgatg

SEQ ID NO: 60477 - DNA, 20 bp, Artificial Sequence
  Description of Artificial Sequence: Synthetic oligonucleotide
  Target: LAMA2; (-) strand; PAM type: NRG; PAM sequence: GAG
aaaacaactgccatgttttt

SEQ ID NO: 60478 - DNA, 20 bp, Artificial Sequence
  Description of Artificial Sequence: Synthetic oligonucleotide
  Target: LAMA2; (-) strand; PAM type: NRG; PAM sequence: AGG
acagagtagaaattgaatca

SEQ ID NO: 60479 - DNA, 20 bp, Artificial Sequence
  Description of Artificial Sequence: Synthetic oligonucleotide
  Target: LAMA2; (-) strand; PAM type: NRG; PAM sequence: AAG
cacagagtagaaattgaatc

SEQ ID NO: 60480 - DNA, 20 bp, Artificial Sequence
  Description of Artificial Sequence: Synthetic oligonucleotide
  Target: LAMA2; (-) strand; PAM type: NRG; PAM sequence: TAG
tatgacaggtcagcacagag

SEQ ID NO: 60481 - DNA, 20 bp, Artificial Sequence
  Description of Artificial Sequence: Synthetic oligonucleotide
  Target: LAMA2; (-) strand; PAM type: NRG; PAM sequence: GAG
ccatatgacaggtcagcaca

SEQ ID NO: 60482 - DNA, 20 bp, Artificial Sequence
  Description of Artificial Sequence: Synthetic oligonucleotide
  Target: LAMA2; (-) strand; PAM type: NRG; PAM sequence: CAG
tcccatatgacaggtcagca

SEQ ID NO: 60483 - DNA, 20 bp, Artificial Sequence
  Description of Artificial Sequence: Synthetic oligonucleotide
  Target: LAMA2; (-) strand; PAM type: NRG; PAM sequence: CAG
atttatcccatatgacaggt

SEQ ID NO: 60484 - DNA, 20 bp, Artificial Sequence
  Description of Artificial Sequence: Synthetic oligonucleotide
  Target: LAMA2; (-) strand; PAM type: NRG; PAM sequence: AGG
ttagatttatcccatatgac

SEQ ID NO: 60485 - DNA, 20 bp, Artificial Sequence
  Description of Artificial Sequence: Synthetic oligonucleotide
  Target: LAMA2; (-) strand; PAM type: NRG; PAM sequence: CAG
gttagatttatcccatatga

SEQ ID NO: 60486 - DNA, 20 bp, Artificial Sequence
  Description of Artificial Sequence: Synthetic oligonucleotide
  Target: LAMA2; (-) strand; PAM type: NRG; PAM sequence: TAG
taacagagctttgctgtagt

SEQ ID NO: 60487 - DNA, 20 bp, Artificial Sequence
  Description of Artificial Sequence: Synthetic oligonucleotide
  Target: LAMA2; (-) strand; PAM type: NRG; PAM sequence: TAG
agaataacagagctttgctg

SEQ ID NO: 60488 - DNA, 20 bp, Artificial Sequence
  Description of Artificial Sequence: Synthetic oligonucleotide
  Target: LAMA2; (-) strand; PAM type: NRG; PAM sequence: GAG
tactgtactgaagaataaca

SEQ ID NO: 60489 - DNA, 20 bp, Artificial Sequence
  Description of Artificial Sequence: Synthetic oligonucleotide
  Target: LAMA2; (-) strand; PAM type: NRG; PAM sequence: CAG
tgtactgtactgaagaataa

SEQ ID NO: 60490 - DNA, 20 bp, Artificial Sequence
  Description of Artificial Sequence: Synthetic oligonucleotide
  Target: LAMA2; (-) strand; PAM type: NRG; PAM sequence: AAG
ttatctgttgtactgtactg

SEQ ID NO: 60491 - DNA, 20 bp, Artificial Sequence
  Description of Artificial Sequence: Synthetic oligonucleotide
  Target: LAMA2; (-) strand; PAM type: NRG; PAM sequence: TGG
tcacccaaatgtattatatc

SEQ ID NO: 60492 - DNA, 20 bp, Artificial Sequence
  Description of Artificial Sequence: Synthetic oligonucleotide
  Target: LAMA2; (-) strand; PAM type: NRG; PAM sequence: TAG
gatccccctctatgattttg

SEQ ID NO: 60493 - DNA, 20 bp, Artificial Sequence
  Description of Artificial Sequence: Synthetic oligonucleotide
  Target: LAMA2; (-) strand; PAM type: NRG; PAM sequence: AAG
ttgttttaaaagctcttaaa

SEQ ID NO: 60494 - DNA, 20 bp, Artificial Sequence
  Description of Artificial Sequence: Synthetic oligonucleotide
  Target: LAMA2; (-) strand; PAM type: NRG; PAM sequence: AAG
aaaccaaaagattgttttaa

SEQ ID NO: 60495 - DNA, 20 bp, Artificial Sequence
  Description of Artificial Sequence: Synthetic oligonucleotide
  Target: LAMA2; (-) strand; PAM type: NRG; PAM sequence: AAG
acttctctgccttaaaccaa

SEQ ID NO: 60496 - DNA, 20 bp, Artificial Sequence
  Description of Artificial Sequence: Synthetic oligonucleotide
  Target: LAMA2; (-) strand; PAM type: NRG; PAM sequence: TAG
tgcaatctagtgtttcattg

SEQ ID NO: 60497 - DNA, 20 bp, Artificial Sequence
  Description of Artificial Sequence: Synthetic oligonucleotide
  Target: LAMA2; (-) strand; PAM type: NRG; PAM sequence: TAG
caggcttatcttatgcaatc

SEQ ID NO: 60498 - DNA, 20 bp, Artificial Sequence
  Description of Artificial Sequence: Synthetic oligonucleotide
  Target: LAMA2; (-) strand; PAM type: NRG; PAM sequence: AGG
aattaagttggaacaggcac

SEQ ID NO: 60499 - DNA, 20 bp, Artificial Sequence
  Description of Artificial Sequence: Synthetic oligonucleotide
  Target: LAMA2; (-) strand; PAM type: NRG; PAM sequence: CAG
aaattaagttggaacaggca

SEQ ID NO: 60500 - DNA, 20 bp, Artificial Sequence
  Description of Artificial Sequence: Synthetic oligonucleotide
  Target: LAMA2; (-) strand; PAM type: NRG; PAM sequence: AGG
aaagaaaattaagttggaac

SEQ ID NO: 60501 - DNA, 20 bp, Artificial Sequence
  Description of Artificial Sequence: Synthetic oligonucleotide
  Target: LAMA2; (-) strand; PAM type: NRG; PAM sequence: CAG
caaagaaaattaagttggaa

SEQ ID NO: 60502 - DNA, 20 bp, Artificial Sequence
  Description of Artificial Sequence: Synthetic oligonucleotide
  Target: LAMA2; (-) strand; PAM type: NRG; PAM sequence: TGG
agtaacaaagaaaattaagt

SEQ ID NO: 60503 - DNA, 20 bp, Artificial Sequence
  Description of Artificial Sequence: Synthetic oligonucleotide
  Target: LAMA2; (-) strand; PAM type: NRG; PAM sequence: AAG
ttagagtaacaaagaaaatt

SEQ ID NO: 60504 - DNA, 20 bp, Artificial Sequence
  Description of Artificial Sequence: Synthetic oligonucleotide
  Target: LAMA2; (-) strand; PAM type: NRG; PAM sequence: AAG
ggggagttcttagagtaaca

SEQ ID NO: 60505 - DNA, 20 bp, Artificial Sequence
  Description of Artificial Sequence: Synthetic oligonucleotide
  Target: LAMA2; (-) strand; PAM type: NRG; PAM sequence: GAG
atatatatggggagttctta

SEQ ID NO: 60506 - DNA, 20 bp, Artificial Sequence
  Description of Artificial Sequence: Synthetic oligonucleotide
  Target: LAMA2; (-) strand; PAM type: NRG; PAM sequence: TAG
acatatatatggggagttct

SEQ ID NO: 60507 - DNA, 20 bp, Artificial Sequence
  Description of Artificial Sequence: Synthetic oligonucleotide
  Target: LAMA2; (-) strand; PAM type: NRG; PAM sequence: GAG
gaaatttacatatatatggg

SEQ ID NO: 60508 - DNA, 20 bp, Artificial Sequence
  Description of Artificial Sequence: Synthetic oligonucleotide
  Target: LAMA2; (-) strand; PAM type: NRG; PAM sequence: GGG
ctgaaatttacatatatatg

SEQ ID NO: 60509 - DNA, 20 bp, Artificial Sequence
  Description of Artificial Sequence: Synthetic oligonucleotide
  Target: LAMA2; (-) strand; PAM type: NRG; PAM sequence: GGG
gctgaaatttacatatatat

SEQ ID NO: 60510 - DNA, 20 bp, Artificial Sequence
  Description of Artificial Sequence: Synthetic oligonucleotide
  Target: LAMA2; (-) strand; PAM type: NRG; PAM sequence: TGG
tgctgaaatttacatatata

SEQ ID NO: 60511 - DNA, 20 bp, Artificial Sequence
  Description of Artificial Sequence: Synthetic oligonucleotide
  Target: LAMA2; (-) strand; PAM type: NRG; PAM sequence: AAG
ttcttctgacataccaaaga

SEQ ID NO: 60512 - DNA, 20 bp, Artificial Sequence
  Description of Artificial Sequence: Synthetic oligonucleotide
  Target: LAMA2; (-) strand; PAM type: NRG; PAM sequence: AAG
attcttcttctgacatacca

SEQ ID NO: 60513 - DNA, 20 bp, Artificial Sequence
  Description of Artificial Sequence: Synthetic oligonucleotide
  Target: LAMA2; (-) strand; PAM type: NRG; PAM sequence: TAG
ctgtgccttatagatttatc

SEQ ID NO: 60514 - DNA, 20 bp, Artificial Sequence
  Description of Artificial Sequence: Synthetic oligonucleotide
  Target: LAMA2; (-) strand; PAM type: NRG; PAM sequence: TAG
ttgctcacacctgtgcctta

SEQ ID NO: 60515 - DNA, 20 bp, Artificial Sequence
  Description of Artificial Sequence: Synthetic oligonucleotide
  Target: LAMA2; (-) strand; PAM type: NRG; PAM sequence: GAG
atttagtatttccttgtgag

SEQ ID NO: 60516 - DNA, 20 bp, Artificial Sequence
  Description of Artificial Sequence: Synthetic oligonucleotide
  Target: LAMA2; (-) strand; PAM type: NRG; PAM sequence: AGG
ttatttagtatttccttgtg

SEQ ID NO: 60517 - DNA, 20 bp, Artificial Sequence
  Description of Artificial Sequence: Synthetic oligonucleotide
  Target: LAMA2; (-) strand; PAM type: NRG; PAM sequence: GAG
gttatttagtatttccttgt

SEQ ID NO: 60518 - DNA, 20 bp, Artificial Sequence
  Description of Artificial Sequence: Synthetic oligonucleotide
  Target: LAMA2; (-) strand; PAM type: NRG; PAM sequence: TAG
tctcaataataattgttatt

SEQ ID NO: 60519 - DNA, 20 bp, Artificial Sequence
  Description of Artificial Sequence: Synthetic oligonucleotide
  Target: LAMA2; (-) strand; PAM type: NRG; PAM sequence: TGG
gatagtagtacttactacta

SEQ ID NO: 60520 - DNA, 20 bp, Artificial Sequence
  Description of Artificial Sequence: Synthetic oligonucleotide
  Target: LAMA2; (-) strand; PAM type: NRG; PAM sequence: TAG
tttcctctttatagagatag

SEQ ID NO: 60521 - DNA, 20 bp, Artificial Sequence
  Description of Artificial Sequence: Synthetic oligonucleotide
  Target: LAMA2; (-) strand; PAM type: NRG; PAM sequence: TAG
atttttcctctttatagaga

SEQ ID NO: 60522 - DNA, 20 bp, Artificial Sequence
  Description of Artificial Sequence: Synthetic oligonucleotide
  Target: LAMA2; (-) strand; PAM type: NRG; PAM sequence: GAG
ttgaatttttcctctttata

SEQ ID NO: 60523 - DNA, 20 bp, Artificial Sequence
  Description of Artificial Sequence: Synthetic oligonucleotide
  Target: LAMA2; (-) strand; PAM type: NRG; PAM sequence: TAG
gattgaatttttcctcttta

SEQ ID NO: 60524 - DNA, 20 bp, Artificial Sequence
  Description of Artificial Sequence: Synthetic oligonucleotide
  Target: LAMA2; (-) strand; PAM type: NRG; PAM sequence: TGG
agaacaactttaatgactgt

SEQ ID NO: 60525 - DNA, 20 bp, Artificial Sequence
  Description of Artificial Sequence: Synthetic oligonucleotide
  Target: LAMA2; (-) strand; PAM type: NRG; PAM sequence: TAG
agatttatcactacatttaa

SEQ ID NO: 60526 - DNA, 20 bp, Artificial Sequence
  Description of Artificial Sequence: Synthetic oligonucleotide
  Target: LAMA2; (-) strand; PAM type: NRG; PAM sequence: AAG
tatattaaaaatacaaactg

SEQ ID NO: 60527 - DNA, 20 bp, Artificial Sequence
  Description of Artificial Sequence: Synthetic oligonucleotide
  Target: LAMA2; (-) strand; PAM type: NRG; PAM sequence: CAG
cctttgctttgattatccct

SEQ ID NO: 60528 - DNA, 20 bp, Artificial Sequence
  Description of Artificial Sequence: Synthetic oligonucleotide
  Target: LAMA2; (-) strand; PAM type: NRG; PAM sequence: AAG
aataaatgccctatccacat

SEQ ID NO: 60529 - DNA, 20 bp, Artificial Sequence
  Description of Artificial Sequence: Synthetic oligonucleotide
  Target: LAMA2; (-) strand; PAM type: NRG; PAM sequence: TGG
aaagagttcaggacatttcc

SEQ ID NO: 60530 - DNA, 20 bp, Artificial Sequence
  Description of Artificial Sequence: Synthetic oligonucleotide
  Target: LAMA2; (-) strand; PAM type: NRG; PAM sequence: AGG
gaatcatgtgtaaagagttc

SEQ ID NO: 60531 - DNA, 20 bp, Artificial Sequence
  Description of Artificial Sequence: Synthetic oligonucleotide
  Target: LAMA2; (-) strand; PAM type: NRG; PAM sequence: CAG
tgaatcatgtgtaaagagtt

SEQ ID NO: 60532 - DNA, 20 bp, Artificial Sequence
  Description of Artificial Sequence: Synthetic oligonucleotide
  Target: LAMA2; (-) strand; PAM type: NRG; PAM sequence: GAG
attaatgaatcatgtgtaaa

SEQ ID NO: 60533 - DNA, 20 bp, Artificial Sequence
  Description of Artificial Sequence: Synthetic oligonucleotide
  Target: LAMA2; (-) strand; PAM type: NRG; PAM sequence: AAG
aaattaatgaatcatgtgta

SEQ ID NO: 60534 - DNA, 20 bp, Artificial Sequence
  Description of Artificial Sequence: Synthetic oligonucleotide
  Target: LAMA2; (-) strand; PAM type: NRG; PAM sequence: CAG
tcctatctacaagtgtaatt

SEQ ID NO: 60535 - DNA, 20 bp, Artificial Sequence
  Description of Artificial Sequence: Synthetic oligonucleotide
  Target: LAMA2; (-) strand; PAM type: NRG; PAM sequence: AAG
taacaatagttcctatctac

SEQ ID NO: 60536 - DNA, 20 bp, Artificial Sequence
  Description of Artificial Sequence: Synthetic oligonucleotide
  Target: LAMA2; (-) strand; PAM type: NRG; PAM sequence: TAG
ctataaaatgaggataacaa

SEQ ID NO: 60537 - DNA, 20 bp, Artificial Sequence
  Description of Artificial Sequence: Synthetic oligonucleotide
  Target: LAMA2; (-) strand; PAM type: NRG; PAM sequence: AGG
gtgtctttgtctataaaatg

SEQ ID NO: 60538 - DNA, 20 bp, Artificial Sequence
  Description of Artificial Sequence: Synthetic oligonucleotide
  Target: LAMA2; (-) strand; PAM type: NRG; PAM sequence: GAG
tgtgtctttgtctataaaat

SEQ ID NO: 60539 - DNA, 20 bp, Artificial Sequence
  Description of Artificial Sequence: Synthetic oligonucleotide
  Target: LAMA2; (-) strand; PAM type: NRG; PAM sequence: AAG
ctagctgtgtggccccagta

SEQ ID NO: 60540 - DNA, 20 bp, Artificial Sequence
  Description of Artificial Sequence: Synthetic oligonucleotide
  Target: LAMA2; (-) strand; PAM type: NRG; PAM sequence: CAG
aattcctagctgtgtggccc

SEQ ID NO: 60541 - DNA, 20 bp, Artificial Sequence
  Description of Artificial Sequence: Synthetic oligonucleotide
  Target: LAMA2; (-) strand; PAM type: NRG; PAM sequence: TGG
tctgccaattcctagctgtg

SEQ ID NO: 60542 - DNA, 20 bp, Artificial Sequence
  Description of Artificial Sequence: Synthetic oligonucleotide
  Target: LAMA2; (-) strand; PAM type: NRG; PAM sequence: TAG
atcctggttctgccaattcc

SEQ ID NO: 60543 - DNA, 20 bp, Artificial Sequence
  Description of Artificial Sequence: Synthetic oligonucleotide
  Target: LAMA2; (-) strand; PAM type: NRG; PAM sequence: TGG
agattttagtgcctaaatcc

SEQ ID NO: 60544 - DNA, 20 bp, Artificial Sequence
  Description of Artificial Sequence: Synthetic oligonucleotide
  Target: LAMA2; (-) strand; PAM type: NRG; PAM sequence: TAG
gtggttaaataaacagattt

SEQ ID NO: 60545 - DNA, 20 bp, Artificial Sequence
  Description of Artificial Sequence: Synthetic oligonucleotide
  Target: LAMA2; (-) strand; PAM type: NRG; PAM sequence: CAG
taggctagtggttaaataaa

SEQ ID NO: 60546 - DNA, 20 bp, Artificial Sequence
  Description of Artificial Sequence: Synthetic oligonucleotide
  Target: LAMA2; (-) strand; PAM type: NRG; PAM sequence: TGG
ccaatggccatgtaggctag

SEQ ID NO: 60547 - DNA, 20 bp, Artificial Sequence
  Description of Artificial Sequence: Synthetic oligonucleotide
  Target: LAMA2; (-) strand; PAM type: NRG; PAM sequence: TAG
tttccaatggccatgtaggc

SEQ ID NO: 60548 - DNA, 20 bp, Artificial Sequence
  Description of Artificial Sequence: Synthetic oligonucleotide
  Target: LAMA2; (-) strand; PAM type: NRG; PAM sequence: AGG
ttcatttccaatggccatgt

SEQ ID NO: 60549 - DNA, 20 bp, Artificial Sequence
  Description of Artificial Sequence: Synthetic oligonucleotide
  Target: LAMA2; (-) strand; PAM type: NRG; PAM sequence: TAG
attcatttccaatggccatg

SEQ ID NO: 60550 - DNA, 20 bp, Artificial Sequence
  Description of Artificial Sequence: Synthetic oligonucleotide
  Target: LAMA2; (-) strand; PAM type: NRG; PAM sequence: TGG
tctgtataattcatttccaa

SEQ ID NO: 60551 - DNA, 20 bp, Artificial Sequence
  Description of Artificial Sequence: Synthetic oligonucleotide
  Target: LAMA2; (-) strand; PAM type: NRG; PAM sequence: GGG
ctgtttttgagtttcaacga

SEQ ID NO: 60552 - DNA, 20 bp, Artificial Sequence
  Description of Artificial Sequence: Synthetic oligonucleotide
  Target: LAMA2; (-) strand; PAM type: NRG; PAM sequence: AGG
tctgtttttgagtttcaacg

SEQ ID NO: 60553 - DNA, 20 bp, Artificial Sequence
  Description of Artificial Sequence: Synthetic oligonucleotide
  Target: LAMA2; (-) strand; PAM type: NRG; PAM sequence: GAG
ttctgtttttgagtttcaac

SEQ ID NO: 60554 - DNA, 20 bp, Artificial Sequence
  Description of Artificial Sequence: Synthetic oligonucleotide
  Target: LAMA2; (-) strand; PAM type: NRG; PAM sequence: GAG
atattttgccttctgttttt

SEQ ID NO: 60555 - DNA, 20 bp, Artificial Sequence
  Description of Artificial Sequence: Synthetic oligonucleotide
  Target: LAMA2; (-) strand; PAM type: NRG; PAM sequence: GAG
ttaaaaatattctcagtttt

SEQ ID NO: 60556 - DNA, 20 bp, Artificial Sequence
  Description of Artificial Sequence: Synthetic oligonucleotide
  Target: LAMA2; (-) strand; PAM type: NRG; PAM sequence: CAG
tctatttttaaaaatattct

SEQ ID NO: 60557 - DNA, 20 bp, Artificial Sequence
  Description of Artificial Sequence: Synthetic oligonucleotide
  Target: LAMA2; (-) strand; PAM type: NRG; PAM sequence: AAG
atggtaaaagtaatagaaga

SEQ ID NO: 60558 - DNA, 20 bp, Artificial Sequence
  Description of Artificial Sequence: Synthetic oligonucleotide
  Target: LAMA2; (-) strand; PAM type: NRG; PAM sequence: AAG
tgcaatggtaaaagtaatag

SEQ ID NO: 60559 - DNA, 20 bp, Artificial Sequence
  Description of Artificial Sequence: Synthetic oligonucleotide
  Target: LAMA2; (-) strand; PAM type: NRG; PAM sequence: TAG
aactgcaatggtaaaagtaa

SEQ ID NO: 60560 - DNA, 20 bp, Artificial Sequence
  Description of Artificial Sequence: Synthetic oligonucleotide
  Target: LAMA2; (-) strand; PAM type: NRG; PAM sequence: AAG
gcccataactgcaatggtaa

SEQ ID NO: 60561 - DNA, 20 bp, Artificial Sequence
  Description of Artificial Sequence: Synthetic oligonucleotide
  Target: LAMA2; (-) strand; PAM type: NRG; PAM sequence: TGG
ccaaacgcccataactgcaa

SEQ ID NO: 60562 - DNA, 20 bp, Artificial Sequence
  Description of Artificial Sequence: Synthetic oligonucleotide
  Target: LAMA2; (-) strand; PAM type: NRG; PAM sequence: GGG
ttaataaaaaccaaacttgg

SEQ ID NO: 60563 - DNA, 20 bp, Artificial Sequence
  Description of Artificial Sequence: Synthetic oligonucleotide
  Target: LAMA2; (-) strand; PAM type: NRG; PAM sequence: GGG
tttaataaaaaccaaacttg

SEQ ID NO: 60564 - DNA, 20 bp, Artificial Sequence
  Description of Artificial Sequence: Synthetic oligonucleotide
  Target: LAMA2; (-) strand; PAM type: NRG; PAM sequence: GGG
ttttaataaaaaccaaactt

SEQ ID NO: 60565 - DNA, 20 bp, Artificial Sequence
  Description of Artificial Sequence: Synthetic oligonucleotide
  Target: LAMA2; (-) strand; PAM type: NRG; PAM sequence: TGG
attttaataaaaaccaaact

SEQ ID NO: 60566 - DNA, 20 bp, Artificial Sequence
  Description of Artificial Sequence: Synthetic oligonucleotide
  Target: LAMA2; (-) strand; PAM type: NRG; PAM sequence: TAG
tgtgatgtattgaccaatga

SEQ ID NO: 60567 - DNA, 20 bp, Artificial Sequence
  Description of Artificial Sequence: Synthetic oligonucleotide
  Target: LAMA2; (-) strand; PAM type: NRG; PAM sequence: GAG
tttgacactactagaaaaga

SEQ ID NO: 60568 - DNA, 20 bp, Artificial Sequence
  Description of Artificial Sequence: Synthetic oligonucleotide
  Target: LAMA2; (-) strand; PAM type: NRG; PAM sequence: GAG
gatttgacactactagaaaa

SEQ ID NO: 60569 - DNA, 20 bp, Artificial Sequence
  Description of Artificial Sequence: Synthetic oligonucleotide
  Target: LAMA2; (-) strand; PAM type: NRG; PAM sequence: AAG
cagatttgacactactagaa

SEQ ID NO: 60570 - DNA, 20 bp, Artificial Sequence
  Description of Artificial Sequence: Synthetic oligonucleotide
  Target: LAMA2; (-) strand; PAM type: NRG; PAM sequence: TAG
ctcctcagatttgacactac

SEQ ID NO: 60571 - DNA, 20 bp, Artificial Sequence
  Description of Artificial Sequence: Synthetic oligonucleotide
  Target: LAMA2; (-) strand; PAM type: NRG; PAM sequence: CAG
gtagctatatatttgctcct

SEQ ID NO: 60572 - DNA, 20 bp, Artificial Sequence
  Description of Artificial Sequence: Synthetic oligonucleotide
  Target: LAMA2; (-) strand; PAM type: NRG; PAM sequence: TAG
aatctttgatttttgtatag

SEQ ID NO: 60573 - DNA, 20 bp, Artificial Sequence
  Description of Artificial Sequence: Synthetic oligonucleotide
  Target: LAMA2; (-) strand; PAM type: NRG; PAM sequence: TAG
ttaaatctttgatttttgta

SEQ ID NO: 60574 - DNA, 20 bp, Artificial Sequence
  Description of Artificial Sequence: Synthetic oligonucleotide
  Target: LAMA2; (-) strand; PAM type: NRG; PAM sequence: TAG
aatgtttttacaatgattaa

SEQ ID NO: 60575 - DNA, 20 bp, Artificial Sequence
  Description of Artificial Sequence: Synthetic oligonucleotide
  Target: LAMA2; (-) strand; PAM type: NRG; PAM sequence: AGG
agctatcatctaaaaaatgg

SEQ ID NO: 60576 - DNA, 20 bp, Artificial Sequence
  Description of Artificial Sequence: Synthetic oligonucleotide
  Target: LAMA2; (-) strand; PAM type: NRG; PAM sequence: GAG
tagctatcatctaaaaaatg

SEQ ID NO: 60577 - DNA, 20 bp, Artificial Sequence
  Description of Artificial Sequence: Synthetic oligonucleotide
  Target: LAMA2; (-) strand; PAM type: NRG; PAM sequence: TGG
tgtagctatcatctaaaaaa

SEQ ID NO: 60578 - DNA, 20 bp, Artificial Sequence
  Description of Artificial Sequence: Synthetic oligonucleotide
  Target: LAMA2; (-) strand; PAM type: NRG; PAM sequence: TAG
tacaccccatctttaatgtg

SEQ ID NO: 60579 - DNA, 20 bp, Artificial Sequence
  Description of Artificial Sequence: Synthetic oligonucleotide
  Target: LAMA2; (-) strand; PAM type: NRG; PAM sequence: TAG
tttgcatactatagtctatt

SEQ ID NO: 60580 - DNA, 20 bp, Artificial Sequence
  Description of Artificial Sequence: Synthetic oligonucleotide
  Target: LAMA2; (-) strand; PAM type: NRG; PAM sequence: TAG
ctgaatgtttttgcatacta

SEQ ID NO: 60581 - DNA, 20 bp, Artificial Sequence
  Description of Artificial Sequence: Synthetic oligonucleotide
  Target: LAMA2; (-) strand; PAM type: NRG; PAM sequence: AGG
ttattttttcttcttgctca

SEQ ID NO: 60582 - DNA, 20 bp, Artificial Sequence
  Description of Artificial Sequence: Synthetic oligonucleotide
  Target: LAMA2; (-) strand; PAM type: NRG; PAM sequence: AAG
tttattttttcttcttgctc

SEQ ID NO: 60583 - DNA, 20 bp, Artificial Sequence
  Description of Artificial Sequence: Synthetic oligonucleotide
  Target: LAMA2; (-) strand; PAM type: NRG; PAM sequence: CAG
ataaattcatgtgttttgat

SEQ ID NO: 60584 - DNA, 20 bp, Artificial Sequence
  Description of Artificial Sequence: Synthetic oligonucleotide
  Target: LAMA2; (-) strand; PAM type: NRG; PAM sequence: GAG
atgataatgtaagaattact

SEQ ID NO: 60585 - DNA, 20 bp, Artificial Sequence
  Description of Artificial Sequence: Synthetic oligonucleotide
  Target: LAMA2; (-) strand; PAM type: NRG; PAM sequence: AAG
agcgaaatttatgataatgt

SEQ ID NO: 60586 - DNA, 20 bp, Artificial Sequence
  Description of Artificial Sequence: Synthetic oligonucleotide
  Target: LAMA2; (-) strand; PAM type: NRG; PAM sequence: TAG
aattgctttcataaaagtgg

SEQ ID NO: 60587 - DNA, 20 bp, Artificial Sequence
  Description of Artificial Sequence: Synthetic oligonucleotide
  Target: LAMA2; (-) strand; PAM type: NRG; PAM sequence: TGG
gtgaattgctttcataaaag

SEQ ID NO: 60588 - DNA, 20 bp, Artificial Sequence
  Description of Artificial Sequence: Synthetic oligonucleotide
  Target: LAMA2; (-) strand; PAM type: NRG; PAM sequence: AAG
tgtgtgaattgctttcataa

SEQ ID NO: 60589 - DNA, 20 bp, Artificial Sequence
  Description of Artificial Sequence: Synthetic oligonucleotide
  Target: LAMA2; (-) strand; PAM type: NRG; PAM sequence: TGG
atattattatgtatctttga

SEQ ID NO: 60590 - DNA, 20 bp, Artificial Sequence
  Description of Artificial Sequence: Synthetic oligonucleotide
  Target: LAMA2; (-) strand; PAM type: NRG; PAM sequence: TGG
ctgtggctccatataccaca

SEQ ID NO: 60591 - DNA, 20 bp, Artificial Sequence
  Description of Artificial Sequence: Synthetic oligonucleotide
  Target: LAMA2; (-) strand; PAM type: NRG; PAM sequence: TGG
aacctgccatcttcatcctg

SEQ ID NO: 60592 - DNA, 20 bp, Artificial Sequence
  Description of Artificial Sequence: Synthetic oligonucleotide
  Target: LAMA2; (-) strand; PAM type: NRG; PAM sequence: AAG
ttgagtaaaattgatggccc

SEQ ID NO: 60593 - DNA, 20 bp, Artificial Sequence
  Description of Artificial Sequence: Synthetic oligonucleotide
  Target: LAMA2; (-) strand; PAM type: NRG; PAM sequence: TGG
atgcccttgagtaaaattga

SEQ ID NO: 60594 - DNA, 20 bp, Artificial Sequence
  Description of Artificial Sequence: Synthetic oligonucleotide
  Target: LAMA2; (-) strand; PAM type: NRG; PAM sequence: GAG
tattattttaaaatgccctt

SEQ ID NO: 60595 - DNA, 20 bp, Artificial Sequence
  Description of Artificial Sequence: Synthetic oligonucleotide
  Target: LAMA2; (-) strand; PAM type: NRG; PAM sequence: CAG
tgcaaataaattttattcta

SEQ ID NO: 60596 - DNA, 20 bp, Artificial Sequence
  Description of Artificial Sequence: Synthetic oligonucleotide
  Target: LAMA2; (-) strand; PAM type: NRG; PAM sequence: GAG
ttcacagaagagtcaggttg

SEQ ID NO: 60597 - DNA, 20 bp, Artificial Sequence
  Description of Artificial Sequence: Synthetic oligonucleotide
  Target: LAMA2; (-) strand; PAM type: NRG; PAM sequence: TGG
atttcacagaagagtcaggt

SEQ ID NO: 60598 - DNA, 20 bp, Artificial Sequence
  Description of Artificial Sequence: Synthetic oligonucleotide
  Target: LAMA2; (-) strand; PAM type: NRG; PAM sequence: AGG
tgaaatttcacagaagagtc

SEQ ID NO: 60599 - DNA, 20 bp, Artificial Sequence
  Description of Artificial Sequence: Synthetic oligonucleotide
  Target: LAMA2; (-) strand; PAM type: NRG; PAM sequence: CAG
ctgaaatttcacagaagagt

SEQ ID NO: 60600 - DNA, 20 bp, Artificial Sequence
  Description of Artificial Sequence: Synthetic oligonucleotide
  Target: LAMA2; (-) strand; PAM type: NRG; PAM sequence: GAG
agctctgaaatttcacagaa

SEQ ID NO: 60601 - DNA, 20 bp, Artificial Sequence
  Description of Artificial Sequence: Synthetic oligonucleotide
  Target: LAMA2; (-) strand; PAM type: NRG; PAM sequence: AAG
acagctctgaaatttcacag

SEQ ID NO: 60602 - DNA, 20 bp, Artificial Sequence
  Description of Artificial Sequence: Synthetic oligonucleotide
  Target: LAMA2; (-) strand; PAM type: NRG; PAM sequence: CAG
gccacagctctgaaatttca

SEQ ID NO: 60603 - DNA, 20 bp, Artificial Sequence
  Description of Artificial Sequence: Synthetic oligonucleotide
  Target: LAMA2; (-) strand; PAM type: NRG; PAM sequence: CAG
tagttccaatttaacagcca

SEQ ID NO: 60604 - DNA, 20 bp, Artificial Sequence
  Description of Artificial Sequence: Synthetic oligonucleotide
  Target: LAMA2; (-) strand; PAM type: NRG; PAM sequence: CAG
gtggcatagttccaatttaa

SEQ ID NO: 60605 - DNA, 20 bp, Artificial Sequence
  Description of Artificial Sequence: Synthetic oligonucleotide
  Target: LAMA2; (-) strand; PAM type: NRG; PAM sequence: TAG
taccccagggtctggtggca

SEQ ID NO: 60606 - DNA, 20 bp, Artificial Sequence
  Description of Artificial Sequence: Synthetic oligonucleotide
  Target: LAMA2; (-) strand; PAM type: NRG; PAM sequence: TGG
agacataccccagggtctgg

SEQ ID NO: 60607 - DNA, 20 bp, Artificial Sequence
  Description of Artificial Sequence: Synthetic oligonucleotide
  Target: LAMA2; (-) strand; PAM type: NRG; PAM sequence: TGG
aatagacataccccagggtc

SEQ ID NO: 60608 - DNA, 20 bp, Artificial Sequence
  Description of Artificial Sequence: Synthetic oligonucleotide
  Target: LAMA2; (-) strand; PAM type: NRG; PAM sequence: GGG
gaataaatagacatacccca

SEQ ID NO: 60609 - DNA, 20 bp, Artificial Sequence
  Description of Artificial Sequence: Synthetic oligonucleotide
  Target: LAMA2; (-) strand; PAM type: NRG; PAM sequence: AGG
agaataaatagacatacccc

SEQ ID NO: 60610 - DNA, 20 bp, Artificial Sequence
  Description of Artificial Sequence: Synthetic oligonucleotide
  Target: LAMA2; (-) strand; PAM type: NRG; PAM sequence: CAG
aagaataaatagacataccc

SEQ ID NO: 60611 - DNA, 20 bp, Artificial Sequence
  Description of Artificial Sequence: Synthetic oligonucleotide
  Target: LAMA2; (-) strand; PAM type: NRG; PAM sequence: TAG
taaaggcagagaagaataaa

SEQ ID NO: 60612 - DNA, 20 bp, Artificial Sequence
  Description of Artificial Sequence: Synthetic oligonucleotide
  Target: LAMA2; (-) strand; PAM type: NRG; PAM sequence: AAG
aaaattccctaaaggcagag

SEQ ID NO: 60613 - DNA, 20 bp, Artificial Sequence
  Description of Artificial Sequence: Synthetic oligonucleotide
  Target: LAMA2; (-) strand; PAM type: NRG; PAM sequence: GAG
aaaaaaattccctaaaggca

SEQ ID NO: 60614 - DNA, 20 bp, Artificial Sequence
  Description of Artificial Sequence: Synthetic oligonucleotide
  Target: LAMA2; (-) strand; PAM type: NRG; PAM sequence: CAG
ttaaaaaaattccctaaagg

SEQ ID NO: 60615 - DNA, 20 bp, Artificial Sequence
  Description of Artificial Sequence: Synthetic oligonucleotide
  Target: LAMA2; (-) strand; PAM type: NRG; PAM sequence: AGG
tttttaaaaaaattccctaa

SEQ ID NO: 60616 - DNA, 20 bp, Artificial Sequence
  Description of Artificial Sequence: Synthetic oligonucleotide
  Target: LAMA2; (-) strand; PAM type: NRG; PAM sequence: AAG
ctttttaaaaaaattcccta

SEQ ID NO: 60617 - DNA, 20 bp, Artificial Sequence
  Description of Artificial Sequence: Synthetic oligonucleotide
  Target: LAMA2; (-) strand; PAM type: NRG; PAM sequence: CGG
atgaaggctgcattatctca

SEQ ID NO: 60618 - DNA, 20 bp, Artificial Sequence
  Description of Artificial Sequence: Synthetic oligonucleotide
  Target: LAMA2; (-) strand; PAM type: NRG; PAM sequence: AGG
tacaaacagaataactatga

SEQ ID NO: 60619 - DNA, 20 bp, Artificial Sequence
  Description of Artificial Sequence: Synthetic oligonucleotide
  Target: LAMA2; (-) strand; PAM type: NRG; PAM sequence: AAG
ctacaaacagaataactatg

SEQ ID NO: 60620 - DNA, 20 bp, Artificial Sequence
  Description of Artificial Sequence: Synthetic oligonucleotide
  Target: LAMA2; (-) strand; PAM type: NRG; PAM sequence: CAG
atttactaccaatctacaaa

SEQ ID NO: 60621 - DNA, 20 bp, Artificial Sequence
  Description of Artificial Sequence: Synthetic oligonucleotide
  Target: LAMA2; (-) strand; PAM type: NRG; PAM sequence: AAG
tccactcttggattcataat

SEQ ID NO: 60622 - DNA, 20 bp, Artificial Sequence
  Description of Artificial Sequence: Synthetic oligonucleotide
  Target: LAMA2; (-) strand; PAM type: NRG; PAM sequence: TGG
ctatgtttcacctccactct

SEQ ID NO: 60623 - DNA, 20 bp, Artificial Sequence
  Description of Artificial Sequence: Synthetic oligonucleotide
  Target: LAMA2; (-) strand; PAM type: NRG; PAM sequence: CAG
ccaacacatataaaaatatc

SEQ ID NO: 60624 - DNA, 20 bp, Artificial Sequence
  Description of Artificial Sequence: Synthetic oligonucleotide
  Target: LAMA2; (-) strand; PAM type: NRG; PAM sequence: TAG
tctctcctatttgattgaca

SEQ ID NO: 60625 - DNA, 20 bp, Artificial Sequence
  Description of Artificial Sequence: Synthetic oligonucleotide
  Target: LAMA2; (-) strand; PAM type: NRG; PAM sequence: AAG
ccctattttctttcactaac

SEQ ID NO: 60626 - DNA, 20 bp, Artificial Sequence
  Description of Artificial Sequence: Synthetic oligonucleotide
  Target: LAMA2; (-) strand; PAM type: NRG; PAM sequence: AAG
ctgtcatatcatgtaacttt

SEQ ID NO: 60627 - DNA, 20 bp, Artificial Sequence
  Description of Artificial Sequence: Synthetic oligonucleotide
  Target: LAMA2; (-) strand; PAM type: NRG; PAM sequence: CAG
aggagaaaaaaattactaga

SEQ ID NO: 60628 - DNA, 20 bp, Artificial Sequence
  Description of Artificial Sequence: Synthetic oligonucleotide
  Target: LAMA2; (-) strand; PAM type: NRG; PAM sequence: TAG
gcgaaggagaaaaaaattac

SEQ ID NO: 60629 - DNA, 20 bp, Artificial Sequence
  Description of Artificial Sequence: Synthetic oligonucleotide
  Target: LAMA2; (-) strand; PAM type: NRG; PAM sequence: GAG
agaaagcaataattgcgaag

SEQ ID NO: 60630 - DNA, 20 bp, Artificial Sequence
  Description of Artificial Sequence: Synthetic oligonucleotide
  Target: LAMA2; (-) strand; PAM type: NRG; PAM sequence: AGG
gaagaaagcaataattgcga

SEQ ID NO: 60631 - DNA, 20 bp, Artificial Sequence
  Description of Artificial Sequence: Synthetic oligonucleotide
  Target: LAMA2; (-) strand; PAM type: NRG; PAM sequence: AAG
tgaagaaagcaataattgcg

SEQ ID NO: 60632 - DNA, 20 bp, Artificial Sequence
  Description of Artificial Sequence: Synthetic oligonucleotide
  Target: LAMA2; (-) strand; PAM type: NRG; PAM sequence: AAG
ataggaaaagcctatgaaga

SEQ ID NO: 60633 - DNA, 20 bp, Artificial Sequence
  Description of Artificial Sequence: Synthetic oligonucleotide
  Target: LAMA2; (-) strand; PAM type: NRG; PAM sequence: AAG
aacaataggaaaagcctatg

SEQ ID NO: 60634 - DNA, 20 bp, Artificial Sequence
  Description of Artificial Sequence: Synthetic oligonucleotide
  Target: LAMA2; (-) strand; PAM type: NRG; PAM sequence: AAG
ttgacagagaacaataggaa

SEQ ID NO: 60635 - DNA, 20 bp, Artificial Sequence
  Description of Artificial Sequence: Synthetic oligonucleotide
  Target: LAMA2; (-) strand; PAM type: NRG; PAM sequence: AGG
gtgtcttgacagagaacaat

SEQ ID NO: 60636 - DNA, 20 bp, Artificial Sequence
  Description of Artificial Sequence: Synthetic oligonucleotide
  Target: LAMA2; (-) strand; PAM type: NRG; PAM sequence: TAG
agtgtcttgacagagaacaa

SEQ ID NO: 60637 - DNA, 20 bp, Artificial Sequence
  Description of Artificial Sequence: Synthetic oligonucleotide
  Target: LAMA2; (-) strand; PAM type: NRG; PAM sequence: GAG
cagactgcagtgtcttgaca

SEQ ID NO: 60638 - DNA, 20 bp, Artificial Sequence
  Description of Artificial Sequence: Synthetic oligonucleotide
  Target: LAMA2; (-) strand; PAM type: NRG; PAM sequence: CAG
aacagactgcagtgtcttga

SEQ ID NO: 60639 - DNA, 20 bp, Artificial Sequence
  Description of Artificial Sequence: Synthetic oligonucleotide
  Target: LAMA2; (-) strand; PAM type: NRG; PAM sequence: CAG
ataatgattaaaacagactg

SEQ ID NO: 60640 - DNA, 20 bp, Artificial Sequence
  Description of Artificial Sequence: Synthetic oligonucleotide
  Target: LAMA2; (-) strand; PAM type: NRG; PAM sequence: CAG
gtagatgataatgattaaaa

SEQ ID NO: 60641 - DNA, 20 bp, Artificial Sequence
  Description of Artificial Sequence: Synthetic oligonucleotide
  Target: LAMA2; (-) strand; PAM type: NRG; PAM sequence: TAG
aacaagtaaaatagaagcag

SEQ ID NO: 60642 - DNA, 20 bp, Artificial Sequence
  Description of Artificial Sequence: Synthetic oligonucleotide
  Target: LAMA2; (-) strand; PAM type: NRG; PAM sequence: CAG
cataacaagtaaaatagaag

SEQ ID NO: 60643 - DNA, 20 bp, Artificial Sequence
  Description of Artificial Sequence: Synthetic oligonucleotide
  Target: LAMA2; (-) strand; PAM type: NRG; PAM sequence: AAG
tgacataacaagtaaaatag

SEQ ID NO: 60644 - DNA, 20 bp, Artificial Sequence
  Description of Artificial Sequence: Synthetic oligonucleotide
  Target: LAMA2; (-) strand; PAM type: NRG; PAM sequence: TAG
gtatgacataacaagtaaaa

SEQ ID NO: 60645 - DNA, 20 bp, Artificial Sequence
  Description of Artificial Sequence: Synthetic oligonucleotide
  Target: LAMA2; (-) strand; PAM type: NRG; PAM sequence: AAG
atgaatttgtatgacataac

SEQ ID NO: 60646 - DNA, 20 bp, Artificial Sequence
  Description of Artificial Sequence: Synthetic oligonucleotide
  Target: LAMA2; (-) strand; PAM type: NRG; PAM sequence: GAG
ctcttgaaacagtattagtg

SEQ ID NO: 60647 - DNA, 20 bp, Artificial Sequence
  Description of Artificial Sequence: Synthetic oligonucleotide
  Target: LAMA2; (-) strand; PAM type: NRG; PAM sequence: TGG
acctcttgaaacagtattag

SEQ ID NO: 60648 - DNA, 20 bp, Artificial Sequence
  Description of Artificial Sequence: Synthetic oligonucleotide
  Target: LAMA2; (-) strand; PAM type: NRG; PAM sequence: TAG
gtgacctcttgaaacagtat

SEQ ID NO: 60649 - DNA, 20 bp, Artificial Sequence
  Description of Artificial Sequence: Synthetic oligonucleotide
  Target: LAMA2; (-) strand; PAM type: NRG; PAM sequence: CAG
ttcttcgtgacctcttgaaa

SEQ ID NO: 60650 - DNA, 20 bp, Artificial Sequence
  Description of Artificial Sequence: Synthetic oligonucleotide
  Target: LAMA2; (-) strand; PAM type: NRG; PAM sequence: TGG
atcataccatcattcgattt

SEQ ID NO: 60651 - DNA, 20 bp, Artificial Sequence
  Description of Artificial Sequence: Synthetic oligonucleotide
  Target: LAMA2; (-) strand; PAM type: NRG; PAM sequence: CAG
ttcttcactccacacaagct

SEQ ID NO: 60652 - DNA, 20 bp, Artificial Sequence
  Description of Artificial Sequence: Synthetic oligonucleotide
  Target: LAMA2; (-) strand; PAM type: NRG; PAM sequence: AAG
aatttttcttcactccacac

SEQ ID NO: 60653 - DNA, 20 bp, Artificial Sequence
  Description of Artificial Sequence: Synthetic oligonucleotide
  Target: LAMA2; (-) strand; PAM type: NRG; PAM sequence: AGG
ccatgcagtgtgtctcagag

SEQ ID NO: 60654 - DNA, 20 bp, Artificial Sequence
  Description of Artificial Sequence: Synthetic oligonucleotide
  Target: LAMA2; (-) strand; PAM type: NRG; PAM sequence: GAG
tccatgcagtgtgtctcaga

SEQ ID NO: 60655 - DNA, 20 bp, Artificial Sequence
  Description of Artificial Sequence: Synthetic oligonucleotide
  Target: LAMA2; (-) strand; PAM type: NRG; PAM sequence: GAG
tttccatgcagtgtgtctca

SEQ ID NO: 60656 - DNA, 20 bp, Artificial Sequence
  Description of Artificial Sequence: Synthetic oligonucleotide
  Target: LAMA2; (-) strand; PAM type: NRG; PAM sequence: CAG
tatttccatgcagtgtgtct

SEQ ID NO: 60657 - DNA, 20 bp, Artificial Sequence
  Description of Artificial Sequence: Synthetic oligonucleotide
  Target: LAMA2; (-) strand; PAM type: NRG; PAM sequence: CAG
actgctttgatatttccatg

SEQ ID NO: 60658 - DNA, 20 bp, Artificial Sequence
  Description of Artificial Sequence: Synthetic oligonucleotide
  Target: LAMA2; (-) strand; PAM type: NRG; PAM sequence: AAG
gtataacctttaatttatga

SEQ ID NO: 60659 - DNA, 20 bp, Artificial Sequence
  Description of Artificial Sequence: Synthetic oligonucleotide
  Target: LAMA2; (-) strand; PAM type: NRG; PAM sequence: GAG
atggacccaaaacagaatga

SEQ ID NO: 60660 - DNA, 20 bp, Artificial Sequence
  Description of Artificial Sequence: Synthetic oligonucleotide
  Target: LAMA2; (-) strand; PAM type: NRG; PAM sequence: GAG
ggatggacccaaaacagaat

SEQ ID NO: 60661 - DNA, 20 bp, Artificial Sequence
  Description of Artificial Sequence: Synthetic oligonucleotide
  Target: LAMA2; (-) strand; PAM type: NRG; PAM sequence: CAG
tcttctggatggacccaaaa

SEQ ID NO: 60662 - DNA, 20 bp, Artificial Sequence
  Description of Artificial Sequence: Synthetic oligonucleotide
  Target: LAMA2; (-) strand; PAM type: NRG; PAM sequence: TGG
aaacattatcatcttctgga

SEQ ID NO: 60663 - DNA, 20 bp, Artificial Sequence
  Description of Artificial Sequence: Synthetic oligonucleotide
  Target: LAMA2; (-) strand; PAM type: NRG; PAM sequence: TGG
ctcgaaacattatcatcttc

SEQ ID NO: 60664 - DNA, 20 bp, Artificial Sequence
  Description of Artificial Sequence: Synthetic oligonucleotide
  Target: LAMA2; (-) strand; PAM type: NRG; PAM sequence: GAG
gaaacacagaagagtgtcct

SEQ ID NO: 60665 - DNA, 20 bp, Artificial Sequence
  Description of Artificial Sequence: Synthetic oligonucleotide
  Target: LAMA2; (-) strand; PAM type: NRG; PAM sequence: GAG
taccatagtgaaacacagaa

SEQ ID NO: 60666 - DNA, 20 bp, Artificial Sequence
  Description of Artificial Sequence: Synthetic oligonucleotide
  Target: LAMA2; (-) strand; PAM type: NRG; PAM sequence: AAG
ggtaccatagtgaaacacag

SEQ ID NO: 60667 - DNA, 20 bp, Artificial Sequence
  Description of Artificial Sequence: Synthetic oligonucleotide
  Target: LAMA2; (-) strand; PAM type: NRG; PAM sequence: CAG
cttggtaccatagtgaaaca

SEQ ID NO: 60668 - DNA, 20 bp, Artificial Sequence
  Description of Artificial Sequence: Synthetic oligonucleotide
  Target: LAMA2; (-) strand; PAM type: NRG; PAM sequence: TAG
tggcaaatttcttggtacca

SEQ ID NO: 60669 - DNA, 20 bp, Artificial Sequence
  Description of Artificial Sequence: Synthetic oligonucleotide
  Target: LAMA2; (-) strand; PAM type: NRG; PAM sequence: TGG
tctttccctggcaaatttct

SEQ ID NO: 60670 - DNA, 20 bp, Artificial Sequence
  Description of Artificial Sequence: Synthetic oligonucleotide
  Target: LAMA2; (-) strand; PAM type: NRG; PAM sequence: TGG
aggcaaatcatttctttccc

SEQ ID NO: 60671 - DNA, 20 bp, Artificial Sequence
  Description of Artificial Sequence: Synthetic oligonucleotide
  Target: LAMA2; (-) strand; PAM type: NRG; PAM sequence: AGG
tgataatattgacagaataa

SEQ ID NO: 60672 - DNA, 20 bp, Artificial Sequence
  Description of Artificial Sequence: Synthetic oligonucleotide
  Target: LAMA2; (-) strand; PAM type: NRG; PAM sequence: AAG
ttgataatattgacagaata

SEQ ID NO: 60673 - DNA, 20 bp, Artificial Sequence
  Description of Artificial Sequence: Synthetic oligonucleotide
  Target: LAMA2; (-) strand; PAM type: NRG; PAM sequence: CAG
tcttaatttgataatattga

SEQ ID NO: 60674 - DNA, 20 bp, Artificial Sequence
  Description of Artificial Sequence: Synthetic oligonucleotide
  Target: LAMA2; (-) strand; PAM type: NRG; PAM sequence: TGG
caataatttaaaagaatttt

SEQ ID NO: 60675 - DNA, 20 bp, Artificial Sequence
  Description of Artificial Sequence: Synthetic oligonucleotide
  Target: LAMA2; (-) strand; PAM type: NRG; PAM sequence: AAG
ataaacactcaataatttaa

SEQ ID NO: 60676 - DNA, 20 bp, Artificial Sequence
  Description of Artificial Sequence: Synthetic oligonucleotide
  Target: LAMA2; (-) strand; PAM type: NRG; PAM sequence: TAG
tatacaaccagcaattagcc

SEQ ID NO: 60677 - DNA, 20 bp, Artificial Sequence
  Description of Artificial Sequence: Synthetic oligonucleotide
  Target: LAMA2; (-) strand; PAM type: NRG; PAM sequence: TAG
ctttatatacaaccagcaat

SEQ ID NO: 60678 - DNA, 20 bp, Artificial Sequence
  Description of Artificial Sequence: Synthetic oligonucleotide
  Target: LAMA2; (-) strand; PAM type: NRG; PAM sequence: CAG
caaatacctttatatacaac

SEQ ID NO: 60679 - DNA, 20 bp, Artificial Sequence
  Description of Artificial Sequence: Synthetic oligonucleotide
  Target: LAMA2; (-) strand; PAM type: NRG; PAM sequence: GAG
ataaaaatagaatagtactg

SEQ ID NO: 60680 - DNA, 20 bp, Artificial Sequence
  Description of Artificial Sequence: Synthetic oligonucleotide
  Target: LAMA2; (-) strand; PAM type: NRG; PAM sequence: TGG
aaataaaaatagaatagtac

SEQ ID NO: 60681 - DNA, 20 bp, Artificial Sequence
  Description of Artificial Sequence: Synthetic oligonucleotide
  Target: LAMA2; (-) strand; PAM type: NRG; PAM sequence: TAG
actacaaaataaaaatagaa

SEQ ID NO: 60682 - DNA, 20 bp, Artificial Sequence
  Description of Artificial Sequence: Synthetic oligonucleotide
  Target: LAMA2; (-) strand; PAM type: NRG; PAM sequence: TAG
cacagactacaaaataaaaa

SEQ ID NO: 60683 - DNA, 20 bp, Artificial Sequence
  Description of Artificial Sequence: Synthetic oligonucleotide
  Target: LAMA2; (-) strand; PAM type: NRG; PAM sequence: CAG
tagtggtttataaattcaca

SEQ ID NO: 60684 - DNA, 20 bp, Artificial Sequence
  Description of Artificial Sequence: Synthetic oligonucleotide
  Target: LAMA2; (-) strand; PAM type: NRG; PAM sequence: TGG
attaaacctgtaagatttag

SEQ ID NO: 60685 - DNA, 20 bp, Artificial Sequence
  Description of Artificial Sequence: Synthetic oligonucleotide
  Target: LAMA2; (-) strand; PAM type: NRG; PAM sequence: TAG
agtattaaacctgtaagatt

SEQ ID NO: 60686 - DNA, 20 bp, Artificial Sequence
  Description of Artificial Sequence: Synthetic oligonucleotide
  Target: LAMA2; (-) strand; PAM type: NRG; PAM sequence: AAG
gttttgagtattaaacctgt

SEQ ID NO: 60687 - DNA, 20 bp, Artificial Sequence
  Description of Artificial Sequence: Synthetic oligonucleotide
  Target: LAMA2; (-) strand; PAM type: NRG; PAM sequence: GAG
ttgaagacaagaggagtttt

SEQ ID NO: 60688 - DNA, 20 bp, Artificial Sequence
  Description of Artificial Sequence: Synthetic oligonucleotide
  Target: LAMA2; (-) strand; PAM type: NRG; PAM sequence: GAG
aggtatattgaagacaagag

SEQ ID NO: 60689 - DNA, 20 bp, Artificial Sequence
  Description of Artificial Sequence: Synthetic oligonucleotide
  Target: LAMA2; (-) strand; PAM type: NRG; PAM sequence: AGG
gtaggtatattgaagacaag

SEQ ID NO: 60690 - DNA, 20 bp, Artificial Sequence
  Description of Artificial Sequence: Synthetic oligonucleotide
  Target: LAMA2; (-) strand; PAM type: NRG; PAM sequence: GAG
ggtaggtatattgaagacaa

SEQ ID NO: 60691 - DNA, 20 bp, Artificial Sequence
  Description of Artificial Sequence: Synthetic oligonucleotide
  Target: LAMA2; (-) strand; PAM type: NRG; PAM sequence: AAG
atggtaggtatattgaagac

SEQ ID NO: 60692 - DNA, 20 bp, Artificial Sequence
  Description of Artificial Sequence: Synthetic oligonucleotide
  Target: LAMA2; (-) strand; PAM type: NRG; PAM sequence: AAG
agtctatggtaggtatattg

SEQ ID NO: 60693 - DNA, 20 bp, Artificial Sequence
  Description of Artificial Sequence: Synthetic oligonucleotide
  Target: LAMA2; (-) strand; PAM type: NRG; PAM sequence: AGG
aatcccttacagtctatggt

SEQ ID NO: 60694 - DNA, 20 bp, Artificial Sequence
  Description of Artificial Sequence: Synthetic oligonucleotide
  Target: LAMA2; (-) strand; PAM type: NRG; PAM sequence: TAG
taatcccttacagtctatgg

SEQ ID NO: 60695 - DNA, 20 bp, Artificial Sequence
  Description of Artificial Sequence: Synthetic oligonucleotide
  Target: LAMA2; (-) strand; PAM type: NRG; PAM sequence: TGG
aaataatcccttacagtcta

SEQ ID NO: 60696 - DNA, 20 bp, Artificial Sequence
  Description of Artificial Sequence: Synthetic oligonucleotide
  Target: LAMA2; (-) strand; PAM type: NRG; PAM sequence: CAG
ctactcgaaataatccctta

SEQ ID NO: 60697 - DNA, 20 bp, Artificial Sequence
  Description of Artificial Sequence: Synthetic oligonucleotide
  Target: LAMA2; (-) strand; PAM type: NRG; PAM sequence: AAG
tagaatgatgtaaatgcata

SEQ ID NO: 60698 - DNA, 20 bp, Artificial Sequence
  Description of Artificial Sequence: Synthetic oligonucleotide
  Target: LAMA2; (-) strand; PAM type: NRG; PAM sequence: TAG
aagaacacacttgaaattga

SEQ ID NO: 60699 - DNA, 20 bp, Artificial Sequence
  Description of Artificial Sequence: Synthetic oligonucleotide
  Target: LAMA2; (-) strand; PAM type: NRG; PAM sequence: AAG
agaaaaaagaaaaagaataa

SEQ ID NO: 60700 - DNA, 20 bp, Artificial Sequence
  Description of Artificial Sequence: Synthetic oligonucleotide
  Target: LAMA2; (-) strand; PAM type: NRG; PAM sequence: AAG
aaaattaaagaaaaaagaaa

SEQ ID NO: 60701 - DNA, 20 bp, Artificial Sequence
  Description of Artificial Sequence: Synthetic oligonucleotide
  Target: LAMA2; (-) strand; PAM type: NRG; PAM sequence: AAG
cctggaaaaattaaagaaaa

SEQ ID NO: 60702 - DNA, 20 bp, Artificial Sequence
  Description of Artificial Sequence: Synthetic oligonucleotide
  Target: LAMA2; (-) strand; PAM type: NRG; PAM sequence: AAG
atttcagcctggaaaaatta

SEQ ID NO: 60703 - DNA, 20 bp, Artificial Sequence
  Description of Artificial Sequence: Synthetic oligonucleotide
  Target: LAMA2; (-) strand; PAM type: NRG; PAM sequence: TGG
aaaagataactatttcagcc

SEQ ID NO: 60704 - DNA, 20 bp, Artificial Sequence
  Description of Artificial Sequence: Synthetic oligonucleotide
  Target: LAMA2; (-) strand; PAM type: NRG; PAM sequence: CAG
actttaaaagataactattt

SEQ ID NO: 60705 - DNA, 20 bp, Artificial Sequence
  Description of Artificial Sequence: Synthetic oligonucleotide
  Target: LAMA2; (-) strand; PAM type: NRG; PAM sequence: AAG
tgctgtagaacagactttaa

SEQ ID NO: 60706 - DNA, 20 bp, Artificial Sequence
  Description of Artificial Sequence: Synthetic oligonucleotide
  Target: LAMA2; (-) strand; PAM type: NRG; PAM sequence: CAG
gtggagcagctgctgtagaa

SEQ ID NO: 60707 - DNA, 20 bp, Artificial Sequence
  Description of Artificial Sequence: Synthetic oligonucleotide
  Target: LAMA2; (-) strand; PAM type: NRG; PAM sequence: TAG
ctggggtggagcagctgctg

SEQ ID NO: 60708 - DNA, 20 bp, Artificial Sequence
  Description of Artificial Sequence: Synthetic oligonucleotide
  Target: LAMA2; (-) strand; PAM type: NRG; PAM sequence: CAG
aggcaatgactggggtggag

SEQ ID NO: 60709 - DNA, 20 bp, Artificial Sequence
  Description of Artificial Sequence: Synthetic oligonucleotide
  Target: LAMA2; (-) strand; PAM type: NRG; PAM sequence: GAG
taaaggcaatgactggggtg

SEQ ID NO: 60710 - DNA, 20 bp, Artificial Sequence
  Description of Artificial Sequence: Synthetic oligonucleotide
  Target: LAMA2; (-) strand; PAM type: NRG; PAM sequence: TGG
gctaaaggcaatgactgggg

SEQ ID NO: 60711 - DNA, 20 bp, Artificial Sequence
  Description of Artificial Sequence: Synthetic oligonucleotide
  Target: LAMA2; (-) strand; PAM type: NRG; PAM sequence: GGG
aaagctaaaggcaatgactg

SEQ ID NO: 60712 - DNA, 20 bp, Artificial Sequence
  Description of Artificial Sequence: Synthetic oligonucleotide
  Target: LAMA2; (-) strand; PAM type: NRG; PAM sequence: GGG
gaaagctaaaggcaatgact

SEQ ID NO: 60713 - DNA, 20 bp, Artificial Sequence
  Description of Artificial Sequence: Synthetic oligonucleotide
  Target: LAMA2; (-) strand; PAM type: NRG; PAM sequence: TGG
agaaagctaaaggcaatgac

SEQ ID NO: 60714 - DNA, 20 bp, Artificial Sequence
  Description of Artificial Sequence: Synthetic oligonucleotide
  Target: LAMA2; (-) strand; PAM type: NRG; PAM sequence: AGG
ggcaatctagagaaagctaa

SEQ ID NO: 60715 - DNA, 20 bp, Artificial Sequence
  Description of Artificial Sequence: Synthetic oligonucleotide
  Target: LAMA2; (-) strand; PAM type: NRG; PAM sequence: AAG
tggcaatctagagaaagcta

SEQ ID NO: 60716 - DNA, 20 bp, Artificial Sequence
  Description of Artificial Sequence: Synthetic oligonucleotide
  Target: LAMA2; (-) strand; PAM type: NRG; PAM sequence: AAG
gcctaatggcaatctagaga

SEQ ID NO: 60717 - DNA, 20 bp, Artificial Sequence
  Description of Artificial Sequence: Synthetic oligonucleotide
  Target: LAMA2; (-) strand; PAM type: NRG; PAM sequence: GAG
gaaggcctaatggcaatcta

SEQ ID NO: 60718 - DNA, 20 bp, Artificial Sequence
  Description of Artificial Sequence: Synthetic oligonucleotide
  Target: LAMA2; (-) strand; PAM type: NRG; PAM sequence: TAG
aagaaggcctaatggcaatc

SEQ ID NO: 60719 - DNA, 20 bp, Artificial Sequence
  Description of Artificial Sequence: Synthetic oligonucleotide
  Target: LAMA2; (-) strand; PAM type: NRG; PAM sequence: TGG
acgacttcaagaaggcctaa

SEQ ID NO: 60720 - DNA, 20 bp, Artificial Sequence
  Description of Artificial Sequence: Synthetic oligonucleotide
  Target: LAMA2; (-) strand; PAM type: NRG; PAM sequence: AGG
taataagcacgacttcaaga

SEQ ID NO: 60721 - DNA, 20 bp, Artificial Sequence
  Description of Artificial Sequence: Synthetic oligonucleotide
  Target: LAMA2; (-) strand; PAM type: NRG; PAM sequence: AAG
gtaataagcacgacttcaag

SEQ ID NO: 60722 - DNA, 20 bp, Artificial Sequence
  Description of Artificial Sequence: Synthetic oligonucleotide
  Target: LAMA2; (-) strand; PAM type: NRG; PAM sequence: AAG
tctgtaataagcacgacttc

SEQ ID NO: 60723 - DNA, 20 bp, Artificial Sequence
  Description of Artificial Sequence: Synthetic oligonucleotide
  Target: LAMA2; (-) strand; PAM type: NRG; PAM sequence: AAG
actcctcacatatctgtaat

SEQ ID NO: 60724 - DNA, 20 bp, Artificial Sequence
  Description of Artificial Sequence: Synthetic oligonucleotide
  Target: LAMA2; (-) strand; PAM type: NRG; PAM sequence: AAG
tccccttccccccctaaaaa

SEQ ID NO: 60725 - DNA, 20 bp, Artificial Sequence
  Description of Artificial Sequence: Synthetic oligonucleotide
  Target: LAMA2; (-) strand; PAM type: NRG; PAM sequence: AGG
gttaaaaacaacaacaaaaa

SEQ ID NO: 60726 - DNA, 20 bp, Artificial Sequence
  Description of Artificial Sequence: Synthetic oligonucleotide
  Target: LAMA2; (-) strand; PAM type: NRG; PAM sequence: AAG
tgttaaaaacaacaacaaaa

SEQ ID NO: 60727 - DNA, 20 bp, Artificial Sequence
  Description of Artificial Sequence: Synthetic oligonucleotide
  Target: LAMA2; (-) strand; PAM type: NRG; PAM sequence: GGG
acactggccatcatagaaaa

SEQ ID NO: 60728 - DNA, 20 bp, Artificial Sequence
  Description of Artificial Sequence: Synthetic oligonucleotide
  Target: LAMA2; (-) strand; PAM type: NRG; PAM sequence: AGG
aacactggccatcatagaaa

SEQ ID NO: 60729 - DNA, 20 bp, Artificial Sequence
  Description of Artificial Sequence: Synthetic oligonucleotide
  Target: LAMA2; (-) strand; PAM type: NRG; PAM sequence: AAG
aaacactggccatcatagaa

SEQ ID NO: 60730 - DNA, 20 bp, Artificial Sequence
  Description of Artificial Sequence: Synthetic oligonucleotide
  Target: LAMA2; (-) strand; PAM type: NRG; PAM sequence: TAG
cagtgaaacactggccatca

SEQ ID NO: 60731 - DNA, 20 bp, Artificial Sequence
  Description of Artificial Sequence: Synthetic oligonucleotide
  Target: LAMA2; (-) strand; PAM type: NRG; PAM sequence: TGG
caagatcatcagtgaaacac

SEQ ID NO: 60732 - DNA, 20 bp, Artificial Sequence
  Description of Artificial Sequence: Synthetic oligonucleotide
  Target: LAMA2; (-) strand; PAM type: NRG; PAM sequence: CAG
gagacagccaacaagatcat

SEQ ID NO: 60733 - DNA, 20 bp, Artificial Sequence
  Description of Artificial Sequence: Synthetic oligonucleotide
  Target: LAMA2; (-) strand; PAM type: NRG; PAM sequence: AAG
cagccacggagacagccaac

SEQ ID NO: 60734 - DNA, 20 bp, Artificial Sequence
  Description of Artificial Sequence: Synthetic oligonucleotide
  Target: LAMA2; (-) strand; PAM type: NRG; PAM sequence: CAG
aactcatccagccacggaga

SEQ ID NO: 60735 - DNA, 20 bp, Artificial Sequence
  Description of Artificial Sequence: Synthetic oligonucleotide
  Target: LAMA2; (-) strand; PAM type: NRG; PAM sequence: GAG
agacaactcatccagccacg

SEQ ID NO: 60736 - DNA, 20 bp, Artificial Sequence
  Description of Artificial Sequence: Synthetic oligonucleotide
  Target: LAMA2; (-) strand; PAM type: NRG; PAM sequence: CGG
cgagacaactcatccagcca

SEQ ID NO: 60737 - DNA, 20 bp, Artificial Sequence
  Description of Artificial Sequence: Synthetic oligonucleotide
  Target: LAMA2; (-) strand; PAM type: NRG; PAM sequence: CAG
gctcttcgagacaactcatc

SEQ ID NO: 60738 - DNA, 20 bp, Artificial Sequence
  Description of Artificial Sequence: Synthetic oligonucleotide
  Target: LAMA2; (-) strand; PAM type: NRG; PAM sequence: GAG
ctgagtgtaaactgctcttc

SEQ ID NO: 60739 - DNA, 20 bp, Artificial Sequence
  Description of Artificial Sequence: Synthetic oligonucleotide
  Target: LAMA2; (-) strand; PAM type: NRG; PAM sequence: GAG
tcaaggacctggtcactact

SEQ ID NO: 60740 - DNA, 20 bp, Artificial Sequence
  Description of Artificial Sequence: Synthetic oligonucleotide
  Target: LAMA2; (-) strand; PAM type: NRG; PAM sequence: TGG
gctaagagctctcaaggacc

SEQ ID NO: 60741 - DNA, 20 bp, Artificial Sequence
  Description of Artificial Sequence: Synthetic oligonucleotide
  Target: LAMA2; (-) strand; PAM type: NRG; PAM sequence: AGG
tgatgagctaagagctctca

SEQ ID NO: 60742 - DNA, 20 bp, Artificial Sequence
  Description of Artificial Sequence: Synthetic oligonucleotide
  Target: LAMA2; (-) strand; PAM type: NRG; PAM sequence: AAG
atgatgagctaagagctctc

SEQ ID NO: 60743 - DNA, 20 bp, Artificial Sequence
  Description of Artificial Sequence: Synthetic oligonucleotide
  Target: LAMA2; (-) strand; PAM type: NRG; PAM sequence: GAG
cttaaaggatgatgagctaa

SEQ ID NO: 60744 - DNA, 20 bp, Artificial Sequence
  Description of Artificial Sequence: Synthetic oligonucleotide
  Target: LAMA2; (-) strand; PAM type: NRG; PAM sequence: AAG
tacttaaaggatgatgagct

SEQ ID NO: 60745 - DNA, 20 bp, Artificial Sequence
  Description of Artificial Sequence: Synthetic oligonucleotide
  Target: LAMA2; (-) strand; PAM type: NRG; PAM sequence: GAG
aactatacttaaaggatgat

SEQ ID NO: 60746 - DNA, 20 bp, Artificial Sequence
  Description of Artificial Sequence: Synthetic oligonucleotide
  Target: LAMA2; (-) strand; PAM type: NRG; PAM sequence: AGG
atactccaaactatacttaa

SEQ ID NO: 60747 - DNA, 20 bp, Artificial Sequence
  Description of Artificial Sequence: Synthetic oligonucleotide
  Target: LAMA2; (-) strand; PAM type: NRG; PAM sequence: AAG
aatactccaaactatactta

SEQ ID NO: 60748 - DNA, 20 bp, Artificial Sequence
  Description of Artificial Sequence: Synthetic oligonucleotide
  Target: LAMA2; (-) strand; PAM type: NRG; PAM sequence: AAG
atgaagtagtacagcctggg

SEQ ID NO: 60749 - DNA, 20 bp, Artificial Sequence
  Description of Artificial Sequence: Synthetic oligonucleotide
  Target: LAMA2; (-) strand; PAM type: NRG; PAM sequence: GGG
tgcatgaagtagtacagcct

SEQ ID NO: 60750 - DNA, 20 bp, Artificial Sequence
  Description of Artificial Sequence: Synthetic oligonucleotide
  Target: LAMA2; (-) strand; PAM type: NRG; PAM sequence: TGG
atgcatgaagtagtacagcc

SEQ ID NO: 60751 - DNA, 20 bp, Artificial Sequence
  Description of Artificial Sequence: Synthetic oligonucleotide
  Target: LAMA2; (-) strand; PAM type: NRG; PAM sequence: CAG
aaaaaatgcatgaagtagta

SEQ ID NO: 60752 - DNA, 20 bp, Artificial Sequence
  Description of Artificial Sequence: Synthetic oligonucleotide
  Target: LAMA2; (-) strand; PAM type: NRG; PAM sequence: TAG
aaaaaaaaaaatgcatgaag

SEQ ID NO: 60753 - DNA, 20 bp, Artificial Sequence
  Description of Artificial Sequence: Synthetic oligonucleotide
  Target: LAMA2; (-) strand; PAM type: NRG; PAM sequence: AAG
aaaaaaaaaaaaaatgcatg

SEQ ID NO: 60754 - DNA, 20 bp, Artificial Sequence
  Description of Artificial Sequence: Synthetic oligonucleotide
  Target: LAMA2; (-) strand; PAM type: NRG; PAM sequence: AGG
ggaaaaactctaaatacaat

SEQ ID NO: 60755 - DNA, 20 bp, Artificial Sequence
  Description of Artificial Sequence: Synthetic oligonucleotide
  Target: LAMA2; (-) strand; PAM type: NRG; PAM sequence: TAG
aggaaaaactctaaatacaa

SEQ ID NO: 60756 - DNA, 20 bp, Artificial Sequence
  Description of Artificial Sequence: Synthetic oligonucleotide
  Target: LAMA2; (-) strand; PAM type: NRG; PAM sequence: AGG
catagtgagaaattcatttc

SEQ ID NO: 60757 - DNA, 20 bp, Artificial Sequence
  Description of Artificial Sequence: Synthetic oligonucleotide
  Target: LAMA2; (-) strand; PAM type: NRG; PAM sequence: CAG
acatagtgagaaattcattt

SEQ ID NO: 60758 - DNA, 20 bp, Artificial Sequence
  Description of Artificial Sequence: Synthetic oligonucleotide
  Target: LAMA2; (-) strand; PAM type: NRG; PAM sequence: GAG
ttgatagtcaaatacatagt

SEQ ID NO: 60759 - DNA, 20 bp, Artificial Sequence
  Description of Artificial Sequence: Synthetic oligonucleotide
  Target: LAMA2; (-) strand; PAM type: NRG; PAM sequence: TAG
cttcttgatagtcaaataca

SEQ ID NO: 60760 - DNA, 20 bp, Artificial Sequence
  Description of Artificial Sequence: Synthetic oligonucleotide
  Target: LAMA2; (-) strand; PAM type: NRG; PAM sequence: TAG
gatgatacaactcttcttga

SEQ ID NO: 60761 - DNA, 20 bp, Artificial Sequence
  Description of Artificial Sequence: Synthetic oligonucleotide
  Target: LAMA2; (-) strand; PAM type: NRG; PAM sequence: CAG
caagtgaaacctcaaacttg

SEQ ID NO: 60762 - DNA, 20 bp, Artificial Sequence
  Description of Artificial Sequence: Synthetic oligonucleotide
  Target: LAMA2; (-) strand; PAM type: NRG; PAM sequence: AAG
tatgggctaataggattttc

SEQ ID NO: 60763 - DNA, 20 bp, Artificial Sequence
  Description of Artificial Sequence: Synthetic oligonucleotide
  Target: LAMA2; (-) strand; PAM type: NRG; PAM sequence: AGG
tattccctgtatgggctaat

SEQ ID NO: 60764 - DNA, 20 bp, Artificial Sequence
  Description of Artificial Sequence: Synthetic oligonucleotide
  Target: LAMA2; (-) strand; PAM type: NRG; PAM sequence: TAG
ttattccctgtatgggctaa

SEQ ID NO: 60765 - DNA, 20 bp, Artificial Sequence
  Description of Artificial Sequence: Synthetic oligonucleotide
  Target: LAMA2; (-) strand; PAM type: NRG; PAM sequence: GGG
gaatgaattattccctgtat

SEQ ID NO: 60766 - DNA, 20 bp, Artificial Sequence
  Description of Artificial Sequence: Synthetic oligonucleotide
  Target: LAMA2; (-) strand; PAM type: NRG; PAM sequence: TGG
ggaatgaattattccctgta

SEQ ID NO: 60767 - DNA, 20 bp, Artificial Sequence
  Description of Artificial Sequence: Synthetic oligonucleotide
  Target: LAMA2; (-) strand; PAM type: NRG; PAM sequence: TGG
aagggctattaagaacctac

SEQ ID NO: 60768 - DNA, 20 bp, Artificial Sequence
  Description of Artificial Sequence: Synthetic oligonucleotide
  Target: LAMA2; (-) strand; PAM type: NRG; PAM sequence: AAG
gggaacagggaagggctatt

SEQ ID NO: 60769 - DNA, 20 bp, Artificial Sequence
  Description of Artificial Sequence: Synthetic oligonucleotide
  Target: LAMA2; (-) strand; PAM type: NRG; PAM sequence: GGG
tagaaacagggaacagggaa

SEQ ID NO: 60770 - DNA, 20 bp, Artificial Sequence
  Description of Artificial Sequence: Synthetic oligonucleotide
  Target: LAMA2; (-) strand; PAM type: NRG; PAM sequence: AGG
ttagaaacagggaacaggga

SEQ ID NO: 60771 - DNA, 20 bp, Artificial Sequence
  Description of Artificial Sequence: Synthetic oligonucleotide
  Target: LAMA2; (-) strand; PAM type: NRG; PAM sequence: AAG
attagaaacagggaacaggg

SEQ ID NO: 60772 - DNA, 20 bp, Artificial Sequence
  Description of Artificial Sequence: Synthetic oligonucleotide
  Target: LAMA2; (-) strand; PAM type: NRG; PAM sequence: GGG
tggattagaaacagggaaca

SEQ ID NO: 60773 - DNA, 20 bp, Artificial Sequence
  Description of Artificial Sequence: Synthetic oligonucleotide
  Target: LAMA2; (-) strand; PAM type: NRG; PAM sequence: AGG
atggattagaaacagggaac

SEQ ID NO: 60774 - DNA, 20 bp, Artificial Sequence
  Description of Artificial Sequence: Synthetic oligonucleotide
  Target: LAMA2; (-) strand; PAM type: NRG; PAM sequence: CAG
aatggattagaaacagggaa

SEQ ID NO: 60775 - DNA, 20 bp, Artificial Sequence
  Description of Artificial Sequence: Synthetic oligonucleotide
  Target: LAMA2; (-) strand; PAM type: NRG; PAM sequence: GGG
caataaatggattagaaaca

SEQ ID NO: 60776 - DNA, 20 bp, Artificial Sequence
  Description of Artificial Sequence: Synthetic oligonucleotide
  Target: LAMA2; (-) strand; PAM type: NRG; PAM sequence: AGG
gcaataaatggattagaaac

SEQ ID NO: 60777 - DNA, 20 bp, Artificial Sequence
  Description of Artificial Sequence: Synthetic oligonucleotide
  Target: LAMA2; (-) strand; PAM type: NRG; PAM sequence: CAG
agcaataaatggattagaaa

SEQ ID NO: 60778 - DNA, 20 bp, Artificial Sequence
  Description of Artificial Sequence: Synthetic oligonucleotide
  Target: LAMA2; (-) strand; PAM type: NRG; PAM sequence: TAG
ttaaagagcaataaatggat

SEQ ID NO: 60779 - DNA, 20 bp, Artificial Sequence
  Description of Artificial Sequence: Synthetic oligonucleotide
  Target: LAMA2; (-) strand; PAM type: NRG; PAM sequence: TGG
aatctttaaagagcaataaa

SEQ ID NO: 60780 - DNA, 20 bp, Artificial Sequence
  Description of Artificial Sequence: Synthetic oligonucleotide
  Target: LAMA2; (-) strand; PAM type: NRG; PAM sequence: GAG
agtacatggtaatctttaaa

SEQ ID NO: 60781 - DNA, 20 bp, Artificial Sequence
  Description of Artificial Sequence: Synthetic oligonucleotide
  Target: LAMA2; (-) strand; PAM type: NRG; PAM sequence: AAG
ggagtacatggtaatcttta

SEQ ID NO: 60782 - DNA, 20 bp, Artificial Sequence
  Description of Artificial Sequence: Synthetic oligonucleotide
  Target: LAMA2; (-) strand; PAM type: NRG; PAM sequence: TGG
taataagaaaaaggagtaca

SEQ ID NO: 60783 - DNA, 20 bp, Artificial Sequence
  Description of Artificial Sequence: Synthetic oligonucleotide
  Target: LAMA2; (-) strand; PAM type: NRG; PAM sequence: GAG
tattttataataagaaaaag

SEQ ID NO: 60784 - DNA, 20 bp, Artificial Sequence
  Description of Artificial Sequence: Synthetic oligonucleotide
  Target: LAMA2; (-) strand; PAM type: NRG; PAM sequence: AGG
aatattttataataagaaaa

SEQ ID NO: 60785 - DNA, 20 bp, Artificial Sequence
  Description of Artificial Sequence: Synthetic oligonucleotide
  Target: LAMA2; (-) strand; PAM type: NRG; PAM sequence: AAG
caatattttataataagaaa

SEQ ID NO: 60786 - DNA, 20 bp, Artificial Sequence
  Description of Artificial Sequence: Synthetic oligonucleotide
  Target: LAMA2; (-) strand; PAM type: NRG; PAM sequence: AAG
aatatgcaatattttataat

SEQ ID NO: 60787 - DNA, 20 bp, Artificial Sequence
  Description of Artificial Sequence: Synthetic oligonucleotide
  Target: LAMA2; (-) strand; PAM type: NRG; PAM sequence: CAG
ttctgcttctatgaattttc

SEQ ID NO: 60788 - DNA, 20 bp, Artificial Sequence
  Description of Artificial Sequence: Synthetic oligonucleotide
  Target: LAMA2; (-) strand; PAM type: NRG; PAM sequence: TAG
tgacattgtttttgattcat

SEQ ID NO: 60789 - DNA, 20 bp, Artificial Sequence
  Description of Artificial Sequence: Synthetic oligonucleotide
  Target: LAMA2; (-) strand; PAM type: NRG; PAM sequence: AAG
cataaataattgtaatgatt

SEQ ID NO: 60790 - DNA, 20 bp, Artificial Sequence
  Description of Artificial Sequence: Synthetic oligonucleotide
  Target: LAMA2; (-) strand; PAM type: NRG; PAM sequence: TAG
aatgtgtgccacacatcaag

SEQ ID NO: 60791 - DNA, 20 bp, Artificial Sequence
  Description of Artificial Sequence: Synthetic oligonucleotide
  Target: LAMA2; (-) strand; PAM type: NRG; PAM sequence: AAG
aacaatgtgtgccacacatc

SEQ ID NO: 60792 - DNA, 20 bp, Artificial Sequence
  Description of Artificial Sequence: Synthetic oligonucleotide
  Target: LAMA2; (-) strand; PAM type: NRG; PAM sequence: TAG
ataacactgtttggatttca

SEQ ID NO: 60793 - DNA, 20 bp, Artificial Sequence
  Description of Artificial Sequence: Synthetic oligonucleotide
  Target: LAMA2; (-) strand; PAM type: NRG; PAM sequence: TGG
gactttacaataacactgtt

SEQ ID NO: 60794 - DNA, 20 bp, Artificial Sequence
  Description of Artificial Sequence: Synthetic oligonucleotide
  Target: LAMA2; (-) strand; PAM type: NRG; PAM sequence: GAG
cttttgctctaagaagccca

SEQ ID NO: 60795 - DNA, 20 bp, Artificial Sequence
  Description of Artificial Sequence: Synthetic oligonucleotide
  Target: LAMA2; (-) strand; PAM type: NRG; PAM sequence: CAG
aacttttgctctaagaagcc

SEQ ID NO: 60796 - DNA, 20 bp, Artificial Sequence
  Description of Artificial Sequence: Synthetic oligonucleotide
  Target: LAMA2; (-) strand; PAM type: NRG; PAM sequence: AAG
tttaaaacttttgctctaag

SEQ ID NO: 60797 - DNA, 20 bp, Artificial Sequence
  Description of Artificial Sequence: Synthetic oligonucleotide
  Target: LAMA2; (-) strand; PAM type: NRG; PAM sequence: AAG
ggttttaaaacttttgctct

SEQ ID NO: 60798 - DNA, 20 bp, Artificial Sequence
  Description of Artificial Sequence: Synthetic oligonucleotide
  Target: LAMA2; (-) strand; PAM type: NRG; PAM sequence: TGG
tatattaaacatataaatga

SEQ ID NO: 60799 - DNA, 20 bp, Artificial Sequence
  Description of Artificial Sequence: Synthetic oligonucleotide
  Target: LAMA2; (-) strand; PAM type: NRG; PAM sequence: TAG
ctttaaaataaatctagaaa

SEQ ID NO: 60800 - DNA, 20 bp, Artificial Sequence
  Description of Artificial Sequence: Synthetic oligonucleotide
  Target: LAMA2; (-) strand; PAM type: NRG; PAM sequence: TAG
tactgcctttaaaataaatc

SEQ ID NO: 60801 - DNA, 20 bp, Artificial Sequence
  Description of Artificial Sequence: Synthetic oligonucleotide
  Target: LAMA2; (-) strand; PAM type: NRG; PAM sequence: TAG
atgggtacccaggagcctgt

SEQ ID NO: 60802 - DNA, 20 bp, Artificial Sequence
  Description of Artificial Sequence: Synthetic oligonucleotide
  Target: LAMA2; (-) strand; PAM type: NRG; PAM sequence: GAG
taaacaccatgggtacccag

SEQ ID NO: 60803 - DNA, 20 bp, Artificial Sequence
  Description of Artificial Sequence: Synthetic oligonucleotide
  Target: LAMA2; (-) strand; PAM type: NRG; PAM sequence: AGG
aataaacaccatgggtaccc

SEQ ID NO: 60804 - DNA, 20 bp, Artificial Sequence
  Description of Artificial Sequence: Synthetic oligonucleotide
  Target: LAMA2; (-) strand; PAM type: NRG; PAM sequence: CAG
taataaacaccatgggtacc

SEQ ID NO: 60805 - DNA, 20 bp, Artificial Sequence
  Description of Artificial Sequence: Synthetic oligonucleotide
  Target: LAMA2; (-) strand; PAM type: NRG; PAM sequence: GGG
cataatataataaacaccat

SEQ ID NO: 60806 - DNA, 20 bp, Artificial Sequence
  Description of Artificial Sequence: Synthetic oligonucleotide
  Target: LAMA2; (-) strand; PAM type: NRG; PAM sequence: TGG
tcataatataataaacacca

SEQ ID NO: 60807 - DNA, 20 bp, Artificial Sequence
  Description of Artificial Sequence: Synthetic oligonucleotide
  Target: LAMA2; (-) strand; PAM type: NRG; PAM sequence: GAG
ttgtagggtttcgactgtat

SEQ ID NO: 60808 - DNA, 20 bp, Artificial Sequence
  Description of Artificial Sequence: Synthetic oligonucleotide
  Target: LAMA2; (-) strand; PAM type: NRG; PAM sequence: GGG
gggaaaggaatttaattgta

SEQ ID NO: 60809 - DNA, 20 bp, Artificial Sequence
  Description of Artificial Sequence: Synthetic oligonucleotide
  Target: LAMA2; (-) strand; PAM type: NRG; PAM sequence: AGG
agggaaaggaatttaattgt

SEQ ID NO: 60810 - DNA, 20 bp, Artificial Sequence
  Description of Artificial Sequence: Synthetic oligonucleotide
  Target: LAMA2; (-) strand; PAM type: NRG; PAM sequence: TAG
gagggaaaggaatttaattg

SEQ ID NO: 60811 - DNA, 20 bp, Artificial Sequence
  Description of Artificial Sequence: Synthetic oligonucleotide
  Target: LAMA2; (-) strand; PAM type: NRG; PAM sequence: AGG
ttccctctgaagggagggaa

SEQ ID NO: 60812 - DNA, 20 bp, Artificial Sequence
  Description of Artificial Sequence: Synthetic oligonucleotide
  Target: LAMA2; (-) strand; PAM type: NRG; PAM sequence: AAG
gttccctctgaagggaggga

SEQ ID NO: 60813 - DNA, 20 bp, Artificial Sequence
  Description of Artificial Sequence: Synthetic oligonucleotide
  Target: LAMA2; (-) strand; PAM type: NRG; PAM sequence: GGG
ataggttccctctgaaggga

SEQ ID NO: 60814 - DNA, 20 bp, Artificial Sequence
  Description of Artificial Sequence: Synthetic oligonucleotide
  Target: LAMA2; (-) strand; PAM type: NRG; PAM sequence: AGG
aataggttccctctgaaggg

SEQ ID NO: 60815 - DNA, 20 bp, Artificial Sequence
  Description of Artificial Sequence: Synthetic oligonucleotide
  Target: LAMA2; (-) strand; PAM type: NRG; PAM sequence: GAG
taataggttccctctgaagg

SEQ ID NO: 60816 - DNA, 20 bp, Artificial Sequence
  Description of Artificial Sequence: Synthetic oligonucleotide
  Target: LAMA2; (-) strand; PAM type: NRG; PAM sequence: GGG
tataataggttccctctgaa

SEQ ID NO: 60817 - DNA, 20 bp, Artificial Sequence
  Description of Artificial Sequence: Synthetic oligonucleotide
  Target: LAMA2; (-) strand; PAM type: NRG; PAM sequence: AGG
ttataataggttccctctga

SEQ ID NO: 60818 - DNA, 20 bp, Artificial Sequence
  Description of Artificial Sequence: Synthetic oligonucleotide
  Target: LAMA2; (-) strand; PAM type: NRG; PAM sequence: AAG
attataataggttccctctg

SEQ ID NO: 60819 - DNA, 20 bp, Artificial Sequence
  Description of Artificial Sequence: Synthetic oligonucleotide
  Target: LAMA2; (-) strand; PAM type: NRG; PAM sequence: AGG
cacaaatcacacattataat

SEQ ID NO: 60820 - DNA, 20 bp, Artificial Sequence
  Description of Artificial Sequence: Synthetic oligonucleotide
  Target: LAMA2; (-) strand; PAM type: NRG; PAM sequence: TAG
tcacaaatcacacattataa

SEQ ID NO: 60821 - DNA, 20 bp, Artificial Sequence
  Description of Artificial Sequence: Synthetic oligonucleotide
  Target: LAMA2; (-) strand; PAM type: NRG; PAM sequence: TAG
aatataaatatcagaaaaac

SEQ ID NO: 60822 - DNA, 20 bp, Artificial Sequence
  Description of Artificial Sequence: Synthetic oligonucleotide
  Target: LAMA2; (-) strand; PAM type: NRG; PAM sequence: CAG
tgcagaataaatataaatat

SEQ ID NO: 60823 - DNA, 20 bp, Artificial Sequence
  Description of Artificial Sequence: Synthetic oligonucleotide
  Target: LAMA2; (-) strand; PAM type: NRG; PAM sequence: CAG
tgatgatgagggtgaaggtg

SEQ ID NO: 60824 - DNA, 20 bp, Artificial Sequence
  Description of Artificial Sequence: Synthetic oligonucleotide
  Target: LAMA2; (-) strand; PAM type: NRG; PAM sequence: AGG
aaggatgatgatgagggtga

SEQ ID NO: 60825 - DNA, 20 bp, Artificial Sequence
  Description of Artificial Sequence: Synthetic oligonucleotide
  Target: LAMA2; (-) strand; PAM type: NRG; PAM sequence: AAG
taaggatgatgatgagggtg

SEQ ID NO: 60826 - DNA, 20 bp, Artificial Sequence
  Description of Artificial Sequence: Synthetic oligonucleotide
  Target: LAMA2; (-) strand; PAM type: NRG; PAM sequence: GGG
tattgtaaggatgatgatga

SEQ ID NO: 60827 - DNA, 20 bp, Artificial Sequence
  Description of Artificial Sequence: Synthetic oligonucleotide
  Target: LAMA2; (-) strand; PAM type: NRG; PAM sequence: AGG
ctattgtaaggatgatgatg

SEQ ID NO: 60828 - DNA, 20 bp, Artificial Sequence
  Description of Artificial Sequence: Synthetic oligonucleotide
  Target: LAMA2; (-) strand; PAM type: NRG; PAM sequence: GAG
cctattgtaaggatgatgat

SEQ ID NO: 60829 - DNA, 20 bp, Artificial Sequence
  Description of Artificial Sequence: Synthetic oligonucleotide
  Target: LAMA2; (-) strand; PAM type: NRG; PAM sequence: AGG
aaaagataaagcctattgta

SEQ ID NO: 60830 - DNA, 20 bp, Artificial Sequence
  Description of Artificial Sequence: Synthetic oligonucleotide
  Target: LAMA2; (-) strand; PAM type: NRG; PAM sequence: AAG
caaaagataaagcctattgt

SEQ ID NO: 60831 - DNA, 20 bp, Artificial Sequence
  Description of Artificial Sequence: Synthetic oligonucleotide
  Target: LAMA2; (-) strand; PAM type: NRG; PAM sequence: AAG
atatgtatttccaaaagata

SEQ ID NO: 60832 - DNA, 20 bp, Artificial Sequence
  Description of Artificial Sequence: Synthetic oligonucleotide
  Target: LAMA2; (-) strand; PAM type: NRG; PAM sequence: AAG
aatattatatgtatttccaa

SEQ ID NO: 60833 - DNA, 20 bp, Artificial Sequence
  Description of Artificial Sequence: Synthetic oligonucleotide
  Target: LAMA2; (-) strand; PAM type: NRG; PAM sequence: GAG
gcaggtgatgattaaaacca

SEQ ID NO: 60834 - DNA, 20 bp, Artificial Sequence
  Description of Artificial Sequence: Synthetic oligonucleotide
  Target: LAMA2; (-) strand; PAM type: NRG; PAM sequence: CAG
aggcaggtgatgattaaaac

SEQ ID NO: 60835 - DNA, 20 bp, Artificial Sequence
  Description of Artificial Sequence: Synthetic oligonucleotide
  Target: LAMA2; (-) strand; PAM type: NRG; PAM sequence: AGG
agcttgctgaggcaagaggc

SEQ ID NO: 60836 - DNA, 20 bp, Artificial Sequence
  Description of Artificial Sequence: Synthetic oligonucleotide
  Target: LAMA2; (-) strand; PAM type: NRG; PAM sequence: CAG
gagcttgctgaggcaagagg

SEQ ID NO: 60837 - DNA, 20 bp, Artificial Sequence
  Description of Artificial Sequence: Synthetic oligonucleotide
  Target: LAMA2; (-) strand; PAM type: NRG; PAM sequence: AGG
ctagagcttgctgaggcaag

SEQ ID NO: 60838 - DNA, 20 bp, Artificial Sequence
  Description of Artificial Sequence: Synthetic oligonucleotide
  Target: LAMA2; (-) strand; PAM type: NRG; PAM sequence: GAG
cctagagcttgctgaggcaa

SEQ ID NO: 60839 - DNA, 20 bp, Artificial Sequence
  Description of Artificial Sequence: Synthetic oligonucleotide
  Target: LAMA2; (-) strand; PAM type: NRG; PAM sequence: AAG
aacctagagcttgctgaggc

SEQ ID NO: 60840 - DNA, 20 bp, Artificial Sequence
  Description of Artificial Sequence: Synthetic oligonucleotide
  Target: LAMA2; (-) strand; PAM type: NRG; PAM sequence: AGG
atacaacctagagcttgctg

SEQ ID NO: 60841 - DNA, 20 bp, Artificial Sequence
  Description of Artificial Sequence: Synthetic oligonucleotide
  Target: LAMA2; (-) strand; PAM type: NRG; PAM sequence: GAG
aatacaacctagagcttgct

SEQ ID NO: 60842 - DNA, 20 bp, Artificial Sequence
  Description of Artificial Sequence: Synthetic oligonucleotide
  Target: LAMA2; (-) strand; PAM type: NRG; PAM sequence: GAG
ctcctttaaaatacaaccta

SEQ ID NO: 60843 - DNA, 20 bp, Artificial Sequence
  Description of Artificial Sequence: Synthetic oligonucleotide
  Target: LAMA2; (-) strand; PAM type: NRG; PAM sequence: TAG
atctcctttaaaatacaacc

SEQ ID NO: 60844 - DNA, 20 bp, Artificial Sequence
  Description of Artificial Sequence: Synthetic oligonucleotide
  Target: LAMA2; (-) strand; PAM type: NRG; PAM sequence: CAG
tacttagatacaattaaatt

SEQ ID NO: 60845 - DNA, 20 bp, Artificial Sequence
  Description of Artificial Sequence: Synthetic oligonucleotide
  Target: LAMA2; (-) strand; PAM type: NRG; PAM sequence: TAG
actcttcgaaaggtattact

SEQ ID NO: 60846 - DNA, 20 bp, Artificial Sequence
  Description of Artificial Sequence: Synthetic oligonucleotide
  Target: LAMA2; (-) strand; PAM type: NRG; PAM sequence: AGG
gtattatttgactcttcgaa

SEQ ID NO: 60847 - DNA, 20 bp, Artificial Sequence
  Description of Artificial Sequence: Synthetic oligonucleotide
  Target: LAMA2; (-) strand; PAM type: NRG; PAM sequence: AAG
tgtattatttgactcttcga

SEQ ID NO: 60848 - DNA, 20 bp, Artificial Sequence
  Description of Artificial Sequence: Synthetic oligonucleotide
  Target: LAMA2; (-) strand; PAM type: NRG; PAM sequence: GAG
gaattgcaactttttgttat

SEQ ID NO: 60849 - DNA, 20 bp, Artificial Sequence
  Description of Artificial Sequence: Synthetic oligonucleotide
  Target: LAMA2; (-) strand; PAM type: NRG; PAM sequence: AAG
tgagagtgaaggagggatgg

SEQ ID NO: 60850 - DNA, 20 bp, Artificial Sequence
  Description of Artificial Sequence: Synthetic oligonucleotide
  Target: LAMA2; (-) strand; PAM type: NRG; PAM sequence: TGG
ctctgagagtgaaggaggga

SEQ ID NO: 60851 - DNA, 20 bp, Artificial Sequence
  Description of Artificial Sequence: Synthetic oligonucleotide
  Target: LAMA2; (-) strand; PAM type: NRG; PAM sequence: GGG
atgtctctgagagtgaagga

SEQ ID NO: 60852 - DNA, 20 bp, Artificial Sequence
  Description of Artificial Sequence: Synthetic oligonucleotide
  Target: LAMA2; (-) strand; PAM type: NRG; PAM sequence: AGG
catgtctctgagagtgaagg

SEQ ID NO: 60853 - DNA, 20 bp, Artificial Sequence
  Description of Artificial Sequence: Synthetic oligonucleotide
  Target: LAMA2; (-) strand; PAM type: NRG; PAM sequence: GAG
tcatgtctctgagagtgaag

SEQ ID NO: 60854 - DNA, 20 bp, Artificial Sequence
  Description of Artificial Sequence: Synthetic oligonucleotide
  Target: LAMA2; (-) strand; PAM type: NRG; PAM sequence: AGG
agtcatgtctctgagagtga

SEQ ID NO: 60855 - DNA, 20 bp, Artificial Sequence
  Description of Artificial Sequence: Synthetic oligonucleotide
  Target: LAMA2; (-) strand; PAM type: NRG; PAM sequence: AAG
cagtcatgtctctgagagtg

SEQ ID NO: 60856 - DNA, 20 bp, Artificial Sequence
  Description of Artificial Sequence: Synthetic oligonucleotide
  Target: LAMA2; (-) strand; PAM type: NRG; PAM sequence: GAG
tagatcagtcatgtctctga

SEQ ID NO: 60857 - DNA, 20 bp, Artificial Sequence
  Description of Artificial Sequence: Synthetic oligonucleotide
  Target: LAMA2; (-) strand; PAM type: NRG; PAM sequence: GAG
gatagatcagtcatgtctct

SEQ ID NO: 60858 - DNA, 20 bp, Artificial Sequence
  Description of Artificial Sequence: Synthetic oligonucleotide
  Target: LAMA2; (-) strand; PAM type: NRG; PAM sequence: CAG
aagaaacagctgagatagat

SEQ ID NO: 60859 - DNA, 20 bp, Artificial Sequence
  Description of Artificial Sequence: Synthetic oligonucleotide
  Target: LAMA2; (-) strand; PAM type: NRG; PAM sequence: TAG
gctagaagaaacagctgaga

SEQ ID NO: 60860 - DNA, 20 bp, Artificial Sequence
  Description of Artificial Sequence: Synthetic oligonucleotide
  Target: LAMA2; (-) strand; PAM type: NRG; PAM sequence: GAG
aaatgctagaagaaacagct

SEQ ID NO: 60861 - DNA, 20 bp, Artificial Sequence
  Description of Artificial Sequence: Synthetic oligonucleotide
  Target: LAMA2; (-) strand; PAM type: NRG; PAM sequence: CAG
ggggtaaatgctagaagaaa

SEQ ID NO: 60862 - DNA, 20 bp, Artificial Sequence
  Description of Artificial Sequence: Synthetic oligonucleotide
  Target: LAMA2; (-) strand; PAM type: NRG; PAM sequence: AAG
aatccgggggtaaatgctag

SEQ ID NO: 60863 - DNA, 20 bp, Artificial Sequence
  Description of Artificial Sequence: Synthetic oligonucleotide
  Target: LAMA2; (-) strand; PAM type: NRG; PAM sequence: TAG
ttaaatccgggggtaaatgc

SEQ ID NO: 60864 - DNA, 20 bp, Artificial Sequence
  Description of Artificial Sequence: Synthetic oligonucleotide
  Target: LAMA2; (-) strand; PAM type: NRG; PAM sequence: GGG
tatattatttttaaatccgg

SEQ ID NO: 60865 - DNA, 20 bp, Artificial Sequence
  Description of Artificial Sequence: Synthetic oligonucleotide
  Target: LAMA2; (-) strand; PAM type: NRG; PAM sequence: GGG
atatattatttttaaatccg

SEQ ID NO: 60866 - DNA, 20 bp, Artificial Sequence
  Description of Artificial Sequence: Synthetic oligonucleotide
  Target: LAMA2; (-) strand; PAM type: NRG; PAM sequence: GGG
aatatattatttttaaatcc

SEQ ID NO: 60867 - DNA, 20 bp, Artificial Sequence
  Description of Artificial Sequence: Synthetic oligonucleotide
  Target: LAMA2; (-) strand; PAM type: NRG; PAM sequence: CGG
aaatatattatttttaaatc

SEQ ID NO: 60868 - DNA, 20 bp, Artificial Sequence
  Description of Artificial Sequence: Synthetic oligonucleotide
  Target: LAMA2; (-) strand; PAM type: NRG; PAM sequence: TAG
aaaatgtttaaattaagtta

SEQ ID NO: 60869 - DNA, 20 bp, Artificial Sequence
  Description of Artificial Sequence: Synthetic oligonucleotide
  Target: LAMA2; (-) strand; PAM type: NRG; PAM sequence: AAG
atgtctaaaatgtttaaatt

SEQ ID NO: 60870 - DNA, 20 bp, Artificial Sequence
  Description of Artificial Sequence: Synthetic oligonucleotide
  Target: LAMA2; (-) strand; PAM type: NRG; PAM sequence: GAG
cttccatactaggaaaggaa

SEQ ID NO: 60871 - DNA, 20 bp, Artificial Sequence
  Description of Artificial Sequence: Synthetic oligonucleotide
  Target: LAMA2; (-) strand; PAM type: NRG; PAM sequence: AAG
gtcttccatactaggaaagg

SEQ ID NO: 60872 - DNA, 20 bp, Artificial Sequence
  Description of Artificial Sequence: Synthetic oligonucleotide
  Target: LAMA2; (-) strand; PAM type: NRG; PAM sequence: AGG
tttgtcttccatactaggaa

SEQ ID NO: 60873 - DNA, 20 bp, Artificial Sequence
  Description of Artificial Sequence: Synthetic oligonucleotide
  Target: LAMA2; (-) strand; PAM type: NRG; PAM sequence: AAG
ctttgtcttccatactagga

SEQ ID NO: 60874 - DNA, 20 bp, Artificial Sequence
  Description of Artificial Sequence: Synthetic oligonucleotide
  Target: LAMA2; (-) strand; PAM type: NRG; PAM sequence: AGG
caatctttgtcttccatact

SEQ ID NO: 60875 - DNA, 20 bp, Artificial Sequence
  Description of Artificial Sequence: Synthetic oligonucleotide
  Target: LAMA2; (-) strand; PAM type: NRG; PAM sequence: TAG
tcaatctttgtcttccatac

SEQ ID NO: 60876 - DNA, 20 bp, Artificial Sequence
  Description of Artificial Sequence: Synthetic oligonucleotide
  Target: LAMA2; (-) strand; PAM type: NRG; PAM sequence: GAG
aatgtgtgagggtcagatga

SEQ ID NO: 60877 - DNA, 20 bp, Artificial Sequence
  Description of Artificial Sequence: Synthetic oligonucleotide
  Target: LAMA2; (-) strand; PAM type: NRG; PAM sequence: GAG
gaaatgtgtgagggtcagat

SEQ ID NO: 60878 - DNA, 20 bp, Artificial Sequence
  Description of Artificial Sequence: Synthetic oligonucleotide
  Target: LAMA2; (-) strand; PAM type: NRG; PAM sequence: CAG
aggcagaaatgtgtgagggt

SEQ ID NO: 60879 - DNA, 20 bp, Artificial Sequence
  Description of Artificial Sequence: Synthetic oligonucleotide
  Target: LAMA2; (-) strand; PAM type: NRG; PAM sequence: GGG
atgtaggcagaaatgtgtga

SEQ ID NO: 60880 - DNA, 20 bp, Artificial Sequence
  Description of Artificial Sequence: Synthetic oligonucleotide
  Target: LAMA2; (-) strand; PAM type: NRG; PAM sequence: AGG
gatgtaggcagaaatgtgtg

SEQ ID NO: 60881 - DNA, 20 bp, Artificial Sequence
  Description of Artificial Sequence: Synthetic oligonucleotide
  Target: LAMA2; (-) strand; PAM type: NRG; PAM sequence: GAG
ggatgtaggcagaaatgtgt

SEQ ID NO: 60882 - DNA, 20 bp, Artificial Sequence
  Description of Artificial Sequence: Synthetic oligonucleotide
  Target: LAMA2; (-) strand; PAM type: NRG; PAM sequence: CAG
tatatgttgcaggatgtagg

SEQ ID NO: 60883 - DNA, 20 bp, Artificial Sequence
  Description of Artificial Sequence: Synthetic oligonucleotide
  Target: LAMA2; (-) strand; PAM type: NRG; PAM sequence: AGG
aagtatatgttgcaggatgt

SEQ ID NO: 60884 - DNA, 20 bp, Artificial Sequence
  Description of Artificial Sequence: Synthetic oligonucleotide
  Target: LAMA2; (-) strand; PAM type: NRG; PAM sequence: TAG
taagtatatgttgcaggatg

SEQ ID NO: 60885 - DNA, 20 bp, Artificial Sequence
  Description of Artificial Sequence: Synthetic oligonucleotide
  Target: LAMA2; (-) strand; PAM type: NRG; PAM sequence: AGG
ttattttaagtatatgttgc

SEQ ID NO: 60886 - DNA, 20 bp, Artificial Sequence
  Description of Artificial Sequence: Synthetic oligonucleotide
  Target: LAMA2; (-) strand; PAM type: NRG; PAM sequence: CAG
tttattttaagtatatgttg

SEQ ID NO: 60887 - DNA, 20 bp, Artificial Sequence
  Description of Artificial Sequence: Synthetic oligonucleotide
  Target: LAMA2; (-) strand; PAM type: NRG; PAM sequence: AAG
tagcattatatatttatttt

SEQ ID NO: 60888 - DNA, 20 bp, Artificial Sequence
  Description of Artificial Sequence: Synthetic oligonucleotide
  Target: LAMA2; (-) strand; PAM type: NRG; PAM sequence: TAG
ttatatggttttaacaatgt

SEQ ID NO: 60889 - DNA, 20 bp, Artificial Sequence
  Description of Artificial Sequence: Synthetic oligonucleotide
  Target: LAMA2; (-) strand; PAM type: NRG; PAM sequence: TGG
agctgtgagtaatatttata

SEQ ID NO: 60890 - DNA, 20 bp, Artificial Sequence
  Description of Artificial Sequence: Synthetic oligonucleotide
  Target: LAMA2; (-) strand; PAM type: NRG; PAM sequence: GAG
gcaccacagagctcagctgt

SEQ ID NO: 60891 - DNA, 20 bp, Artificial Sequence
  Description of Artificial Sequence: Synthetic oligonucleotide
  Target: LAMA2; (-) strand; PAM type: NRG; PAM sequence: CAG
acacagtgcaccacagagct

SEQ ID NO: 60892 - DNA, 20 bp, Artificial Sequence
  Description of Artificial Sequence: Synthetic oligonucleotide
  Target: LAMA2; (-) strand; PAM type: NRG; PAM sequence: GAG
gagagacacagtgcaccaca

SEQ ID NO: 60893 - DNA, 20 bp, Artificial Sequence
  Description of Artificial Sequence: Synthetic oligonucleotide
  Target: LAMA2; (-) strand; PAM type: NRG; PAM sequence: CAG
aagagagacacagtgcacca

SEQ ID NO: 60894 - DNA, 20 bp, Artificial Sequence
  Description of Artificial Sequence: Synthetic oligonucleotide
  Target: LAMA2; (-) strand; PAM type: NRG; PAM sequence: CAG
caaaaaagaaaagagagaca

SEQ ID NO: 60895 - DNA, 20 bp, Artificial Sequence
  Description of Artificial Sequence: Synthetic oligonucleotide
  Target: LAMA2; (-) strand; PAM type: NRG; PAM sequence: GAG
gatgtacaaaaaagaaaaga

SEQ ID NO: 60896 - DNA, 20 bp, Artificial Sequence
  Description of Artificial Sequence: Synthetic oligonucleotide
  Target: LAMA2; (-) strand; PAM type: NRG; PAM sequence: GAG
acgatgtacaaaaaagaaaa

SEQ ID NO: 60897 - DNA, 20 bp, Artificial Sequence
  Description of Artificial Sequence: Synthetic oligonucleotide
  Target: LAMA2; (-) strand; PAM type: NRG; PAM sequence: AAG
caacgatgtacaaaaaagaa

SEQ ID NO: 60898 - DNA, 20 bp, Artificial Sequence
  Description of Artificial Sequence: Synthetic oligonucleotide
  Target: LAMA2; (-) strand; PAM type: NRG; PAM sequence: AAG
ccaggcaacgatgtacaaaa

SEQ ID NO: 60899 - DNA, 20 bp, Artificial Sequence
  Description of Artificial Sequence: Synthetic oligonucleotide
  Target: LAMA2; (-) strand; PAM type: NRG; PAM sequence: AGG
acaaagcaattattaatgcc

SEQ ID NO: 60900 - DNA, 20 bp, Artificial Sequence
  Description of Artificial Sequence: Synthetic oligonucleotide
  Target: LAMA2; (-) strand; PAM type: NRG; PAM sequence: CAG
aacaaagcaattattaatgc

SEQ ID NO: 60901 - DNA, 20 bp, Artificial Sequence
  Description of Artificial Sequence: Synthetic oligonucleotide
  Target: LAMA2; (-) strand; PAM type: NRG; PAM sequence: AAG
aagactaatttttcaaaaca

SEQ ID NO: 60902 - DNA, 20 bp, Artificial Sequence
  Description of Artificial Sequence: Synthetic oligonucleotide
  Target: LAMA2; (-) strand; PAM type: NRG; PAM sequence: AAG
taaaatgtatgtagtaaact

SEQ ID NO: 60903 - DNA, 20 bp, Artificial Sequence
  Description of Artificial Sequence: Synthetic oligonucleotide
  Target: LAMA2; (-) strand; PAM type: NRG; PAM sequence: TAG
taaaattagtaaaatgtatg

SEQ ID NO: 60904 - DNA, 20 bp, Artificial Sequence
  Description of Artificial Sequence: Synthetic oligonucleotide
  Target: LAMA2; (-) strand; PAM type: NRG; PAM sequence: TAG
cagaaagtgtagtttaaaat

SEQ ID NO: 60905 - DNA, 20 bp, Artificial Sequence
  Description of Artificial Sequence: Synthetic oligonucleotide
  Target: LAMA2; (-) strand; PAM type: NRG; PAM sequence: TAG
aataattctgtcagaaagtg

SEQ ID NO: 60906 - DNA, 20 bp, Artificial Sequence
  Description of Artificial Sequence: Synthetic oligonucleotide
  Target: LAMA2; (-) strand; PAM type: NRG; PAM sequence: AAG
agtttaataattctgtcaga

SEQ ID NO: 60907 - DNA, 20 bp, Artificial Sequence
  Description of Artificial Sequence: Synthetic oligonucleotide
  Target: LAMA2; (-) strand; PAM type: NRG; PAM sequence: CAG
agggagtttaataattctgt

SEQ ID NO: 60908 - DNA, 20 bp, Artificial Sequence
  Description of Artificial Sequence: Synthetic oligonucleotide
  Target: LAMA2; (-) strand; PAM type: NRG; PAM sequence: GAG
gtgatgaaacatactgaagg

SEQ ID NO: 60909 - DNA, 20 bp, Artificial Sequence
  Description of Artificial Sequence: Synthetic oligonucleotide
  Target: LAMA2; (-) strand; PAM type: NRG; PAM sequence: GGG
atgtgatgaaacatactgaa

SEQ ID NO: 60910 - DNA, 20 bp, Artificial Sequence
  Description of Artificial Sequence: Synthetic oligonucleotide
  Target: LAMA2; (-) strand; PAM type: NRG; PAM sequence: AGG
aatgtgatgaaacatactga

SEQ ID NO: 60911 - DNA, 20 bp, Artificial Sequence
  Description of Artificial Sequence: Synthetic oligonucleotide
  Target: LAMA2; (-) strand; PAM type: NRG; PAM sequence: AAG
aaatgtgatgaaacatactg

SEQ ID NO: 60912 - DNA, 20 bp, Artificial Sequence
  Description of Artificial Sequence: Synthetic oligonucleotide
  Target: LAMA2; (-) strand; PAM type: NRG; PAM sequence: TAG
taacaaaaatcatcaattaa

SEQ ID NO: 60913 - DNA, 20 bp, Artificial Sequence
  Description of Artificial Sequence: Synthetic oligonucleotide
  Target: LAMA2; (-) strand; PAM type: NRG; PAM sequence: TGG
gggagagaaaagcatcagga

SEQ ID NO: 60914 - DNA, 20 bp, Artificial Sequence
  Description of Artificial Sequence: Synthetic oligonucleotide
  Target: LAMA2; (-) strand; PAM type: NRG; PAM sequence: AGG
atgtgggagagaaaagcatc

SEQ ID NO: 60915 - DNA, 20 bp, Artificial Sequence
  Description of Artificial Sequence: Synthetic oligonucleotide
  Target: LAMA2; (-) strand; PAM type: NRG; PAM sequence: CAG
aatgtgggagagaaaagcat

SEQ ID NO: 60916 - DNA, 20 bp, Artificial Sequence
  Description of Artificial Sequence: Synthetic oligonucleotide
  Target: LAMA2; (-) strand; PAM type: NRG; PAM sequence: AAG
tacaaaaatgtgggagagaa

SEQ ID NO: 60917 - DNA, 20 bp, Artificial Sequence
  Description of Artificial Sequence: Synthetic oligonucleotide
  Target: LAMA2; (-) strand; PAM type: NRG; PAM sequence: GAG
gaagctacaaaaatgtggga

SEQ ID NO: 60918 - DNA, 20 bp, Artificial Sequence
  Description of Artificial Sequence: Synthetic oligonucleotide
  Target: LAMA2; (-) strand; PAM type: NRG; PAM sequence: GAG
aggaagctacaaaaatgtgg

SEQ ID NO: 60919 - DNA, 20 bp, Artificial Sequence
  Description of Artificial Sequence: Synthetic oligonucleotide
  Target: LAMA2; (-) strand; PAM type: NRG; PAM sequence: GGG
taaggaagctacaaaaatgt

SEQ ID NO: 60920 - DNA, 20 bp, Artificial Sequence
  Description of Artificial Sequence: Synthetic oligonucleotide
  Target: LAMA2; (-) strand; PAM type: NRG; PAM sequence: TGG
ctaaggaagctacaaaaatg

SEQ ID NO: 60921 - DNA, 20 bp, Artificial Sequence
  Description of Artificial Sequence: Synthetic oligonucleotide
  Target: LAMA2; (-) strand; PAM type: NRG; PAM sequence: AAG
tttcttcactctttctaagg

SEQ ID NO: 60922 - DNA, 20 bp, Artificial Sequence
  Description of Artificial Sequence: Synthetic oligonucleotide
  Target: LAMA2; (-) strand; PAM type: NRG; PAM sequence: AGG
ccttttcttcactctttcta

SEQ ID NO: 60923 - DNA, 20 bp, Artificial Sequence
  Description of Artificial Sequence: Synthetic oligonucleotide
  Target: LAMA2; (-) strand; PAM type: NRG; PAM sequence: AAG
accttttcttcactctttct

SEQ ID NO: 60924 - DNA, 20 bp, Artificial Sequence
  Description of Artificial Sequence: Synthetic oligonucleotide
  Target: LAMA2; (-) strand; PAM type: NRG; PAM sequence: CAG
ggggggaattaaggcatctt

SEQ ID NO: 60925 - DNA, 20 bp, Artificial Sequence
  Description of Artificial Sequence: Synthetic oligonucleotide
  Target: LAMA2; (-) strand; PAM type: NRG; PAM sequence: AGG
tctaaaagaggggggaatta

SEQ ID NO: 60926 - DNA, 20 bp, Artificial Sequence
  Description of Artificial Sequence: Synthetic oligonucleotide
  Target: LAMA2; (-) strand; PAM type: NRG; PAM sequence: AAG
atctaaaagaggggggaatt

SEQ ID NO: 60927 - DNA, 20 bp, Artificial Sequence
  Description of Artificial Sequence: Synthetic oligonucleotide
  Target: LAMA2; (-) strand; PAM type: NRG; PAM sequence: GGG
agctgatatctaaaagaggg

SEQ ID NO: 60928 - DNA, 20 bp, Artificial Sequence
  Description of Artificial Sequence: Synthetic oligonucleotide
  Target: LAMA2; (-) strand; PAM type: NRG; PAM sequence: GGG
cagctgatatctaaaagagg

SEQ ID NO: 60929 - DNA, 20 bp, Artificial Sequence
  Description of Artificial Sequence: Synthetic oligonucleotide
  Target: LAMA2; (-) strand; PAM type: NRG; PAM sequence: GGG
ccagctgatatctaaaagag

SEQ ID NO: 60930 - DNA, 20 bp, Artificial Sequence
  Description of Artificial Sequence: Synthetic oligonucleotide
  Target: LAMA2; (-) strand; PAM type: NRG; PAM sequence: GGG
gccagctgatatctaaaaga

SEQ ID NO: 60931 - DNA, 20 bp, Artificial Sequence
  Description of Artificial Sequence: Synthetic oligonucleotide
  Target: LAMA2; (-) strand; PAM type: NRG; PAM sequence: AGG
agccagctgatatctaaaag

SEQ ID NO: 60932 - DNA, 20 bp, Artificial Sequence
  Description of Artificial Sequence: Synthetic oligonucleotide
  Target: LAMA2; (-) strand; PAM type: NRG; PAM sequence: GAG
gagccagctgatatctaaaa

SEQ ID NO: 60933 - DNA, 20 bp, Artificial Sequence
  Description of Artificial Sequence: Synthetic oligonucleotide
  Target: LAMA2; (-) strand; PAM type: NRG; PAM sequence: AAG
tagagccagctgatatctaa

SEQ ID NO: 60934 - DNA, 20 bp, Artificial Sequence
  Description of Artificial Sequence: Synthetic oligonucleotide
  Target: LAMA2; (-) strand; PAM type: NRG; PAM sequence: CAG
tctacctagaattctagagc

SEQ ID NO: 60935 - DNA, 20 bp, Artificial Sequence
  Description of Artificial Sequence: Synthetic oligonucleotide
  Target: LAMA2; (-) strand; PAM type: NRG; PAM sequence: GAG
gctttctacctagaattcta

SEQ ID NO: 60936 - DNA, 20 bp, Artificial Sequence
  Description of Artificial Sequence: Synthetic oligonucleotide
  Target: LAMA2; (-) strand; PAM type: NRG; PAM sequence: TAG
atgctttctacctagaattc

SEQ ID NO: 60937 - DNA, 20 bp, Artificial Sequence
  Description of Artificial Sequence: Synthetic oligonucleotide
  Target: LAMA2; (-) strand; PAM type: NRG; PAM sequence: TAG
gagaagagatgctttctacc

SEQ ID NO: 60938 - DNA, 20 bp, Artificial Sequence
  Description of Artificial Sequence: Synthetic oligonucleotide
  Target: LAMA2; (-) strand; PAM type: NRG; PAM sequence: GAG
tatcttcaaaattctgagaa

SEQ ID NO: 60939 - DNA, 20 bp, Artificial Sequence
  Description of Artificial Sequence: Synthetic oligonucleotide
  Target: LAMA2; (-) strand; PAM type: NRG; PAM sequence: AAG
aatatcttcaaaattctgag

SEQ ID NO: 60940 - DNA, 20 bp, Artificial Sequence
  Description of Artificial Sequence: Synthetic oligonucleotide
  Target: LAMA2; (-) strand; PAM type: NRG; PAM sequence: GAG
agcaatatcttcaaaattct

SEQ ID NO: 60941 - DNA, 20 bp, Artificial Sequence
  Description of Artificial Sequence: Synthetic oligonucleotide
  Target: LAMA2; (-) strand; PAM type: NRG; PAM sequence: AAG
gtgaagaattgagagccatg

SEQ ID NO: 60942 - DNA, 20 bp, Artificial Sequence
  Description of Artificial Sequence: Synthetic oligonucleotide
  Target: LAMA2; (-) strand; PAM type: NRG; PAM sequence: GAG
taaggtgagtgaagaattga

SEQ ID NO: 60943 - DNA, 20 bp, Artificial Sequence
  Description of Artificial Sequence: Synthetic oligonucleotide
  Target: LAMA2; (-) strand; PAM type: NRG; PAM sequence: GAG
agtaaggtgagtgaagaatt

SEQ ID NO: 60944 - DNA, 20 bp, Artificial Sequence
  Description of Artificial Sequence: Synthetic oligonucleotide
  Target: LAMA2; (-) strand; PAM type: NRG; PAM sequence: AAG
ttcatagagtaaggtgagtg

SEQ ID NO: 60945 - DNA, 20 bp, Artificial Sequence
  Description of Artificial Sequence: Synthetic oligonucleotide
  Target: LAMA2; (-) strand; PAM type: NRG; PAM sequence: GAG
tggggttcatagagtaaggt

SEQ ID NO: 60946 - DNA, 20 bp, Artificial Sequence
  Description of Artificial Sequence: Synthetic oligonucleotide
  Target: LAMA2; (-) strand; PAM type: NRG; PAM sequence: AGG
accctggggttcatagagta

SEQ ID NO: 60947 - DNA, 20 bp, Artificial Sequence
  Description of Artificial Sequence: Synthetic oligonucleotide
  Target: LAMA2; (-) strand; PAM type: NRG; PAM sequence: AAG
gaccctggggttcatagagt

SEQ ID NO: 60948 - DNA, 20 bp, Artificial Sequence
  Description of Artificial Sequence: Synthetic oligonucleotide
  Target: LAMA2; (-) strand; PAM type: NRG; PAM sequence: GAG
taaagaccctggggttcata

SEQ ID NO: 60949 - DNA, 20 bp, Artificial Sequence
  Description of Artificial Sequence: Synthetic oligonucleotide
  Target: LAMA2; (-) strand; PAM type: NRG; PAM sequence: TAG
tgtaaagaccctggggttca

SEQ ID NO: 60950 - DNA, 20 bp, Artificial Sequence
  Description of Artificial Sequence: Synthetic oligonucleotide
  Target: LAMA2; (-) strand; PAM type: NRG; PAM sequence: GGG
caagggatgtaaagaccctg

SEQ ID NO: 60951 - DNA, 20 bp, Artificial Sequence
  Description of Artificial Sequence: Synthetic oligonucleotide
  Target: LAMA2; (-) strand; PAM type: NRG; PAM sequence: GGG
tcaagggatgtaaagaccct

SEQ ID NO: 60952 - DNA, 20 bp, Artificial Sequence
  Description of Artificial Sequence: Synthetic oligonucleotide
  Target: LAMA2; (-) strand; PAM type: NRG; PAM sequence: TGG
ctcaagggatgtaaagaccc

SEQ ID NO: 60953 - DNA, 20 bp, Artificial Sequence
  Description of Artificial Sequence: Synthetic oligonucleotide
  Target: LAMA2; (-) strand; PAM type: NRG; PAM sequence: AAG
ttcagtcctcaagggatgta

SEQ ID NO: 60954 - DNA, 20 bp, Artificial Sequence
  Description of Artificial Sequence: Synthetic oligonucleotide
  Target: LAMA2; (-) strand; PAM type: NRG; PAM sequence: GGG
aaacacacttcagtcctcaa

SEQ ID NO: 60955 - DNA, 20 bp, Artificial Sequence
  Description of Artificial Sequence: Synthetic oligonucleotide
  Target: LAMA2; (-) strand; PAM type: NRG; PAM sequence: AGG
gaaacacacttcagtcctca

SEQ ID NO: 60956 - DNA, 20 bp, Artificial Sequence
  Description of Artificial Sequence: Synthetic oligonucleotide
  Target: LAMA2; (-) strand; PAM type: NRG; PAM sequence: AAG
ggaaacacacttcagtcctc

SEQ ID NO: 60957 - DNA, 20 bp, Artificial Sequence
  Description of Artificial Sequence: Synthetic oligonucleotide
  Target: LAMA2; (-) strand; PAM type: NRG; PAM sequence: CAG
cctgaagtggaaacacactt

SEQ ID NO: 60958 - DNA, 20 bp, Artificial Sequence
  Description of Artificial Sequence: Synthetic oligonucleotide
  Target: LAMA2; (-) strand; PAM type: NRG; PAM sequence: TGG
ccagtgcaaagcacctgaag

SEQ ID NO: 60959 - DNA, 20 bp, Artificial Sequence
  Description of Artificial Sequence: Synthetic oligonucleotide
  Target: LAMA2; (-) strand; PAM type: NRG; PAM sequence: AAG
cagccagtgcaaagcacctg

SEQ ID NO: 60960 - DNA, 20 bp, Artificial Sequence
  Description of Artificial Sequence: Synthetic oligonucleotide
  Target: LAMA2; (-) strand; PAM type: NRG; PAM sequence: AAG
atagaagaccagccagtgca

SEQ ID NO: 60961 - DNA, 20 bp, Artificial Sequence
  Description of Artificial Sequence: Synthetic oligonucleotide
  Target: LAMA2; (-) strand; PAM type: NRG; PAM sequence: CAG
attccagatagaagaccagc

SEQ ID NO: 60962 - DNA, 20 bp, Artificial Sequence
  Description of Artificial Sequence: Synthetic oligonucleotide
  Target: LAMA2; (-) strand; PAM type: NRG; PAM sequence: CAG
aagcattccagatagaagac

SEQ ID NO: 60963 - DNA, 20 bp, Artificial Sequence
  Description of Artificial Sequence: Synthetic oligonucleotide
  Target: LAMA2; (-) strand; PAM type: NRG; PAM sequence: AAG
gggagaagcattccagatag

SEQ ID NO: 60964 - DNA, 20 bp, Artificial Sequence
  Description of Artificial Sequence: Synthetic oligonucleotide
  Target: LAMA2; (-) strand; PAM type: NRG; PAM sequence: TAG
ttggggagaagcattccaga

SEQ ID NO: 60965 - DNA, 20 bp, Artificial Sequence
  Description of Artificial Sequence: Synthetic oligonucleotide
  Target: LAMA2; (-) strand; PAM type: NRG; PAM sequence: CAG
tatcttggggagaagcattc

SEQ ID NO: 60966 - DNA, 20 bp, Artificial Sequence
  Description of Artificial Sequence: Synthetic oligonucleotide
  Target: LAMA2; (-) strand; PAM type: NRG; PAM sequence: AAG
ccagaagatatcttggggag

SEQ ID NO: 60967 - DNA, 20 bp, Artificial Sequence
  Description of Artificial Sequence: Synthetic oligonucleotide
  Target: LAMA2; (-) strand; PAM type: NRG; PAM sequence: GAG
tagccagaagatatcttggg

SEQ ID NO: 60968 - DNA, 20 bp, Artificial Sequence
  Description of Artificial Sequence: Synthetic oligonucleotide
  Target: LAMA2; (-) strand; PAM type: NRG; PAM sequence: GGG
gttagccagaagatatcttg

SEQ ID NO: 60969 - DNA, 20 bp, Artificial Sequence
  Description of Artificial Sequence: Synthetic oligonucleotide
  Target: LAMA2; (-) strand; PAM type: NRG; PAM sequence: GGG
agttagccagaagatatctt

SEQ ID NO: 60970 - DNA, 20 bp, Artificial Sequence
  Description of Artificial Sequence: Synthetic oligonucleotide
  Target: LAMA2; (-) strand; PAM type: NRG; PAM sequence: TGG
gagttagccagaagatatct

SEQ ID NO: 60971 - DNA, 20 bp, Artificial Sequence
  Description of Artificial Sequence: Synthetic oligonucleotide
  Target: LAMA2; (-) strand; PAM type: NRG; PAM sequence: AAG
aagaaaagagagttagccag

SEQ ID NO: 60972 - DNA, 20 bp, Artificial Sequence
  Description of Artificial Sequence: Synthetic oligonucleotide
  Target: LAMA2; (-) strand; PAM type: NRG; PAM sequence: CAG
aagaagaaaagagagttagc

SEQ ID NO: 60973 - DNA, 20 bp, Artificial Sequence
  Description of Artificial Sequence: Synthetic oligonucleotide
  Target: LAMA2; (-) strand; PAM type: NRG; PAM sequence: TAG
ttctaagaagaaaagagagt

SEQ ID NO: 60974 - DNA, 20 bp, Artificial Sequence
  Description of Artificial Sequence: Synthetic oligonucleotide
  Target: LAMA2; (-) strand; PAM type: NRG; PAM sequence: GAG
agttttctaagaagaaaaga

SEQ ID NO: 60975 - DNA, 20 bp, Artificial Sequence
  Description of Artificial Sequence: Synthetic oligonucleotide
  Target: LAMA2; (-) strand; PAM type: NRG; PAM sequence: GAG
gcagttttctaagaagaaaa

SEQ ID NO: 60976 - DNA, 20 bp, Artificial Sequence
  Description of Artificial Sequence: Synthetic oligonucleotide
  Target: LAMA2; (-) strand; PAM type: NRG; PAM sequence: AAG
tagcagttttctaagaagaa

SEQ ID NO: 60977 - DNA, 20 bp, Artificial Sequence
  Description of Artificial Sequence: Synthetic oligonucleotide
  Target: LAMA2; (-) strand; PAM type: NRG; PAM sequence: AAG
aatcttagcagttttctaag

SEQ ID NO: 60978 - DNA, 20 bp, Artificial Sequence
  Description of Artificial Sequence: Synthetic oligonucleotide
  Target: LAMA2; (-) strand; PAM type: NRG; PAM sequence: AAG
gtaaatcttagcagttttct

SEQ ID NO: 60979 - DNA, 20 bp, Artificial Sequence
  Description of Artificial Sequence: Synthetic oligonucleotide
  Target: LAMA2; (-) strand; PAM type: NRG; PAM sequence: CAG
ttgggaatggtaaatcttag

SEQ ID NO: 60980 - DNA, 20 bp, Artificial Sequence
  Description of Artificial Sequence: Synthetic oligonucleotide
  Target: LAMA2; (-) strand; PAM type: NRG; PAM sequence: TAG
tcattgggaatggtaaatct

SEQ ID NO: 60981 - DNA, 20 bp, Artificial Sequence
  Description of Artificial Sequence: Synthetic oligonucleotide
  Target: LAMA2; (-) strand; PAM type: NRG; PAM sequence: TGG
aagaggcggctcattgggaa

SEQ ID NO: 60982 - DNA, 20 bp, Artificial Sequence
  Description of Artificial Sequence: Synthetic oligonucleotide
  Target: LAMA2; (-) strand; PAM type: NRG; PAM sequence: GGG
aggacaagaggcggctcatt

SEQ ID NO: 60983 - DNA, 20 bp, Artificial Sequence
  Description of Artificial Sequence: Synthetic oligonucleotide
  Target: LAMA2; (-) strand; PAM type: NRG; PAM sequence: TGG
aaggacaagaggcggctcat

SEQ ID NO: 60984 - DNA, 20 bp, Artificial Sequence
  Description of Artificial Sequence: Synthetic oligonucleotide
  Target: LAMA2; (-) strand; PAM type: NRG; PAM sequence: CGG
ataaataaaaggacaagagg

SEQ ID NO: 60985 - DNA, 20 bp, Artificial Sequence
  Description of Artificial Sequence: Synthetic oligonucleotide
  Target: LAMA2; (-) strand; PAM type: NRG; PAM sequence: AGG
aaaataaataaaaggacaag

SEQ ID NO: 60986 - DNA, 20 bp, Artificial Sequence
  Description of Artificial Sequence: Synthetic oligonucleotide
  Target: LAMA2; (-) strand; PAM type: NRG; PAM sequence: GAG
aaaaataaataaaaggacaa

SEQ ID NO: 60987 - DNA, 20 bp, Artificial Sequence
  Description of Artificial Sequence: Synthetic oligonucleotide
  Target: LAMA2; (-) strand; PAM type: NRG; PAM sequence: AAG
gcaaaaataaataaaaggac

SEQ ID NO: 60988 - DNA, 20 bp, Artificial Sequence
  Description of Artificial Sequence: Synthetic oligonucleotide
  Target: LAMA2; (-) strand; PAM type: NRG; PAM sequence: AGG
agtttgcaaaaataaataaa

SEQ ID NO: 60989 - DNA, 20 bp, Artificial Sequence
  Description of Artificial Sequence: Synthetic oligonucleotide
  Target: LAMA2; (-) strand; PAM type: NRG; PAM sequence: AAG
cagtttgcaaaaataaataa

SEQ ID NO: 60990 - DNA, 20 bp, Artificial Sequence
  Description of Artificial Sequence: Synthetic oligonucleotide
  Target: LAMA2; (-) strand; PAM type: NRG; PAM sequence: CAG
ggaatggcagtgggcagggg

SEQ ID NO: 60991 - DNA, 20 bp, Artificial Sequence
  Description of Artificial Sequence: Synthetic oligonucleotide
  Target: LAMA2; (-) strand; PAM type: NRG; PAM sequence: GGG
ccaggaatggcagtgggcag

SEQ ID NO: 60992 - DNA, 20 bp, Artificial Sequence
  Description of Artificial Sequence: Synthetic oligonucleotide
  Target: LAMA2; (-) strand; PAM type: NRG; PAM sequence: GGG
accaggaatggcagtgggca

SEQ ID NO: 60993 - DNA, 20 bp, Artificial Sequence
  Description of Artificial Sequence: Synthetic oligonucleotide
  Target: LAMA2; (-) strand; PAM type: NRG; PAM sequence: AGG
gaccaggaatggcagtgggc

SEQ ID NO: 60994 - DNA, 20 bp, Artificial Sequence
  Description of Artificial Sequence: Synthetic oligonucleotide
  Target: LAMA2; (-) strand; PAM type: NRG; PAM sequence: CAG
agaccaggaatggcagtggg

SEQ ID NO: 60995 - DNA, 20 bp, Artificial Sequence
  Description of Artificial Sequence: Synthetic oligonucleotide
  Target: LAMA2; (-) strand; PAM type: NRG; PAM sequence: GGG
gggagaccaggaatggcagt

SEQ ID NO: 60996 - DNA, 20 bp, Artificial Sequence
  Description of Artificial Sequence: Synthetic oligonucleotide
  Target: LAMA2; (-) strand; PAM type: NRG; PAM sequence: TGG
agggagaccaggaatggcag

SEQ ID NO: 60997 - DNA, 20 bp, Artificial Sequence
  Description of Artificial Sequence: Synthetic oligonucleotide
  Target: LAMA2; (-) strand; PAM type: NRG; PAM sequence: CAG
tttagggagaccaggaatgg

SEQ ID NO: 60998 - DNA, 20 bp, Artificial Sequence
  Description of Artificial Sequence: Synthetic oligonucleotide
  Target: LAMA2; (-) strand; PAM type: NRG; PAM sequence: TGG
ttgtttagggagaccaggaa

SEQ ID NO: 60999 - DNA, 20 bp, Artificial Sequence
  Description of Artificial Sequence: Synthetic oligonucleotide
  Target: LAMA2; (-) strand; PAM type: NRG; PAM sequence: AGG
aagacttgtttagggagacc

SEQ ID NO: 61000 - DNA, 20 bp, Artificial Sequence
  Description of Artificial Sequence: Synthetic oligonucleotide
  Target: LAMA2; (-) strand; PAM type: NRG; PAM sequence: CAG
taagacttgtttagggagac

SEQ ID NO: 61001 - DNA, 20 bp, Artificial Sequence
  Description of Artificial Sequence: Synthetic oligonucleotide
  Target: LAMA2; (-) strand; PAM type: NRG; PAM sequence: GAG
aatactaagacttgtttagg

SEQ ID NO: 61002 - DNA, 20 bp, Artificial Sequence
  Description of Artificial Sequence: Synthetic oligonucleotide
  Target: LAMA2; (-) strand; PAM type: NRG; PAM sequence: GGG
gaaatactaagacttgttta

SEQ ID NO: 61003 - DNA, 20 bp, Artificial Sequence
  Description of Artificial Sequence: Synthetic oligonucleotide
  Target: LAMA2; (-) strand; PAM type: NRG; PAM sequence: AGG
agaaatactaagacttgttt

SEQ ID NO: 61004 - DNA, 20 bp, Artificial Sequence
  Description of Artificial Sequence: Synthetic oligonucleotide
  Target: LAMA2; (-) strand; PAM type: NRG; PAM sequence: TAG
aagaaatactaagacttgtt

SEQ ID NO: 61005 - DNA, 20 bp, Artificial Sequence
  Description of Artificial Sequence: Synthetic oligonucleotide
  Target: LAMA2; (-) strand; PAM type: NRG; PAM sequence: AAG
agagaaagggaagaaatact

SEQ ID NO: 61006 - DNA, 20 bp, Artificial Sequence
  Description of Artificial Sequence: Synthetic oligonucleotide
  Target: LAMA2; (-) strand; PAM type: NRG; PAM sequence: AAG
caacatgaaaagagaaaggg

SEQ ID NO: 61007 - DNA, 20 bp, Artificial Sequence
  Description of Artificial Sequence: Synthetic oligonucleotide
  Target: LAMA2; (-) strand; PAM type: NRG; PAM sequence: GGG
tttcaacatgaaaagagaaa

SEQ ID NO: 61008 - DNA, 20 bp, Artificial Sequence
  Description of Artificial Sequence: Synthetic oligonucleotide
  Target: LAMA2; (-) strand; PAM type: NRG; PAM sequence: AGG
atttcaacatgaaaagagaa

SEQ ID NO: 61009 - DNA, 20 bp, Artificial Sequence
  Description of Artificial Sequence: Synthetic oligonucleotide
  Target: LAMA2; (-) strand; PAM type: NRG; PAM sequence: AAG
tatttcaacatgaaaagaga

SEQ ID NO: 61010 - DNA, 20 bp, Artificial Sequence
  Description of Artificial Sequence: Synthetic oligonucleotide
  Target: LAMA2; (-) strand; PAM type: NRG; PAM sequence: GAG
agtgtatttcaacatgaaaa

SEQ ID NO: 61011 - DNA, 20 bp, Artificial Sequence
  Description of Artificial Sequence: Synthetic oligonucleotide
  Target: LAMA2; (-) strand; PAM type: NRG; PAM sequence: AAG
atagtgtatttcaacatgaa

SEQ ID NO: 61012 - DNA, 20 bp, Artificial Sequence
  Description of Artificial Sequence: Synthetic oligonucleotide
  Target: LAMA2; (-) strand; PAM type: NRG; PAM sequence: TAG
taatacataagtaaactata

SEQ ID NO: 61013 - DNA, 20 bp, Artificial Sequence
  Description of Artificial Sequence: Synthetic oligonucleotide
  Target: LAMA2; (-) strand; PAM type: NRG; PAM sequence: AAG
aaaaagtttacctaatacat

SEQ ID NO: 61014 - DNA, 20 bp, Artificial Sequence
  Description of Artificial Sequence: Synthetic oligonucleotide
  Target: LAMA2; (-) strand; PAM type: NRG; PAM sequence: AAG
gtacagagagaggcaataaa

SEQ ID NO: 61015 - DNA, 20 bp, Artificial Sequence
  Description of Artificial Sequence: Synthetic oligonucleotide
  Target: LAMA2; (-) strand; PAM type: NRG; PAM sequence: AGG
agcttggggagtacagagag

SEQ ID NO: 61016 - DNA, 20 bp, Artificial Sequence
  Description of Artificial Sequence: Synthetic oligonucleotide
  Target: LAMA2; (-) strand; PAM type: NRG; PAM sequence: GAG
tagcttggggagtacagaga

SEQ ID NO: 61017 - DNA, 20 bp, Artificial Sequence
  Description of Artificial Sequence: Synthetic oligonucleotide
  Target: LAMA2; (-) strand; PAM type: NRG; PAM sequence: GAG
agtagcttggggagtacaga

SEQ ID NO: 61018 - DNA, 20 bp, Artificial Sequence
  Description of Artificial Sequence: Synthetic oligonucleotide
  Target: LAMA2; (-) strand; PAM type: NRG; PAM sequence: GAG
gaagtagcttggggagtaca

SEQ ID NO: 61019 - DNA, 20 bp, Artificial Sequence
  Description of Artificial Sequence: Synthetic oligonucleotide
  Target: LAMA2; (-) strand; PAM type: NRG; PAM sequence: CAG
aagaagtagcttggggagta

SEQ ID NO: 61020 - DNA, 20 bp, Artificial Sequence
  Description of Artificial Sequence: Synthetic oligonucleotide
  Target: LAMA2; (-) strand; PAM type: NRG; PAM sequence: GAG
gggtcaagaagtagcttggg

SEQ ID NO: 61021 - DNA, 20 bp, Artificial Sequence
  Description of Artificial Sequence: Synthetic oligonucleotide
  Target: LAMA2; (-) strand; PAM type: NRG; PAM sequence: GGG
aagggtcaagaagtagcttg

SEQ ID NO: 61022 - DNA, 20 bp, Artificial Sequence
  Description of Artificial Sequence: Synthetic oligonucleotide
  Target: LAMA2; (-) strand; PAM type: NRG; PAM sequence: GGG
caagggtcaagaagtagctt

SEQ ID NO: 61023 - DNA, 20 bp, Artificial Sequence
  Description of Artificial Sequence: Synthetic oligonucleotide
  Target: LAMA2; (-) strand; PAM type: NRG; PAM sequence: TGG
tcaagggtcaagaagtagct

SEQ ID NO: 61024 - DNA, 20 bp, Artificial Sequence
  Description of Artificial Sequence: Synthetic oligonucleotide
  Target: LAMA2; (-) strand; PAM type: NRG; PAM sequence: TAG
ttttttcaagggtcaagaag

SEQ ID NO: 61025 - DNA, 20 bp, Artificial Sequence
  Description of Artificial Sequence: Synthetic oligonucleotide
  Target: LAMA2; (-) strand; PAM type: NRG; PAM sequence: AAG
acattttttcaagggtcaag

SEQ ID NO: 61026 - DNA, 20 bp, Artificial Sequence
  Description of Artificial Sequence: Synthetic oligonucleotide
  Target: LAMA2; (-) strand; PAM type: NRG; PAM sequence: AAG
tctacattttttcaagggtc

SEQ ID NO: 61027 - DNA, 20 bp, Artificial Sequence
  Description of Artificial Sequence: Synthetic oligonucleotide
  Target: LAMA2; (-) strand; PAM type: NRG; PAM sequence: GGG
tggaatctacattttttcaa

SEQ ID NO: 61028 - DNA, 20 bp, Artificial Sequence
  Description of Artificial Sequence: Synthetic oligonucleotide
  Target: LAMA2; (-) strand; PAM type: NRG; PAM sequence: AGG
atggaatctacattttttca

SEQ ID NO: 61029 - DNA, 20 bp, Artificial Sequence
  Description of Artificial Sequence: Synthetic oligonucleotide
  Target: LAMA2; (-) strand; PAM type: NRG; PAM sequence: AAG
catggaatctacattttttc

SEQ ID NO: 61030 - DNA, 20 bp, Artificial Sequence
  Description of Artificial Sequence: Synthetic oligonucleotide
  Target: LAMA2; (-) strand; PAM type: NRG; PAM sequence: TGG
ataaaaattttatacgatca

SEQ ID NO: 61031 - DNA, 20 bp, Artificial Sequence
  Description of Artificial Sequence: Synthetic oligonucleotide
  Target: LAMA2; (-) strand; PAM type: NRG; PAM sequence: AAG
ttaatttagaaaagttttta

SEQ ID NO: 61032 - DNA, 20 bp, Artificial Sequence
  Description of Artificial Sequence: Synthetic oligonucleotide
  Target: LAMA2; (-) strand; PAM type: NRG; PAM sequence: AAG
tataatttattaatttagaa

SEQ ID NO: 61033 - DNA, 20 bp, Artificial Sequence
  Description of Artificial Sequence: Synthetic oligonucleotide
  Target: LAMA2; (-) strand; PAM type: NRG; PAM sequence: TAG
ttttttataatttattaatt

SEQ ID NO: 61034 - DNA, 20 bp, Artificial Sequence
  Description of Artificial Sequence: Synthetic oligonucleotide
  Target: LAMA2; (-) strand; PAM type: NRG; PAM sequence: TAG
taggtgtttaggcatacatc

SEQ ID NO: 61035 - DNA, 20 bp, Artificial Sequence
  Description of Artificial Sequence: Synthetic oligonucleotide
  Target: LAMA2; (-) strand; PAM type: NRG; PAM sequence: AGG
aggcacttttctaggtgttt

SEQ ID NO: 61036 - DNA, 20 bp, Artificial Sequence
  Description of Artificial Sequence: Synthetic oligonucleotide
  Target: LAMA2; (-) strand; PAM type: NRG; PAM sequence: TAG
caggcacttttctaggtgtt

SEQ ID NO: 61037 - DNA, 20 bp, Artificial Sequence
  Description of Artificial Sequence: Synthetic oligonucleotide
  Target: LAMA2; (-) strand; PAM type: NRG; PAM sequence: AGG
catgcgccaggcacttttct

SEQ ID NO: 61038 - DNA, 20 bp, Artificial Sequence
  Description of Artificial Sequence: Synthetic oligonucleotide
  Target: LAMA2; (-) strand; PAM type: NRG; PAM sequence: TAG
acatgcgccaggcacttttc

SEQ ID NO: 61039 - DNA, 20 bp, Artificial Sequence
  Description of Artificial Sequence: Synthetic oligonucleotide
  Target: LAMA2; (-) strand; PAM type: NRG; PAM sequence: AGG
tctaatttctaacatgcgcc

SEQ ID NO: 61040 - DNA, 20 bp, Artificial Sequence
  Description of Artificial Sequence: Synthetic oligonucleotide
  Target: LAMA2; (-) strand; PAM type: NRG; PAM sequence: CAG
ttctaatttctaacatgcgc

SEQ ID NO: 61041 - DNA, 20 bp, Artificial Sequence
  Description of Artificial Sequence: Synthetic oligonucleotide
  Target: LAMA2; (-) strand; PAM type: NRG; PAM sequence: AAG
aaaatcataaaactgttcat

SEQ ID NO: 61042 - DNA, 20 bp, Artificial Sequence
  Description of Artificial Sequence: Synthetic oligonucleotide
  Target: LAMA2; (-) strand; PAM type: NRG; PAM sequence: AAG
ataagataggggaaattggc

SEQ ID NO: 61043 - DNA, 20 bp, Artificial Sequence
  Description of Artificial Sequence: Synthetic oligonucleotide
  Target: LAMA2; (-) strand; PAM type: NRG; PAM sequence: TGG
atatataagataggggaaat

SEQ ID NO: 61044 - DNA, 20 bp, Artificial Sequence
  Description of Artificial Sequence: Synthetic oligonucleotide
  Target: LAMA2; (-) strand; PAM type: NRG; PAM sequence: GGG
tgatcacatatataagatag

SEQ ID NO: 61045 - DNA, 20 bp, Artificial Sequence
  Description of Artificial Sequence: Synthetic oligonucleotide
  Target: LAMA2; (-) strand; PAM type: NRG; PAM sequence: GGG
ctgatcacatatataagata

SEQ ID NO: 61046 - DNA, 20 bp, Artificial Sequence
  Description of Artificial Sequence: Synthetic oligonucleotide
  Target: LAMA2; (-) strand; PAM type: NRG; PAM sequence: AGG
tctgatcacatatataagat

SEQ ID NO: 61047 - DNA, 20 bp, Artificial Sequence
  Description of Artificial Sequence: Synthetic oligonucleotide
  Target: LAMA2; (-) strand; PAM type: NRG; PAM sequence: TAG
atctgatcacatatataaga

SEQ ID NO: 61048 - DNA, 20 bp, Artificial Sequence
  Description of Artificial Sequence: Synthetic oligonucleotide
  Target: LAMA2; (-) strand; PAM type: NRG; PAM sequence: AAG
aaaaatctgatcacatatat

SEQ ID NO: 61049 - DNA, 20 bp, Artificial Sequence
  Description of Artificial Sequence: Synthetic oligonucleotide
  Target: LAMA2; (-) strand; PAM type: NRG; PAM sequence: AGG
aaaatcctaaaagtttacag

SEQ ID NO: 61050 - DNA, 20 bp, Artificial Sequence
  Description of Artificial Sequence: Synthetic oligonucleotide
  Target: LAMA2; (-) strand; PAM type: NRG; PAM sequence: GAG
taaaatcctaaaagtttaca

SEQ ID NO: 61051 - DNA, 20 bp, Artificial Sequence
  Description of Artificial Sequence: Synthetic oligonucleotide
  Target: LAMA2; (-) strand; PAM type: NRG; PAM sequence: CAG
gataaaatcctaaaagttta

SEQ ID NO: 61052 - DNA, 20 bp, Artificial Sequence
  Description of Artificial Sequence: Synthetic oligonucleotide
  Target: LAMA2; (-) strand; PAM type: NRG; PAM sequence: AAG
gggtcaagataaaatcctaa

SEQ ID NO: 61053 - DNA, 20 bp, Artificial Sequence
  Description of Artificial Sequence: Synthetic oligonucleotide
  Target: LAMA2; (-) strand; PAM type: NRG; PAM sequence: AAG
actacagaacatttggggtc

SEQ ID NO: 61054 - DNA, 20 bp, Artificial Sequence
  Description of Artificial Sequence: Synthetic oligonucleotide
  Target: LAMA2; (-) strand; PAM type: NRG; PAM sequence: GGG
atcaaactacagaacatttg

SEQ ID NO: 61055 - DNA, 20 bp, Artificial Sequence
  Description of Artificial Sequence: Synthetic oligonucleotide
  Target: LAMA2; (-) strand; PAM type: NRG; PAM sequence: GGG
gatcaaactacagaacattt

SEQ ID NO: 61056 - DNA, 20 bp, Artificial Sequence
  Description of Artificial Sequence: Synthetic oligonucleotide
  Target: LAMA2; (-) strand; PAM type: NRG; PAM sequence: TGG
tgatcaaactacagaacatt

SEQ ID NO: 61057 - DNA, 20 bp, Artificial Sequence
  Description of Artificial Sequence: Synthetic oligonucleotide
  Target: LAMA2; (-) strand; PAM type: NRG; PAM sequence: CAG
gtcatattgtgatcaaacta

SEQ ID NO: 61058 - DNA, 20 bp, Artificial Sequence
  Description of Artificial Sequence: Synthetic oligonucleotide
  Target: LAMA2; (-) strand; PAM type: NRG; PAM sequence: AGG
ggtcaaaaaattcatagcac

SEQ ID NO: 61059 - DNA, 20 bp, Artificial Sequence
  Description of Artificial Sequence: Synthetic oligonucleotide
  Target: LAMA2; (-) strand; PAM type: NRG; PAM sequence: CAG
gggtcaaaaaattcatagca

SEQ ID NO: 61060 - DNA, 20 bp, Artificial Sequence
  Description of Artificial Sequence: Synthetic oligonucleotide
  Target: LAMA2; (-) strand; PAM type: NRG; PAM sequence: TAG
ttcccgggtcaaaaaattca

SEQ ID NO: 61061 - DNA, 20 bp, Artificial Sequence
  Description of Artificial Sequence: Synthetic oligonucleotide
  Target: LAMA2; (-) strand; PAM type: NRG; PAM sequence: GGG
gttaggtgtatgaatttccc

SEQ ID NO: 61062 - DNA, 20 bp, Artificial Sequence
  Description of Artificial Sequence: Synthetic oligonucleotide
  Target: LAMA2; (-) strand; PAM type: NRG; PAM sequence: CGG
agttaggtgtatgaatttcc

SEQ ID NO: 61063 - DNA, 20 bp, Artificial Sequence
  Description of Artificial Sequence: Synthetic oligonucleotide
  Target: LAMA2; (-) strand; PAM type: NRG; PAM sequence: AGG
aaaattaaaatccttaagtt

SEQ ID NO: 61064 - DNA, 20 bp, Artificial Sequence
  Description of Artificial Sequence: Synthetic oligonucleotide
  Target: LAMA2; (-) strand; PAM type: NRG; PAM sequence: TAG
aaaaattaaaatccttaagt

SEQ ID NO: 61065 - DNA, 20 bp, Artificial Sequence
  Description of Artificial Sequence: Synthetic oligonucleotide
  Target: LAMA2; (-) strand; PAM type: NRG; PAM sequence: AAG
aatgaaaaattaaaatcctt

SEQ ID NO: 61066 - DNA, 20 bp, Artificial Sequence
  Description of Artificial Sequence: Synthetic oligonucleotide
  Target: LAMA2; (-) strand; PAM type: NRG; PAM sequence: TAG
tctaacaaagaagagttcca

SEQ ID NO: 61067 - DNA, 20 bp, Artificial Sequence
  Description of Artificial Sequence: Synthetic oligonucleotide
  Target: LAMA2; (-) strand; PAM type: NRG; PAM sequence: GAG
attcaatatctaacaaagaa

SEQ ID NO: 61068 - DNA, 20 bp, Artificial Sequence
  Description of Artificial Sequence: Synthetic oligonucleotide
  Target: LAMA2; (-) strand; PAM type: NRG; PAM sequence: AAG
aaattcaatatctaacaaag

SEQ ID NO: 61069 - DNA, 20 bp, Artificial Sequence
  Description of Artificial Sequence: Synthetic oligonucleotide
  Target: LAMA2; (-) strand; PAM type: NRG; PAM sequence: AAG
atgaaattcaatatctaaca

SEQ ID NO: 61070 - DNA, 20 bp, Artificial Sequence
  Description of Artificial Sequence: Synthetic oligonucleotide
  Target: LAMA2; (-) strand; PAM type: NRG; PAM sequence: GGG
aaccaaagacaaaaagctag

SEQ ID NO: 61071 - DNA, 20 bp, Artificial Sequence
  Description of Artificial Sequence: Synthetic oligonucleotide
  Target: LAMA2; (-) strand; PAM type: NRG; PAM sequence: GGG
aaaccaaagacaaaaagcta

SEQ ID NO: 61072 - DNA, 20 bp, Artificial Sequence
  Description of Artificial Sequence: Synthetic oligonucleotide
  Target: LAMA2; (-) strand; PAM type: NRG; PAM sequence: AGG
taaaccaaagacaaaaagct

SEQ ID NO: 61073 - DNA, 20 bp, Artificial Sequence
  Description of Artificial Sequence: Synthetic oligonucleotide
  Target: LAMA2; (-) strand; PAM type: NRG; PAM sequence: TAG
ataaaccaaagacaaaaagc

SEQ ID NO: 61074 - DNA, 20 bp, Artificial Sequence
  Description of Artificial Sequence: Synthetic oligonucleotide
  Target: LAMA2; (-) strand; PAM type: NRG; PAM sequence: AAG
caaaataaaccaaagacaaa

SEQ ID NO: 61075 - DNA, 20 bp, Artificial Sequence
  Description of Artificial Sequence: Synthetic oligonucleotide
  Target: LAMA2; (-) strand; PAM type: NRG; PAM sequence: AAG
agagtaatcaaaataaacca

SEQ ID NO: 61076 - DNA, 20 bp, Artificial Sequence
  Description of Artificial Sequence: Synthetic oligonucleotide
  Target: LAMA2; (-) strand; PAM type: NRG; PAM sequence: GAG
aaaaaggaaaaaaaaaaaaa

SEQ ID NO: 61077 - DNA, 20 bp, Artificial Sequence
  Description of Artificial Sequence: Synthetic oligonucleotide
  Target: LAMA2; (-) strand; PAM type: NRG; PAM sequence: AAG
aaaaaaaggaaaaaaaaaaa

SEQ ID NO: 61078 - DNA, 20 bp, Artificial Sequence
  Description of Artificial Sequence: Synthetic oligonucleotide
  Target: LAMA2; (-) strand; PAM type: NRG; PAM sequence: AGG
ctttgtctcaaaaaaaaaaa

SEQ ID NO: 61079 - DNA, 20 bp, Artificial Sequence
  Description of Artificial Sequence: Synthetic oligonucleotide
  Target: LAMA2; (-) strand; PAM type: NRG; PAM sequence: AAG
actttgtctcaaaaaaaaaa

SEQ ID NO: 61080 - DNA, 20 bp, Artificial Sequence
  Description of Artificial Sequence: Synthetic oligonucleotide
  Target: LAMA2; (-) strand; PAM type: NRG; PAM sequence: GAG
ccagcctgggggacaagagc

SEQ ID NO: 61081 - DNA, 20 bp, Artificial Sequence
  Description of Artificial Sequence: Synthetic oligonucleotide
  Target: LAMA2; (-) strand; PAM type: NRG; PAM sequence: GAG
cactccagcctgggggacaa

SEQ ID NO: 61082 - DNA, 20 bp, Artificial Sequence
  Description of Artificial Sequence: Synthetic oligonucleotide
  Target: LAMA2; (-) strand; PAM type: NRG; PAM sequence: AAG
tgcactccagcctgggggac

SEQ ID NO: 61083 - DNA, 20 bp, Artificial Sequence
  Description of Artificial Sequence: Synthetic oligonucleotide
  Target: LAMA2; (-) strand; PAM type: NRG; PAM sequence: GGG
gccattgcactccagcctgg

SEQ ID NO: 61084 - DNA, 20 bp, Artificial Sequence
  Description of Artificial Sequence: Synthetic oligonucleotide
  Target: LAMA2; (-) strand; PAM type: NRG; PAM sequence: GGG
tgccattgcactccagcctg

SEQ ID NO: 61085 - DNA, 20 bp, Artificial Sequence
  Description of Artificial Sequence: Synthetic oligonucleotide
  Target: LAMA2; (-) strand; PAM type: NRG; PAM sequence: GGG
atgccattgcactccagcct

SEQ ID NO: 61086 - DNA, 20 bp, Artificial Sequence
  Description of Artificial Sequence: Synthetic oligonucleotide
  Target: LAMA2; (-) strand; PAM type: NRG; PAM sequence: TGG
catgccattgcactccagcc

SEQ ID NO: 61087 - DNA, 20 bp, Artificial Sequence
  Description of Artificial Sequence: Synthetic oligonucleotide
  Target: LAMA2; (-) strand; PAM type: NRG; PAM sequence: CAG
aagatcatgccattgcactc

SEQ ID NO: 61088 - DNA, 20 bp, Artificial Sequence
  Description of Artificial Sequence: Synthetic oligonucleotide
  Target: LAMA2; (-) strand; PAM type: NRG; PAM sequence: AAG
ggcagaggctgcagtgagcc

SEQ ID NO: 61089 - DNA, 20 bp, Artificial Sequence
  Description of Artificial Sequence: Synthetic oligonucleotide
  Target: LAMA2; (-) strand; PAM type: NRG; PAM sequence: GAG
tgggaggcagaggctgcagt

SEQ ID NO: 61090 - DNA, 20 bp, Artificial Sequence
  Description of Artificial Sequence: Synthetic oligonucleotide
  Target: LAMA2; (-) strand; PAM type: NRG; PAM sequence: CAG
aacctgggaggcagaggctg

SEQ ID NO: 61091 - DNA, 20 bp, Artificial Sequence
  Description of Artificial Sequence: Synthetic oligonucleotide
  Target: LAMA2; (-) strand; PAM type: NRG; PAM sequence: AGG
cgctggaacctgggaggcag

SEQ ID NO: 61092 - DNA, 20 bp, Artificial Sequence
  Description of Artificial Sequence: Synthetic oligonucleotide
  Target: LAMA2; (-) strand; PAM type: NRG; PAM sequence: GAG
tcgctggaacctgggaggca

SEQ ID NO: 61093 - DNA, 20 bp, Artificial Sequence
  Description of Artificial Sequence: Synthetic oligonucleotide
  Target: LAMA2; (-) strand; PAM type: NRG; PAM sequence: CAG
aatcgctggaacctgggagg

SEQ ID NO: 61094 - DNA, 20 bp, Artificial Sequence
  Description of Artificial Sequence: Synthetic oligonucleotide
  Target: LAMA2; (-) strand; PAM type: NRG; PAM sequence: AGG
gagaatcgctggaacctggg

SEQ ID NO: 61095 - DNA, 20 bp, Artificial Sequence
  Description of Artificial Sequence: Synthetic oligonucleotide
  Target: LAMA2; (-) strand; PAM type: NRG; PAM sequence: GAG
ggagaatcgctggaacctgg

SEQ ID NO: 61096 - DNA, 20 bp, Artificial Sequence
  Description of Artificial Sequence: Synthetic oligonucleotide
  Target: LAMA2; (-) strand; PAM type: NRG; PAM sequence: GGG
ccggagaatcgctggaacct

SEQ ID NO: 61097 - DNA, 20 bp, Artificial Sequence
  Description of Artificial Sequence: Synthetic oligonucleotide
  Target: LAMA2; (-) strand; PAM type: NRG; PAM sequence: TGG
gccggagaatcgctggaacc

SEQ ID NO: 61098 - DNA, 20 bp, Artificial Sequence
  Description of Artificial Sequence: Synthetic oligonucleotide
  Target: LAMA2; (-) strand; PAM type: NRG; PAM sequence: TGG
ggccaaggccggagaatcgc

SEQ ID NO: 61099 - DNA, 20 bp, Artificial Sequence
  Description of Artificial Sequence: Synthetic oligonucleotide
  Target: LAMA2; (-) strand; PAM type: NRG; PAM sequence: GAG
gcggggtggggccaaggccg

SEQ ID NO: 61100 - DNA, 20 bp, Artificial Sequence
  Description of Artificial Sequence: Synthetic oligonucleotide
  Target: LAMA2; (-) strand; PAM type: NRG; PAM sequence: CGG
gggcggggtggggccaaggc

SEQ ID NO: 61101 - DNA, 20 bp, Artificial Sequence
  Description of Artificial Sequence: Synthetic oligonucleotide
  Target: LAMA2; (-) strand; PAM type: NRG; PAM sequence: AGG
gcgggggcggggtggggcca

SEQ ID NO: 61102 - DNA, 20 bp, Artificial Sequence
  Description of Artificial Sequence: Synthetic oligonucleotide
  Target: LAMA2; (-) strand; PAM type: NRG; PAM sequence: AAG
ggcgggggcggggtggggcc

SEQ ID NO: 61103 - DNA, 20 bp, Artificial Sequence
  Description of Artificial Sequence: Synthetic oligonucleotide
  Target: LAMA2; (-) strand; PAM type: NRG; PAM sequence: GGG
gggtcggcgggggcggggtg

SEQ ID NO: 61104 - DNA, 20 bp, Artificial Sequence
  Description of Artificial Sequence: Synthetic oligonucleotide
  Target: LAMA2; (-) strand; PAM type: NRG; PAM sequence: GGG
ggggtcggcgggggcggggt

SEQ ID NO: 61105 - DNA, 20 bp, Artificial Sequence
  Description of Artificial Sequence: Synthetic oligonucleotide
  Target: LAMA2; (-) strand; PAM type: NRG; PAM sequence: TGG
gggggtcggcgggggcgggg

SEQ ID NO: 61106 - DNA, 20 bp, Artificial Sequence
  Description of Artificial Sequence: Synthetic oligonucleotide
  Target: LAMA2; (-) strand; PAM type: NRG; PAM sequence: GGG
catgggggtcggcgggggcg

SEQ ID NO: 61107 - DNA, 20 bp, Artificial Sequence
  Description of Artificial Sequence: Synthetic oligonucleotide
  Target: LAMA2; (-) strand; PAM type: NRG; PAM sequence: GGG
tcatgggggtcggcgggggc

SEQ ID NO: 61108 - DNA, 20 bp, Artificial Sequence
  Description of Artificial Sequence: Synthetic oligonucleotide
  Target: LAMA2; (-) strand; PAM type: NRG; PAM sequence: CGG
ctcatgggggtcggcggggg

SEQ ID NO: 61109 - DNA, 20 bp, Artificial Sequence
  Description of Artificial Sequence: Synthetic oligonucleotide
  Target: LAMA2; (-) strand; PAM type: NRG; PAM sequence: GGG
ctactcatgggggtcggcgg

SEQ ID NO: 61110 - DNA, 20 bp, Artificial Sequence
  Description of Artificial Sequence: Synthetic oligonucleotide
  Target: LAMA2; (-) strand; PAM type: NRG; PAM sequence: GGG
gctactcatgggggtcggcg

SEQ ID NO: 61111 - DNA, 20 bp, Artificial Sequence
  Description of Artificial Sequence: Synthetic oligonucleotide
  Target: LAMA2; (-) strand; PAM type: NRG; PAM sequence: GGG
agctactcatgggggtcggc

SEQ ID NO: 61112 - DNA, 20 bp, Artificial Sequence
  Description of Artificial Sequence: Synthetic oligonucleotide
  Target: LAMA2; (-) strand; PAM type: NRG; PAM sequence: CGG
cagctactcatgggggtcgg

SEQ ID NO: 61113 - DNA, 20 bp, Artificial Sequence
  Description of Artificial Sequence: Synthetic oligonucleotide
  Target: LAMA2; (-) strand; PAM type: NRG; PAM sequence: CGG
tcccagctactcatgggggt

SEQ ID NO: 61114 - DNA, 20 bp, Artificial Sequence
  Description of Artificial Sequence: Synthetic oligonucleotide
  Target: LAMA2; (-) strand; PAM type: NRG; PAM sequence: GGG
gaaatcccagctactcatgg

SEQ ID NO: 61115 - DNA, 20 bp, Artificial Sequence
  Description of Artificial Sequence: Synthetic oligonucleotide
  Target: LAMA2; (-) strand; PAM type: NRG; PAM sequence: GGG
tgaaatcccagctactcatg

SEQ ID NO: 61116 - DNA, 20 bp, Artificial Sequence
  Description of Artificial Sequence: Synthetic oligonucleotide
  Target: LAMA2; (-) strand; PAM type: NRG; PAM sequence: GGG
ctgaaatcccagctactcat

SEQ ID NO: 61117 - DNA, 20 bp, Artificial Sequence
  Description of Artificial Sequence: Synthetic oligonucleotide
  Target: LAMA2; (-) strand; PAM type: NRG; PAM sequence: TGG
cctgaaatcccagctactca

SEQ ID NO: 61118 - DNA, 20 bp, Artificial Sequence
  Description of Artificial Sequence: Synthetic oligonucleotide
  Target: LAMA2; (-) strand; PAM type: NRG; PAM sequence: CAG
gtggcaggcacctgaaatcc

SEQ ID NO: 61119 - DNA, 20 bp, Artificial Sequence
  Description of Artificial Sequence: Synthetic oligonucleotide
  Target: LAMA2; (-) strand; PAM type: NRG; PAM sequence: AGG
aattagccgggtttggtggc

SEQ ID NO: 61120 - DNA, 20 bp, Artificial Sequence
  Description of Artificial Sequence: Synthetic oligonucleotide
  Target: LAMA2; (-) strand; PAM type: NRG; PAM sequence: CAG
aaattagccgggtttggtgg

SEQ ID NO: 61121 - DNA, 20 bp, Artificial Sequence
  Description of Artificial Sequence: Synthetic oligonucleotide
  Target: LAMA2; (-) strand; PAM type: NRG; PAM sequence: TGG
caaaaattagccgggtttgg

SEQ ID NO: 61122 - DNA, 20 bp, Artificial Sequence
  Description of Artificial Sequence: Synthetic oligonucleotide
  Target: LAMA2; (-) strand; PAM type: NRG; PAM sequence: TGG
atacaaaaattagccgggtt

SEQ ID NO: 61123 - DNA, 20 bp, Artificial Sequence
  Description of Artificial Sequence: Synthetic oligonucleotide
  Target: LAMA2; (-) strand; PAM type: NRG; PAM sequence: GGG
taaaaatacaaaaattagcc

SEQ ID NO: 61124 - DNA, 20 bp, Artificial Sequence
  Description of Artificial Sequence: Synthetic oligonucleotide
  Target: LAMA2; (-) strand; PAM type: NRG; PAM sequence: CGG
ctaaaaatacaaaaattagc

SEQ ID NO: 61125 - DNA, 20 bp, Artificial Sequence
  Description of Artificial Sequence: Synthetic oligonucleotide
  Target: LAMA2; (-) strand; PAM type: NRG; PAM sequence: TAG
tctactaaaaatacaaaaat

SEQ ID NO: 61126 - DNA, 20 bp, Artificial Sequence
  Description of Artificial Sequence: Synthetic oligonucleotide
  Target: LAMA2; (-) strand; PAM type: NRG; PAM sequence: TGG
ccagaccagcctggcccaca

SEQ ID NO: 61127 - DNA, 20 bp, Artificial Sequence
  Description of Artificial Sequence: Synthetic oligonucleotide
  Target: LAMA2; (-) strand; PAM type: NRG; PAM sequence: TGG
tcaggcgttccagaccagcc

SEQ ID NO: 61128 - DNA, 20 bp, Artificial Sequence
  Description of Artificial Sequence: Synthetic oligonucleotide
  Target: LAMA2; (-) strand; PAM type: NRG; PAM sequence: CAG
cgaggtcaggcgttccagac

SEQ ID NO: 61129 - DNA, 20 bp, Artificial Sequence
  Description of Artificial Sequence: Synthetic oligonucleotide
  Target: LAMA2; (-) strand; PAM type: NRG; PAM sequence: CAG
tcacccgaggtcaggcgttc

SEQ ID NO: 61130 - DNA, 20 bp, Artificial Sequence
  Description of Artificial Sequence: Synthetic oligonucleotide
  Target: LAMA2; (-) strand; PAM type: NRG; PAM sequence: AGG
cgggtggatcacccgaggtc

SEQ ID NO: 61131 - DNA, 20 bp, Artificial Sequence
  Description of Artificial Sequence: Synthetic oligonucleotide
  Target: LAMA2; (-) strand; PAM type: NRG; PAM sequence: CAG
gcgggtggatcacccgaggt

SEQ ID NO: 61132 - DNA, 20 bp, Artificial Sequence
  Description of Artificial Sequence: Synthetic oligonucleotide
  Target: LAMA2; (-) strand; PAM type: NRG; PAM sequence: AGG
ccaggcgggtggatcacccg

SEQ ID NO: 61133 - DNA, 20 bp, Artificial Sequence
  Description of Artificial Sequence: Synthetic oligonucleotide
  Target: LAMA2; (-) strand; PAM type: NRG; PAM sequence: GAG
accaggcgggtggatcaccc

SEQ ID NO: 61134 - DNA, 20 bp, Artificial Sequence
  Description of Artificial Sequence: Synthetic oligonucleotide
  Target: LAMA2; (-) strand; PAM type: NRG; PAM sequence: TGG
ctttgggaggaccaggcggg

SEQ ID NO: 61135 - DNA, 20 bp, Artificial Sequence
  Description of Artificial Sequence: Synthetic oligonucleotide
  Target: LAMA2; (-) strand; PAM type: NRG; PAM sequence: GGG
gcactttgggaggaccaggc

SEQ ID NO: 61136 - DNA, 20 bp, Artificial Sequence
  Description of Artificial Sequence: Synthetic oligonucleotide
  Target: LAMA2; (-) strand; PAM type: NRG; PAM sequence: CGG
agcactttgggaggaccagg

SEQ ID NO: 61137 - DNA, 20 bp, Artificial Sequence
  Description of Artificial Sequence: Synthetic oligonucleotide
  Target: LAMA2; (-) strand; PAM type: NRG; PAM sequence: AGG
cccagcactttgggaggacc

SEQ ID NO: 61138 - DNA, 20 bp, Artificial Sequence
  Description of Artificial Sequence: Synthetic oligonucleotide
  Target: LAMA2; (-) strand; PAM type: NRG; PAM sequence: CAG
tcccagcactttgggaggac

SEQ ID NO: 61139 - DNA, 20 bp, Artificial Sequence
  Description of Artificial Sequence: Synthetic oligonucleotide
  Target: LAMA2; (-) strand; PAM type: NRG; PAM sequence: AGG
tgtaatcccagcactttggg

SEQ ID NO: 61140 - DNA, 20 bp, Artificial Sequence
  Description of Artificial Sequence: Synthetic oligonucleotide
  Target: LAMA2; (-) strand; PAM type: NRG; PAM sequence: GAG
ctgtaatcccagcactttgg

SEQ ID NO: 61141 - DNA, 20 bp, Artificial Sequence
  Description of Artificial Sequence: Synthetic oligonucleotide
  Target: LAMA2; (-) strand; PAM type: NRG; PAM sequence: GGG
gcctgtaatcccagcacttt

SEQ ID NO: 61142 - DNA, 20 bp, Artificial Sequence
  Description of Artificial Sequence: Synthetic oligonucleotide
  Target: LAMA2; (-) strand; PAM type: NRG; PAM sequence: TGG
cgcctgtaatcccagcactt

SEQ ID NO: 61143 - DNA, 20 bp, Artificial Sequence
  Description of Artificial Sequence: Synthetic oligonucleotide
  Target: LAMA2; (-) strand; PAM type: NRG; PAM sequence: CAG
gtggctcacgcctgtaatcc

SEQ ID NO: 61144 - DNA, 20 bp, Artificial Sequence
  Description of Artificial Sequence: Synthetic oligonucleotide
  Target: LAMA2; (-) strand; PAM type: NRG; PAM sequence: TGG
gagaaatcggctgggcgtgg

SEQ ID NO: 61145 - DNA, 20 bp, Artificial Sequence
  Description of Artificial Sequence: Synthetic oligonucleotide
  Target: LAMA2; (-) strand; PAM type: NRG; PAM sequence: TGG
aaagagaaatcggctgggcg

SEQ ID NO: 61146 - DNA, 20 bp, Artificial Sequence
  Description of Artificial Sequence: Synthetic oligonucleotide
  Target: LAMA2; (-) strand; PAM type: NRG; PAM sequence: GGG
aaagaaaagagaaatcggct

SEQ ID NO: 61147 - DNA, 20 bp, Artificial Sequence
  Description of Artificial Sequence: Synthetic oligonucleotide
  Target: LAMA2; (-) strand; PAM type: NRG; PAM sequence: TGG
aaaagaaaagagaaatcggc

SEQ ID NO: 61148 - DNA, 20 bp, Artificial Sequence
  Description of Artificial Sequence: Synthetic oligonucleotide
  Target: LAMA2; (-) strand; PAM type: NRG; PAM sequence: CGG
aaataaaagaaaagagaaat

SEQ ID NO: 61149 - DNA, 20 bp, Artificial Sequence
  Description of Artificial Sequence: Synthetic oligonucleotide
  Target: LAMA2; (-) strand; PAM type: NRG; PAM sequence: GAG
gaaaaggaaataaaagaaaa

SEQ ID NO: 61150 - DNA, 20 bp, Artificial Sequence
  Description of Artificial Sequence: Synthetic oligonucleotide
  Target: LAMA2; (-) strand; PAM type: NRG; PAM sequence: AAG
aagaaaaggaaataaaagaa

SEQ ID NO: 61151 - DNA, 20 bp, Artificial Sequence
  Description of Artificial Sequence: Synthetic oligonucleotide
  Target: LAMA2; (-) strand; PAM type: NRG; PAM sequence: AAG
atataaagaaaaggaaataa

SEQ ID NO: 61152 - DNA, 20 bp, Artificial Sequence
  Description of Artificial Sequence: Synthetic oligonucleotide
  Target: LAMA2; (-) strand; PAM type: NRG; PAM sequence: AGG
aacaatagaatataaagaaa

SEQ ID NO: 61153 - DNA, 20 bp, Artificial Sequence
  Description of Artificial Sequence: Synthetic oligonucleotide
  Target: LAMA2; (-) strand; PAM type: NRG; PAM sequence: AAG
aaacaatagaatataaagaa

SEQ ID NO: 61154 - DNA, 20 bp, Artificial Sequence
  Description of Artificial Sequence: Synthetic oligonucleotide
  Target: LAMA2; (-) strand; PAM type: NRG; PAM sequence: AAG
aggggaaacaatagaatata

SEQ ID NO: 61155 - DNA, 20 bp, Artificial Sequence
  Description of Artificial Sequence: Synthetic oligonucleotide
  Target: LAMA2; (-) strand; PAM type: NRG; PAM sequence: TAG
ggtctccccaggggaaacaa

SEQ ID NO: 61156 - DNA, 20 bp, Artificial Sequence
  Description of Artificial Sequence: Synthetic oligonucleotide
  Target: LAMA2; (-) strand; PAM type: NRG; PAM sequence: GGG
aggtgaggaggtctccccag

SEQ ID NO: 61157 - DNA, 20 bp, Artificial Sequence
  Description of Artificial Sequence: Synthetic oligonucleotide
  Target: LAMA2; (-) strand; PAM type: NRG; PAM sequence: GGG
aaggtgaggaggtctcccca

SEQ ID NO: 61158 - DNA, 20 bp, Artificial Sequence
  Description of Artificial Sequence: Synthetic oligonucleotide
  Target: LAMA2; (-) strand; PAM type: NRG; PAM sequence: AGG
aaaggtgaggaggtctcccc

SEQ ID NO: 61159 - DNA, 20 bp, Artificial Sequence
  Description of Artificial Sequence: Synthetic oligonucleotide
  Target: LAMA2; (-) strand; PAM type: NRG; PAM sequence: CAG
taaaggtgaggaggtctccc

SEQ ID NO: 61160 - DNA, 20 bp, Artificial Sequence
  Description of Artificial Sequence: Synthetic oligonucleotide
  Target: LAMA2; (-) strand; PAM type: NRG; PAM sequence: AGG
gttgtaagataaaggtgagg

SEQ ID NO: 61161 - DNA, 20 bp, Artificial Sequence
  Description of Artificial Sequence: Synthetic oligonucleotide
  Target: LAMA2; (-) strand; PAM type: NRG; PAM sequence: GAG
tgttgtaagataaaggtgag

SEQ ID NO: 61162 - DNA, 20 bp, Artificial Sequence
  Description of Artificial Sequence: Synthetic oligonucleotide
  Target: LAMA2; (-) strand; PAM type: NRG; PAM sequence: AGG
aatgttgtaagataaaggtg

SEQ ID NO: 61163 - DNA, 20 bp, Artificial Sequence
  Description of Artificial Sequence: Synthetic oligonucleotide
  Target: LAMA2; (-) strand; PAM type: NRG; PAM sequence: GAG
aaatgttgtaagataaaggt

SEQ ID NO: 61164 - DNA, 20 bp, Artificial Sequence
  Description of Artificial Sequence: Synthetic oligonucleotide
  Target: LAMA2; (-) strand; PAM type: NRG; PAM sequence: AGG
tttaaaatgttgtaagataa

SEQ ID NO: 61165 - DNA, 20 bp, Artificial Sequence
  Description of Artificial Sequence: Synthetic oligonucleotide
  Target: LAMA2; (-) strand; PAM type: NRG; PAM sequence: AAG
atttaaaatgttgtaagata

SEQ ID NO: 61166 - DNA, 20 bp, Artificial Sequence
  Description of Artificial Sequence: Synthetic oligonucleotide
  Target: LAMA2; (-) strand; PAM type: NRG; PAM sequence: AAG
ggtaatatttaaaatgttgt

SEQ ID NO: 61167 - DNA, 20 bp, Artificial Sequence
  Description of Artificial Sequence: Synthetic oligonucleotide
  Target: LAMA2; (-) strand; PAM type: NRG; PAM sequence: TGG
acaaaagaattattaaatta

SEQ ID NO: 61168 - DNA, 20 bp, Artificial Sequence
  Description of Artificial Sequence: Synthetic oligonucleotide
  Target: LAMA2; (-) strand; PAM type: NRG; PAM sequence: AAG
aaagactactcaaagcacaa

SEQ ID NO: 61169 - DNA, 20 bp, Artificial Sequence
  Description of Artificial Sequence: Synthetic oligonucleotide
  Target: LAMA2; (-) strand; PAM type: NRG; PAM sequence: AAG
aatttttaaaagactactca

SEQ ID NO: 61170 - DNA, 20 bp, Artificial Sequence
  Description of Artificial Sequence: Synthetic oligonucleotide
  Target: LAMA2; (-) strand; PAM type: NRG; PAM sequence: AAG
gatgagatattaatttttaa

SEQ ID NO: 61171 - DNA, 20 bp, Artificial Sequence
  Description of Artificial Sequence: Synthetic oligonucleotide
  Target: LAMA2; (-) strand; PAM type: NRG; PAM sequence: GAG
gcacaaaacaagaacaggat

SEQ ID NO: 61172 - DNA, 20 bp, Artificial Sequence
  Description of Artificial Sequence: Synthetic oligonucleotide
  Target: LAMA2; (-) strand; PAM type: NRG; PAM sequence: AGG
ggcatgcacaaaacaagaac

SEQ ID NO: 61173 - DNA, 20 bp, Artificial Sequence
  Description of Artificial Sequence: Synthetic oligonucleotide
  Target: LAMA2; (-) strand; PAM type: NRG; PAM sequence: CAG
tggcatgcacaaaacaagaa

SEQ ID NO: 61174 - DNA, 20 bp, Artificial Sequence
  Description of Artificial Sequence: Synthetic oligonucleotide
  Target: LAMA2; (-) strand; PAM type: NRG; PAM sequence: AAG
acatatggcatgcacaaaac

SEQ ID NO: 61175 - DNA, 20 bp, Artificial Sequence
  Description of Artificial Sequence: Synthetic oligonucleotide
  Target: LAMA2; (-) strand; PAM type: NRG; PAM sequence: TGG
cggagaactagcaaaacata

SEQ ID NO: 61176 - DNA, 20 bp, Artificial Sequence
  Description of Artificial Sequence: Synthetic oligonucleotide
  Target: LAMA2; (-) strand; PAM type: NRG; PAM sequence: TAG
agtcaatattctcggagaac

SEQ ID NO: 61177 - DNA, 20 bp, Artificial Sequence
  Description of Artificial Sequence: Synthetic oligonucleotide
  Target: LAMA2; (-) strand; PAM type: NRG; PAM sequence: GAG
aaaatgagtcaatattctcg

SEQ ID NO: 61178 - DNA, 20 bp, Artificial Sequence
  Description of Artificial Sequence: Synthetic oligonucleotide
  Target: LAMA2; (-) strand; PAM type: NRG; PAM sequence: CGG
caaaaatgagtcaatattct

SEQ ID NO: 61179 - DNA, 20 bp, Artificial Sequence
  Description of Artificial Sequence: Synthetic oligonucleotide
  Target: LAMA2; (-) strand; PAM type: NRG; PAM sequence: GAG
atattaaaaacttcaaaaat

SEQ ID NO: 61180 - DNA, 20 bp, Artificial Sequence
  Description of Artificial Sequence: Synthetic oligonucleotide
  Target: LAMA2; (-) strand; PAM type: NRG; PAM sequence: AGG
aaacaaaacagaggaaacaa

SEQ ID NO: 61181 - DNA, 20 bp, Artificial Sequence
  Description of Artificial Sequence: Synthetic oligonucleotide
  Target: LAMA2; (-) strand; PAM type: NRG; PAM sequence: AAG
aaaacaaaacagaggaaaca

SEQ ID NO: 61182 - DNA, 20 bp, Artificial Sequence
  Description of Artificial Sequence: Synthetic oligonucleotide
  Target: LAMA2; (-) strand; PAM type: NRG; PAM sequence: AGG
catgaaagaaaacaaaacag

SEQ ID NO: 61183 - DNA, 20 bp, Artificial Sequence
  Description of Artificial Sequence: Synthetic oligonucleotide
  Target: LAMA2; (-) strand; PAM type: NRG; PAM sequence: GAG
ccatgaaagaaaacaaaaca

SEQ ID NO: 61184 - DNA, 20 bp, Artificial Sequence
  Description of Artificial Sequence: Synthetic oligonucleotide
  Target: LAMA2; (-) strand; PAM type: NRG; PAM sequence: CAG
tcccatgaaagaaaacaaaa

SEQ ID NO: 61185 - DNA, 20 bp, Artificial Sequence
  Description of Artificial Sequence: Synthetic oligonucleotide
  Target: LAMA2; (-) strand; PAM type: NRG; PAM sequence: AAG
aaattttgtatctcccatga

SEQ ID NO: 61186 - DNA, 20 bp, Artificial Sequence
  Description of Artificial Sequence: Synthetic oligonucleotide
  Target: LAMA2; (-) strand; PAM type: NRG; PAM sequence: CAG
attggacagcaaaattttcc

SEQ ID NO: 61187 - DNA, 20 bp, Artificial Sequence
  Description of Artificial Sequence: Synthetic oligonucleotide
  Target: LAMA2; (-) strand; PAM type: NRG; PAM sequence: CAG
ctcagctaaacattattgga

SEQ ID NO: 61188 - DNA, 20 bp, Artificial Sequence
  Description of Artificial Sequence: Synthetic oligonucleotide
  Target: LAMA2; (-) strand; PAM type: NRG; PAM sequence: TGG
gtgtctcagctaaacattat

SEQ ID NO: 61189 - DNA, 20 bp, Artificial Sequence
  Description of Artificial Sequence: Synthetic oligonucleotide
  Target: LAMA2; (-) strand; PAM type: NRG; PAM sequence: CAG
atttaacaattttagtgtct

SEQ ID NO: 61190 - DNA, 20 bp, Artificial Sequence
  Description of Artificial Sequence: Synthetic oligonucleotide
  Target: LAMA2; (-) strand; PAM type: NRG; PAM sequence: TAG
atacagagatttaacaattt

SEQ ID NO: 61191 - DNA, 20 bp, Artificial Sequence
  Description of Artificial Sequence: Synthetic oligonucleotide
  Target: LAMA2; (-) strand; PAM type: NRG; PAM sequence: GAG
acatgctttcgtgacataca

SEQ ID NO: 61192 - DNA, 20 bp, Artificial Sequence
  Description of Artificial Sequence: Synthetic oligonucleotide
  Target: LAMA2; (-) strand; PAM type: NRG; PAM sequence: CAG
taacatgctttcgtgacata

SEQ ID NO: 61193 - DNA, 20 bp, Artificial Sequence
  Description of Artificial Sequence: Synthetic oligonucleotide
  Target: LAMA2; (-) strand; PAM type: NRG; PAM sequence: GAG
atgataccttgttcatattt

SEQ ID NO: 61194 - DNA, 20 bp, Artificial Sequence
  Description of Artificial Sequence: Synthetic oligonucleotide
  Target: LAMA2; (-) strand; PAM type: NRG; PAM sequence: GAG
cctaccgagaggatatttgg

SEQ ID NO: 61195 - DNA, 20 bp, Artificial Sequence
  Description of Artificial Sequence: Synthetic oligonucleotide
  Target: LAMA2; (-) strand; PAM type: NRG; PAM sequence: GGG
agcctaccgagaggatattt

SEQ ID NO: 61196 - DNA, 20 bp, Artificial Sequence
  Description of Artificial Sequence: Synthetic oligonucleotide
  Target: LAMA2; (-) strand; PAM type: NRG; PAM sequence: TGG
tagcctaccgagaggatatt

SEQ ID NO: 61197 - DNA, 20 bp, Artificial Sequence
  Description of Artificial Sequence: Synthetic oligonucleotide
  Target: LAMA2; (-) strand; PAM type: NRG; PAM sequence: AGG
cataaaaatagcctaccgag

SEQ ID NO: 61198 - DNA, 20 bp, Artificial Sequence
  Description of Artificial Sequence: Synthetic oligonucleotide
  Target: LAMA2; (-) strand; PAM type: NRG; PAM sequence: GAG
ccataaaaatagcctaccga

SEQ ID NO: 61199 - DNA, 20 bp, Artificial Sequence
  Description of Artificial Sequence: Synthetic oligonucleotide
  Target: LAMA2; (-) strand; PAM type: NRG; PAM sequence: GAG
gtccataaaaatagcctacc

SEQ ID NO: 61200 - DNA, 20 bp, Artificial Sequence
  Description of Artificial Sequence: Synthetic oligonucleotide
  Target: LAMA2; (-) strand; PAM type: NRG; PAM sequence: TAG
aaaatacctgtccataaaaa

SEQ ID NO: 61201 - DNA, 20 bp, Artificial Sequence
  Description of Artificial Sequence: Synthetic oligonucleotide
  Target: LAMA2; (-) strand; PAM type: NRG; PAM sequence: TGG
aaatgctagcagacaaagat

SEQ ID NO: 61202 - DNA, 20 bp, Artificial Sequence
  Description of Artificial Sequence: Synthetic oligonucleotide
  Target: LAMA2; (-) strand; PAM type: NRG; PAM sequence: AAG
aacaaaaatgctagcagaca

SEQ ID NO: 61203 - DNA, 20 bp, Artificial Sequence
  Description of Artificial Sequence: Synthetic oligonucleotide
  Target: LAMA2; (-) strand; PAM type: NRG; PAM sequence: CAG
gttctcaacaaaaatgctag

SEQ ID NO: 61204 - DNA, 20 bp, Artificial Sequence
  Description of Artificial Sequence: Synthetic oligonucleotide
  Target: LAMA2; (-) strand; PAM type: NRG; PAM sequence: TAG
tccgttctcaacaaaaatgc

SEQ ID NO: 61205 - DNA, 20 bp, Artificial Sequence
  Description of Artificial Sequence: Synthetic oligonucleotide
  Target: LAMA2; (-) strand; PAM type: NRG; PAM sequence: TAG
agtgtgattattctcatcct

SEQ ID NO: 61206 - DNA, 20 bp, Artificial Sequence
  Description of Artificial Sequence: Synthetic oligonucleotide
  Target: LAMA2; (-) strand; PAM type: NRG; PAM sequence: GAG
gtgaaaatctacatattgta

SEQ ID NO: 61207 - DNA, 20 bp, Artificial Sequence
  Description of Artificial Sequence: Synthetic oligonucleotide
  Target: LAMA2; (-) strand; PAM type: NRG; PAM sequence: TAG
aagtgaaaatctacatattg

SEQ ID NO: 61208 - DNA, 20 bp, Artificial Sequence
  Description of Artificial Sequence: Synthetic oligonucleotide
  Target: LAMA2; (-) strand; PAM type: NRG; PAM sequence: AAG
aattcatactaaaaatgaaa

SEQ ID NO: 61209 - DNA, 20 bp, Artificial Sequence
  Description of Artificial Sequence: Synthetic oligonucleotide
  Target: LAMA2; (-) strand; PAM type: NRG; PAM sequence: AAG
gaaggatgaggggtgaggat

SEQ ID NO: 61210 - DNA, 20 bp, Artificial Sequence
  Description of Artificial Sequence: Synthetic oligonucleotide
  Target: LAMA2; (-) strand; PAM type: NRG; PAM sequence: AGG
gcagtgaaggatgaggggtg

SEQ ID NO: 61211 - DNA, 20 bp, Artificial Sequence
  Description of Artificial Sequence: Synthetic oligonucleotide
  Target: LAMA2; (-) strand; PAM type: NRG; PAM sequence: GAG
tgcagtgaaggatgaggggt

SEQ ID NO: 61212 - DNA, 20 bp, Artificial Sequence
  Description of Artificial Sequence: Synthetic oligonucleotide
  Target: LAMA2; (-) strand; PAM type: NRG; PAM sequence: GGG
accatgcagtgaaggatgag

SEQ ID NO: 61213 - DNA, 20 bp, Artificial Sequence
  Description of Artificial Sequence: Synthetic oligonucleotide
  Target: LAMA2; (-) strand; PAM type: NRG; PAM sequence: GGG
taccatgcagtgaaggatga

SEQ ID NO: 61214 - DNA, 20 bp, Artificial Sequence
  Description of Artificial Sequence: Synthetic oligonucleotide
  Target: LAMA2; (-) strand; PAM type: NRG; PAM sequence: AGG
ttaccatgcagtgaaggatg

SEQ ID NO: 61215 - DNA, 20 bp, Artificial Sequence
  Description of Artificial Sequence: Synthetic oligonucleotide
  Target: LAMA2; (-) strand; PAM type: NRG; PAM sequence: GAG
attaccatgcagtgaaggat

SEQ ID NO: 61216 - DNA, 20 bp, Artificial Sequence
  Description of Artificial Sequence: Synthetic oligonucleotide
  Target: LAMA2; (-) strand; PAM type: NRG; PAM sequence: AGG
gtccaattaccatgcagtga

SEQ ID NO: 61217 - DNA, 20 bp, Artificial Sequence
  Description of Artificial Sequence: Synthetic oligonucleotide
  Target: LAMA2; (-) strand; PAM type: NRG; PAM sequence: AAG
tgtccaattaccatgcagtg

SEQ ID NO: 61218 - DNA, 20 bp, Artificial Sequence
  Description of Artificial Sequence: Synthetic oligonucleotide
  Target: LAMA2; (-) strand; PAM type: NRG; PAM sequence: CAG
gaaagtgtccaattaccatg

SEQ ID NO: 61219 - DNA, 20 bp, Artificial Sequence
  Description of Artificial Sequence: Synthetic oligonucleotide
  Target: LAMA2; (-) strand; PAM type: NRG; PAM sequence: AAG
tctagggaaatttaataaga

SEQ ID NO: 61220 - DNA, 20 bp, Artificial Sequence
  Description of Artificial Sequence: Synthetic oligonucleotide
  Target: LAMA2; (-) strand; PAM type: NRG; PAM sequence: AAG
attctctagggaaatttaat

SEQ ID NO: 61221 - DNA, 20 bp, Artificial Sequence
  Description of Artificial Sequence: Synthetic oligonucleotide
  Target: LAMA2; (-) strand; PAM type: NRG; PAM sequence: GGG
aaccctaatacaattctcta

SEQ ID NO: 61222 - DNA, 20 bp, Artificial Sequence
  Description of Artificial Sequence: Synthetic oligonucleotide
  Target: LAMA2; (-) strand; PAM type: NRG; PAM sequence: AGG
gaaccctaatacaattctct

SEQ ID NO: 61223 - DNA, 20 bp, Artificial Sequence
  Description of Artificial Sequence: Synthetic oligonucleotide
  Target: LAMA2; (-) strand; PAM type: NRG; PAM sequence: TAG
agaaccctaatacaattctc

SEQ ID NO: 61224 - DNA, 20 bp, Artificial Sequence
  Description of Artificial Sequence: Synthetic oligonucleotide
  Target: LAMA2; (-) strand; PAM type: NRG; PAM sequence: CAG
atattagttctgtccctcta

SEQ ID NO: 61225 - DNA, 20 bp, Artificial Sequence
  Description of Artificial Sequence: Synthetic oligonucleotide
  Target: LAMA2; (-) strand; PAM type: NRG; PAM sequence: TAG
tatatatatatatatcatat

SEQ ID NO: 61226 - DNA, 20 bp, Artificial Sequence
  Description of Artificial Sequence: Synthetic oligonucleotide
  Target: LAMA2; (-) strand; PAM type: NRG; PAM sequence: AAG
gtatatatatgcagtcgtat

SEQ ID NO: 61227 - DNA, 20 bp, Artificial Sequence
  Description of Artificial Sequence: Synthetic oligonucleotide
  Target: LAMA2; (-) strand; PAM type: NRG; PAM sequence: CAG
tatatatatgtatatatatg

SEQ ID NO: 61228 - DNA, 20 bp, Artificial Sequence
  Description of Artificial Sequence: Synthetic oligonucleotide
  Target: LAMA2; (-) strand; PAM type: NRG; PAM sequence: AAG
gtgggaccttgtgatcgagt

SEQ ID NO: 61229 - DNA, 20 bp, Artificial Sequence
  Description of Artificial Sequence: Synthetic oligonucleotide
  Target: LAMA2; (-) strand; PAM type: NRG; PAM sequence: GAG
tattgtgggaccttgtgatc

SEQ ID NO: 61230 - DNA, 20 bp, Artificial Sequence
  Description of Artificial Sequence: Synthetic oligonucleotide
  Target: LAMA2; (-) strand; PAM type: NRG; PAM sequence: GGG
gcttgcagacagcctattgt

SEQ ID NO: 61231 - DNA, 20 bp, Artificial Sequence
  Description of Artificial Sequence: Synthetic oligonucleotide
  Target: LAMA2; (-) strand; PAM type: NRG; PAM sequence: TGG
agcttgcagacagcctattg

SEQ ID NO: 61232 - DNA, 20 bp, Artificial Sequence
  Description of Artificial Sequence: Synthetic oligonucleotide
  Target: LAMA2; (-) strand; PAM type: NRG; PAM sequence: CAG
cttgctcctcagcttgcaga

SEQ ID NO: 61233 - DNA, 20 bp, Artificial Sequence
  Description of Artificial Sequence: Synthetic oligonucleotide
  Target: LAMA2; (-) strand; PAM type: NRG; PAM sequence: CAG
tctccttgctcctcagcttg

SEQ ID NO: 61234 - DNA, 20 bp, Artificial Sequence
  Description of Artificial Sequence: Synthetic oligonucleotide
  Target: LAMA2; (-) strand; PAM type: NRG; PAM sequence: CAG
gactggctctccttgctcct

SEQ ID NO: 61235 - DNA, 20 bp, Artificial Sequence
  Description of Artificial Sequence: Synthetic oligonucleotide
  Target: LAMA2; (-) strand; PAM type: NRG; PAM sequence: TGG
ttcagttttgggacccagac

SEQ ID NO: 61236 - DNA, 20 bp, Artificial Sequence
  Description of Artificial Sequence: Synthetic oligonucleotide
  Target: LAMA2; (-) strand; PAM type: NRG; PAM sequence: CAG
agttcttcagttttgggacc

SEQ ID NO: 61237 - DNA, 20 bp, Artificial Sequence
  Description of Artificial Sequence: Synthetic oligonucleotide
  Target: LAMA2; (-) strand; PAM type: NRG; PAM sequence: GGG
actccaagttcttcagtttt

SEQ ID NO: 61238 - DNA, 20 bp, Artificial Sequence
  Description of Artificial Sequence: Synthetic oligonucleotide
  Target: LAMA2; (-) strand; PAM type: NRG; PAM sequence: TGG
gactccaagttcttcagttt

SEQ ID NO: 61239 - DNA, 20 bp, Artificial Sequence
  Description of Artificial Sequence: Synthetic oligonucleotide
  Target: LAMA2; (-) strand; PAM type: NRG; PAM sequence: CAG
acatcagactccaagttctt

SEQ ID NO: 61240 - DNA, 20 bp, Artificial Sequence
  Description of Artificial Sequence: Synthetic oligonucleotide
  Target: LAMA2; (-) strand; PAM type: NRG; PAM sequence: AAG
gtcctcaaacatcagactcc

SEQ ID NO: 61241 - DNA, 20 bp, Artificial Sequence
  Description of Artificial Sequence: Synthetic oligonucleotide
  Target: LAMA2; (-) strand; PAM type: NRG; PAM sequence: CAG
tgcttcctgtcctcaaacat

SEQ ID NO: 61242 - DNA, 20 bp, Artificial Sequence
  Description of Artificial Sequence: Synthetic oligonucleotide
  Target: LAMA2; (-) strand; PAM type: NRG; PAM sequence: TGG
tctacatctttctcccttgc

SEQ ID NO: 61243 - DNA, 20 bp, Artificial Sequence
  Description of Artificial Sequence: Synthetic oligonucleotide
  Target: LAMA2; (-) strand; PAM type: NRG; PAM sequence: CAG
gagagactggcatagcctcc

SEQ ID NO: 61244 - DNA, 20 bp, Artificial Sequence
  Description of Artificial Sequence: Synthetic oligonucleotide
  Target: LAMA2; (-) strand; PAM type: NRG; PAM sequence: TAG
gtgaaaaggagagactggca

SEQ ID NO: 61245 - DNA, 20 bp, Artificial Sequence
  Description of Artificial Sequence: Synthetic oligonucleotide
  Target: LAMA2; (-) strand; PAM type: NRG; PAM sequence: TGG
aaaatgtgaaaaggagagac

SEQ ID NO: 61246 - DNA, 20 bp, Artificial Sequence
  Description of Artificial Sequence: Synthetic oligonucleotide
  Target: LAMA2; (-) strand; PAM type: NRG; PAM sequence: GAG
ggcagaaaatgtgaaaagga

SEQ ID NO: 61247 - DNA, 20 bp, Artificial Sequence
  Description of Artificial Sequence: Synthetic oligonucleotide
  Target: LAMA2; (-) strand; PAM type: NRG; PAM sequence: GAG
caggcagaaaatgtgaaaag

SEQ ID NO: 61248 - DNA, 20 bp, Artificial Sequence
  Description of Artificial Sequence: Synthetic oligonucleotide
  Target: LAMA2; (-) strand; PAM type: NRG; PAM sequence: AGG
agcaggcagaaaatgtgaaa

SEQ ID NO: 61249 - DNA, 20 bp, Artificial Sequence
  Description of Artificial Sequence: Synthetic oligonucleotide
  Target: LAMA2; (-) strand; PAM type: NRG; PAM sequence: AAG
aagcaggcagaaaatgtgaa

SEQ ID NO: 61250 - DNA, 20 bp, Artificial Sequence
  Description of Artificial Sequence: Synthetic oligonucleotide
  Target: LAMA2; (-) strand; PAM type: NRG; PAM sequence: CAG
gccagcaaatataaagcagg

SEQ ID NO: 61251 - DNA, 20 bp, Artificial Sequence
  Description of Artificial Sequence: Synthetic oligonucleotide
  Target: LAMA2; (-) strand; PAM type: NRG; PAM sequence: AGG
gccgccagcaaatataaagc

SEQ ID NO: 61252 - DNA, 20 bp, Artificial Sequence
  Description of Artificial Sequence: Synthetic oligonucleotide
  Target: LAMA2; (-) strand; PAM type: NRG; PAM sequence: CAG
agccgccagcaaatataaag

SEQ ID NO: 61253 - DNA, 20 bp, Artificial Sequence
  Description of Artificial Sequence: Synthetic oligonucleotide
  Target: LAMA2; (-) strand; PAM type: NRG; PAM sequence: AAG
atcagccgccagcaaatata

SEQ ID NO: 61254 - DNA, 20 bp, Artificial Sequence
  Description of Artificial Sequence: Synthetic oligonucleotide
  Target: LAMA2; (-) strand; PAM type: NRG; PAM sequence: CAG
ggcacaatctaatcagccgc

SEQ ID NO: 61255 - DNA, 20 bp, Artificial Sequence
  Description of Artificial Sequence: Synthetic oligonucleotide
  Target: LAMA2; (-) strand; PAM type: NRG; PAM sequence: CAG
tctggtgggcacaatctaat

SEQ ID NO: 61256 - DNA, 20 bp, Artificial Sequence
  Description of Artificial Sequence: Synthetic oligonucleotide
  Target: LAMA2; (-) strand; PAM type: NRG; PAM sequence: GGG
agacccacccttaatctggt

SEQ ID NO: 61257 - DNA, 20 bp, Artificial Sequence
  Description of Artificial Sequence: Synthetic oligonucleotide
  Target: LAMA2; (-) strand; PAM type: NRG; PAM sequence: TGG
cagacccacccttaatctgg

SEQ ID NO: 61258 - DNA, 20 bp, Artificial Sequence
  Description of Artificial Sequence: Synthetic oligonucleotide
  Target: LAMA2; (-) strand; PAM type: NRG; PAM sequence: TGG
aggcagacccacccttaatc

SEQ ID NO: 61259 - DNA, 20 bp, Artificial Sequence
  Description of Artificial Sequence: Synthetic oligonucleotide
  Target: LAMA2; (-) strand; PAM type: NRG; PAM sequence: CAG
agtcagtgggctgggaaagg

SEQ ID NO: 61260 - DNA, 20 bp, Artificial Sequence
  Description of Artificial Sequence: Synthetic oligonucleotide
  Target: LAMA2; (-) strand; PAM type: NRG; PAM sequence: AGG
ttgagtcagtgggctgggaa

SEQ ID NO: 61261 - DNA, 20 bp, Artificial Sequence
  Description of Artificial Sequence: Synthetic oligonucleotide
  Target: LAMA2; (-) strand; PAM type: NRG; PAM sequence: AAG
tttgagtcagtgggctggga

SEQ ID NO: 61262 - DNA, 20 bp, Artificial Sequence
  Description of Artificial Sequence: Synthetic oligonucleotide
  Target: LAMA2; (-) strand; PAM type: NRG; PAM sequence: GGG
aacatttgagtcagtgggct

SEQ ID NO: 61263 - DNA, 20 bp, Artificial Sequence
  Description of Artificial Sequence: Synthetic oligonucleotide
  Target: LAMA2; (-) strand; PAM type: NRG; PAM sequence: TGG
taacatttgagtcagtgggc

SEQ ID NO: 61264 - DNA, 20 bp, Artificial Sequence
  Description of Artificial Sequence: Synthetic oligonucleotide
  Target: LAMA2; (-) strand; PAM type: NRG; PAM sequence: GGG
aaattaacatttgagtcagt

SEQ ID NO: 61265 - DNA, 20 bp, Artificial Sequence
  Description of Artificial Sequence: Synthetic oligonucleotide
  Target: LAMA2; (-) strand; PAM type: NRG; PAM sequence: TGG
gaaattaacatttgagtcag

SEQ ID NO: 61266 - DNA, 20 bp, Artificial Sequence
  Description of Artificial Sequence: Synthetic oligonucleotide
  Target: LAMA2; (-) strand; PAM type: NRG; PAM sequence: CAG
aaggaaattaacatttgagt

SEQ ID NO: 61267 - DNA, 20 bp, Artificial Sequence
  Description of Artificial Sequence: Synthetic oligonucleotide
  Target: LAMA2; (-) strand; PAM type: NRG; PAM sequence: GAG
gccaaaggaaattaacattt

SEQ ID NO: 61268 - DNA, 20 bp, Artificial Sequence
  Description of Artificial Sequence: Synthetic oligonucleotide
  Target: LAMA2; (-) strand; PAM type: NRG; PAM sequence: AGG
atctgtgagggtgttgccaa

SEQ ID NO: 61269 - DNA, 20 bp, Artificial Sequence
  Description of Artificial Sequence: Synthetic oligonucleotide
  Target: LAMA2; (-) strand; PAM type: NRG; PAM sequence: AAG
tatctgtgagggtgttgcca

SEQ ID NO: 61270 - DNA, 20 bp, Artificial Sequence
  Description of Artificial Sequence: Synthetic oligonucleotide
  Target: LAMA2; (-) strand; PAM type: NRG; PAM sequence: GGG
gatcgtgggtgtatctgtga

SEQ ID NO: 61271 - DNA, 20 bp, Artificial Sequence
  Description of Artificial Sequence: Synthetic oligonucleotide
  Target: LAMA2; (-) strand; PAM type: NRG; PAM sequence: AGG
tgatcgtgggtgtatctgtg

SEQ ID NO: 61272 - DNA, 20 bp, Artificial Sequence
  Description of Artificial Sequence: Synthetic oligonucleotide
  Target: LAMA2; (-) strand; PAM type: NRG; PAM sequence: GAG
ttgatcgtgggtgtatctgt

SEQ ID NO: 61273 - DNA, 20 bp, Artificial Sequence
  Description of Artificial Sequence: Synthetic oligonucleotide
  Target: LAMA2; (-) strand; PAM type: NRG; PAM sequence: GGG
gaatacaaagtattgatcgt

SEQ ID NO: 61274 - DNA, 20 bp, Artificial Sequence
  Description of Artificial Sequence: Synthetic oligonucleotide
  Target: LAMA2; (-) strand; PAM type: NRG; PAM sequence: TGG
agaatacaaagtattgatcg

SEQ ID NO: 61275 - DNA, 20 bp, Artificial Sequence
  Description of Artificial Sequence: Synthetic oligonucleotide
  Target: LAMA2; (-) strand; PAM type: NRG; PAM sequence: AAG
tgattggattgaagaataca

SEQ ID NO: 61276 - DNA, 20 bp, Artificial Sequence
  Description of Artificial Sequence: Synthetic oligonucleotide
  Target: LAMA2; (-) strand; PAM type: NRG; PAM sequence: AAG
gtgtcaacttgattggattg

SEQ ID NO: 61277 - DNA, 20 bp, Artificial Sequence
  Description of Artificial Sequence: Synthetic oligonucleotide
  Target: LAMA2; (-) strand; PAM type: NRG; PAM sequence: TGG
aatacaagtgtcaacttgat

SEQ ID NO: 61278 - DNA, 20 bp, Artificial Sequence
  Description of Artificial Sequence: Synthetic oligonucleotide
  Target: LAMA2; (-) strand; PAM type: NRG; PAM sequence: AAG
attcttgtgatggttaatac

SEQ ID NO: 61279 - DNA, 20 bp, Artificial Sequence
  Description of Artificial Sequence: Synthetic oligonucleotide
  Target: LAMA2; (-) strand; PAM type: NRG; PAM sequence: TGG
ctgggaatttattcttgtga

SEQ ID NO: 61280 - DNA, 20 bp, Artificial Sequence
  Description of Artificial Sequence: Synthetic oligonucleotide
  Target: LAMA2; (-) strand; PAM type: NRG; PAM sequence: GGG
tgacctggcaagagaccact

SEQ ID NO: 61281 - DNA, 20 bp, Artificial Sequence
  Description of Artificial Sequence: Synthetic oligonucleotide
  Target: LAMA2; (-) strand; PAM type: NRG; PAM sequence: TGG
ctgacctggcaagagaccac

SEQ ID NO: 61282 - DNA, 20 bp, Artificial Sequence
  Description of Artificial Sequence: Synthetic oligonucleotide
  Target: LAMA2; (-) strand; PAM type: NRG; PAM sequence: GAG
tcccattgctgacctggcaa

SEQ ID NO: 61283 - DNA, 20 bp, Artificial Sequence
  Description of Artificial Sequence: Synthetic oligonucleotide
  Target: LAMA2; (-) strand; PAM type: NRG; PAM sequence: AAG
tatcccattgctgacctggc

SEQ ID NO: 61284 - DNA, 20 bp, Artificial Sequence
  Description of Artificial Sequence: Synthetic oligonucleotide
  Target: LAMA2; (-) strand; PAM type: NRG; PAM sequence: TGG
ttactatcccattgctgacc

SEQ ID NO: 61285 - DNA, 20 bp, Artificial Sequence
  Description of Artificial Sequence: Synthetic oligonucleotide
  Target: LAMA2; (-) strand; PAM type: NRG; PAM sequence: CAG
caaaatcttagttaggtatc

SEQ ID NO: 61286 - DNA, 20 bp, Artificial Sequence
  Description of Artificial Sequence: Synthetic oligonucleotide
  Target: LAMA2; (-) strand; PAM type: NRG; PAM sequence: AGG
gaggctgcaaaatcttagtt

SEQ ID NO: 61287 - DNA, 20 bp, Artificial Sequence
  Description of Artificial Sequence: Synthetic oligonucleotide
  Target: LAMA2; (-) strand; PAM type: NRG; PAM sequence: TAG
tgaggctgcaaaatcttagt

SEQ ID NO: 61288 - DNA, 20 bp, Artificial Sequence
  Description of Artificial Sequence: Synthetic oligonucleotide
  Target: LAMA2; (-) strand; PAM type: NRG; PAM sequence: TAG
gtgttgaggctgcaaaatct

SEQ ID NO: 61289 - DNA, 20 bp, Artificial Sequence
  Description of Artificial Sequence: Synthetic oligonucleotide
  Target: LAMA2; (-) strand; PAM type: NRG; PAM sequence: AGG
caaggctagagtaagtgttg

SEQ ID NO: 61290 - DNA, 20 bp, Artificial Sequence
  Description of Artificial Sequence: Synthetic oligonucleotide
  Target: LAMA2; (-) strand; PAM type: NRG; PAM sequence: GAG
acaaggctagagtaagtgtt

SEQ ID NO: 61291 - DNA, 20 bp, Artificial Sequence
  Description of Artificial Sequence: Synthetic oligonucleotide
  Target: LAMA2; (-) strand; PAM type: NRG; PAM sequence: AAG
ataatttacaaggctagagt

SEQ ID NO: 61292 - DNA, 20 bp, Artificial Sequence
  Description of Artificial Sequence: Synthetic oligonucleotide
  Target: LAMA2; (-) strand; PAM type: NRG; PAM sequence: GAG
ccaaataatttacaaggcta

SEQ ID NO: 61293 - DNA, 20 bp, Artificial Sequence
  Description of Artificial Sequence: Synthetic oligonucleotide
  Target: LAMA2; (-) strand; PAM type: NRG; PAM sequence: TAG
taccaaataatttacaaggc

SEQ ID NO: 61294 - DNA, 20 bp, Artificial Sequence
  Description of Artificial Sequence: Synthetic oligonucleotide
  Target: LAMA2; (-) strand; PAM type: NRG; PAM sequence: AGG
taagtaccaaataatttaca

SEQ ID NO: 61295 - DNA, 20 bp, Artificial Sequence
  Description of Artificial Sequence: Synthetic oligonucleotide
  Target: LAMA2; (-) strand; PAM type: NRG; PAM sequence: AAG
ttaagtaccaaataatttac

SEQ ID NO: 61296 - DNA, 20 bp, Artificial Sequence
  Description of Artificial Sequence: Synthetic oligonucleotide
  Target: LAMA2; (-) strand; PAM type: NRG; PAM sequence: AAG
cagaatgtctctgaaatttt

SEQ ID NO: 61297 - DNA, 20 bp, Artificial Sequence
  Description of Artificial Sequence: Synthetic oligonucleotide
  Target: LAMA2; (-) strand; PAM type: NRG; PAM sequence: CAG
ttatttgagctgctgatccc

SEQ ID NO: 61298 - DNA, 20 bp, Artificial Sequence
  Description of Artificial Sequence: Synthetic oligonucleotide
  Target: LAMA2; (-) strand; PAM type: NRG; PAM sequence: GAG
cacagcaagaagtgttattt

SEQ ID NO: 61299 - DNA, 20 bp, Artificial Sequence
  Description of Artificial Sequence: Synthetic oligonucleotide
  Target: LAMA2; (-) strand; PAM type: NRG; PAM sequence: AAG
gaggagcaaaccacagcaag

SEQ ID NO: 61300 - DNA, 20 bp, Artificial Sequence
  Description of Artificial Sequence: Synthetic oligonucleotide
  Target: LAMA2; (-) strand; PAM type: NRG; PAM sequence: AAG
ggggaggagcaaaccacagc

SEQ ID NO: 61301 - DNA, 20 bp, Artificial Sequence
  Description of Artificial Sequence: Synthetic oligonucleotide
  Target: LAMA2; (-) strand; PAM type: NRG; PAM sequence: CAG
ccaaggggaggagcaaacca

SEQ ID NO: 61302 - DNA, 20 bp, Artificial Sequence
  Description of Artificial Sequence: Synthetic oligonucleotide
  Target: LAMA2; (-) strand; PAM type: NRG; PAM sequence: GAG
gatgtgtctgccaaggggag

SEQ ID NO: 61303 - DNA, 20 bp, Artificial Sequence
  Description of Artificial Sequence: Synthetic oligonucleotide
  Target: LAMA2; (-) strand; PAM type: NRG; PAM sequence: AGG
aggatgtgtctgccaagggg

SEQ ID NO: 61304 - DNA, 20 bp, Artificial Sequence
  Description of Artificial Sequence: Synthetic oligonucleotide
  Target: LAMA2; (-) strand; PAM type: NRG; PAM sequence: GAG
taggatgtgtctgccaaggg

SEQ ID NO: 61305 - DNA, 20 bp, Artificial Sequence
  Description of Artificial Sequence: Synthetic oligonucleotide
  Target: LAMA2; (-) strand; PAM type: NRG; PAM sequence: GGG
gataggatgtgtctgccaag

SEQ ID NO: 61306 - DNA, 20 bp, Artificial Sequence
  Description of Artificial Sequence: Synthetic oligonucleotide
  Target: LAMA2; (-) strand; PAM type: NRG; PAM sequence: GGG
ggataggatgtgtctgccaa

SEQ ID NO: 61307 - DNA, 20 bp, Artificial Sequence
  Description of Artificial Sequence: Synthetic oligonucleotide
  Target: LAMA2; (-) strand; PAM type: NRG; PAM sequence: AGG
gggataggatgtgtctgcca

SEQ ID NO: 61308 - DNA, 20 bp, Artificial Sequence
  Description of Artificial Sequence: Synthetic oligonucleotide
  Target: LAMA2; (-) strand; PAM type: NRG; PAM sequence: AAG
ggggataggatgtgtctgcc

SEQ ID NO: 61309 - DNA, 20 bp, Artificial Sequence
  Description of Artificial Sequence: Synthetic oligonucleotide
  Target: LAMA2; (-) strand; PAM type: NRG; PAM sequence: AGG
gagcagaggaagctggggat

SEQ ID NO: 61310 - DNA, 20 bp, Artificial Sequence
  Description of Artificial Sequence: Synthetic oligonucleotide
  Target: LAMA2; (-) strand; PAM type: NRG; PAM sequence: TAG
agagcagaggaagctgggga

SEQ ID NO: 61311 - DNA, 20 bp, Artificial Sequence
  Description of Artificial Sequence: Synthetic oligonucleotide
  Target: LAMA2; (-) strand; PAM type: NRG; PAM sequence: GGG
gcccagagcagaggaagctg

SEQ ID NO: 61312 - DNA, 20 bp, Artificial Sequence
  Description of Artificial Sequence: Synthetic oligonucleotide
  Target: LAMA2; (-) strand; PAM type: NRG; PAM sequence: GGG
agcccagagcagaggaagct

SEQ ID NO: 61313 - DNA, 20 bp, Artificial Sequence
  Description of Artificial Sequence: Synthetic oligonucleotide
  Target: LAMA2; (-) strand; PAM type: NRG; PAM sequence: TGG
tagcccagagcagaggaagc

SEQ ID NO: 61314 - DNA, 20 bp, Artificial Sequence
  Description of Artificial Sequence: Synthetic oligonucleotide
  Target: LAMA2; (-) strand; PAM type: NRG; PAM sequence: AAG
gtactagcccagagcagagg

SEQ ID NO: 61315 - DNA, 20 bp, Artificial Sequence
  Description of Artificial Sequence: Synthetic oligonucleotide
  Target: LAMA2; (-) strand; PAM type: NRG; PAM sequence: AGG
gtggtactagcccagagcag

SEQ ID NO: 61316 - DNA, 20 bp, Artificial Sequence
  Description of Artificial Sequence: Synthetic oligonucleotide
  Target: LAMA2; (-) strand; PAM type: NRG; PAM sequence: GAG
agtggtactagcccagagca

SEQ ID NO: 61317 - DNA, 20 bp, Artificial Sequence
  Description of Artificial Sequence: Synthetic oligonucleotide
  Target: LAMA2; (-) strand; PAM type: NRG; PAM sequence: CAG
tgagtggtactagcccagag

SEQ ID NO: 61318 - DNA, 20 bp, Artificial Sequence
  Description of Artificial Sequence: Synthetic oligonucleotide
  Target: LAMA2; (-) strand; PAM type: NRG; PAM sequence: GAG
gagtgagtggtactagccca

SEQ ID NO: 61319 - DNA, 20 bp, Artificial Sequence
  Description of Artificial Sequence: Synthetic oligonucleotide
  Target: LAMA2; (-) strand; PAM type: NRG; PAM sequence: CAG
tggagtgagtggtactagcc

SEQ ID NO: 61320 - DNA, 20 bp, Artificial Sequence
  Description of Artificial Sequence: Synthetic oligonucleotide
  Target: LAMA2; (-) strand; PAM type: NRG; PAM sequence: TAG
gtggatggagtgagtggtac

SEQ ID NO: 61321 - DNA, 20 bp, Artificial Sequence
  Description of Artificial Sequence: Synthetic oligonucleotide
  Target: LAMA2; (-) strand; PAM type: NRG; PAM sequence: TGG
aggaaagtggatggagtgag

SEQ ID NO: 61322 - DNA, 20 bp, Artificial Sequence
  Description of Artificial Sequence: Synthetic oligonucleotide
  Target: LAMA2; (-) strand; PAM type: NRG; PAM sequence: GAG
ggaaggaaagtggatggagt

SEQ ID NO: 61323 - DNA, 20 bp, Artificial Sequence
  Description of Artificial Sequence: Synthetic oligonucleotide
  Target: LAMA2; (-) strand; PAM type: NRG; PAM sequence: GAG
ggatggaaggaaagtggatg

SEQ ID NO: 61324 - DNA, 20 bp, Artificial Sequence
  Description of Artificial Sequence: Synthetic oligonucleotide
  Target: LAMA2; (-) strand; PAM type: NRG; PAM sequence: TGG
taggatggaaggaaagtgga

SEQ ID NO: 61325 - DNA, 20 bp, Artificial Sequence
  Description of Artificial Sequence: Synthetic oligonucleotide
  Target: LAMA2; (-) strand; PAM type: NRG; PAM sequence: TGG
aatataggatggaaggaaag

SEQ ID NO: 61326 - DNA, 20 bp, Artificial Sequence
  Description of Artificial Sequence: Synthetic oligonucleotide
  Target: LAMA2; (-) strand; PAM type: NRG; PAM sequence: AAG
attaatataggatggaagga

SEQ ID NO: 61327 - DNA, 20 bp, Artificial Sequence
  Description of Artificial Sequence: Synthetic oligonucleotide
  Target: LAMA2; (-) strand; PAM type: NRG; PAM sequence: AGG
acaaattaatataggatgga

SEQ ID NO: 61328 - DNA, 20 bp, Artificial Sequence
  Description of Artificial Sequence: Synthetic oligonucleotide
  Target: LAMA2; (-) strand; PAM type: NRG; PAM sequence: AAG
aacaaattaatataggatgg

SEQ ID NO: 61329 - DNA, 20 bp, Artificial Sequence
  Description of Artificial Sequence: Synthetic oligonucleotide
  Target: LAMA2; (-) strand; PAM type: NRG; PAM sequence: TGG
gtcaacaaattaatatagga

SEQ ID NO: 61330 - DNA, 20 bp, Artificial Sequence
  Description of Artificial Sequence: Synthetic oligonucleotide
  Target: LAMA2; (-) strand; PAM type: NRG; PAM sequence: AGG
aagtgtcaacaaattaatat

SEQ ID NO: 61331 - DNA, 20 bp, Artificial Sequence
  Description of Artificial Sequence: Synthetic oligonucleotide
  Target: LAMA2; (-) strand; PAM type: NRG; PAM sequence: TAG
gaagtgtcaacaaattaata

SEQ ID NO: 61332 - DNA, 20 bp, Artificial Sequence
  Description of Artificial Sequence: Synthetic oligonucleotide
  Target: LAMA2; (-) strand; PAM type: NRG; PAM sequence: AAG
agaggatgacatcagaaaag

SEQ ID NO: 61333 - DNA, 20 bp, Artificial Sequence
  Description of Artificial Sequence: Synthetic oligonucleotide
  Target: LAMA2; (-) strand; PAM type: NRG; PAM sequence: AAG
tccagaggatgacatcagaa

SEQ ID NO: 61334 - DNA, 20 bp, Artificial Sequence
  Description of Artificial Sequence: Synthetic oligonucleotide
  Target: LAMA2; (-) strand; PAM type: NRG; PAM sequence: CAG
tatggtccagaggatgacat

SEQ ID NO: 61335 - DNA, 20 bp, Artificial Sequence
  Description of Artificial Sequence: Synthetic oligonucleotide
  Target: LAMA2; (-) strand; PAM type: NRG; PAM sequence: AGG
tatatatatatatggtccag

SEQ ID NO: 61336 - DNA, 20 bp, Artificial Sequence
  Description of Artificial Sequence: Synthetic oligonucleotide
  Target: LAMA2; (-) strand; PAM type: NRG; PAM sequence: GAG
atatatatatatatggtcca

SEQ ID NO: 61337 - DNA, 20 bp, Artificial Sequence
  Description of Artificial Sequence: Synthetic oligonucleotide
  Target: LAMA2; (-) strand; PAM type: NRG; PAM sequence: CAG
atatatatatatatatggtc

SEQ ID NO: 61338 - DNA, 20 bp, Artificial Sequence
  Description of Artificial Sequence: Synthetic oligonucleotide
  Target: LAMA2; (-) strand; PAM type: NRG; PAM sequence: TGG
tatatatatatatatatata

SEQ ID NO: 61339 - DNA, 20 bp, Artificial Sequence
  Description of Artificial Sequence: Synthetic oligonucleotide
  Target: LAMA2; (-) strand; PAM type: NRG; PAM sequence: AAG
aatcttctaaaataagagtt

SEQ ID NO: 61340 - DNA, 20 bp, Artificial Sequence
  Description of Artificial Sequence: Synthetic oligonucleotide
  Target: LAMA2; (-) strand; PAM type: NRG; PAM sequence: GAG
ctacaaatcttctaaaataa

SEQ ID NO: 61341 - DNA, 20 bp, Artificial Sequence
  Description of Artificial Sequence: Synthetic oligonucleotide
  Target: LAMA2; (-) strand; PAM type: NRG; PAM sequence: AAG
acctacaaatcttctaaaat

SEQ ID NO: 61342 - DNA, 20 bp, Artificial Sequence
  Description of Artificial Sequence: Synthetic oligonucleotide
  Target: LAMA2; (-) strand; PAM type: NRG; PAM sequence: TGG
aatactcaggcctaggactt

SEQ ID NO: 61343 - DNA, 20 bp, Artificial Sequence
  Description of Artificial Sequence: Synthetic oligonucleotide
  Target: LAMA2; (-) strand; PAM type: NRG; PAM sequence: AGG
acattgaaatactcaggcct

SEQ ID NO: 61344 - DNA, 20 bp, Artificial Sequence
  Description of Artificial Sequence: Synthetic oligonucleotide
  Target: LAMA2; (-) strand; PAM type: NRG; PAM sequence: TAG
cacattgaaatactcaggcc

SEQ ID NO: 61345 - DNA, 20 bp, Artificial Sequence
  Description of Artificial Sequence: Synthetic oligonucleotide
  Target: LAMA2; (-) strand; PAM type: NRG; PAM sequence: AGG
ttcttcacattgaaatactc

SEQ ID NO: 61346 - DNA, 20 bp, Artificial Sequence
  Description of Artificial Sequence: Synthetic oligonucleotide
  Target: LAMA2; (-) strand; PAM type: NRG; PAM sequence: CAG
gttcttcacattgaaatact

SEQ ID NO: 61347 - DNA, 20 bp, Artificial Sequence
  Description of Artificial Sequence: Synthetic oligonucleotide
  Target: LAMA2; (-) strand; PAM type: NRG; PAM sequence: AAG
tatcaaaaatagaggtatga

SEQ ID NO: 61348 - DNA, 20 bp, Artificial Sequence
  Description of Artificial Sequence: Synthetic oligonucleotide
  Target: LAMA2; (-) strand; PAM type: NRG; PAM sequence: AGG
tcacagactatcaaaaatag

SEQ ID NO: 61349 - DNA, 20 bp, Artificial Sequence
  Description of Artificial Sequence: Synthetic oligonucleotide
  Target: LAMA2; (-) strand; PAM type: NRG; PAM sequence: GAG
atcacagactatcaaaaata

SEQ ID NO: 61350 - DNA, 20 bp, Artificial Sequence
  Description of Artificial Sequence: Synthetic oligonucleotide
  Target: LAMA2; (-) strand; PAM type: NRG; PAM sequence: TAG
gaatcacagactatcaaaaa

SEQ ID NO: 61351 - DNA, 20 bp, Artificial Sequence
  Description of Artificial Sequence: Synthetic oligonucleotide
  Target: LAMA2; (-) strand; PAM type: NRG; PAM sequence: CAG
atagatagggctcagaatca

SEQ ID NO: 61352 - DNA, 20 bp, Artificial Sequence
  Description of Artificial Sequence: Synthetic oligonucleotide
  Target: LAMA2; (-) strand; PAM type: NRG; PAM sequence: CAG
ctgaaagcatagatagggct

SEQ ID NO: 61353 - DNA, 20 bp, Artificial Sequence
  Description of Artificial Sequence: Synthetic oligonucleotide
  Target: LAMA2; (-) strand; PAM type: NRG; PAM sequence: GGG
tttgactgaaagcatagata

SEQ ID NO: 61354 - DNA, 20 bp, Artificial Sequence
  Description of Artificial Sequence: Synthetic oligonucleotide
  Target: LAMA2; (-) strand; PAM type: NRG; PAM sequence: AGG
atttgactgaaagcatagat

SEQ ID NO: 61355 - DNA, 20 bp, Artificial Sequence
  Description of Artificial Sequence: Synthetic oligonucleotide
  Target: LAMA2; (-) strand; PAM type: NRG; PAM sequence: TAG
aatttgactgaaagcataga

SEQ ID NO: 61356 - DNA, 20 bp, Artificial Sequence
  Description of Artificial Sequence: Synthetic oligonucleotide
  Target: LAMA2; (-) strand; PAM type: NRG; PAM sequence: TAG
tggtaatttgactgaaagca

SEQ ID NO: 61357 - DNA, 20 bp, Artificial Sequence
  Description of Artificial Sequence: Synthetic oligonucleotide
  Target: LAMA2; (-) strand; PAM type: NRG; PAM sequence: AAG
accattggtaatttgactga

SEQ ID NO: 61358 - DNA, 20 bp, Artificial Sequence
  Description of Artificial Sequence: Synthetic oligonucleotide
  Target: LAMA2; (-) strand; PAM type: NRG; PAM sequence: TGG
attaaagagtttcataccat

SEQ ID NO: 61359 - DNA, 20 bp, Artificial Sequence
  Description of Artificial Sequence: Synthetic oligonucleotide
  Target: LAMA2; (-) strand; PAM type: NRG; PAM sequence: GAG
gtgagacacacaaaattaaa

SEQ ID NO: 61360 - DNA, 20 bp, Artificial Sequence
  Description of Artificial Sequence: Synthetic oligonucleotide
  Target: LAMA2; (-) strand; PAM type: NRG; PAM sequence: AAG
acgtgagacacacaaaatta

SEQ ID NO: 61361 - DNA, 20 bp, Artificial Sequence
  Description of Artificial Sequence: Synthetic oligonucleotide
  Target: LAMA2; (-) strand; PAM type: NRG; PAM sequence: GAG
ttaagctaccctctaaacgt

SEQ ID NO: 61362 - DNA, 20 bp, Artificial Sequence
  Description of Artificial Sequence: Synthetic oligonucleotide
  Target: LAMA2; (-) strand; PAM type: NRG; PAM sequence: AAG
atgcagttaaagaacctctt

SEQ ID NO: 61363 - DNA, 20 bp, Artificial Sequence
  Description of Artificial Sequence: Synthetic oligonucleotide
  Target: LAMA2; (-) strand; PAM type: NRG; PAM sequence: AAG
tcacaatagtcatgcagtta

SEQ ID NO: 61364 - DNA, 20 bp, Artificial Sequence
  Description of Artificial Sequence: Synthetic oligonucleotide
  Target: LAMA2; (-) strand; PAM type: NRG; PAM sequence: CAG
tcctcctcacaatagtcatg

SEQ ID NO: 61365 - DNA, 20 bp, Artificial Sequence
  Description of Artificial Sequence: Synthetic oligonucleotide
  Target: LAMA2; (-) strand; PAM type: NRG; PAM sequence: TAG
cataagtatcctcctcacaa

SEQ ID NO: 61366 - DNA, 20 bp, Artificial Sequence
  Description of Artificial Sequence: Synthetic oligonucleotide
  Target: LAMA2; (-) strand; PAM type: NRG; PAM sequence: AAG
ggaaatgaagaacaactcat

SEQ ID NO: 61367 - DNA, 20 bp, Artificial Sequence
  Description of Artificial Sequence: Synthetic oligonucleotide
  Target: LAMA2; (-) strand; PAM type: NRG; PAM sequence: AAG
tccttgtccccatggaaatg

SEQ ID NO: 61368 - DNA, 20 bp, Artificial Sequence
  Description of Artificial Sequence: Synthetic oligonucleotide
  Target: LAMA2; (-) strand; PAM type: NRG; PAM sequence: TGG
tttcattgtccttgtcccca

SEQ ID NO: 61369 - DNA, 20 bp, Artificial Sequence
  Description of Artificial Sequence: Synthetic oligonucleotide
  Target: LAMA2; (-) strand; PAM type: NRG; PAM sequence: AGG
tttattgtttaacaattaaa

SEQ ID NO: 61370 - DNA, 20 bp, Artificial Sequence
  Description of Artificial Sequence: Synthetic oligonucleotide
  Target: LAMA2; (-) strand; PAM type: NRG; PAM sequence: AAG
ctttattgtttaacaattaa

SEQ ID NO: 61371 - DNA, 20 bp, Artificial Sequence
  Description of Artificial Sequence: Synthetic oligonucleotide
  Target: LAMA2; (-) strand; PAM type: NRG; PAM sequence: GAG
ttcataagcacatgcctaat

SEQ ID NO: 61372 - DNA, 20 bp, Artificial Sequence
  Description of Artificial Sequence: Synthetic oligonucleotide
  Target: LAMA2; (-) strand; PAM type: NRG; PAM sequence: AAG
tcaggcctttttgtcttcat

SEQ ID NO: 61373 - DNA, 20 bp, Artificial Sequence
  Description of Artificial Sequence: Synthetic oligonucleotide
  Target: LAMA2; (-) strand; PAM type: NRG; PAM sequence: AGG
aatcactaaatcagtaaatc

SEQ ID NO: 61374 - DNA, 20 bp, Artificial Sequence
  Description of Artificial Sequence: Synthetic oligonucleotide
  Target: LAMA2; (-) strand; PAM type: NRG; PAM sequence: CAG
aaatcactaaatcagtaaat

SEQ ID NO: 61375 - DNA, 20 bp, Artificial Sequence
  Description of Artificial Sequence: Synthetic oligonucleotide
  Target: LAMA2; (-) strand; PAM type: NRG; PAM sequence: CAG
cttggactaaatcactaaat

SEQ ID NO: 61376 - DNA, 20 bp, Artificial Sequence
  Description of Artificial Sequence: Synthetic oligonucleotide
  Target: LAMA2; (-) strand; PAM type: NRG; PAM sequence: TGG
tcatatggatgtcaaagcct

SEQ ID NO: 61377 - DNA, 20 bp, Artificial Sequence
  Description of Artificial Sequence: Synthetic oligonucleotide
  Target: LAMA2; (-) strand; PAM type: NRG; PAM sequence: AAG
tccacatcatatggatgtca

SEQ ID NO: 61378 - DNA, 20 bp, Artificial Sequence
  Description of Artificial Sequence: Synthetic oligonucleotide
  Target: LAMA2; (-) strand; PAM type: NRG; PAM sequence: TGG
acccagaggtccacatcata

SEQ ID NO: 61379 - DNA, 20 bp, Artificial Sequence
  Description of Artificial Sequence: Synthetic oligonucleotide
  Target: LAMA2; (-) strand; PAM type: NRG; PAM sequence: AGG
tagacttctttagtacccag

SEQ ID NO: 61380 - DNA, 20 bp, Artificial Sequence
  Description of Artificial Sequence: Synthetic oligonucleotide
  Target: LAMA2; (-) strand; PAM type: NRG; PAM sequence: GAG
atagacttctttagtaccca

SEQ ID NO: 61381 - DNA, 20 bp, Artificial Sequence
  Description of Artificial Sequence: Synthetic oligonucleotide
  Target: LAMA2; (-) strand; PAM type: NRG; PAM sequence: CAG
ttatagacttctttagtacc

SEQ ID NO: 61382 - DNA, 20 bp, Artificial Sequence
  Description of Artificial Sequence: Synthetic oligonucleotide
  Target: LAMA2; (-) strand; PAM type: NRG; PAM sequence: TAG
ttgggatttatagacttctt

SEQ ID NO: 61383 - DNA, 20 bp, Artificial Sequence
  Description of Artificial Sequence: Synthetic oligonucleotide
  Target: LAMA2; (-) strand; PAM type: NRG; PAM sequence: TAG
acagttgtgattgggattta

SEQ ID NO: 61384 - DNA, 20 bp, Artificial Sequence
  Description of Artificial Sequence: Synthetic oligonucleotide
  Target: LAMA2; (-) strand; PAM type: NRG; PAM sequence: GGG
aattaatcacagttgtgatt

SEQ ID NO: 61385 - DNA, 20 bp, Artificial Sequence
  Description of Artificial Sequence: Synthetic oligonucleotide
  Target: LAMA2; (-) strand; PAM type: NRG; PAM sequence: TGG
taattaatcacagttgtgat

SEQ ID NO: 61386 - DNA, 20 bp, Artificial Sequence
  Description of Artificial Sequence: Synthetic oligonucleotide
  Target: LAMA2; (-) strand; PAM type: NRG; PAM sequence: CAG
aagatatttgtaattaatca

SEQ ID NO: 61387 - DNA, 20 bp, Artificial Sequence
  Description of Artificial Sequence: Synthetic oligonucleotide
  Target: LAMA2; (-) strand; PAM type: NRG; PAM sequence: AAG
agctaaagaaatacatgcat

SEQ ID NO: 61388 - DNA, 20 bp, Artificial Sequence
  Description of Artificial Sequence: Synthetic oligonucleotide
  Target: LAMA2; (-) strand; PAM type: NRG; PAM sequence: AAG
tctacctctgtctttagcta

SEQ ID NO: 61389 - DNA, 20 bp, Artificial Sequence
  Description of Artificial Sequence: Synthetic oligonucleotide
  Target: LAMA2; (-) strand; PAM type: NRG; PAM sequence: TAG
tttgattctacctctgtctt

SEQ ID NO: 61390 - DNA, 20 bp, Artificial Sequence
  Description of Artificial Sequence: Synthetic oligonucleotide
  Target: LAMA2; (-) strand; PAM type: NRG; PAM sequence: GAG
aaatagagccagtaaacttg

SEQ ID NO: 61391 - DNA, 20 bp, Artificial Sequence
  Description of Artificial Sequence: Synthetic oligonucleotide
  Target: LAMA2; (-) strand; PAM type: NRG; PAM sequence: TGG
agaaatagagccagtaaact

SEQ ID NO: 61392 - DNA, 20 bp, Artificial Sequence
  Description of Artificial Sequence: Synthetic oligonucleotide
  Target: LAMA2; (-) strand; PAM type: NRG; PAM sequence: CAG
caaatgaagagaaatagagc

SEQ ID NO: 61393 - DNA, 20 bp, Artificial Sequence
  Description of Artificial Sequence: Synthetic oligonucleotide
  Target: LAMA2; (-) strand; PAM type: NRG; PAM sequence: GAG
ttttcaaatgaagagaaata

SEQ ID NO: 61394 - DNA, 20 bp, Artificial Sequence
  Description of Artificial Sequence: Synthetic oligonucleotide
  Target: LAMA2; (-) strand; PAM type: NRG; PAM sequence: TAG
tgttttcaaatgaagagaaa

SEQ ID NO: 61395 - DNA, 20 bp, Artificial Sequence
  Description of Artificial Sequence: Synthetic oligonucleotide
  Target: LAMA2; (-) strand; PAM type: NRG; PAM sequence: GAG
aaattctgttttcaaatgaa

SEQ ID NO: 61396 - DNA, 20 bp, Artificial Sequence
  Description of Artificial Sequence: Synthetic oligonucleotide
  Target: LAMA2; (-) strand; PAM type: NRG; PAM sequence: AAG
gaaaattctgttttcaaatg

SEQ ID NO: 61397 - DNA, 20 bp, Artificial Sequence
  Description of Artificial Sequence: Synthetic oligonucleotide
  Target: LAMA2; (-) strand; PAM type: NRG; PAM sequence: GAG
aaacttttcctttgcctttt

SEQ ID NO: 61398 - DNA, 20 bp, Artificial Sequence
  Description of Artificial Sequence: Synthetic oligonucleotide
  Target: LAMA2; (-) strand; PAM type: NRG; PAM sequence: TGG
actttcattaataagagatg

SEQ ID NO: 61399 - DNA, 20 bp, Artificial Sequence
  Description of Artificial Sequence: Synthetic oligonucleotide
  Target: LAMA2; (-) strand; PAM type: NRG; PAM sequence: GAG
tgttacactttcattaataa

SEQ ID NO: 61400 - DNA, 20 bp, Artificial Sequence
  Description of Artificial Sequence: Synthetic oligonucleotide
  Target: LAMA2; (-) strand; PAM type: NRG; PAM sequence: AAG
attgttacactttcattaat

SEQ ID NO: 61401 - DNA, 20 bp, Artificial Sequence
  Description of Artificial Sequence: Synthetic oligonucleotide
  Target: LAMA2; (-) strand; PAM type: NRG; PAM sequence: GAG
ttattcagaaggagaaatgt

SEQ ID NO: 61402 - DNA, 20 bp, Artificial Sequence
  Description of Artificial Sequence: Synthetic oligonucleotide
  Target: LAMA2; (-) strand; PAM type: NRG; PAM sequence: GAG
tagtttgttttattcagaag

SEQ ID NO: 61403 - DNA, 20 bp, Artificial Sequence
  Description of Artificial Sequence: Synthetic oligonucleotide
  Target: LAMA2; (-) strand; PAM type: NRG; PAM sequence: AGG
agtagtttgttttattcaga

SEQ ID NO: 61404 - DNA, 20 bp, Artificial Sequence
  Description of Artificial Sequence: Synthetic oligonucleotide
  Target: LAMA2; (-) strand; PAM type: NRG; PAM sequence: AAG
cagtagtttgttttattcag

SEQ ID NO: 61405 - DNA, 20 bp, Artificial Sequence
  Description of Artificial Sequence: Synthetic oligonucleotide
  Target: LAMA2; (-) strand; PAM type: NRG; PAM sequence: CAG
catcagtagtttgttttatt

SEQ ID NO: 61406 - DNA, 20 bp, Artificial Sequence
  Description of Artificial Sequence: Synthetic oligonucleotide
  Target: LAMA2; (-) strand; PAM type: NRG; PAM sequence: TAG
ttatctttatctctcatcag

SEQ ID NO: 61407 - DNA, 20 bp, Artificial Sequence
  Description of Artificial Sequence: Synthetic oligonucleotide
  Target: LAMA2; (-) strand; PAM type: NRG; PAM sequence: CAG
taattatctttatctctcat

SEQ ID NO: 61408 - DNA, 20 bp, Artificial Sequence
  Description of Artificial Sequence: Synthetic oligonucleotide
  Target: LAMA2; (-) strand; PAM type: NRG; PAM sequence: AGG
gaatatttaaaagacaacag

SEQ ID NO: 61409 - DNA, 20 bp, Artificial Sequence
  Description of Artificial Sequence: Synthetic oligonucleotide
  Target: LAMA2; (-) strand; PAM type: NRG; PAM sequence: GAG
ggaatatttaaaagacaaca

SEQ ID NO: 61410 - DNA, 20 bp, Artificial Sequence
  Description of Artificial Sequence: Synthetic oligonucleotide
  Target: LAMA2; (-) strand; PAM type: NRG; PAM sequence: CAG
aaggaatatttaaaagacaa

SEQ ID NO: 61411 - DNA, 20 bp, Artificial Sequence
  Description of Artificial Sequence: Synthetic oligonucleotide
  Target: LAMA2; (-) strand; PAM type: NRG; PAM sequence: AAG
tccaaaaaaggaatatttaa

SEQ ID NO: 61412 - DNA, 20 bp, Artificial Sequence
  Description of Artificial Sequence: Synthetic oligonucleotide
  Target: LAMA2; (-) strand; PAM type: NRG; PAM sequence: AGG
ttgttttgcttttccaaaaa

SEQ ID NO: 61413 - DNA, 20 bp, Artificial Sequence
  Description of Artificial Sequence: Synthetic oligonucleotide
  Target: LAMA2; (-) strand; PAM type: NRG; PAM sequence: AAG
cttgttttgcttttccaaaa

SEQ ID NO: 61414 - DNA, 20 bp, Artificial Sequence
  Description of Artificial Sequence: Synthetic oligonucleotide
  Target: LAMA2; (-) strand; PAM type: NRG; PAM sequence: GGG
aagaaggccatctagttctt

SEQ ID NO: 61415 - DNA, 20 bp, Artificial Sequence
  Description of Artificial Sequence: Synthetic oligonucleotide
  Target: LAMA2; (-) strand; PAM type: NRG; PAM sequence: TGG
gaagaaggccatctagttct

SEQ ID NO: 61416 - DNA, 20 bp, Artificial Sequence
  Description of Artificial Sequence: Synthetic oligonucleotide
  Target: LAMA2; (-) strand; PAM type: NRG; PAM sequence: TAG
cgtaccagaagaaggccatc

SEQ ID NO: 61417 - DNA, 20 bp, Artificial Sequence
  Description of Artificial Sequence: Synthetic oligonucleotide
  Target: LAMA2; (-) strand; PAM type: NRG; PAM sequence: AGG
gaaagaaccgtaccagaaga

SEQ ID NO: 61418 - DNA, 20 bp, Artificial Sequence
  Description of Artificial Sequence: Synthetic oligonucleotide
  Target: LAMA2; (-) strand; PAM type: NRG; PAM sequence: AAG
tgaaagaaccgtaccagaag

SEQ ID NO: 61419 - DNA, 20 bp, Artificial Sequence
  Description of Artificial Sequence: Synthetic oligonucleotide
  Target: LAMA2; (-) strand; PAM type: NRG; PAM sequence: AAG
tagtgaaagaaccgtaccag

SEQ ID NO: 61420 - DNA, 20 bp, Artificial Sequence
  Description of Artificial Sequence: Synthetic oligonucleotide
  Target: LAMA2; (-) strand; PAM type: NRG; PAM sequence: CAG
agatagtgaaagaaccgtac

SEQ ID NO: 61421 - DNA, 20 bp, Artificial Sequence
  Description of Artificial Sequence: Synthetic oligonucleotide
  Target: LAMA2; (-) strand; PAM type: NRG; PAM sequence: AAG
agagatacaccagatagtga

SEQ ID NO: 61422 - DNA, 20 bp, Artificial Sequence
  Description of Artificial Sequence: Synthetic oligonucleotide
  Target: LAMA2; (-) strand; PAM type: NRG; PAM sequence: TAG
cacttcagagatacaccaga

SEQ ID NO: 61423 - DNA, 20 bp, Artificial Sequence
  Description of Artificial Sequence: Synthetic oligonucleotide
  Target: LAMA2; (-) strand; PAM type: NRG; PAM sequence: CAG
atcacacttcagagatacac

SEQ ID NO: 61424 - DNA, 20 bp, Artificial Sequence
  Description of Artificial Sequence: Synthetic oligonucleotide
  Target: LAMA2; (-) strand; PAM type: NRG; PAM sequence: GAG
ttacctttgatcacacttca

SEQ ID NO: 61425 - DNA, 20 bp, Artificial Sequence
  Description of Artificial Sequence: Synthetic oligonucleotide
  Target: LAMA2; (-) strand; PAM type: NRG; PAM sequence: CAG
agttacctttgatcacactt

SEQ ID NO: 61426 - DNA, 20 bp, Artificial Sequence
  Description of Artificial Sequence: Synthetic oligonucleotide
  Target: LAMA2; (-) strand; PAM type: NRG; PAM sequence: CAG
aacgattatctagttatgat

SEQ ID NO: 61427 - DNA, 20 bp, Artificial Sequence
  Description of Artificial Sequence: Synthetic oligonucleotide
  Target: LAMA2; (-) strand; PAM type: NRG; PAM sequence: TAG
taggggctttaacgattatc

SEQ ID NO: 61428 - DNA, 20 bp, Artificial Sequence
  Description of Artificial Sequence: Synthetic oligonucleotide
  Target: LAMA2; (-) strand; PAM type: NRG; PAM sequence: GGG
cagaaagggagggaggatag

SEQ ID NO: 61429 - DNA, 20 bp, Artificial Sequence
  Description of Artificial Sequence: Synthetic oligonucleotide
  Target: LAMA2; (-) strand; PAM type: NRG; PAM sequence: GGG
acagaaagggagggaggata

SEQ ID NO: 61430 - DNA, 20 bp, Artificial Sequence
  Description of Artificial Sequence: Synthetic oligonucleotide
  Target: LAMA2; (-) strand; PAM type: NRG; PAM sequence: AGG
tacagaaagggagggaggat

SEQ ID NO: 61431 - DNA, 20 bp, Artificial Sequence
  Description of Artificial Sequence: Synthetic oligonucleotide
  Target: LAMA2; (-) strand; PAM type: NRG; PAM sequence: TAG
atacagaaagggagggagga

SEQ ID NO: 61432 - DNA, 20 bp, Artificial Sequence
  Description of Artificial Sequence: Synthetic oligonucleotide
  Target: LAMA2; (-) strand; PAM type: NRG; PAM sequence: AGG
aaaaatacagaaagggaggg

SEQ ID NO: 61433 - DNA, 20 bp, Artificial Sequence
  Description of Artificial Sequence: Synthetic oligonucleotide
  Target: LAMA2; (-) strand; PAM type: NRG; PAM sequence: GAG
taaaaatacagaaagggagg

SEQ ID NO: 61434 - DNA, 20 bp, Artificial Sequence
  Description of Artificial Sequence: Synthetic oligonucleotide
  Target: LAMA2; (-) strand; PAM type: NRG; PAM sequence: GGG
ggtaaaaatacagaaaggga

SEQ ID NO: 61435 - DNA, 20 bp, Artificial Sequence
  Description of Artificial Sequence: Synthetic oligonucleotide
  Target: LAMA2; (-) strand; PAM type: NRG; PAM sequence: AGG
aggtaaaaatacagaaaggg

SEQ ID NO: 61436 - DNA, 20 bp, Artificial Sequence
  Description of Artificial Sequence: Synthetic oligonucleotide
  Target: LAMA2; (-) strand; PAM type: NRG; PAM sequence: GAG
aaggtaaaaatacagaaagg

SEQ ID NO: 61437 - DNA, 20 bp, Artificial Sequence
  Description of Artificial Sequence: Synthetic oligonucleotide
  Target: LAMA2; (-) strand; PAM type: NRG; PAM sequence: GGG
gaaaggtaaaaatacagaaa

SEQ ID NO: 61438 - DNA, 20 bp, Artificial Sequence
  Description of Artificial Sequence: Synthetic oligonucleotide
  Target: LAMA2; (-) strand; PAM type: NRG; PAM sequence: AGG
agaaaggtaaaaatacagaa

SEQ ID NO: 61439 - DNA, 20 bp, Artificial Sequence
  Description of Artificial Sequence: Synthetic oligonucleotide
  Target: LAMA2; (-) strand; PAM type: NRG; PAM sequence: AAG
aagaaaggtaaaaatacaga

SEQ ID NO: 61440 - DNA, 20 bp, Artificial Sequence
  Description of Artificial Sequence: Synthetic oligonucleotide
  Target: LAMA2; (-) strand; PAM type: NRG; PAM sequence: CAG
agggaagaaaggtaaaaata

SEQ ID NO: 61441 - DNA, 20 bp, Artificial Sequence
  Description of Artificial Sequence: Synthetic oligonucleotide
  Target: LAMA2; (-) strand; PAM type: NRG; PAM sequence: AGG
tagtatcaataagggaagaa

SEQ ID NO: 61442 - DNA, 20 bp, Artificial Sequence
  Description of Artificial Sequence: Synthetic oligonucleotide
  Target: LAMA2; (-) strand; PAM type: NRG; PAM sequence: AAG
ttagtatcaataagggaaga

SEQ ID NO: 61443 - DNA, 20 bp, Artificial Sequence
  Description of Artificial Sequence: Synthetic oligonucleotide
  Target: LAMA2; (-) strand; PAM type: NRG; PAM sequence: AAG
ggtcttagtatcaataaggg

SEQ ID NO: 61444 - DNA, 20 bp, Artificial Sequence
  Description of Artificial Sequence: Synthetic oligonucleotide
  Target: LAMA2; (-) strand; PAM type: NRG; PAM sequence: GGG
caaggtcttagtatcaataa

SEQ ID NO: 61445 - DNA, 20 bp, Artificial Sequence
  Description of Artificial Sequence: Synthetic oligonucleotide
  Target: LAMA2; (-) strand; PAM type: NRG; PAM sequence: AGG
tcaaggtcttagtatcaata

SEQ ID NO: 61446 - DNA, 20 bp, Artificial Sequence
  Description of Artificial Sequence: Synthetic oligonucleotide
  Target: LAMA2; (-) strand; PAM type: NRG; PAM sequence: AAG
atcaaggtcttagtatcaat

SEQ ID NO: 61447 - DNA, 20 bp, Artificial Sequence
  Description of Artificial Sequence: Synthetic oligonucleotide
  Target: LAMA2; (-) strand; PAM type: NRG; PAM sequence: TAG
acaacttagtatcaaggtct

SEQ ID NO: 61448 - DNA, 20 bp, Artificial Sequence
  Description of Artificial Sequence: Synthetic oligonucleotide
  Target: LAMA2; (-) strand; PAM type: NRG; PAM sequence: AGG
ttgtgaacaacttagtatca

SEQ ID NO: 61449 - DNA, 20 bp, Artificial Sequence
  Description of Artificial Sequence: Synthetic oligonucleotide
  Target: LAMA2; (-) strand; PAM type: NRG; PAM sequence: AAG
gttgtgaacaacttagtatc

SEQ ID NO: 61450 - DNA, 20 bp, Artificial Sequence
  Description of Artificial Sequence: Synthetic oligonucleotide
  Target: LAMA2; (-) strand; PAM type: NRG; PAM sequence: TAG
tgggccagttgtgaacaact

SEQ ID NO: 61451 - DNA, 20 bp, Artificial Sequence
  Description of Artificial Sequence: Synthetic oligonucleotide
  Target: LAMA2; (-) strand; PAM type: NRG; PAM sequence: CAG
tttcaacctagaatgtgggc

SEQ ID NO: 61452 - DNA, 20 bp, Artificial Sequence
  Description of Artificial Sequence: Synthetic oligonucleotide
  Target: LAMA2; (-) strand; PAM type: NRG; PAM sequence: GGG
atcatttcaacctagaatgt

SEQ ID NO: 61453 - DNA, 20 bp, Artificial Sequence
  Description of Artificial Sequence: Synthetic oligonucleotide
  Target: LAMA2; (-) strand; PAM type: NRG; PAM sequence: TGG
catcatttcaacctagaatg

SEQ ID NO: 61454 - DNA, 20 bp, Artificial Sequence
  Description of Artificial Sequence: Synthetic oligonucleotide
  Target: LAMA2; (-) strand; PAM type: NRG; PAM sequence: TAG
catgcaccatcatttcaacc

SEQ ID NO: 61455 - DNA, 20 bp, Artificial Sequence
  Description of Artificial Sequence: Synthetic oligonucleotide
  Target: LAMA2; (-) strand; PAM type: NRG; PAM sequence: TGG
acagtagtaatataaccata

SEQ ID NO: 61456 - DNA, 20 bp, Artificial Sequence
  Description of Artificial Sequence: Synthetic oligonucleotide
  Target: LAMA2; (-) strand; PAM type: NRG; PAM sequence: TAG
ttctacatacattttcacag

SEQ ID NO: 61457 - DNA, 20 bp, Artificial Sequence
  Description of Artificial Sequence: Synthetic oligonucleotide
  Target: LAMA2; (-) strand; PAM type: NRG; PAM sequence: CAG
attttctacatacattttca

SEQ ID NO: 61458 - DNA, 20 bp, Artificial Sequence
  Description of Artificial Sequence: Synthetic oligonucleotide
  Target: LAMA2; (-) strand; PAM type: NRG; PAM sequence: CAG
gaaaatagtccatattaccc

SEQ ID NO: 61459 - DNA, 20 bp, Artificial Sequence
  Description of Artificial Sequence: Synthetic oligonucleotide
  Target: LAMA2; (-) strand; PAM type: NRG; PAM sequence: TAG
aaattagattattaagaaaa

SEQ ID NO: 61460 - DNA, 20 bp, Artificial Sequence
  Description of Artificial Sequence: Synthetic oligonucleotide
  Target: LAMA2; (-) strand; PAM type: NRG; PAM sequence: AAG
aggtaagaaattagattatt

SEQ ID NO: 61461 - DNA, 20 bp, Artificial Sequence
  Description of Artificial Sequence: Synthetic oligonucleotide
  Target: LAMA2; (-) strand; PAM type: NRG; PAM sequence: TAG
ctgtctactaggtaagaaat

SEQ ID NO: 61462 - DNA, 20 bp, Artificial Sequence
  Description of Artificial Sequence: Synthetic oligonucleotide
  Target: LAMA2; (-) strand; PAM type: NRG; PAM sequence: AAG
atgttgactgtctactaggt

SEQ ID NO: 61463 - DNA, 20 bp, Artificial Sequence
  Description of Artificial Sequence: Synthetic oligonucleotide
  Target: LAMA2; (-) strand; PAM type: NRG; PAM sequence: AGG
ggaaatgttgactgtctact

SEQ ID NO: 61464 - DNA, 20 bp, Artificial Sequence
  Description of Artificial Sequence: Synthetic oligonucleotide
  Target: LAMA2; (-) strand; PAM type: NRG; PAM sequence: TAG
tggaaatgttgactgtctac

SEQ ID NO: 61465 - DNA, 20 bp, Artificial Sequence
  Description of Artificial Sequence: Synthetic oligonucleotide
  Target: LAMA2; (-) strand; PAM type: NRG; PAM sequence: TGG
cactagttcatttccatgat

SEQ ID NO: 61466 - DNA, 20 bp, Artificial Sequence
  Description of Artificial Sequence: Synthetic oligonucleotide
  Target: LAMA2; (-) strand; PAM type: NRG; PAM sequence: TAG
gatttcagttatgtggacac

SEQ ID NO: 61467 - DNA, 20 bp, Artificial Sequence
  Description of Artificial Sequence: Synthetic oligonucleotide
  Target: LAMA2; (-) strand; PAM type: NRG; PAM sequence: TGG
tgtgaaggatttcagttatg

SEQ ID NO: 61468 - DNA, 20 bp, Artificial Sequence
  Description of Artificial Sequence: Synthetic oligonucleotide
  Target: LAMA2; (-) strand; PAM type: NRG; PAM sequence: CAG
tagccagatgtgaaggattt

SEQ ID NO: 61469 - DNA, 20 bp, Artificial Sequence
  Description of Artificial Sequence: Synthetic oligonucleotide
  Target: LAMA2; (-) strand; PAM type: NRG; PAM sequence: AGG
ctaaagatagccagatgtga

SEQ ID NO: 61470 - DNA, 20 bp, Artificial Sequence
  Description of Artificial Sequence: Synthetic oligonucleotide
  Target: LAMA2; (-) strand; PAM type: NRG; PAM sequence: AAG
cctaaagatagccagatgtg

SEQ ID NO: 61471 - DNA, 20 bp, Artificial Sequence
  Description of Artificial Sequence: Synthetic oligonucleotide
  Target: LAMA2; (-) strand; PAM type: NRG; PAM sequence: CAG
atttagggcctaaagatagc

SEQ ID NO: 61472 - DNA, 20 bp, Artificial Sequence
  Description of Artificial Sequence: Synthetic oligonucleotide
  Target: LAMA2; (-) strand; PAM type: NRG; PAM sequence: TAG
cataatttagggcctaaaga

SEQ ID NO: 61473 - DNA, 20 bp, Artificial Sequence
  Description of Artificial Sequence: Synthetic oligonucleotide
  Target: LAMA2; (-) strand; PAM type: NRG; PAM sequence: AAG
ttcacataatttagggccta

SEQ ID NO: 61474 - DNA, 20 bp, Artificial Sequence
  Description of Artificial Sequence: Synthetic oligonucleotide
  Target: LAMA2; (-) strand; PAM type: NRG; PAM sequence: GGG
agtgaatttcacataattta

SEQ ID NO: 61475 - DNA, 20 bp, Artificial Sequence
  Description of Artificial Sequence: Synthetic oligonucleotide
  Target: LAMA2; (-) strand; PAM type: NRG; PAM sequence: AGG
cagtgaatttcacataattt

SEQ ID NO: 61476 - DNA, 20 bp, Artificial Sequence
  Description of Artificial Sequence: Synthetic oligonucleotide
  Target: LAMA2; (-) strand; PAM type: NRG; PAM sequence: TAG
tcagtgaatttcacataatt

SEQ ID NO: 61477 - DNA, 20 bp, Artificial Sequence
  Description of Artificial Sequence: Synthetic oligonucleotide
  Target: LAMA2; (-) strand; PAM type: NRG; PAM sequence: CAG
acaactctgtggaaaatact

SEQ ID NO: 61478 - DNA, 20 bp, Artificial Sequence
  Description of Artificial Sequence: Synthetic oligonucleotide
  Target: LAMA2; (-) strand; PAM type: NRG; PAM sequence: TGG
tacaacagtaaacaactctg

SEQ ID NO: 61479 - DNA, 20 bp, Artificial Sequence
  Description of Artificial Sequence: Synthetic oligonucleotide
  Target: LAMA2; (-) strand; PAM type: NRG; PAM sequence: CAG
tttgatttaagattttacaa

SEQ ID NO: 61480 - DNA, 20 bp, Artificial Sequence
  Description of Artificial Sequence: Synthetic oligonucleotide
  Target: LAMA2; (-) strand; PAM type: NRG; PAM sequence: AAG
ttgatgtaacattttgattt

SEQ ID NO: 61481 - DNA, 20 bp, Artificial Sequence
  Description of Artificial Sequence: Synthetic oligonucleotide
  Target: LAMA2; (-) strand; PAM type: NRG; PAM sequence: AGG
gttgttttgaggttttgctg

SEQ ID NO: 61482 - DNA, 20 bp, Artificial Sequence
  Description of Artificial Sequence: Synthetic oligonucleotide
  Target: LAMA2; (-) strand; PAM type: NRG; PAM sequence: GAG
ggttgttttgaggttttgct

SEQ ID NO: 61483 - DNA, 20 bp, Artificial Sequence
  Description of Artificial Sequence: Synthetic oligonucleotide
  Target: LAMA2; (-) strand; PAM type: NRG; PAM sequence: AGG
tggagtgtttggttgttttg

SEQ ID NO: 61484 - DNA, 20 bp, Artificial Sequence
  Description of Artificial Sequence: Synthetic oligonucleotide
  Target: LAMA2; (-) strand; PAM type: NRG; PAM sequence: GAG
gtggagtgtttggttgtttt

SEQ ID NO: 61485 - DNA, 20 bp, Artificial Sequence
  Description of Artificial Sequence: Synthetic oligonucleotide
  Target: LAMA2; (-) strand; PAM type: NRG; PAM sequence: TGG
aaacagacaagtggagtgtt

SEQ ID NO: 61486 - DNA, 20 bp, Artificial Sequence
  Description of Artificial Sequence: Synthetic oligonucleotide
  Target: LAMA2; (-) strand; PAM type: NRG; PAM sequence: GAG
ataatttaaacagacaagtg

SEQ ID NO: 61487 - DNA, 20 bp, Artificial Sequence
  Description of Artificial Sequence: Synthetic oligonucleotide
  Target: LAMA2; (-) strand; PAM type: NRG; PAM sequence: TGG
taataatttaaacagacaag

SEQ ID NO: 61488 - DNA, 20 bp, Artificial Sequence
  Description of Artificial Sequence: Synthetic oligonucleotide
  Target: LAMA2; (-) strand; PAM type: NRG; PAM sequence: AAG
tgctaataatttaaacagac

SEQ ID NO: 61489 - DNA, 20 bp, Artificial Sequence
  Description of Artificial Sequence: Synthetic oligonucleotide
  Target: LAMA2; (-) strand; PAM type: NRG; PAM sequence: CAG
gcttttgctaataatttaaa

SEQ ID NO: 61490 - DNA, 20 bp, Artificial Sequence
  Description of Artificial Sequence: Synthetic oligonucleotide
  Target: LAMA2; (-) strand; PAM type: NRG; PAM sequence: GAG
gcttagaagctgggataaca

SEQ ID NO: 61491 - DNA, 20 bp, Artificial Sequence
  Description of Artificial Sequence: Synthetic oligonucleotide
  Target: LAMA2; (-) strand; PAM type: NRG; PAM sequence: CAG
tagcttagaagctgggataa

SEQ ID NO: 61492 - DNA, 20 bp, Artificial Sequence
  Description of Artificial Sequence: Synthetic oligonucleotide
  Target: LAMA2; (-) strand; PAM type: NRG; PAM sequence: GGG
gtctggttagcttagaagct

SEQ ID NO: 61493 - DNA, 20 bp, Artificial Sequence
  Description of Artificial Sequence: Synthetic oligonucleotide
  Target: LAMA2; (-) strand; PAM type: NRG; PAM sequence: TGG
agtctggttagcttagaagc

SEQ ID NO: 61494 - DNA, 20 bp, Artificial Sequence
  Description of Artificial Sequence: Synthetic oligonucleotide
  Target: LAMA2; (-) strand; PAM type: NRG; PAM sequence: AAG
gatgagtctggttagcttag

SEQ ID NO: 61495 - DNA, 20 bp, Artificial Sequence
  Description of Artificial Sequence: Synthetic oligonucleotide
  Target: LAMA2; (-) strand; PAM type: NRG; PAM sequence: TAG
aatgatgagtctggttagct

SEQ ID NO: 61496 - DNA, 20 bp, Artificial Sequence
  Description of Artificial Sequence: Synthetic oligonucleotide
  Target: LAMA2; (-) strand; PAM type: NRG; PAM sequence: TAG
gccaaaatgatgagtctggt

SEQ ID NO: 61497 - DNA, 20 bp, Artificial Sequence
  Description of Artificial Sequence: Synthetic oligonucleotide
  Target: LAMA2; (-) strand; PAM type: NRG; PAM sequence: TGG
aaaggccaaaatgatgagtc

SEQ ID NO: 61498 - DNA, 20 bp, Artificial Sequence
  Description of Artificial Sequence: Synthetic oligonucleotide
  Target: LAMA2; (-) strand; PAM type: NRG; PAM sequence: GAG
acatgaaaggccaaaatgat

SEQ ID NO: 61499 - DNA, 20 bp, Artificial Sequence
  Description of Artificial Sequence: Synthetic oligonucleotide
  Target: LAMA2; (-) strand; PAM type: NRG; PAM sequence: AGG
ataggaaaagcatacatgaa

SEQ ID NO: 61500 - DNA, 20 bp, Artificial Sequence
  Description of Artificial Sequence: Synthetic oligonucleotide
  Target: LAMA2; (-) strand; PAM type: NRG; PAM sequence: AAG
cataggaaaagcatacatga

SEQ ID NO: 61501 - DNA, 20 bp, Artificial Sequence
  Description of Artificial Sequence: Synthetic oligonucleotide
  Target: LAMA2; (-) strand; PAM type: NRG; PAM sequence: AAG
ggacgttttggccataggaa

SEQ ID NO: 61502 - DNA, 20 bp, Artificial Sequence
  Description of Artificial Sequence: Synthetic oligonucleotide
  Target: LAMA2; (-) strand; PAM type: NRG; PAM sequence: AGG
tttgtggacgttttggccat

SEQ ID NO: 61503 - DNA, 20 bp, Artificial Sequence
  Description of Artificial Sequence: Synthetic oligonucleotide
  Target: LAMA2; (-) strand; PAM type: NRG; PAM sequence: TAG
atttgtggacgttttggcca

SEQ ID NO: 61504 - DNA, 20 bp, Artificial Sequence
  Description of Artificial Sequence: Synthetic oligonucleotide
  Target: LAMA2; (-) strand; PAM type: NRG; PAM sequence: TGG
ttagtaatttgtggacgttt

SEQ ID NO: 61505 - DNA, 20 bp, Artificial Sequence
  Description of Artificial Sequence: Synthetic oligonucleotide
  Target: LAMA2; (-) strand; PAM type: NRG; PAM sequence: TGG
cagcatttattagtaatttg

SEQ ID NO: 61506 - DNA, 20 bp, Artificial Sequence
  Description of Artificial Sequence: Synthetic oligonucleotide
  Target: LAMA2; (-) strand; PAM type: NRG; PAM sequence: TAG
ctctccttgtcagcatttat

SEQ ID NO: 61507 - DNA, 20 bp, Artificial Sequence
  Description of Artificial Sequence: Synthetic oligonucleotide
  Target: LAMA2; (-) strand; PAM type: NRG; PAM sequence: CAG
gttttaacctctctccttgt

SEQ ID NO: 61508 - DNA, 20 bp, Artificial Sequence
  Description of Artificial Sequence: Synthetic oligonucleotide
  Target: LAMA2; (-) strand; PAM type: NRG; PAM sequence: TGG
agctaaaaggcatggcttcc

SEQ ID NO: 61509 - DNA, 20 bp, Artificial Sequence
  Description of Artificial Sequence: Synthetic oligonucleotide
  Target: LAMA2; (-) strand; PAM type: NRG; PAM sequence: TGG
gttttgtcagctaaaaggca

SEQ ID NO: 61510 - DNA, 20 bp, Artificial Sequence
  Description of Artificial Sequence: Synthetic oligonucleotide
  Target: LAMA2; (-) strand; PAM type: NRG; PAM sequence: AGG
tgaatgttttgtcagctaaa

SEQ ID NO: 61511 - DNA, 20 bp, Artificial Sequence
  Description of Artificial Sequence: Synthetic oligonucleotide
  Target: LAMA2; (-) strand; PAM type: NRG; PAM sequence: AAG
atgaatgttttgtcagctaa

SEQ ID NO: 61512 - DNA, 20 bp, Artificial Sequence
  Description of Artificial Sequence: Synthetic oligonucleotide
  Target: LAMA2; (-) strand; PAM type: NRG; PAM sequence: CAG
catttcaatgaatgttttgt

SEQ ID NO: 61513 - DNA, 20 bp, Artificial Sequence
  Description of Artificial Sequence: Synthetic oligonucleotide
  Target: LAMA2; (-) strand; PAM type: NRG; PAM sequence: TAG
ttctcagtgcttcacccaga

SEQ ID NO: 61514 - DNA, 20 bp, Artificial Sequence
  Description of Artificial Sequence: Synthetic oligonucleotide
  Target: LAMA2; (-) strand; PAM type: NRG; PAM sequence: CAG
taatttctcagtgcttcacc

SEQ ID NO: 61515 - DNA, 20 bp, Artificial Sequence
  Description of Artificial Sequence: Synthetic oligonucleotide
  Target: LAMA2; (-) strand; PAM type: NRG; PAM sequence: CAG
tattcagatgattaatttct

SEQ ID NO: 61516 - DNA, 20 bp, Artificial Sequence
  Description of Artificial Sequence: Synthetic oligonucleotide
  Target: LAMA2; (-) strand; PAM type: NRG; PAM sequence: CAG
gtactataatttagactatt

SEQ ID NO: 61517 - DNA, 20 bp, Artificial Sequence
  Description of Artificial Sequence: Synthetic oligonucleotide
  Target: LAMA2; (-) strand; PAM type: NRG; PAM sequence: TAG
attcttcatgtactataatt

SEQ ID NO: 61518 - DNA, 20 bp, Artificial Sequence
  Description of Artificial Sequence: Synthetic oligonucleotide
  Target: LAMA2; (-) strand; PAM type: NRG; PAM sequence: AAG
tgaaggtatgtctccctagc

SEQ ID NO: 61519 - DNA, 20 bp, Artificial Sequence
  Description of Artificial Sequence: Synthetic oligonucleotide
  Target: LAMA2; (-) strand; PAM type: NRG; PAM sequence: TAG
atgctgaaggtatgtctccc

SEQ ID NO: 61520 - DNA, 20 bp, Artificial Sequence
  Description of Artificial Sequence: Synthetic oligonucleotide
  Target: LAMA2; (-) strand; PAM type: NRG; PAM sequence: AGG
ttaacctcgaataatgctga

SEQ ID NO: 61521 - DNA, 20 bp, Artificial Sequence
  Description of Artificial Sequence: Synthetic oligonucleotide
  Target: LAMA2; (-) strand; PAM type: NRG; PAM sequence: AAG
attaacctcgaataatgctg

SEQ ID NO: 61522 - DNA, 20 bp, Artificial Sequence
  Description of Artificial Sequence: Synthetic oligonucleotide
  Target: LAMA2; (-) strand; PAM type: NRG; PAM sequence: TGG
gcatacaaacatttacatgt

SEQ ID NO: 61523 - DNA, 20 bp, Artificial Sequence
  Description of Artificial Sequence: Synthetic oligonucleotide
  Target: LAMA2; (-) strand; PAM type: NRG; PAM sequence: AAG
cttttgggataccacacatg

SEQ ID NO: 61524 - DNA, 20 bp, Artificial Sequence
  Description of Artificial Sequence: Synthetic oligonucleotide
  Target: LAMA2; (-) strand; PAM type: NRG; PAM sequence: GGG
aagagaaaacacaacctttt

SEQ ID NO: 61525 - DNA, 20 bp, Artificial Sequence
  Description of Artificial Sequence: Synthetic oligonucleotide
  Target: LAMA2; (-) strand; PAM type: NRG; PAM sequence: TGG
aaagagaaaacacaaccttt

SEQ ID NO: 61526 - DNA, 20 bp, Artificial Sequence
  Description of Artificial Sequence: Synthetic oligonucleotide
  Target: LAMA2; (-) strand; PAM type: NRG; PAM sequence: GAG
agcatattcaaagatcaaaa

SEQ ID NO: 61527 - DNA, 20 bp, Artificial Sequence
  Description of Artificial Sequence: Synthetic oligonucleotide
  Target: LAMA2; (-) strand; PAM type: NRG; PAM sequence: AAG
tcagcatattcaaagatcaa

SEQ ID NO: 61528 - DNA, 20 bp, Artificial Sequence
  Description of Artificial Sequence: Synthetic oligonucleotide
  Target: LAMA2; (-) strand; PAM type: NRG; PAM sequence: AAG
aaaggcgatcagcatattca

SEQ ID NO: 61529 - DNA, 20 bp, Artificial Sequence
  Description of Artificial Sequence: Synthetic oligonucleotide
  Target: LAMA2; (-) strand; PAM type: NRG; PAM sequence: CAG
cactgttcatgaaaggcgat

SEQ ID NO: 61530 - DNA, 20 bp, Artificial Sequence
  Description of Artificial Sequence: Synthetic oligonucleotide
  Target: LAMA2; (-) strand; PAM type: NRG; PAM sequence: AGG
tgaatgccactgttcatgaa

SEQ ID NO: 61531 - DNA, 20 bp, Artificial Sequence
  Description of Artificial Sequence: Synthetic oligonucleotide
  Target: LAMA2; (-) strand; PAM type: NRG; PAM sequence: AAG
ttgaatgccactgttcatga

SEQ ID NO: 61532 - DNA, 20 bp, Artificial Sequence
  Description of Artificial Sequence: Synthetic oligonucleotide
  Target: LAMA2; (-) strand; PAM type: NRG; PAM sequence: AAG
aaaagactgtgtttttttca

SEQ ID NO: 61533 - DNA, 20 bp, Artificial Sequence
  Description of Artificial Sequence: Synthetic oligonucleotide
  Target: LAMA2; (-) strand; PAM type: NRG; PAM sequence: AAG
acaacttaccttcaaagaaa

SEQ ID NO: 61534 - DNA, 20 bp, Artificial Sequence
  Description of Artificial Sequence: Synthetic oligonucleotide
  Target: LAMA2; (-) strand; PAM type: NRG; PAM sequence: AAG
tttcttacaacttaccttca

SEQ ID NO: 61535 - DNA, 20 bp, Artificial Sequence
  Description of Artificial Sequence: Synthetic oligonucleotide
  Target: LAMA2; (-) strand; PAM type: NRG; PAM sequence: AGG
cgacaacaattctgcactcc

SEQ ID NO: 61536 - DNA, 20 bp, Artificial Sequence
  Description of Artificial Sequence: Synthetic oligonucleotide
  Target: LAMA2; (-) strand; PAM type: NRG; PAM sequence: CAG
tcgacaacaattctgcactc

SEQ ID NO: 61537 - DNA, 20 bp, Artificial Sequence
  Description of Artificial Sequence: Synthetic oligonucleotide
  Target: LAMA2; (-) strand; PAM type: NRG; PAM sequence: CAG
caactcacttgataccattt

SEQ ID NO: 61538 - DNA, 20 bp, Artificial Sequence
  Description of Artificial Sequence: Synthetic oligonucleotide
  Target: LAMA2; (-) strand; PAM type: NRG; PAM sequence: AGG
atgcccatttttaaaatatg

SEQ ID NO: 61539 - DNA, 20 bp, Artificial Sequence
  Description of Artificial Sequence: Synthetic oligonucleotide
  Target: LAMA2; (-) strand; PAM type: NRG; PAM sequence: GAG
catgcccatttttaaaatat

SEQ ID NO: 61540 - DNA, 20 bp, Artificial Sequence
  Description of Artificial Sequence: Synthetic oligonucleotide
  Target: LAMA2; (-) strand; PAM type: NRG; PAM sequence: GAG
tttttttgttagtaataata

SEQ ID NO: 61541 - DNA, 20 bp, Artificial Sequence
  Description of Artificial Sequence: Synthetic oligonucleotide
  Target: LAMA2; (-) strand; PAM type: NRG; PAM sequence: TAG
gatttttttgttagtaataa

SEQ ID NO: 61542 - DNA, 20 bp, Artificial Sequence
  Description of Artificial Sequence: Synthetic oligonucleotide
  Target: LAMA2; (-) strand; PAM type: NRG; PAM sequence: TAG
taaaatgcagatttttttgt

SEQ ID NO: 61543 - DNA, 20 bp, Artificial Sequence
  Description of Artificial Sequence: Synthetic oligonucleotide
  Target: LAMA2; (-) strand; PAM type: NRG; PAM sequence: CAG
gtcagatatcacataaaatg

SEQ ID NO: 61544 - DNA, 20 bp, Artificial Sequence
  Description of Artificial Sequence: Synthetic oligonucleotide
  Target: LAMA2; (-) strand; PAM type: NRG; PAM sequence: CAG
caagcatccctttcccatgt

SEQ ID NO: 61545 - DNA, 20 bp, Artificial Sequence
  Description of Artificial Sequence: Synthetic oligonucleotide
  Target: LAMA2; (-) strand; PAM type: NRG; PAM sequence: AAG
aacatcattggctactcatc

SEQ ID NO: 61546 - DNA, 20 bp, Artificial Sequence
  Description of Artificial Sequence: Synthetic oligonucleotide
  Target: LAMA2; (-) strand; PAM type: NRG; PAM sequence: TGG
tacagccagttcaacatcat

SEQ ID NO: 61547 - DNA, 20 bp, Artificial Sequence
  Description of Artificial Sequence: Synthetic oligonucleotide
  Target: LAMA2; (-) strand; PAM type: NRG; PAM sequence: CAG
agtcagtcggaaaatacagc

SEQ ID NO: 61548 - DNA, 20 bp, Artificial Sequence
  Description of Artificial Sequence: Synthetic oligonucleotide
  Target: LAMA2; (-) strand; PAM type: NRG; PAM sequence: CAG
aacaagtcagtcggaaaata

SEQ ID NO: 61549 - DNA, 20 bp, Artificial Sequence
  Description of Artificial Sequence: Synthetic oligonucleotide
  Target: LAMA2; (-) strand; PAM type: NRG; PAM sequence: CGG
cataagaaaaacaagtcagt

SEQ ID NO: 61550 - DNA, 20 bp, Artificial Sequence
  Description of Artificial Sequence: Synthetic oligonucleotide
  Target: LAMA2; (-) strand; PAM type: NRG; PAM sequence: CAG
ccttcataagaaaaacaagt

SEQ ID NO: 61551 - DNA, 20 bp, Artificial Sequence
  Description of Artificial Sequence: Synthetic oligonucleotide
  Target: LAMA2; (-) strand; PAM type: NRG; PAM sequence: AAG
gctgccttcataagaaaaac

SEQ ID NO: 61552 - DNA, 20 bp, Artificial Sequence
  Description of Artificial Sequence: Synthetic oligonucleotide
  Target: LAMA2; (-) strand; PAM type: NRG; PAM sequence: AAG
tactaaaatgctgccttcat

SEQ ID NO: 61553 - DNA, 20 bp, Artificial Sequence
  Description of Artificial Sequence: Synthetic oligonucleotide
  Target: LAMA2; (-) strand; PAM type: NRG; PAM sequence: AAG
attagagcctatcagaaaga

SEQ ID NO: 61554 - DNA, 20 bp, Artificial Sequence
  Description of Artificial Sequence: Synthetic oligonucleotide
  Target: LAMA2; (-) strand; PAM type: NRG; PAM sequence: AAG
ttcaattagagcctatcaga

SEQ ID NO: 61555 - DNA, 20 bp, Artificial Sequence
  Description of Artificial Sequence: Synthetic oligonucleotide
  Target: LAMA2; (-) strand; PAM type: NRG; PAM sequence: CAG
aaacttcaattagagcctat

SEQ ID NO: 61556 - DNA, 20 bp, Artificial Sequence
  Description of Artificial Sequence: Synthetic oligonucleotide
  Target: LAMA2; (-) strand; PAM type: NRG; PAM sequence: GAG
gaaccttcaaacttcaatta

SEQ ID NO: 61557 - DNA, 20 bp, Artificial Sequence
  Description of Artificial Sequence: Synthetic oligonucleotide
  Target: LAMA2; (-) strand; PAM type: NRG; PAM sequence: TAG
atgaaccttcaaacttcaat

SEQ ID NO: 61558 - DNA, 20 bp, Artificial Sequence
  Description of Artificial Sequence: Synthetic oligonucleotide
  Target: LAMA2; (-) strand; PAM type: NRG; PAM sequence: AGG
gtatttgacaacatattccc

SEQ ID NO: 61559 - DNA, 20 bp, Artificial Sequence
  Description of Artificial Sequence: Synthetic oligonucleotide
  Target: LAMA2; (-) strand; PAM type: NRG; PAM sequence: CAG
tgtatttgacaacatattcc

SEQ ID NO: 61560 - DNA, 20 bp, Artificial Sequence
  Description of Artificial Sequence: Synthetic oligonucleotide
  Target: LAMA2; (-) strand; PAM type: NRG; PAM sequence: AGG
gccaatattcactgtgggag

SEQ ID NO: 61561 - DNA, 20 bp, Artificial Sequence
  Description of Artificial Sequence: Synthetic oligonucleotide
  Target: LAMA2; (-) strand; PAM type: NRG; PAM sequence: GAG
tgccaatattcactgtggga

SEQ ID NO: 61562 - DNA, 20 bp, Artificial Sequence
  Description of Artificial Sequence: Synthetic oligonucleotide
  Target: LAMA2; (-) strand; PAM type: NRG; PAM sequence: GAG
catgccaatattcactgtgg

SEQ ID NO: 61563 - DNA, 20 bp, Artificial Sequence
  Description of Artificial Sequence: Synthetic oligonucleotide
  Target: LAMA2; (-) strand; PAM type: NRG; PAM sequence: GGG
atcatgccaatattcactgt

SEQ ID NO: 61564 - DNA, 20 bp, Artificial Sequence
  Description of Artificial Sequence: Synthetic oligonucleotide
  Target: LAMA2; (-) strand; PAM type: NRG; PAM sequence: TGG
aatcatgccaatattcactg

SEQ ID NO: 61565 - DNA, 20 bp, Artificial Sequence
  Description of Artificial Sequence: Synthetic oligonucleotide
  Target: LAMA2; (-) strand; PAM type: NRG; PAM sequence: GAG
attatgacagctgagctcta

SEQ ID NO: 61566 - DNA, 20 bp, Artificial Sequence
  Description of Artificial Sequence: Synthetic oligonucleotide
  Target: LAMA2; (-) strand; PAM type: NRG; PAM sequence: TAG
atattatgacagctgagctc

SEQ ID NO: 61567 - DNA, 20 bp, Artificial Sequence
  Description of Artificial Sequence: Synthetic oligonucleotide
  Target: LAMA2; (-) strand; PAM type: NRG; PAM sequence: GAG
agccaaatattatgacagct

SEQ ID NO: 61568 - DNA, 20 bp, Artificial Sequence
  Description of Artificial Sequence: Synthetic oligonucleotide
  Target: LAMA2; (-) strand; PAM type: NRG; PAM sequence: CAG
attggagccaaatattatga

SEQ ID NO: 61569 - DNA, 20 bp, Artificial Sequence
  Description of Artificial Sequence: Synthetic oligonucleotide
  Target: LAMA2; (-) strand; PAM type: NRG; PAM sequence: GAG
gtccattatgaatgaaattg

SEQ ID NO: 61570 - DNA, 20 bp, Artificial Sequence
  Description of Artificial Sequence: Synthetic oligonucleotide
  Target: LAMA2; (-) strand; PAM type: NRG; PAM sequence: TGG
ctgtccattatgaatgaaat

SEQ ID NO: 61571 - DNA, 20 bp, Artificial Sequence
  Description of Artificial Sequence: Synthetic oligonucleotide
  Target: LAMA2; (-) strand; PAM type: NRG; PAM sequence: TAG
agtagggattcaaaacattg

SEQ ID NO: 61572 - DNA, 20 bp, Artificial Sequence
  Description of Artificial Sequence: Synthetic oligonucleotide
  Target: LAMA2; (-) strand; PAM type: NRG; PAM sequence: GGG
tgtgctgacatttgaaagta

SEQ ID NO: 61573 - DNA, 20 bp, Artificial Sequence
  Description of Artificial Sequence: Synthetic oligonucleotide
  Target: LAMA2; (-) strand; PAM type: NRG; PAM sequence: AGG
gtgtgctgacatttgaaagt

SEQ ID NO: 61574 - DNA, 20 bp, Artificial Sequence
  Description of Artificial Sequence: Synthetic oligonucleotide
  Target: LAMA2; (-) strand; PAM type: NRG; PAM sequence: TAG
agtgtgctgacatttgaaag

SEQ ID NO: 61575 - DNA, 20 bp, Artificial Sequence
  Description of Artificial Sequence: Synthetic oligonucleotide
  Target: LAMA2; (-) strand; PAM type: NRG; PAM sequence: AAG
tccagtgtgctgacatttga

SEQ ID NO: 61576 - DNA, 20 bp, Artificial Sequence
  Description of Artificial Sequence: Synthetic oligonucleotide
  Target: LAMA2; (-) strand; PAM type: NRG; PAM sequence: CAG
ccattctttaatatttgttc

SEQ ID NO: 61577 - DNA, 20 bp, Artificial Sequence
  Description of Artificial Sequence: Synthetic oligonucleotide
  Target: LAMA2; (-) strand; PAM type: NRG; PAM sequence: TAG
caaggaaatactcatctact

SEQ ID NO: 61578 - DNA, 20 bp, Artificial Sequence
  Description of Artificial Sequence: Synthetic oligonucleotide
  Target: LAMA2; (-) strand; PAM type: NRG; PAM sequence: AGG
ggctataacatgttgcttca

SEQ ID NO: 61579 - DNA, 20 bp, Artificial Sequence
  Description of Artificial Sequence: Synthetic oligonucleotide
  Target: LAMA2; (-) strand; PAM type: NRG; PAM sequence: AAG
aggctataacatgttgcttc

SEQ ID NO: 61580 - DNA, 20 bp, Artificial Sequence
  Description of Artificial Sequence: Synthetic oligonucleotide
  Target: LAMA2; (-) strand; PAM type: NRG; PAM sequence: AGG
aattgaaggaaacaacattt

SEQ ID NO: 61581 - DNA, 20 bp, Artificial Sequence
  Description of Artificial Sequence: Synthetic oligonucleotide
  Target: LAMA2; (-) strand; PAM type: NRG; PAM sequence: TAG
taattgaaggaaacaacatt

SEQ ID NO: 61582 - DNA, 20 bp, Artificial Sequence
  Description of Artificial Sequence: Synthetic oligonucleotide
  Target: LAMA2; (-) strand; PAM type: NRG; PAM sequence: AGG
cattgtttaaacataattga

SEQ ID NO: 61583 - DNA, 20 bp, Artificial Sequence
  Description of Artificial Sequence: Synthetic oligonucleotide
  Target: LAMA2; (-) strand; PAM type: NRG; PAM sequence: AAG
acattgtttaaacataattg

SEQ ID NO: 61584 - DNA, 20 bp, Artificial Sequence
  Description of Artificial Sequence: Synthetic oligonucleotide
  Target: LAMA2; (-) strand; PAM type: NRG; PAM sequence: AGG
atacatctgtgaaacattta

SEQ ID NO: 61585 - DNA, 20 bp, Artificial Sequence
  Description of Artificial Sequence: Synthetic oligonucleotide
  Target: LAMA2; (-) strand; PAM type: NRG; PAM sequence: AAG
gatacatctgtgaaacattt

SEQ ID NO: 61586 - DNA, 20 bp, Artificial Sequence
  Description of Artificial Sequence: Synthetic oligonucleotide
  Target: LAMA2; (-) strand; PAM type: NRG; PAM sequence: AAG
tagtatgtgttttggatttc

SEQ ID NO: 61587 - DNA, 20 bp, Artificial Sequence
  Description of Artificial Sequence: Synthetic oligonucleotide
  Target: LAMA2; (-) strand; PAM type: NRG; PAM sequence: TGG
ttgatgagtagtatgtgttt

SEQ ID NO: 61588 - DNA, 20 bp, Artificial Sequence
  Description of Artificial Sequence: Synthetic oligonucleotide
  Target: LAMA2; (-) strand; PAM type: NRG; PAM sequence: TAG
ataaagatgactttgatgag

SEQ ID NO: 61589 - DNA, 20 bp, Artificial Sequence
  Description of Artificial Sequence: Synthetic oligonucleotide
  Target: LAMA2; (-) strand; PAM type: NRG; PAM sequence: GAG
taaataaagatgactttgat

SEQ ID NO: 61590 - DNA, 20 bp, Artificial Sequence
  Description of Artificial Sequence: Synthetic oligonucleotide
  Target: LAMA2; (-) strand; PAM type: NRG; PAM sequence: AAG
tttcttcctaagcttaaata

SEQ ID NO: 61591 - DNA, 20 bp, Artificial Sequence
  Description of Artificial Sequence: Synthetic oligonucleotide
  Target: LAMA2; (-) strand; PAM type: NRG; PAM sequence: AAG
agatttctatttttcttcct

SEQ ID NO: 61592 - DNA, 20 bp, Artificial Sequence
  Description of Artificial Sequence: Synthetic oligonucleotide
  Target: LAMA2; (-) strand; PAM type: NRG; PAM sequence: CAG
tggactaagagcaaacattt

SEQ ID NO: 61593 - DNA, 20 bp, Artificial Sequence
  Description of Artificial Sequence: Synthetic oligonucleotide
  Target: LAMA2; (-) strand; PAM type: NRG; PAM sequence: GAG
gagaagtgtgtgtggactaa

SEQ ID NO: 61594 - DNA, 20 bp, Artificial Sequence
  Description of Artificial Sequence: Synthetic oligonucleotide
  Target: LAMA2; (-) strand; PAM type: NRG; PAM sequence: AAG
atgagaagtgtgtgtggact

SEQ ID NO: 61595 - DNA, 20 bp, Artificial Sequence
  Description of Artificial Sequence: Synthetic oligonucleotide
  Target: LAMA2; (-) strand; PAM type: NRG; PAM sequence: TGG
tgccagatgagaagtgtgtg

SEQ ID NO: 61596 - DNA, 20 bp, Artificial Sequence
  Description of Artificial Sequence: Synthetic oligonucleotide
  Target: LAMA2; (-) strand; PAM type: NRG; PAM sequence: AAG
gaaatgtcctgccagatgag

SEQ ID NO: 61597 - DNA, 20 bp, Artificial Sequence
  Description of Artificial Sequence: Synthetic oligonucleotide
  Target: LAMA2; (-) strand; PAM type: NRG; PAM sequence: GAG
tcagaaatgtcctgccagat

SEQ ID NO: 61598 - DNA, 20 bp, Artificial Sequence
  Description of Artificial Sequence: Synthetic oligonucleotide
  Target: LAMA2; (-) strand; PAM type: NRG; PAM sequence: CAG
taaattcagaaatgtcctgc

SEQ ID NO: 61599 - DNA, 20 bp, Artificial Sequence
  Description of Artificial Sequence: Synthetic oligonucleotide
  Target: LAMA2; (-) strand; PAM type: NRG; PAM sequence: CAG
ttcaatttcccaaataaatt

SEQ ID NO: 61600 - DNA, 20 bp, Artificial Sequence
  Description of Artificial Sequence: Synthetic oligonucleotide
  Target: LAMA2; (-) strand; PAM type: NRG; PAM sequence: CAG
ctgaagtacactcatttacc

SEQ ID NO: 61601 - DNA, 20 bp, Artificial Sequence
  Description of Artificial Sequence: Synthetic oligonucleotide
  Target: LAMA2; (-) strand; PAM type: NRG; PAM sequence: AAG
taaaaacagtcctgacactg

SEQ ID NO: 61602 - DNA, 20 bp, Artificial Sequence
  Description of Artificial Sequence: Synthetic oligonucleotide
  Target: LAMA2; (-) strand; PAM type: NRG; PAM sequence: CAG
ataaaatctgttaataaaaa

SEQ ID NO: 61603 - DNA, 20 bp, Artificial Sequence
  Description of Artificial Sequence: Synthetic oligonucleotide
  Target: LAMA2; (-) strand; PAM type: NRG; PAM sequence: CAG
agaactggaaactaccaagc

SEQ ID NO: 61604 - DNA, 20 bp, Artificial Sequence
  Description of Artificial Sequence: Synthetic oligonucleotide
  Target: LAMA2; (-) strand; PAM type: NRG; PAM sequence: AAG
ccacagaactggaaactacc

SEQ ID NO: 61605 - DNA, 20 bp, Artificial Sequence
  Description of Artificial Sequence: Synthetic oligonucleotide
  Target: LAMA2; (-) strand; PAM type: NRG; PAM sequence: TGG
gattgttcttgccacagaac

SEQ ID NO: 61606 - DNA, 20 bp, Artificial Sequence
  Description of Artificial Sequence: Synthetic oligonucleotide
  Target: LAMA2; (-) strand; PAM type: NRG; PAM sequence: CAG
atgatagattgttcttgcca

SEQ ID NO: 61607 - DNA, 20 bp, Artificial Sequence
  Description of Artificial Sequence: Synthetic oligonucleotide
  Target: LAMA2; (-) strand; PAM type: NRG; PAM sequence: TAG
atgttacaggtttattatga

SEQ ID NO: 61608 - DNA, 20 bp, Artificial Sequence
  Description of Artificial Sequence: Synthetic oligonucleotide
  Target: LAMA2; (-) strand; PAM type: NRG; PAM sequence: AGG
attctgtacttttatgttac

SEQ ID NO: 61609 - DNA, 20 bp, Artificial Sequence
  Description of Artificial Sequence: Synthetic oligonucleotide
  Target: LAMA2; (-) strand; PAM type: NRG; PAM sequence: CAG
tattctgtacttttatgtta

SEQ ID NO: 61610 - DNA, 20 bp, Artificial Sequence
  Description of Artificial Sequence: Synthetic oligonucleotide
  Target: LAMA2; (-) strand; PAM type: NRG; PAM sequence: AGG
ctcttacagactcttgaaac

SEQ ID NO: 61611 - DNA, 20 bp, Artificial Sequence
  Description of Artificial Sequence: Synthetic oligonucleotide
  Target: LAMA2; (-) strand; PAM type: NRG; PAM sequence: CAG
cctcttacagactcttgaaa

SEQ ID NO: 61612 - DNA, 20 bp, Artificial Sequence
  Description of Artificial Sequence: Synthetic oligonucleotide
  Target: LAMA2; (-) strand; PAM type: NRG; PAM sequence: CAG
tcatgaggggactcctctta

SEQ ID NO: 61613 - DNA, 20 bp, Artificial Sequence
  Description of Artificial Sequence: Synthetic oligonucleotide
  Target: LAMA2; (-) strand; PAM type: NRG; PAM sequence: GGG
tcatataaactgttcatgag

SEQ ID NO: 61614 - DNA, 20 bp, Artificial Sequence
  Description of Artificial Sequence: Synthetic oligonucleotide
  Target: LAMA2; (-) strand; PAM type: NRG; PAM sequence: GGG
ctcatataaactgttcatga

SEQ ID NO: 61615 - DNA, 20 bp, Artificial Sequence
  Description of Artificial Sequence: Synthetic oligonucleotide
  Target: LAMA2; (-) strand; PAM type: NRG; PAM sequence: AGG
tctcatataaactgttcatg

SEQ ID NO: 61616 - DNA, 20 bp, Artificial Sequence
  Description of Artificial Sequence: Synthetic oligonucleotide
  Target: LAMA2; (-) strand; PAM type: NRG; PAM sequence: GAG
ctctcatataaactgttcat

SEQ ID NO: 61617 - DNA, 20 bp, Artificial Sequence
  Description of Artificial Sequence: Synthetic oligonucleotide
  Target: LAMA2; (-) strand; PAM type: NRG; PAM sequence: CAG
taacaacacaccattcactg

SEQ ID NO: 61618 - DNA, 20 bp, Artificial Sequence
  Description of Artificial Sequence: Synthetic oligonucleotide
  Target: LAMA2; (-) strand; PAM type: NRG; PAM sequence: AAG
tatatttttttcatgattta

SEQ ID NO: 61619 - DNA, 20 bp, Artificial Sequence
  Description of Artificial Sequence: Synthetic oligonucleotide
  Target: LAMA2; (-) strand; PAM type: NRG; PAM sequence: AAG
taagattaataaatccttga

SEQ ID NO: 61620 - DNA, 20 bp, Artificial Sequence
  Description of Artificial Sequence: Synthetic oligonucleotide
  Target: LAMA2; (-) strand; PAM type: NRG; PAM sequence: AAG
aaaatatatatatttggagt

SEQ ID NO: 61621 - DNA, 20 bp, Artificial Sequence
  Description of Artificial Sequence: Synthetic oligonucleotide
  Target: LAMA2; (-) strand; PAM type: NRG; PAM sequence: GAG
taccaaaatatatatatttg

SEQ ID NO: 61622 - DNA, 20 bp, Artificial Sequence
  Description of Artificial Sequence: Synthetic oligonucleotide
  Target: LAMA2; (-) strand; PAM type: NRG; PAM sequence: TGG
tttaccaaaatatatatatt

SEQ ID NO: 61623 - DNA, 20 bp, Artificial Sequence
  Description of Artificial Sequence: Synthetic oligonucleotide
  Target: LAMA2; (-) strand; PAM type: NRG; PAM sequence: AAG
ttggtcagctcagtgcttct

SEQ ID NO: 61624 - DNA, 20 bp, Artificial Sequence
  Description of Artificial Sequence: Synthetic oligonucleotide
  Target: LAMA2; (-) strand; PAM type: NRG; PAM sequence: CAG
ttccaatatattggtcagct

SEQ ID NO: 61625 - DNA, 20 bp, Artificial Sequence
  Description of Artificial Sequence: Synthetic oligonucleotide
  Target: LAMA2; (-) strand; PAM type: NRG; PAM sequence: CAG
tagttttccaatatattggt

SEQ ID NO: 61626 - DNA, 20 bp, Artificial Sequence
  Description of Artificial Sequence: Synthetic oligonucleotide
  Target: LAMA2; (-) strand; PAM type: NRG; PAM sequence: TGG
tacttagttttccaatatat

SEQ ID NO: 61627 - DNA, 20 bp, Artificial Sequence
  Description of Artificial Sequence: Synthetic oligonucleotide
  Target: LAMA2; (-) strand; PAM type: NRG; PAM sequence: TAG
gatcactggcctgctttact

SEQ ID NO: 61628 - DNA, 20 bp, Artificial Sequence
  Description of Artificial Sequence: Synthetic oligonucleotide
  Target: LAMA2; (-) strand; PAM type: NRG; PAM sequence: TGG
tcactcagaatagagatcac

SEQ ID NO: 61629 - DNA, 20 bp, Artificial Sequence
  Description of Artificial Sequence: Synthetic oligonucleotide
  Target: LAMA2; (-) strand; PAM type: NRG; PAM sequence: GAG
aaaatatttcactcagaata

SEQ ID NO: 61630 - DNA, 20 bp, Artificial Sequence
  Description of Artificial Sequence: Synthetic oligonucleotide
  Target: LAMA2; (-) strand; PAM type: NRG; PAM sequence: TAG
gcaaaatatttcactcagaa

SEQ ID NO: 61631 - DNA, 20 bp, Artificial Sequence
  Description of Artificial Sequence: Synthetic oligonucleotide
  Target: LAMA2; (-) strand; PAM type: NRG; PAM sequence: CAG
acagagcaaaatatttcact

SEQ ID NO: 61632 - DNA, 20 bp, Artificial Sequence
  Description of Artificial Sequence: Synthetic oligonucleotide
  Target: LAMA2; (-) strand; PAM type: NRG; PAM sequence: GAG
ttgcacccagatgtcaaaca

SEQ ID NO: 61633 - DNA, 20 bp, Artificial Sequence
  Description of Artificial Sequence: Synthetic oligonucleotide
  Target: LAMA2; (-) strand; PAM type: NRG; PAM sequence: CAG
cattgcacccagatgtcaaa

SEQ ID NO: 61634 - DNA, 20 bp, Artificial Sequence
  Description of Artificial Sequence: Synthetic oligonucleotide
  Target: LAMA2; (-) strand; PAM type: NRG; PAM sequence: CAG
gacatagccatcattgcacc

SEQ ID NO: 61635 - DNA, 20 bp, Artificial Sequence
  Description of Artificial Sequence: Synthetic oligonucleotide
  Target: LAMA2; (-) strand; PAM type: NRG; PAM sequence: TAG
aaaataaagtgacactgaca

SEQ ID NO: 61636 - DNA, 20 bp, Artificial Sequence
  Description of Artificial Sequence: Synthetic oligonucleotide
  Target: LAMA2; (-) strand; PAM type: NRG; PAM sequence: AAG
acttgcacaagagaaaaata

SEQ ID NO: 61637 - DNA, 20 bp, Artificial Sequence
  Description of Artificial Sequence: Synthetic oligonucleotide
  Target: LAMA2; (-) strand; PAM type: NRG; PAM sequence: GAG
gttttatcaaacttgcacaa

SEQ ID NO: 61638 - DNA, 20 bp, Artificial Sequence
  Description of Artificial Sequence: Synthetic oligonucleotide
  Target: LAMA2; (-) strand; PAM type: NRG; PAM sequence: AAG
gagttttatcaaacttgcac

SEQ ID NO: 61639 - DNA, 20 bp, Artificial Sequence
  Description of Artificial Sequence: Synthetic oligonucleotide
  Target: LAMA2; (-) strand; PAM type: NRG; PAM sequence: GAG
aatacacattagtatttaaa

SEQ ID NO: 61640 - DNA, 20 bp, Artificial Sequence
  Description of Artificial Sequence: Synthetic oligonucleotide
  Target: LAMA2; (-) strand; PAM type: NRG; PAM sequence: AAG
aaaatacacattagtattta

SEQ ID NO: 61641 - DNA, 20 bp, Artificial Sequence
  Description of Artificial Sequence: Synthetic oligonucleotide
  Target: LAMA2; (-) strand; PAM type: NRG; PAM sequence: TAG
gtgttttctaaaatacacat

SEQ ID NO: 61642 - DNA, 20 bp, Artificial Sequence
  Description of Artificial Sequence: Synthetic oligonucleotide
  Target: LAMA2; (-) strand; PAM type: NRG; PAM sequence: CAG
tccttcctcctggaatataa

SEQ ID NO: 61643 - DNA, 20 bp, Artificial Sequence
  Description of Artificial Sequence: Synthetic oligonucleotide
  Target: LAMA2; (-) strand; PAM type: NRG; PAM sequence: TGG
taaggcaatttccttcctcc

SEQ ID NO: 61644 - DNA, 20 bp, Artificial Sequence
  Description of Artificial Sequence: Synthetic oligonucleotide
  Target: LAMA2; (-) strand; PAM type: NRG; PAM sequence: AGG
caaatctgattcatatccta

SEQ ID NO: 61645 - DNA, 20 bp, Artificial Sequence
  Description of Artificial Sequence: Synthetic oligonucleotide
  Target: LAMA2; (-) strand; PAM type: NRG; PAM sequence: AAG
tcaaatctgattcatatcct

SEQ ID NO: 61646 - DNA, 20 bp, Artificial Sequence
  Description of Artificial Sequence: Synthetic oligonucleotide
  Target: LAMA2; (-) strand; PAM type: NRG; PAM sequence: TAG
tttagaataattaaataaga

SEQ ID NO: 61647 - DNA, 20 bp, Artificial Sequence
  Description of Artificial Sequence: Synthetic oligonucleotide
  Target: LAMA2; (-) strand; PAM type: NRG; PAM sequence: AAG
tcaatttagaataattaaat

SEQ ID NO: 61648 - DNA, 20 bp, Artificial Sequence
  Description of Artificial Sequence: Synthetic oligonucleotide
  Target: LAMA2; (-) strand; PAM type: NRG; PAM sequence: TAG
ctttcatgatgttttcaatt

SEQ ID NO: 61649 - DNA, 20 bp, Artificial Sequence
  Description of Artificial Sequence: Synthetic oligonucleotide
  Target: LAMA2; (-) strand; PAM type: NRG; PAM sequence: TGG
aaacaagaggaaaataaaaa

SEQ ID NO: 61650 - DNA, 20 bp, Artificial Sequence
  Description of Artificial Sequence: Synthetic oligonucleotide
  Target: LAMA2; (-) strand; PAM type: NRG; PAM sequence: AGG
tcaaataagcaagaaacaag

SEQ ID NO: 61651 - DNA, 20 bp, Artificial Sequence
  Description of Artificial Sequence: Synthetic oligonucleotide
  Target: LAMA2; (-) strand; PAM type: NRG; PAM sequence: GAG
ttcaaataagcaagaaacaa

SEQ ID NO: 61652 - DNA, 20 bp, Artificial Sequence
  Description of Artificial Sequence: Synthetic oligonucleotide
  Target: LAMA2; (-) strand; PAM type: NRG; PAM sequence: AAG
gattcaaataagcaagaaac

SEQ ID NO: 61653 - DNA, 20 bp, Artificial Sequence
  Description of Artificial Sequence: Synthetic oligonucleotide
  Target: LAMA2; (-) strand; PAM type: NRG; PAM sequence: AAG
aacgaatgattcaaataagc

SEQ ID NO: 61654 - DNA, 20 bp, Artificial Sequence
  Description of Artificial Sequence: Synthetic oligonucleotide
  Target: LAMA2; (-) strand; PAM type: NRG; PAM sequence: AAG
ataaaacgaatgattcaaat

SEQ ID NO: 61655 - DNA, 20 bp, Artificial Sequence
  Description of Artificial Sequence: Synthetic oligonucleotide
  Target: LAMA2; (-) strand; PAM type: NRG; PAM sequence: AAG
agcttagcctaagtagaaag

SEQ ID NO: 61656 - DNA, 20 bp, Artificial Sequence
  Description of Artificial Sequence: Synthetic oligonucleotide
  Target: LAMA2; (-) strand; PAM type: NRG; PAM sequence: AAG
gagagcttagcctaagtaga

SEQ ID NO: 61657 - DNA, 20 bp, Artificial Sequence
  Description of Artificial Sequence: Synthetic oligonucleotide
  Target: LAMA2; (-) strand; PAM type: NRG; PAM sequence: TAG
ttttgagagcttagcctaag

SEQ ID NO: 61658 - DNA, 20 bp, Artificial Sequence
  Description of Artificial Sequence: Synthetic oligonucleotide
  Target: LAMA2; (-) strand; PAM type: NRG; PAM sequence: AAG
tccttttgagagcttagcct

SEQ ID NO: 61659 - DNA, 20 bp, Artificial Sequence
  Description of Artificial Sequence: Synthetic oligonucleotide
  Target: LAMA2; (-) strand; PAM type: NRG; PAM sequence: TAG
ctcctttccttttgagagct

SEQ ID NO: 61660 - DNA, 20 bp, Artificial Sequence
  Description of Artificial Sequence: Synthetic oligonucleotide
  Target: LAMA2; (-) strand; PAM type: NRG; PAM sequence: GAG
tacatctcctttccttttga

SEQ ID NO: 61661 - DNA, 20 bp, Artificial Sequence
  Description of Artificial Sequence: Synthetic oligonucleotide
  Target: LAMA2; (-) strand; PAM type: NRG; PAM sequence: GAG
attacatctcctttcctttt

SEQ ID NO: 61662 - DNA, 20 bp, Artificial Sequence
  Description of Artificial Sequence: Synthetic oligonucleotide
  Target: LAMA2; (-) strand; PAM type: NRG; PAM sequence: TAG
tgttgaaaaatacctacact

SEQ ID NO: 61663 - DNA, 20 bp, Artificial Sequence
  Description of Artificial Sequence: Synthetic oligonucleotide
  Target: LAMA2; (-) strand; PAM type: NRG; PAM sequence: AAG
acacagtttttatgtgacat

SEQ ID NO: 61664 - DNA, 20 bp, Artificial Sequence
  Description of Artificial Sequence: Synthetic oligonucleotide
  Target: LAMA2; (-) strand; PAM type: NRG; PAM sequence: CAG
atttttaatctgtttaaaca

SEQ ID NO: 61665 - DNA, 20 bp, Artificial Sequence
  Description of Artificial Sequence: Synthetic oligonucleotide
  Target: LAMA2; (-) strand; PAM type: NRG; PAM sequence: CAG
gtaaaataaataaaactctc

SEQ ID NO: 61666 - DNA, 20 bp, Artificial Sequence
  Description of Artificial Sequence: Synthetic oligonucleotide
  Target: LAMA2; (-) strand; PAM type: NRG; PAM sequence: GAG
tggaaaggaaataatattgg

SEQ ID NO: 61667 - DNA, 20 bp, Artificial Sequence
  Description of Artificial Sequence: Synthetic oligonucleotide
  Target: LAMA2; (-) strand; PAM type: NRG; PAM sequence: GGG
tctggaaaggaaataatatt

SEQ ID NO: 61668 - DNA, 20 bp, Artificial Sequence
  Description of Artificial Sequence: Synthetic oligonucleotide
  Target: LAMA2; (-) strand; PAM type: NRG; PAM sequence: TGG
gtctggaaaggaaataatat

SEQ ID NO: 61669 - DNA, 20 bp, Artificial Sequence
  Description of Artificial Sequence: Synthetic oligonucleotide
  Target: LAMA2; (-) strand; PAM type: NRG; PAM sequence: AGG
ttaaagattgctgtctggaa

SEQ ID NO: 61670 - DNA, 20 bp, Artificial Sequence
  Description of Artificial Sequence: Synthetic oligonucleotide
  Target: LAMA2; (-) strand; PAM type: NRG; PAM sequence: AAG
tttaaagattgctgtctgga

SEQ ID NO: 61671 - DNA, 20 bp, Artificial Sequence
  Description of Artificial Sequence: Synthetic oligonucleotide
  Target: LAMA2; (-) strand; PAM type: NRG; PAM sequence: TGG
aggatttaaagattgctgtc

SEQ ID NO: 61672 - DNA, 20 bp, Artificial Sequence
  Description of Artificial Sequence: Synthetic oligonucleotide
  Target: LAMA2; (-) strand; PAM type: NRG; PAM sequence: AAG
gatgactcaagcaggattta

SEQ ID NO: 61673 - DNA, 20 bp, Artificial Sequence
  Description of Artificial Sequence: Synthetic oligonucleotide
  Target: LAMA2; (-) strand; PAM type: NRG; PAM sequence: AGG
gaataaaagatgactcaagc

SEQ ID NO: 61674 - DNA, 20 bp, Artificial Sequence
  Description of Artificial Sequence: Synthetic oligonucleotide
  Target: LAMA2; (-) strand; PAM type: NRG; PAM sequence: CAG
ggaataaaagatgactcaag

SEQ ID NO: 61675 - DNA, 20 bp, Artificial Sequence
  Description of Artificial Sequence: Synthetic oligonucleotide
  Target: LAMA2; (-) strand; PAM type: NRG; PAM sequence: AAG
actggaataaaagatgactc

SEQ ID NO: 61676 - DNA, 20 bp, Artificial Sequence
  Description of Artificial Sequence: Synthetic oligonucleotide
  Target: LAMA2; (-) strand; PAM type: NRG; PAM sequence: AAG
aaaaaggaaaactggaataa

SEQ ID NO: 61677 - DNA, 20 bp, Artificial Sequence
  Description of Artificial Sequence: Synthetic oligonucleotide
  Target: LAMA2; (-) strand; PAM type: NRG; PAM sequence: TGG
acactcaaaaaaaggaaaac

SEQ ID NO: 61678 - DNA, 20 bp, Artificial Sequence
  Description of Artificial Sequence: Synthetic oligonucleotide
  Target: LAMA2; (-) strand; PAM type: NRG; PAM sequence: AGG
ttgcctttacactcaaaaaa

SEQ ID NO: 61679 - DNA, 20 bp, Artificial Sequence
  Description of Artificial Sequence: Synthetic oligonucleotide
  Target: LAMA2; (-) strand; PAM type: NRG; PAM sequence: AAG
attgcctttacactcaaaaa

SEQ ID NO: 61680 - DNA, 20 bp, Artificial Sequence
  Description of Artificial Sequence: Synthetic oligonucleotide
  Target: LAMA2; (-) strand; PAM type: NRG; PAM sequence: AAG
aactatgggacaaagagtat

SEQ ID NO: 61681 - DNA, 20 bp, Artificial Sequence
  Description of Artificial Sequence: Synthetic oligonucleotide
  Target: LAMA2; (-) strand; PAM type: NRG; PAM sequence: GAG
aagagaaactatgggacaaa

SEQ ID NO: 61682 - DNA, 20 bp, Artificial Sequence
  Description of Artificial Sequence: Synthetic oligonucleotide
  Target: LAMA2; (-) strand; PAM type: NRG; PAM sequence: AAG
aaaagagaaactatgggaca

SEQ ID NO: 61683 - DNA, 20 bp, Artificial Sequence
  Description of Artificial Sequence: Synthetic oligonucleotide
  Target: LAMA2; (-) strand; PAM type: NRG; PAM sequence: GGG
caacagaaaagagaaactat

SEQ ID NO: 61684 - DNA, 20 bp, Artificial Sequence
  Description of Artificial Sequence: Synthetic oligonucleotide
  Target: LAMA2; (-) strand; PAM type: NRG; PAM sequence: TGG
tcaacagaaaagagaaacta

SEQ ID NO: 61685 - DNA, 20 bp, Artificial Sequence
  Description of Artificial Sequence: Synthetic oligonucleotide
  Target: LAMA2; (-) strand; PAM type: NRG; PAM sequence: GAG
agctatatttcaacagaaaa

SEQ ID NO: 61686 - DNA, 20 bp, Artificial Sequence
  Description of Artificial Sequence: Synthetic oligonucleotide
  Target: LAMA2; (-) strand; PAM type: NRG; PAM sequence: AAG
caagctatatttcaacagaa

SEQ ID NO: 61687 - DNA, 20 bp, Artificial Sequence
  Description of Artificial Sequence: Synthetic oligonucleotide
  Target: LAMA2; (-) strand; PAM type: NRG; PAM sequence: CAG
aagagcaagctatatttcaa

SEQ ID NO: 61688 - DNA, 20 bp, Artificial Sequence
  Description of Artificial Sequence: Synthetic oligonucleotide
  Target: LAMA2; (-) strand; PAM type: NRG; PAM sequence: AAG
atgttaatattccaaagagc

SEQ ID NO: 61689 - DNA, 20 bp, Artificial Sequence
  Description of Artificial Sequence: Synthetic oligonucleotide
  Target: LAMA2; (-) strand; PAM type: NRG; PAM sequence: GAG
ttacatgttaatattccaaa

SEQ ID NO: 61690 - DNA, 20 bp, Artificial Sequence
  Description of Artificial Sequence: Synthetic oligonucleotide
  Target: LAMA2; (-) strand; PAM type: NRG; PAM sequence: AAG
gtttacatgttaatattcca

SEQ ID NO: 61691 - DNA, 20 bp, Artificial Sequence
  Description of Artificial Sequence: Synthetic oligonucleotide
  Target: LAMA2; (-) strand; PAM type: NRG; PAM sequence: TGG
aaaaaaaaaaaaaaaacctc

SEQ ID NO: 61692 - DNA, 20 bp, Artificial Sequence
  Description of Artificial Sequence: Synthetic oligonucleotide
  Target: LAMA2; (-) strand; PAM type: NRG; PAM sequence: CAG
aaaaagtgttttagaatagt

SEQ ID NO: 61693 - DNA, 20 bp, Artificial Sequence
  Description of Artificial Sequence: Synthetic oligonucleotide
  Target: LAMA2; (-) strand; PAM type: NRG; PAM sequence: TAG
tcctaaaaagtgttttagaa

SEQ ID NO: 61694 - DNA, 20 bp, Artificial Sequence
  Description of Artificial Sequence: Synthetic oligonucleotide
  Target: LAMA2; (-) strand; PAM type: NRG; PAM sequence: TAG
tgatatcctaaaaagtgttt

SEQ ID NO: 61695 - DNA, 20 bp, Artificial Sequence
  Description of Artificial Sequence: Synthetic oligonucleotide
  Target: LAMA2; (-) strand; PAM type: NRG; PAM sequence: AAG
acaattagtgatatcctaaa

SEQ ID NO: 61696 - DNA, 20 bp, Artificial Sequence
  Description of Artificial Sequence: Synthetic oligonucleotide
  Target: LAMA2; (-) strand; PAM type: NRG; PAM sequence: TAG
ctcaattccttattgacaat

SEQ ID NO: 61697 - DNA, 20 bp, Artificial Sequence
  Description of Artificial Sequence: Synthetic oligonucleotide
  Target: LAMA2; (-) strand; PAM type: NRG; PAM sequence: TGG
gttcctgataagtttatctg

SEQ ID NO: 61698 - DNA, 20 bp, Artificial Sequence
  Description of Artificial Sequence: Synthetic oligonucleotide
  Target: LAMA2; (-) strand; PAM type: NRG; PAM sequence: AAG
aacaattttctgttcctgat

SEQ ID NO: 61699 - DNA, 20 bp, Artificial Sequence
  Description of Artificial Sequence: Synthetic oligonucleotide
  Target: LAMA2; (-) strand; PAM type: NRG; PAM sequence: TAG
agaatctttaaaaaaaaatt

SEQ ID NO: 61700 - DNA, 20 bp, Artificial Sequence
  Description of Artificial Sequence: Synthetic oligonucleotide
  Target: LAMA2; (-) strand; PAM type: NRG; PAM sequence: CAG
gtgaagtcctacctattcaa

SEQ ID NO: 61701 - DNA, 20 bp, Artificial Sequence
  Description of Artificial Sequence: Synthetic oligonucleotide
  Target: LAMA2; (-) strand; PAM type: NRG; PAM sequence: AAG
accaggttgaatccaatgtg

SEQ ID NO: 61702 - DNA, 20 bp, Artificial Sequence
  Description of Artificial Sequence: Synthetic oligonucleotide
  Target: LAMA2; (-) strand; PAM type: NRG; PAM sequence: AGG
gtatttgcattttaaatacc

SEQ ID NO: 61703 - DNA, 20 bp, Artificial Sequence
  Description of Artificial Sequence: Synthetic oligonucleotide
  Target: LAMA2; (-) strand; PAM type: NRG; PAM sequence: CAG
agtatttgcattttaaatac

SEQ ID NO: 61704 - DNA, 20 bp, Artificial Sequence
  Description of Artificial Sequence: Synthetic oligonucleotide
  Target: LAMA2; (-) strand; PAM type: NRG; PAM sequence: AAG
tagcaaaaagagaaatcaaa

SEQ ID NO: 61705 - DNA, 20 bp, Artificial Sequence
  Description of Artificial Sequence: Synthetic oligonucleotide
  Target: LAMA2; (-) strand; PAM type: NRG; PAM sequence: GAG
agaatattacttagcaaaaa

SEQ ID NO: 61706 - DNA, 20 bp, Artificial Sequence
  Description of Artificial Sequence: Synthetic oligonucleotide
  Target: LAMA2; (-) strand; PAM type: NRG; PAM sequence: AAG
ttagaatattacttagcaaa

SEQ ID NO: 61707 - DNA, 20 bp, Artificial Sequence
  Description of Artificial Sequence: Synthetic oligonucleotide
  Target: LAMA2; (-) strand; PAM type: NRG; PAM sequence: TAG
taatctcttagaatattact

SEQ ID NO: 61708 - DNA, 20 bp, Artificial Sequence
  Description of Artificial Sequence: Synthetic oligonucleotide
  Target: LAMA2; (-) strand; PAM type: NRG; PAM sequence: TAG
aaaatgtatggctaatctct

SEQ ID NO: 61709 - DNA, 20 bp, Artificial Sequence
  Description of Artificial Sequence: Synthetic oligonucleotide
  Target: LAMA2; (-) strand; PAM type: NRG; PAM sequence: TGG
tcacaacattttaaaatgta

SEQ ID NO: 61710 - DNA, 20 bp, Artificial Sequence
  Description of Artificial Sequence: Synthetic oligonucleotide
  Target: LAMA2; (-) strand; PAM type: NRG; PAM sequence: CAG
acaaacatgaaacacaaaaa

SEQ ID NO: 61711 - DNA, 20 bp, Artificial Sequence
  Description of Artificial Sequence: Synthetic oligonucleotide
  Target: LAMA2; (-) strand; PAM type: NRG; PAM sequence: AAG
gatctttaaggatcttaaac

SEQ ID NO: 61712 - DNA, 20 bp, Artificial Sequence
  Description of Artificial Sequence: Synthetic oligonucleotide
  Target: LAMA2; (-) strand; PAM type: NRG; PAM sequence: AGG
taatttacctcagatcttta

SEQ ID NO: 61713 - DNA, 20 bp, Artificial Sequence
  Description of Artificial Sequence: Synthetic oligonucleotide
  Target: LAMA2; (-) strand; PAM type: NRG; PAM sequence: AAG
ataatttacctcagatcttt

SEQ ID NO: 61714 - DNA, 20 bp, Artificial Sequence
  Description of Artificial Sequence: Synthetic oligonucleotide
  Target: LAMA2; (-) strand; PAM type: NRG; PAM sequence: CAG
ttcccaaaaataatttacct

SEQ ID NO: 61715 - DNA, 20 bp, Artificial Sequence
  Description of Artificial Sequence: Synthetic oligonucleotide
  Target: LAMA2; (-) strand; PAM type: NRG; PAM sequence: AAG
cagaaggtagaaattacaga

SEQ ID NO: 61716 - DNA, 20 bp, Artificial Sequence
  Description of Artificial Sequence: Synthetic oligonucleotide
  Target: LAMA2; (-) strand; PAM type: NRG; PAM sequence: CAG
ttcacagaaggtagaaatta

SEQ ID NO: 61717 - DNA, 20 bp, Artificial Sequence
  Description of Artificial Sequence: Synthetic oligonucleotide
  Target: LAMA2; (-) strand; PAM type: NRG; PAM sequence: TAG
aagaagttgttcacagaagg

SEQ ID NO: 61718 - DNA, 20 bp, Artificial Sequence
  Description of Artificial Sequence: Synthetic oligonucleotide
  Target: LAMA2; (-) strand; PAM type: NRG; PAM sequence: AGG
ttcaagaagttgttcacaga

SEQ ID NO: 61719 - DNA, 20 bp, Artificial Sequence
  Description of Artificial Sequence: Synthetic oligonucleotide
  Target: LAMA2; (-) strand; PAM type: NRG; PAM sequence: AAG
cttcaagaagttgttcacag

SEQ ID NO: 61720 - DNA, 20 bp, Artificial Sequence
  Description of Artificial Sequence: Synthetic oligonucleotide
  Target: LAMA2; (-) strand; PAM type: NRG; PAM sequence: CAG
agtcttcaagaagttgttca

SEQ ID NO: 61721 - DNA, 20 bp, Artificial Sequence
  Description of Artificial Sequence: Synthetic oligonucleotide
  Target: LAMA2; (-) strand; PAM type: NRG; PAM sequence: AAG
gcaacagaacagtcttcaag

SEQ ID NO: 61722 - DNA, 20 bp, Artificial Sequence
  Description of Artificial Sequence: Synthetic oligonucleotide
  Target: LAMA2; (-) strand; PAM type: NRG; PAM sequence: AAG
agagcaacagaacagtcttc

SEQ ID NO: 61723 - DNA, 20 bp, Artificial Sequence
  Description of Artificial Sequence: Synthetic oligonucleotide
  Target: LAMA2; (-) strand; PAM type: NRG; PAM sequence: CAG
ataaaccaagagcaacagaa

SEQ ID NO: 61724 - DNA, 20 bp, Artificial Sequence
  Description of Artificial Sequence: Synthetic oligonucleotide
  Target: LAMA2; (-) strand; PAM type: NRG; PAM sequence: CAG
tgcgtataaaccaagagcaa

SEQ ID NO: 61725 - DNA, 20 bp, Artificial Sequence
  Description of Artificial Sequence: Synthetic oligonucleotide
  Target: LAMA2; (-) strand; PAM type: NRG; PAM sequence: GAG
gggacctgcgtataaaccaa

SEQ ID NO: 61726 - DNA, 20 bp, Artificial Sequence
  Description of Artificial Sequence: Synthetic oligonucleotide
  Target: LAMA2; (-) strand; PAM type: NRG; PAM sequence: AAG
aagggacctgcgtataaacc

SEQ ID NO: 61727 - DNA, 20 bp, Artificial Sequence
  Description of Artificial Sequence: Synthetic oligonucleotide
  Target: LAMA2; (-) strand; PAM type: NRG; PAM sequence: GGG
tttttattttgttattttaa

SEQ ID NO: 61728 - DNA, 20 bp, Artificial Sequence
  Description of Artificial Sequence: Synthetic oligonucleotide
  Target: LAMA2; (-) strand; PAM type: NRG; PAM sequence: AGG
ttttttattttgttatttta

SEQ ID NO: 61729 - DNA, 20 bp, Artificial Sequence
  Description of Artificial Sequence: Synthetic oligonucleotide
  Target: LAMA2; (-) strand; PAM type: NRG; PAM sequence: AAG
attttttattttgttatttt

SEQ ID NO: 61730 - DNA, 20 bp, Artificial Sequence
  Description of Artificial Sequence: Synthetic oligonucleotide
  Target: LAMA2; (-) strand; PAM type: NRG; PAM sequence: CAG
aattatttttcttttatttc

SEQ ID NO: 61731 - DNA, 20 bp, Artificial Sequence
  Description of Artificial Sequence: Synthetic oligonucleotide
  Target: LAMA2; (-) strand; PAM type: NRG; PAM sequence: GAG
cttacccaagaaaatccctt

SEQ ID NO: 61732 - DNA, 20 bp, Artificial Sequence
  Description of Artificial Sequence: Synthetic oligonucleotide
  Target: LAMA2; (-) strand; PAM type: NRG; PAM sequence: AAG
cattctctgaggccttaccc

SEQ ID NO: 61733 - DNA, 20 bp, Artificial Sequence
  Description of Artificial Sequence: Synthetic oligonucleotide
  Target: LAMA2; (-) strand; PAM type: NRG; PAM sequence: AGG
aacagctggaacattctctg

SEQ ID NO: 61734 - DNA, 20 bp, Artificial Sequence
  Description of Artificial Sequence: Synthetic oligonucleotide
  Target: LAMA2; (-) strand; PAM type: NRG; PAM sequence: GAG
gaacagctggaacattctct

SEQ ID NO: 61735 - DNA, 20 bp, Artificial Sequence
  Description of Artificial Sequence: Synthetic oligonucleotide
  Target: LAMA2; (-) strand; PAM type: NRG; PAM sequence: TGG
atgtctttcttaagaacagc

SEQ ID NO: 61736 - DNA, 20 bp, Artificial Sequence
  Description of Artificial Sequence: Synthetic oligonucleotide
  Target: LAMA2; (-) strand; PAM type: NRG; PAM sequence: CAG
tacaatgtctttcttaagaa

SEQ ID NO: 61737 - DNA, 20 bp, Artificial Sequence
  Description of Artificial Sequence: Synthetic oligonucleotide
  Target: LAMA2; (-) strand; PAM type: NRG; PAM sequence: AAG
ttatatacaatgtctttctt

SEQ ID NO: 61738 - DNA, 20 bp, Artificial Sequence
  Description of Artificial Sequence: Synthetic oligonucleotide
  Target: LAMA2; (-) strand; PAM type: NRG; PAM sequence: TGG
tcagtctattcagctaaatg

SEQ ID NO: 61739 - DNA, 20 bp, Artificial Sequence
  Description of Artificial Sequence: Synthetic oligonucleotide
  Target: LAMA2; (-) strand; PAM type: NRG; PAM sequence: CAG
taagaatttttcagtctatt

SEQ ID NO: 61740 - DNA, 20 bp, Artificial Sequence
  Description of Artificial Sequence: Synthetic oligonucleotide
  Target: LAMA2; (-) strand; PAM type: NRG; PAM sequence: CAG
ctcaaataataagaattttt

SEQ ID NO: 61741 - DNA, 20 bp, Artificial Sequence
  Description of Artificial Sequence: Synthetic oligonucleotide
  Target: LAMA2; (-) strand; PAM type: NRG; PAM sequence: AAG
tgaatcatttctcaaataat

SEQ ID NO: 61742 - DNA, 20 bp, Artificial Sequence
  Description of Artificial Sequence: Synthetic oligonucleotide
  Target: LAMA2; (-) strand; PAM type: NRG; PAM sequence: GAG
ttttatgaatatttagcatt

SEQ ID NO: 61743 - DNA, 20 bp, Artificial Sequence
  Description of Artificial Sequence: Synthetic oligonucleotide
  Target: LAMA2; (-) strand; PAM type: NRG; PAM sequence: TAG
ggatagtttttatgaatatt

SEQ ID NO: 61744 - DNA, 20 bp, Artificial Sequence
  Description of Artificial Sequence: Synthetic oligonucleotide
  Target: LAMA2; (-) strand; PAM type: NRG; PAM sequence: TAG
aaaaaggattaatgaatgga

SEQ ID NO: 61745 - DNA, 20 bp, Artificial Sequence
  Description of Artificial Sequence: Synthetic oligonucleotide
  Target: LAMA2; (-) strand; PAM type: NRG; PAM sequence: TGG
gtttaaaaaggattaatgaa

SEQ ID NO: 61746 - DNA, 20 bp, Artificial Sequence
  Description of Artificial Sequence: Synthetic oligonucleotide
  Target: LAMA2; (-) strand; PAM type: NRG; PAM sequence: AGG
ctaattacttcagtttaaaa

SEQ ID NO: 61747 - DNA, 20 bp, Artificial Sequence
  Description of Artificial Sequence: Synthetic oligonucleotide
  Target: LAMA2; (-) strand; PAM type: NRG; PAM sequence: AAG
tctaattacttcagtttaaa

SEQ ID NO: 61748 - DNA, 20 bp, Artificial Sequence
  Description of Artificial Sequence: Synthetic oligonucleotide
  Target: LAMA2; (-) strand; PAM type: NRG; PAM sequence: CAG
cctgctttttctaattactt

SEQ ID NO: 61749 - DNA, 20 bp, Artificial Sequence
  Description of Artificial Sequence: Synthetic oligonucleotide
  Target: LAMA2; (-) strand; PAM type: NRG; PAM sequence: AAG
attaaccatttgatgaagaa

SEQ ID NO: 61750 - DNA, 20 bp, Artificial Sequence
  Description of Artificial Sequence: Synthetic oligonucleotide
  Target: LAMA2; (-) strand; PAM type: NRG; PAM sequence: AAG
aaagaattaaccatttgatg

SEQ ID NO: 61751 - DNA, 20 bp, Artificial Sequence
  Description of Artificial Sequence: Synthetic oligonucleotide
  Target: LAMA2; (-) strand; PAM type: NRG; PAM sequence: AAG
taaagaataaccatttaata

SEQ ID NO: 61752 - DNA, 20 bp, Artificial Sequence
  Description of Artificial Sequence: Synthetic oligonucleotide
  Target: LAMA2; (-) strand; PAM type: NRG; PAM sequence: AAG
gctcatctttgctcatttta

SEQ ID NO: 61753 - DNA, 20 bp, Artificial Sequence
  Description of Artificial Sequence: Synthetic oligonucleotide
  Target: LAMA2; (-) strand; PAM type: NRG; PAM sequence: GAG
ttacaagtaccttatttgct

SEQ ID NO: 61754 - DNA, 20 bp, Artificial Sequence
  Description of Artificial Sequence: Synthetic oligonucleotide
  Target: LAMA2; (-) strand; PAM type: NRG; PAM sequence: AAG
tatagtactttcattattac

SEQ ID NO: 61755 - DNA, 20 bp, Artificial Sequence
  Description of Artificial Sequence: Synthetic oligonucleotide
  Target: LAMA2; (-) strand; PAM type: NRG; PAM sequence: TAG
aaagccagtattcctgcata

SEQ ID NO: 61756 - DNA, 20 bp, Artificial Sequence
  Description of Artificial Sequence: Synthetic oligonucleotide
  Target: LAMA2; (-) strand; PAM type: NRG; PAM sequence: CAG
gcagattaaaaacaaaaagc

SEQ ID NO: 61757 - DNA, 20 bp, Artificial Sequence
  Description of Artificial Sequence: Synthetic oligonucleotide
  Target: LAMA2; (-) strand; PAM type: NRG; PAM sequence: AAG
aattgcagattaaaaacaaa

SEQ ID NO: 61758 - DNA, 20 bp, Artificial Sequence
  Description of Artificial Sequence: Synthetic oligonucleotide
  Target: LAMA2; (-) strand; PAM type: NRG; PAM sequence: CAG
gaaatttaattaactaattg

SEQ ID NO: 61759 - DNA, 20 bp, Artificial Sequence
  Description of Artificial Sequence: Synthetic oligonucleotide
  Target: LAMA2; (-) strand; PAM type: NRG; PAM sequence: TGG
agctgtattatgaggaagaa

SEQ ID NO: 61760 - DNA, 20 bp, Artificial Sequence
  Description of Artificial Sequence: Synthetic oligonucleotide
  Target: LAMA2; (-) strand; PAM type: NRG; PAM sequence: AAG
tcactagctgtattatgagg

SEQ ID NO: 61761 - DNA, 20 bp, Artificial Sequence
  Description of Artificial Sequence: Synthetic oligonucleotide
  Target: LAMA2; (-) strand; PAM type: NRG; PAM sequence: AGG
ccttcactagctgtattatg

SEQ ID NO: 61762 - DNA, 20 bp, Artificial Sequence
  Description of Artificial Sequence: Synthetic oligonucleotide
  Target: LAMA2; (-) strand; PAM type: NRG; PAM sequence: GAG
accttcactagctgtattat

SEQ ID NO: 61763 - DNA, 20 bp, Artificial Sequence
  Description of Artificial Sequence: Synthetic oligonucleotide
  Target: LAMA2; (-) strand; PAM type: NRG; PAM sequence: TAG
actgaaatttggaccttcac

SEQ ID NO: 61764 - DNA, 20 bp, Artificial Sequence
  Description of Artificial Sequence: Synthetic oligonucleotide
  Target: LAMA2; (-) strand; PAM type: NRG; PAM sequence: TGG
acacttgagtcactgaaatt

SEQ ID NO: 61765 - DNA, 20 bp, Artificial Sequence
  Description of Artificial Sequence: Synthetic oligonucleotide
  Target: LAMA2; (-) strand; PAM type: NRG; PAM sequence: GAG
actttttcccacctacactt

SEQ ID NO: 61766 - DNA, 20 bp, Artificial Sequence
  Description of Artificial Sequence: Synthetic oligonucleotide
  Target: LAMA2; (-) strand; PAM type: NRG; PAM sequence: AGG
caatttgcgtaaagtttgtg

SEQ ID NO: 61767 - DNA, 20 bp, Artificial Sequence
  Description of Artificial Sequence: Synthetic oligonucleotide
  Target: LAMA2; (-) strand; PAM type: NRG; PAM sequence: GAG
acaatttgcgtaaagtttgt

SEQ ID NO: 61768 - DNA, 20 bp, Artificial Sequence
  Description of Artificial Sequence: Synthetic oligonucleotide
  Target: LAMA2; (-) strand; PAM type: NRG; PAM sequence: AAG
cttttctaacaatttgcgta

SEQ ID NO: 61769 - DNA, 20 bp, Artificial Sequence
  Description of Artificial Sequence: Synthetic oligonucleotide
  Target: LAMA2; (-) strand; PAM type: NRG; PAM sequence: AAG
catagtagtcatgtttacat

SEQ ID NO: 61770 - DNA, 20 bp, Artificial Sequence
  Description of Artificial Sequence: Synthetic oligonucleotide
  Target: LAMA2; (-) strand; PAM type: NRG; PAM sequence: TAG
tccctggtctgtattcatag

SEQ ID NO: 61771 - DNA, 20 bp, Artificial Sequence
  Description of Artificial Sequence: Synthetic oligonucleotide
  Target: LAMA2; (-) strand; PAM type: NRG; PAM sequence: TAG
acatccctggtctgtattca

SEQ ID NO: 61772 - DNA, 20 bp, Artificial Sequence
  Description of Artificial Sequence: Synthetic oligonucleotide
  Target: LAMA2; (-) strand; PAM type: NRG; PAM sequence: TGG
ttgactctggggcacatccc

SEQ ID NO: 61773 - DNA, 20 bp, Artificial Sequence
  Description of Artificial Sequence: Synthetic oligonucleotide
  Target: LAMA2; (-) strand; PAM type: NRG; PAM sequence: GGG
aattgaactcattgactctg

SEQ ID NO: 61774 - DNA, 20 bp, Artificial Sequence
  Description of Artificial Sequence: Synthetic oligonucleotide
  Target: LAMA2; (-) strand; PAM type: NRG; PAM sequence: GGG
gaattgaactcattgactct

SEQ ID NO: 61775 - DNA, 20 bp, Artificial Sequence
  Description of Artificial Sequence: Synthetic oligonucleotide
  Target: LAMA2; (-) strand; PAM type: NRG; PAM sequence: TGG
tgaattgaactcattgactc

SEQ ID NO: 61776 - DNA, 20 bp, Artificial Sequence
  Description of Artificial Sequence: Synthetic oligonucleotide
  Target: LAMA2; (-) strand; PAM type: NRG; PAM sequence: AAG
cctgaaagcattgtggcagc

SEQ ID NO: 61777 - DNA, 20 bp, Artificial Sequence
  Description of Artificial Sequence: Synthetic oligonucleotide
  Target: LAMA2; (-) strand; PAM type: NRG; PAM sequence: CAG
taggcctgaaagcattgtgg

SEQ ID NO: 61778 - DNA, 20 bp, Artificial Sequence
  Description of Artificial Sequence: Synthetic oligonucleotide
  Target: LAMA2; (-) strand; PAM type: NRG; PAM sequence: TGG
gcctaggcctgaaagcattg

SEQ ID NO: 61779 - DNA, 20 bp, Artificial Sequence
  Description of Artificial Sequence: Synthetic oligonucleotide
  Target: LAMA2; (-) strand; PAM type: NRG; PAM sequence: AAG
tgcaaagagcctaggcctga

SEQ ID NO: 61780 - DNA, 20 bp, Artificial Sequence
  Description of Artificial Sequence: Synthetic oligonucleotide
  Target: LAMA2; (-) strand; PAM type: NRG; PAM sequence: AGG
tctctgtctgcaaagagcct

SEQ ID NO: 61781 - DNA, 20 bp, Artificial Sequence
  Description of Artificial Sequence: Synthetic oligonucleotide
  Target: LAMA2; (-) strand; PAM type: NRG; PAM sequence: TAG
ctctctgtctgcaaagagcc

SEQ ID NO: 61782 - DNA, 20 bp, Artificial Sequence
  Description of Artificial Sequence: Synthetic oligonucleotide
  Target: LAMA2; (-) strand; PAM type: NRG; PAM sequence: GAG
tgctgctctctgtctgcaaa

SEQ ID NO: 61783 - DNA, 20 bp, Artificial Sequence
  Description of Artificial Sequence: Synthetic oligonucleotide
  Target: LAMA2; (-) strand; PAM type: NRG; PAM sequence: AAG
gatgctgctctctgtctgca

SEQ ID NO: 61784 - DNA, 20 bp, Artificial Sequence
  Description of Artificial Sequence: Synthetic oligonucleotide
  Target: LAMA2; (-) strand; PAM type: NRG; PAM sequence: AGG
gaacaaaccctgctgggcac

SEQ ID NO: 61785 - DNA, 20 bp, Artificial Sequence
  Description of Artificial Sequence: Synthetic oligonucleotide
  Target: LAMA2; (-) strand; PAM type: NRG; PAM sequence: CAG
tgaacaaaccctgctgggca

SEQ ID NO: 61786 - DNA, 20 bp, Artificial Sequence
  Description of Artificial Sequence: Synthetic oligonucleotide
  Target: LAMA2; (-) strand; PAM type: NRG; PAM sequence: GGG
gcagttgaacaaaccctgct

SEQ ID NO: 61787 - DNA, 20 bp, Artificial Sequence
  Description of Artificial Sequence: Synthetic oligonucleotide
  Target: LAMA2; (-) strand; PAM type: NRG; PAM sequence: TGG
agcagttgaacaaaccctgc

SEQ ID NO: 61788 - DNA, 20 bp, Artificial Sequence
  Description of Artificial Sequence: Synthetic oligonucleotide
  Target: LAMA2; (-) strand; PAM type: NRG; PAM sequence: CAG
gaatctaccttgaccattag

SEQ ID NO: 61789 - DNA, 20 bp, Artificial Sequence
  Description of Artificial Sequence: Synthetic oligonucleotide
  Target: LAMA2; (-) strand; PAM type: NRG; PAM sequence: TAG
cttgaatctaccttgaccat

SEQ ID NO: 61790 - DNA, 20 bp, Artificial Sequence
  Description of Artificial Sequence: Synthetic oligonucleotide
  Target: LAMA2; (-) strand; PAM type: NRG; PAM sequence: GGG
atgtctctgggaatgataga

SEQ ID NO: 61791 - DNA, 20 bp, Artificial Sequence
  Description of Artificial Sequence: Synthetic oligonucleotide
  Target: LAMA2; (-) strand; PAM type: NRG; PAM sequence: AGG
tatgtctctgggaatgatag

SEQ ID NO: 61792 - DNA, 20 bp, Artificial Sequence
  Description of Artificial Sequence: Synthetic oligonucleotide
  Target: LAMA2; (-) strand; PAM type: NRG; PAM sequence: GAG
gtatgtctctgggaatgata

SEQ ID NO: 61793 - DNA, 20 bp, Artificial Sequence
  Description of Artificial Sequence: Synthetic oligonucleotide
  Target: LAMA2; (-) strand; PAM type: NRG; PAM sequence: TAG
ttgtatgtctctgggaatga

SEQ ID NO: 61794 - DNA, 20 bp, Artificial Sequence
  Description of Artificial Sequence: Synthetic oligonucleotide
  Target: LAMA2; (-) strand; PAM type: NRG; PAM sequence: GGG
atttgattttgtatgtctct

SEQ ID NO: 61795 - DNA, 20 bp, Artificial Sequence
  Description of Artificial Sequence: Synthetic oligonucleotide
  Target: LAMA2; (-) strand; PAM type: NRG; PAM sequence: TGG
tatttgattttgtatgtctc

SEQ ID NO: 61796 - DNA, 20 bp, Artificial Sequence
  Description of Artificial Sequence: Synthetic oligonucleotide
  Target: LAMA2; (-) strand; PAM type: NRG; PAM sequence: CAG
atttatatttctctttaagt

SEQ ID NO: 61797 - DNA, 20 bp, Artificial Sequence
  Description of Artificial Sequence: Synthetic oligonucleotide
  Target: LAMA2; (-) strand; PAM type: NRG; PAM sequence: AAG
tttcatttatatttctcttt

SEQ ID NO: 61798 - DNA, 20 bp, Artificial Sequence
  Description of Artificial Sequence: Synthetic oligonucleotide
  Target: LAMA2; (-) strand; PAM type: NRG; PAM sequence: TAG
tctttgttttcttttccttt

SEQ ID NO: 61799 - DNA, 20 bp, Artificial Sequence
  Description of Artificial Sequence: Synthetic oligonucleotide
  Target: LAMA2; (-) strand; PAM type: NRG; PAM sequence: AAG
ctttctttagtgccttgtaa

SEQ ID NO: 61800 - DNA, 20 bp, Artificial Sequence
  Description of Artificial Sequence: Synthetic oligonucleotide
  Target: LAMA2; (-) strand; PAM type: NRG; PAM sequence: TAG
tgttcccttgtgtctttctt

SEQ ID NO: 61801 - DNA, 20 bp, Artificial Sequence
  Description of Artificial Sequence: Synthetic oligonucleotide
  Target: LAMA2; (-) strand; PAM type: NRG; PAM sequence: TGG
gaggccaatctaacagtgcc

SEQ ID NO: 61802 - DNA, 20 bp, Artificial Sequence
  Description of Artificial Sequence: Synthetic oligonucleotide
  Target: LAMA2; (-) strand; PAM type: NRG; PAM sequence: CAG
agctcatgaggccaatctaa

SEQ ID NO: 61803 - DNA, 20 bp, Artificial Sequence
  Description of Artificial Sequence: Synthetic oligonucleotide
  Target: LAMA2; (-) strand; PAM type: NRG; PAM sequence: AGG
gtgcccatgcaaagctcatg

SEQ ID NO: 61804 - DNA, 20 bp, Artificial Sequence
  Description of Artificial Sequence: Synthetic oligonucleotide
  Target: LAMA2; (-) strand; PAM type: NRG; PAM sequence: GAG
ggtgcccatgcaaagctcat

SEQ ID NO: 61805 - DNA, 20 bp, Artificial Sequence
  Description of Artificial Sequence: Synthetic oligonucleotide
  Target: LAMA2; (-) strand; PAM type: NRG; PAM sequence: AAG
agcaagtgggtgcccatgca

SEQ ID NO: 61806 - DNA, 20 bp, Artificial Sequence
  Description of Artificial Sequence: Synthetic oligonucleotide
  Target: LAMA2; (-) strand; PAM type: NRG; PAM sequence: GGG
aagcctgatgtatagcaagt

SEQ ID NO: 61807 - DNA, 20 bp, Artificial Sequence
  Description of Artificial Sequence: Synthetic oligonucleotide
  Target: LAMA2; (-) strand; PAM type: NRG; PAM sequence: TGG
caagcctgatgtatagcaag

SEQ ID NO: 61808 - DNA, 20 bp, Artificial Sequence
  Description of Artificial Sequence: Synthetic oligonucleotide
  Target: LAMA2; (-) strand; PAM type: NRG; PAM sequence: AAG
ttccaagcctgatgtatagc

SEQ ID NO: 61809 - DNA, 20 bp, Artificial Sequence
  Description of Artificial Sequence: Synthetic oligonucleotide
  Target: LAMA2; (-) strand; PAM type: NRG; PAM sequence: TAG
atgtttccaagcctgatgta

SEQ ID NO: 61810 - DNA, 20 bp, Artificial Sequence
  Description of Artificial Sequence: Synthetic oligonucleotide
  Target: LAMA2; (-) strand; PAM type: NRG; PAM sequence: AAG
ctggtcaggagtatgtttcc

SEQ ID NO: 61811 - DNA, 20 bp, Artificial Sequence
  Description of Artificial Sequence: Synthetic oligonucleotide
  Target: LAMA2; (-) strand; PAM type: NRG; PAM sequence: GAG
ctagcataaatgctggtcag

SEQ ID NO: 61812 - DNA, 20 bp, Artificial Sequence
  Description of Artificial Sequence: Synthetic oligonucleotide
  Target: LAMA2; (-) strand; PAM type: NRG; PAM sequence: AGG
gtctagcataaatgctggtc

SEQ ID NO: 61813 - DNA, 20 bp, Artificial Sequence
  Description of Artificial Sequence: Synthetic oligonucleotide
  Target: LAMA2; (-) strand; PAM type: NRG; PAM sequence: CAG
tgtctagcataaatgctggt

SEQ ID NO: 61814 - DNA, 20 bp, Artificial Sequence
  Description of Artificial Sequence: Synthetic oligonucleotide
  Target: LAMA2; (-) strand; PAM type: NRG; PAM sequence: TGG
atcatgtctagcataaatgc

SEQ ID NO: 61815 - DNA, 20 bp, Artificial Sequence
  Description of Artificial Sequence: Synthetic oligonucleotide
  Target: LAMA2; (-) strand; PAM type: NRG; PAM sequence: TAG
tatgagacataaatcatgtc

SEQ ID NO: 61816 - DNA, 20 bp, Artificial Sequence
  Description of Artificial Sequence: Synthetic oligonucleotide
  Target: LAMA2; (-) strand; PAM type: NRG; PAM sequence: GAG
tcacccccttagcacagtat

SEQ ID NO: 61817 - DNA, 20 bp, Artificial Sequence
  Description of Artificial Sequence: Synthetic oligonucleotide
  Target: LAMA2; (-) strand; PAM type: NRG; PAM sequence: CAG
ttttagtcacccccttagca

SEQ ID NO: 61818 - DNA, 20 bp, Artificial Sequence
  Description of Artificial Sequence: Synthetic oligonucleotide
  Target: LAMA2; (-) strand; PAM type: NRG; PAM sequence: TAG
atagattttagtcaccccct

SEQ ID NO: 61819 - DNA, 20 bp, Artificial Sequence
  Description of Artificial Sequence: Synthetic oligonucleotide
  Target: LAMA2; (-) strand; PAM type: NRG; PAM sequence: TAG
gtattggtcaatatagattt

SEQ ID NO: 61820 - DNA, 20 bp, Artificial Sequence
  Description of Artificial Sequence: Synthetic oligonucleotide
  Target: LAMA2; (-) strand; PAM type: NRG; PAM sequence: TAG
tcatcaagtattggtcaata

SEQ ID NO: 61821 - DNA, 20 bp, Artificial Sequence
  Description of Artificial Sequence: Synthetic oligonucleotide
  Target: LAMA2; (-) strand; PAM type: NRG; PAM sequence: TGG
caaatatactcatcaagtat

SEQ ID NO: 61822 - DNA, 20 bp, Artificial Sequence
  Description of Artificial Sequence: Synthetic oligonucleotide
  Target: LAMA2; (-) strand; PAM type: NRG; PAM sequence: AAG
atctgtcaaatatactcatc

SEQ ID NO: 61823 - DNA, 20 bp, Artificial Sequence
  Description of Artificial Sequence: Synthetic oligonucleotide
  Target: LAMA2; (-) strand; PAM type: NRG; PAM sequence: GGG
tcccgttacatttttgagca

SEQ ID NO: 61824 - DNA, 20 bp, Artificial Sequence
  Description of Artificial Sequence: Synthetic oligonucleotide
  Target: LAMA2; (-) strand; PAM type: NRG; PAM sequence: AGG
atcccgttacatttttgagc

SEQ ID NO: 61825 - DNA, 20 bp, Artificial Sequence
  Description of Artificial Sequence: Synthetic oligonucleotide
  Target: LAMA2; (-) strand; PAM type: NRG; PAM sequence: CAG
gatcccgttacatttttgag

SEQ ID NO: 61826 - DNA, 20 bp, Artificial Sequence
  Description of Artificial Sequence: Synthetic oligonucleotide
  Target: LAMA2; (-) strand; PAM type: NRG; PAM sequence: GAG
aaagatcccgttacattttt

SEQ ID NO: 61827 - DNA, 20 bp, Artificial Sequence
  Description of Artificial Sequence: Synthetic oligonucleotide
  Target: LAMA2; (-) strand; PAM type: NRG; PAM sequence: AAG
acctatgatcctgattagta

SEQ ID NO: 61828 - DNA, 20 bp, Artificial Sequence
  Description of Artificial Sequence: Synthetic oligonucleotide
  Target: LAMA2; (-) strand; PAM type: NRG; PAM sequence: TAG
tgcaaacctatgatcctgat

SEQ ID NO: 61829 - DNA, 20 bp, Artificial Sequence
  Description of Artificial Sequence: Synthetic oligonucleotide
  Target: LAMA2; (-) strand; PAM type: NRG; PAM sequence: AGG
ccactcattcttttcctcct

SEQ ID NO: 61830 - DNA, 20 bp, Artificial Sequence
  Description of Artificial Sequence: Synthetic oligonucleotide
  Target: LAMA2; (-) strand; PAM type: NRG; PAM sequence: TAG
cccactcattcttttcctcc

SEQ ID NO: 61831 - DNA, 20 bp, Artificial Sequence
  Description of Artificial Sequence: Synthetic oligonucleotide
  Target: LAMA2; (-) strand; PAM type: NRG; PAM sequence: TGG
ttgatgcttggtgtataaac

SEQ ID NO: 61832 - DNA, 20 bp, Artificial Sequence
  Description of Artificial Sequence: Synthetic oligonucleotide
  Target: LAMA2; (-) strand; PAM type: NRG; PAM sequence: TGG
gaatggagtcctttgatgct

SEQ ID NO: 61833 - DNA, 20 bp, Artificial Sequence
  Description of Artificial Sequence: Synthetic oligonucleotide
  Target: LAMA2; (-) strand; PAM type: NRG; PAM sequence: GAG
gtttccctagggtgagaatg

SEQ ID NO: 61834 - DNA, 20 bp, Artificial Sequence
  Description of Artificial Sequence: Synthetic oligonucleotide
  Target: LAMA2; (-) strand; PAM type: NRG; PAM sequence: TGG
gtgtttccctagggtgagaa

SEQ ID NO: 61835 - DNA, 20 bp, Artificial Sequence
  Description of Artificial Sequence: Synthetic oligonucleotide
  Target: LAMA2; (-) strand; PAM type: NRG; PAM sequence: GAG
aatccgtgtttccctagggt

SEQ ID NO: 61836 - DNA, 20 bp, Artificial Sequence
  Description of Artificial Sequence: Synthetic oligonucleotide
  Target: LAMA2; (-) strand; PAM type: NRG; PAM sequence: GGG
gtaaaatccgtgtttcccta

SEQ ID NO: 61837 - DNA, 20 bp, Artificial Sequence
  Description of Artificial Sequence: Synthetic oligonucleotide
  Target: LAMA2; (-) strand; PAM type: NRG; PAM sequence: AGG
agtaaaatccgtgtttccct

SEQ ID NO: 61838 - DNA, 20 bp, Artificial Sequence
  Description of Artificial Sequence: Synthetic oligonucleotide
  Target: LAMA2; (-) strand; PAM type: NRG; PAM sequence: TAG
cagtaaaatccgtgtttccc

SEQ ID NO: 61839 - DNA, 20 bp, Artificial Sequence
  Description of Artificial Sequence: Synthetic oligonucleotide
  Target: LAMA2; (-) strand; PAM type: NRG; PAM sequence: CAG
aattttcatcatcccctgag

SEQ ID NO: 61840 - DNA, 20 bp, Artificial Sequence
  Description of Artificial Sequence: Synthetic oligonucleotide
  Target: LAMA2; (-) strand; PAM type: NRG; PAM sequence: GAG
tccaattttcatcatcccct

SEQ ID NO: 61841 - DNA, 20 bp, Artificial Sequence
  Description of Artificial Sequence: Synthetic oligonucleotide
  Target: LAMA2; (-) strand; PAM type: NRG; PAM sequence: CGG
ataatctgaggtgtaaaagt

SEQ ID NO: 61842 - DNA, 20 bp, Artificial Sequence
  Description of Artificial Sequence: Synthetic oligonucleotide
  Target: LAMA2; (-) strand; PAM type: NRG; PAM sequence: AAG
agaaataatctgaggtgtaa

SEQ ID NO: 61843 - DNA, 20 bp, Artificial Sequence
  Description of Artificial Sequence: Synthetic oligonucleotide
  Target: LAMA2; (-) strand; PAM type: NRG; PAM sequence: AGG
taattaatagaaataatctg

SEQ ID NO: 61844 - DNA, 20 bp, Artificial Sequence
  Description of Artificial Sequence: Synthetic oligonucleotide
  Target: LAMA2; (-) strand; PAM type: NRG; PAM sequence: GAG
gtaattaatagaaataatct

SEQ ID NO: 61845 - DNA, 20 bp, Artificial Sequence
  Description of Artificial Sequence: Synthetic oligonucleotide
  Target: LAMA2; (-) strand; PAM type: NRG; PAM sequence: TAG
ataatctgaggtgtaattaa

SEQ ID NO: 61846 - DNA, 20 bp, Artificial Sequence
  Description of Artificial Sequence: Synthetic oligonucleotide
  Target: LAMA2; (-) strand; PAM type: NRG; PAM sequence: AGG
ggtgtaatagaaataatctg

SEQ ID NO: 61847 - DNA, 20 bp, Artificial Sequence
  Description of Artificial Sequence: Synthetic oligonucleotide
  Target: LAMA2; (-) strand; PAM type: NRG; PAM sequence: GAG
aggtgtaatagaaataatct

SEQ ID NO: 61848 - DNA, 20 bp, Artificial Sequence
  Description of Artificial Sequence: Synthetic oligonucleotide
  Target: LAMA2; (-) strand; PAM type: NRG; PAM sequence: TAG
gataataatctgaggtgtaa

SEQ ID NO: 61849 - DNA, 20 bp, Artificial Sequence
  Description of Artificial Sequence: Synthetic oligonucleotide
  Target: LAMA2; (-) strand; PAM type: NRG; PAM sequence: AGG
taatctgagataataatctg

SEQ ID NO: 61850 - DNA, 20 bp, Artificial Sequence
  Description of Artificial Sequence: Synthetic oligonucleotide
  Target: LAMA2; (-) strand; PAM type: NRG; PAM sequence: GAG
ataatctgagataataatct

SEQ ID NO: 61851 - DNA, 20 bp, Artificial Sequence
  Description of Artificial Sequence: Synthetic oligonucleotide
  Target: LAMA2; (-) strand; PAM type: NRG; PAM sequence: GAG
ggtgtaatagataataatct

SEQ ID NO: 61852 - DNA, 20 bp, Artificial Sequence
  Description of Artificial Sequence: Synthetic oligonucleotide
  Target: LAMA2; (-) strand; PAM type: NRG; PAM sequence: TAG
agaaataatctgaggtgtaa

SEQ ID NO: 61853 - DNA, 20 bp, Artificial Sequence
  Description of Artificial Sequence: Synthetic oligonucleotide
  Target: LAMA2; (-) strand; PAM type: NRG; PAM sequence: AGG
tgaataatagaaataatctg

SEQ ID NO: 61854 - DNA, 20 bp, Artificial Sequence
  Description of Artificial Sequence: Synthetic oligonucleotide
  Target: LAMA2; (-) strand; PAM type: NRG; PAM sequence: GAG
ctgaataatagaaataatct

SEQ ID NO: 61855 - DNA, 20 bp, Artificial Sequence
  Description of Artificial Sequence: Synthetic oligonucleotide
  Target: LAMA2; (-) strand; PAM type: NRG; PAM sequence: TAG
cttcggctaagactgaataa

SEQ ID NO: 61856 - DNA, 20 bp, Artificial Sequence
  Description of Artificial Sequence: Synthetic oligonucleotide
  Target: LAMA2; (-) strand; PAM type: NRG; PAM sequence: AAG
ggggctgggaatcttcggct

SEQ ID NO: 61857 - DNA, 20 bp, Artificial Sequence
  Description of Artificial Sequence: Synthetic oligonucleotide
  Target: LAMA2; (-) strand; PAM type: NRG; PAM sequence: CGG
gacctggggctgggaatctt

SEQ ID NO: 61858 - DNA, 20 bp, Artificial Sequence
  Description of Artificial Sequence: Synthetic oligonucleotide
  Target: LAMA2; (-) strand; PAM type: NRG; PAM sequence: GGG
gcaacgatggacctggggct

SEQ ID NO: 61859 - DNA, 20 bp, Artificial Sequence
  Description of Artificial Sequence: Synthetic oligonucleotide
  Target: LAMA2; (-) strand; PAM type: NRG; PAM sequence: TGG
agcaacgatggacctggggc

SEQ ID NO: 61860 - DNA, 20 bp, Artificial Sequence
  Description of Artificial Sequence: Synthetic oligonucleotide
  Target: LAMA2; (-) strand; PAM type: NRG; PAM sequence: GGG
cttgagcaacgatggacctg

SEQ ID NO: 61861 - DNA, 20 bp, Artificial Sequence
  Description of Artificial Sequence: Synthetic oligonucleotide
  Target: LAMA2; (-) strand; PAM type: NRG; PAM sequence: GGG
ccttgagcaacgatggacct

SEQ ID NO: 61862 - DNA, 20 bp, Artificial Sequence
  Description of Artificial Sequence: Synthetic oligonucleotide
  Target: LAMA2; (-) strand; PAM type: NRG; PAM sequence: TGG
cccttgagcaacgatggacc

SEQ ID NO: 61863 - DNA, 20 bp, Artificial Sequence
  Description of Artificial Sequence: Synthetic oligonucleotide
  Target: LAMA2; (-) strand; PAM type: NRG; PAM sequence: TGG
atcttacccttgagcaacga

SEQ ID NO: 61864 - DNA, 20 bp, Artificial Sequence
  Description of Artificial Sequence: Synthetic oligonucleotide
  Target: LAMA2; (-) strand; PAM type: NRG; PAM sequence: GAG
aggtctgtgatcttaccctt

SEQ ID NO: 61865 - DNA, 20 bp, Artificial Sequence
  Description of Artificial Sequence: Synthetic oligonucleotide
  Target: LAMA2; (-) strand; PAM type: NRG; PAM sequence: AGG
agggaaataatgcaggcact

SEQ ID NO: 61866 - DNA, 20 bp, Artificial Sequence
  Description of Artificial Sequence: Synthetic oligonucleotide
  Target: LAMA2; (-) strand; PAM type: NRG; PAM sequence: TAG
aagggaaataatgcaggcac

SEQ ID NO: 61867 - DNA, 20 bp, Artificial Sequence
  Description of Artificial Sequence: Synthetic oligonucleotide
  Target: LAMA2; (-) strand; PAM type: NRG; PAM sequence: AGG
gcacagaagggaaataatgc

SEQ ID NO: 61868 - DNA, 20 bp, Artificial Sequence
  Description of Artificial Sequence: Synthetic oligonucleotide
  Target: LAMA2; (-) strand; PAM type: NRG; PAM sequence: CAG
tgcacagaagggaaataatg

SEQ ID NO: 61869 - DNA, 20 bp, Artificial Sequence
  Description of Artificial Sequence: Synthetic oligonucleotide
  Target: LAMA2; (-) strand; PAM type: NRG; PAM sequence: GGG
ccctcacgatttgcacagaa

SEQ ID NO: 61870 - DNA, 20 bp, Artificial Sequence
  Description of Artificial Sequence: Synthetic oligonucleotide
  Target: LAMA2; (-) strand; PAM type: NRG; PAM sequence: AGG
gccctcacgatttgcacaga

SEQ ID NO: 61871 - DNA, 20 bp, Artificial Sequence
  Description of Artificial Sequence: Synthetic oligonucleotide
  Target: LAMA2; (-) strand; PAM type: NRG; PAM sequence: AAG
ggccctcacgatttgcacag

SEQ ID NO: 61872 - DNA, 20 bp, Artificial Sequence
  Description of Artificial Sequence: Synthetic oligonucleotide
  Target: LAMA2; (-) strand; PAM type: NRG; PAM sequence: CAG
attggccctcacgatttgca

SEQ ID NO: 61873 - DNA, 20 bp, Artificial Sequence
  Description of Artificial Sequence: Synthetic oligonucleotide
  Target: LAMA2; (-) strand; PAM type: NRG; PAM sequence: TGG
aaatttttagagagcaaaat

SEQ ID NO: 61874 - DNA, 20 bp, Artificial Sequence
  Description of Artificial Sequence: Synthetic oligonucleotide
  Target: LAMA2; (-) strand; PAM type: NRG; PAM sequence: GAG
gtttaatgcaaatttttaga

SEQ ID NO: 61875 - DNA, 20 bp, Artificial Sequence
  Description of Artificial Sequence: Synthetic oligonucleotide
  Target: LAMA2; (-) strand; PAM type: NRG; PAM sequence: GAG
ctgtttaatgcaaattttta

SEQ ID NO: 61876 - DNA, 20 bp, Artificial Sequence
  Description of Artificial Sequence: Synthetic oligonucleotide
  Target: LAMA2; (-) strand; PAM type: NRG; PAM sequence: TAG
gtctgtttaatgcaaatttt

SEQ ID NO: 61877 - DNA, 20 bp, Artificial Sequence
  Description of Artificial Sequence: Synthetic oligonucleotide
  Target: LAMA2; (-) strand; PAM type: NRG; PAM sequence: TGG
tgtagaaggaatctagtgat

SEQ ID NO: 61878 - DNA, 20 bp, Artificial Sequence
  Description of Artificial Sequence: Synthetic oligonucleotide
  Target: LAMA2; (-) strand; PAM type: NRG; PAM sequence: TAG
tttgatctgtagaaggaatc

SEQ ID NO: 61879 - DNA, 20 bp, Artificial Sequence
  Description of Artificial Sequence: Synthetic oligonucleotide
  Target: LAMA2; (-) strand; PAM type: NRG; PAM sequence: AGG
aatgcattttgatctgtaga

SEQ ID NO: 61880 - DNA, 20 bp, Artificial Sequence
  Description of Artificial Sequence: Synthetic oligonucleotide
  Target: LAMA2; (-) strand; PAM type: NRG; PAM sequence: AAG
aaatgcattttgatctgtag

SEQ ID NO: 61881 - DNA, 20 bp, Artificial Sequence
  Description of Artificial Sequence: Synthetic oligonucleotide
  Target: LAMA2; (-) strand; PAM type: NRG; PAM sequence: TAG
aataaatgcattttgatctg

SEQ ID NO: 61882 - DNA, 20 bp, Artificial Sequence
  Description of Artificial Sequence: Synthetic oligonucleotide
  Target: LAMA2; (-) strand; PAM type: NRG; PAM sequence: TGG
ccttccttagttgcctcaca

SEQ ID NO: 61883 - DNA, 20 bp, Artificial Sequence
  Description of Artificial Sequence: Synthetic oligonucleotide
  Target: LAMA2; (-) strand; PAM type: NRG; PAM sequence: TAG
ctggagggaaagcccttcct

SEQ ID NO: 61884 - DNA, 20 bp, Artificial Sequence
  Description of Artificial Sequence: Synthetic oligonucleotide
  Target: LAMA2; (-) strand; PAM type: NRG; PAM sequence: AAG
tgctcaccagactggaggga

SEQ ID NO: 61885 - DNA, 20 bp, Artificial Sequence
  Description of Artificial Sequence: Synthetic oligonucleotide
  Target: LAMA2; (-) strand; PAM type: NRG; PAM sequence: GGG
ccactgctcaccagactgga

SEQ ID NO: 61886 - DNA, 20 bp, Artificial Sequence
  Description of Artificial Sequence: Synthetic oligonucleotide
  Target: LAMA2; (-) strand; PAM type: NRG; PAM sequence: AGG
gccactgctcaccagactgg

SEQ ID NO: 61887 - DNA, 20 bp, Artificial Sequence
  Description of Artificial Sequence: Synthetic oligonucleotide
  Target: LAMA2; (-) strand; PAM type: NRG; PAM sequence: GAG
agccactgctcaccagactg

SEQ ID NO: 61888 - DNA, 20 bp, Artificial Sequence
  Description of Artificial Sequence: Synthetic oligonucleotide
  Target: LAMA2; (-) strand; PAM type: NRG; PAM sequence: TGG
acagccactgctcaccagac

SEQ ID NO: 61889 - DNA, 20 bp, Artificial Sequence
  Description of Artificial Sequence: Synthetic oligonucleotide
  Target: LAMA2; (-) strand; PAM type: NRG; PAM sequence: CAG
gagccacagccactgctcac

SEQ ID NO: 61890 - DNA, 20 bp, Artificial Sequence
  Description of Artificial Sequence: Synthetic oligonucleotide
  Target: LAMA2; (-) strand; PAM type: NRG; PAM sequence: CAG
aaatagagccagcagagcca

SEQ ID NO: 61891 - DNA, 20 bp, Artificial Sequence
  Description of Artificial Sequence: Synthetic oligonucleotide
  Target: LAMA2; (-) strand; PAM type: NRG; PAM sequence: GAG
ctcacaaaatagagccagca

SEQ ID NO: 61892 - DNA, 20 bp, Artificial Sequence
  Description of Artificial Sequence: Synthetic oligonucleotide
  Target: LAMA2; (-) strand; PAM type: NRG; PAM sequence: CAG
acctcacaaaatagagccag

SEQ ID NO: 61893 - DNA, 20 bp, Artificial Sequence
  Description of Artificial Sequence: Synthetic oligonucleotide
  Target: LAMA2; (-) strand; PAM type: NRG; PAM sequence: CAG
aagacctcacaaaatagagc

SEQ ID NO: 61894 - DNA, 20 bp, Artificial Sequence
  Description of Artificial Sequence: Synthetic oligonucleotide
  Target: LAMA2; (-) strand; PAM type: NRG; PAM sequence: GAG
tataaagacctcacaaaata

SEQ ID NO: 61895 - DNA, 20 bp, Artificial Sequence
  Description of Artificial Sequence: Synthetic oligonucleotide
  Target: LAMA2; (-) strand; PAM type: NRG; PAM sequence: TAG
tttataaagacctcacaaaa

SEQ ID NO: 61896 - DNA, 20 bp, Artificial Sequence
  Description of Artificial Sequence: Synthetic oligonucleotide
  Target: LAMA2; (-) strand; PAM type: NRG; PAM sequence: AAG
cttaattgtggtcatttata

SEQ ID NO: 61897 - DNA, 20 bp, Artificial Sequence
  Description of Artificial Sequence: Synthetic oligonucleotide
  Target: LAMA2; (-) strand; PAM type: NRG; PAM sequence: TGG
gtacatctacagcttaattg

SEQ ID NO: 61898 - DNA, 20 bp, Artificial Sequence
  Description of Artificial Sequence: Synthetic oligonucleotide
  Target: LAMA2; (-) strand; PAM type: NRG; PAM sequence: CAG
ctagggcatgagtacatcta

SEQ ID NO: 61899 - DNA, 20 bp, Artificial Sequence
  Description of Artificial Sequence: Synthetic oligonucleotide
  Target: LAMA2; (-) strand; PAM type: NRG; PAM sequence: GAG
gatggttacatctagggcat

SEQ ID NO: 61900 - DNA, 20 bp, Artificial Sequence
  Description of Artificial Sequence: Synthetic oligonucleotide
  Target: LAMA2; (-) strand; PAM type: NRG; PAM sequence: GGG
agaacggatggttacatcta

SEQ ID NO: 61901 - DNA, 20 bp, Artificial Sequence
  Description of Artificial Sequence: Synthetic oligonucleotide
  Target: LAMA2; (-) strand; PAM type: NRG; PAM sequence: AGG
cagaacggatggttacatct

SEQ ID NO: 61902 - DNA, 20 bp, Artificial Sequence
  Description of Artificial Sequence: Synthetic oligonucleotide
  Target: LAMA2; (-) strand; PAM type: NRG; PAM sequence: TAG
ccagaacggatggttacatc

SEQ ID NO: 61903 - DNA, 20 bp, Artificial Sequence
  Description of Artificial Sequence: Synthetic oligonucleotide
  Target: LAMA2; (-) strand; PAM type: NRG; PAM sequence: TGG
gccatattccccagaacgga

SEQ ID NO: 61904 - DNA, 20 bp, Artificial Sequence
  Description of Artificial Sequence: Synthetic oligonucleotide
  Target: LAMA2; (-) strand; PAM type: NRG; PAM sequence: CGG
tcaagccatattccccagaa

SEQ ID NO: 61905 - DNA, 20 bp, Artificial Sequence
  Description of Artificial Sequence: Synthetic oligonucleotide
  Target: LAMA2; (-) strand; PAM type: NRG; PAM sequence: CAG
gtttatcaagccatattccc

SEQ ID NO: 61906 - DNA, 20 bp, Artificial Sequence
  Description of Artificial Sequence: Synthetic oligonucleotide
  Target: LAMA2; (-) strand; PAM type: NRG; PAM sequence: AAG
tagacaccaatgggtttatc

SEQ ID NO: 61907 - DNA, 20 bp, Artificial Sequence
  Description of Artificial Sequence: Synthetic oligonucleotide
  Target: LAMA2; (-) strand; PAM type: NRG; PAM sequence: GGG
aataagtgttagacaccaat

SEQ ID NO: 61908 - DNA, 20 bp, Artificial Sequence
  Description of Artificial Sequence: Synthetic oligonucleotide
  Target: LAMA2; (-) strand; PAM type: NRG; PAM sequence: TGG
gaataagtgttagacaccaa

SEQ ID NO: 61909 - DNA, 20 bp, Artificial Sequence
  Description of Artificial Sequence: Synthetic oligonucleotide
  Target: LAMA2; (-) strand; PAM type: NRG; PAM sequence: TAG
tgagtgacatgaataagtgt

SEQ ID NO: 61910 - DNA, 20 bp, Artificial Sequence
  Description of Artificial Sequence: Synthetic oligonucleotide
  Target: LAMA2; (-) strand; PAM type: NRG; PAM sequence: AAG
aatgaatgagtgacatgaat

SEQ ID NO: 61911 - DNA, 20 bp, Artificial Sequence
  Description of Artificial Sequence: Synthetic oligonucleotide
  Target: LAMA2; (-) strand; PAM type: NRG; PAM sequence: GAG
gaataaatgaatgaatgaat

SEQ ID NO: 61912 - DNA, 20 bp, Artificial Sequence
  Description of Artificial Sequence: Synthetic oligonucleotide
  Target: LAMA2; (-) strand; PAM type: NRG; PAM sequence: GAG
cagtgcctggcacctcataa

SEQ ID NO: 61913 - DNA, 20 bp, Artificial Sequence
  Description of Artificial Sequence: Synthetic oligonucleotide
  Target: LAMA2; (-) strand; PAM type: NRG; PAM sequence: AAG
aacagtgcctggcacctcat

SEQ ID NO: 61914 - DNA, 20 bp, Artificial Sequence
  Description of Artificial Sequence: Synthetic oligonucleotide
  Target: LAMA2; (-) strand; PAM type: NRG; PAM sequence: TGG
ccattgcttagaacagtgcc

SEQ ID NO: 61915 - DNA, 20 bp, Artificial Sequence
  Description of Artificial Sequence: Synthetic oligonucleotide
  Target: LAMA2; (-) strand; PAM type: NRG; PAM sequence: CAG
tgttttcccattgcttagaa

SEQ ID NO: 61916 - DNA, 20 bp, Artificial Sequence
  Description of Artificial Sequence: Synthetic oligonucleotide
  Target: LAMA2; (-) strand; PAM type: NRG; PAM sequence: TAG
actcctgttttcccattgct

SEQ ID NO: 61917 - DNA, 20 bp, Artificial Sequence
  Description of Artificial Sequence: Synthetic oligonucleotide
  Target: LAMA2; (-) strand; PAM type: NRG; PAM sequence: GGG
ataaaaacatcataagaatg

SEQ ID NO: 61918 - DNA, 20 bp, Artificial Sequence
  Description of Artificial Sequence: Synthetic oligonucleotide
  Target: LAMA2; (-) strand; PAM type: NRG; PAM sequence: GGG
aataaaaacatcataagaat

SEQ ID NO: 61919 - DNA, 20 bp, Artificial Sequence
  Description of Artificial Sequence: Synthetic oligonucleotide
  Target: LAMA2; (-) strand; PAM type: NRG; PAM sequence: TGG
aaataaaaacatcataagaa

SEQ ID NO: 61920 - DNA, 20 bp, Artificial Sequence
  Description of Artificial Sequence: Synthetic oligonucleotide
  Target: LAMA2; (-) strand; PAM type: NRG; PAM sequence: AAG
ctctaaaataaaaacatcat

SEQ ID NO: 61921 - DNA, 20 bp, Artificial Sequence
  Description of Artificial Sequence: Synthetic oligonucleotide
  Target: LAMA2; (-) strand; PAM type: NRG; PAM sequence: TGG
ttatttctttccttattcat

SEQ ID NO: 61922 - DNA, 20 bp, Artificial Sequence
  Description of Artificial Sequence: Synthetic oligonucleotide
  Target: LAMA2; (-) strand; PAM type: NRG; PAM sequence: TAG
ttttcatttcttcccatcct

SEQ ID NO: 61923 - DNA, 20 bp, Artificial Sequence
  Description of Artificial Sequence: Synthetic oligonucleotide
  Target: LAMA2; (-) strand; PAM type: NRG; PAM sequence: GGG
aacccaacacttctttagca

SEQ ID NO: 61924 - DNA, 20 bp, Artificial Sequence
  Description of Artificial Sequence: Synthetic oligonucleotide
  Target: LAMA2; (-) strand; PAM type: NRG; PAM sequence: AGG
caacccaacacttctttagc

SEQ ID NO: 61925 - DNA, 20 bp, Artificial Sequence
  Description of Artificial Sequence: Synthetic oligonucleotide
  Target: LAMA2; (-) strand; PAM type: NRG; PAM sequence: CAG
ccaacccaacacttctttag

SEQ ID NO: 61926 - DNA, 20 bp, Artificial Sequence
  Description of Artificial Sequence: Synthetic oligonucleotide
  Target: LAMA2; (-) strand; PAM type: NRG; PAM sequence: TAG
taaccaacccaacacttctt

SEQ ID NO: 61927 - DNA, 20 bp, Artificial Sequence
  Description of Artificial Sequence: Synthetic oligonucleotide
  Target: LAMA2; (-) strand; PAM type: NRG; PAM sequence: GGG
gagctgaaaagtcccttgct

SEQ ID NO: 61928 - DNA, 20 bp, Artificial Sequence
  Description of Artificial Sequence: Synthetic oligonucleotide
  Target: LAMA2; (-) strand; PAM type: NRG; PAM sequence: TGG
agagctgaaaagtcccttgc

SEQ ID NO: 61929 - DNA, 20 bp, Artificial Sequence
  Description of Artificial Sequence: Synthetic oligonucleotide
  Target: LAMA2; (-) strand; PAM type: NRG; PAM sequence: AAG
caagcatctccagagctgaa

SEQ ID NO: 61930 - DNA, 20 bp, Artificial Sequence
  Description of Artificial Sequence: Synthetic oligonucleotide
  Target: LAMA2; (-) strand; PAM type: NRG; PAM sequence: GAG
tttctctacaagcatctcca

SEQ ID NO: 61931 - DNA, 20 bp, Artificial Sequence
  Description of Artificial Sequence: Synthetic oligonucleotide
  Target: LAMA2; (-) strand; PAM type: NRG; PAM sequence: CAG
catttctctacaagcatctc

SEQ ID NO: 61932 - DNA, 20 bp, Artificial Sequence
  Description of Artificial Sequence: Synthetic oligonucleotide
  Target: LAMA2; (-) strand; PAM type: NRG; PAM sequence: AAG
ggacctctgcatttctctac

SEQ ID NO: 61933 - DNA, 20 bp, Artificial Sequence
  Description of Artificial Sequence: Synthetic oligonucleotide
  Target: LAMA2; (-) strand; PAM type: NRG; PAM sequence: AGG
gagatgttcattcccatatt

SEQ ID NO: 61934 - DNA, 20 bp, Artificial Sequence
  Description of Artificial Sequence: Synthetic oligonucleotide
  Target: LAMA2; (-) strand; PAM type: NRG; PAM sequence: TAG
tgagatgttcattcccatat

SEQ ID NO: 61935 - DNA, 20 bp, Artificial Sequence
  Description of Artificial Sequence: Synthetic oligonucleotide
  Target: LAMA2; (-) strand; PAM type: NRG; PAM sequence: GAG
tgagaagctataccctacat

SEQ ID NO: 61936 - DNA, 20 bp, Artificial Sequence
  Description of Artificial Sequence: Synthetic oligonucleotide
  Target: LAMA2; (-) strand; PAM type: NRG; PAM sequence: AAG
ttctgttcctcaaacatgag

SEQ ID NO: 61937 - DNA, 20 bp, Artificial Sequence
  Description of Artificial Sequence: Synthetic oligonucleotide
  Target: LAMA2; (-) strand; PAM type: NRG; PAM sequence: GAG
tgtttctgttcctcaaacat

SEQ ID NO: 61938 - DNA, 20 bp, Artificial Sequence
  Description of Artificial Sequence: Synthetic oligonucleotide
  Target: LAMA2; (-) strand; PAM type: NRG; PAM sequence: GGG
tcacaatattagagccttta

SEQ ID NO: 61939 - DNA, 20 bp, Artificial Sequence
  Description of Artificial Sequence: Synthetic oligonucleotide
  Target: LAMA2; (-) strand; PAM type: NRG; PAM sequence: AGG
ctcacaatattagagccttt

SEQ ID NO: 61940 - DNA, 20 bp, Artificial Sequence
  Description of Artificial Sequence: Synthetic oligonucleotide
  Target: LAMA2; (-) strand; PAM type: NRG; PAM sequence: TAG
gctcacaatattagagcctt

SEQ ID NO: 61941 - DNA, 20 bp, Artificial Sequence
  Description of Artificial Sequence: Synthetic oligonucleotide
  Target: LAMA2; (-) strand; PAM type: NRG; PAM sequence: GAG
tatcctggctcacaatatta

SEQ ID NO: 61942 - DNA, 20 bp, Artificial Sequence
  Description of Artificial Sequence: Synthetic oligonucleotide
  Target: LAMA2; (-) strand; PAM type: NRG; PAM sequence: TAG
cttatcctggctcacaatat

SEQ ID NO: 61943 - DNA, 20 bp, Artificial Sequence
  Description of Artificial Sequence: Synthetic oligonucleotide
  Target: LAMA2; (-) strand; PAM type: NRG; PAM sequence: TGG
taccctggctgcccttatcc

SEQ ID NO: 61944 - DNA, 20 bp, Artificial Sequence
  Description of Artificial Sequence: Synthetic oligonucleotide
  Target: LAMA2; (-) strand; PAM type: NRG; PAM sequence: TGG
gatgtcatctgcccttaccc

SEQ ID NO: 61945 - DNA, 20 bp, Artificial Sequence
  Description of Artificial Sequence: Synthetic oligonucleotide
  Target: LAMA2; (-) strand; PAM type: NRG; PAM sequence: CAG
acctggcccctacctgtctc

SEQ ID NO: 61946 - DNA, 20 bp, Artificial Sequence
  Description of Artificial Sequence: Synthetic oligonucleotide
  Target: LAMA2; (-) strand; PAM type: NRG; PAM sequence: TGG
acacagtacaaggtcctacc

SEQ ID NO: 61947 - DNA, 20 bp, Artificial Sequence
  Description of Artificial Sequence: Synthetic oligonucleotide
  Target: LAMA2; (-) strand; PAM type: NRG; PAM sequence: AGG
ggtcctacgtacacagtaca

SEQ ID NO: 61948 - DNA, 20 bp, Artificial Sequence
  Description of Artificial Sequence: Synthetic oligonucleotide
  Target: LAMA2; (-) strand; PAM type: NRG; PAM sequence: AAG
aggtcctacgtacacagtac

SEQ ID NO: 61949 - DNA, 20 bp, Artificial Sequence
  Description of Artificial Sequence: Synthetic oligonucleotide
  Target: LAMA2; (-) strand; PAM type: NRG; PAM sequence: CAG
tgtacaaggtcctacgtaca

SEQ ID NO: 61950 - DNA, 20 bp, Artificial Sequence
  Description of Artificial Sequence: Synthetic oligonucleotide
  Target: LAMA2; (-) strand; PAM type: NRG; PAM sequence: AGG
atctgactcctacatgtaca

SEQ ID NO: 61951 - DNA, 20 bp, Artificial Sequence
  Description of Artificial Sequence: Synthetic oligonucleotide
  Target: LAMA2; (-) strand; PAM type: NRG; PAM sequence: AAG
gatctgactcctacatgtac

SEQ ID NO: 61952 - DNA, 20 bp, Artificial Sequence
  Description of Artificial Sequence: Synthetic oligonucleotide
  Target: LAMA2; (-) strand; PAM type: NRG; PAM sequence: AGG
taaaattcaaacgaagcaca

SEQ ID NO: 61953 - DNA, 20 bp, Artificial Sequence
  Description of Artificial Sequence: Synthetic oligonucleotide
  Target: LAMA2; (-) strand; PAM type: NRG; PAM sequence: AAG
ataaaattcaaacgaagcac

SEQ ID NO: 61954 - DNA, 20 bp, Artificial Sequence
  Description of Artificial Sequence: Synthetic oligonucleotide
  Target: LAMA2; (-) strand; PAM type: NRG; PAM sequence: AAG
tttagaataaaattcaaacg

SEQ ID NO: 61955 - DNA, 20 bp, Artificial Sequence
  Description of Artificial Sequence: Synthetic oligonucleotide
  Target: LAMA2; (-) strand; PAM type: NRG; PAM sequence: TAG
tctaatcaattcccaacatt

SEQ ID NO: 61956 - DNA, 20 bp, Artificial Sequence
  Description of Artificial Sequence: Synthetic oligonucleotide
  Target: LAMA2; (-) strand; PAM type: NRG; PAM sequence: AAG
agagtgacacagtattaaga

SEQ ID NO: 61957 - DNA, 20 bp, Artificial Sequence
  Description of Artificial Sequence: Synthetic oligonucleotide
  Target: LAMA2; (-) strand; PAM type: NRG; PAM sequence: AAG
aggcagagtgacacagtatt

SEQ ID NO: 61958 - DNA, 20 bp, Artificial Sequence
  Description of Artificial Sequence: Synthetic oligonucleotide
  Target: LAMA2; (-) strand; PAM type: NRG; PAM sequence: CAG
agagagtaggcagagtgaca

SEQ ID NO: 61959 - DNA, 20 bp, Artificial Sequence
  Description of Artificial Sequence: Synthetic oligonucleotide
  Target: LAMA2; (-) strand; PAM type: NRG; PAM sequence: GAG
tgtttctcagagagtaggca

SEQ ID NO: 61960 - DNA, 20 bp, Artificial Sequence
  Description of Artificial Sequence: Synthetic oligonucleotide
  Target: LAMA2; (-) strand; PAM type: NRG; PAM sequence: CAG
tctgtttctcagagagtagg

SEQ ID NO: 61961 - DNA, 20 bp, Artificial Sequence
  Description of Artificial Sequence: Synthetic oligonucleotide
  Target: LAMA2; (-) strand; PAM type: NRG; PAM sequence: AGG
tgatctgtttctcagagagt

SEQ ID NO: 61962 - DNA, 20 bp, Artificial Sequence
  Description of Artificial Sequence: Synthetic oligonucleotide
  Target: LAMA2; (-) strand; PAM type: NRG; PAM sequence: TAG
atgatctgtttctcagagag

SEQ ID NO: 61963 - DNA, 20 bp, Artificial Sequence
  Description of Artificial Sequence: Synthetic oligonucleotide
  Target: LAMA2; (-) strand; PAM type: NRG; PAM sequence: GAG
cttatgatctgtttctcaga

SEQ ID NO: 61964 - DNA, 20 bp, Artificial Sequence
  Description of Artificial Sequence: Synthetic oligonucleotide
  Target: LAMA2; (-) strand; PAM type: NRG; PAM sequence: GAG
tccttatgatctgtttctca

SEQ ID NO: 61965 - DNA, 20 bp, Artificial Sequence
  Description of Artificial Sequence: Synthetic oligonucleotide
  Target: LAMA2; (-) strand; PAM type: NRG; PAM sequence: CAG
tctccttatgatctgtttct

SEQ ID NO: 61966 - DNA, 20 bp, Artificial Sequence
  Description of Artificial Sequence: Synthetic oligonucleotide
  Target: LAMA2; (-) strand; PAM type: NRG; PAM sequence: AAG
cctaccaaagtcttctgtag

SEQ ID NO: 61967 - DNA, 20 bp, Artificial Sequence
  Description of Artificial Sequence: Synthetic oligonucleotide
  Target: LAMA2; (-) strand; PAM type: NRG; PAM sequence: TAG
gaacctaccaaagtcttctg

SEQ ID NO: 61968 - DNA, 20 bp, Artificial Sequence
  Description of Artificial Sequence: Synthetic oligonucleotide
  Target: LAMA2; (-) strand; PAM type: NRG; PAM sequence: AAG
tatagaaaccgaacctacca

SEQ ID NO: 61969 - DNA, 20 bp, Artificial Sequence
  Description of Artificial Sequence: Synthetic oligonucleotide
  Target: LAMA2; (-) strand; PAM type: NRG; PAM sequence: TAG
cctgcagagcttggaaatta

SEQ ID NO: 61970 - DNA, 20 bp, Artificial Sequence
  Description of Artificial Sequence: Synthetic oligonucleotide
  Target: LAMA2; (-) strand; PAM type: NRG; PAM sequence: TGG
tagtggtctcctgcagagct

SEQ ID NO: 61971 - DNA, 20 bp, Artificial Sequence
  Description of Artificial Sequence: Synthetic oligonucleotide
  Target: LAMA2; (-) strand; PAM type: NRG; PAM sequence: GAG
agctgtagtggtctcctgca

SEQ ID NO: 61972 - DNA, 20 bp, Artificial Sequence
  Description of Artificial Sequence: Synthetic oligonucleotide
  Target: LAMA2; (-) strand; PAM type: NRG; PAM sequence: CAG
gaagctgtagtggtctcctg

SEQ ID NO: 61973 - DNA, 20 bp, Artificial Sequence
  Description of Artificial Sequence: Synthetic oligonucleotide
  Target: LAMA2; (-) strand; PAM type: NRG; PAM sequence: TGG
aactgaggaggaagctgtag

SEQ ID NO: 61974 - DNA, 20 bp, Artificial Sequence
  Description of Artificial Sequence: Synthetic oligonucleotide
  Target: LAMA2; (-) strand; PAM type: NRG; PAM sequence: TAG
agtaactgaggaggaagctg

SEQ ID NO: 61975 - DNA, 20 bp, Artificial Sequence
  Description of Artificial Sequence: Synthetic oligonucleotide
  Target: LAMA2; (-) strand; PAM type: NRG; PAM sequence: AAG
aataagagtaactgaggagg

SEQ ID NO: 61976 - DNA, 20 bp, Artificial Sequence
  Description of Artificial Sequence: Synthetic oligonucleotide
  Target: LAMA2; (-) strand; PAM type: NRG; PAM sequence: AGG
gtaaataagagtaactgagg

SEQ ID NO: 61977 - DNA, 20 bp, Artificial Sequence
  Description of Artificial Sequence: Synthetic oligonucleotide
  Target: LAMA2; (-) strand; PAM type: NRG; PAM sequence: GAG
agtaaataagagtaactgag

SEQ ID NO: 61978 - DNA, 20 bp, Artificial Sequence
  Description of Artificial Sequence: Synthetic oligonucleotide
  Target: LAMA2; (-) strand; PAM type: NRG; PAM sequence: AGG
taagtaaataagagtaactg

SEQ ID NO: 61979 - DNA, 20 bp, Artificial Sequence
  Description of Artificial Sequence: Synthetic oligonucleotide
  Target: LAMA2; (-) strand; PAM type: NRG; PAM sequence: GAG
ataagtaaataagagtaact

SEQ ID NO: 61980 - DNA, 20 bp, Artificial Sequence
  Description of Artificial Sequence: Synthetic oligonucleotide
  Target: LAMA2; (-) strand; PAM type: NRG; PAM sequence: GAG
ttgggcccataagtaaataa

SEQ ID NO: 61981 - DNA, 20 bp, Artificial Sequence
  Description of Artificial Sequence: Synthetic oligonucleotide
  Target: LAMA2; (-) strand; PAM type: NRG; PAM sequence: AAG
gtttgggcccataagtaaat

SEQ ID NO: 61982 - DNA, 20 bp, Artificial Sequence
  Description of Artificial Sequence: Synthetic oligonucleotide
  Target: LAMA2; (-) strand; PAM type: NRG; PAM sequence: AAG
gctcaggggtttgggcccat

SEQ ID NO: 61983 - DNA, 20 bp, Artificial Sequence
  Description of Artificial Sequence: Synthetic oligonucleotide
  Target: LAMA2; (-) strand; PAM type: NRG; PAM sequence: GGG
ttttaactgctcaggggttt

SEQ ID NO: 61984 - DNA, 20 bp, Artificial Sequence
  Description of Artificial Sequence: Synthetic oligonucleotide
  Target: LAMA2; (-) strand; PAM type: NRG; PAM sequence: TGG
attttaactgctcaggggtt

SEQ ID NO: 61985 - DNA, 20 bp, Artificial Sequence
  Description of Artificial Sequence: Synthetic oligonucleotide
  Target: LAMA2; (-) strand; PAM type: NRG; PAM sequence: GGG
gccagattttaactgctcag

SEQ ID NO: 61986 - DNA, 20 bp, Artificial Sequence
  Description of Artificial Sequence: Synthetic oligonucleotide
  Target: LAMA2; (-) strand; PAM type: NRG; PAM sequence: GGG
tgccagattttaactgctca

SEQ ID NO: 61987 - DNA, 20 bp, Artificial Sequence
  Description of Artificial Sequence: Synthetic oligonucleotide
  Target: LAMA2; (-) strand; PAM type: NRG; PAM sequence: AGG
atgccagattttaactgctc

SEQ ID NO: 61988 - DNA, 20 bp, Artificial Sequence
  Description of Artificial Sequence: Synthetic oligonucleotide
  Target: LAMA2; (-) strand; PAM type: NRG; PAM sequence: CAG
gatgccagattttaactgct

SEQ ID NO: 61989 - DNA, 20 bp, Artificial Sequence
  Description of Artificial Sequence: Synthetic oligonucleotide
  Target: LAMA2; (-) strand; PAM type: NRG; PAM sequence: CAG
attgatagtgttattgatgc

SEQ ID NO: 61990 - DNA, 20 bp, Artificial Sequence
  Description of Artificial Sequence: Synthetic oligonucleotide
  Target: LAMA2; (-) strand; PAM type: NRG; PAM sequence: TAG
aaggtgttagccagaattga

SEQ ID NO: 61991 - DNA, 20 bp, Artificial Sequence
  Description of Artificial Sequence: Synthetic oligonucleotide
  Target: LAMA2; (-) strand; PAM type: NRG; PAM sequence: CAG
tcactggccaaggtgttagc

SEQ ID NO: 61992 - DNA, 20 bp, Artificial Sequence
  Description of Artificial Sequence: Synthetic oligonucleotide
  Target: LAMA2; (-) strand; PAM type: NRG; PAM sequence: TAG
cttctcactggccaaggtgt

SEQ ID NO: 61993 - DNA, 20 bp, Artificial Sequence
  Description of Artificial Sequence: Synthetic oligonucleotide
  Target: LAMA2; (-) strand; PAM type: NRG; PAM sequence: AGG
ttaacccttctcactggcca

SEQ ID NO: 61994 - DNA, 20 bp, Artificial Sequence
  Description of Artificial Sequence: Synthetic oligonucleotide
  Target: LAMA2; (-) strand; PAM type: NRG; PAM sequence: AAG
attaacccttctcactggcc

SEQ ID NO: 61995 - DNA, 20 bp, Artificial Sequence
  Description of Artificial Sequence: Synthetic oligonucleotide
  Target: LAMA2; (-) strand; PAM type: NRG; PAM sequence: TGG
gttatattaacccttctcac

SEQ ID NO: 61996 - DNA, 20 bp, Artificial Sequence
  Description of Artificial Sequence: Synthetic oligonucleotide
  Target: LAMA2; (-) strand; PAM type: NRG; PAM sequence: TGG
caaaaaagaggtaaaagaaa

SEQ ID NO: 61997 - DNA, 20 bp, Artificial Sequence
  Description of Artificial Sequence: Synthetic oligonucleotide
  Target: LAMA2; (-) strand; PAM type: NRG; PAM sequence: AAG
ggagaccaaaaaagaggtaa

SEQ ID NO: 61998 - DNA, 20 bp, Artificial Sequence
  Description of Artificial Sequence: Synthetic oligonucleotide
  Target: LAMA2; (-) strand; PAM type: NRG; PAM sequence: AGG
acctgtggagaccaaaaaag

SEQ ID NO: 61999 - DNA, 20 bp, Artificial Sequence
  Description of Artificial Sequence: Synthetic oligonucleotide
  Target: LAMA2; (-) strand; PAM type: NRG; PAM sequence: GAG
aacctgtggagaccaaaaaa

SEQ ID NO: 62000 - DNA, 20 bp, Artificial Sequence
  Description of Artificial Sequence: Synthetic oligonucleotide
  Target: LAMA2; (-) strand; PAM type: NRG; PAM sequence: AAG
tcaacctgtggagaccaaaa

SEQ ID NO: 62001 - DNA, 20 bp, Artificial Sequence
  Description of Artificial Sequence: Synthetic oligonucleotide
  Target: LAMA2; (-) strand; PAM type: NRG; PAM sequence: GAG
catgttattgtcaacctgtg

SEQ ID NO: 62002 - DNA, 20 bp, Artificial Sequence
  Description of Artificial Sequence: Synthetic oligonucleotide
  Target: LAMA2; (-) strand; PAM type: NRG; PAM sequence: TGG
aacatgttattgtcaacctg

SEQ ID NO: 62003 - DNA, 20 bp, Artificial Sequence
  Description of Artificial Sequence: Synthetic oligonucleotide
  Target: LAMA2; (-) strand; PAM type: NRG; PAM sequence: TGG
atctaagatttcaaaacttc

SEQ ID NO: 62004 - DNA, 20 bp, Artificial Sequence
  Description of Artificial Sequence: Synthetic oligonucleotide
  Target: LAMA2; (-) strand; PAM type: NRG; PAM sequence: AAG
tggaatgttagtggtaatct

SEQ ID NO: 62005 - DNA, 20 bp, Artificial Sequence
  Description of Artificial Sequence: Synthetic oligonucleotide
  Target: LAMA2; (-) strand; PAM type: NRG; PAM sequence: TGG
tttagaaattggaatgttag

SEQ ID NO: 62006 - DNA, 20 bp, Artificial Sequence
  Description of Artificial Sequence: Synthetic oligonucleotide
  Target: LAMA2; (-) strand; PAM type: NRG; PAM sequence: TAG
gtctttagaaattggaatgt

SEQ ID NO: 62007 - DNA, 20 bp, Artificial Sequence
  Description of Artificial Sequence: Synthetic oligonucleotide
  Target: LAMA2; (-) strand; PAM type: NRG; PAM sequence: TGG
tgtccactgtctttagaaat

SEQ ID NO: 62008 - DNA, 20 bp, Artificial Sequence
  Description of Artificial Sequence: Synthetic oligonucleotide
  Target: LAMA2; (-) strand; PAM type: NRG; PAM sequence: TAG
gaattcatgtccactgtctt

SEQ ID NO: 62009 - DNA, 20 bp, Artificial Sequence
  Description of Artificial Sequence: Synthetic oligonucleotide
  Target: LAMA2; (-) strand; PAM type: NRG; PAM sequence: AGG
atctattctcagagagctgc

SEQ ID NO: 62010 - DNA, 20 bp, Artificial Sequence
  Description of Artificial Sequence: Synthetic oligonucleotide
  Target: LAMA2; (-) strand; PAM type: NRG; PAM sequence: CAG
aatctattctcagagagctg

SEQ ID NO: 62011 - DNA, 20 bp, Artificial Sequence
  Description of Artificial Sequence: Synthetic oligonucleotide
  Target: LAMA2; (-) strand; PAM type: NRG; PAM sequence: GAG
agctaaaatctattctcaga

SEQ ID NO: 62012 - DNA, 20 bp, Artificial Sequence
  Description of Artificial Sequence: Synthetic oligonucleotide
  Target: LAMA2; (-) strand; PAM type: NRG; PAM sequence: GAG
acagctaaaatctattctca

SEQ ID NO: 62013 - DNA, 20 bp, Artificial Sequence
  Description of Artificial Sequence: Synthetic oligonucleotide
  Target: LAMA2; (-) strand; PAM type: NRG; PAM sequence: CAG
taacagctaaaatctattct

SEQ ID NO: 62014 - DNA, 20 bp, Artificial Sequence
  Description of Artificial Sequence: Synthetic oligonucleotide
  Target: LAMA2; (-) strand; PAM type: NRG; PAM sequence: CAG
aagttgtaatataatattaa

SEQ ID NO: 62015 - DNA, 20 bp, Artificial Sequence
  Description of Artificial Sequence: Synthetic oligonucleotide
  Target: LAMA2; (-) strand; PAM type: NRG; PAM sequence: AAG
aatttttacaactatgtagg

SEQ ID NO: 62016 - DNA, 20 bp, Artificial Sequence
  Description of Artificial Sequence: Synthetic oligonucleotide
  Target: LAMA2; (-) strand; PAM type: NRG; PAM sequence: AGG
ctaaatttttacaactatgt

SEQ ID NO: 62017 - DNA, 20 bp, Artificial Sequence
  Description of Artificial Sequence: Synthetic oligonucleotide
  Target: LAMA2; (-) strand; PAM type: NRG; PAM sequence: TAG
cctaaatttttacaactatg

SEQ ID NO: 62018 - DNA, 20 bp, Artificial Sequence
  Description of Artificial Sequence: Synthetic oligonucleotide
  Target: LAMA2; (-) strand; PAM type: NRG; PAM sequence: AGG
aaaaataaaaataaattcac

SEQ ID NO: 62019 - DNA, 20 bp, Artificial Sequence
  Description of Artificial Sequence: Synthetic oligonucleotide
  Target: LAMA2; (-) strand; PAM type: NRG; PAM sequence: CAG
aaaaaataaaaataaattca

SEQ ID NO: 62020 - DNA, 20 bp, Artificial Sequence
  Description of Artificial Sequence: Synthetic oligonucleotide
  Target: LAMA2; (-) strand; PAM type: NRG; PAM sequence: GAG
tccagcctgggcaacagagt

SEQ ID NO: 62021 - DNA, 20 bp, Artificial Sequence
  Description of Artificial Sequence: Synthetic oligonucleotide
  Target: LAMA2; (-) strand; PAM type: NRG; PAM sequence: GAG
acactccagcctgggcaaca

SEQ ID NO: 62022 - DNA, 20 bp, Artificial Sequence
  Description of Artificial Sequence: Synthetic oligonucleotide
  Target: LAMA2; (-) strand; PAM type: NRG; PAM sequence: CAG
ctacactccagcctgggcaa

SEQ ID NO: 62023 - DNA, 20 bp, Artificial Sequence
  Description of Artificial Sequence: Synthetic oligonucleotide
  Target: LAMA2; (-) strand; PAM type: NRG; PAM sequence: GGG
acaccactacactccagcct

SEQ ID NO: 62024 - DNA, 20 bp, Artificial Sequence
  Description of Artificial Sequence: Synthetic oligonucleotide
  Target: LAMA2; (-) strand; PAM type: NRG; PAM sequence: TGG
cacaccactacactccagcc

SEQ ID NO: 62025 - DNA, 20 bp, Artificial Sequence
  Description of Artificial Sequence: Synthetic oligonucleotide
  Target: LAMA2; (-) strand; PAM type: NRG; PAM sequence: CAG
gagatcacaccactacactc

SEQ ID NO: 62026 - DNA, 20 bp, Artificial Sequence
  Description of Artificial Sequence: Synthetic oligonucleotide
  Target: LAMA2; (-) strand; PAM type: NRG; PAM sequence: GAG
aggcaaagttgcaatgagct

SEQ ID NO: 62027 - DNA, 20 bp, Artificial Sequence
  Description of Artificial Sequence: Synthetic oligonucleotide
  Target: LAMA2; (-) strand; PAM type: NRG; PAM sequence: GAG
ctgggaggcaaagttgcaat

SEQ ID NO: 62028 - DNA, 20 bp, Artificial Sequence
  Description of Artificial Sequence: Synthetic oligonucleotide
  Target: LAMA2; (-) strand; PAM type: NRG; PAM sequence: AAG
tcgcttgagcctgggaggca

SEQ ID NO: 62029 - DNA, 20 bp, Artificial Sequence
  Description of Artificial Sequence: Synthetic oligonucleotide
  Target: LAMA2; (-) strand; PAM type: NRG; PAM sequence: AGG
gaggatcgcttgagcctggg

SEQ ID NO: 62030 - DNA, 20 bp, Artificial Sequence
  Description of Artificial Sequence: Synthetic oligonucleotide
  Target: LAMA2; (-) strand; PAM type: NRG; PAM sequence: GAG
ggaggatcgcttgagcctgg

SEQ ID NO: 62031 - DNA, 20 bp, Artificial Sequence
  Description of Artificial Sequence: Synthetic oligonucleotide
  Target: LAMA2; (-) strand; PAM type: NRG; PAM sequence: GGG
caggaggatcgcttgagcct

SEQ ID NO: 62032 - DNA, 20 bp, Artificial Sequence
  Description of Artificial Sequence: Synthetic oligonucleotide
  Target: LAMA2; (-) strand; PAM type: NRG; PAM sequence: TGG
gcaggaggatcgcttgagcc

SEQ ID NO: 62033 - DNA, 20 bp, Artificial Sequence
  Description of Artificial Sequence: Synthetic oligonucleotide
  Target: LAMA2; (-) strand; PAM type: NRG; PAM sequence: GAG
ctgaggcaggaggatcgctt

SEQ ID NO: 62034 - DNA, 20 bp, Artificial Sequence
  Description of Artificial Sequence: Synthetic oligonucleotide
  Target: LAMA2; (-) strand; PAM type: NRG; PAM sequence: AGG
actctcgtggctgaggcagg

SEQ ID NO: 62035 - DNA, 20 bp, Artificial Sequence
  Description of Artificial Sequence: Synthetic oligonucleotide
  Target: LAMA2; (-) strand; PAM type: NRG; PAM sequence: GAG
tactctcgtggctgaggcag

SEQ ID NO: 62036 - DNA, 20 bp, Artificial Sequence
  Description of Artificial Sequence: Synthetic oligonucleotide
  Target: LAMA2; (-) strand; PAM type: NRG; PAM sequence: AGG
gctactctcgtggctgaggc

SEQ ID NO: 62037 - DNA, 20 bp, Artificial Sequence
  Description of Artificial Sequence: Synthetic oligonucleotide
  Target: LAMA2; (-) strand; PAM type: NRG; PAM sequence: CAG
agctactctcgtggctgagg

SEQ ID NO: 62038 - DNA, 20 bp, Artificial Sequence
  Description of Artificial Sequence: Synthetic oligonucleotide
  Target: LAMA2; (-) strand; PAM type: NRG; PAM sequence: AGG
cccagctactctcgtggctg

SEQ ID NO: 62039 - DNA, 20 bp, Artificial Sequence
  Description of Artificial Sequence: Synthetic oligonucleotide
  Target: LAMA2; (-) strand; PAM type: NRG; PAM sequence: GAG
tcccagctactctcgtggct

SEQ ID NO: 62040 - DNA, 20 bp, Artificial Sequence
  Description of Artificial Sequence: Synthetic oligonucleotide
  Target: LAMA2; (-) strand; PAM type: NRG; PAM sequence: TGG
tgtaatcccagctactctcg

SEQ ID NO: 62041 - DNA, 20 bp, Artificial Sequence
  Description of Artificial Sequence: Synthetic oligonucleotide
  Target: LAMA2; (-) strand; PAM type: NRG; PAM sequence: CAG
gtggcgtgaatctgtaatcc

SEQ ID NO: 62042 - DNA, 20 bp, Artificial Sequence
  Description of Artificial Sequence: Synthetic oligonucleotide
  Target: LAMA2; (-) strand; PAM type: NRG; PAM sequence: TGG
caaaagtttgctgggtgtag

SEQ ID NO: 62043 - DNA, 20 bp, Artificial Sequence
  Description of Artificial Sequence: Synthetic oligonucleotide
  Target: LAMA2; (-) strand; PAM type: NRG; PAM sequence: TAG
atacaaaagtttgctgggtg

SEQ ID NO: 62044 - DNA, 20 bp, Artificial Sequence
  Description of Artificial Sequence: Synthetic oligonucleotide
  Target: LAMA2; (-) strand; PAM type: NRG; PAM sequence: GGG
taaaaatacaaaagtttgct

SEQ ID NO: 62045 - DNA, 20 bp, Artificial Sequence
  Description of Artificial Sequence: Synthetic oligonucleotide
  Target: LAMA2; (-) strand; PAM type: NRG; PAM sequence: TGG
ctaaaaatacaaaagtttgc

SEQ ID NO: 62046 - DNA, 20 bp, Artificial Sequence
  Description of Artificial Sequence: Synthetic oligonucleotide
  Target: LAMA2; (-) strand; PAM type: NRG; PAM sequence: AAG
catatctactaaaaatacaa

SEQ ID NO: 62047 - DNA, 20 bp, Artificial Sequence
  Description of Artificial Sequence: Synthetic oligonucleotide
  Target: LAMA2; (-) strand; PAM type: NRG; PAM sequence: TGG
tgagaacagcctggacaaca

SEQ ID NO: 62048 - DNA, 20 bp, Artificial Sequence
  Description of Artificial Sequence: Synthetic oligonucleotide
  Target: LAMA2; (-) strand; PAM type: NRG; PAM sequence: TGG
tcaggagtttgagaacagcc

SEQ ID NO: 62049 - DNA, 20 bp, Artificial Sequence
  Description of Artificial Sequence: Synthetic oligonucleotide
  Target: LAMA2; (-) strand; PAM type: NRG; PAM sequence: CAG
tgagctcaggagtttgagaa

SEQ ID NO: 62050 - DNA, 20 bp, Artificial Sequence
  Description of Artificial Sequence: Synthetic oligonucleotide
  Target: LAMA2; (-) strand; PAM type: NRG; PAM sequence: GAG
tcacttgagctcaggagttt

SEQ ID NO: 62051 - DNA, 20 bp, Artificial Sequence
  Description of Artificial Sequence: Synthetic oligonucleotide
  Target: LAMA2; (-) strand; PAM type: NRG; PAM sequence: GAG
ggtggatcacttgagctcag

SEQ ID NO: 62052 - DNA, 20 bp, Artificial Sequence
  Description of Artificial Sequence: Synthetic oligonucleotide
  Target: LAMA2; (-) strand; PAM type: NRG; PAM sequence: AGG
tgggtggatcacttgagctc

SEQ ID NO: 62053 - DNA, 20 bp, Artificial Sequence
  Description of Artificial Sequence: Synthetic oligonucleotide
  Target: LAMA2; (-) strand; PAM type: NRG; PAM sequence: CAG
gtgggtggatcacttgagct

SEQ ID NO: 62054 - DNA, 20 bp, Artificial Sequence
  Description of Artificial Sequence: Synthetic oligonucleotide
  Target: LAMA2; (-) strand; PAM type: NRG; PAM sequence: GAG
tctaggtgggtggatcactt

SEQ ID NO: 62055 - DNA, 20 bp, Artificial Sequence
  Description of Artificial Sequence: Synthetic oligonucleotide
  Target: LAMA2; (-) strand; PAM type: NRG; PAM sequence: TGG
ctttgggaggtctaggtggg

SEQ ID NO: 62056 - DNA, 20 bp, Artificial Sequence
  Description of Artificial Sequence: Synthetic oligonucleotide
  Target: LAMA2; (-) strand; PAM type: NRG; PAM sequence: GGG
gcactttgggaggtctaggt

SEQ ID NO: 62057 - DNA, 20 bp, Artificial Sequence
  Description of Artificial Sequence: Synthetic oligonucleotide
  Target: LAMA2; (-) strand; PAM type: NRG; PAM sequence: TGG
agcactttgggaggtctagg

SEQ ID NO: 62058 - DNA, 20 bp, Artificial Sequence
  Description of Artificial Sequence: Synthetic oligonucleotide
  Target: LAMA2; (-) strand; PAM type: NRG; PAM sequence: AGG
cccagcactttgggaggtct

SEQ ID NO: 62059 - DNA, 20 bp, Artificial Sequence
  Description of Artificial Sequence: Synthetic oligonucleotide
  Target: LAMA2; (-) strand; PAM type: NRG; PAM sequence: TAG
tcccagcactttgggaggtc

SEQ ID NO: 62060 - DNA, 20 bp, Artificial Sequence
  Description of Artificial Sequence: Synthetic oligonucleotide
  Target: LAMA2; (-) strand; PAM type: NRG; PAM sequence: AGG
tgtagtcccagcactttggg

SEQ ID NO: 62061 - DNA, 20 bp, Artificial Sequence
  Description of Artificial Sequence: Synthetic oligonucleotide
  Target: LAMA2; (-) strand; PAM type: NRG; PAM sequence: GAG
ctgtagtcccagcactttgg

SEQ ID NO: 62062 - DNA, 20 bp, Artificial Sequence
  Description of Artificial Sequence: Synthetic oligonucleotide
  Target: LAMA2; (-) strand; PAM type: NRG; PAM sequence: GGG
gcctgtagtcccagcacttt

SEQ ID NO: 62063 - DNA, 20 bp, Artificial Sequence
  Description of Artificial Sequence: Synthetic oligonucleotide
  Target: LAMA2; (-) strand; PAM type: NRG; PAM sequence: TGG
tgcctgtagtcccagcactt

SEQ ID NO: 62064 - DNA, 20 bp, Artificial Sequence
  Description of Artificial Sequence: Synthetic oligonucleotide
  Target: LAMA2; (-) strand; PAM type: NRG; PAM sequence: CAG
gtggctcatgcctgtagtcc

SEQ ID NO: 62065 - DNA, 20 bp, Artificial Sequence
  Description of Artificial Sequence: Synthetic oligonucleotide
  Target: LAMA2; (-) strand; PAM type: NRG; PAM sequence: TAG
tcacaggtggctcatgcctg

SEQ ID NO: 62066 - DNA, 20 bp, Artificial Sequence
  Description of Artificial Sequence: Synthetic oligonucleotide
  Target: LAMA2; (-) strand; PAM type: NRG; PAM sequence: TGG
atttactttaaattcacagg

SEQ ID NO: 62067 - DNA, 20 bp, Artificial Sequence
  Description of Artificial Sequence: Synthetic oligonucleotide
  Target: LAMA2; (-) strand; PAM type: NRG; PAM sequence: AGG
ttaatttactttaaattcac

SEQ ID NO: 62068 - DNA, 20 bp, Artificial Sequence
  Description of Artificial Sequence: Synthetic oligonucleotide
  Target: LAMA2; (-) strand; PAM type: NRG; PAM sequence: CAG
attaatttactttaaattca

SEQ ID NO: 62069 - DNA, 20 bp, Artificial Sequence
  Description of Artificial Sequence: Synthetic oligonucleotide
  Target: LAMA2; (-) strand; PAM type: NRG; PAM sequence: AAG
tttttgttttatccaaatag

SEQ ID NO: 62070 - DNA, 20 bp, Artificial Sequence
  Description of Artificial Sequence: Synthetic oligonucleotide
  Target: LAMA2; (-) strand; PAM type: NRG; PAM sequence: TAG
atttttttgttttatccaaa

SEQ ID NO: 62071 - DNA, 20 bp, Artificial Sequence
  Description of Artificial Sequence: Synthetic oligonucleotide
  Target: LAMA2; (-) strand; PAM type: NRG; PAM sequence: TAG
agtatctttcacttttacag

SEQ ID NO: 62072 - DNA, 20 bp, Artificial Sequence
  Description of Artificial Sequence: Synthetic oligonucleotide
  Target: LAMA2; (-) strand; PAM type: NRG; PAM sequence: CAG
tgtagtatctttcactttta

SEQ ID NO: 62073 - DNA, 20 bp, Artificial Sequence
  Description of Artificial Sequence: Synthetic oligonucleotide
  Target: LAMA2; (-) strand; PAM type: NRG; PAM sequence: TAG
ccagttgttcctaaagtatg

SEQ ID NO: 62074 - DNA, 20 bp, Artificial Sequence
  Description of Artificial Sequence: Synthetic oligonucleotide
  Target: LAMA2; (-) strand; PAM type: NRG; PAM sequence: AAG
acaaataccagttgttccta

SEQ ID NO: 62075 - DNA, 20 bp, Artificial Sequence
  Description of Artificial Sequence: Synthetic oligonucleotide
  Target: LAMA2; (-) strand; PAM type: NRG; PAM sequence: CAG
gcccacttgcatacaaatac

SEQ ID NO: 62076 - DNA, 20 bp, Artificial Sequence
  Description of Artificial Sequence: Synthetic oligonucleotide
  Target: LAMA2; (-) strand; PAM type: NRG; PAM sequence: AGG
cttcacacaacattagattt

SEQ ID NO: 62077 - DNA, 20 bp, Artificial Sequence
  Description of Artificial Sequence: Synthetic oligonucleotide
  Target: LAMA2; (-) strand; PAM type: NRG; PAM sequence: TAG
tcttcacacaacattagatt

SEQ ID NO: 62078 - DNA, 20 bp, Artificial Sequence
  Description of Artificial Sequence: Synthetic oligonucleotide
  Target: LAMA2; (-) strand; PAM type: NRG; PAM sequence: TAG
ctttgatcttcacacaacat

SEQ ID NO: 62079 - DNA, 20 bp, Artificial Sequence
  Description of Artificial Sequence: Synthetic oligonucleotide
  Target: LAMA2; (-) strand; PAM type: NRG; PAM sequence: TGG
acatgagctacaattgtact

SEQ ID NO: 62080 - DNA, 20 bp, Artificial Sequence
  Description of Artificial Sequence: Synthetic oligonucleotide
  Target: LAMA2; (-) strand; PAM type: NRG; PAM sequence: GAG
cctcgaaataactgcaacat

SEQ ID NO: 62081 - DNA, 20 bp, Artificial Sequence
  Description of Artificial Sequence: Synthetic oligonucleotide
  Target: LAMA2; (-) strand; PAM type: NRG; PAM sequence: GAG
tttttgttgttatccctttt

SEQ ID NO: 62082 - DNA, 20 bp, Artificial Sequence
  Description of Artificial Sequence: Synthetic oligonucleotide
  Target: LAMA2; (-) strand; PAM type: NRG; PAM sequence: TAG
ccagattctgttttctatta

SEQ ID NO: 62083 - DNA, 20 bp, Artificial Sequence
  Description of Artificial Sequence: Synthetic oligonucleotide
  Target: LAMA2; (-) strand; PAM type: NRG; PAM sequence: CAG
tatttccactgattttaacc

SEQ ID NO: 62084 - DNA, 20 bp, Artificial Sequence
  Description of Artificial Sequence: Synthetic oligonucleotide
  Target: LAMA2; (-) strand; PAM type: NRG; PAM sequence: CAG
ccatattttcctccaagagc

SEQ ID NO: 62085 - DNA, 20 bp, Artificial Sequence
  Description of Artificial Sequence: Synthetic oligonucleotide
  Target: LAMA2; (-) strand; PAM type: NRG; PAM sequence: GAG
gataccatattttcctccaa

SEQ ID NO: 62086 - DNA, 20 bp, Artificial Sequence
  Description of Artificial Sequence: Synthetic oligonucleotide
  Target: LAMA2; (-) strand; PAM type: NRG; PAM sequence: AAG
aagataccatattttcctcc

SEQ ID NO: 62087 - DNA, 20 bp, Artificial Sequence
  Description of Artificial Sequence: Synthetic oligonucleotide
  Target: LAMA2; (-) strand; PAM type: NRG; PAM sequence: AAG
tttaaagacatttaaagaat

SEQ ID NO: 62088 - DNA, 20 bp, Artificial Sequence
  Description of Artificial Sequence: Synthetic oligonucleotide
  Target: LAMA2; (-) strand; PAM type: NRG; PAM sequence: AAG
tataaatttaaagacattta

SEQ ID NO: 62089 - DNA, 20 bp, Artificial Sequence
  Description of Artificial Sequence: Synthetic oligonucleotide
  Target: LAMA2; (-) strand; PAM type: NRG; PAM sequence: AAG
gcttatgacttataaattta

SEQ ID NO: 62090 - DNA, 20 bp, Artificial Sequence
  Description of Artificial Sequence: Synthetic oligonucleotide
  Target: LAMA2; (-) strand; PAM type: NRG; PAM sequence: CAG
ataatgatgctactgacttg

SEQ ID NO: 62091 - DNA, 20 bp, Artificial Sequence
  Description of Artificial Sequence: Synthetic oligonucleotide
  Target: LAMA2; (-) strand; PAM type: NRG; PAM sequence: GGG
atttttataagaattaaact

SEQ ID NO: 62092 - DNA, 20 bp, Artificial Sequence
  Description of Artificial Sequence: Synthetic oligonucleotide
  Target: LAMA2; (-) strand; PAM type: NRG; PAM sequence: TGG
aatttttataagaattaaac

SEQ ID NO: 62093 - DNA, 20 bp, Artificial Sequence
  Description of Artificial Sequence: Synthetic oligonucleotide
  Target: LAMA2; (-) strand; PAM type: NRG; PAM sequence: AAG
aagataatttcaatttttat

SEQ ID NO: 62094 - DNA, 20 bp, Artificial Sequence
  Description of Artificial Sequence: Synthetic oligonucleotide
  Target: LAMA2; (-) strand; PAM type: NRG; PAM sequence: AAG
aaatatgacttagagttcag

SEQ ID NO: 62095 - DNA, 20 bp, Artificial Sequence
  Description of Artificial Sequence: Synthetic oligonucleotide
  Target: LAMA2; (-) strand; PAM type: NRG; PAM sequence: CAG
ctaaaatatgacttagagtt

SEQ ID NO: 62096 - DNA, 20 bp, Artificial Sequence
  Description of Artificial Sequence: Synthetic oligonucleotide
  Target: LAMA2; (-) strand; PAM type: NRG; PAM sequence: GAG
tgtggctaaaatatgactta

SEQ ID NO: 62097 - DNA, 20 bp, Artificial Sequence
  Description of Artificial Sequence: Synthetic oligonucleotide
  Target: LAMA2; (-) strand; PAM type: NRG; PAM sequence: TAG
cctgtggctaaaatatgact

SEQ ID NO: 62098 - DNA, 20 bp, Artificial Sequence
  Description of Artificial Sequence: Synthetic oligonucleotide
  Target: LAMA2; (-) strand; PAM type: NRG; PAM sequence: TGG
acaaaacaaaaaaatacctg

SEQ ID NO: 62099 - DNA, 20 bp, Artificial Sequence
  Description of Artificial Sequence: Synthetic oligonucleotide
  Target: LAMA2; (-) strand; PAM type: NRG; PAM sequence: AGG
cgaataagtttcattctttc

SEQ ID NO: 62100 - DNA, 20 bp, Artificial Sequence
  Description of Artificial Sequence: Synthetic oligonucleotide
  Target: LAMA2; (-) strand; PAM type: NRG; PAM sequence: CAG
tcgaataagtttcattcttt

SEQ ID NO: 62101 - DNA, 20 bp, Artificial Sequence
  Description of Artificial Sequence: Synthetic oligonucleotide
  Target: LAMA2; (-) strand; PAM type: NRG; PAM sequence: AAG
tcacgtaataaaagtcgaat

SEQ ID NO: 62102 - DNA, 20 bp, Artificial Sequence
  Description of Artificial Sequence: Synthetic oligonucleotide
  Target: LAMA2; (-) strand; PAM type: NRG; PAM sequence: AAG
taaaccttgtcacgtaataa

SEQ ID NO: 62103 - DNA, 20 bp, Artificial Sequence
  Description of Artificial Sequence: Synthetic oligonucleotide
  Target: LAMA2; (-) strand; PAM type: NRG; PAM sequence: AAG
gactccataatgttttattc

SEQ ID NO: 62104 - DNA, 20 bp, Artificial Sequence
  Description of Artificial Sequence: Synthetic oligonucleotide
  Target: LAMA2; (-) strand; PAM type: NRG; PAM sequence: CAG
ctgcctttatgctttgaatt

SEQ ID NO: 62105 - DNA, 20 bp, Artificial Sequence
  Description of Artificial Sequence: Synthetic oligonucleotide
  Target: LAMA2; (-) strand; PAM type: NRG; PAM sequence: AAG
taaaagtgacagacgtttga

SEQ ID NO: 62106 - DNA, 20 bp, Artificial Sequence
  Description of Artificial Sequence: Synthetic oligonucleotide
  Target: LAMA2; (-) strand; PAM type: NRG; PAM sequence: CAG
aacaaaattattaaaagtga

SEQ ID NO: 62107 - DNA, 20 bp, Artificial Sequence
  Description of Artificial Sequence: Synthetic oligonucleotide
  Target: LAMA2; (-) strand; PAM type: NRG; PAM sequence: AAG
acatagaacaaaattattaa

SEQ ID NO: 62108 - DNA, 20 bp, Artificial Sequence
  Description of Artificial Sequence: Synthetic oligonucleotide
  Target: LAMA2; (-) strand; PAM type: NRG; PAM sequence: TAG
cattcgtaggtcatataaca

SEQ ID NO: 62109 - DNA, 20 bp, Artificial Sequence
  Description of Artificial Sequence: Synthetic oligonucleotide
  Target: LAMA2; (-) strand; PAM type: NRG; PAM sequence: AGG
tacagactcttaacattcgt

SEQ ID NO: 62110 - DNA, 20 bp, Artificial Sequence
  Description of Artificial Sequence: Synthetic oligonucleotide
  Target: LAMA2; (-) strand; PAM type: NRG; PAM sequence: TAG
ttacagactcttaacattcg

SEQ ID NO: 62111 - DNA, 20 bp, Artificial Sequence
  Description of Artificial Sequence: Synthetic oligonucleotide
  Target: LAMA2; (-) strand; PAM type: NRG; PAM sequence: CAG
tgcagctgaagaaactctta

SEQ ID NO: 62112 - DNA, 20 bp, Artificial Sequence
  Description of Artificial Sequence: Synthetic oligonucleotide
  Target: LAMA2; (-) strand; PAM type: NRG; PAM sequence: AAG
ggtaaaatcaaatgcagctg

SEQ ID NO: 62113 - DNA, 20 bp, Artificial Sequence
  Description of Artificial Sequence: Synthetic oligonucleotide
  Target: LAMA2; (-) strand; PAM type: NRG; PAM sequence: CAG
ggtgttggtaaaatcaaatg

SEQ ID NO: 62114 - DNA, 20 bp, Artificial Sequence
  Description of Artificial Sequence: Synthetic oligonucleotide
  Target: LAMA2; (-) strand; PAM type: NRG; PAM sequence: TGG
taactgtacccacaaggtgt

SEQ ID NO: 62115 - DNA, 20 bp, Artificial Sequence
  Description of Artificial Sequence: Synthetic oligonucleotide
  Target: LAMA2; (-) strand; PAM type: NRG; PAM sequence: AGG
tcttcttaactgtacccaca

SEQ ID NO: 62116 - DNA, 20 bp, Artificial Sequence
  Description of Artificial Sequence: Synthetic oligonucleotide
  Target: LAMA2; (-) strand; PAM type: NRG; PAM sequence: AAG
atcttcttaactgtacccac

SEQ ID NO: 62117 - DNA, 20 bp, Artificial Sequence
  Description of Artificial Sequence: Synthetic oligonucleotide
  Target: LAMA2; (-) strand; PAM type: NRG; PAM sequence: AAG
tcagttataaagcctcaaat

SEQ ID NO: 62118 - DNA, 20 bp, Artificial Sequence
  Description of Artificial Sequence: Synthetic oligonucleotide
  Target: LAMA2; (-) strand; PAM type: NRG; PAM sequence: AAG
catatccaatttcagttata

SEQ ID NO: 62119 - DNA, 20 bp, Artificial Sequence
  Description of Artificial Sequence: Synthetic oligonucleotide
  Target: LAMA2; (-) strand; PAM type: NRG; PAM sequence: CAG
gtttgaaccatatccaattt

SEQ ID NO: 62120 - DNA, 20 bp, Artificial Sequence
  Description of Artificial Sequence: Synthetic oligonucleotide
  Target: LAMA2; (-) strand; PAM type: NRG; PAM sequence: CAG
atttttgagagaagtcattt

SEQ ID NO: 62121 - DNA, 20 bp, Artificial Sequence
  Description of Artificial Sequence: Synthetic oligonucleotide
  Target: LAMA2; (-) strand; PAM type: NRG; PAM sequence: AAG
ccggcataaatttttgagag

SEQ ID NO: 62122 - DNA, 20 bp, Artificial Sequence
  Description of Artificial Sequence: Synthetic oligonucleotide
  Target: LAMA2; (-) strand; PAM type: NRG; PAM sequence: GAG
gttccggcataaatttttga

SEQ ID NO: 62123 - DNA, 20 bp, Artificial Sequence
  Description of Artificial Sequence: Synthetic oligonucleotide
  Target: LAMA2; (-) strand; PAM type: NRG; PAM sequence: GAG
atgttccggcataaattttt

SEQ ID NO: 62124 - DNA, 20 bp, Artificial Sequence
  Description of Artificial Sequence: Synthetic oligonucleotide
  Target: LAMA2; (-) strand; PAM type: NRG; PAM sequence: CGG
aaatttatttgttgatgttc

SEQ ID NO: 62125 - DNA, 20 bp, Artificial Sequence
  Description of Artificial Sequence: Synthetic oligonucleotide
  Target: LAMA2; (-) strand; PAM type: NRG; PAM sequence: TAG
actacttcatcagaataagt

SEQ ID NO: 62126 - DNA, 20 bp, Artificial Sequence
  Description of Artificial Sequence: Synthetic oligonucleotide
  Target: LAMA2; (-) strand; PAM type: NRG; PAM sequence: AAG
gggaactacttcatcagaat

SEQ ID NO: 62127 - DNA, 20 bp, Artificial Sequence
  Description of Artificial Sequence: Synthetic oligonucleotide
  Target: LAMA2; (-) strand; PAM type: NRG; PAM sequence: CAG
tgacaagggaactacttcat

SEQ ID NO: 62128 - DNA, 20 bp, Artificial Sequence
  Description of Artificial Sequence: Synthetic oligonucleotide
  Target: LAMA2; (-) strand; PAM type: NRG; PAM sequence: GGG
aagaaaaagcttcctgacaa

SEQ ID NO: 62129 - DNA, 20 bp, Artificial Sequence
  Description of Artificial Sequence: Synthetic oligonucleotide
  Target: LAMA2; (-) strand; PAM type: NRG; PAM sequence: AGG
taagaaaaagcttcctgaca

SEQ ID NO: 62130 - DNA, 20 bp, Artificial Sequence
  Description of Artificial Sequence: Synthetic oligonucleotide
  Target: LAMA2; (-) strand; PAM type: NRG; PAM sequence: AAG
ttaagaaaaagcttcctgac

SEQ ID NO: 62131 - DNA, 20 bp, Artificial Sequence
  Description of Artificial Sequence: Synthetic oligonucleotide
  Target: LAMA2; (-) strand; PAM type: NRG; PAM sequence: AAG
ataaaacacactttaagaaa

SEQ ID NO: 62132 - DNA, 20 bp, Artificial Sequence
  Description of Artificial Sequence: Synthetic oligonucleotide
  Target: LAMA2; (-) strand; PAM type: NRG; PAM sequence: AAG
caaatcataaaacacacttt

SEQ ID NO: 62133 - DNA, 20 bp, Artificial Sequence
  Description of Artificial Sequence: Synthetic oligonucleotide
  Target: LAMA2; (-) strand; PAM type: NRG; PAM sequence: TGG
ggcaatgatcgacttagtga

SEQ ID NO: 62134 - DNA, 20 bp, Artificial Sequence
  Description of Artificial Sequence: Synthetic oligonucleotide
  Target: LAMA2; (-) strand; PAM type: NRG; PAM sequence: TAG
ccaatgggcaatgatcgact

SEQ ID NO: 62135 - DNA, 20 bp, Artificial Sequence
  Description of Artificial Sequence: Synthetic oligonucleotide
  Target: LAMA2; (-) strand; PAM type: NRG; PAM sequence: GGG
gtacatgtagactaaccaat

SEQ ID NO: 62136 - DNA, 20 bp, Artificial Sequence
  Description of Artificial Sequence: Synthetic oligonucleotide
  Target: LAMA2; (-) strand; PAM type: NRG; PAM sequence: TGG
agtacatgtagactaaccaa

SEQ ID NO: 62137 - DNA, 20 bp, Artificial Sequence
  Description of Artificial Sequence: Synthetic oligonucleotide
  Target: LAMA2; (-) strand; PAM type: NRG; PAM sequence: TAG
tcactaaaaggcagtacatg

SEQ ID NO: 62138 - DNA, 20 bp, Artificial Sequence
  Description of Artificial Sequence: Synthetic oligonucleotide
  Target: LAMA2; (-) strand; PAM type: NRG; PAM sequence: CAG
gaactcatgtcactaaaagg

SEQ ID NO: 62139 - DNA, 20 bp, Artificial Sequence
  Description of Artificial Sequence: Synthetic oligonucleotide
  Target: LAMA2; (-) strand; PAM type: NRG; PAM sequence: AGG
attgaactcatgtcactaaa

SEQ ID NO: 62140 - DNA, 20 bp, Artificial Sequence
  Description of Artificial Sequence: Synthetic oligonucleotide
  Target: LAMA2; (-) strand; PAM type: NRG; PAM sequence: AAG
aattgaactcatgtcactaa

SEQ ID NO: 62141 - DNA, 20 bp, Artificial Sequence
  Description of Artificial Sequence: Synthetic oligonucleotide
  Target: LAMA2; (-) strand; PAM type: NRG; PAM sequence: TAG
aggctattctcattcttaat

SEQ ID NO: 62142 - DNA, 20 bp, Artificial Sequence
  Description of Artificial Sequence: Synthetic oligonucleotide
  Target: LAMA2; (-) strand; PAM type: NRG; PAM sequence: AGG
ctatctgtgttcatagttat

SEQ ID NO: 62143 - DNA, 20 bp, Artificial Sequence
  Description of Artificial Sequence: Synthetic oligonucleotide
  Target: LAMA2; (-) strand; PAM type: NRG; PAM sequence: TAG
gctatctgtgttcatagtta

SEQ ID NO: 62144 - DNA, 20 bp, Artificial Sequence
  Description of Artificial Sequence: Synthetic oligonucleotide
  Target: LAMA2; (-) strand; PAM type: NRG; PAM sequence: TAG
catgtagctatctgtgttca

SEQ ID NO: 62145 - DNA, 20 bp, Artificial Sequence
  Description of Artificial Sequence: Synthetic oligonucleotide
  Target: LAMA2; (-) strand; PAM type: NRG; PAM sequence: TAG
cctctcactagagacacatg

SEQ ID NO: 62146 - DNA, 20 bp, Artificial Sequence
  Description of Artificial Sequence: Synthetic oligonucleotide
  Target: LAMA2; (-) strand; PAM type: NRG; PAM sequence: GAG
aggactagtacctctcacta

SEQ ID NO: 62147 - DNA, 20 bp, Artificial Sequence
  Description of Artificial Sequence: Synthetic oligonucleotide
  Target: LAMA2; (-) strand; PAM type: NRG; PAM sequence: TAG
agaggactagtacctctcac

SEQ ID NO: 62148 - DNA, 20 bp, Artificial Sequence
  Description of Artificial Sequence: Synthetic oligonucleotide
  Target: LAMA2; (-) strand; PAM type: NRG; PAM sequence: TAG
agagaaatgtcaaagaggac

SEQ ID NO: 62149 - DNA, 20 bp, Artificial Sequence
  Description of Artificial Sequence: Synthetic oligonucleotide
  Target: LAMA2; (-) strand; PAM type: NRG; PAM sequence: AGG
ctttaagagaaatgtcaaag

SEQ ID NO: 62150 - DNA, 20 bp, Artificial Sequence
  Description of Artificial Sequence: Synthetic oligonucleotide
  Target: LAMA2; (-) strand; PAM type: NRG; PAM sequence: GAG
gctttaagagaaatgtcaaa

SEQ ID NO: 62151 - DNA, 20 bp, Artificial Sequence
  Description of Artificial Sequence: Synthetic oligonucleotide
  Target: LAMA2; (-) strand; PAM type: NRG; PAM sequence: AAG
ccgctttaagagaaatgtca

SEQ ID NO: 62152 - DNA, 20 bp, Artificial Sequence
  Description of Artificial Sequence: Synthetic oligonucleotide
  Target: LAMA2; (-) strand; PAM type: NRG; PAM sequence: GAG
ccaaataaattccgctttaa

SEQ ID NO: 62153 - DNA, 20 bp, Artificial Sequence
  Description of Artificial Sequence: Synthetic oligonucleotide
  Target: LAMA2; (-) strand; PAM type: NRG; PAM sequence: AAG
ccccaaataaattccgcttt

SEQ ID NO: 62154 - DNA, 20 bp, Artificial Sequence
  Description of Artificial Sequence: Synthetic oligonucleotide
  Target: LAMA2; (-) strand; PAM type: NRG; PAM sequence: CAG
ttatcttcccctatggctac

SEQ ID NO: 62155 - DNA, 20 bp, Artificial Sequence
  Description of Artificial Sequence: Synthetic oligonucleotide
  Target: LAMA2; (-) strand; PAM type: NRG; PAM sequence: TGG
ccttttcttatcttccccta

SEQ ID NO: 62156 - DNA, 20 bp, Artificial Sequence
  Description of Artificial Sequence: Synthetic oligonucleotide
  Target: LAMA2; (-) strand; PAM type: NRG; PAM sequence: TGG
agcagtagaaatgaatatct

SEQ ID NO: 62157 - DNA, 20 bp, Artificial Sequence
  Description of Artificial Sequence: Synthetic oligonucleotide
  Target: LAMA2; (-) strand; PAM type: NRG; PAM sequence: TAG
agcattccacatgccagcag

SEQ ID NO: 62158 - DNA, 20 bp, Artificial Sequence
  Description of Artificial Sequence: Synthetic oligonucleotide
  Target: LAMA2; (-) strand; PAM type: NRG; PAM sequence: CAG
aagagcattccacatgccag

SEQ ID NO: 62159 - DNA, 20 bp, Artificial Sequence
  Description of Artificial Sequence: Synthetic oligonucleotide
  Target: LAMA2; (-) strand; PAM type: NRG; PAM sequence: CAG
gaaaagagcattccacatgc

SEQ ID NO: 62160 - DNA, 20 bp, Artificial Sequence
  Description of Artificial Sequence: Synthetic oligonucleotide
  Target: LAMA2; (-) strand; PAM type: NRG; PAM sequence: GAG
actggcatggagcaggaaaa

SEQ ID NO: 62161 - DNA, 20 bp, Artificial Sequence
  Description of Artificial Sequence: Synthetic oligonucleotide
  Target: LAMA2; (-) strand; PAM type: NRG; PAM sequence: AAG
agactggcatggagcaggaa

SEQ ID NO: 62162 - DNA, 20 bp, Artificial Sequence
  Description of Artificial Sequence: Synthetic oligonucleotide
  Target: LAMA2; (-) strand; PAM type: NRG; PAM sequence: AGG
gtgagagactggcatggagc

SEQ ID NO: 62163 - DNA, 20 bp, Artificial Sequence
  Description of Artificial Sequence: Synthetic oligonucleotide
  Target: LAMA2; (-) strand; PAM type: NRG; PAM sequence: CAG
agtgagagactggcatggag

SEQ ID NO: 62164 - DNA, 20 bp, Artificial Sequence
  Description of Artificial Sequence: Synthetic oligonucleotide
  Target: LAMA2; (-) strand; PAM type: NRG; PAM sequence: GAG
tcaagtgagagactggcatg

SEQ ID NO: 62165 - DNA, 20 bp, Artificial Sequence
  Description of Artificial Sequence: Synthetic oligonucleotide
  Target: LAMA2; (-) strand; PAM type: NRG; PAM sequence: TGG
aatcaagtgagagactggca

SEQ ID NO: 62166 - DNA, 20 bp, Artificial Sequence
  Description of Artificial Sequence: Synthetic oligonucleotide
  Target: LAMA2; (-) strand; PAM type: NRG; PAM sequence: TGG
ttctaaatcaagtgagagac

SEQ ID NO: 62167 - DNA, 20 bp, Artificial Sequence
  Description of Artificial Sequence: Synthetic oligonucleotide
  Target: LAMA2; (-) strand; PAM type: NRG; PAM sequence: GAG
aatctttctaaatcaagtga

SEQ ID NO: 62168 - DNA, 20 bp, Artificial Sequence
  Description of Artificial Sequence: Synthetic oligonucleotide
  Target: LAMA2; (-) strand; PAM type: NRG; PAM sequence: GAG
caaatctttctaaatcaagt

SEQ ID NO: 62169 - DNA, 20 bp, Artificial Sequence
  Description of Artificial Sequence: Synthetic oligonucleotide
  Target: LAMA2; (-) strand; PAM type: NRG; PAM sequence: AAG
cgcacaaatctttctaaatc

SEQ ID NO: 62170 - DNA, 20 bp, Artificial Sequence
  Description of Artificial Sequence: Synthetic oligonucleotide
  Target: LAMA2; (-) strand; PAM type: NRG; PAM sequence: AGG
cttcttgatggtcaaagcta

SEQ ID NO: 62171 - DNA, 20 bp, Artificial Sequence
  Description of Artificial Sequence: Synthetic oligonucleotide
  Target: LAMA2; (-) strand; PAM type: NRG; PAM sequence: AAG
tcttcttgatggtcaaagct

SEQ ID NO: 62172 - DNA, 20 bp, Artificial Sequence
  Description of Artificial Sequence: Synthetic oligonucleotide
  Target: LAMA2; (-) strand; PAM type: NRG; PAM sequence: AAG
tggactcttcttgatggtca

SEQ ID NO: 62173 - DNA, 20 bp, Artificial Sequence
  Description of Artificial Sequence: Synthetic oligonucleotide
  Target: LAMA2; (-) strand; PAM type: NRG; PAM sequence: TGG
aggagatggactcttcttga

SEQ ID NO: 62174 - DNA, 20 bp, Artificial Sequence
  Description of Artificial Sequence: Synthetic oligonucleotide
  Target: LAMA2; (-) strand; PAM type: NRG; PAM sequence: TGG
gcacaggaaggcaaaggaga

SEQ ID NO: 62175 - DNA, 20 bp, Artificial Sequence
  Description of Artificial Sequence: Synthetic oligonucleotide
  Target: LAMA2; (-) strand; PAM type: NRG; PAM sequence: GAG
ccaggcacaggaaggcaaag

SEQ ID NO: 62176 - DNA, 20 bp, Artificial Sequence
  Description of Artificial Sequence: Synthetic oligonucleotide
  Target: LAMA2; (-) strand; PAM type: NRG; PAM sequence: AGG
taccaggcacaggaaggcaa

SEQ ID NO: 62177 - DNA, 20 bp, Artificial Sequence
  Description of Artificial Sequence: Synthetic oligonucleotide
  Target: LAMA2; (-) strand; PAM type: NRG; PAM sequence: AAG
gtaccaggcacaggaaggca

SEQ ID NO: 62178 - DNA, 20 bp, Artificial Sequence
  Description of Artificial Sequence: Synthetic oligonucleotide
  Target: LAMA2; (-) strand; PAM type: NRG; PAM sequence: AGG
ttcaggtaccaggcacagga

SEQ ID NO: 62179 - DNA, 20 bp, Artificial Sequence
  Description of Artificial Sequence: Synthetic oligonucleotide
  Target: LAMA2; (-) strand; PAM type: NRG; PAM sequence: AAG
tttcaggtaccaggcacagg

SEQ ID NO: 62180 - DNA, 20 bp, Artificial Sequence
  Description of Artificial Sequence: Synthetic oligonucleotide
  Target: LAMA2; (-) strand; PAM type: NRG; PAM sequence: AGG
gtctttcaggtaccaggcac

SEQ ID NO: 62181 - DNA, 20 bp, Artificial Sequence
  Description of Artificial Sequence: Synthetic oligonucleotide
  Target: LAMA2; (-) strand; PAM type: NRG; PAM sequence: CAG
ggtctttcaggtaccaggca

SEQ ID NO: 62182 - DNA, 20 bp, Artificial Sequence
  Description of Artificial Sequence: Synthetic oligonucleotide
  Target: LAMA2; (-) strand; PAM type: NRG; PAM sequence: AGG
cactaggtctttcaggtacc

SEQ ID NO: 62183 - DNA, 20 bp, Artificial Sequence
  Description of Artificial Sequence: Synthetic oligonucleotide
  Target: LAMA2; (-) strand; PAM type: NRG; PAM sequence: CAG
tcactaggtctttcaggtac

SEQ ID NO: 62184 - DNA, 20 bp, Artificial Sequence
  Description of Artificial Sequence: Synthetic oligonucleotide
  Target: LAMA2; (-) strand; PAM type: NRG; PAM sequence: AGG
cagtcttcactaggtctttc

SEQ ID NO: 62185 - DNA, 20 bp, Artificial Sequence
  Description of Artificial Sequence: Synthetic oligonucleotide
  Target: LAMA2; (-) strand; PAM type: NRG; PAM sequence: CAG
tcagtcttcactaggtcttt

SEQ ID NO: 62186 - DNA, 20 bp, Artificial Sequence
  Description of Artificial Sequence: Synthetic oligonucleotide
  Target: LAMA2; (-) strand; PAM type: NRG; PAM sequence: AGG
cttttctttcagtcttcact

SEQ ID NO: 62187 - DNA, 20 bp, Artificial Sequence
  Description of Artificial Sequence: Synthetic oligonucleotide
  Target: LAMA2; (-) strand; PAM type: NRG; PAM sequence: TAG
acttttctttcagtcttcac

SEQ ID NO: 62188 - DNA, 20 bp, Artificial Sequence
  Description of Artificial Sequence: Synthetic oligonucleotide
  Target: LAMA2; (-) strand; PAM type: NRG; PAM sequence: CAG
gaaaataaaaacttttcttt

SEQ ID NO: 62189 - DNA, 20 bp, Artificial Sequence
  Description of Artificial Sequence: Synthetic oligonucleotide
  Target: LAMA2; (-) strand; PAM type: NRG; PAM sequence: AAG
tcaaagtgctttcactatgt

SEQ ID NO: 62190 - DNA, 20 bp, Artificial Sequence
  Description of Artificial Sequence: Synthetic oligonucleotide
  Target: LAMA2; (-) strand; PAM type: NRG; PAM sequence: AAG
atgtgtaacaaaatgcttca

SEQ ID NO: 62191 - DNA, 20 bp, Artificial Sequence
  Description of Artificial Sequence: Synthetic oligonucleotide
  Target: LAMA2; (-) strand; PAM type: NRG; PAM sequence: TAG
ataattatcatgttaaatta

SEQ ID NO: 62192 - DNA, 20 bp, Artificial Sequence
  Description of Artificial Sequence: Synthetic oligonucleotide
  Target: LAMA2; (-) strand; PAM type: NRG; PAM sequence: TAG
ttacttgctaaaataatgtg

SEQ ID NO: 62193 - DNA, 20 bp, Artificial Sequence
  Description of Artificial Sequence: Synthetic oligonucleotide
  Target: LAMA2; (-) strand; PAM type: NRG; PAM sequence: AAG
tatgacaacactaggcactt

SEQ ID NO: 62194 - DNA, 20 bp, Artificial Sequence
  Description of Artificial Sequence: Synthetic oligonucleotide
  Target: LAMA2; (-) strand; PAM type: NRG; PAM sequence: AGG
tttatacctatgacaacact

SEQ ID NO: 62195 - DNA, 20 bp, Artificial Sequence
  Description of Artificial Sequence: Synthetic oligonucleotide
  Target: LAMA2; (-) strand; PAM type: NRG; PAM sequence: TAG
atttatacctatgacaacac

SEQ ID NO: 62196 - DNA, 20 bp, Artificial Sequence
  Description of Artificial Sequence: Synthetic oligonucleotide
  Target: LAMA2; (-) strand; PAM type: NRG; PAM sequence: AGG
ttatacactttcttgagggc

SEQ ID NO: 62197 - DNA, 20 bp, Artificial Sequence
  Description of Artificial Sequence: Synthetic oligonucleotide
  Target: LAMA2; (-) strand; PAM type: NRG; PAM sequence: CAG
attatacactttcttgaggg

SEQ ID NO: 62198 - DNA, 20 bp, Artificial Sequence
  Description of Artificial Sequence: Synthetic oligonucleotide
  Target: LAMA2; (-) strand; PAM type: NRG; PAM sequence: GGG
aaaattatacactttcttga

SEQ ID NO: 62199 - DNA, 20 bp, Artificial Sequence
  Description of Artificial Sequence: Synthetic oligonucleotide
  Target: LAMA2; (-) strand; PAM type: NRG; PAM sequence: AGG
taaaattatacactttcttg

SEQ ID NO: 62200 - DNA, 20 bp, Artificial Sequence
  Description of Artificial Sequence: Synthetic oligonucleotide
  Target: LAMA2; (-) strand; PAM type: NRG; PAM sequence: GAG
ataaaattatacactttctt

SEQ ID NO: 62201 - DNA, 20 bp, Artificial Sequence
  Description of Artificial Sequence: Synthetic oligonucleotide
  Target: LAMA2; (-) strand; PAM type: NRG; PAM sequence: AAG
ttattcatttgtttctgcga

SEQ ID NO: 62202 - DNA, 20 bp, Artificial Sequence
  Description of Artificial Sequence: Synthetic oligonucleotide
  Target: LAMA2; (-) strand; PAM type: NRG; PAM sequence: TGG
tgagcttaagttctccatgt

SEQ ID NO: 62203 - DNA, 20 bp, Artificial Sequence
  Description of Artificial Sequence: Synthetic oligonucleotide
  Target: LAMA2; (-) strand; PAM type: NRG; PAM sequence: AAG
ccacattcacctatgagctt

SEQ ID NO: 62204 - DNA, 20 bp, Artificial Sequence
  Description of Artificial Sequence: Synthetic oligonucleotide
  Target: LAMA2; (-) strand; PAM type: NRG; PAM sequence: GAG
atattcccacattcacctat

SEQ ID NO: 62205 - DNA, 20 bp, Artificial Sequence
  Description of Artificial Sequence: Synthetic oligonucleotide
  Target: LAMA2; (-) strand; PAM type: NRG; PAM sequence: TGG
gcactctttgatcactcacc

SEQ ID NO: 62206 - DNA, 20 bp, Artificial Sequence
  Description of Artificial Sequence: Synthetic oligonucleotide
  Target: LAMA2; (-) strand; PAM type: NRG; PAM sequence: TAG
tgtacaggtaccaccttttc

SEQ ID NO: 62207 - DNA, 20 bp, Artificial Sequence
  Description of Artificial Sequence: Synthetic oligonucleotide
  Target: LAMA2; (-) strand; PAM type: NRG; PAM sequence: AGG
catcctccaaacccctgtac

SEQ ID NO: 62208 - DNA, 20 bp, Artificial Sequence
  Description of Artificial Sequence: Synthetic oligonucleotide
  Target: LAMA2; (-) strand; PAM type: NRG; PAM sequence: CAG
gcatcctccaaacccctgta

SEQ ID NO: 62209 - DNA, 20 bp, Artificial Sequence
  Description of Artificial Sequence: Synthetic oligonucleotide
  Target: LAMA2; (-) strand; PAM type: NRG; PAM sequence: AAG
cttctagacactctgcctgg

SEQ ID NO: 62210 - DNA, 20 bp, Artificial Sequence
  Description of Artificial Sequence: Synthetic oligonucleotide
  Target: LAMA2; (-) strand; PAM type: NRG; PAM sequence: TGG
ctgcttctagacactctgcc

SEQ ID NO: 62211 - DNA, 20 bp, Artificial Sequence
  Description of Artificial Sequence: Synthetic oligonucleotide
  Target: LAMA2; (-) strand; PAM type: NRG; PAM sequence: TAG
tctgctgctggctctgcttc

SEQ ID NO: 62212 - DNA, 20 bp, Artificial Sequence
  Description of Artificial Sequence: Synthetic oligonucleotide
  Target: LAMA2; (-) strand; PAM type: NRG; PAM sequence: TGG
cttacactaaaatctgctgc

SEQ ID NO: 62213 - DNA, 20 bp, Artificial Sequence
  Description of Artificial Sequence: Synthetic oligonucleotide
  Target: LAMA2; (-) strand; PAM type: NRG; PAM sequence: AGG
tctcatagatatcttctgag

SEQ ID NO: 62214 - DNA, 20 bp, Artificial Sequence
  Description of Artificial Sequence: Synthetic oligonucleotide
  Target: LAMA2; (-) strand; PAM type: NRG; PAM sequence: GAG
atctcatagatatcttctga

SEQ ID NO: 62215 - DNA, 20 bp, Artificial Sequence
  Description of Artificial Sequence: Synthetic oligonucleotide
  Target: LAMA2; (-) strand; PAM type: NRG; PAM sequence: GAG
ccatctcatagatatcttct

SEQ ID NO: 62216 - DNA, 20 bp, Artificial Sequence
  Description of Artificial Sequence: Synthetic oligonucleotide
  Target: LAMA2; (-) strand; PAM type: NRG; PAM sequence: TAG
cagcttttcttaccatctca

SEQ ID NO: 62217 - DNA, 20 bp, Artificial Sequence
  Description of Artificial Sequence: Synthetic oligonucleotide
  Target: LAMA2; (-) strand; PAM type: NRG; PAM sequence: CAG
actttctcccctaccttttt

SEQ ID NO: 62218 - DNA, 20 bp, Artificial Sequence
  Description of Artificial Sequence: Synthetic oligonucleotide
  Target: LAMA2; (-) strand; PAM type: NRG; PAM sequence: GAG
cagtctgaggctcaacttta

SEQ ID NO: 62219 - DNA, 20 bp, Artificial Sequence
  Description of Artificial Sequence: Synthetic oligonucleotide
  Target: LAMA2; (-) strand; PAM type: NRG; PAM sequence: TAG
atcagtctgaggctcaactt

SEQ ID NO: 62220 - DNA, 20 bp, Artificial Sequence
  Description of Artificial Sequence: Synthetic oligonucleotide
  Target: LAMA2; (-) strand; PAM type: NRG; PAM sequence: AGG
ccatgccatgtatcagtctg

SEQ ID NO: 62221 - DNA, 20 bp, Artificial Sequence
  Description of Artificial Sequence: Synthetic oligonucleotide
  Target: LAMA2; (-) strand; PAM type: NRG; PAM sequence: GAG
accatgccatgtatcagtct

SEQ ID NO: 62222 - DNA, 20 bp, Artificial Sequence
  Description of Artificial Sequence: Synthetic oligonucleotide
  Target: LAMA2; (-) strand; PAM type: NRG; PAM sequence: CAG
ctccagaccatgccatgtat

SEQ ID NO: 62223 - DNA, 20 bp, Artificial Sequence
  Description of Artificial Sequence: Synthetic oligonucleotide
  Target: LAMA2; (-) strand; PAM type: NRG; PAM sequence: CAG
ctgtggtgcaattttccctc

SEQ ID NO: 62224 - DNA, 20 bp, Artificial Sequence
  Description of Artificial Sequence: Synthetic oligonucleotide
  Target: LAMA2; (-) strand; PAM type: NRG; PAM sequence: TGG
ttaaggggtacctctttctg

SEQ ID NO: 62225 - DNA, 20 bp, Artificial Sequence
  Description of Artificial Sequence: Synthetic oligonucleotide
  Target: LAMA2; (-) strand; PAM type: NRG; PAM sequence: GGG
ctggcatcctgttccttaag

SEQ ID NO: 62226 - DNA, 20 bp, Artificial Sequence
  Description of Artificial Sequence: Synthetic oligonucleotide
  Target: LAMA2; (-) strand; PAM type: NRG; PAM sequence: GGG
cctggcatcctgttccttaa

SEQ ID NO: 62227 - DNA, 20 bp, Artificial Sequence
  Description of Artificial Sequence: Synthetic oligonucleotide
  Target: LAMA2; (-) strand; PAM type: NRG; PAM sequence: AGG
tcctggcatcctgttcctta

SEQ ID NO: 62228 - DNA, 20 bp, Artificial Sequence
  Description of Artificial Sequence: Synthetic oligonucleotide
  Target: LAMA2; (-) strand; PAM type: NRG; PAM sequence: AAG
atcctggcatcctgttcctt

SEQ ID NO: 62229 - DNA, 20 bp, Artificial Sequence
  Description of Artificial Sequence: Synthetic oligonucleotide
  Target: LAMA2; (-) strand; PAM type: NRG; PAM sequence: TGG
agatatgaggggtaaaatcc

SEQ ID NO: 62230 - DNA, 20 bp, Artificial Sequence
  Description of Artificial Sequence: Synthetic oligonucleotide
  Target: LAMA2; (-) strand; PAM type: NRG; PAM sequence: GGG
cgataactgacagatatgag

SEQ ID NO: 62231 - DNA, 20 bp, Artificial Sequence
  Description of Artificial Sequence: Synthetic oligonucleotide
  Target: LAMA2; (-) strand; PAM type: NRG; PAM sequence: GGG
ccgataactgacagatatga

SEQ ID NO: 62232 - DNA, 20 bp, Artificial Sequence
  Description of Artificial Sequence: Synthetic oligonucleotide
  Target: LAMA2; (-) strand; PAM type: NRG; PAM sequence: AGG
gccgataactgacagatatg

SEQ ID NO: 62233 - DNA, 20 bp, Artificial Sequence
  Description of Artificial Sequence: Synthetic oligonucleotide
  Target: LAMA2; (-) strand; PAM type: NRG; PAM sequence: GAG
agccgataactgacagatat

SEQ ID NO: 62234 - DNA, 20 bp, Artificial Sequence
  Description of Artificial Sequence: Synthetic oligonucleotide
  Target: LAMA2; (-) strand; PAM type: NRG; PAM sequence: CAG
gacttgtagccgataactga

SEQ ID NO: 62235 - DNA, 20 bp, Artificial Sequence
  Description of Artificial Sequence: Synthetic oligonucleotide
  Target: LAMA2; (-) strand; PAM type: NRG; PAM sequence: TAG
ccccctgccccttggacttg

SEQ ID NO: 62236 - DNA, 20 bp, Artificial Sequence
  Description of Artificial Sequence: Synthetic oligonucleotide
  Target: LAMA2; (-) strand; PAM type: NRG; PAM sequence: TGG
ttgcacttccccctgcccct

SEQ ID NO: 62237 - DNA, 20 bp, Artificial Sequence
  Description of Artificial Sequence: Synthetic oligonucleotide
  Target: LAMA2; (-) strand; PAM type: NRG; PAM sequence: AAG
ctgaccctgagacttccagc

SEQ ID NO: 62238 - DNA, 20 bp, Artificial Sequence
  Description of Artificial Sequence: Synthetic oligonucleotide
  Target: LAMA2; (-) strand; PAM type: NRG; PAM sequence: CAG
cctcctgaccctgagacttc

SEQ ID NO: 62239 - DNA, 20 bp, Artificial Sequence
  Description of Artificial Sequence: Synthetic oligonucleotide
  Target: LAMA2; (-) strand; PAM type: NRG; PAM sequence: GAG
aatgagagcctcctgaccct

SEQ ID NO: 62240 - DNA, 20 bp, Artificial Sequence
  Description of Artificial Sequence: Synthetic oligonucleotide
  Target: LAMA2; (-) strand; PAM type: NRG; PAM sequence: GAG
agacctgcctctttgaatga

SEQ ID NO: 62241 - DNA, 20 bp, Artificial Sequence
  Description of Artificial Sequence: Synthetic oligonucleotide
  Target: LAMA2; (-) strand; PAM type: NRG; PAM sequence: GAG
agagacctgcctctttgaat

SEQ ID NO: 62242 - DNA, 20 bp, Artificial Sequence
  Description of Artificial Sequence: Synthetic oligonucleotide
  Target: LAMA2; (-) strand; PAM type: NRG; PAM sequence: GAG
cttgcagctgcatcattcca

SEQ ID NO: 62243 - DNA, 20 bp, Artificial Sequence
  Description of Artificial Sequence: Synthetic oligonucleotide
  Target: LAMA2; (-) strand; PAM type: NRG; PAM sequence: CAG
ggcttgcagctgcatcattc

SEQ ID NO: 62244 - DNA, 20 bp, Artificial Sequence
  Description of Artificial Sequence: Synthetic oligonucleotide
  Target: LAMA2; (-) strand; PAM type: NRG; PAM sequence: CAG
ggttggctgctaatggcttg

SEQ ID NO: 62245 - DNA, 20 bp, Artificial Sequence
  Description of Artificial Sequence: Synthetic oligonucleotide
  Target: LAMA2; (-) strand; PAM type: NRG; PAM sequence: TGG
aggcaagggttggctgctaa

SEQ ID NO: 62246 - DNA, 20 bp, Artificial Sequence
  Description of Artificial Sequence: Synthetic oligonucleotide
  Target: LAMA2; (-) strand; PAM type: NRG; PAM sequence: TGG
ctctcagctgaggcaagggt

SEQ ID NO: 62247 - DNA, 20 bp, Artificial Sequence
  Description of Artificial Sequence: Synthetic oligonucleotide
  Target: LAMA2; (-) strand; PAM type: NRG; PAM sequence: GGG
ccatctctcagctgaggcaa

SEQ ID NO: 62248 - DNA, 20 bp, Artificial Sequence
  Description of Artificial Sequence: Synthetic oligonucleotide
  Target: LAMA2; (-) strand; PAM type: NRG; PAM sequence: AGG
cccatctctcagctgaggca

SEQ ID NO: 62249 - DNA, 20 bp, Artificial Sequence
  Description of Artificial Sequence: Synthetic oligonucleotide
  Target: LAMA2; (-) strand; PAM type: NRG; PAM sequence: AAG
acccatctctcagctgaggc

SEQ ID NO: 62250 - DNA, 20 bp, Artificial Sequence
  Description of Artificial Sequence: Synthetic oligonucleotide
  Target: LAMA2; (-) strand; PAM type: NRG; PAM sequence: AGG
tggtacccatctctcagctg

SEQ ID NO: 62251 - DNA, 20 bp, Artificial Sequence
  Description of Artificial Sequence: Synthetic oligonucleotide
  Target: LAMA2; (-) strand; PAM type: NRG; PAM sequence: GAG
ctggtacccatctctcagct

SEQ ID NO: 62252 - DNA, 20 bp, Artificial Sequence
  Description of Artificial Sequence: Synthetic oligonucleotide
  Target: LAMA2; (-) strand; PAM type: NRG; PAM sequence: CAG
tcatcctggtacccatctct

SEQ ID NO: 62253 - DNA, 20 bp, Artificial Sequence
  Description of Artificial Sequence: Synthetic oligonucleotide
  Target: LAMA2; (-) strand; PAM type: NRG; PAM sequence: TGG
ctttaccaggcctttcatcc

SEQ ID NO: 62254 - DNA, 20 bp, Artificial Sequence
  Description of Artificial Sequence: Synthetic oligonucleotide
  Target: LAMA2; (-) strand; PAM type: NRG; PAM sequence: AGG
cacagccataaccctttacc

SEQ ID NO: 62255 - DNA, 20 bp, Artificial Sequence
  Description of Artificial Sequence: Synthetic oligonucleotide
  Target: LAMA2; (-) strand; PAM type: NRG; PAM sequence: CAG
gcacagccataaccctttac

SEQ ID NO: 62256 - DNA, 20 bp, Artificial Sequence
  Description of Artificial Sequence: Synthetic oligonucleotide
  Target: LAMA2; (-) strand; PAM type: NRG; PAM sequence: CAG
aggaaattccactggtggca

SEQ ID NO: 62257 - DNA, 20 bp, Artificial Sequence
  Description of Artificial Sequence: Synthetic oligonucleotide
  Target: LAMA2; (-) strand; PAM type: NRG; PAM sequence: TGG
agtgtaggaaattccactgg

SEQ ID NO: 62258 - DNA, 20 bp, Artificial Sequence
  Description of Artificial Sequence: Synthetic oligonucleotide
  Target: LAMA2; (-) strand; PAM type: NRG; PAM sequence: TGG
cccagtgtaggaaattccac

SEQ ID NO: 62259 - DNA, 20 bp, Artificial Sequence
  Description of Artificial Sequence: Synthetic oligonucleotide
  Target: LAMA2; (-) strand; PAM type: NRG; PAM sequence: AGG
agcatgtatattcccagtgt

SEQ ID NO: 62260 - DNA, 20 bp, Artificial Sequence
  Description of Artificial Sequence: Synthetic oligonucleotide
  Target: LAMA2; (-) strand; PAM type: NRG; PAM sequence: TAG
tagcatgtatattcccagtg

SEQ ID NO: 62261 - DNA, 20 bp, Artificial Sequence
  Description of Artificial Sequence: Synthetic oligonucleotide
  Target: LAMA2; (-) strand; PAM type: NRG; PAM sequence: CAG
gcacctagcatgtatattcc

SEQ ID NO: 62262 - DNA, 20 bp, Artificial Sequence
  Description of Artificial Sequence: Synthetic oligonucleotide
  Target: LAMA2; (-) strand; PAM type: NRG; PAM sequence: TAG
cacctaacattctatgcacc

SEQ ID NO: 62263 - DNA, 20 bp, Artificial Sequence
  Description of Artificial Sequence: Synthetic oligonucleotide
  Target: LAMA2; (-) strand; PAM type: NRG; PAM sequence: TGG
atgaatactttccaacaggc

SEQ ID NO: 62264 - DNA, 20 bp, Artificial Sequence
  Description of Artificial Sequence: Synthetic oligonucleotide
  Target: LAMA2; (-) strand; PAM type: NRG; PAM sequence: AGG
attaatgaatactttccaac

SEQ ID NO: 62265 - DNA, 20 bp, Artificial Sequence
  Description of Artificial Sequence: Synthetic oligonucleotide
  Target: LAMA2; (-) strand; PAM type: NRG; PAM sequence: CAG
cattaatgaatactttccaa

SEQ ID NO: 62266 - DNA, 20 bp, Artificial Sequence
  Description of Artificial Sequence: Synthetic oligonucleotide
  Target: LAMA2; (-) strand; PAM type: NRG; PAM sequence: TAG
tttaataaagtgttaccagc

SEQ ID NO: 62267 - DNA, 20 bp, Artificial Sequence
  Description of Artificial Sequence: Synthetic oligonucleotide
  Target: LAMA2; (-) strand; PAM type: NRG; PAM sequence: CAG
aatgtttaataaagtgttac

SEQ ID NO: 62268 - DNA, 20 bp, Artificial Sequence
  Description of Artificial Sequence: Synthetic oligonucleotide
  Target: LAMA2; (-) strand; PAM type: NRG; PAM sequence: AAG
gcaatatctaatgtttaata

SEQ ID NO: 62269 - DNA, 20 bp, Artificial Sequence
  Description of Artificial Sequence: Synthetic oligonucleotide
  Target: LAMA2; (-) strand; PAM type: NRG; PAM sequence: TAG
ttgcttcaaagcacataaaa

SEQ ID NO: 62270 - DNA, 20 bp, Artificial Sequence
  Description of Artificial Sequence: Synthetic oligonucleotide
  Target: LAMA2; (-) strand; PAM type: NRG; PAM sequence: AAG
caaacagtgtaattgcttca

SEQ ID NO: 62271 - DNA, 20 bp, Artificial Sequence
  Description of Artificial Sequence: Synthetic oligonucleotide
  Target: LAMA2; (-) strand; PAM type: NRG; PAM sequence: CAG
acaaaataaggtttttcaaa

SEQ ID NO: 62272 - DNA, 20 bp, Artificial Sequence
  Description of Artificial Sequence: Synthetic oligonucleotide
  Target: LAMA2; (-) strand; PAM type: NRG; PAM sequence: AGG
agatttttttttacaaaata

SEQ ID NO: 62273 - DNA, 20 bp, Artificial Sequence
  Description of Artificial Sequence: Synthetic oligonucleotide
  Target: LAMA2; (-) strand; PAM type: NRG; PAM sequence: AAG
cagatttttttttacaaaat

SEQ ID NO: 62274 - DNA, 20 bp, Artificial Sequence
  Description of Artificial Sequence: Synthetic oligonucleotide
  Target: LAMA2; (-) strand; PAM type: NRG; PAM sequence: CAG
ctgtgagacagtgaatagaa

SEQ ID NO: 62275 - DNA, 20 bp, Artificial Sequence
  Description of Artificial Sequence: Synthetic oligonucleotide
  Target: LAMA2; (-) strand; PAM type: NRG; PAM sequence: TAG
taaatctgtgagacagtgaa

SEQ ID NO: 62276 - DNA, 20 bp, Artificial Sequence
  Description of Artificial Sequence: Synthetic oligonucleotide
  Target: LAMA2; (-) strand; PAM type: NRG; PAM sequence: CAG
actgtcctaaatctgtgaga

SEQ ID NO: 62277 - DNA, 20 bp, Artificial Sequence
  Description of Artificial Sequence: Synthetic oligonucleotide
  Target: LAMA2; (-) strand; PAM type: NRG; PAM sequence: GAG
ataaactgtcctaaatctgt

SEQ ID NO: 62278 - DNA, 20 bp, Artificial Sequence
  Description of Artificial Sequence: Synthetic oligonucleotide
  Target: LAMA2; (-) strand; PAM type: NRG; PAM sequence: TAG
ggtctgtttgacttgaaatc

SEQ ID NO: 62279 - DNA, 20 bp, Artificial Sequence
  Description of Artificial Sequence: Synthetic oligonucleotide
  Target: LAMA2; (-) strand; PAM type: NRG; PAM sequence: AGG
caaggtcaaggtttaaggtc

SEQ ID NO: 62280 - DNA, 20 bp, Artificial Sequence
  Description of Artificial Sequence: Synthetic oligonucleotide
  Target: LAMA2; (-) strand; PAM type: NRG; PAM sequence: CAG
acaaggtcaaggtttaaggt

SEQ ID NO: 62281 - DNA, 20 bp, Artificial Sequence
  Description of Artificial Sequence: Synthetic oligonucleotide
  Target: LAMA2; (-) strand; PAM type: NRG; PAM sequence: AGG
aagaacaaggtcaaggttta

SEQ ID NO: 62282 - DNA, 20 bp, Artificial Sequence
  Description of Artificial Sequence: Synthetic oligonucleotide
  Target: LAMA2; (-) strand; PAM type: NRG; PAM sequence: AAG
aaagaacaaggtcaaggttt

SEQ ID NO: 62283 - DNA, 20 bp, Artificial Sequence
  Description of Artificial Sequence: Synthetic oligonucleotide
  Target: LAMA2; (-) strand; PAM type: NRG; PAM sequence: AGG
tacagcaaagaacaaggtca

SEQ ID NO: 62284 - DNA, 20 bp, Artificial Sequence
  Description of Artificial Sequence: Synthetic oligonucleotide
  Target: LAMA2; (-) strand; PAM type: NRG; PAM sequence: AAG
atacagcaaagaacaaggtc

SEQ ID NO: 62285 - DNA, 20 bp, Artificial Sequence
  Description of Artificial Sequence: Synthetic oligonucleotide
  Target: LAMA2; (-) strand; PAM type: NRG; PAM sequence: AGG
catttatacagcaaagaaca

SEQ ID NO: 62286 - DNA, 20 bp, Artificial Sequence
  Description of Artificial Sequence: Synthetic oligonucleotide
  Target: LAMA2; (-) strand; PAM type: NRG; PAM sequence: AAG
ccatttatacagcaaagaac

SEQ ID NO: 62287 - DNA, 20 bp, Artificial Sequence
  Description of Artificial Sequence: Synthetic oligonucleotide
  Target: LAMA2; (-) strand; PAM type: NRG; PAM sequence: AAG
acaaaaccatttatacagca

SEQ ID NO: 62288 - DNA, 20 bp, Artificial Sequence
  Description of Artificial Sequence: Synthetic oligonucleotide
  Target: LAMA2; (-) strand; PAM type: NRG; PAM sequence: CAG
ctcatacaaaaccatttata

SEQ ID NO: 62289 - DNA, 20 bp, Artificial Sequence
  Description of Artificial Sequence: Synthetic oligonucleotide
  Target: LAMA2; (-) strand; PAM type: NRG; PAM sequence: AAG
atttgaggctcagtgtggtt

SEQ ID NO: 62290 - DNA, 20 bp, Artificial Sequence
  Description of Artificial Sequence: Synthetic oligonucleotide
  Target: LAMA2; (-) strand; PAM type: NRG; PAM sequence: TGG
tgggaatttgaggctcagtg

SEQ ID NO: 62291 - DNA, 20 bp, Artificial Sequence
  Description of Artificial Sequence: Synthetic oligonucleotide
  Target: LAMA2; (-) strand; PAM type: NRG; PAM sequence: CAG
actgatgggaatttgaggct

SEQ ID NO: 62292 - DNA, 20 bp, Artificial Sequence
  Description of Artificial Sequence: Synthetic oligonucleotide
  Target: LAMA2; (-) strand; PAM type: NRG; PAM sequence: AGG
atataactgatgggaatttg

SEQ ID NO: 62293 - DNA, 20 bp, Artificial Sequence
  Description of Artificial Sequence: Synthetic oligonucleotide
  Target: LAMA2; (-) strand; PAM type: NRG; PAM sequence: GAG
catataactgatgggaattt

SEQ ID NO: 62294 - DNA, 20 bp, Artificial Sequence
  Description of Artificial Sequence: Synthetic oligonucleotide
  Target: LAMA2; (-) strand; PAM type: NRG; PAM sequence: GGG
ataatccacatataactgat

SEQ ID NO: 62295 - DNA, 20 bp, Artificial Sequence
  Description of Artificial Sequence: Synthetic oligonucleotide
  Target: LAMA2; (-) strand; PAM type: NRG; PAM sequence: TGG
tataatccacatataactga

SEQ ID NO: 62296 - DNA, 20 bp, Artificial Sequence
  Description of Artificial Sequence: Synthetic oligonucleotide
  Target: LAMA2; (-) strand; PAM type: NRG; PAM sequence: CAG
tgttcacaacaagcatgagg

SEQ ID NO: 62297 - DNA, 20 bp, Artificial Sequence
  Description of Artificial Sequence: Synthetic oligonucleotide
  Target: LAMA2; (-) strand; PAM type: NRG; PAM sequence: AGG
gaatgttcacaacaagcatg

SEQ ID NO: 62298 - DNA, 20 bp, Artificial Sequence
  Description of Artificial Sequence: Synthetic oligonucleotide
  Target: LAMA2; (-) strand; PAM type: NRG; PAM sequence: GAG
tgaatgttcacaacaagcat

SEQ ID NO: 62299 - DNA, 20 bp, Artificial Sequence
  Description of Artificial Sequence: Synthetic oligonucleotide
  Target: LAMA2; (-) strand; PAM type: NRG; PAM sequence: AAG
ttacattgaatgttcacaac

SEQ ID NO: 62300 - DNA, 20 bp, Artificial Sequence
  Description of Artificial Sequence: Synthetic oligonucleotide
  Target: LAMA2; (-) strand; PAM type: NRG; PAM sequence: CAG
tgttgaacatttatgtgcac

SEQ ID NO: 62301 - DNA, 20 bp, Artificial Sequence
  Description of Artificial Sequence: Synthetic oligonucleotide
  Target: LAMA2; (-) strand; PAM type: NRG; PAM sequence: AAG
ggttttgctcatccagaagg

SEQ ID NO: 62302 - DNA, 20 bp, Artificial Sequence
  Description of Artificial Sequence: Synthetic oligonucleotide
  Target: LAMA2; (-) strand; PAM type: NRG; PAM sequence: AGG
caaggttttgctcatccaga

SEQ ID NO: 62303 - DNA, 20 bp, Artificial Sequence
  Description of Artificial Sequence: Synthetic oligonucleotide
  Target: LAMA2; (-) strand; PAM type: NRG; PAM sequence: AAG
tcaaggttttgctcatccag

SEQ ID NO: 62304 - DNA, 20 bp, Artificial Sequence
  Description of Artificial Sequence: Synthetic oligonucleotide
  Target: LAMA2; (-) strand; PAM type: NRG; PAM sequence: CAG
gcatcaaggttttgctcatc

SEQ ID NO: 62305 - DNA, 20 bp, Artificial Sequence
  Description of Artificial Sequence: Synthetic oligonucleotide
  Target: LAMA2; (-) strand; PAM type: NRG; PAM sequence: AGG
accttctactgaaagcatca

SEQ ID NO: 62306 - DNA, 20 bp, Artificial Sequence
  Description of Artificial Sequence: Synthetic oligonucleotide
  Target: LAMA2; (-) strand; PAM type: NRG; PAM sequence: AAG
taccttctactgaaagcatc

SEQ ID NO: 62307 - DNA, 20 bp, Artificial Sequence
  Description of Artificial Sequence: Synthetic oligonucleotide
  Target: LAMA2; (-) strand; PAM type: NRG; PAM sequence: AAG
ttccaaataccttctactga

SEQ ID NO: 62308 - DNA, 20 bp, Artificial Sequence
  Description of Artificial Sequence: Synthetic oligonucleotide
  Target: LAMA2; (-) strand; PAM type: NRG; PAM sequence: TAG
ccccagaaaagattcaacca

SEQ ID NO: 62309 - DNA, 20 bp, Artificial Sequence
  Description of Artificial Sequence: Synthetic oligonucleotide
  Target: LAMA2; (-) strand; PAM type: NRG; PAM sequence: AAG
tcccatcaatacccccagaa

SEQ ID NO: 62310 - DNA, 20 bp, Artificial Sequence
  Description of Artificial Sequence: Synthetic oligonucleotide
  Target: LAMA2; (-) strand; PAM type: NRG; PAM sequence: CAG
tctagtcccatcaatacccc

SEQ ID NO: 62311 - DNA, 20 bp, Artificial Sequence
  Description of Artificial Sequence: Synthetic oligonucleotide
  Target: LAMA2; (-) strand; PAM type: NRG; PAM sequence: TAG
catccacctcatcctgactc

SEQ ID NO: 62312 - DNA, 20 bp, Artificial Sequence
  Description of Artificial Sequence: Synthetic oligonucleotide
  Target: LAMA2; (-) strand; PAM type: NRG; PAM sequence: TGG
gtcatacagatgaaagtacc

SEQ ID NO: 62313 - DNA, 20 bp, Artificial Sequence
  Description of Artificial Sequence: Synthetic oligonucleotide
  Target: LAMA2; (-) strand; PAM type: NRG; PAM sequence: AAG
ctctcaagtcatacagatga

SEQ ID NO: 62314 - DNA, 20 bp, Artificial Sequence
  Description of Artificial Sequence: Synthetic oligonucleotide
  Target: LAMA2; (-) strand; PAM type: NRG; PAM sequence: CAG
gcatacactctcaagtcata

SEQ ID NO: 62315 - DNA, 20 bp, Artificial Sequence
  Description of Artificial Sequence: Synthetic oligonucleotide
  Target: LAMA2; (-) strand; PAM type: NRG; PAM sequence: AAG
aatttgatgcatacactctc

SEQ ID NO: 62316 - DNA, 20 bp, Artificial Sequence
  Description of Artificial Sequence: Synthetic oligonucleotide
  Target: LAMA2; (-) strand; PAM type: NRG; PAM sequence: GGG
gaggtgagagaggtgctcga

SEQ ID NO: 62317 - DNA, 20 bp, Artificial Sequence
  Description of Artificial Sequence: Synthetic oligonucleotide
  Target: LAMA2; (-) strand; PAM type: NRG; PAM sequence: AGG
ggaggtgagagaggtgctcg

SEQ ID NO: 62318 - DNA, 20 bp, Artificial Sequence
  Description of Artificial Sequence: Synthetic oligonucleotide
  Target: LAMA2; (-) strand; PAM type: NRG; PAM sequence: GAG
tggaggtgagagaggtgctc

SEQ ID NO: 62319 - DNA, 20 bp, Artificial Sequence
  Description of Artificial Sequence: Synthetic oligonucleotide
  Target: LAMA2; (-) strand; PAM type: NRG; PAM sequence: AGG
tttcaatgtggaggtgagag

SEQ ID NO: 62320 - DNA, 20 bp, Artificial Sequence
  Description of Artificial Sequence: Synthetic oligonucleotide
  Target: LAMA2; (-) strand; PAM type: NRG; PAM sequence: GAG
ttttcaatgtggaggtgaga

SEQ ID NO: 62321 - DNA, 20 bp, Artificial Sequence
  Description of Artificial Sequence: Synthetic oligonucleotide
  Target: LAMA2; (-) strand; PAM type: NRG; PAM sequence: GAG
ttttttcaatgtggaggtga

SEQ ID NO: 62322 - DNA, 20 bp, Artificial Sequence
  Description of Artificial Sequence: Synthetic oligonucleotide
  Target: LAMA2; (-) strand; PAM type: NRG; PAM sequence: GAG
atttttttcaatgtggaggt

SEQ ID NO: 62323 - DNA, 20 bp, Artificial Sequence
  Description of Artificial Sequence: Synthetic oligonucleotide
  Target: LAMA2; (-) strand; PAM type: NRG; PAM sequence: AGG
atgtatttttttcaatgtgg

SEQ ID NO: 62324 - DNA, 20 bp, Artificial Sequence
  Description of Artificial Sequence: Synthetic oligonucleotide
  Target: LAMA2; (-) strand; PAM type: NRG; PAM sequence: GAG
catgtatttttttcaatgtg

SEQ ID NO: 62325 - DNA, 20 bp, Artificial Sequence
  Description of Artificial Sequence: Synthetic oligonucleotide
  Target: LAMA2; (-) strand; PAM type: NRG; PAM sequence: TGG
ggcatgtatttttttcaatg

SEQ ID NO: 62326 - DNA, 20 bp, Artificial Sequence
  Description of Artificial Sequence: Synthetic oligonucleotide
  Target: LAMA2; (-) strand; PAM type: NRG; PAM sequence: TGG
caatttcattttttttaatc

SEQ ID NO: 62327 - DNA, 20 bp, Artificial Sequence
  Description of Artificial Sequence: Synthetic oligonucleotide
  Target: LAMA2; (-) strand; PAM type: NRG; PAM sequence: CAG
gagttttatggatgctctaa

SEQ ID NO: 62328 - DNA, 20 bp, Artificial Sequence
  Description of Artificial Sequence: Synthetic oligonucleotide
  Target: LAMA2; (-) strand; PAM type: NRG; PAM sequence: TGG
ttactttgtaatgagtttta

SEQ ID NO: 62329 - DNA, 20 bp, Artificial Sequence
  Description of Artificial Sequence: Synthetic oligonucleotide
  Target: LAMA2; (-) strand; PAM type: NRG; PAM sequence: GAG
aatatattttactttgtaat

SEQ ID NO: 62330 - DNA, 20 bp, Artificial Sequence
  Description of Artificial Sequence: Synthetic oligonucleotide
  Target: LAMA2; (-) strand; PAM type: NRG; PAM sequence: AGG
tggaattagagtggttcccg

SEQ ID NO: 62331 - DNA, 20 bp, Artificial Sequence
  Description of Artificial Sequence: Synthetic oligonucleotide
  Target: LAMA2; (-) strand; PAM type: NRG; PAM sequence: GAG
ttggaattagagtggttccc

SEQ ID NO: 62332 - DNA, 20 bp, Artificial Sequence
  Description of Artificial Sequence: Synthetic oligonucleotide
  Target: LAMA2; (-) strand; PAM type: NRG; PAM sequence: TGG
gagatgatttggaattagag

SEQ ID NO: 62333 - DNA, 20 bp, Artificial Sequence
  Description of Artificial Sequence: Synthetic oligonucleotide
  Target: LAMA2; (-) strand; PAM type: NRG; PAM sequence: GAG
agagagatgatttggaatta

SEQ ID NO: 62334 - DNA, 20 bp, Artificial Sequence
  Description of Artificial Sequence: Synthetic oligonucleotide
  Target: LAMA2; (-) strand; PAM type: NRG; PAM sequence: TAG
acagagagatgatttggaat

SEQ ID NO: 62335 - DNA, 20 bp, Artificial Sequence
  Description of Artificial Sequence: Synthetic oligonucleotide
  Target: LAMA2; (-) strand; PAM type: NRG; PAM sequence: TGG
caagagacagagagatgatt

SEQ ID NO: 62336 - DNA, 20 bp, Artificial Sequence
  Description of Artificial Sequence: Synthetic oligonucleotide
  Target: LAMA2; (-) strand; PAM type: NRG; PAM sequence: GAG
aagccattacaagagacaga

SEQ ID NO: 62337 - DNA, 20 bp, Artificial Sequence
  Description of Artificial Sequence: Synthetic oligonucleotide
  Target: LAMA2; (-) strand; PAM type: NRG; PAM sequence: GAG
gaaagccattacaagagaca

SEQ ID NO: 62338 - DNA, 20 bp, Artificial Sequence
  Description of Artificial Sequence: Synthetic oligonucleotide
  Target: LAMA2; (-) strand; PAM type: NRG; PAM sequence: CAG
tggaaagccattacaagaga

SEQ ID NO: 62339 - DNA, 20 bp, Artificial Sequence
  Description of Artificial Sequence: Synthetic oligonucleotide
  Target: LAMA2; (-) strand; PAM type: NRG; PAM sequence: GAG
atattggaaagccattacaa

SEQ ID NO: 62340 - DNA, 20 bp, Artificial Sequence
  Description of Artificial Sequence: Synthetic oligonucleotide
  Target: LAMA2; (-) strand; PAM type: NRG; PAM sequence: AAG
gaatattggaaagccattac

SEQ ID NO: 62341 - DNA, 20 bp, Artificial Sequence
  Description of Artificial Sequence: Synthetic oligonucleotide
  Target: LAMA2; (-) strand; PAM type: NRG; PAM sequence: AAG
atttttcaaagaatattgga

SEQ ID NO: 62342 - DNA, 20 bp, Artificial Sequence
  Description of Artificial Sequence: Synthetic oligonucleotide
  Target: LAMA2; (-) strand; PAM type: NRG; PAM sequence: TGG
caatatttttcaaagaatat

SEQ ID NO: 62343 - DNA, 20 bp, Artificial Sequence
  Description of Artificial Sequence: Synthetic oligonucleotide
  Target: LAMA2; (-) strand; PAM type: NRG; PAM sequence: AAG
aataacctcaatatttttca

SEQ ID NO: 62344 - DNA, 20 bp, Artificial Sequence
  Description of Artificial Sequence: Synthetic oligonucleotide
  Target: LAMA2; (-) strand; PAM type: NRG; PAM sequence: AAG
aggatatttaaaccaaatca

SEQ ID NO: 62345 - DNA, 20 bp, Artificial Sequence
  Description of Artificial Sequence: Synthetic oligonucleotide
  Target: LAMA2; (-) strand; PAM type: NRG; PAM sequence: AGG
ttgtatatctcaagaataaa

SEQ ID NO: 62346 - DNA, 20 bp, Artificial Sequence
  Description of Artificial Sequence: Synthetic oligonucleotide
  Target: LAMA2; (-) strand; PAM type: NRG; PAM sequence: AAG
attgtatatctcaagaataa

SEQ ID NO: 62347 - DNA, 20 bp, Artificial Sequence
  Description of Artificial Sequence: Synthetic oligonucleotide
  Target: LAMA2; (-) strand; PAM type: NRG; PAM sequence: AAG
cagttgaaattgtatatctc

SEQ ID NO: 62348 - DNA, 20 bp, Artificial Sequence
  Description of Artificial Sequence: Synthetic oligonucleotide
  Target: LAMA2; (-) strand; PAM type: NRG; PAM sequence: CAG
actctgtcatagttgccatt

SEQ ID NO: 62349 - DNA, 20 bp, Artificial Sequence
  Description of Artificial Sequence: Synthetic oligonucleotide
  Target: LAMA2; (-) strand; PAM type: NRG; PAM sequence: TAG
gtacattttcaactctgtca

SEQ ID NO: 62350 - DNA, 20 bp, Artificial Sequence
  Description of Artificial Sequence: Synthetic oligonucleotide
  Target: LAMA2; (-) strand; PAM type: NRG; PAM sequence: TAG
acttttttttcattgcaata

SEQ ID NO: 62351 - DNA, 20 bp, Artificial Sequence
  Description of Artificial Sequence: Synthetic oligonucleotide
  Target: LAMA2; (-) strand; PAM type: NRG; PAM sequence: AGG
atagttgaattaccaatttt

SEQ ID NO: 62352 - DNA, 20 bp, Artificial Sequence
  Description of Artificial Sequence: Synthetic oligonucleotide
  Target: LAMA2; (-) strand; PAM type: NRG; PAM sequence: TAG
aatagttgaattaccaattt

SEQ ID NO: 62353 - DNA, 20 bp, Artificial Sequence
  Description of Artificial Sequence: Synthetic oligonucleotide
  Target: LAMA2; (-) strand; PAM type: NRG; PAM sequence: TAG
ttcagctattaggacagcaa

SEQ ID NO: 62354 - DNA, 20 bp, Artificial Sequence
  Description of Artificial Sequence: Synthetic oligonucleotide
  Target: LAMA2; (-) strand; PAM type: NRG; PAM sequence: CAG
aatgacttcagctattagga

SEQ ID NO: 62355 - DNA, 20 bp, Artificial Sequence
  Description of Artificial Sequence: Synthetic oligonucleotide
  Target: LAMA2; (-) strand; PAM type: NRG; PAM sequence: AGG
taaaaatgacttcagctatt

SEQ ID NO: 62356 - DNA, 20 bp, Artificial Sequence
  Description of Artificial Sequence: Synthetic oligonucleotide
  Target: LAMA2; (-) strand; PAM type: NRG; PAM sequence: TAG
ataaaaatgacttcagctat

SEQ ID NO: 62357 - DNA, 20 bp, Artificial Sequence
  Description of Artificial Sequence: Synthetic oligonucleotide
  Target: LAMA2; (-) strand; PAM type: NRG; PAM sequence: CAG
gccatacataaaaatgactt

SEQ ID NO: 62358 - DNA, 20 bp, Artificial Sequence
  Description of Artificial Sequence: Synthetic oligonucleotide
  Target: LAMA2; (-) strand; PAM type: NRG; PAM sequence: AGG
tcttatgatggctttgattt

SEQ ID NO: 62359 - DNA, 20 bp, Artificial Sequence
  Description of Artificial Sequence: Synthetic oligonucleotide
  Target: LAMA2; (-) strand; PAM type: NRG; PAM sequence: TAG
atcttatgatggctttgatt

SEQ ID NO: 62360 - DNA, 20 bp, Artificial Sequence
  Description of Artificial Sequence: Synthetic oligonucleotide
  Target: LAMA2; (-) strand; PAM type: NRG; PAM sequence: TGG
aggtctgcagcatcttatga

SEQ ID NO: 62361 - DNA, 20 bp, Artificial Sequence
  Description of Artificial Sequence: Synthetic oligonucleotide
  Target: LAMA2; (-) strand; PAM type: NRG; PAM sequence: CAG
ccaagctattaagaggtctg

SEQ ID NO: 62362 - DNA, 20 bp, Artificial Sequence
  Description of Artificial Sequence: Synthetic oligonucleotide
  Target: LAMA2; (-) strand; PAM type: NRG; PAM sequence: AGG
actggagccaagctattaag

SEQ ID NO: 62363 - DNA, 20 bp, Artificial Sequence
  Description of Artificial Sequence: Synthetic oligonucleotide
  Target: LAMA2; (-) strand; PAM type: NRG; PAM sequence: GAG
cactggagccaagctattaa

SEQ ID NO: 62364 - DNA, 20 bp, Artificial Sequence
  Description of Artificial Sequence: Synthetic oligonucleotide
  Target: LAMA2; (-) strand; PAM type: NRG; PAM sequence: AAG
atcactggagccaagctatt

SEQ ID NO: 62365 - DNA, 20 bp, Artificial Sequence
  Description of Artificial Sequence: Synthetic oligonucleotide
  Target: LAMA2; (-) strand; PAM type: NRG; PAM sequence: AAG
ggctcattatcactggagcc

SEQ ID NO: 62366 - DNA, 20 bp, Artificial Sequence
  Description of Artificial Sequence: Synthetic oligonucleotide
  Target: LAMA2; (-) strand; PAM type: NRG; PAM sequence: GAG
tcctgggctcattatcactg

SEQ ID NO: 62367 - DNA, 20 bp, Artificial Sequence
  Description of Artificial Sequence: Synthetic oligonucleotide
  Target: LAMA2; (-) strand; PAM type: NRG; PAM sequence: TGG
tgtcctgggctcattatcac

SEQ ID NO: 62368 - DNA, 20 bp, Artificial Sequence
  Description of Artificial Sequence: Synthetic oligonucleotide
  Target: LAMA2; (-) strand; PAM type: NRG; PAM sequence: GGG
caaatgagctctaatgtcct

SEQ ID NO: 62369 - DNA, 20 bp, Artificial Sequence
  Description of Artificial Sequence: Synthetic oligonucleotide
  Target: LAMA2; (-) strand; PAM type: NRG; PAM sequence: TGG
tcaaatgagctctaatgtcc

SEQ ID NO: 62370 - DNA, 20 bp, Artificial Sequence
  Description of Artificial Sequence: Synthetic oligonucleotide
  Target: LAMA2; (-) strand; PAM type: NRG; PAM sequence: GAG
tatgaatcctgctctcaaat

SEQ ID NO: 62371 - DNA, 20 bp, Artificial Sequence
  Description of Artificial Sequence: Synthetic oligonucleotide
  Target: LAMA2; (-) strand; PAM type: NRG; PAM sequence: CAG
ccagaggtaggaaaattgca

SEQ ID NO: 62372 - DNA, 20 bp, Artificial Sequence
  Description of Artificial Sequence: Synthetic oligonucleotide
  Target: LAMA2; (-) strand; PAM type: NRG; PAM sequence: AGG
tttgagacaaagccagaggt

SEQ ID NO: 62373 - DNA, 20 bp, Artificial Sequence
  Description of Artificial Sequence: Synthetic oligonucleotide
  Target: LAMA2; (-) strand; PAM type: NRG; PAM sequence: TAG
ctttgagacaaagccagagg

SEQ ID NO: 62374 - DNA, 20 bp, Artificial Sequence
  Description of Artificial Sequence: Synthetic oligonucleotide
  Target: LAMA2; (-) strand; PAM type: NRG; PAM sequence: AGG
tgtctttgagacaaagccag

SEQ ID NO: 62375 - DNA, 20 bp, Artificial Sequence
  Description of Artificial Sequence: Synthetic oligonucleotide
  Target: LAMA2; (-) strand; PAM type: NRG; PAM sequence: GAG
atgtctttgagacaaagcca

SEQ ID NO: 62376 - DNA, 20 bp, Artificial Sequence
  Description of Artificial Sequence: Synthetic oligonucleotide
  Target: LAMA2; (-) strand; PAM type: NRG; PAM sequence: CAG
ctatgtctttgagacaaagc

SEQ ID NO: 62377 - DNA, 20 bp, Artificial Sequence
  Description of Artificial Sequence: Synthetic oligonucleotide
  Target: LAMA2; (-) strand; PAM type: NRG; PAM sequence: AAG
gtggctatgtctttgagaca

SEQ ID NO: 62378 - DNA, 20 bp, Artificial Sequence
  Description of Artificial Sequence: Synthetic oligonucleotide
  Target: LAMA2; (-) strand; PAM type: NRG; PAM sequence: GAG
ccatgtgtggctatgtcttt

SEQ ID NO: 62379 - DNA, 20 bp, Artificial Sequence
  Description of Artificial Sequence: Synthetic oligonucleotide
  Target: LAMA2; (-) strand; PAM type: NRG; PAM sequence: TGG
tcagtgtccttctccatgtg

SEQ ID NO: 62380 - DNA, 20 bp, Artificial Sequence
  Description of Artificial Sequence: Synthetic oligonucleotide
  Target: LAMA2; (-) strand; PAM type: NRG; PAM sequence: CAG
atgtcaaactctcttattat

SEQ ID NO: 62381 - DNA, 20 bp, Artificial Sequence
  Description of Artificial Sequence: Synthetic oligonucleotide
  Target: LAMA2; (-) strand; PAM type: NRG; PAM sequence: AAG
ctggcaaaagaaaaattata

SEQ ID NO: 62382 - DNA, 20 bp, Artificial Sequence
  Description of Artificial Sequence: Synthetic oligonucleotide
  Target: LAMA2; (-) strand; PAM type: NRG; PAM sequence: AAG
gattataaggatcctggcaa

SEQ ID NO: 62383 - DNA, 20 bp, Artificial Sequence
  Description of Artificial Sequence: Synthetic oligonucleotide
  Target: LAMA2; (-) strand; PAM type: NRG; PAM sequence: TGG
ttcaaggattataaggatcc

SEQ ID NO: 62384 - DNA, 20 bp, Artificial Sequence
  Description of Artificial Sequence: Synthetic oligonucleotide
  Target: LAMA2; (-) strand; PAM type: NRG; PAM sequence: AGG
attttgattcaaggattata

SEQ ID NO: 62385 - DNA, 20 bp, Artificial Sequence
  Description of Artificial Sequence: Synthetic oligonucleotide
  Target: LAMA2; (-) strand; PAM type: NRG; PAM sequence: AAG
cattttgattcaaggattat

SEQ ID NO: 62386 - DNA, 20 bp, Artificial Sequence
  Description of Artificial Sequence: Synthetic oligonucleotide
  Target: LAMA2; (-) strand; PAM type: NRG; PAM sequence: AGG
gcttcaatcattttgattca

SEQ ID NO: 62387 - DNA, 20 bp, Artificial Sequence
  Description of Artificial Sequence: Synthetic oligonucleotide
  Target: LAMA2; (-) strand; PAM type: NRG; PAM sequence: AAG
tgcttcaatcattttgattc

SEQ ID NO: 62388 - DNA, 20 bp, Artificial Sequence
  Description of Artificial Sequence: Synthetic oligonucleotide
  Target: LAMA2; (-) strand; PAM type: NRG; PAM sequence: TAG
aaaataatacattttaaatc

SEQ ID NO: 62389 - DNA, 20 bp, Artificial Sequence
  Description of Artificial Sequence: Synthetic oligonucleotide
  Target: LAMA2; (-) strand; PAM type: NRG; PAM sequence: AGG
aaacaaaataatgtcaaaag

SEQ ID NO: 62390 - DNA, 20 bp, Artificial Sequence
  Description of Artificial Sequence: Synthetic oligonucleotide
  Target: LAMA2; (-) strand; PAM type: NRG; PAM sequence: GAG
taaacaaaataatgtcaaaa

SEQ ID NO: 62391 - DNA, 20 bp, Artificial Sequence
  Description of Artificial Sequence: Synthetic oligonucleotide
  Target: LAMA2; (-) strand; PAM type: NRG; PAM sequence: AAG
tctaaacaaaataatgtcaa

SEQ ID NO: 62392 - DNA, 20 bp, Artificial Sequence
  Description of Artificial Sequence: Synthetic oligonucleotide
  Target: LAMA2; (-) strand; PAM type: NRG; PAM sequence: AGG
atcaccagtagagtttttaa

SEQ ID NO: 62393 - DNA, 20 bp, Artificial Sequence
  Description of Artificial Sequence: Synthetic oligonucleotide
  Target: LAMA2; (-) strand; PAM type: NRG; PAM sequence: AAG
aatcaccagtagagttttta

SEQ ID NO: 62394 - DNA, 20 bp, Artificial Sequence
  Description of Artificial Sequence: Synthetic oligonucleotide
  Target: LAMA2; (-) strand; PAM type: NRG; PAM sequence: GAG
caatattttaatcaccagta

SEQ ID NO: 62395 - DNA, 20 bp, Artificial Sequence
  Description of Artificial Sequence: Synthetic oligonucleotide
  Target: LAMA2; (-) strand; PAM type: NRG; PAM sequence: TAG
ttcaatattttaatcaccag

SEQ ID NO: 62396 - DNA, 20 bp, Artificial Sequence
  Description of Artificial Sequence: Synthetic oligonucleotide
  Target: LAMA2; (-) strand; PAM type: NRG; PAM sequence: CAG
agtttcaatattttaatcac

SEQ ID NO: 62397 - DNA, 20 bp, Artificial Sequence
  Description of Artificial Sequence: Synthetic oligonucleotide
  Target: LAMA2; (-) strand; PAM type: NRG; PAM sequence: TAG
tcatgccaaaaatactgtta

SEQ ID NO: 62398 - DNA, 20 bp, Artificial Sequence
  Description of Artificial Sequence: Synthetic oligonucleotide
  Target: LAMA2; (-) strand; PAM type: NRG; PAM sequence: AAG
gagaagtatatagctgaaag

SEQ ID NO: 62399 - DNA, 20 bp, Artificial Sequence
  Description of Artificial Sequence: Synthetic oligonucleotide
  Target: LAMA2; (-) strand; PAM type: NRG; PAM sequence: AAG
ttagagaagtatatagctga

SEQ ID NO: 62400 - DNA, 20 bp, Artificial Sequence
  Description of Artificial Sequence: Synthetic oligonucleotide
  Target: LAMA2; (-) strand; PAM type: NRG; PAM sequence: TAG
caataagttagagaagtata

SEQ ID NO: 62401 - DNA, 20 bp, Artificial Sequence
  Description of Artificial Sequence: Synthetic oligonucleotide
  Target: LAMA2; (-) strand; PAM type: NRG; PAM sequence: AAG
aataagccaataagttagag

SEQ ID NO: 62402 - DNA, 20 bp, Artificial Sequence
  Description of Artificial Sequence: Synthetic oligonucleotide
  Target: LAMA2; (-) strand; PAM type: NRG; PAM sequence: GAG
aataataagccaataagtta

SEQ ID NO: 62403 - DNA, 20 bp, Artificial Sequence
  Description of Artificial Sequence: Synthetic oligonucleotide
  Target: LAMA2; (-) strand; PAM type: NRG; PAM sequence: TAG
caaataataagccaataagt

SEQ ID NO: 62404 - DNA, 20 bp, Artificial Sequence
  Description of Artificial Sequence: Synthetic oligonucleotide
  Target: LAMA2; (-) strand; PAM type: NRG; PAM sequence: AAG
aaatcaaataataagccaat

SEQ ID NO: 62405 - DNA, 20 bp, Artificial Sequence
  Description of Artificial Sequence: Synthetic oligonucleotide
  Target: LAMA2; (-) strand; PAM type: NRG; PAM sequence: AAG
ggacaattaaatcaaataat

SEQ ID NO: 62406 - DNA, 20 bp, Artificial Sequence
  Description of Artificial Sequence: Synthetic oligonucleotide
  Target: LAMA2; (-) strand; PAM type: NRG; PAM sequence: AGG
ctcataattaacactgccta

SEQ ID NO: 62407 - DNA, 20 bp, Artificial Sequence
  Description of Artificial Sequence: Synthetic oligonucleotide
  Target: LAMA2; (-) strand; PAM type: NRG; PAM sequence: AAG
tctcataattaacactgcct

SEQ ID NO: 62408 - DNA, 20 bp, Artificial Sequence
  Description of Artificial Sequence: Synthetic oligonucleotide
  Target: LAMA2; (-) strand; PAM type: NRG; PAM sequence: CGG
caaattcccaagaagaaact

SEQ ID NO: 62409 - DNA, 20 bp, Artificial Sequence
  Description of Artificial Sequence: Synthetic oligonucleotide
  Target: LAMA2; (-) strand; PAM type: NRG; PAM sequence: AAG
tttattctcaaattcccaag

SEQ ID NO: 62410 - DNA, 20 bp, Artificial Sequence
  Description of Artificial Sequence: Synthetic oligonucleotide
  Target: LAMA2; (-) strand; PAM type: NRG; PAM sequence: AAG
tcctttattctcaaattccc

SEQ ID NO: 62411 - DNA, 20 bp, Artificial Sequence
  Description of Artificial Sequence: Synthetic oligonucleotide
  Target: LAMA2; (-) strand; PAM type: NRG; PAM sequence: CAG
ccttcagtacattgaaaaaa

SEQ ID NO: 62412 - DNA, 20 bp, Artificial Sequence
  Description of Artificial Sequence: Synthetic oligonucleotide
  Target: LAMA2; (-) strand; PAM type: NRG; PAM sequence: CAG
ctggtaatctgaaatgcctt

SEQ ID NO: 62413 - DNA, 20 bp, Artificial Sequence
  Description of Artificial Sequence: Synthetic oligonucleotide
  Target: LAMA2; (-) strand; PAM type: NRG; PAM sequence: TGG
ccttgtctctgtgattcttc

SEQ ID NO: 62414 - DNA, 20 bp, Artificial Sequence
  Description of Artificial Sequence: Synthetic oligonucleotide
  Target: LAMA2; (-) strand; PAM type: NRG; PAM sequence: TGG
ggtttaaccctatggctaaa

SEQ ID NO: 62415 - DNA, 20 bp, Artificial Sequence
  Description of Artificial Sequence: Synthetic oligonucleotide
  Target: LAMA2; (-) strand; PAM type: NRG; PAM sequence: TGG
aagtgacaggtttaacccta

SEQ ID NO: 62416 - DNA, 20 bp, Artificial Sequence
  Description of Artificial Sequence: Synthetic oligonucleotide
  Target: LAMA2; (-) strand; PAM type: NRG; PAM sequence: AGG
tgtggggtaggtaaagtgac

SEQ ID NO: 62417 - DNA, 20 bp, Artificial Sequence
  Description of Artificial Sequence: Synthetic oligonucleotide
  Target: LAMA2; (-) strand; PAM type: NRG; PAM sequence: CAG
ttgtggggtaggtaaagtga

SEQ ID NO: 62418 - DNA, 20 bp, Artificial Sequence
  Description of Artificial Sequence: Synthetic oligonucleotide
  Target: LAMA2; (-) strand; PAM type: NRG; PAM sequence: AAG
acttatttgtggggtaggta

SEQ ID NO: 62419 - DNA, 20 bp, Artificial Sequence
  Description of Artificial Sequence: Synthetic oligonucleotide
  Target: LAMA2; (-) strand; PAM type: NRG; PAM sequence: AGG
tagttacttatttgtggggt

SEQ ID NO: 62420 - DNA, 20 bp, Artificial Sequence
  Description of Artificial Sequence: Synthetic oligonucleotide
  Target: LAMA2; (-) strand; PAM type: NRG; PAM sequence: TAG
atagttacttatttgtgggg

SEQ ID NO: 62421 - DNA, 20 bp, Artificial Sequence
  Description of Artificial Sequence: Synthetic oligonucleotide
  Target: LAMA2; (-) strand; PAM type: NRG; PAM sequence: GGG
gccatagttacttatttgtg

SEQ ID NO: 62422 - DNA, 20 bp, Artificial Sequence
  Description of Artificial Sequence: Synthetic oligonucleotide
  Target: LAMA2; (-) strand; PAM type: NRG; PAM sequence: GGG
tgccatagttacttatttgt

SEQ ID NO: 62423 - DNA, 20 bp, Artificial Sequence
  Description of Artificial Sequence: Synthetic oligonucleotide
  Target: LAMA2; (-) strand; PAM type: NRG; PAM sequence: TGG
ttgccatagttacttatttg

SEQ ID NO: 62424 - DNA, 20 bp, Artificial Sequence
  Description of Artificial Sequence: Synthetic oligonucleotide
  Target: LAMA2; (-) strand; PAM type: NRG; PAM sequence: TAG
gcactttcagtgagttgcca

SEQ ID NO: 62425 - DNA, 20 bp, Artificial Sequence
  Description of Artificial Sequence: Synthetic oligonucleotide
  Target: LAMA2; (-) strand; PAM type: NRG; PAM sequence: GAG
ggtagctaagcactttcagt

SEQ ID NO: 62426 - DNA, 20 bp, Artificial Sequence
  Description of Artificial Sequence: Synthetic oligonucleotide
  Target: LAMA2; (-) strand; PAM type: NRG; PAM sequence: CAG
ccatggtagctaagcacttt

SEQ ID NO: 62427 - DNA, 20 bp, Artificial Sequence
  Description of Artificial Sequence: Synthetic oligonucleotide
  Target: LAMA2; (-) strand; PAM type: NRG; PAM sequence: AAG
catccactcccatggtagct

SEQ ID NO: 62428 - DNA, 20 bp, Artificial Sequence
  Description of Artificial Sequence: Synthetic oligonucleotide
  Target: LAMA2; (-) strand; PAM type: NRG; PAM sequence: TAG
aactccatccactcccatgg

SEQ ID NO: 62429 - DNA, 20 bp, Artificial Sequence
  Description of Artificial Sequence: Synthetic oligonucleotide
  Target: LAMA2; (-) strand; PAM type: NRG; PAM sequence: TGG
acgaactccatccactccca

SEQ ID NO: 62430 - DNA, 20 bp, Artificial Sequence
  Description of Artificial Sequence: Synthetic oligonucleotide
  Target: LAMA2; (-) strand; PAM type: NRG; PAM sequence: AAG
cccacagcattgtccccaca

SEQ ID NO: 62431 - DNA, 20 bp, Artificial Sequence
  Description of Artificial Sequence: Synthetic oligonucleotide
  Target: LAMA2; (-) strand; PAM type: NRG; PAM sequence: CAG
atgggggcatagaggtccca

SEQ ID NO: 62432 - DNA, 20 bp, Artificial Sequence
  Description of Artificial Sequence: Synthetic oligonucleotide
  Target: LAMA2; (-) strand; PAM type: NRG; PAM sequence: AGG
ccttatggatgggggcatag

SEQ ID NO: 62433 - DNA, 20 bp, Artificial Sequence
  Description of Artificial Sequence: Synthetic oligonucleotide
  Target: LAMA2; (-) strand; PAM type: NRG; PAM sequence: GAG
cccttatggatgggggcata

SEQ ID NO: 62434 - DNA, 20 bp, Artificial Sequence
  Description of Artificial Sequence: Synthetic oligonucleotide
  Target: LAMA2; (-) strand; PAM type: NRG; PAM sequence: TAG
gtcccttatggatgggggca

SEQ ID NO: 62435 - DNA, 20 bp, Artificial Sequence
  Description of Artificial Sequence: Synthetic oligonucleotide
  Target: LAMA2; (-) strand; PAM type: NRG; PAM sequence: GGG
ccagggtcccttatggatgg

SEQ ID NO: 62436 - DNA, 20 bp, Artificial Sequence
  Description of Artificial Sequence: Synthetic oligonucleotide
  Target: LAMA2; (-) strand; PAM type: NRG; PAM sequence: GGG
cccagggtcccttatggatg

SEQ ID NO: 62437 - DNA, 20 bp, Artificial Sequence
  Description of Artificial Sequence: Synthetic oligonucleotide
  Target: LAMA2; (-) strand; PAM type: NRG; PAM sequence: GGG
tcccagggtcccttatggat

SEQ ID NO: 62438 - DNA, 20 bp, Artificial Sequence
  Description of Artificial Sequence: Synthetic oligonucleotide
  Target: LAMA2; (-) strand; PAM type: NRG; PAM sequence: TGG
ttcccagggtcccttatgga

SEQ ID NO: 62439 - DNA, 20 bp, Artificial Sequence
  Description of Artificial Sequence: Synthetic oligonucleotide
  Target: LAMA2; (-) strand; PAM type: NRG; PAM sequence: TGG
gcaattcccagggtccctta

SEQ ID NO: 62440 - DNA, 20 bp, Artificial Sequence
  Description of Artificial Sequence: Synthetic oligonucleotide
  Target: LAMA2; (-) strand; PAM type: NRG; PAM sequence: GGG
ctgctagaaggcaattccca

SEQ ID NO: 62441 - DNA, 20 bp, Artificial Sequence
  Description of Artificial Sequence: Synthetic oligonucleotide
  Target: LAMA2; (-) strand; PAM type: NRG; PAM sequence: AGG
tctgctagaaggcaattccc

SEQ ID NO: 62442 - DNA, 20 bp, Artificial Sequence
  Description of Artificial Sequence: Synthetic oligonucleotide
  Target: LAMA2; (-) strand; PAM type: NRG; PAM sequence: CAG
ctctgctagaaggcaattcc

SEQ ID NO: 62443 - DNA, 20 bp, Artificial Sequence
  Description of Artificial Sequence: Synthetic oligonucleotide
  Target: LAMA2; (-) strand; PAM type: NRG; PAM sequence: AGG
gagttggcctctctgctaga

SEQ ID NO: 62444 - DNA, 20 bp, Artificial Sequence
  Description of Artificial Sequence: Synthetic oligonucleotide
  Target: LAMA2; (-) strand; PAM type: NRG; PAM sequence: AAG
tgagttggcctctctgctag

SEQ ID NO: 62445 - DNA, 20 bp, Artificial Sequence
  Description of Artificial Sequence: Synthetic oligonucleotide
  Target: LAMA2; (-) strand; PAM type: NRG; PAM sequence: TAG
atgtgagttggcctctctgc

SEQ ID NO: 62446 - DNA, 20 bp, Artificial Sequence
  Description of Artificial Sequence: Synthetic oligonucleotide
  Target: LAMA2; (-) strand; PAM type: NRG; PAM sequence: TGG
tacttatttgaaatgtgagt

SEQ ID NO: 62447 - DNA, 20 bp, Artificial Sequence
  Description of Artificial Sequence: Synthetic oligonucleotide
  Target: LAMA2; (-) strand; PAM type: NRG; PAM sequence: GAG
aaaatacttatttgaaatgt

SEQ ID NO: 62448 - DNA, 20 bp, Artificial Sequence
  Description of Artificial Sequence: Synthetic oligonucleotide
  Target: LAMA2; (-) strand; PAM type: NRG; PAM sequence: GGG
cttagaaaagcagttgagga

SEQ ID NO: 62449 - DNA, 20 bp, Artificial Sequence
  Description of Artificial Sequence: Synthetic oligonucleotide
  Target: LAMA2; (-) strand; PAM type: NRG; PAM sequence: AGG
gcttagaaaagcagttgagg

SEQ ID NO: 62450 - DNA, 20 bp, Artificial Sequence
  Description of Artificial Sequence: Synthetic oligonucleotide
  Target: LAMA2; (-) strand; PAM type: NRG; PAM sequence: GAG
agcttagaaaagcagttgag

SEQ ID NO: 62451 - DNA, 20 bp, Artificial Sequence
  Description of Artificial Sequence: Synthetic oligonucleotide
  Target: LAMA2; (-) strand; PAM type: NRG; PAM sequence: AGG
aaagcttagaaaagcagttg

SEQ ID NO: 62452 - DNA, 20 bp, Artificial Sequence
  Description of Artificial Sequence: Synthetic oligonucleotide
  Target: LAMA2; (-) strand; PAM type: NRG; PAM sequence: GAG
caaagcttagaaaagcagtt

SEQ ID NO: 62453 - DNA, 20 bp, Artificial Sequence
  Description of Artificial Sequence: Synthetic oligonucleotide
  Target: LAMA2; (-) strand; PAM type: NRG; PAM sequence: CAG
atgtgcaaagcttagaaaag

SEQ ID NO: 62454 - DNA, 20 bp, Artificial Sequence
  Description of Artificial Sequence: Synthetic oligonucleotide
  Target: LAMA2; (-) strand; PAM type: NRG; PAM sequence: AAG
ttaatgtgcaaagcttagaa

SEQ ID NO: 62455 - DNA, 20 bp, Artificial Sequence
  Description of Artificial Sequence: Synthetic oligonucleotide
  Target: LAMA2; (-) strand; PAM type: NRG; PAM sequence: TAG
cagtgttaatgtgcaaagct

SEQ ID NO: 62456 - DNA, 20 bp, Artificial Sequence
  Description of Artificial Sequence: Synthetic oligonucleotide
  Target: LAMA2; (-) strand; PAM type: NRG; PAM sequence: AAG
taggtcagtgttaatgtgca

SEQ ID NO: 62457 - DNA, 20 bp, Artificial Sequence
  Description of Artificial Sequence: Synthetic oligonucleotide
  Target: LAMA2; (-) strand; PAM type: NRG; PAM sequence: CAG
ttttaaatggtgcactaggt

SEQ ID NO: 62458 - DNA, 20 bp, Artificial Sequence
  Description of Artificial Sequence: Synthetic oligonucleotide
  Target: LAMA2; (-) strand; PAM type: NRG; PAM sequence: AGG
ggacttttaaatggtgcact

SEQ ID NO: 62459 - DNA, 20 bp, Artificial Sequence
  Description of Artificial Sequence: Synthetic oligonucleotide
  Target: LAMA2; (-) strand; PAM type: NRG; PAM sequence: TAG
aggacttttaaatggtgcac

SEQ ID NO: 62460 - DNA, 20 bp, Artificial Sequence
  Description of Artificial Sequence: Synthetic oligonucleotide
  Target: LAMA2; (-) strand; PAM type: NRG; PAM sequence: TGG
atatatttaggacttttaaa

SEQ ID NO: 62461 - DNA, 20 bp, Artificial Sequence
  Description of Artificial Sequence: Synthetic oligonucleotide
  Target: LAMA2; (-) strand; PAM type: NRG; PAM sequence: AGG
ggcgactgtgtgatatattt

SEQ ID NO: 62462 - DNA, 20 bp, Artificial Sequence
  Description of Artificial Sequence: Synthetic oligonucleotide
  Target: LAMA2; (-) strand; PAM type: NRG; PAM sequence: TAG
tggcgactgtgtgatatatt

SEQ ID NO: 62463 - DNA, 20 bp, Artificial Sequence
  Description of Artificial Sequence: Synthetic oligonucleotide
  Target: LAMA2; (-) strand; PAM type: NRG; PAM sequence: TGG
accactcaccttgattgggc

SEQ ID NO: 62464 - DNA, 20 bp, Artificial Sequence
  Description of Artificial Sequence: Synthetic oligonucleotide
  Target: LAMA2; (-) strand; PAM type: NRG; PAM sequence: GGG
tctgaccactcaccttgatt

SEQ ID NO: 62465 - DNA, 20 bp, Artificial Sequence
  Description of Artificial Sequence: Synthetic oligonucleotide
  Target: LAMA2; (-) strand; PAM type: NRG; PAM sequence: TGG
gtctgaccactcaccttgat

SEQ ID NO: 62466 - DNA, 20 bp, Artificial Sequence
  Description of Artificial Sequence: Synthetic oligonucleotide
  Target: LAMA2; (-) strand; PAM type: NRG; PAM sequence: TGG
gcatactgtgcacagcatgc

SEQ ID NO: 62467 - DNA, 20 bp, Artificial Sequence
  Description of Artificial Sequence: Synthetic oligonucleotide
  Target: LAMA2; (-) strand; PAM type: NRG; PAM sequence: CAG
gccaactagcatactgtgca

SEQ ID NO: 62468 - DNA, 20 bp, Artificial Sequence
  Description of Artificial Sequence: Synthetic oligonucleotide
  Target: LAMA2; (-) strand; PAM type: NRG; PAM sequence: TAG
tgtattactctaaggccaac

SEQ ID NO: 62469 - DNA, 20 bp, Artificial Sequence
  Description of Artificial Sequence: Synthetic oligonucleotide
  Target: LAMA2; (-) strand; PAM type: NRG; PAM sequence: AGG
gtgtaccctgtattactcta

SEQ ID NO: 62470 - DNA, 20 bp, Artificial Sequence
  Description of Artificial Sequence: Synthetic oligonucleotide
  Target: LAMA2; (-) strand; PAM type: NRG; PAM sequence: AAG
ggtgtaccctgtattactct

SEQ ID NO: 62471 - DNA, 20 bp, Artificial Sequence
  Description of Artificial Sequence: Synthetic oligonucleotide
  Target: LAMA2; (-) strand; PAM type: NRG; PAM sequence: TGG
cctggttaactggacataaa

SEQ ID NO: 62472 - DNA, 20 bp, Artificial Sequence
  Description of Artificial Sequence: Synthetic oligonucleotide
  Target: LAMA2; (-) strand; PAM type: NRG; PAM sequence: TGG
tagagggtcacctggttaac

SEQ ID NO: 62473 - DNA, 20 bp, Artificial Sequence
  Description of Artificial Sequence: Synthetic oligonucleotide
  Target: LAMA2; (-) strand; PAM type: NRG; PAM sequence: TGG
aaagcaactagagggtcacc

SEQ ID NO: 62474 - DNA, 20 bp, Artificial Sequence
  Description of Artificial Sequence: Synthetic oligonucleotide
  Target: LAMA2; (-) strand; PAM type: NRG; PAM sequence: GGG
tgcttaataaagcaactaga

SEQ ID NO: 62475 - DNA, 20 bp, Artificial Sequence
  Description of Artificial Sequence: Synthetic oligonucleotide
  Target: LAMA2; (-) strand; PAM type: NRG; PAM sequence: AGG
gtgcttaataaagcaactag

SEQ ID NO: 62476 - DNA, 20 bp, Artificial Sequence
  Description of Artificial Sequence: Synthetic oligonucleotide
  Target: LAMA2; (-) strand; PAM type: NRG; PAM sequence: GAG
tgtgcttaataaagcaacta

SEQ ID NO: 62477 - DNA, 20 bp, Artificial Sequence
  Description of Artificial Sequence: Synthetic oligonucleotide
  Target: LAMA2; (-) strand; PAM type: NRG; PAM sequence: TAG
cctgtgcttaataaagcaac

SEQ ID NO: 62478 - DNA, 20 bp, Artificial Sequence
  Description of Artificial Sequence: Synthetic oligonucleotide
  Target: LAMA2; (-) strand; PAM type: NRG; PAM sequence: AAG
agtcaagcctgtgcttaata

SEQ ID NO: 62479 - DNA, 20 bp, Artificial Sequence
  Description of Artificial Sequence: Synthetic oligonucleotide
  Target: LAMA2; (-) strand; PAM type: NRG; PAM sequence: AAG
ttgtgacctgtttgacagtc

SEQ ID NO: 62480 - DNA, 20 bp, Artificial Sequence
  Description of Artificial Sequence: Synthetic oligonucleotide
  Target: LAMA2; (-) strand; PAM type: NRG; PAM sequence: CAG
cctccttgtgacctgtttga

SEQ ID NO: 62481 - DNA, 20 bp, Artificial Sequence
  Description of Artificial Sequence: Synthetic oligonucleotide
  Target: LAMA2; (-) strand; PAM type: NRG; PAM sequence: AGG
aactcttttcatacgatgca

SEQ ID NO: 62482 - DNA, 20 bp, Artificial Sequence
  Description of Artificial Sequence: Synthetic oligonucleotide
  Target: LAMA2; (-) strand; PAM type: NRG; PAM sequence: AAG
caactcttttcatacgatgc

SEQ ID NO: 62483 - DNA, 20 bp, Artificial Sequence
  Description of Artificial Sequence: Synthetic oligonucleotide
  Target: LAMA2; (-) strand; PAM type: NRG; PAM sequence: AAG
agagggtattctgtgatttc

SEQ ID NO: 62484 - DNA, 20 bp, Artificial Sequence
  Description of Artificial Sequence: Synthetic oligonucleotide
  Target: LAMA2; (-) strand; PAM type: NRG; PAM sequence: GGG
ggattttagcaattaataga

SEQ ID NO: 62485 - DNA, 20 bp, Artificial Sequence
  Description of Artificial Sequence: Synthetic oligonucleotide
  Target: LAMA2; (-) strand; PAM type: NRG; PAM sequence: AGG
tggattttagcaattaatag

SEQ ID NO: 62486 - DNA, 20 bp, Artificial Sequence
  Description of Artificial Sequence: Synthetic oligonucleotide
  Target: LAMA2; (-) strand; PAM type: NRG; PAM sequence: GAG
ttggattttagcaattaata

SEQ ID NO: 62487 - DNA, 20 bp, Artificial Sequence
  Description of Artificial Sequence: Synthetic oligonucleotide
  Target: LAMA2; (-) strand; PAM type: NRG; PAM sequence: TAG
aattggattttagcaattaa

SEQ ID NO: 62488 - DNA, 20 bp, Artificial Sequence
  Description of Artificial Sequence: Synthetic oligonucleotide
  Target: LAMA2; (-) strand; PAM type: NRG; PAM sequence: TAG
ttcaggtggaaattggattt

SEQ ID NO: 62489 - DNA, 20 bp, Artificial Sequence
  Description of Artificial Sequence: Synthetic oligonucleotide
  Target: LAMA2; (-) strand; PAM type: NRG; PAM sequence: TGG
gcatgtcttcaggtggaaat

SEQ ID NO: 62490 - DNA, 20 bp, Artificial Sequence
  Description of Artificial Sequence: Synthetic oligonucleotide
  Target: LAMA2; (-) strand; PAM type: NRG; PAM sequence: TGG
catggaggcatgtcttcagg

SEQ ID NO: 62491 - DNA, 20 bp, Artificial Sequence
  Description of Artificial Sequence: Synthetic oligonucleotide
  Target: LAMA2; (-) strand; PAM type: NRG; PAM sequence: AGG
agtcatggaggcatgtcttc

SEQ ID NO: 62492 - DNA, 20 bp, Artificial Sequence
  Description of Artificial Sequence: Synthetic oligonucleotide
  Target: LAMA2; (-) strand; PAM type: NRG; PAM sequence: CAG
gagtcatggaggcatgtctt

SEQ ID NO: 62493 - DNA, 20 bp, Artificial Sequence
  Description of Artificial Sequence: Synthetic oligonucleotide
  Target: LAMA2; (-) strand; PAM type: NRG; PAM sequence: AGG
atttttctcacgagtcatgg

SEQ ID NO: 62494 - DNA, 20 bp, Artificial Sequence
  Description of Artificial Sequence: Synthetic oligonucleotide
  Target: LAMA2; (-) strand; PAM type: NRG; PAM sequence: GAG
gatttttctcacgagtcatg

SEQ ID NO: 62495 - DNA, 20 bp, Artificial Sequence
  Description of Artificial Sequence: Synthetic oligonucleotide
  Target: LAMA2; (-) strand; PAM type: NRG; PAM sequence: TGG
ttgatttttctcacgagtca

SEQ ID NO: 62496 - DNA, 20 bp, Artificial Sequence
  Description of Artificial Sequence: Synthetic oligonucleotide
  Target: LAMA2; (-) strand; PAM type: NRG; PAM sequence: GAG
aaataattgatttttctcac

SEQ ID NO: 62497 - DNA, 20 bp, Artificial Sequence
  Description of Artificial Sequence: Synthetic oligonucleotide
  Target: LAMA2; (-) strand; PAM type: NRG; PAM sequence: CAG
aggtctgagtgtttgagttg

SEQ ID NO: 62498 - DNA, 20 bp, Artificial Sequence
  Description of Artificial Sequence: Synthetic oligonucleotide
  Target: LAMA2; (-) strand; PAM type: NRG; PAM sequence: GAG
tctaataggtctgagtgttt

SEQ ID NO: 62499 - DNA, 20 bp, Artificial Sequence
  Description of Artificial Sequence: Synthetic oligonucleotide
  Target: LAMA2; (-) strand; PAM type: NRG; PAM sequence: GAG
ctagatactctaataggtct

SEQ ID NO: 62500 - DNA, 20 bp, Artificial Sequence
  Description of Artificial Sequence: Synthetic oligonucleotide
  Target: LAMA2; (-) strand; PAM type: NRG; PAM sequence: AGG
atgctgctagatactctaat

SEQ ID NO: 62501 - DNA, 20 bp, Artificial Sequence
  Description of Artificial Sequence: Synthetic oligonucleotide
  Target: LAMA2; (-) strand; PAM type: NRG; PAM sequence: TAG
catgctgctagatactctaa

SEQ ID NO: 62502 - DNA, 20 bp, Artificial Sequence
  Description of Artificial Sequence: Synthetic oligonucleotide
  Target: LAMA2; (-) strand; PAM type: NRG; PAM sequence: TAG
tctatctcctggcatgctgc

SEQ ID NO: 62503 - DNA, 20 bp, Artificial Sequence
  Description of Artificial Sequence: Synthetic oligonucleotide
  Target: LAMA2; (-) strand; PAM type: NRG; PAM sequence: TGG
ttgcagctcagtctatctcc

SEQ ID NO: 62504 - DNA, 20 bp, Artificial Sequence
  Description of Artificial Sequence: Synthetic oligonucleotide
  Target: LAMA2; (-) strand; PAM type: NRG; PAM sequence: CAG
tccatatttatcttgcagct

SEQ ID NO: 62505 - DNA, 20 bp, Artificial Sequence
  Description of Artificial Sequence: Synthetic oligonucleotide
  Target: LAMA2; (-) strand; PAM type: NRG; PAM sequence: CAG
atggttccatatttatcttg

SEQ ID NO: 62506 - DNA, 20 bp, Artificial Sequence
  Description of Artificial Sequence: Synthetic oligonucleotide
  Target: LAMA2; (-) strand; PAM type: NRG; PAM sequence: TGG
gaaatttatattccacaaga

SEQ ID NO: 62507 - DNA, 20 bp, Artificial Sequence
  Description of Artificial Sequence: Synthetic oligonucleotide
  Target: LAMA2; (-) strand; PAM type: NRG; PAM sequence: AAG
aactgaaatttatattccac

SEQ ID NO: 62508 - DNA, 20 bp, Artificial Sequence
  Description of Artificial Sequence: Synthetic oligonucleotide
  Target: LAMA2; (-) strand; PAM type: NRG; PAM sequence: CAG
gaaaactgcatgtgaacttt

SEQ ID NO: 62509 - DNA, 20 bp, Artificial Sequence
  Description of Artificial Sequence: Synthetic oligonucleotide
  Target: LAMA2; (-) strand; PAM type: NRG; PAM sequence: GGG
aggaaatatattaactttgg

SEQ ID NO: 62510 - DNA, 20 bp, Artificial Sequence
  Description of Artificial Sequence: Synthetic oligonucleotide
  Target: LAMA2; (-) strand; PAM type: NRG; PAM sequence: GGG
caggaaatatattaactttg

SEQ ID NO: 62511 - DNA, 20 bp, Artificial Sequence
  Description of Artificial Sequence: Synthetic oligonucleotide
  Target: LAMA2; (-) strand; PAM type: NRG; PAM sequence: GGG
ccaggaaatatattaacttt

SEQ ID NO: 62512 - DNA, 20 bp, Artificial Sequence
  Description of Artificial Sequence: Synthetic oligonucleotide
  Target: LAMA2; (-) strand; PAM type: NRG; PAM sequence: TGG
cccaggaaatatattaactt

SEQ ID NO: 62513 - DNA, 20 bp, Artificial Sequence
  Description of Artificial Sequence: Synthetic oligonucleotide
  Target: LAMA2; (-) strand; PAM type: NRG; PAM sequence: AGG
aagagtgtgaatgagtaccc

SEQ ID NO: 62514 - DNA, 20 bp, Artificial Sequence
  Description of Artificial Sequence: Synthetic oligonucleotide
  Target: LAMA2; (-) strand; PAM type: NRG; PAM sequence: CAG
gaagagtgtgaatgagtacc

SEQ ID NO: 62515 - DNA, 20 bp, Artificial Sequence
  Description of Artificial Sequence: Synthetic oligonucleotide
  Target: LAMA2; (-) strand; PAM type: NRG; PAM sequence: GAG
attggcagaagagtgtgaat

SEQ ID NO: 62516 - DNA, 20 bp, Artificial Sequence
  Description of Artificial Sequence: Synthetic oligonucleotide
  Target: LAMA2; (-) strand; PAM type: NRG; PAM sequence: GAG
cattaatactattggcagaa

SEQ ID NO: 62517 - DNA, 20 bp, Artificial Sequence
  Description of Artificial Sequence: Synthetic oligonucleotide
  Target: LAMA2; (-) strand; PAM type: NRG; PAM sequence: AAG
agcattaatactattggcag

SEQ ID NO: 62518 - DNA, 20 bp, Artificial Sequence
  Description of Artificial Sequence: Synthetic oligonucleotide
  Target: LAMA2; (-) strand; PAM type: NRG; PAM sequence: CAG
caaagcattaatactattgg

SEQ ID NO: 62519 - DNA, 20 bp, Artificial Sequence
  Description of Artificial Sequence: Synthetic oligonucleotide
  Target: LAMA2; (-) strand; PAM type: NRG; PAM sequence: TGG
tcccaaagcattaatactat

SEQ ID NO: 62520 - DNA, 20 bp, Artificial Sequence
  Description of Artificial Sequence: Synthetic oligonucleotide
  Target: LAMA2; (-) strand; PAM type: NRG; PAM sequence: AAG
cacttctcaaacatttccca

SEQ ID NO: 62521 - DNA, 20 bp, Artificial Sequence
  Description of Artificial Sequence: Synthetic oligonucleotide
  Target: LAMA2; (-) strand; PAM type: NRG; PAM sequence: TGG
acccacaggctcatttccac

SEQ ID NO: 62522 - DNA, 20 bp, Artificial Sequence
  Description of Artificial Sequence: Synthetic oligonucleotide
  Target: LAMA2; (-) strand; PAM type: NRG; PAM sequence: AGG
aaatgaatcagtgaacccac

SEQ ID NO: 62523 - DNA, 20 bp, Artificial Sequence
  Description of Artificial Sequence: Synthetic oligonucleotide
  Target: LAMA2; (-) strand; PAM type: NRG; PAM sequence: CAG
taaatgaatcagtgaaccca

SEQ ID NO: 62524 - DNA, 20 bp, Artificial Sequence
  Description of Artificial Sequence: Synthetic oligonucleotide
  Target: LAMA2; (-) strand; PAM type: NRG; PAM sequence: CAG
gaatgaatggataaatgaat

SEQ ID NO: 62525 - DNA, 20 bp, Artificial Sequence
  Description of Artificial Sequence: Synthetic oligonucleotide
  Target: LAMA2; (-) strand; PAM type: NRG; PAM sequence: TGG
tgaaggaataaatgaatgaa

SEQ ID NO: 62526 - DNA, 20 bp, Artificial Sequence
  Description of Artificial Sequence: Synthetic oligonucleotide
  Target: LAMA2; (-) strand; PAM type: NRG; PAM sequence: AGG
gaaagctatatactgtatga

SEQ ID NO: 62527 - DNA, 20 bp, Artificial Sequence
  Description of Artificial Sequence: Synthetic oligonucleotide
  Target: LAMA2; (-) strand; PAM type: NRG; PAM sequence: AAG
tgaaagctatatactgtatg

SEQ ID NO: 62528 - DNA, 20 bp, Artificial Sequence
  Description of Artificial Sequence: Synthetic oligonucleotide
  Target: LAMA2; (-) strand; PAM type: NRG; PAM sequence: AAG
agtccataaaagtggcttga

SEQ ID NO: 62529 - DNA, 20 bp, Artificial Sequence
  Description of Artificial Sequence: Synthetic oligonucleotide
  Target: LAMA2; (-) strand; PAM type: NRG; PAM sequence: TGG
aataaaatagtccataaaag

SEQ ID NO: 62530 - DNA, 20 bp, Artificial Sequence
  Description of Artificial Sequence: Synthetic oligonucleotide
  Target: LAMA2; (-) strand; PAM type: NRG; PAM sequence: AAG
gttaataaaatagtccataa

SEQ ID NO: 62531 - DNA, 20 bp, Artificial Sequence
  Description of Artificial Sequence: Synthetic oligonucleotide
  Target: LAMA2; (-) strand; PAM type: NRG; PAM sequence: TAG
gatattcaaagttaataaaa

SEQ ID NO: 62532 - DNA, 20 bp, Artificial Sequence
  Description of Artificial Sequence: Synthetic oligonucleotide
  Target: LAMA2; (-) strand; PAM type: NRG; PAM sequence: AAG
tttattggttttgatattca

SEQ ID NO: 62533 - DNA, 20 bp, Artificial Sequence
  Description of Artificial Sequence: Synthetic oligonucleotide
  Target: LAMA2; (-) strand; PAM type: NRG; PAM sequence: TGG
agacacaaagtctattttat

SEQ ID NO: 62534 - DNA, 20 bp, Artificial Sequence
  Description of Artificial Sequence: Synthetic oligonucleotide
  Target: LAMA2; (-) strand; PAM type: NRG; PAM sequence: AAG
tgtgtcacaaagcagacaca

SEQ ID NO: 62535 - DNA, 20 bp, Artificial Sequence
  Description of Artificial Sequence: Synthetic oligonucleotide
  Target: LAMA2; (-) strand; PAM type: NRG; PAM sequence: CAG
cattaaattgtgtcacaaag

SEQ ID NO: 62536 - DNA, 20 bp, Artificial Sequence
  Description of Artificial Sequence: Synthetic oligonucleotide
  Target: LAMA2; (-) strand; PAM type: NRG; PAM sequence: AAG
actcattaaattgtgtcaca

SEQ ID NO: 62537 - DNA, 20 bp, Artificial Sequence
  Description of Artificial Sequence: Synthetic oligonucleotide
  Target: LAMA2; (-) strand; PAM type: NRG; PAM sequence: GAG
tccagcctgggcaacagagt

SEQ ID NO: 62538 - DNA, 20 bp, Artificial Sequence
  Description of Artificial Sequence: Synthetic oligonucleotide
  Target: LAMA2; (-) strand; PAM type: NRG; PAM sequence: GAG
gcactccagcctgggcaaca

SEQ ID NO: 62539 - DNA, 20 bp, Artificial Sequence
  Description of Artificial Sequence: Synthetic oligonucleotide
  Target: LAMA2; (-) strand; PAM type: NRG; PAM sequence: CAG
ctgcactccagcctgggcaa

SEQ ID NO: 62540 - DNA, 20 bp, Artificial Sequence
  Description of Artificial Sequence: Synthetic oligonucleotide
  Target: LAMA2; (-) strand; PAM type: NRG; PAM sequence: GGG
gtgccactgcactccagcct

SEQ ID NO: 62541 - DNA, 20 bp, Artificial Sequence
  Description of Artificial Sequence: Synthetic oligonucleotide
  Target: LAMA2; (-) strand; PAM type: NRG; PAM sequence: TGG
cgtgccactgcactccagcc

SEQ ID NO: 62542 - DNA, 20 bp, Artificial Sequence
  Description of Artificial Sequence: Synthetic oligonucleotide
  Target: LAMA2; (-) strand; PAM type: NRG; PAM sequence: CAG
aagatcgtgccactgcactc

SEQ ID NO: 62543 - DNA, 20 bp, Artificial Sequence
  Description of Artificial Sequence: Synthetic oligonucleotide
  Target: LAMA2; (-) strand; PAM type: NRG; PAM sequence: AAG
ggcggagcttgcagtgaacc

SEQ ID NO: 62544 - DNA, 20 bp, Artificial Sequence
  Description of Artificial Sequence: Synthetic oligonucleotide
  Target: LAMA2; (-) strand; PAM type: NRG; PAM sequence: CAG
aacccgtgaggcggagcttg

SEQ ID NO: 62545 - DNA, 20 bp, Artificial Sequence
  Description of Artificial Sequence: Synthetic oligonucleotide
  Target: LAMA2; (-) strand; PAM type: NRG; PAM sequence: GAG
tggcgtgaacccgtgaggcg

SEQ ID NO: 62546 - DNA, 20 bp, Artificial Sequence
  Description of Artificial Sequence: Synthetic oligonucleotide
  Target: LAMA2; (-) strand; PAM type: NRG; PAM sequence: CGG
aatggcgtgaacccgtgagg

SEQ ID NO: 62547 - DNA, 20 bp, Artificial Sequence
  Description of Artificial Sequence: Synthetic oligonucleotide
  Target: LAMA2; (-) strand; PAM type: NRG; PAM sequence: AGG
gagaatggcgtgaacccgtg

SEQ ID NO: 62548 - DNA, 20 bp, Artificial Sequence
  Description of Artificial Sequence: Synthetic oligonucleotide
  Target: LAMA2; (-) strand; PAM type: NRG; PAM sequence: GAG
ggagaatggcgtgaacccgt

SEQ ID NO: 62549 - DNA, 20 bp, Artificial Sequence
  Description of Artificial Sequence: Synthetic oligonucleotide
  Target: LAMA2; (-) strand; PAM type: NRG; PAM sequence: TGG
cggaggccgaggcaggagaa

SEQ ID NO: 62550 - DNA, 20 bp, Artificial Sequence
  Description of Artificial Sequence: Synthetic oligonucleotide
  Target: LAMA2; (-) strand; PAM type: NRG; PAM sequence: GAG
tactccggaggccgaggcag

SEQ ID NO: 62551 - DNA, 20 bp, Artificial Sequence
  Description of Artificial Sequence: Synthetic oligonucleotide
  Target: LAMA2; (-) strand; PAM type: NRG; PAM sequence: AGG
gctactccggaggccgaggc

SEQ ID NO: 62552 - DNA, 20 bp, Artificial Sequence
  Description of Artificial Sequence: Synthetic oligonucleotide
  Target: LAMA2; (-) strand; PAM type: NRG; PAM sequence: CAG
agctactccggaggccgagg

SEQ ID NO: 62553 - DNA, 20 bp, Artificial Sequence
  Description of Artificial Sequence: Synthetic oligonucleotide
  Target: LAMA2; (-) strand; PAM type: NRG; PAM sequence: AGG
cccagctactccggaggccg

SEQ ID NO: 62554 - DNA, 20 bp, Artificial Sequence
  Description of Artificial Sequence: Synthetic oligonucleotide
  Target: LAMA2; (-) strand; PAM type: NRG; PAM sequence: GAG
tcccagctactccggaggcc

SEQ ID NO: 62555 - DNA, 20 bp, Artificial Sequence
  Description of Artificial Sequence: Synthetic oligonucleotide
  Target: LAMA2; (-) strand; PAM type: NRG; PAM sequence: AGG
tgtagtcccagctactccgg

SEQ ID NO: 62556 - DNA, 20 bp, Artificial Sequence
  Description of Artificial Sequence: Synthetic oligonucleotide
  Target: LAMA2; (-) strand; PAM type: NRG; PAM sequence: GAG
ctgtagtcccagctactccg

SEQ ID NO: 62557 - DNA, 20 bp, Artificial Sequence
  Description of Artificial Sequence: Synthetic oligonucleotide
  Target: LAMA2; (-) strand; PAM type: NRG; PAM sequence: CGG
gcctgtagtcccagctactc

SEQ ID NO: 62558 - DNA, 20 bp, Artificial Sequence
  Description of Artificial Sequence: Synthetic oligonucleotide
  Target: LAMA2; (-) strand; PAM type: NRG; PAM sequence: CAG
gtggtgggcgcctgtagtcc

SEQ ID NO: 62559 - DNA, 20 bp, Artificial Sequence
  Description of Artificial Sequence: Synthetic oligonucleotide
  Target: LAMA2; (-) strand; PAM type: NRG; PAM sequence: TAG
ggcatggtggtgggcgcctg

SEQ ID NO: 62560 - DNA, 20 bp, Artificial Sequence
  Description of Artificial Sequence: Synthetic oligonucleotide
  Target: LAMA2; (-) strand; PAM type: NRG; PAM sequence: GGG
aattagctgggcatggtggt

SEQ ID NO: 62561 - DNA, 20 bp, Artificial Sequence
  Description of Artificial Sequence: Synthetic oligonucleotide
  Target: LAMA2; (-) strand; PAM type: NRG; PAM sequence: TGG
aaattagctgggcatggtgg

SEQ ID NO: 62562 - DNA, 20 bp, Artificial Sequence
  Description of Artificial Sequence: Synthetic oligonucleotide
  Target: LAMA2; (-) strand; PAM type: NRG; PAM sequence: TGG
aaaaaattagctgggcatgg

SEQ ID NO: 62563 - DNA, 20 bp, Artificial Sequence
  Description of Artificial Sequence: Synthetic oligonucleotide
  Target: LAMA2; (-) strand; PAM type: NRG; PAM sequence: TGG
acaaaaaaattagctgggca

SEQ ID NO: 62564 - DNA, 20 bp, Artificial Sequence
  Description of Artificial Sequence: Synthetic oligonucleotide
  Target: LAMA2; (-) strand; PAM type: NRG; PAM sequence: GGG
aaaatacaaaaaaattagct

SEQ ID NO: 62565 - DNA, 20 bp, Artificial Sequence
  Description of Artificial Sequence: Synthetic oligonucleotide
  Target: LAMA2; (-) strand; PAM type: NRG; PAM sequence: TGG
aaaaatacaaaaaaattagc

SEQ ID NO: 62566 - DNA, 20 bp, Artificial Sequence
  Description of Artificial Sequence: Synthetic oligonucleotide
  Target: LAMA2; (-) strand; PAM type: NRG; PAM sequence: TAG
tactaaaaatacaaaaaaat

SEQ ID NO: 62567 - DNA, 20 bp, Artificial Sequence
  Description of Artificial Sequence: Synthetic oligonucleotide
  Target: LAMA2; (-) strand; PAM type: NRG; PAM sequence: CAG
caagaccatcctggctaaca

SEQ ID NO: 62568 - DNA, 20 bp, Artificial Sequence
  Description of Artificial Sequence: Synthetic oligonucleotide
  Target: LAMA2; (-) strand; PAM type: NRG; PAM sequence: TGG
tcaggagatcaagaccatcc

SEQ ID NO: 62569 - DNA, 20 bp, Artificial Sequence
  Description of Artificial Sequence: Synthetic oligonucleotide
  Target: LAMA2; (-) strand; PAM type: NRG; PAM sequence: AAG
gatcacgaggtcaggagatc

SEQ ID NO: 62570 - DNA, 20 bp, Artificial Sequence
  Description of Artificial Sequence: Synthetic oligonucleotide
  Target: LAMA2; (-) strand; PAM type: NRG; PAM sequence: GAG
caggcggatcacgaggtcag

SEQ ID NO: 62571 - DNA, 20 bp, Artificial Sequence
  Description of Artificial Sequence: Synthetic oligonucleotide
  Target: LAMA2; (-) strand; PAM type: NRG; PAM sequence: AGG
ggcaggcggatcacgaggtc

SEQ ID NO: 62572 - DNA, 20 bp, Artificial Sequence
  Description of Artificial Sequence: Synthetic oligonucleotide
  Target: LAMA2; (-) strand; PAM type: NRG; PAM sequence: CAG
aggcaggcggatcacgaggt

SEQ ID NO: 62573 - DNA, 20 bp, Artificial Sequence
  Description of Artificial Sequence: Synthetic oligonucleotide
  Target: LAMA2; (-) strand; PAM type: NRG; PAM sequence: AGG
gcagaggcaggcggatcacg

SEQ ID NO: 62574 - DNA, 20 bp, Artificial Sequence
  Description of Artificial Sequence: Synthetic oligonucleotide
  Target: LAMA2; (-) strand; PAM type: NRG; PAM sequence: GAG
ggcagaggcaggcggatcac

SEQ ID NO: 62575 - DNA, 20 bp, Artificial Sequence
  Description of Artificial Sequence: Synthetic oligonucleotide
  Target: LAMA2; (-) strand; PAM type: NRG; PAM sequence: CGG
ctttgggaggcagaggcagg

SEQ ID NO: 62576 - DNA, 20 bp, Artificial Sequence
  Description of Artificial Sequence: Synthetic oligonucleotide
  Target: LAMA2; (-) strand; PAM type: NRG; PAM sequence: AGG
gcactttgggaggcagaggc

SEQ ID NO: 62577 - DNA, 20 bp, Artificial Sequence
  Description of Artificial Sequence: Synthetic oligonucleotide
  Target: LAMA2; (-) strand; PAM type: NRG; PAM sequence: CAG
agcactttgggaggcagagg

SEQ ID NO: 62578 - DNA, 20 bp, Artificial Sequence
  Description of Artificial Sequence: Synthetic oligonucleotide
  Target: LAMA2; (-) strand; PAM type: NRG; PAM sequence: AGG
cccagcactttgggaggcag

SEQ ID NO: 62579 - DNA, 20 bp, Artificial Sequence
  Description of Artificial Sequence: Synthetic oligonucleotide
  Target: LAMA2; (-) strand; PAM type: NRG; PAM sequence: GAG
tcccagcactttgggaggca

SEQ ID NO: 62580 - DNA, 20 bp, Artificial Sequence
  Description of Artificial Sequence: Synthetic oligonucleotide
  Target: LAMA2; (-) strand; PAM type: NRG; PAM sequence: CAG
aatcccagcactttgggagg

SEQ ID NO: 62581 - DNA, 20 bp, Artificial Sequence
  Description of Artificial Sequence: Synthetic oligonucleotide
  Target: LAMA2; (-) strand; PAM type: NRG; PAM sequence: AGG
tgtaatcccagcactttggg

SEQ ID NO: 62582 - DNA, 20 bp, Artificial Sequence
  Description of Artificial Sequence: Synthetic oligonucleotide
  Target: LAMA2; (-) strand; PAM type: NRG; PAM sequence: GAG
ctgtaatcccagcactttgg

SEQ ID NO: 62583 - DNA, 20 bp, Artificial Sequence
  Description of Artificial Sequence: Synthetic oligonucleotide
  Target: LAMA2; (-) strand; PAM type: NRG; PAM sequence: GGG
gcctgtaatcccagcacttt

SEQ ID NO: 62584 - DNA, 20 bp, Artificial Sequence
  Description of Artificial Sequence: Synthetic oligonucleotide
  Target: LAMA2; (-) strand; PAM type: NRG; PAM sequence: TGG
ggcctgtaatcccagcactt

SEQ ID NO: 62585 - DNA, 20 bp, Artificial Sequence
  Description of Artificial Sequence: Synthetic oligonucleotide
  Target: LAMA2; (-) strand; PAM type: NRG; PAM sequence: CAG
atggctcaggcctgtaatcc

SEQ ID NO: 62586 - DNA, 20 bp, Artificial Sequence
  Description of Artificial Sequence: Synthetic oligonucleotide
  Target: LAMA2; (-) strand; PAM type: NRG; PAM sequence: AGG
atggccaggcgcgatggctc

SEQ ID NO: 62587 - DNA, 20 bp, Artificial Sequence
  Description of Artificial Sequence: Synthetic oligonucleotide
  Target: LAMA2; (-) strand; PAM type: NRG; PAM sequence: CAG
catggccaggcgcgatggct

SEQ ID NO: 62588 - DNA, 20 bp, Artificial Sequence
  Description of Artificial Sequence: Synthetic oligonucleotide
  Target: LAMA2; (-) strand; PAM type: NRG; PAM sequence: TGG
ttactcatggccaggcgcga

SEQ ID NO: 62589 - DNA, 20 bp, Artificial Sequence
  Description of Artificial Sequence: Synthetic oligonucleotide
  Target: LAMA2; (-) strand; PAM type: NRG; PAM sequence: AGG
aaaaattgttactcatggcc

SEQ ID NO: 62590 - DNA, 20 bp, Artificial Sequence
  Description of Artificial Sequence: Synthetic oligonucleotide
  Target: LAMA2; (-) strand; PAM type: NRG; PAM sequence: CAG
taaaaattgttactcatggc

SEQ ID NO: 62591 - DNA, 20 bp, Artificial Sequence
  Description of Artificial Sequence: Synthetic oligonucleotide
  Target: LAMA2; (-) strand; PAM type: NRG; PAM sequence: TGG
attttaaaaattgttactca

SEQ ID NO: 62592 - DNA, 20 bp, Artificial Sequence
  Description of Artificial Sequence: Synthetic oligonucleotide
  Target: LAMA2; (-) strand; PAM type: NRG; PAM sequence: TAG
tttctgccatatggtcctaa

SEQ ID NO: 62593 - DNA, 20 bp, Artificial Sequence
  Description of Artificial Sequence: Synthetic oligonucleotide
  Target: LAMA2; (-) strand; PAM type: NRG; PAM sequence: TGG
tctgttgtttttctgccata

SEQ ID NO: 62594 - DNA, 20 bp, Artificial Sequence
  Description of Artificial Sequence: Synthetic oligonucleotide
  Target: LAMA2; (-) strand; PAM type: NRG; PAM sequence: AAG
aagtcttccctaactcttct

SEQ ID NO: 62595 - DNA, 20 bp, Artificial Sequence
  Description of Artificial Sequence: Synthetic oligonucleotide
  Target: LAMA2; (-) strand; PAM type: NRG; PAM sequence: AAG
taattgccacttcctttggg

SEQ ID NO: 62596 - DNA, 20 bp, Artificial Sequence
  Description of Artificial Sequence: Synthetic oligonucleotide
  Target: LAMA2; (-) strand; PAM type: NRG; PAM sequence: GGG
ggttaattgccacttccttt

SEQ ID NO: 62597 - DNA, 20 bp, Artificial Sequence
  Description of Artificial Sequence: Synthetic oligonucleotide
  Target: LAMA2; (-) strand; PAM type: NRG; PAM sequence: TGG
aggttaattgccacttcctt

SEQ ID NO: 62598 - DNA, 20 bp, Artificial Sequence
  Description of Artificial Sequence: Synthetic oligonucleotide
  Target: LAMA2; (-) strand; PAM type: NRG; PAM sequence: AGG
tgctcatctttaaaaatctc

SEQ ID NO: 62599 - DNA, 20 bp, Artificial Sequence
  Description of Artificial Sequence: Synthetic oligonucleotide
  Target: LAMA2; (-) strand; PAM type: NRG; PAM sequence: CAG
ctgctcatctttaaaaatct

SEQ ID NO: 62600 - DNA, 20 bp, Artificial Sequence
  Description of Artificial Sequence: Synthetic oligonucleotide
  Target: LAMA2; (-) strand; PAM type: NRG; PAM sequence: AAG
cctactcccaaccccactgc

SEQ ID NO: 62601 - DNA, 20 bp, Artificial Sequence
  Description of Artificial Sequence: Synthetic oligonucleotide
  Target: LAMA2; (-) strand; PAM type: NRG; PAM sequence: TGG
attattcacctggaatatca

SEQ ID NO: 62602 - DNA, 20 bp, Artificial Sequence
  Description of Artificial Sequence: Synthetic oligonucleotide
  Target: LAMA2; (-) strand; PAM type: NRG; PAM sequence: TGG
aaagtgctcaattattcacc

SEQ ID NO: 62603 - DNA, 20 bp, Artificial Sequence
  Description of Artificial Sequence: Synthetic oligonucleotide
  Target: LAMA2; (-) strand; PAM type: NRG; PAM sequence: AAG
agggccctcctcccaagcta

SEQ ID NO: 62604 - DNA, 20 bp, Artificial Sequence
  Description of Artificial Sequence: Synthetic oligonucleotide
  Target: LAMA2; (-) strand; PAM type: NRG; PAM sequence: AAG
tcatttagggccctcctccc

SEQ ID NO: 62605 - DNA, 20 bp, Artificial Sequence
  Description of Artificial Sequence: Synthetic oligonucleotide
  Target: LAMA2; (-) strand; PAM type: NRG; PAM sequence: GGG
gtcatatactttctcattta

SEQ ID NO: 62606 - DNA, 20 bp, Artificial Sequence
  Description of Artificial Sequence: Synthetic oligonucleotide
  Target: LAMA2; (-) strand; PAM type: NRG; PAM sequence: AGG
ggtcatatactttctcattt

SEQ ID NO: 62607 - DNA, 20 bp, Artificial Sequence
  Description of Artificial Sequence: Synthetic oligonucleotide
  Target: LAMA2; (-) strand; PAM type: NRG; PAM sequence: TAG
aggtcatatactttctcatt

SEQ ID NO: 62608 - DNA, 20 bp, Artificial Sequence
  Description of Artificial Sequence: Synthetic oligonucleotide
  Target: LAMA2; (-) strand; PAM type: NRG; PAM sequence: AGG
tttctttcagttcctgaaat

SEQ ID NO: 62609 - DNA, 20 bp, Artificial Sequence
  Description of Artificial Sequence: Synthetic oligonucleotide
  Target: LAMA2; (-) strand; PAM type: NRG; PAM sequence: TAG
atttctttcagttcctgaaa

SEQ ID NO: 62610 - DNA, 20 bp, Artificial Sequence
  Description of Artificial Sequence: Synthetic oligonucleotide
  Target: LAMA2; (-) strand; PAM type: NRG; PAM sequence: CAG
caagcattccaaatttcttt

SEQ ID NO: 62611 - DNA, 20 bp, Artificial Sequence
  Description of Artificial Sequence: Synthetic oligonucleotide
  Target: LAMA2; (-) strand; PAM type: NRG; PAM sequence: AAG
tgccccacactttatattcc

SEQ ID NO: 62612 - DNA, 20 bp, Artificial Sequence
  Description of Artificial Sequence: Synthetic oligonucleotide
  Target: LAMA2; (-) strand; PAM type: NRG; PAM sequence: CAG
atgagatctgggtggagaca

SEQ ID NO: 62613 - DNA, 20 bp, Artificial Sequence
  Description of Artificial Sequence: Synthetic oligonucleotide
  Target: LAMA2; (-) strand; PAM type: NRG; PAM sequence: GAG
ttcaagatgagatctgggtg

SEQ ID NO: 62614 - DNA, 20 bp, Artificial Sequence
  Description of Artificial Sequence: Synthetic oligonucleotide
  Target: LAMA2; (-) strand; PAM type: NRG; PAM sequence: TGG
aattcaagatgagatctggg

SEQ ID NO: 62615 - DNA, 20 bp, Artificial Sequence
  Description of Artificial Sequence: Synthetic oligonucleotide
  Target: LAMA2; (-) strand; PAM type: NRG; PAM sequence: GGG
tgcaattcaagatgagatct

SEQ ID NO: 62616 - DNA, 20 bp, Artificial Sequence
  Description of Artificial Sequence: Synthetic oligonucleotide
  Target: LAMA2; (-) strand; PAM type: NRG; PAM sequence: TGG
ctgcaattcaagatgagatc

SEQ ID NO: 62617 - DNA, 20 bp, Artificial Sequence
  Description of Artificial Sequence: Synthetic oligonucleotide
  Target: LAMA2; (-) strand; PAM type: NRG; PAM sequence: GAG
tgggaactgcaattcaagat

SEQ ID NO: 62618 - DNA, 20 bp, Artificial Sequence
  Description of Artificial Sequence: Synthetic oligonucleotide
  Target: LAMA2; (-) strand; PAM type: NRG; PAM sequence: AAG
aattgtgggaactgcaattc

SEQ ID NO: 62619 - DNA, 20 bp, Artificial Sequence
  Description of Artificial Sequence: Synthetic oligonucleotide
  Target: LAMA2; (-) strand; PAM type: NRG; PAM sequence: GGG
ccatgacccttgggaattgt

SEQ ID NO: 62620 - DNA, 20 bp, Artificial Sequence
  Description of Artificial Sequence: Synthetic oligonucleotide
  Target: LAMA2; (-) strand; PAM type: NRG; PAM sequence: TGG
cccatgacccttgggaattg

SEQ ID NO: 62621 - DNA, 20 bp, Artificial Sequence
  Description of Artificial Sequence: Synthetic oligonucleotide
  Target: LAMA2; (-) strand; PAM type: NRG; PAM sequence: GGG
aggtccctcccatgaccctt

SEQ ID NO: 62622 - DNA, 20 bp, Artificial Sequence
  Description of Artificial Sequence: Synthetic oligonucleotide
  Target: LAMA2; (-) strand; PAM type: NRG; PAM sequence: TGG
caggtccctcccatgaccct

SEQ ID NO: 62623 - DNA, 20 bp, Artificial Sequence
  Description of Artificial Sequence: Synthetic oligonucleotide
  Target: LAMA2; (-) strand; PAM type: NRG; PAM sequence: AGG
tgattgaattgcctccctcc

SEQ ID NO: 62624 - DNA, 20 bp, Artificial Sequence
  Description of Artificial Sequence: Synthetic oligonucleotide
  Target: LAMA2; (-) strand; PAM type: NRG; PAM sequence: CAG
atgattgaattgcctccctc

SEQ ID NO: 62625 - DNA, 20 bp, Artificial Sequence
  Description of Artificial Sequence: Synthetic oligonucleotide
  Target: LAMA2; (-) strand; PAM type: NRG; PAM sequence: AAG
atcatgagaaaagcatggga

SEQ ID NO: 62626 - DNA, 20 bp, Artificial Sequence
  Description of Artificial Sequence: Synthetic oligonucleotide
  Target: LAMA2; (-) strand; PAM type: NRG; PAM sequence: GGG
cactatcatgagaaaagcat

SEQ ID NO: 62627 - DNA, 20 bp, Artificial Sequence
  Description of Artificial Sequence: Synthetic oligonucleotide
  Target: LAMA2; (-) strand; PAM type: NRG; PAM sequence: TGG
tcactatcatgagaaaagca

SEQ ID NO: 62628 - DNA, 20 bp, Artificial Sequence
  Description of Artificial Sequence: Synthetic oligonucleotide
  Target: LAMA2; (-) strand; PAM type: NRG; PAM sequence: AAG
cttattcactatcatgagaa

SEQ ID NO: 62629 - DNA, 20 bp, Artificial Sequence
  Description of Artificial Sequence: Synthetic oligonucleotide
  Target: LAMA2; (-) strand; PAM type: NRG; PAM sequence: GAG
tgagacttattcactatcat

SEQ ID NO: 62630 - DNA, 20 bp, Artificial Sequence
  Description of Artificial Sequence: Synthetic oligonucleotide
  Target: LAMA2; (-) strand; PAM type: NRG; PAM sequence: GAG
ataaaatcatcagatctcgt

SEQ ID NO: 62631 - DNA, 20 bp, Artificial Sequence
  Description of Artificial Sequence: Synthetic oligonucleotide
  Target: LAMA2; (-) strand; PAM type: NRG; PAM sequence: CAG
actctcctttataaaatcat

SEQ ID NO: 62632 - DNA, 20 bp, Artificial Sequence
  Description of Artificial Sequence: Synthetic oligonucleotide
  Target: LAMA2; (-) strand; PAM type: NRG; PAM sequence: GGG
aggcaagagggcatgtgcag

SEQ ID NO: 62633 - DNA, 20 bp, Artificial Sequence
  Description of Artificial Sequence: Synthetic oligonucleotide
  Target: LAMA2; (-) strand; PAM type: NRG; PAM sequence: GGG
caggcaagagggcatgtgca

SEQ ID NO: 62634 - DNA, 20 bp, Artificial Sequence
  Description of Artificial Sequence: Synthetic oligonucleotide
  Target: LAMA2; (-) strand; PAM type: NRG; PAM sequence: AGG
gcaggcaagagggcatgtgc

SEQ ID NO: 62635 - DNA, 20 bp, Artificial Sequence
  Description of Artificial Sequence: Synthetic oligonucleotide
  Target: LAMA2; (-) strand; PAM type: NRG; PAM sequence: CAG
ggcaggcaagagggcatgtg

SEQ ID NO: 62636 - DNA, 20 bp, Artificial Sequence
  Description of Artificial Sequence: Synthetic oligonucleotide
  Target: LAMA2; (-) strand; PAM type: NRG; PAM sequence: GGG
ttacatggtggcaggcaaga

SEQ ID NO: 62637 - DNA, 20 bp, Artificial Sequence
  Description of Artificial Sequence: Synthetic oligonucleotide
  Target: LAMA2; (-) strand; PAM type: NRG; PAM sequence: AGG
cttacatggtggcaggcaag

SEQ ID NO: 62638 - DNA, 20 bp, Artificial Sequence
  Description of Artificial Sequence: Synthetic oligonucleotide
  Target: LAMA2; (-) strand; PAM type: NRG; PAM sequence: GAG
tcttacatggtggcaggcaa

SEQ ID NO: 62639 - DNA, 20 bp, Artificial Sequence
  Description of Artificial Sequence: Synthetic oligonucleotide
  Target: LAMA2; (-) strand; PAM type: NRG; PAM sequence: AAG
cgtcttacatggtggcaggc

SEQ ID NO: 62640 - DNA, 20 bp, Artificial Sequence
  Description of Artificial Sequence: Synthetic oligonucleotide
  Target: LAMA2; (-) strand; PAM type: NRG; PAM sequence: AGG
gtcacgtcttacatggtggc

SEQ ID NO: 62641 - DNA, 20 bp, Artificial Sequence
  Description of Artificial Sequence: Synthetic oligonucleotide
  Target: LAMA2; (-) strand; PAM type: NRG; PAM sequence: CAG
agtcacgtcttacatggtgg

SEQ ID NO: 62642 - DNA, 20 bp, Artificial Sequence
  Description of Artificial Sequence: Synthetic oligonucleotide
  Target: LAMA2; (-) strand; PAM type: NRG; PAM sequence: TGG
caaagtcacgtcttacatgg

SEQ ID NO: 62643 - DNA, 20 bp, Artificial Sequence
  Description of Artificial Sequence: Synthetic oligonucleotide
  Target: LAMA2; (-) strand; PAM type: NRG; PAM sequence: TGG
gagcaaagtcacgtcttaca

SEQ ID NO: 62644 - DNA, 20 bp, Artificial Sequence
  Description of Artificial Sequence: Synthetic oligonucleotide
  Target: LAMA2; (-) strand; PAM type: NRG; PAM sequence: AAG
cagaaagtacttgaagagca

SEQ ID NO: 62645 - DNA, 20 bp, Artificial Sequence
  Description of Artificial Sequence: Synthetic oligonucleotide
  Target: LAMA2; (-) strand; PAM type: NRG; PAM sequence: GAG
catggcagaaagtacttgaa

SEQ ID NO: 62646 - DNA, 20 bp, Artificial Sequence
  Description of Artificial Sequence: Synthetic oligonucleotide
  Target: LAMA2; (-) strand; PAM type: NRG; PAM sequence: AAG
atcatggcagaaagtacttg

SEQ ID NO: 62647 - DNA, 20 bp, Artificial Sequence
  Description of Artificial Sequence: Synthetic oligonucleotide
  Target: LAMA2; (-) strand; PAM type: NRG; PAM sequence: AAG
ggcctcacaatcatggcaga

SEQ ID NO: 62648 - DNA, 20 bp, Artificial Sequence
  Description of Artificial Sequence: Synthetic oligonucleotide
  Target: LAMA2; (-) strand; PAM type: NRG; PAM sequence: CAG
gggaggcctcacaatcatgg

SEQ ID NO: 62649 - DNA, 20 bp, Artificial Sequence
  Description of Artificial Sequence: Synthetic oligonucleotide
  Target: LAMA2; (-) strand; PAM type: NRG; PAM sequence: TGG
ctggggaggcctcacaatca

SEQ ID NO: 62650 - DNA, 20 bp, Artificial Sequence
  Description of Artificial Sequence: Synthetic oligonucleotide
  Target: LAMA2; (-) strand; PAM type: NRG; PAM sequence: AGG
acaattccacatggctgggg

SEQ ID NO: 62651 - DNA, 20 bp, Artificial Sequence
  Description of Artificial Sequence: Synthetic oligonucleotide
  Target: LAMA2; (-) strand; PAM type: NRG; PAM sequence: GAG
cacaattccacatggctggg

SEQ ID NO: 62652 - DNA, 20 bp, Artificial Sequence
  Description of Artificial Sequence: Synthetic oligonucleotide
  Target: LAMA2; (-) strand; PAM type: NRG; PAM sequence: GGG
ctcacaattccacatggctg

SEQ ID NO: 62653 - DNA, 20 bp, Artificial Sequence
  Description of Artificial Sequence: Synthetic oligonucleotide
  Target: LAMA2; (-) strand; PAM type: NRG; PAM sequence: GGG
actcacaattccacatggct

SEQ ID NO: 62654 - DNA, 20 bp, Artificial Sequence
  Description of Artificial Sequence: Synthetic oligonucleotide
  Target: LAMA2; (-) strand; PAM type: NRG; PAM sequence: TGG
gactcacaattccacatggc

SEQ ID NO: 62655 - DNA, 20 bp, Artificial Sequence
  Description of Artificial Sequence: Synthetic oligonucleotide
  Target: LAMA2; (-) strand; PAM type: NRG; PAM sequence: TGG
aattgactcacaattccaca

SEQ ID NO: 62656 - DNA, 20 bp, Artificial Sequence
  Description of Artificial Sequence: Synthetic oligonucleotide
  Target: LAMA2; (-) strand; PAM type: NRG; PAM sequence: AGG
gggtaatttataaaggaaag

SEQ ID NO: 62657 - DNA, 20 bp, Artificial Sequence
  Description of Artificial Sequence: Synthetic oligonucleotide
  Target: LAMA2; (-) strand; PAM type: NRG; PAM sequence: GAG
agggtaatttataaaggaaa

SEQ ID NO: 62658 - DNA, 20 bp, Artificial Sequence
  Description of Artificial Sequence: Synthetic oligonucleotide
  Target: LAMA2; (-) strand; PAM type: NRG; PAM sequence: AAG
acagggtaatttataaagga

SEQ ID NO: 62659 - DNA, 20 bp, Artificial Sequence
  Description of Artificial Sequence: Synthetic oligonucleotide
  Target: LAMA2; (-) strand; PAM type: NRG; PAM sequence: AGG
caagacagggtaatttataa

SEQ ID NO: 62660 - DNA, 20 bp, Artificial Sequence
  Description of Artificial Sequence: Synthetic oligonucleotide
  Target: LAMA2; (-) strand; PAM type: NRG; PAM sequence: AAG
ccaagacagggtaatttata

SEQ ID NO: 62661 - DNA, 20 bp, Artificial Sequence
  Description of Artificial Sequence: Synthetic oligonucleotide
  Target: LAMA2; (-) strand; PAM type: NRG; PAM sequence: GGG
ataaagaaatacccaagaca

SEQ ID NO: 62662 - DNA, 20 bp, Artificial Sequence
  Description of Artificial Sequence: Synthetic oligonucleotide
  Target: LAMA2; (-) strand; PAM type: NRG; PAM sequence: AGG
aataaagaaatacccaagac

SEQ ID NO: 62663 - DNA, 20 bp, Artificial Sequence
  Description of Artificial Sequence: Synthetic oligonucleotide
  Target: LAMA2; (-) strand; PAM type: NRG; PAM sequence: CAG
taataaagaaatacccaaga

SEQ ID NO: 62664 - DNA, 20 bp, Artificial Sequence
  Description of Artificial Sequence: Synthetic oligonucleotide
  Target: LAMA2; (-) strand; PAM type: NRG; PAM sequence: AAG
ctgctaataaagaaataccc

SEQ ID NO: 62665 - DNA, 20 bp, Artificial Sequence
  Description of Artificial Sequence: Synthetic oligonucleotide
  Target: LAMA2; (-) strand; PAM type: NRG; PAM sequence: AAG
ccattctcatgctgctaata

SEQ ID NO: 62666 - DNA, 20 bp, Artificial Sequence
  Description of Artificial Sequence: Synthetic oligonucleotide
  Target: LAMA2; (-) strand; PAM type: NRG; PAM sequence: AAG
actcactaacaaggctcaca

SEQ ID NO: 62667 - DNA, 20 bp, Artificial Sequence
  Description of Artificial Sequence: Synthetic oligonucleotide
  Target: LAMA2; (-) strand; PAM type: NRG; PAM sequence: AGG
ttccctgaaactcactaaca

SEQ ID NO: 62668 - DNA, 20 bp, Artificial Sequence
  Description of Artificial Sequence: Synthetic oligonucleotide
  Target: LAMA2; (-) strand; PAM type: NRG; PAM sequence: AAG
tttccctgaaactcactaac

SEQ ID NO: 62669 - DNA, 20 bp, Artificial Sequence
  Description of Artificial Sequence: Synthetic oligonucleotide
  Target: LAMA2; (-) strand; PAM type: NRG; PAM sequence: GGG
ttttccacattgcagttaga

SEQ ID NO: 62670 - DNA, 20 bp, Artificial Sequence
  Description of Artificial Sequence: Synthetic oligonucleotide
  Target: LAMA2; (-) strand; PAM type: NRG; PAM sequence: AGG
attttccacattgcagttag

SEQ ID NO: 62671 - DNA, 20 bp, Artificial Sequence
  Description of Artificial Sequence: Synthetic oligonucleotide
  Target: LAMA2; (-) strand; PAM type: NRG; PAM sequence: GAG
cattttccacattgcagtta

SEQ ID NO: 62672 - DNA, 20 bp, Artificial Sequence
  Description of Artificial Sequence: Synthetic oligonucleotide
  Target: LAMA2; (-) strand; PAM type: NRG; PAM sequence: TAG
ttcattttccacattgcagt

SEQ ID NO: 62673 - DNA, 20 bp, Artificial Sequence
  Description of Artificial Sequence: Synthetic oligonucleotide
  Target: LAMA2; (-) strand; PAM type: NRG; PAM sequence: CAG
ccaattcattttccacattg

SEQ ID NO: 62674 - DNA, 20 bp, Artificial Sequence
  Description of Artificial Sequence: Synthetic oligonucleotide
  Target: LAMA2; (-) strand; PAM type: NRG; PAM sequence: AGG
cactgccaccatcttagttc

SEQ ID NO: 62675 - DNA, 20 bp, Artificial Sequence
  Description of Artificial Sequence: Synthetic oligonucleotide
  Target: LAMA2; (-) strand; PAM type: NRG; PAM sequence: CAG
ccactgccaccatcttagtt

SEQ ID NO: 62676 - DNA, 20 bp, Artificial Sequence
  Description of Artificial Sequence: Synthetic oligonucleotide
  Target: LAMA2; (-) strand; PAM type: NRG; PAM sequence: TAG
cattcccactgccaccatct

SEQ ID NO: 62677 - DNA, 20 bp, Artificial Sequence
  Description of Artificial Sequence: Synthetic oligonucleotide
  Target: LAMA2; (-) strand; PAM type: NRG; PAM sequence: CAG
aaatacaaaaaaaatcctgt

SEQ ID NO: 62678 - DNA, 20 bp, Artificial Sequence
  Description of Artificial Sequence: Synthetic oligonucleotide
  Target: LAMA2; (-) strand; PAM type: NRG; PAM sequence: GAG
taatgctaccaacacctgct

SEQ ID NO: 62679 - DNA, 20 bp, Artificial Sequence
  Description of Artificial Sequence: Synthetic oligonucleotide
  Target: LAMA2; (-) strand; PAM type: NRG; PAM sequence: GAG
caatctgagcatcatgccta

SEQ ID NO: 62680 - DNA, 20 bp, Artificial Sequence
  Description of Artificial Sequence: Synthetic oligonucleotide
  Target: LAMA2; (-) strand; PAM type: NRG; PAM sequence: TAG
agcaatctgagcatcatgcc

SEQ ID NO: 62681 - DNA, 20 bp, Artificial Sequence
  Description of Artificial Sequence: Synthetic oligonucleotide
  Target: LAMA2; (-) strand; PAM type: NRG; PAM sequence: GAG
tttaaccaaatcagcaatct

SEQ ID NO: 62682 - DNA, 20 bp, Artificial Sequence
  Description of Artificial Sequence: Synthetic oligonucleotide
  Target: LAMA2; (-) strand; PAM type: NRG; PAM sequence: CAG
tctgcttcctttaaccaaat

SEQ ID NO: 62683 - DNA, 20 bp, Artificial Sequence
  Description of Artificial Sequence: Synthetic oligonucleotide
  Target: LAMA2; (-) strand; PAM type: NRG; PAM sequence: CAG
ggggattcttgtttcctctc

SEQ ID NO: 62684 - DNA, 20 bp, Artificial Sequence
  Description of Artificial Sequence: Synthetic oligonucleotide
  Target: LAMA2; (-) strand; PAM type: NRG; PAM sequence: GGG
aaaaaacaaaacaaaaagtg

SEQ ID NO: 62685 - DNA, 20 bp, Artificial Sequence
  Description of Artificial Sequence: Synthetic oligonucleotide
  Target: LAMA2; (-) strand; PAM type: NRG; PAM sequence: GGG
gaaaaaacaaaacaaaaagt

SEQ ID NO: 62686 - DNA, 20 bp, Artificial Sequence
  Description of Artificial Sequence: Synthetic oligonucleotide
  Target: LAMA2; (-) strand; PAM type: NRG; PAM sequence: TGG
ggaaaaaacaaaacaaaaag

SEQ ID NO: 62687 - DNA, 20 bp, Artificial Sequence
  Description of Artificial Sequence: Synthetic oligonucleotide
  Target: LAMA2; (-) strand; PAM type: NRG; PAM sequence: AAG
actggaaaaaacaaaacaaa

SEQ ID NO: 62688 - DNA, 20 bp, Artificial Sequence
  Description of Artificial Sequence: Synthetic oligonucleotide
  Target: LAMA2; (-) strand; PAM type: NRG; PAM sequence: TGG
catggctatctatcaggaac

SEQ ID NO: 62689 - DNA, 20 bp, Artificial Sequence
  Description of Artificial Sequence: Synthetic oligonucleotide
  Target: LAMA2; (-) strand; PAM type: NRG; PAM sequence: AGG
cttgagcatggctatctatc

SEQ ID NO: 62690 - DNA, 20 bp, Artificial Sequence
  Description of Artificial Sequence: Synthetic oligonucleotide
  Target: LAMA2; (-) strand; PAM type: NRG; PAM sequence: CAG
acttgagcatggctatctat

SEQ ID NO: 62691 - DNA, 20 bp, Artificial Sequence
  Description of Artificial Sequence: Synthetic oligonucleotide
  Target: LAMA2; (-) strand; PAM type: NRG; PAM sequence: TGG
gccactgggacacttgagca

SEQ ID NO: 62692 - DNA, 20 bp, Artificial Sequence
  Description of Artificial Sequence: Synthetic oligonucleotide
  Target: LAMA2; (-) strand; PAM type: NRG; PAM sequence: GAG
caactgccactgggacactt

SEQ ID NO: 62693 - DNA, 20 bp, Artificial Sequence
  Description of Artificial Sequence: Synthetic oligonucleotide
  Target: LAMA2; (-) strand; PAM type: NRG; PAM sequence: GGG
ctaaatactcaactgccact

SEQ ID NO: 62694 - DNA, 20 bp, Artificial Sequence
  Description of Artificial Sequence: Synthetic oligonucleotide
  Target: LAMA2; (-) strand; PAM type: NRG; PAM sequence: TGG
tctaaatactcaactgccac

SEQ ID NO: 62695 - DNA, 20 bp, Artificial Sequence
  Description of Artificial Sequence: Synthetic oligonucleotide
  Target: LAMA2; (-) strand; PAM type: NRG; PAM sequence: GAG
accagctagagttctcccct

SEQ ID NO: 62696 - DNA, 20 bp, Artificial Sequence
  Description of Artificial Sequence: Synthetic oligonucleotide
  Target: LAMA2; (-) strand; PAM type: NRG; PAM sequence: GAG
caaatcattatcaccagcta

SEQ ID NO: 62697 - DNA, 20 bp, Artificial Sequence
  Description of Artificial Sequence: Synthetic oligonucleotide
  Target: LAMA2; (-) strand; PAM type: NRG; PAM sequence: TAG
cccaaatcattatcaccagc

SEQ ID NO: 62698 - DNA, 20 bp, Artificial Sequence
  Description of Artificial Sequence: Synthetic oligonucleotide
  Target: LAMA2; (-) strand; PAM type: NRG; PAM sequence: CAG
aattcccaaatcattatcac

SEQ ID NO: 62699 - DNA, 20 bp, Artificial Sequence
  Description of Artificial Sequence: Synthetic oligonucleotide
  Target: LAMA2; (-) strand; PAM type: NRG; PAM sequence: GAG
ccatttccctgggttcaaat

SEQ ID NO: 62700 - DNA, 20 bp, Artificial Sequence
  Description of Artificial Sequence: Synthetic oligonucleotide
  Target: LAMA2; (-) strand; PAM type: NRG; PAM sequence: GGG
atgttacctcccatttccct

SEQ ID NO: 62701 - DNA, 20 bp, Artificial Sequence
  Description of Artificial Sequence: Synthetic oligonucleotide
  Target: LAMA2; (-) strand; PAM type: NRG; PAM sequence: TGG
gatgttacctcccatttccc

SEQ ID NO: 62702 - DNA, 20 bp, Artificial Sequence
  Description of Artificial Sequence: Synthetic oligonucleotide
  Target: LAMA2; (-) strand; PAM type: NRG; PAM sequence: TGG
ttccttctacaagcttatcc

SEQ ID NO: 62703 - DNA, 20 bp, Artificial Sequence
  Description of Artificial Sequence: Synthetic oligonucleotide
  Target: LAMA2; (-) strand; PAM type: NRG; PAM sequence: AAG
acacagtctcttccttctac

SEQ ID NO: 62704 - DNA, 20 bp, Artificial Sequence
  Description of Artificial Sequence: Synthetic oligonucleotide
  Target: LAMA2; (-) strand; PAM type: NRG; PAM sequence: CAG
ttccctgtgttcctactaca

SEQ ID NO: 62705 - DNA, 20 bp, Artificial Sequence
  Description of Artificial Sequence: Synthetic oligonucleotide
  Target: LAMA2; (-) strand; PAM type: NRG; PAM sequence: TGG
gcaaagcatctcttcctctc

SEQ ID NO: 62706 - DNA, 20 bp, Artificial Sequence
  Description of Artificial Sequence: Synthetic oligonucleotide
  Target: LAMA2; (-) strand; PAM type: NRG; PAM sequence: AAG
gtagagtacaccctcaagca

SEQ ID NO: 62707 - DNA, 20 bp, Artificial Sequence
  Description of Artificial Sequence: Synthetic oligonucleotide
  Target: LAMA2; (-) strand; PAM type: NRG; PAM sequence: AAG
taaatgtagagtacaccctc

SEQ ID NO: 62708 - DNA, 20 bp, Artificial Sequence
  Description of Artificial Sequence: Synthetic oligonucleotide
  Target: LAMA2; (-) strand; PAM type: NRG; PAM sequence: GAG
aagagaaaaatttaaatgta

SEQ ID NO: 62709 - DNA, 20 bp, Artificial Sequence
  Description of Artificial Sequence: Synthetic oligonucleotide
  Target: LAMA2; (-) strand; PAM type: NRG; PAM sequence: TAG
caaagagaaaaatttaaatg

SEQ ID NO: 62710 - DNA, 20 bp, Artificial Sequence
  Description of Artificial Sequence: Synthetic oligonucleotide
  Target: LAMA2; (-) strand; PAM type: NRG; PAM sequence: GAG
gtcatgattcttctctcaaa

SEQ ID NO: 62711 - DNA, 20 bp, Artificial Sequence
  Description of Artificial Sequence: Synthetic oligonucleotide
  Target: LAMA2; (-) strand; PAM type: NRG; PAM sequence: AAG
ttgtcatgattcttctctca

SEQ ID NO: 62712 - DNA, 20 bp, Artificial Sequence
  Description of Artificial Sequence: Synthetic oligonucleotide
  Target: LAMA2; (-) strand; PAM type: NRG; PAM sequence: TGG
tttcaaaacaatctgaaata

SEQ ID NO: 62713 - DNA, 20 bp, Artificial Sequence
  Description of Artificial Sequence: Synthetic oligonucleotide
  Target: LAMA2; (-) strand; PAM type: NRG; PAM sequence: TAG
tcacttcacactcctttcat

SEQ ID NO: 62714 - DNA, 20 bp, Artificial Sequence
  Description of Artificial Sequence: Synthetic oligonucleotide
  Target: LAMA2; (-) strand; PAM type: NRG; PAM sequence: CAG
acatttctcaggaatgtcaa

SEQ ID NO: 62715 - DNA, 20 bp, Artificial Sequence
  Description of Artificial Sequence: Synthetic oligonucleotide
  Target: LAMA2; (-) strand; PAM type: NRG; PAM sequence: AGG
gccccccagatacatttctc

SEQ ID NO: 62716 - DNA, 20 bp, Artificial Sequence
  Description of Artificial Sequence: Synthetic oligonucleotide
  Target: LAMA2; (-) strand; PAM type: NRG; PAM sequence: CAG
ggccccccagatacatttct

SEQ ID NO: 62717 - DNA, 20 bp, Artificial Sequence
  Description of Artificial Sequence: Synthetic oligonucleotide
  Target: LAMA2; (-) strand; PAM type: NRG; PAM sequence: CAG
ttacagattttaaggccccc

SEQ ID NO: 62718 - DNA, 20 bp, Artificial Sequence
  Description of Artificial Sequence: Synthetic oligonucleotide
  Target: LAMA2; (-) strand; PAM type: NRG; PAM sequence: AGG
tatgatatttacagatttta

SEQ ID NO: 62719 - DNA, 20 bp, Artificial Sequence
  Description of Artificial Sequence: Synthetic oligonucleotide
  Target: LAMA2; (-) strand; PAM type: NRG; PAM sequence: AAG
ttatgatatttacagatttt

SEQ ID NO: 62720 - DNA, 20 bp, Artificial Sequence
  Description of Artificial Sequence: Synthetic oligonucleotide
  Target: LAMA2; (-) strand; PAM type: NRG; PAM sequence: CAG
tatgatatttatgatattta

SEQ ID NO: 62721 - DNA, 20 bp, Artificial Sequence
  Description of Artificial Sequence: Synthetic oligonucleotide
  Target: LAMA2; (-) strand; PAM type: NRG; PAM sequence: AGG
cttaaatcccagaatttctt

SEQ ID NO: 62722 - DNA, 20 bp, Artificial Sequence
  Description of Artificial Sequence: Synthetic oligonucleotide
  Target: LAMA2; (-) strand; PAM type: NRG; PAM sequence: TAG
ccttaaatcccagaatttct

SEQ ID NO: 62723 - DNA, 20 bp, Artificial Sequence
  Description of Artificial Sequence: Synthetic oligonucleotide
  Target: LAMA2; (-) strand; PAM type: NRG; PAM sequence: CAG
tcccactcatccttaaatcc

SEQ ID NO: 62724 - DNA, 20 bp, Artificial Sequence
  Description of Artificial Sequence: Synthetic oligonucleotide
  Target: LAMA2; (-) strand; PAM type: NRG; PAM sequence: AAG
caacacagaaccaagaacct

SEQ ID NO: 62725 - DNA, 20 bp, Artificial Sequence
  Description of Artificial Sequence: Synthetic oligonucleotide
  Target: LAMA2; (-) strand; PAM type: NRG; PAM sequence: AAG
atgacttacaacacagaacc

SEQ ID NO: 62726 - DNA, 20 bp, Artificial Sequence
  Description of Artificial Sequence: Synthetic oligonucleotide
  Target: LAMA2; (-) strand; PAM type: NRG; PAM sequence: CAG
ttggagaatgacttacaaca

SEQ ID NO: 62727 - DNA, 20 bp, Artificial Sequence
  Description of Artificial Sequence: Synthetic oligonucleotide
  Target: LAMA2; (-) strand; PAM type: NRG; PAM sequence: GAG
ctatggtcctgctacacttg

SEQ ID NO: 62728 - DNA, 20 bp, Artificial Sequence
  Description of Artificial Sequence: Synthetic oligonucleotide
  Target: LAMA2; (-) strand; PAM type: NRG; PAM sequence: TGG
tgctatggtcctgctacact

SEQ ID NO: 62729 - DNA, 20 bp, Artificial Sequence
  Description of Artificial Sequence: Synthetic oligonucleotide
  Target: LAMA2; (-) strand; PAM type: NRG; PAM sequence: TGG
aatcattttcatcagtgcta

SEQ ID NO: 62730 - DNA, 20 bp, Artificial Sequence
  Description of Artificial Sequence: Synthetic oligonucleotide
  Target: LAMA2; (-) strand; PAM type: NRG; PAM sequence: CAG
actgtataaatcattttcat

SEQ ID NO: 62731 - DNA, 20 bp, Artificial Sequence
  Description of Artificial Sequence: Synthetic oligonucleotide
  Target: LAMA2; (-) strand; PAM type: NRG; PAM sequence: AAG
atacatgggcattggatcat

SEQ ID NO: 62732 - DNA, 20 bp, Artificial Sequence
  Description of Artificial Sequence: Synthetic oligonucleotide
  Target: LAMA2; (-) strand; PAM type: NRG; PAM sequence: TGG
ctttgttcatacatgggcat

SEQ ID NO: 62733 - DNA, 20 bp, Artificial Sequence
  Description of Artificial Sequence: Synthetic oligonucleotide
  Target: LAMA2; (-) strand; PAM type: NRG; PAM sequence: GGG
agtaacctttgttcatacat

SEQ ID NO: 62734 - DNA, 20 bp, Artificial Sequence
  Description of Artificial Sequence: Synthetic oligonucleotide
  Target: LAMA2; (-) strand; PAM type: NRG; PAM sequence: TGG
cagtaacctttgttcataca

SEQ ID NO: 62735 - DNA, 20 bp, Artificial Sequence
  Description of Artificial Sequence: Synthetic oligonucleotide
  Target: LAMA2; (-) strand; PAM type: NRG; PAM sequence: CAG
cccaatttagaagacaggaa

SEQ ID NO: 62736 - DNA, 20 bp, Artificial Sequence
  Description of Artificial Sequence: Synthetic oligonucleotide
  Target: LAMA2; (-) strand; PAM type: NRG; PAM sequence: AGG
ggaaccccaatttagaagac

SEQ ID NO: 62737 - DNA, 20 bp, Artificial Sequence
  Description of Artificial Sequence: Synthetic oligonucleotide
  Target: LAMA2; (-) strand; PAM type: NRG; PAM sequence: CAG
gggaaccccaatttagaaga

SEQ ID NO: 62738 - DNA, 20 bp, Artificial Sequence
  Description of Artificial Sequence: Synthetic oligonucleotide
  Target: LAMA2; (-) strand; PAM type: NRG; PAM sequence: AAG
cactgggaaccccaatttag

SEQ ID NO: 62739 - DNA, 20 bp, Artificial Sequence
  Description of Artificial Sequence: Synthetic oligonucleotide
  Target: LAMA2; (-) strand; PAM type: NRG; PAM sequence: TAG
ttacactgggaaccccaatt

SEQ ID NO: 62740 - DNA, 20 bp, Artificial Sequence
  Description of Artificial Sequence: Synthetic oligonucleotide
  Target: LAMA2; (-) strand; PAM type: NRG; PAM sequence: GGG
tagtcttcctgtattacact

SEQ ID NO: 62741 - DNA, 20 bp, Artificial Sequence
  Description of Artificial Sequence: Synthetic oligonucleotide
  Target: LAMA2; (-) strand; PAM type: NRG; PAM sequence: TGG
gtagtcttcctgtattacac

SEQ ID NO: 62742 - DNA, 20 bp, Artificial Sequence
  Description of Artificial Sequence: Synthetic oligonucleotide
  Target: LAMA2; (-) strand; PAM type: NRG; PAM sequence: TAG
ttctgtttactagcacacag

SEQ ID NO: 62743 - DNA, 20 bp, Artificial Sequence
  Description of Artificial Sequence: Synthetic oligonucleotide
  Target: LAMA2; (-) strand; PAM type: NRG; PAM sequence: CAG
gctttctgtttactagcaca

SEQ ID NO: 62744 - DNA, 20 bp, Artificial Sequence
  Description of Artificial Sequence: Synthetic oligonucleotide
  Target: LAMA2; (-) strand; PAM type: NRG; PAM sequence: TAG
ggattgtgctttctgtttac

SEQ ID NO: 62745 - DNA, 20 bp, Artificial Sequence
  Description of Artificial Sequence: Synthetic oligonucleotide
  Target: LAMA2; (-) strand; PAM type: NRG; PAM sequence: TGG
gaggaaaatatggtcaaatg

SEQ ID NO: 62746 - DNA, 20 bp, Artificial Sequence
  Description of Artificial Sequence: Synthetic oligonucleotide
  Target: LAMA2; (-) strand; PAM type: NRG; PAM sequence: TGG
cacatccaacgaggaaaata

SEQ ID NO: 62747 - DNA, 20 bp, Artificial Sequence
  Description of Artificial Sequence: Synthetic oligonucleotide
  Target: LAMA2; (-) strand; PAM type: NRG; PAM sequence: AGG
atccataaacacatccaacg

SEQ ID NO: 62748 - DNA, 20 bp, Artificial Sequence
  Description of Artificial Sequence: Synthetic oligonucleotide
  Target: LAMA2; (-) strand; PAM type: NRG; PAM sequence: GAG
tatccataaacacatccaac

SEQ ID NO: 62749 - DNA, 20 bp, Artificial Sequence
  Description of Artificial Sequence: Synthetic oligonucleotide
  Target: LAMA2; (-) strand; PAM type: NRG; PAM sequence: CAG
taatctcagaaagataaaag

SEQ ID NO: 62750 - DNA, 20 bp, Artificial Sequence
  Description of Artificial Sequence: Synthetic oligonucleotide
  Target: LAMA2; (-) strand; PAM type: NRG; PAM sequence: AAG
cattaatctcagaaagataa

SEQ ID NO: 62751 - DNA, 20 bp, Artificial Sequence
  Description of Artificial Sequence: Synthetic oligonucleotide
  Target: LAMA2; (-) strand; PAM type: NRG; PAM sequence: AAG
gataaggcattaatctcaga

SEQ ID NO: 62752 - DNA, 20 bp, Artificial Sequence
  Description of Artificial Sequence: Synthetic oligonucleotide
  Target: LAMA2; (-) strand; PAM type: NRG; PAM sequence: CAG
gccagataaggcattaatct

SEQ ID NO: 62753 - DNA, 20 bp, Artificial Sequence
  Description of Artificial Sequence: Synthetic oligonucleotide
  Target: LAMA2; (-) strand; PAM type: NRG; PAM sequence: AGG
ataggaaaaaaggccagata

SEQ ID NO: 62754 - DNA, 20 bp, Artificial Sequence
  Description of Artificial Sequence: Synthetic oligonucleotide
  Target: LAMA2; (-) strand; PAM type: NRG; PAM sequence: AAG
cataggaaaaaaggccagat

SEQ ID NO: 62755 - DNA, 20 bp, Artificial Sequence
  Description of Artificial Sequence: Synthetic oligonucleotide
  Target: LAMA2; (-) strand; PAM type: NRG; PAM sequence: CAG
gtactcataggaaaaaaggc

SEQ ID NO: 62756 - DNA, 20 bp, Artificial Sequence
  Description of Artificial Sequence: Synthetic oligonucleotide
  Target: LAMA2; (-) strand; PAM type: NRG; PAM sequence: AGG
aaaggtactcataggaaaaa

SEQ ID NO: 62757 - DNA, 20 bp, Artificial Sequence
  Description of Artificial Sequence: Synthetic oligonucleotide
  Target: LAMA2; (-) strand; PAM type: NRG; PAM sequence: AAG
caaaggtactcataggaaaa

SEQ ID NO: 62758 - DNA, 20 bp, Artificial Sequence
  Description of Artificial Sequence: Synthetic oligonucleotide
  Target: LAMA2; (-) strand; PAM type: NRG; PAM sequence: AGG
ttataaccaaaggtactcat

SEQ ID NO: 62759 - DNA, 20 bp, Artificial Sequence
  Description of Artificial Sequence: Synthetic oligonucleotide
  Target: LAMA2; (-) strand; PAM type: NRG; PAM sequence: TAG
tttataaccaaaggtactca

SEQ ID NO: 62760 - DNA, 20 bp, Artificial Sequence
  Description of Artificial Sequence: Synthetic oligonucleotide
  Target: LAMA2; (-) strand; PAM type: NRG; PAM sequence: AGG
gcgaagttctttataaccaa

SEQ ID NO: 62761 - DNA, 20 bp, Artificial Sequence
  Description of Artificial Sequence: Synthetic oligonucleotide
  Target: LAMA2; (-) strand; PAM type: NRG; PAM sequence: AAG
tgcgaagttctttataacca

SEQ ID NO: 62762 - DNA, 20 bp, Artificial Sequence
  Description of Artificial Sequence: Synthetic oligonucleotide
  Target: LAMA2; (-) strand; PAM type: NRG; PAM sequence: AAG
attgataatgtagcaatgcg

SEQ ID NO: 62763 - DNA, 20 bp, Artificial Sequence
  Description of Artificial Sequence: Synthetic oligonucleotide
  Target: LAMA2; (-) strand; PAM type: NRG; PAM sequence: TAG
gaggctgaaaattgataatg

SEQ ID NO: 62764 - DNA, 20 bp, Artificial Sequence
  Description of Artificial Sequence: Synthetic oligonucleotide
  Target: LAMA2; (-) strand; PAM type: NRG; PAM sequence: AGG
aaattaaaaataaaaaagag

SEQ ID NO: 62765 - DNA, 20 bp, Artificial Sequence
  Description of Artificial Sequence: Synthetic oligonucleotide
  Target: LAMA2; (-) strand; PAM type: NRG; PAM sequence: GAG
gaaattaaaaataaaaaaga

SEQ ID NO: 62766 - DNA, 20 bp, Artificial Sequence
  Description of Artificial Sequence: Synthetic oligonucleotide
  Target: LAMA2; (-) strand; PAM type: NRG; PAM sequence: GAG
aagaaattaaaaataaaaaa

SEQ ID NO: 62767 - DNA, 20 bp, Artificial Sequence
  Description of Artificial Sequence: Synthetic oligonucleotide
  Target: LAMA2; (-) strand; PAM type: NRG; PAM sequence: AAG
caaagaaattaaaaataaaa

SEQ ID NO: 62768 - DNA, 20 bp, Artificial Sequence
  Description of Artificial Sequence: Synthetic oligonucleotide
  Target: LAMA2; (-) strand; PAM type: NRG; PAM sequence: AAG
tgtattaagaagaggtggca

SEQ ID NO: 62769 - DNA, 20 bp, Artificial Sequence
  Description of Artificial Sequence: Synthetic oligonucleotide
  Target: LAMA2; (-) strand; PAM type: NRG; PAM sequence: TGG
cattatgtattaagaagagg

SEQ ID NO: 62770 - DNA, 20 bp, Artificial Sequence
  Description of Artificial Sequence: Synthetic oligonucleotide
  Target: LAMA2; (-) strand; PAM type: NRG; PAM sequence: AGG
gagcattatgtattaagaag

SEQ ID NO: 62771 - DNA, 20 bp, Artificial Sequence
  Description of Artificial Sequence: Synthetic oligonucleotide
  Target: LAMA2; (-) strand; PAM type: NRG; PAM sequence: GAG
agagcattatgtattaagaa

SEQ ID NO: 62772 - DNA, 20 bp, Artificial Sequence
  Description of Artificial Sequence: Synthetic oligonucleotide
  Target: LAMA2; (-) strand; PAM type: NRG; PAM sequence: AAG
aaagagcattatgtattaag

SEQ ID NO: 62773 - DNA, 20 bp, Artificial Sequence
  Description of Artificial Sequence: Synthetic oligonucleotide
  Target: LAMA2; (-) strand; PAM type: NRG; PAM sequence: AAG
aagaaagagcattatgtatt

SEQ ID NO: 62774 - DNA, 20 bp, Artificial Sequence
  Description of Artificial Sequence: Synthetic oligonucleotide
  Target: LAMA2; (-) strand; PAM type: NRG; PAM sequence: GAG
gggaggaacgaaggaagaaa

SEQ ID NO: 62775 - DNA, 20 bp, Artificial Sequence
  Description of Artificial Sequence: Synthetic oligonucleotide
  Target: LAMA2; (-) strand; PAM type: NRG; PAM sequence: AAG
gggggaggaacgaaggaaga

SEQ ID NO: 62776 - DNA, 20 bp, Artificial Sequence
  Description of Artificial Sequence: Synthetic oligonucleotide
  Target: LAMA2; (-) strand; PAM type: NRG; PAM sequence: AAG
gagagggggaggaacgaagg

SEQ ID NO: 62777 - DNA, 20 bp, Artificial Sequence
  Description of Artificial Sequence: Synthetic oligonucleotide
  Target: LAMA2; (-) strand; PAM type: NRG; PAM sequence: AGG
acagagagggggaggaacga

SEQ ID NO: 62778 - DNA, 20 bp, Artificial Sequence
  Description of Artificial Sequence: Synthetic oligonucleotide
  Target: LAMA2; (-) strand; PAM type: NRG; PAM sequence: AAG
aacagagagggggaggaacg

SEQ ID NO: 62779 - DNA, 20 bp, Artificial Sequence
  Description of Artificial Sequence: Synthetic oligonucleotide
  Target: LAMA2; (-) strand; PAM type: NRG; PAM sequence: AGG
aggaagaaacagagaggggg

SEQ ID NO: 62780 - DNA, 20 bp, Artificial Sequence
  Description of Artificial Sequence: Synthetic oligonucleotide
  Target: LAMA2; (-) strand; PAM type: NRG; PAM sequence: GAG
aaggaagaaacagagagggg

SEQ ID NO: 62781 - DNA, 20 bp, Artificial Sequence
  Description of Artificial Sequence: Synthetic oligonucleotide
  Target: LAMA2; (-) strand; PAM type: NRG; PAM sequence: GGG
ggaaggaagaaacagagagg

SEQ ID NO: 62782 - DNA, 20 bp, Artificial Sequence
  Description of Artificial Sequence: Synthetic oligonucleotide
  Target: LAMA2; (-) strand; PAM type: NRG; PAM sequence: GGG
aggaaggaagaaacagagag

SEQ ID NO: 62783 - DNA, 20 bp, Artificial Sequence
  Description of Artificial Sequence: Synthetic oligonucleotide
  Target: LAMA2; (-) strand; PAM type: NRG; PAM sequence: GGG
gaggaaggaagaaacagaga

SEQ ID NO: 62784 - DNA, 20 bp, Artificial Sequence
  Description of Artificial Sequence: Synthetic oligonucleotide
  Target: LAMA2; (-) strand; PAM type: NRG; PAM sequence: AGG
ggaggaaggaagaaacagag

SEQ ID NO: 62785 - DNA, 20 bp, Artificial Sequence
  Description of Artificial Sequence: Synthetic oligonucleotide
  Target: LAMA2; (-) strand; PAM type: NRG; PAM sequence: GAG
aggaggaaggaagaaacaga

SEQ ID NO: 62786 - DNA, 20 bp, Artificial Sequence
  Description of Artificial Sequence: Synthetic oligonucleotide
  Target: LAMA2; (-) strand; PAM type: NRG; PAM sequence: GAG
aaaggaggaaggaagaaaca

SEQ ID NO: 62787 - DNA, 20 bp, Artificial Sequence
  Description of Artificial Sequence: Synthetic oligonucleotide
  Target: LAMA2; (-) strand; PAM type: NRG; PAM sequence: CAG
agaaaggaggaaggaagaaa

SEQ ID NO: 62788 - DNA, 20 bp, Artificial Sequence
  Description of Artificial Sequence: Synthetic oligonucleotide
  Target: LAMA2; (-) strand; PAM type: NRG; PAM sequence: AAG
caagaaagaaaggaggaagg

SEQ ID NO: 62789 - DNA, 20 bp, Artificial Sequence
  Description of Artificial Sequence: Synthetic oligonucleotide
  Target: LAMA2; (-) strand; PAM type: NRG; PAM sequence: AGG
aagcaagaaagaaaggagga

SEQ ID NO: 62790 - DNA, 20 bp, Artificial Sequence
  Description of Artificial Sequence: Synthetic oligonucleotide
  Target: LAMA2; (-) strand; PAM type: NRG; PAM sequence: AAG
aaagcaagaaagaaaggagg

SEQ ID NO: 62791 - DNA, 20 bp, Artificial Sequence
  Description of Artificial Sequence: Synthetic oligonucleotide
  Target: LAMA2; (-) strand; PAM type: NRG; PAM sequence: AGG
aagaaagcaagaaagaaagg

SEQ ID NO: 62792 - DNA, 20 bp, Artificial Sequence
  Description of Artificial Sequence: Synthetic oligonucleotide
  Target: LAMA2; (-) strand; PAM type: NRG; PAM sequence: GAG
gaagaaagcaagaaagaaag

SEQ ID NO: 62793 - DNA, 20 bp, Artificial Sequence
  Description of Artificial Sequence: Synthetic oligonucleotide
  Target: LAMA2; (-) strand; PAM type: NRG; PAM sequence: AGG
aagaagaaagcaagaaagaa

SEQ ID NO: 62794 - DNA, 20 bp, Artificial Sequence
  Description of Artificial Sequence: Synthetic oligonucleotide
  Target: LAMA2; (-) strand; PAM type: NRG; PAM sequence: AAG
aaagaagaaagcaagaaaga

SEQ ID NO: 62795 - DNA, 20 bp, Artificial Sequence
  Description of Artificial Sequence: Synthetic oligonucleotide
  Target: LAMA2; (-) strand; PAM type: NRG; PAM sequence: AAG
aaagaaagaagaaagcaaga

SEQ ID NO: 62796 - DNA, 20 bp, Artificial Sequence
  Description of Artificial Sequence: Synthetic oligonucleotide
  Target: LAMA2; (-) strand; PAM type: NRG; PAM sequence: AAG
aagaaaagaaagaagaaagc

SEQ ID NO: 62797 - DNA, 20 bp, Artificial Sequence
  Description of Artificial Sequence: Synthetic oligonucleotide
  Target: LAMA2; (-) strand; PAM type: NRG; PAM sequence: AAG
aataaagaaaagaaagaaga

SEQ ID NO: 62798 - DNA, 20 bp, Artificial Sequence
  Description of Artificial Sequence: Synthetic oligonucleotide
  Target: LAMA2; (-) strand; PAM type: NRG; PAM sequence: AAG
aaagaataaagaaaagaaag

SEQ ID NO: 62799 - DNA, 20 bp, Artificial Sequence
  Description of Artificial Sequence: Synthetic oligonucleotide
  Target: LAMA2; (-) strand; PAM type: NRG; PAM sequence: AAG
aagaaagaataaagaaaaga

SEQ ID NO: 62800 - DNA, 20 bp, Artificial Sequence
  Description of Artificial Sequence: Synthetic oligonucleotide
  Target: LAMA2; (-) strand; PAM type: NRG; PAM sequence: AAG
aaaaaagaaagaataaagaa

SEQ ID NO: 62801 - DNA, 20 bp, Artificial Sequence
  Description of Artificial Sequence: Synthetic oligonucleotide
  Target: LAMA2; (-) strand; PAM type: NRG; PAM sequence: AAG
aaaaaaaaaaagaaagaata

SEQ ID NO: 62802 - DNA, 20 bp, Artificial Sequence
  Description of Artificial Sequence: Synthetic oligonucleotide
  Target: LAMA2; (-) strand; PAM type: NRG; PAM sequence: AAG
ttgaaaaaaaaaaaaaaaga

SEQ ID NO: 62803 - DNA, 20 bp, Artificial Sequence
  Description of Artificial Sequence: Synthetic oligonucleotide
  Target: LAMA2; (-) strand; PAM type: NRG; PAM sequence: AAG
gaccttgaaaaaaaaaaaaa

SEQ ID NO: 62804 - DNA, 20 bp, Artificial Sequence
  Description of Artificial Sequence: Synthetic oligonucleotide
  Target: LAMA2; (-) strand; PAM type: NRG; PAM sequence: AAG
tccagcctgggcaacacgtc

SEQ ID NO: 62805 - DNA, 20 bp, Artificial Sequence
  Description of Artificial Sequence: Synthetic oligonucleotide
  Target: LAMA2; (-) strand; PAM type: NRG; PAM sequence: GGG
tcactactgcactccagcct

SEQ ID NO: 62806 - DNA, 20 bp, Artificial Sequence
  Description of Artificial Sequence: Synthetic oligonucleotide
  Target: LAMA2; (-) strand; PAM type: NRG; PAM sequence: TGG
ttcactactgcactccagcc

SEQ ID NO: 62807 - DNA, 20 bp, Artificial Sequence
  Description of Artificial Sequence: Synthetic oligonucleotide
  Target: LAMA2; (-) strand; PAM type: NRG; PAM sequence: CAG
atgatttcactactgcactc

SEQ ID NO: 62808 - DNA, 20 bp, Artificial Sequence
  Description of Artificial Sequence: Synthetic oligonucleotide
  Target: LAMA2; (-) strand; PAM type: NRG; PAM sequence: GAG
caggaggttgaggctgcagt

SEQ ID NO: 62809 - DNA, 20 bp, Artificial Sequence
  Description of Artificial Sequence: Synthetic oligonucleotide
  Target: LAMA2; (-) strand; PAM type: NRG; PAM sequence: CAG
agcccaggaggttgaggctg

SEQ ID NO: 62810 - DNA, 20 bp, Artificial Sequence
  Description of Artificial Sequence: Synthetic oligonucleotide
  Target: LAMA2; (-) strand; PAM type: NRG; PAM sequence: AGG
tgcttgagcccaggaggttg

SEQ ID NO: 62811 - DNA, 20 bp, Artificial Sequence
  Description of Artificial Sequence: Synthetic oligonucleotide
  Target: LAMA2; (-) strand; PAM type: NRG; PAM sequence: GAG
ttgcttgagcccaggaggtt

SEQ ID NO: 62812 - DNA, 20 bp, Artificial Sequence
  Description of Artificial Sequence: Synthetic oligonucleotide
  Target: LAMA2; (-) strand; PAM type: NRG; PAM sequence: AGG
aaggattgcttgagcccagg

SEQ ID NO: 62813 - DNA, 20 bp, Artificial Sequence
  Description of Artificial Sequence: Synthetic oligonucleotide
  Target: LAMA2; (-) strand; PAM type: NRG; PAM sequence: GAG
gaaggattgcttgagcccag

SEQ ID NO: 62814 - DNA, 20 bp, Artificial Sequence
  Description of Artificial Sequence: Synthetic oligonucleotide
  Target: LAMA2; (-) strand; PAM type: NRG; PAM sequence: AGG
tggaaggattgcttgagccc

SEQ ID NO: 62815 - DNA, 20 bp, Artificial Sequence
  Description of Artificial Sequence: Synthetic oligonucleotide
  Target: LAMA2; (-) strand; PAM type: NRG; PAM sequence: CAG
gtggaaggattgcttgagcc

SEQ ID NO: 62816 - DNA, 20 bp, Artificial Sequence
  Description of Artificial Sequence: Synthetic oligonucleotide
  Target: LAMA2; (-) strand; PAM type: NRG; PAM sequence: GAG
cggaggtggaaggattgctt

SEQ ID NO: 62817 - DNA, 20 bp, Artificial Sequence
  Description of Artificial Sequence: Synthetic oligonucleotide
  Target: LAMA2; (-) strand; PAM type: NRG; PAM sequence: AGG
cttgggggtgcggaggtgga

SEQ ID NO: 62818 - DNA, 20 bp, Artificial Sequence
  Description of Artificial Sequence: Synthetic oligonucleotide
  Target: LAMA2; (-) strand; PAM type: NRG; PAM sequence: AAG
gcttgggggtgcggaggtgg

SEQ ID NO: 62819 - DNA, 20 bp, Artificial Sequence
  Description of Artificial Sequence: Synthetic oligonucleotide
  Target: LAMA2; (-) strand; PAM type: NRG; PAM sequence: TGG
gctgcttgggggtgcggagg

SEQ ID NO: 62820 - DNA, 20 bp, Artificial Sequence
  Description of Artificial Sequence: Synthetic oligonucleotide
  Target: LAMA2; (-) strand; PAM type: NRG; PAM sequence: AGG
ccagctgcttgggggtgcgg

SEQ ID NO: 62821 - DNA, 20 bp, Artificial Sequence
  Description of Artificial Sequence: Synthetic oligonucleotide
  Target: LAMA2; (-) strand; PAM type: NRG; PAM sequence: GAG
cccagctgcttgggggtgcg

SEQ ID NO: 62822 - DNA, 20 bp, Artificial Sequence
  Description of Artificial Sequence: Synthetic oligonucleotide
  Target: LAMA2; (-) strand; PAM type: NRG; PAM sequence: CGG
gtcccagctgcttgggggtg

SEQ ID NO: 62823 - DNA, 20 bp, Artificial Sequence
  Description of Artificial Sequence: Synthetic oligonucleotide
  Target: LAMA2; (-) strand; PAM type: NRG; PAM sequence: GGG
ctgtagtcccagctgcttgg

SEQ ID NO: 62824 - DNA, 20 bp, Artificial Sequence
  Description of Artificial Sequence: Synthetic oligonucleotide
  Target: LAMA2; (-) strand; PAM type: NRG; PAM sequence: GGG
cctgtagtcccagctgcttg

SEQ ID NO: 62825 - DNA, 20 bp, Artificial Sequence
  Description of Artificial Sequence: Synthetic oligonucleotide
  Target: LAMA2; (-) strand; PAM type: NRG; PAM sequence: GGG
gcctgtagtcccagctgctt

SEQ ID NO: 62826 - DNA, 20 bp, Artificial Sequence
  Description of Artificial Sequence: Synthetic oligonucleotide
  Target: LAMA2; (-) strand; PAM type: NRG; PAM sequence: TGG
tgcctgtagtcccagctgct

SEQ ID NO: 62827 - DNA, 20 bp, Artificial Sequence
  Description of Artificial Sequence: Synthetic oligonucleotide
  Target: LAMA2; (-) strand; PAM type: NRG; PAM sequence: CAG
gtggcccttgcctgtagtcc

SEQ ID NO: 62828 - DNA, 20 bp, Artificial Sequence
  Description of Artificial Sequence: Synthetic oligonucleotide
  Target: LAMA2; (-) strand; PAM type: NRG; PAM sequence: TAG
ggcatggtggcccttgcctg

SEQ ID NO: 62829 - DNA, 20 bp, Artificial Sequence
  Description of Artificial Sequence: Synthetic oligonucleotide
  Target: LAMA2; (-) strand; PAM type: NRG; PAM sequence: TGG
aataaattagttgggcatgg

SEQ ID NO: 62830 - DNA, 20 bp, Artificial Sequence
  Description of Artificial Sequence: Synthetic oligonucleotide
  Target: LAMA2; (-) strand; PAM type: NRG; PAM sequence: TGG
aaaaataaattagttgggca

SEQ ID NO: 62831 - DNA, 20 bp, Artificial Sequence
  Description of Artificial Sequence: Synthetic oligonucleotide
  Target: LAMA2; (-) strand; PAM type: NRG; PAM sequence: GGG
aaaacaaaaataaattagtt

SEQ ID NO: 62832 - DNA, 20 bp, Artificial Sequence
  Description of Artificial Sequence: Synthetic oligonucleotide
  Target: LAMA2; (-) strand; PAM type: NRG; PAM sequence: TGG
aaaaacaaaaataaattagt

SEQ ID NO: 62833 - DNA, 20 bp, Artificial Sequence
  Description of Artificial Sequence: Synthetic oligonucleotide
  Target: LAMA2; (-) strand; PAM type: NRG; PAM sequence: TAG
tatgaaaaacaaaaataaat

SEQ ID NO: 62834 - DNA, 20 bp, Artificial Sequence
  Description of Artificial Sequence: Synthetic oligonucleotide
  Target: LAMA2; (-) strand; PAM type: NRG; PAM sequence: GAG
agcagcctgggcaacatagt

SEQ ID NO: 62835 - DNA, 20 bp, Artificial Sequence
  Description of Artificial Sequence: Synthetic oligonucleotide
  Target: LAMA2; (-) strand; PAM type: NRG; PAM sequence: TAG
tgagagcagcctgggcaaca

SEQ ID NO: 62836 - DNA, 20 bp, Artificial Sequence
  Description of Artificial Sequence: Synthetic oligonucleotide
  Target: LAMA2; (-) strand; PAM type: NRG; PAM sequence: GGG
caggagtttgagagcagcct

SEQ ID NO: 62837 - DNA, 20 bp, Artificial Sequence
  Description of Artificial Sequence: Synthetic oligonucleotide
  Target: LAMA2; (-) strand; PAM type: NRG; PAM sequence: TGG
ccaggagtttgagagcagcc

SEQ ID NO: 62838 - DNA, 20 bp, Artificial Sequence
  Description of Artificial Sequence: Synthetic oligonucleotide
  Target: LAMA2; (-) strand; PAM type: NRG; PAM sequence: CAG
ttggcccaggagtttgagag

SEQ ID NO: 62839 - DNA, 20 bp, Artificial Sequence
  Description of Artificial Sequence: Synthetic oligonucleotide
  Target: LAMA2; (-) strand; PAM type: NRG; PAM sequence: GAG
cacttggcccaggagtttga

SEQ ID NO: 62840 - DNA, 20 bp, Artificial Sequence
  Description of Artificial Sequence: Synthetic oligonucleotide
  Target: LAMA2; (-) strand; PAM type: NRG; PAM sequence: GAG
atcacttggcccaggagttt

SEQ ID NO: 62841 - DNA, 20 bp, Artificial Sequence
  Description of Artificial Sequence: Synthetic oligonucleotide
  Target: LAMA2; (-) strand; PAM type: NRG; PAM sequence: GAG
agaaggatcacttggcccag

SEQ ID NO: 62842 - DNA, 20 bp, Artificial Sequence
  Description of Artificial Sequence: Synthetic oligonucleotide
  Target: LAMA2; (-) strand; PAM type: NRG; PAM sequence: AGG
gcagaaggatcacttggccc

SEQ ID NO: 62843 - DNA, 20 bp, Artificial Sequence
  Description of Artificial Sequence: Synthetic oligonucleotide
  Target: LAMA2; (-) strand; PAM type: NRG; PAM sequence: CAG
ggcagaaggatcacttggcc

SEQ ID NO: 62844 - DNA, 20 bp, Artificial Sequence
  Description of Artificial Sequence: Synthetic oligonucleotide
  Target: LAMA2; (-) strand; PAM type: NRG; PAM sequence: TGG
gctgaggcagaaggatcact

SEQ ID NO: 62845 - DNA, 20 bp, Artificial Sequence
  Description of Artificial Sequence: Synthetic oligonucleotide
  Target: LAMA2; (-) strand; PAM type: NRG; PAM sequence: AGG
ctttgaaaggctgaggcaga

SEQ ID NO: 62846 - DNA, 20 bp, Artificial Sequence
  Description of Artificial Sequence: Synthetic oligonucleotide
  Target: LAMA2; (-) strand; PAM type: NRG; PAM sequence: AAG
actttgaaaggctgaggcag

SEQ ID NO: 62847 - DNA, 20 bp, Artificial Sequence
  Description of Artificial Sequence: Synthetic oligonucleotide
  Target: LAMA2; (-) strand; PAM type: NRG; PAM sequence: CAG
agcactttgaaaggctgagg

SEQ ID NO: 62848 - DNA, 20 bp, Artificial Sequence
  Description of Artificial Sequence: Synthetic oligonucleotide
  Target: LAMA2; (-) strand; PAM type: NRG; PAM sequence: AGG
cccagcactttgaaaggctg

SEQ ID NO: 62849 - DNA, 20 bp, Artificial Sequence
  Description of Artificial Sequence: Synthetic oligonucleotide
  Target: LAMA2; (-) strand; PAM type: NRG; PAM sequence: GAG
tcccagcactttgaaaggct

SEQ ID NO: 62850 - DNA, 20 bp, Artificial Sequence
  Description of Artificial Sequence: Synthetic oligonucleotide
  Target: LAMA2; (-) strand; PAM type: NRG; PAM sequence: AGG
tgtaatcccagcactttgaa

SEQ ID NO: 62851 - DNA, 20 bp, Artificial Sequence
  Description of Artificial Sequence: Synthetic oligonucleotide
  Target: LAMA2; (-) strand; PAM type: NRG; PAM sequence: AAG
ctgtaatcccagcactttga

SEQ ID NO: 62852 - DNA, 20 bp, Artificial Sequence
  Description of Artificial Sequence: Synthetic oligonucleotide
  Target: LAMA2; (-) strand; PAM type: NRG; PAM sequence: CAG
gtggctcatgtctgtaatcc

SEQ ID NO: 62853 - DNA, 20 bp, Artificial Sequence
  Description of Artificial Sequence: Synthetic oligonucleotide
  Target: LAMA2; (-) strand; PAM type: NRG; PAM sequence: TGG
aaagaaaagtttgggtgagg

SEQ ID NO: 62854 - DNA, 20 bp, Artificial Sequence
  Description of Artificial Sequence: Synthetic oligonucleotide
  Target: LAMA2; (-) strand; PAM type: NRG; PAM sequence: AGG
aaaaaagaaaagtttgggtg

SEQ ID NO: 62855 - DNA, 20 bp, Artificial Sequence
  Description of Artificial Sequence: Synthetic oligonucleotide
  Target: LAMA2; (-) strand; PAM type: NRG; PAM sequence: GAG
aaaaaaagaaaagtttgggt

SEQ ID NO: 62856 - DNA, 20 bp, Artificial Sequence
  Description of Artificial Sequence: Synthetic oligonucleotide
  Target: LAMA2; (-) strand; PAM type: NRG; PAM sequence: GGG
tcaaaaaaaaagaaaagttt

SEQ ID NO: 62857 - DNA, 20 bp, Artificial Sequence
  Description of Artificial Sequence: Synthetic oligonucleotide
  Target: LAMA2; (-) strand; PAM type: NRG; PAM sequence: TGG
ctcaaaaaaaaagaaaagtt

SEQ ID NO: 62858 - DNA, 20 bp, Artificial Sequence
  Description of Artificial Sequence: Synthetic oligonucleotide
  Target: LAMA2; (-) strand; PAM type: NRG; PAM sequence: AAG
aatctctcaaaaaaaaagaa

SEQ ID NO: 62859 - DNA, 20 bp, Artificial Sequence
  Description of Artificial Sequence: Synthetic oligonucleotide
  Target: LAMA2; (-) strand; PAM type: NRG; PAM sequence: AAG
ttaagaatctctcaaaaaaa

SEQ ID NO: 62860 - DNA, 20 bp, Artificial Sequence
  Description of Artificial Sequence: Synthetic oligonucleotide
  Target: LAMA2; (-) strand; PAM type: NRG; PAM sequence: AAG
tcgtaagtacaatctagttt

SEQ ID NO: 62861 - DNA, 20 bp, Artificial Sequence
  Description of Artificial Sequence: Synthetic oligonucleotide
  Target: LAMA2; (-) strand; PAM type: NRG; PAM sequence: TAG
catttatcgtaagtacaatc

SEQ ID NO: 62862 - DNA, 20 bp, Artificial Sequence
  Description of Artificial Sequence: Synthetic oligonucleotide
  Target: LAMA2; (-) strand; PAM type: NRG; PAM sequence: AAG
aatcagtcaacatttatcgt

SEQ ID NO: 62863 - DNA, 20 bp, Artificial Sequence
  Description of Artificial Sequence: Synthetic oligonucleotide
  Target: LAMA2; (-) strand; PAM type: NRG; PAM sequence: CAG
cactgttgaaggtaatgaat

SEQ ID NO: 62864 - DNA, 20 bp, Artificial Sequence
  Description of Artificial Sequence: Synthetic oligonucleotide
  Target: LAMA2; (-) strand; PAM type: NRG; PAM sequence: AGG
gaggctgaaagcactgttga

SEQ ID NO: 62865 - DNA, 20 bp, Artificial Sequence
  Description of Artificial Sequence: Synthetic oligonucleotide
  Target: LAMA2; (-) strand; PAM type: NRG; PAM sequence: AAG
agaggctgaaagcactgttg

SEQ ID NO: 62866 - DNA, 20 bp, Artificial Sequence
  Description of Artificial Sequence: Synthetic oligonucleotide
  Target: LAMA2; (-) strand; PAM type: NRG; PAM sequence: AAG
tctgaaccatcagaggctga

SEQ ID NO: 62867 - DNA, 20 bp, Artificial Sequence
  Description of Artificial Sequence: Synthetic oligonucleotide
  Target: LAMA2; (-) strand; PAM type: NRG; PAM sequence: AGG
tcatttctctgaaccatcag

SEQ ID NO: 62868 - DNA, 20 bp, Artificial Sequence
  Description of Artificial Sequence: Synthetic oligonucleotide
  Target: LAMA2; (-) strand; PAM type: NRG; PAM sequence: GAG
atcatttctctgaaccatca

SEQ ID NO: 62869 - DNA, 20 bp, Artificial Sequence
  Description of Artificial Sequence: Synthetic oligonucleotide
  Target: LAMA2; (-) strand; PAM type: NRG; PAM sequence: CAG
caatcatttctctgaaccat

SEQ ID NO: 62870 - DNA, 20 bp, Artificial Sequence
  Description of Artificial Sequence: Synthetic oligonucleotide
  Target: LAMA2; (-) strand; PAM type: NRG; PAM sequence: AAG
cctgattcaggtgaaatata

SEQ ID NO: 62871 - DNA, 20 bp, Artificial Sequence
  Description of Artificial Sequence: Synthetic oligonucleotide
  Target: LAMA2; (-) strand; PAM type: NRG; PAM sequence: AGG
tctcaaccgaaacctgattc

SEQ ID NO: 62872 - DNA, 20 bp, Artificial Sequence
  Description of Artificial Sequence: Synthetic oligonucleotide
  Target: LAMA2; (-) strand; PAM type: NRG; PAM sequence: CAG
gtctcaaccgaaacctgatt

SEQ ID NO: 62873 - DNA, 20 bp, Artificial Sequence
  Description of Artificial Sequence: Synthetic oligonucleotide
  Target: LAMA2; (-) strand; PAM type: NRG; PAM sequence: CAG
ttgtgaagtggagacatact

SEQ ID NO: 62874 - DNA, 20 bp, Artificial Sequence
  Description of Artificial Sequence: Synthetic oligonucleotide
  Target: LAMA2; (-) strand; PAM type: NRG; PAM sequence: GAG
taaattaattttgtgaagtg

SEQ ID NO: 62875 - DNA, 20 bp, Artificial Sequence
  Description of Artificial Sequence: Synthetic oligonucleotide
  Target: LAMA2; (-) strand; PAM type: NRG; PAM sequence: TGG
aataaattaattttgtgaag

SEQ ID NO: 62876 - DNA, 20 bp, Artificial Sequence
  Description of Artificial Sequence: Synthetic oligonucleotide
  Target: LAMA2; (-) strand; PAM type: NRG; PAM sequence: AAG
gaaaataaattaattttgtg

SEQ ID NO: 62877 - DNA, 20 bp, Artificial Sequence
  Description of Artificial Sequence: Synthetic oligonucleotide
  Target: LAMA2; (-) strand; PAM type: NRG; PAM sequence: AAG
acagtggtaaaactagagaa

SEQ ID NO: 62878 - DNA, 20 bp, Artificial Sequence
  Description of Artificial Sequence: Synthetic oligonucleotide
  Target: LAMA2; (-) strand; PAM type: NRG; PAM sequence: GAG
tcaaaacagtggtaaaacta

SEQ ID NO: 62879 - DNA, 20 bp, Artificial Sequence
  Description of Artificial Sequence: Synthetic oligonucleotide
  Target: LAMA2; (-) strand; PAM type: NRG; PAM sequence: TAG
tatcaaaacagtggtaaaac

SEQ ID NO: 62880 - DNA, 20 bp, Artificial Sequence
  Description of Artificial Sequence: Synthetic oligonucleotide
  Target: LAMA2; (-) strand; PAM type: NRG; PAM sequence: TGG
aagattatttatcaaaacag

SEQ ID NO: 62881 - DNA, 20 bp, Artificial Sequence
  Description of Artificial Sequence: Synthetic oligonucleotide
  Target: LAMA2; (-) strand; PAM type: NRG; PAM sequence: CAG
tgtaagattatttatcaaaa

SEQ ID NO: 62882 - DNA, 20 bp, Artificial Sequence
  Description of Artificial Sequence: Synthetic oligonucleotide
  Target: LAMA2; (-) strand; PAM type: NRG; PAM sequence: AAG
aataagtcttcctccactgt

SEQ ID NO: 62883 - DNA, 20 bp, Artificial Sequence
  Description of Artificial Sequence: Synthetic oligonucleotide
  Target: LAMA2; (-) strand; PAM type: NRG; PAM sequence: AAG
agtgatgaaattgtttcaat

SEQ ID NO: 62884 - DNA, 20 bp, Artificial Sequence
  Description of Artificial Sequence: Synthetic oligonucleotide
  Target: LAMA2; (-) strand; PAM type: NRG; PAM sequence: AAG
gaggcaaacaagagaaaaaa

SEQ ID NO: 62885 - DNA, 20 bp, Artificial Sequence
  Description of Artificial Sequence: Synthetic oligonucleotide
  Target: LAMA2; (-) strand; PAM type: NRG; PAM sequence: GAG
ccatactctgaggcaaacaa

SEQ ID NO: 62886 - DNA, 20 bp, Artificial Sequence
  Description of Artificial Sequence: Synthetic oligonucleotide
  Target: LAMA2; (-) strand; PAM type: NRG; PAM sequence: AAG
aaccatactctgaggcaaac

SEQ ID NO: 62887 - DNA, 20 bp, Artificial Sequence
  Description of Artificial Sequence: Synthetic oligonucleotide
  Target: LAMA2; (-) strand; PAM type: NRG; PAM sequence: AGG
aatgaatcaaccatactctg

SEQ ID NO: 62888 - DNA, 20 bp, Artificial Sequence
  Description of Artificial Sequence: Synthetic oligonucleotide
  Target: LAMA2; (-) strand; PAM type: NRG; PAM sequence: GAG
gaatgaatcaaccatactct

SEQ ID NO: 62889 - DNA, 20 bp, Artificial Sequence
  Description of Artificial Sequence: Synthetic oligonucleotide
  Target: LAMA2; (-) strand; PAM type: NRG; PAM sequence: GAG
caatggctccaacctaggga

SEQ ID NO: 62890 - DNA, 20 bp, Artificial Sequence
  Description of Artificial Sequence: Synthetic oligonucleotide
  Target: LAMA2; (-) strand; PAM type: NRG; PAM sequence: GAG
tgcaatggctccaacctagg

SEQ ID NO: 62891 - DNA, 20 bp, Artificial Sequence
  Description of Artificial Sequence: Synthetic oligonucleotide
  Target: LAMA2; (-) strand; PAM type: NRG; PAM sequence: GGG
tctgcaatggctccaaccta

SEQ ID NO: 62892 - DNA, 20 bp, Artificial Sequence
  Description of Artificial Sequence: Synthetic oligonucleotide
  Target: LAMA2; (-) strand; PAM type: NRG; PAM sequence: AGG
ttctgcaatggctccaacct

SEQ ID NO: 62893 - DNA, 20 bp, Artificial Sequence
  Description of Artificial Sequence: Synthetic oligonucleotide
  Target: LAMA2; (-) strand; PAM type: NRG; PAM sequence: TAG
attctgcaatggctccaacc

SEQ ID NO: 62894 - DNA, 20 bp, Artificial Sequence
  Description of Artificial Sequence: Synthetic oligonucleotide
  Target: LAMA2; (-) strand; PAM type: NRG; PAM sequence: TGG
gtaaaatattgattctgcaa

SEQ ID NO: 62895 - DNA, 20 bp, Artificial Sequence
  Description of Artificial Sequence: Synthetic oligonucleotide
  Target: LAMA2; (-) strand; PAM type: NRG; PAM sequence: AAG
tatattttggagtcagttaa

SEQ ID NO: 62896 - DNA, 20 bp, Artificial Sequence
  Description of Artificial Sequence: Synthetic oligonucleotide
  Target: LAMA2; (-) strand; PAM type: NRG; PAM sequence: CAG
gaatgtatatattttggagt

SEQ ID NO: 62897 - DNA, 20 bp, Artificial Sequence
  Description of Artificial Sequence: Synthetic oligonucleotide
  Target: LAMA2; (-) strand; PAM type: NRG; PAM sequence: GAG
gctagaatgtatatattttg

SEQ ID NO: 62898 - DNA, 20 bp, Artificial Sequence
  Description of Artificial Sequence: Synthetic oligonucleotide
  Target: LAMA2; (-) strand; PAM type: NRG; PAM sequence: TGG
tagctagaatgtatatattt

SEQ ID NO: 62899 - DNA, 20 bp, Artificial Sequence
  Description of Artificial Sequence: Synthetic oligonucleotide
  Target: LAMA2; (-) strand; PAM type: NRG; PAM sequence: TAG
tagtgctgaaagtacttagc

SEQ ID NO: 62900 - DNA, 20 bp, Artificial Sequence
  Description of Artificial Sequence: Synthetic oligonucleotide
  Target: LAMA2; (-) strand; PAM type: NRG; PAM sequence: TAG
ctcatagtgctgaaagtact

SEQ ID NO: 62901 - DNA, 20 bp, Artificial Sequence
  Description of Artificial Sequence: Synthetic oligonucleotide
  Target: LAMA2; (-) strand; PAM type: NRG; PAM sequence: AAG
aggacaactcatagtgctga

SEQ ID NO: 62902 - DNA, 20 bp, Artificial Sequence
  Description of Artificial Sequence: Synthetic oligonucleotide
  Target: LAMA2; (-) strand; PAM type: NRG; PAM sequence: TAG
tttaaaagaaggacaactca

SEQ ID NO: 62903 - DNA, 20 bp, Artificial Sequence
  Description of Artificial Sequence: Synthetic oligonucleotide
  Target: LAMA2; (-) strand; PAM type: NRG; PAM sequence: AGG
aaaaatttctctttaaaaga

SEQ ID NO: 62904 - DNA, 20 bp, Artificial Sequence
  Description of Artificial Sequence: Synthetic oligonucleotide
  Target: LAMA2; (-) strand; PAM type: NRG; PAM sequence: AAG
aaaaaatttctctttaaaag

SEQ ID NO: 62905 - DNA, 20 bp, Artificial Sequence
  Description of Artificial Sequence: Synthetic oligonucleotide
  Target: LAMA2; (-) strand; PAM type: NRG; PAM sequence: AAG
ttaaaaaaatttctctttaa

SEQ ID NO: 62906 - DNA, 20 bp, Artificial Sequence
  Description of Artificial Sequence: Synthetic oligonucleotide
  Target: LAMA2; (-) strand; PAM type: NRG; PAM sequence: TGG
ttatacaataaatcatggaa

SEQ ID NO: 62907 - DNA, 20 bp, Artificial Sequence
  Description of Artificial Sequence: Synthetic oligonucleotide
  Target: LAMA2; (-) strand; PAM type: NRG; PAM sequence: TGG
ttctcttatacaataaatca

SEQ ID NO: 62908 - DNA, 20 bp, Artificial Sequence
  Description of Artificial Sequence: Synthetic oligonucleotide
  Target: LAMA2; (-) strand; PAM type: NRG; PAM sequence: AGG
ccagggtattattctattgc

SEQ ID NO: 62909 - DNA, 20 bp, Artificial Sequence
  Description of Artificial Sequence: Synthetic oligonucleotide
  Target: LAMA2; (-) strand; PAM type: NRG; PAM sequence: CAG
tccagggtattattctattg

SEQ ID NO: 62910 - DNA, 20 bp, Artificial Sequence
  Description of Artificial Sequence: Synthetic oligonucleotide
  Target: LAMA2; (-) strand; PAM type: NRG; PAM sequence: GGG
tcagtgaaggtggatatcca

SEQ ID NO: 62911 - DNA, 20 bp, Artificial Sequence
  Description of Artificial Sequence: Synthetic oligonucleotide
  Target: LAMA2; (-) strand; PAM type: NRG; PAM sequence: AGG
atcagtgaaggtggatatcc

SEQ ID NO: 62912 - DNA, 20 bp, Artificial Sequence
  Description of Artificial Sequence: Synthetic oligonucleotide
  Target: LAMA2; (-) strand; PAM type: NRG; PAM sequence: CAG
catcagtgaaggtggatatc

SEQ ID NO: 62913 - DNA, 20 bp, Artificial Sequence
  Description of Artificial Sequence: Synthetic oligonucleotide
  Target: LAMA2; (-) strand; PAM type: NRG; PAM sequence: TGG
gttaaactcatcagtgaagg

SEQ ID NO: 62914 - DNA, 20 bp, Artificial Sequence
  Description of Artificial Sequence: Synthetic oligonucleotide
  Target: LAMA2; (-) strand; PAM type: NRG; PAM sequence: AGG
tcagttaaactcatcagtga

SEQ ID NO: 62915 - DNA, 20 bp, Artificial Sequence
  Description of Artificial Sequence: Synthetic oligonucleotide
  Target: LAMA2; (-) strand; PAM type: NRG; PAM sequence: AAG
gtcagttaaactcatcagtg

SEQ ID NO: 62916 - DNA, 20 bp, Artificial Sequence
  Description of Artificial Sequence: Synthetic oligonucleotide
  Target: LAMA2; (-) strand; PAM type: NRG; PAM sequence: CAG
aatgagtcagttaaactcat

SEQ ID NO: 62917 - DNA, 20 bp, Artificial Sequence
  Description of Artificial Sequence: Synthetic oligonucleotide
  Target: LAMA2; (-) strand; PAM type: NRG; PAM sequence: CAG
gttaacaggtaagaatgagt

SEQ ID NO: 62918 - DNA, 20 bp, Artificial Sequence
  Description of Artificial Sequence: Synthetic oligonucleotide
  Target: LAMA2; (-) strand; PAM type: NRG; PAM sequence: GAG
tttggttaacaggtaagaat

SEQ ID NO: 62919 - DNA, 20 bp, Artificial Sequence
  Description of Artificial Sequence: Synthetic oligonucleotide
  Target: LAMA2; (-) strand; PAM type: NRG; PAM sequence: AAG
aaagcatttggttaacaggt

SEQ ID NO: 62920 - DNA, 20 bp, Artificial Sequence
  Description of Artificial Sequence: Synthetic oligonucleotide
  Target: LAMA2; (-) strand; PAM type: NRG; PAM sequence: AGG
ctcaaaagcatttggttaac

SEQ ID NO: 62921 - DNA, 20 bp, Artificial Sequence
  Description of Artificial Sequence: Synthetic oligonucleotide
  Target: LAMA2; (-) strand; PAM type: NRG; PAM sequence: CAG
tctcaaaagcatttggttaa

SEQ ID NO: 62922 - DNA, 20 bp, Artificial Sequence
  Description of Artificial Sequence: Synthetic oligonucleotide
  Target: LAMA2; (-) strand; PAM type: NRG; PAM sequence: TGG
ctttgactctcaaaagcatt

SEQ ID NO: 62923 - DNA, 20 bp, Artificial Sequence
  Description of Artificial Sequence: Synthetic oligonucleotide
  Target: LAMA2; (-) strand; PAM type: NRG; PAM sequence: AAG
accctgcctttgactctcaa

SEQ ID NO: 62924 - DNA, 20 bp, Artificial Sequence
  Description of Artificial Sequence: Synthetic oligonucleotide
  Target: LAMA2; (-) strand; PAM type: NRG; PAM sequence: CAG
tattcattgataattcctct

SEQ ID NO: 62925 - DNA, 20 bp, Artificial Sequence
  Description of Artificial Sequence: Synthetic oligonucleotide
  Target: LAMA2; (-) strand; PAM type: NRG; PAM sequence: AAG
tggaagtttcaactattcac

SEQ ID NO: 62926 - DNA, 20 bp, Artificial Sequence
  Description of Artificial Sequence: Synthetic oligonucleotide
  Target: LAMA2; (-) strand; PAM type: NRG; PAM sequence: AAG
ctacacagccttaatattgg

SEQ ID NO: 62927 - DNA, 20 bp, Artificial Sequence
  Description of Artificial Sequence: Synthetic oligonucleotide
  Target: LAMA2; (-) strand; PAM type: NRG; PAM sequence: TGG
ggcctacacagccttaatat

SEQ ID NO: 62928 - DNA, 20 bp, Artificial Sequence
  Description of Artificial Sequence: Synthetic oligonucleotide
  Target: LAMA2; (-) strand; PAM type: NRG; PAM sequence: CAG
aactagattcttggcctaca

SEQ ID NO: 62929 - DNA, 20 bp, Artificial Sequence
  Description of Artificial Sequence: Synthetic oligonucleotide
  Target: LAMA2; (-) strand; PAM type: NRG; PAM sequence: TGG
tgaaaggataactagattct

SEQ ID NO: 62930 - DNA, 20 bp, Artificial Sequence
  Description of Artificial Sequence: Synthetic oligonucleotide
  Target: LAMA2; (-) strand; PAM type: NRG; PAM sequence: TAG
aaaatttctgaaaggataac

SEQ ID NO: 62931 - DNA, 20 bp, Artificial Sequence
  Description of Artificial Sequence: Synthetic oligonucleotide
  Target: LAMA2; (-) strand; PAM type: NRG; PAM sequence: AGG
cagaaaaaaaaatttctgaa

SEQ ID NO: 62932 - DNA, 20 bp, Artificial Sequence
  Description of Artificial Sequence: Synthetic oligonucleotide
  Target: LAMA2; (-) strand; PAM type: NRG; PAM sequence: AAG
tcagaaaaaaaaatttctga

SEQ ID NO: 62933 - DNA, 20 bp, Artificial Sequence
  Description of Artificial Sequence: Synthetic oligonucleotide
  Target: LAMA2; (-) strand; PAM type: NRG; PAM sequence: CAG
taaggcacagagtaggtggt

SEQ ID NO: 62934 - DNA, 20 bp, Artificial Sequence
  Description of Artificial Sequence: Synthetic oligonucleotide
  Target: LAMA2; (-) strand; PAM type: NRG; PAM sequence: TGG
tgcttaaggcacagagtagg

SEQ ID NO: 62935 - DNA, 20 bp, Artificial Sequence
  Description of Artificial Sequence: Synthetic oligonucleotide
  Target: LAMA2; (-) strand; PAM type: NRG; PAM sequence: AGG
ttttgcttaaggcacagagt

SEQ ID NO: 62936 - DNA, 20 bp, Artificial Sequence
  Description of Artificial Sequence: Synthetic oligonucleotide
  Target: LAMA2; (-) strand; PAM type: NRG; PAM sequence: TAG
cttttgcttaaggcacagag

SEQ ID NO: 62937 - DNA, 20 bp, Artificial Sequence
  Description of Artificial Sequence: Synthetic oligonucleotide
  Target: LAMA2; (-) strand; PAM type: NRG; PAM sequence: GAG
gtacttttgcttaaggcaca

SEQ ID NO: 62938 - DNA, 20 bp, Artificial Sequence
  Description of Artificial Sequence: Synthetic oligonucleotide
  Target: LAMA2; (-) strand; PAM type: NRG; PAM sequence: CAG
aggtacttttgcttaaggca

SEQ ID NO: 62939 - DNA, 20 bp, Artificial Sequence
  Description of Artificial Sequence: Synthetic oligonucleotide
  Target: LAMA2; (-) strand; PAM type: NRG; PAM sequence: AGG
agggcaggtacttttgctta

SEQ ID NO: 62940 - DNA, 20 bp, Artificial Sequence
  Description of Artificial Sequence: Synthetic oligonucleotide
  Target: LAMA2; (-) strand; PAM type: NRG; PAM sequence: AAG
aagggcaggtacttttgctt

SEQ ID NO: 62941 - DNA, 20 bp, Artificial Sequence
  Description of Artificial Sequence: Synthetic oligonucleotide
  Target: LAMA2; (-) strand; PAM type: NRG; PAM sequence: AGG
aaaaagaaagaaagaagggc

SEQ ID NO: 62942 - DNA, 20 bp, Artificial Sequence
  Description of Artificial Sequence: Synthetic oligonucleotide
  Target: LAMA2; (-) strand; PAM type: NRG; PAM sequence: CAG
aaaaaagaaagaaagaaggg

SEQ ID NO: 62943 - DNA, 20 bp, Artificial Sequence
  Description of Artificial Sequence: Synthetic oligonucleotide
  Target: LAMA2; (-) strand; PAM type: NRG; PAM sequence: GGG
aaaaaaaaagaaagaaagaa

SEQ ID NO: 62944 - DNA, 20 bp, Artificial Sequence
  Description of Artificial Sequence: Synthetic oligonucleotide
  Target: LAMA2; (-) strand; PAM type: NRG; PAM sequence: AGG
aaaaaaaaaagaaagaaaga

SEQ ID NO: 62945 - DNA, 20 bp, Artificial Sequence
  Description of Artificial Sequence: Synthetic oligonucleotide
  Target: LAMA2; (-) strand; PAM type: NRG; PAM sequence: AAG
aaaaaaaaaaagaaagaaag

SEQ ID NO: 62946 - DNA, 20 bp, Artificial Sequence
  Description of Artificial Sequence: Synthetic oligonucleotide
  Target: LAMA2; (-) strand; PAM type: NRG; PAM sequence: AAG
aaaaaaaaaaaaaagaaaga

SEQ ID NO: 62947 - DNA, 20 bp, Artificial Sequence
  Description of Artificial Sequence: Synthetic oligonucleotide
  Target: LAMA2; (-) strand; PAM type: NRG; PAM sequence: AAG
aaaaaaaaaaaaaaaaaaga

SEQ ID NO: 62948 - DNA, 20 bp, Artificial Sequence
  Description of Artificial Sequence: Synthetic oligonucleotide
  Target: LAMA2; (-) strand; PAM type: NRG; PAM sequence: AAG
tctcaaaaaaaaaaaaaaaa

SEQ ID NO: 62949 - DNA, 20 bp, Artificial Sequence
  Description of Artificial Sequence: Synthetic oligonucleotide
  Target: LAMA2; (-) strand; PAM type: NRG; PAM sequence: GAG
ggcgaatgttgcagtgagcc

SEQ ID NO: 62950 - DNA, 20 bp, Artificial Sequence
  Description of Artificial Sequence: Synthetic oligonucleotide
  Target: LAMA2; (-) strand; PAM type: NRG; PAM sequence: GAG
cgggaggcgaatgttgcagt

SEQ ID NO: 62951 - DNA, 20 bp, Artificial Sequence
  Description of Artificial Sequence: Synthetic oligonucleotide
  Target: LAMA2; (-) strand; PAM type: NRG; PAM sequence: CAG
aacccgggaggcgaatgttg

SEQ ID NO: 62952 - DNA, 20 bp, Artificial Sequence
  Description of Artificial Sequence: Synthetic oligonucleotide
  Target: LAMA2; (-) strand; PAM type: NRG; PAM sequence: AGG
gtgaatcgcttgaacccggg

SEQ ID NO: 62953 - DNA, 20 bp, Artificial Sequence
  Description of Artificial Sequence: Synthetic oligonucleotide
  Target: LAMA2; (-) strand; PAM type: NRG; PAM sequence: GAG
agtgaatcgcttgaacccgg

SEQ ID NO: 62954 - DNA, 20 bp, Artificial Sequence
  Description of Artificial Sequence: Synthetic oligonucleotide
  Target: LAMA2; (-) strand; PAM type: NRG; PAM sequence: GGG
caagtgaatcgcttgaaccc

SEQ ID NO: 62955 - DNA, 20 bp, Artificial Sequence
  Description of Artificial Sequence: Synthetic oligonucleotide
  Target: LAMA2; (-) strand; PAM type: NRG; PAM sequence: CGG
gcaagtgaatcgcttgaacc

SEQ ID NO: 62956 - DNA, 20 bp, Artificial Sequence
  Description of Artificial Sequence: Synthetic oligonucleotide
  Target: LAMA2; (-) strand; PAM type: NRG; PAM sequence: AAG
gctactcaggaggctgaggc

SEQ ID NO: 62957 - DNA, 20 bp, Artificial Sequence
  Description of Artificial Sequence: Synthetic oligonucleotide
  Target: LAMA2; (-) strand; PAM type: NRG; PAM sequence: AGG
cccagctactcaggaggctg

SEQ ID NO: 62958 - DNA, 20 bp, Artificial Sequence
  Description of Artificial Sequence: Synthetic oligonucleotide
  Target: LAMA2; (-) strand; PAM type: NRG; PAM sequence: GAG
tcccagctactcaggaggct

SEQ ID NO: 62959 - DNA, 20 bp, Artificial Sequence
  Description of Artificial Sequence: Synthetic oligonucleotide
  Target: LAMA2; (-) strand; PAM type: NRG; PAM sequence: AGG
tgtaatcccagctactcagg

SEQ ID NO: 62960 - DNA, 20 bp, Artificial Sequence
  Description of Artificial Sequence: Synthetic oligonucleotide
  Target: LAMA2; (-) strand; PAM type: NRG; PAM sequence: GAG
ctgtaatcccagctactcag

SEQ ID NO: 62961 - DNA, 20 bp, Artificial Sequence
  Description of Artificial Sequence: Synthetic oligonucleotide
  Target: LAMA2; (-) strand; PAM type: NRG; PAM sequence: AGG
gcctgtaatcccagctactc

SEQ ID NO: 62962 - DNA, 20 bp, Artificial Sequence
  Description of Artificial Sequence: Synthetic oligonucleotide
  Target: LAMA2; (-) strand; PAM type: NRG; PAM sequence: CAG
cgcctgtaatcccagctact

SEQ ID NO: 62963 - DNA, 20 bp, Artificial Sequence
  Description of Artificial Sequence: Synthetic oligonucleotide
  Target: LAMA2; (-) strand; PAM type: NRG; PAM sequence: CAG
gtggcaggcgcctgtaatcc

SEQ ID NO: 62964 - DNA, 20 bp, Artificial Sequence
  Description of Artificial Sequence: Synthetic oligonucleotide
  Target: LAMA2; (-) strand; PAM type: NRG; PAM sequence: AGG
aattagcccagcttggtggc

SEQ ID NO: 62965 - DNA, 20 bp, Artificial Sequence
  Description of Artificial Sequence: Synthetic oligonucleotide
  Target: LAMA2; (-) strand; PAM type: NRG; PAM sequence: CAG
aaattagcccagcttggtgg

SEQ ID NO: 62966 - DNA, 20 bp, Artificial Sequence
  Description of Artificial Sequence: Synthetic oligonucleotide
  Target: LAMA2; (-) strand; PAM type: NRG; PAM sequence: TGG
caaaaattagcccagcttgg

SEQ ID NO: 62967 - DNA, 20 bp, Artificial Sequence
  Description of Artificial Sequence: Synthetic oligonucleotide
  Target: LAMA2; (-) strand; PAM type: NRG; PAM sequence: TGG
atacaaaaattagcccagct

SEQ ID NO: 62968 - DNA, 20 bp, Artificial Sequence
  Description of Artificial Sequence: Synthetic oligonucleotide
  Target: LAMA2; (-) strand; PAM type: NRG; PAM sequence: CAG
taaaaatacaaaaattagcc

SEQ ID NO: 62969 - DNA, 20 bp, Artificial Sequence
  Description of Artificial Sequence: Synthetic oligonucleotide
  Target: LAMA2; (-) strand; PAM type: NRG; PAM sequence: TAG
tctactaaaaatacaaaaat

SEQ ID NO: 62970 - DNA, 20 bp, Artificial Sequence
  Description of Artificial Sequence: Synthetic oligonucleotide
  Target: LAMA2; (-) strand; PAM type: NRG; PAM sequence: TGG
caagaccagtctggccaaca

SEQ ID NO: 62971 - DNA, 20 bp, Artificial Sequence
  Description of Artificial Sequence: Synthetic oligonucleotide
  Target: LAMA2; (-) strand; PAM type: NRG; PAM sequence: TGG
tcaagagttcaagaccagtc

SEQ ID NO: 62972 - DNA, 20 bp, Artificial Sequence
  Description of Artificial Sequence: Synthetic oligonucleotide
  Target: LAMA2; (-) strand; PAM type: NRG; PAM sequence: CAG
tgaggtcaagagttcaagac

SEQ ID NO: 62973 - DNA, 20 bp, Artificial Sequence
  Description of Artificial Sequence: Synthetic oligonucleotide
  Target: LAMA2; (-) strand; PAM type: NRG; PAM sequence: AAG
gatcatgaggtcaagagttc

SEQ ID NO: 62974 - DNA, 20 bp, Artificial Sequence
  Description of Artificial Sequence: Synthetic oligonucleotide
  Target: LAMA2; (-) strand; PAM type: NRG; PAM sequence: GAG
catgcagatcatgaggtcaa

SEQ ID NO: 62975 - DNA, 20 bp, Artificial Sequence
  Description of Artificial Sequence: Synthetic oligonucleotide
  Target: LAMA2; (-) strand; PAM type: NRG; PAM sequence: AAG
ggcatgcagatcatgaggtc

SEQ ID NO: 62976 - DNA, 20 bp, Artificial Sequence
  Description of Artificial Sequence: Synthetic oligonucleotide
  Target: LAMA2; (-) strand; PAM type: NRG; PAM sequence: AGG
gctcaggcatgcagatcatg

SEQ ID NO: 62977 - DNA, 20 bp, Artificial Sequence
  Description of Artificial Sequence: Synthetic oligonucleotide
  Target: LAMA2; (-) strand; PAM type: NRG; PAM sequence: GAG
ggctcaggcatgcagatcat

SEQ ID NO: 62978 - DNA, 20 bp, Artificial Sequence
  Description of Artificial Sequence: Synthetic oligonucleotide
  Target: LAMA2; (-) strand; PAM type: NRG; PAM sequence: CAG
ctttgggaggctcaggcatg

SEQ ID NO: 62979 - DNA, 20 bp, Artificial Sequence
  Description of Artificial Sequence: Synthetic oligonucleotide
  Target: LAMA2; (-) strand; PAM type: NRG; PAM sequence: AGG
cccagcactttgggaggctc

SEQ ID NO: 62980 - DNA, 20 bp, Artificial Sequence
  Description of Artificial Sequence: Synthetic oligonucleotide
  Target: LAMA2; (-) strand; PAM type: NRG; PAM sequence: CAG
tcccagcactttgggaggct

SEQ ID NO: 62981 - DNA, 20 bp, Artificial Sequence
  Description of Artificial Sequence: Synthetic oligonucleotide
  Target: LAMA2; (-) strand; PAM type: NRG; PAM sequence: AGG
tgtaatcccagcactttggg

SEQ ID NO: 62982 - DNA, 20 bp, Artificial Sequence
  Description of Artificial Sequence: Synthetic oligonucleotide
  Target: LAMA2; (-) strand; PAM type: NRG; PAM sequence: GAG
ttgtaatcccagcactttgg

SEQ ID NO: 62983 - DNA, 20 bp, Artificial Sequence
  Description of Artificial Sequence: Synthetic oligonucleotide
  Target: LAMA2; (-) strand; PAM type: NRG; PAM sequence: GGG
gcttgtaatcccagcacttt

SEQ ID NO: 62984 - DNA, 20 bp, Artificial Sequence
  Description of Artificial Sequence: Synthetic oligonucleotide
  Target: LAMA2; (-) strand; PAM type: NRG; PAM sequence: TGG
cgcttgtaatcccagcactt

SEQ ID NO: 62985 - DNA, 20 bp, Artificial Sequence
  Description of Artificial Sequence: Synthetic oligonucleotide
  Target: LAMA2; (-) strand; PAM type: NRG; PAM sequence: CAG
gtggctcacgcttgtaatcc

SEQ ID NO: 62986 - DNA, 20 bp, Artificial Sequence
  Description of Artificial Sequence: Synthetic oligonucleotide
  Target: LAMA2; (-) strand; PAM type: NRG; PAM sequence: TGG
caggtactgaccgggcatgg

SEQ ID NO: 62987 - DNA, 20 bp, Artificial Sequence
  Description of Artificial Sequence: Synthetic oligonucleotide
  Target: LAMA2; (-) strand; PAM type: NRG; PAM sequence: TGG
gggcaggtactgaccgggca

SEQ ID NO: 62988 - DNA, 20 bp, Artificial Sequence
  Description of Artificial Sequence: Synthetic oligonucleotide
  Target: LAMA2; (-) strand; PAM type: NRG; PAM sequence: GGG
gagaagggcaggtactgacc

SEQ ID NO: 62989 - DNA, 20 bp, Artificial Sequence
  Description of Artificial Sequence: Synthetic oligonucleotide
  Target: LAMA2; (-) strand; PAM type: NRG; PAM sequence: CGG
agagaagggcaggtactgac

SEQ ID NO: 62990 - DNA, 20 bp, Artificial Sequence
  Description of Artificial Sequence: Synthetic oligonucleotide
  Target: LAMA2; (-) strand; PAM type: NRG; PAM sequence: AGG
aagtgcctttagagaagggc

SEQ ID NO: 62991 - DNA, 20 bp, Artificial Sequence
  Description of Artificial Sequence: Synthetic oligonucleotide
  Target: LAMA2; (-) strand; PAM type: NRG; PAM sequence: CAG
caagtgcctttagagaaggg

SEQ ID NO: 62992 - DNA, 20 bp, Artificial Sequence
  Description of Artificial Sequence: Synthetic oligonucleotide
  Target: LAMA2; (-) strand; PAM type: NRG; PAM sequence: GGG
aagcaagtgcctttagagaa

SEQ ID NO: 62993 - DNA, 20 bp, Artificial Sequence
  Description of Artificial Sequence: Synthetic oligonucleotide
  Target: LAMA2; (-) strand; PAM type: NRG; PAM sequence: AGG
caagcaagtgcctttagaga

SEQ ID NO: 62994 - DNA, 20 bp, Artificial Sequence
  Description of Artificial Sequence: Synthetic oligonucleotide
  Target: LAMA2; (-) strand; PAM type: NRG; PAM sequence: AAG
gcaagcaagtgcctttagag

SEQ ID NO: 62995 - DNA, 20 bp, Artificial Sequence
  Description of Artificial Sequence: Synthetic oligonucleotide
  Target: LAMA2; (-) strand; PAM type: NRG; PAM sequence: GAG
actgcaagcaagtgccttta

SEQ ID NO: 62996 - DNA, 20 bp, Artificial Sequence
  Description of Artificial Sequence: Synthetic oligonucleotide
  Target: LAMA2; (-) strand; PAM type: NRG; PAM sequence: TAG
agactgcaagcaagtgcctt

SEQ ID NO: 62997 - DNA, 20 bp, Artificial Sequence
  Description of Artificial Sequence: Synthetic oligonucleotide
  Target: LAMA2; (-) strand; PAM type: NRG; PAM sequence: AAG
ctcctccaaagactgcaagc

SEQ ID NO: 62998 - DNA, 20 bp, Artificial Sequence
  Description of Artificial Sequence: Synthetic oligonucleotide
  Target: LAMA2; (-) strand; PAM type: NRG; PAM sequence: AAG
ttatctcctccaaagactgc

SEQ ID NO: 62999 - DNA, 20 bp, Artificial Sequence
  Description of Artificial Sequence: Synthetic oligonucleotide
  Target: LAMA2; (-) strand; PAM type: NRG; PAM sequence: AAG
atcaaagcttatctcctcca

SEQ ID NO: 63000 - DNA, 20 bp, Artificial Sequence
  Description of Artificial Sequence: Synthetic oligonucleotide
  Target: LAMA2; (-) strand; PAM type: NRG; PAM sequence: AAG
ttaggttgatgagttgatca

SEQ ID NO: 63001 - DNA, 20 bp, Artificial Sequence
  Description of Artificial Sequence: Synthetic oligonucleotide
  Target: LAMA2; (-) strand; PAM type: NRG; PAM sequence: GAG
atacttgccattaggttgat

SEQ ID NO: 63002 - DNA, 20 bp, Artificial Sequence
  Description of Artificial Sequence: Synthetic oligonucleotide
  Target: LAMA2; (-) strand; PAM type: NRG; PAM sequence: AGG
gtcaaatgatacttgccatt

SEQ ID NO: 63003 - DNA, 20 bp, Artificial Sequence
  Description of Artificial Sequence: Synthetic oligonucleotide
  Target: LAMA2; (-) strand; PAM type: NRG; PAM sequence: TAG
agtcaaatgatacttgccat

SEQ ID NO: 63004 - DNA, 20 bp, Artificial Sequence
  Description of Artificial Sequence: Synthetic oligonucleotide
  Target: LAMA2; (-) strand; PAM type: NRG; PAM sequence: AAG
cctgtttcttatcttttctc

SEQ ID NO: 63005 - DNA, 20 bp, Artificial Sequence
  Description of Artificial Sequence: Synthetic oligonucleotide
  Target: LAMA2; (-) strand; PAM type: NRG; PAM sequence: GAG
atcttgtagatcacactatt

SEQ ID NO: 63006 - DNA, 20 bp, Artificial Sequence
  Description of Artificial Sequence: Synthetic oligonucleotide
  Target: LAMA2; (-) strand; PAM type: NRG; PAM sequence: TAG
actgactgctgtctatcttg

SEQ ID NO: 63007 - DNA, 20 bp, Artificial Sequence
  Description of Artificial Sequence: Synthetic oligonucleotide
  Target: LAMA2; (-) strand; PAM type: NRG; PAM sequence: AAG
agtcacttcctcagagaagc

SEQ ID NO: 63008 - DNA, 20 bp, Artificial Sequence
  Description of Artificial Sequence: Synthetic oligonucleotide
  Target: LAMA2; (-) strand; PAM type: NRG; PAM sequence: AAG
caagagtcacttcctcagag

SEQ ID NO: 63009 - DNA, 20 bp, Artificial Sequence
  Description of Artificial Sequence: Synthetic oligonucleotide
  Target: LAMA2; (-) strand; PAM type: NRG; PAM sequence: GAG
ttccaagagtcacttcctca

SEQ ID NO: 63010 - DNA, 20 bp, Artificial Sequence
  Description of Artificial Sequence: Synthetic oligonucleotide
  Target: LAMA2; (-) strand; PAM type: NRG; PAM sequence: CAG
tcttccaagagtcacttcct

SEQ ID NO: 63011 - DNA, 20 bp, Artificial Sequence
  Description of Artificial Sequence: Synthetic oligonucleotide
  Target: LAMA2; (-) strand; PAM type: NRG; PAM sequence: GAG
gctcttactaattcttccaa

SEQ ID NO: 63012 - DNA, 20 bp, Artificial Sequence
  Description of Artificial Sequence: Synthetic oligonucleotide
  Target: LAMA2; (-) strand; PAM type: NRG; PAM sequence: AAG
tagctcttactaattcttcc

SEQ ID NO: 63013 - DNA, 20 bp, Artificial Sequence
  Description of Artificial Sequence: Synthetic oligonucleotide
  Target: LAMA2; (-) strand; PAM type: NRG; PAM sequence: TAG
cttacccgaatttgcccacc

SEQ ID NO: 63014 - DNA, 20 bp, Artificial Sequence
  Description of Artificial Sequence: Synthetic oligonucleotide
  Target: LAMA2; (-) strand; PAM type: NRG; PAM sequence: GAG
agaggaactatgttcctgtg

SEQ ID NO: 63015 - DNA, 20 bp, Artificial Sequence
  Description of Artificial Sequence: Synthetic oligonucleotide
  Target: LAMA2; (-) strand; PAM type: NRG; PAM sequence: TGG
ggagaggaactatgttcctg

SEQ ID NO: 63016 - DNA, 20 bp, Artificial Sequence
  Description of Artificial Sequence: Synthetic oligonucleotide
  Target: LAMA2; (-) strand; PAM type: NRG; PAM sequence: AGG
tctccataatacagcaggag

SEQ ID NO: 63017 - DNA, 20 bp, Artificial Sequence
  Description of Artificial Sequence: Synthetic oligonucleotide
  Target: LAMA2; (-) strand; PAM type: NRG; PAM sequence: GAG
ctctccataatacagcagga

SEQ ID NO: 63018 - DNA, 20 bp, Artificial Sequence
  Description of Artificial Sequence: Synthetic oligonucleotide
  Target: LAMA2; (-) strand; PAM type: NRG; PAM sequence: GAG
ttctctccataatacagcag

SEQ ID NO: 63019 - DNA, 20 bp, Artificial Sequence
  Description of Artificial Sequence: Synthetic oligonucleotide
  Target: LAMA2; (-) strand; PAM type: NRG; PAM sequence: AGG
tgttctctccataatacagc

SEQ ID NO: 63020 - DNA, 20 bp, Artificial Sequence
  Description of Artificial Sequence: Synthetic oligonucleotide
  Target: LAMA2; (-) strand; PAM type: NRG; PAM sequence: CAG
atgttctctccataatacag

SEQ ID NO: 63021 - DNA, 20 bp, Artificial Sequence
  Description of Artificial Sequence: Synthetic oligonucleotide
  Target: LAMA2; (-) strand; PAM type: NRG; PAM sequence: CAG
tccatgttctctccataata

SEQ ID NO: 63022 - DNA, 20 bp, Artificial Sequence
  Description of Artificial Sequence: Synthetic oligonucleotide
  Target: LAMA2; (-) strand; PAM type: NRG; PAM sequence: AGG
tgacatttttatatctctga

SEQ ID NO: 63023 - DNA, 20 bp, Artificial Sequence
  Description of Artificial Sequence: Synthetic oligonucleotide
  Target: LAMA2; (-) strand; PAM type: NRG; PAM sequence: AAG
atgacatttttatatctctg

SEQ ID NO: 63024 - DNA, 20 bp, Artificial Sequence
  Description of Artificial Sequence: Synthetic oligonucleotide
  Target: LAMA2; (-) strand; PAM type: NRG; PAM sequence: CAG
ttcccttcatctttgcattc

SEQ ID NO: 63025 - DNA, 20 bp, Artificial Sequence
  Description of Artificial Sequence: Synthetic oligonucleotide
  Target: LAMA2; (-) strand; PAM type: NRG; PAM sequence: AAG
tataatgcaccaaattctta

SEQ ID NO: 63026 - DNA, 20 bp, Artificial Sequence
  Description of Artificial Sequence: Synthetic oligonucleotide
  Target: LAMA2; (-) strand; PAM type: NRG; PAM sequence: GAG
agtggcaaacatcatttaat

SEQ ID NO: 63027 - DNA, 20 bp, Artificial Sequence
  Description of Artificial Sequence: Synthetic oligonucleotide
  Target: LAMA2; (-) strand; PAM type: NRG; PAM sequence: TGG
agaatgtttgttgacccaag

SEQ ID NO: 63028 - DNA, 20 bp, Artificial Sequence
  Description of Artificial Sequence: Synthetic oligonucleotide
  Target: LAMA2; (-) strand; PAM type: NRG; PAM sequence: AAG
tacagaatgtttgttgaccc

SEQ ID NO: 63029 - DNA, 20 bp, Artificial Sequence
  Description of Artificial Sequence: Synthetic oligonucleotide
  Target: LAMA2; (-) strand; PAM type: NRG; PAM sequence: CAG
acttactatctaagccttta

SEQ ID NO: 63030 - DNA, 20 bp, Artificial Sequence
  Description of Artificial Sequence: Synthetic oligonucleotide
  Target: LAMA2; (-) strand; PAM type: NRG; PAM sequence: AAG
atttataatacttactatct

SEQ ID NO: 63031 - DNA, 20 bp, Artificial Sequence
  Description of Artificial Sequence: Synthetic oligonucleotide
  Target: LAMA2; (-) strand; PAM type: NRG; PAM sequence: GAG
agagttgagtaattgcaaca

SEQ ID NO: 63032 - DNA, 20 bp, Artificial Sequence
  Description of Artificial Sequence: Synthetic oligonucleotide
  Target: LAMA2; (-) strand; PAM type: NRG; PAM sequence: CAG
gcagagttgagtaattgcaa

SEQ ID NO: 63033 - DNA, 20 bp, Artificial Sequence
  Description of Artificial Sequence: Synthetic oligonucleotide
  Target: LAMA2; (-) strand; PAM type: NRG; PAM sequence: GAG
tcccttacaacagcagagtt

SEQ ID NO: 63034 - DNA, 20 bp, Artificial Sequence
  Description of Artificial Sequence: Synthetic oligonucleotide
  Target: LAMA2; (-) strand; PAM type: NRG; PAM sequence: GAG
gcttctcccttacaacagca

SEQ ID NO: 63035 - DNA, 20 bp, Artificial Sequence
  Description of Artificial Sequence: Synthetic oligonucleotide
  Target: LAMA2; (-) strand; PAM type: NRG; PAM sequence: CAG
ctgcttctcccttacaacag

SEQ ID NO: 63036 - DNA, 20 bp, Artificial Sequence
  Description of Artificial Sequence: Synthetic oligonucleotide
  Target: LAMA2; (-) strand; PAM type: NRG; PAM sequence: CAG
tatctgcttctcccttacaa

SEQ ID NO: 63037 - DNA, 20 bp, Artificial Sequence
  Description of Artificial Sequence: Synthetic oligonucleotide
  Target: LAMA2; (-) strand; PAM type: NRG; PAM sequence: TGG
tttctgtaaataaagcttta

SEQ ID NO: 63038 - DNA, 20 bp, Artificial Sequence
  Description of Artificial Sequence: Synthetic oligonucleotide
  Target: LAMA2; (-) strand; PAM type: NRG; PAM sequence: AAG
atggcttgtttctgtaaata

SEQ ID NO: 63039 - DNA, 20 bp, Artificial Sequence
  Description of Artificial Sequence: Synthetic oligonucleotide
  Target: LAMA2; (-) strand; PAM type: NRG; PAM sequence: TGG
agatatgccagatactgtca

SEQ ID NO: 63040 - DNA, 20 bp, Artificial Sequence
  Description of Artificial Sequence: Synthetic oligonucleotide
  Target: LAMA2; (-) strand; PAM type: NRG; PAM sequence: CAG
tatctgatcaggagatatgc

SEQ ID NO: 63041 - DNA, 20 bp, Artificial Sequence
  Description of Artificial Sequence: Synthetic oligonucleotide
  Target: LAMA2; (-) strand; PAM type: NRG; PAM sequence: GAG
atgaggatttatctgatcag

SEQ ID NO: 63042 - DNA, 20 bp, Artificial Sequence
  Description of Artificial Sequence: Synthetic oligonucleotide
  Target: LAMA2; (-) strand; PAM type: NRG; PAM sequence: AGG
acatgaggatttatctgatc

SEQ ID NO: 63043 - DNA, 20 bp, Artificial Sequence
  Description of Artificial Sequence: Synthetic oligonucleotide
  Target: LAMA2; (-) strand; PAM type: NRG; PAM sequence: CAG
aacatgaggatttatctgat

SEQ ID NO: 63044 - DNA, 20 bp, Artificial Sequence
  Description of Artificial Sequence: Synthetic oligonucleotide
  Target: LAMA2; (-) strand; PAM type: NRG; PAM sequence: AGG
ggaaataaggcagcaacatg

SEQ ID NO: 63045 - DNA, 20 bp, Artificial Sequence
  Description of Artificial Sequence: Synthetic oligonucleotide
  Target: LAMA2; (-) strand; PAM type: NRG; PAM sequence: GAG
gggaaataaggcagcaacat

SEQ ID NO: 63046 - DNA, 20 bp, Artificial Sequence
  Description of Artificial Sequence: Synthetic oligonucleotide
  Target: LAMA2; (-) strand; PAM type: NRG; PAM sequence: CAG
ggagacattgggaaataagg

SEQ ID NO: 63047 - DNA, 20 bp, Artificial Sequence
  Description of Artificial Sequence: Synthetic oligonucleotide
  Target: LAMA2; (-) strand; PAM type: NRG; PAM sequence: AGG
aacggagacattgggaaata

SEQ ID NO: 63048 - DNA, 20 bp, Artificial Sequence
  Description of Artificial Sequence: Synthetic oligonucleotide
  Target: LAMA2; (-) strand; PAM type: NRG; PAM sequence: AAG
aaacggagacattgggaaat

SEQ ID NO: 63049 - DNA, 20 bp, Artificial Sequence
  Description of Artificial Sequence: Synthetic oligonucleotide
  Target: LAMA2; (-) strand; PAM type: NRG; PAM sequence: GGG
ctagttcaaacggagacatt

SEQ ID NO: 63050 - DNA, 20 bp, Artificial Sequence
  Description of Artificial Sequence: Synthetic oligonucleotide
  Target: LAMA2; (-) strand; PAM type: NRG; PAM sequence: TGG
actagttcaaacggagacat

SEQ ID NO: 63051 - DNA, 20 bp, Artificial Sequence
  Description of Artificial Sequence: Synthetic oligonucleotide
  Target: LAMA2; (-) strand; PAM type: NRG; PAM sequence: GAG
tccctgcactagttcaaacg

SEQ ID NO: 63052 - DNA, 20 bp, Artificial Sequence
  Description of Artificial Sequence: Synthetic oligonucleotide
  Target: LAMA2; (-) strand; PAM type: NRG; PAM sequence: CGG
tatccctgcactagttcaaa

SEQ ID NO: 63053 - DNA, 20 bp, Artificial Sequence
  Description of Artificial Sequence: Synthetic oligonucleotide
  Target: LAMA2; (-) strand; PAM type: NRG; PAM sequence: TAG
tctccaaaatatccctgcac

SEQ ID NO: 63054 - DNA, 20 bp, Artificial Sequence
  Description of Artificial Sequence: Synthetic oligonucleotide
  Target: LAMA2; (-) strand; PAM type: NRG; PAM sequence: AAG
ttgctgactaggcattgcta

SEQ ID NO: 63055 - DNA, 20 bp, Artificial Sequence
  Description of Artificial Sequence: Synthetic oligonucleotide
  Target: LAMA2; (-) strand; PAM type: NRG; PAM sequence: AGG
tacactgatgcttgctgact

SEQ ID NO: 63056 - DNA, 20 bp, Artificial Sequence
  Description of Artificial Sequence: Synthetic oligonucleotide
  Target: LAMA2; (-) strand; PAM type: NRG; PAM sequence: TAG
gtacactgatgcttgctgac

SEQ ID NO: 63057 - DNA, 20 bp, Artificial Sequence
  Description of Artificial Sequence: Synthetic oligonucleotide
  Target: LAMA2; (-) strand; PAM type: NRG; PAM sequence: AAG
aacccgattttcaatgtcta

SEQ ID NO: 63058 - DNA, 20 bp, Artificial Sequence
  Description of Artificial Sequence: Synthetic oligonucleotide
  Target: LAMA2; (-) strand; PAM type: NRG; PAM sequence: CAG
acttcaaaggaaaatcaaag

SEQ ID NO: 63059 - DNA, 20 bp, Artificial Sequence
  Description of Artificial Sequence: Synthetic oligonucleotide
  Target: LAMA2; (-) strand; PAM type: NRG; PAM sequence: AAG
attacttcaaaggaaaatca

SEQ ID NO: 63060 - DNA, 20 bp, Artificial Sequence
  Description of Artificial Sequence: Synthetic oligonucleotide
  Target: LAMA2; (-) strand; PAM type: NRG; PAM sequence: AGG
ttcttgtgacattacttcaa

SEQ ID NO: 63061 - DNA, 20 bp, Artificial Sequence
  Description of Artificial Sequence: Synthetic oligonucleotide
  Target: LAMA2; (-) strand; PAM type: NRG; PAM sequence: AAG
cttcttgtgacattacttca

SEQ ID NO: 63062 - DNA, 20 bp, Artificial Sequence
  Description of Artificial Sequence: Synthetic oligonucleotide
  Target: LAMA2; (-) strand; PAM type: NRG; PAM sequence: CAG
tccttccttggcaaatgaac

SEQ ID NO: 63063 - DNA, 20 bp, Artificial Sequence
  Description of Artificial Sequence: Synthetic oligonucleotide
  Target: LAMA2; (-) strand; PAM type: NRG; PAM sequence: TGG
ctttcatgctcttccttcct

SEQ ID NO: 63064 - DNA, 20 bp, Artificial Sequence
  Description of Artificial Sequence: Synthetic oligonucleotide
  Target: LAMA2; (-) strand; PAM type: NRG; PAM sequence: TGG
ttcctctagtacctagttac

SEQ ID NO: 63065 - DNA, 20 bp, Artificial Sequence
  Description of Artificial Sequence: Synthetic oligonucleotide
  Target: LAMA2; (-) strand; PAM type: NRG; PAM sequence: TAG
cactcctttcctctagtacc

SEQ ID NO: 63066 - DNA, 20 bp, Artificial Sequence
  Description of Artificial Sequence: Synthetic oligonucleotide
  Target: LAMA2; (-) strand; PAM type: NRG; PAM sequence: TAG
ttcttagcactcctttcctc

SEQ ID NO: 63067 - DNA, 20 bp, Artificial Sequence
  Description of Artificial Sequence: Synthetic oligonucleotide
  Target: LAMA2; (-) strand; PAM type: NRG; PAM sequence: TAG
atcccttttgaacattttct

SEQ ID NO: 63068 - DNA, 20 bp, Artificial Sequence
  Description of Artificial Sequence: Synthetic oligonucleotide
  Target: LAMA2; (-) strand; PAM type: NRG; PAM sequence: AAG
ccaagtgatctttgcttttc

SEQ ID NO: 63069 - DNA, 20 bp, Artificial Sequence
  Description of Artificial Sequence: Synthetic oligonucleotide
  Target: LAMA2; (-) strand; PAM type: NRG; PAM sequence: AAG
tttgaacaagttcatctacc

SEQ ID NO: 63070 - DNA, 20 bp, Artificial Sequence
  Description of Artificial Sequence: Synthetic oligonucleotide
  Target: LAMA2; (-) strand; PAM type: NRG; PAM sequence: AAG
agttagcgaacactttgaac

SEQ ID NO: 63071 - DNA, 20 bp, Artificial Sequence
  Description of Artificial Sequence: Synthetic oligonucleotide
  Target: LAMA2; (-) strand; PAM type: NRG; PAM sequence: TAG
tgttcttgcaagaggtgagt

SEQ ID NO: 63072 - DNA, 20 bp, Artificial Sequence
  Description of Artificial Sequence: Synthetic oligonucleotide
  Target: LAMA2; (-) strand; PAM type: NRG; PAM sequence: GAG
agtttgttcttgcaagaggt

SEQ ID NO: 63073 - DNA, 20 bp, Artificial Sequence
  Description of Artificial Sequence: Synthetic oligonucleotide
  Target: LAMA2; (-) strand; PAM type: NRG; PAM sequence: AGG
agatagtttgttcttgcaag

SEQ ID NO: 63074 - DNA, 20 bp, Artificial Sequence
  Description of Artificial Sequence: Synthetic oligonucleotide
  Target: LAMA2; (-) strand; PAM type: NRG; PAM sequence: GAG
aagatagtttgttcttgcaa

SEQ ID NO: 63075 - DNA, 20 bp, Artificial Sequence
  Description of Artificial Sequence: Synthetic oligonucleotide
  Target: LAMA2; (-) strand; PAM type: NRG; PAM sequence: AAG
gcaagatagtttgttcttgc

SEQ ID NO: 63076 - DNA, 20 bp, Artificial Sequence
  Description of Artificial Sequence: Synthetic oligonucleotide
  Target: LAMA2; (-) strand; PAM type: NRG; PAM sequence: TAG
tgcagtagagccttgcaaga

SEQ ID NO: 63077 - DNA, 20 bp, Artificial Sequence
  Description of Artificial Sequence: Synthetic oligonucleotide
  Target: LAMA2; (-) strand; PAM type: NRG; PAM sequence: AAG
atgttgcagtagagccttgc

SEQ ID NO: 63078 - DNA, 20 bp, Artificial Sequence
  Description of Artificial Sequence: Synthetic oligonucleotide
  Target: LAMA2; (-) strand; PAM type: NRG; PAM sequence: GAG
gtatcagacatgttgcagta

SEQ ID NO: 63079 - DNA, 20 bp, Artificial Sequence
  Description of Artificial Sequence: Synthetic oligonucleotide
  Target: LAMA2; (-) strand; PAM type: NRG; PAM sequence: TAG
gtgtatcagacatgttgcag

SEQ ID NO: 63080 - DNA, 20 bp, Artificial Sequence
  Description of Artificial Sequence: Synthetic oligonucleotide
  Target: LAMA2; (-) strand; PAM type: NRG; PAM sequence: CAG
gctgtgtatcagacatgttg

SEQ ID NO: 63081 - DNA, 20 bp, Artificial Sequence
  Description of Artificial Sequence: Synthetic oligonucleotide
  Target: LAMA2; (-) strand; PAM type: NRG; PAM sequence: CAG
tgactgcaggtgctgtgtat

SEQ ID NO: 63082 - DNA, 20 bp, Artificial Sequence
  Description of Artificial Sequence: Synthetic oligonucleotide
  Target: LAMA2; (-) strand; PAM type: NRG; PAM sequence: AGG
ctacagagtctgttgactgc

SEQ ID NO: 63083 - DNA, 20 bp, Artificial Sequence
  Description of Artificial Sequence: Synthetic oligonucleotide
  Target: LAMA2; (-) strand; PAM type: NRG; PAM sequence: CAG
actacagagtctgttgactg

SEQ ID NO: 63084 - DNA, 20 bp, Artificial Sequence
  Description of Artificial Sequence: Synthetic oligonucleotide
  Target: LAMA2; (-) strand; PAM type: NRG; PAM sequence: GAG
ctcaatactttgcaactaca

SEQ ID NO: 63085 - DNA, 20 bp, Artificial Sequence
  Description of Artificial Sequence: Synthetic oligonucleotide
  Target: LAMA2; (-) strand; PAM type: NRG; PAM sequence: CAG
aactcaatactttgcaacta

SEQ ID NO: 63086 - DNA, 20 bp, Artificial Sequence
  Description of Artificial Sequence: Synthetic oligonucleotide
  Target: LAMA2; (-) strand; PAM type: NRG; PAM sequence: GAG
tccattaacttctatagctt

SEQ ID NO: 63087 - DNA, 20 bp, Artificial Sequence
  Description of Artificial Sequence: Synthetic oligonucleotide
  Target: LAMA2; (-) strand; PAM type: NRG; PAM sequence: TAG
tgacagtccattaacttcta

SEQ ID NO: 63088 - DNA, 20 bp, Artificial Sequence
  Description of Artificial Sequence: Synthetic oligonucleotide
  Target: LAMA2; (-) strand; PAM type: NRG; PAM sequence: CAG
tcatctgaacaatgttatga

SEQ ID NO: 63089 - DNA, 20 bp, Artificial Sequence
  Description of Artificial Sequence: Synthetic oligonucleotide
  Target: LAMA2; (-) strand; PAM type: NRG; PAM sequence: GGG
ttagtctgttaagctttgct

SEQ ID NO: 63090 - DNA, 20 bp, Artificial Sequence
  Description of Artificial Sequence: Synthetic oligonucleotide
  Target: LAMA2; (-) strand; PAM type: NRG; PAM sequence: TGG
cttagtctgttaagctttgc

SEQ ID NO: 63091 - DNA, 20 bp, Artificial Sequence
  Description of Artificial Sequence: Synthetic oligonucleotide
  Target: LAMA2; (-) strand; PAM type: NRG; PAM sequence: AAG
aaaatccaccttagtctgtt

SEQ ID NO: 63092 - DNA, 20 bp, Artificial Sequence
  Description of Artificial Sequence: Synthetic oligonucleotide
  Target: LAMA2; (-) strand; PAM type: NRG; PAM sequence: TAG
aggggaggcaaaatccacct

SEQ ID NO: 63093 - DNA, 20 bp, Artificial Sequence
  Description of Artificial Sequence: Synthetic oligonucleotide
  Target: LAMA2; (-) strand; PAM type: NRG; PAM sequence: AGG
tagcactggattaaaagggg

SEQ ID NO: 63094 - DNA, 20 bp, Artificial Sequence
  Description of Artificial Sequence: Synthetic oligonucleotide
  Target: LAMA2; (-) strand; PAM type: NRG; PAM sequence: GAG
ttagcactggattaaaaggg

SEQ ID NO: 63095 - DNA, 20 bp, Artificial Sequence
  Description of Artificial Sequence: Synthetic oligonucleotide
  Target: LAMA2; (-) strand; PAM type: NRG; PAM sequence: GGG
aattagcactggattaaaag

SEQ ID NO: 63096 - DNA, 20 bp, Artificial Sequence
  Description of Artificial Sequence: Synthetic oligonucleotide
  Target: LAMA2; (-) strand; PAM type: NRG; PAM sequence: GGG
aaattagcactggattaaaa

SEQ ID NO: 63097 - DNA, 20 bp, Artificial Sequence
  Description of Artificial Sequence: Synthetic oligonucleotide
  Target: LAMA2; (-) strand; PAM type: NRG; PAM sequence: AGG
gaaattagcactggattaaa

SEQ ID NO: 63098 - DNA, 20 bp, Artificial Sequence
  Description of Artificial Sequence: Synthetic oligonucleotide
  Target: LAMA2; (-) strand; PAM type: NRG; PAM sequence: AAG
agaaattagcactggattaa

SEQ ID NO: 63099 - DNA, 20 bp, Artificial Sequence
  Description of Artificial Sequence: Synthetic oligonucleotide
  Target: LAMA2; (-) strand; PAM type: NRG; PAM sequence: TGG
ttactcaaagaaattagcac

SEQ ID NO: 63100 - DNA, 20 bp, Artificial Sequence
  Description of Artificial Sequence: Synthetic oligonucleotide
  Target: LAMA2; (-) strand; PAM type: NRG; PAM sequence: TAG
ctgagattactcaaagaaat

SEQ ID NO: 63101 - DNA, 20 bp, Artificial Sequence
  Description of Artificial Sequence: Synthetic oligonucleotide
  Target: LAMA2; (-) strand; PAM type: NRG; PAM sequence: AAG
aagttttctgagattactca

SEQ ID NO: 63102 - DNA, 20 bp, Artificial Sequence
  Description of Artificial Sequence: Synthetic oligonucleotide
  Target: LAMA2; (-) strand; PAM type: NRG; PAM sequence: GAG
ttagcataaaaaagttttct

SEQ ID NO: 63103 - DNA, 20 bp, Artificial Sequence
  Description of Artificial Sequence: Synthetic oligonucleotide
  Target: LAMA2; (-) strand; PAM type: NRG; PAM sequence: AAG
tgaatcactttagcataaaa

SEQ ID NO: 63104 - DNA, 20 bp, Artificial Sequence
  Description of Artificial Sequence: Synthetic oligonucleotide
  Target: LAMA2; (-) strand; PAM type: NRG; PAM sequence: TAG
actttataaatgaatcactt

SEQ ID NO: 63105 - DNA, 20 bp, Artificial Sequence
  Description of Artificial Sequence: Synthetic oligonucleotide
  Target: LAMA2; (-) strand; PAM type: NRG; PAM sequence: AAG
aatacactggttgttttgac

SEQ ID NO: 63106 - DNA, 20 bp, Artificial Sequence
  Description of Artificial Sequence: Synthetic oligonucleotide
  Target: LAMA2; (-) strand; PAM type: NRG; PAM sequence: TGG
ccaaaatattttaaatacac

SEQ ID NO: 63107 - DNA, 20 bp, Artificial Sequence
  Description of Artificial Sequence: Synthetic oligonucleotide
  Target: LAMA2; (-) strand; PAM type: NRG; PAM sequence: TAG
cataacctagcccatctgcc

SEQ ID NO: 63108 - DNA, 20 bp, Artificial Sequence
  Description of Artificial Sequence: Synthetic oligonucleotide
  Target: LAMA2; (-) strand; PAM type: NRG; PAM sequence: TAG
ttcattattgcagcataacc

SEQ ID NO: 63109 - DNA, 20 bp, Artificial Sequence
  Description of Artificial Sequence: Synthetic oligonucleotide
  Target: LAMA2; (-) strand; PAM type: NRG; PAM sequence: CAG
tttggggttgttcattattg

SEQ ID NO: 63110 - DNA, 20 bp, Artificial Sequence
  Description of Artificial Sequence: Synthetic oligonucleotide
  Target: LAMA2; (-) strand; PAM type: NRG; PAM sequence: GGG
ttgcaaccactaagattttg

SEQ ID NO: 63111 - DNA, 20 bp, Artificial Sequence
  Description of Artificial Sequence: Synthetic oligonucleotide
  Target: LAMA2; (-) strand; PAM type: NRG; PAM sequence: GGG
tttgcaaccactaagatttt

SEQ ID NO: 63112 - DNA, 20 bp, Artificial Sequence
  Description of Artificial Sequence: Synthetic oligonucleotide
  Target: LAMA2; (-) strand; PAM type: NRG; PAM sequence: TGG
gtttgcaaccactaagattt

SEQ ID NO: 63113 - DNA, 20 bp, Artificial Sequence
  Description of Artificial Sequence: Synthetic oligonucleotide
  Target: LAMA2; (-) strand; PAM type: NRG; PAM sequence: AAG
gtttgttgtttgcaaccact

SEQ ID NO: 63114 - DNA, 20 bp, Artificial Sequence
  Description of Artificial Sequence: Synthetic oligonucleotide
  Target: LAMA2; (-) strand; PAM type: NRG; PAM sequence: AAG
gtattgtgagtgggagaaaa

SEQ ID NO: 63115 - DNA, 20 bp, Artificial Sequence
  Description of Artificial Sequence: Synthetic oligonucleotide
  Target: LAMA2; (-) strand; PAM type: NRG; PAM sequence: GAG
tgaacctgtattgtgagtgg

SEQ ID NO: 63116 - DNA, 20 bp, Artificial Sequence
  Description of Artificial Sequence: Synthetic oligonucleotide
  Target: LAMA2; (-) strand; PAM type: NRG; PAM sequence: GGG
gatgaacctgtattgtgagt

SEQ ID NO: 63117 - DNA, 20 bp, Artificial Sequence
  Description of Artificial Sequence: Synthetic oligonucleotide
  Target: LAMA2; (-) strand; PAM type: NRG; PAM sequence: TGG
tgatgaacctgtattgtgag

SEQ ID NO: 63118 - DNA, 20 bp, Artificial Sequence
  Description of Artificial Sequence: Synthetic oligonucleotide
  Target: LAMA2; (-) strand; PAM type: NRG; PAM sequence: GAG
ctatgatgaacctgtattgt

SEQ ID NO: 63119 - DNA, 20 bp, Artificial Sequence
  Description of Artificial Sequence: Synthetic oligonucleotide
  Target: LAMA2; (-) strand; PAM type: NRG; PAM sequence: GAG
atcagcaattatgattcctg

SEQ ID NO: 63120 - DNA, 20 bp, Artificial Sequence
  Description of Artificial Sequence: Synthetic oligonucleotide
  Target: LAMA2; (-) strand; PAM type: NRG; PAM sequence: TGG
atatcagcaattatgattcc

SEQ ID NO: 63121 - DNA, 20 bp, Artificial Sequence
  Description of Artificial Sequence: Synthetic oligonucleotide
  Target: LAMA2; (-) strand; PAM type: NRG; PAM sequence: CAG
gatctgtcaggtggctatat

SEQ ID NO: 63122 - DNA, 20 bp, Artificial Sequence
  Description of Artificial Sequence: Synthetic oligonucleotide
  Target: LAMA2; (-) strand; PAM type: NRG; PAM sequence: TGG
gaggttactgatctgtcagg

SEQ ID NO: 63123 - DNA, 20 bp, Artificial Sequence
  Description of Artificial Sequence: Synthetic oligonucleotide
  Target: LAMA2; (-) strand; PAM type: NRG; PAM sequence: AGG
actgaggttactgatctgtc

SEQ ID NO: 63124 - DNA, 20 bp, Artificial Sequence
  Description of Artificial Sequence: Synthetic oligonucleotide
  Target: LAMA2; (-) strand; PAM type: NRG; PAM sequence: CAG
cactgaggttactgatctgt

SEQ ID NO: 63125 - DNA, 20 bp, Artificial Sequence
  Description of Artificial Sequence: Synthetic oligonucleotide
  Target: LAMA2; (-) strand; PAM type: NRG; PAM sequence: AGG
catggccaccagctacactg

SEQ ID NO: 63126 - DNA, 20 bp, Artificial Sequence
  Description of Artificial Sequence: Synthetic oligonucleotide
  Target: LAMA2; (-) strand; PAM type: NRG; PAM sequence: GAG
tcatggccaccagctacact

SEQ ID NO: 63127 - DNA, 20 bp, Artificial Sequence
  Description of Artificial Sequence: Synthetic oligonucleotide
  Target: LAMA2; (-) strand; PAM type: NRG; PAM sequence: CAG
tcgccttttctcatggccac

SEQ ID NO: 63128 - DNA, 20 bp, Artificial Sequence
  Description of Artificial Sequence: Synthetic oligonucleotide
  Target: LAMA2; (-) strand; PAM type: NRG; PAM sequence: TGG
atgattatcgccttttctca

SEQ ID NO: 63129 - DNA, 20 bp, Artificial Sequence
  Description of Artificial Sequence: Synthetic oligonucleotide
  Target: LAMA2; (-) strand; PAM type: NRG; PAM sequence: AAG
tgttctaatatttgatatga

SEQ ID NO: 63130 - DNA, 20 bp, Artificial Sequence
  Description of Artificial Sequence: Synthetic oligonucleotide
  Target: LAMA2; (-) strand; PAM type: NRG; PAM sequence: GAG
gtgtgtgatattgatataga

SEQ ID NO: 63131 - DNA, 20 bp, Artificial Sequence
  Description of Artificial Sequence: Synthetic oligonucleotide
  Target: LAMA2; (-) strand; PAM type: NRG; PAM sequence: GAG
gtgtgtgtgatattgatata

SEQ ID NO: 63132 - DNA, 20 bp, Artificial Sequence
  Description of Artificial Sequence: Synthetic oligonucleotide
  Target: LAMA2; (-) strand; PAM type: NRG; PAM sequence: TAG
tagtgtgtgtgatattgata

SEQ ID NO: 63133 - DNA, 20 bp, Artificial Sequence
  Description of Artificial Sequence: Synthetic oligonucleotide
  Target: LAMA2; (-) strand; PAM type: NRG; PAM sequence: TAG
ctaaaatgcacaccaagtgt

SEQ ID NO: 63134 - DNA, 20 bp, Artificial Sequence
  Description of Artificial Sequence: Synthetic oligonucleotide
  Target: LAMA2; (-) strand; PAM type: NRG; PAM sequence: AAG
gatattctaaaatgcacacc

SEQ ID NO: 63135 - DNA, 20 bp, Artificial Sequence
  Description of Artificial Sequence: Synthetic oligonucleotide
  Target: LAMA2; (-) strand; PAM type: NRG; PAM sequence: AAG
catatttactgggaaccagc

SEQ ID NO: 63136 - DNA, 20 bp, Artificial Sequence
  Description of Artificial Sequence: Synthetic oligonucleotide
  Target: LAMA2; (-) strand; PAM type: NRG; PAM sequence: CAG
ttgacatatttactgggaac

SEQ ID NO: 63137 - DNA, 20 bp, Artificial Sequence
  Description of Artificial Sequence: Synthetic oligonucleotide
  Target: LAMA2; (-) strand; PAM type: NRG; PAM sequence: GGG
aaaaagttgacatatttact

SEQ ID NO: 63138 - DNA, 20 bp, Artificial Sequence
  Description of Artificial Sequence: Synthetic oligonucleotide
  Target: LAMA2; (-) strand; PAM type: NRG; PAM sequence: TGG
caaaaagttgacatatttac

SEQ ID NO: 63139 - DNA, 20 bp, Artificial Sequence
  Description of Artificial Sequence: Synthetic oligonucleotide
  Target: LAMA2; (-) strand; PAM type: NRG; PAM sequence: AAG
caagcggtatatagtgcaaa

SEQ ID NO: 63140 - DNA, 20 bp, Artificial Sequence
  Description of Artificial Sequence: Synthetic oligonucleotide
  Target: LAMA2; (-) strand; PAM type: NRG; PAM sequence: TAG
ttgacatttcaagcggtata

SEQ ID NO: 63141 - DNA, 20 bp, Artificial Sequence
  Description of Artificial Sequence: Synthetic oligonucleotide
  Target: LAMA2; (-) strand; PAM type: NRG; PAM sequence: CGG
tgcagtattgacatttcaag

SEQ ID NO: 63142 - DNA, 20 bp, Artificial Sequence
  Description of Artificial Sequence: Synthetic oligonucleotide
  Target: LAMA2; (-) strand; PAM type: NRG; PAM sequence: AAG
ttgtgcagtattgacatttc

SEQ ID NO: 63143 - DNA, 20 bp, Artificial Sequence
  Description of Artificial Sequence: Synthetic oligonucleotide
  Target: LAMA2; (-) strand; PAM type: NRG; PAM sequence: CAG
gcagactacgcgtatttgtg

SEQ ID NO: 63144 - DNA, 20 bp, Artificial Sequence
  Description of Artificial Sequence: Synthetic oligonucleotide
  Target: LAMA2; (-) strand; PAM type: NRG; PAM sequence: CAG
acctggcaggttactgtcag

SEQ ID NO: 63145 - DNA, 20 bp, Artificial Sequence
  Description of Artificial Sequence: Synthetic oligonucleotide
  Target: LAMA2; (-) strand; PAM type: NRG; PAM sequence: CAG
agaacctggcaggttactgt

SEQ ID NO: 63146 - DNA, 20 bp, Artificial Sequence
  Description of Artificial Sequence: Synthetic oligonucleotide
  Target: LAMA2; (-) strand; PAM type: NRG; PAM sequence: AGG
atggaagtctagaacctggc

SEQ ID NO: 63147 - DNA, 20 bp, Artificial Sequence
  Description of Artificial Sequence: Synthetic oligonucleotide
  Target: LAMA2; (-) strand; PAM type: NRG; PAM sequence: CAG
tatggaagtctagaacctgg

SEQ ID NO: 63148 - DNA, 20 bp, Artificial Sequence
  Description of Artificial Sequence: Synthetic oligonucleotide
  Target: LAMA2; (-) strand; PAM type: NRG; PAM sequence: TGG
caatatggaagtctagaacc

SEQ ID NO: 63149 - DNA, 20 bp, Artificial Sequence
  Description of Artificial Sequence: Synthetic oligonucleotide
  Target: LAMA2; (-) strand; PAM type: NRG; PAM sequence: TAG
cagtaatcaatatggaagtc

SEQ ID NO: 63150 - DNA, 20 bp, Artificial Sequence
  Description of Artificial Sequence: Synthetic oligonucleotide
  Target: LAMA2; (-) strand; PAM type: NRG; PAM sequence: AAG
gctaacagtaatcaatatgg

SEQ ID NO: 63151 - DNA, 20 bp, Artificial Sequence
  Description of Artificial Sequence: Synthetic oligonucleotide
  Target: LAMA2; (-) strand; PAM type: NRG; PAM sequence: TGG
tttgctaacagtaatcaata

SEQ ID NO: 63152 - DNA, 20 bp, Artificial Sequence
  Description of Artificial Sequence: Synthetic oligonucleotide
  Target: LAMA2; (-) strand; PAM type: NRG; PAM sequence: CAG
tcacctacacattttgctaa

SEQ ID NO: 63153 - DNA, 20 bp, Artificial Sequence
  Description of Artificial Sequence: Synthetic oligonucleotide
  Target: LAMA2; (-) strand; PAM type: NRG; PAM sequence: TGG
aacctcttgccttctgtgaa

SEQ ID NO: 63154 - DNA, 20 bp, Artificial Sequence
  Description of Artificial Sequence: Synthetic oligonucleotide
  Target: LAMA2; (-) strand; PAM type: NRG; PAM sequence: GAG
acagaaaattaaattccaaa

SEQ ID NO: 63155 - DNA, 20 bp, Artificial Sequence
  Description of Artificial Sequence: Synthetic oligonucleotide
  Target: LAMA2; (-) strand; PAM type: NRG; PAM sequence: AAG
acacagaaaattaaattcca

SEQ ID NO: 63156 - DNA, 20 bp, Artificial Sequence
  Description of Artificial Sequence: Synthetic oligonucleotide
  Target: LAMA2; (-) strand; PAM type: NRG; PAM sequence: CAG
aaagtgatttatttttcaca

SEQ ID NO: 63157 - DNA, 20 bp, Artificial Sequence
  Description of Artificial Sequence: Synthetic oligonucleotide
  Target: LAMA2; (-) strand; PAM type: NRG; PAM sequence: AAG
aatgttccacacacacaaaa

SEQ ID NO: 63158 - DNA, 20 bp, Artificial Sequence
  Description of Artificial Sequence: Synthetic oligonucleotide
  Target: LAMA2; (-) strand; PAM type: NRG; PAM sequence: GAG
aatatgacccattattccat

SEQ ID NO: 63159 - DNA, 20 bp, Artificial Sequence
  Description of Artificial Sequence: Synthetic oligonucleotide
  Target: LAMA2; (-) strand; PAM type: NRG; PAM sequence: CAG
gtgcacagctcaataaacat

SEQ ID NO: 63160 - DNA, 20 bp, Artificial Sequence
  Description of Artificial Sequence: Synthetic oligonucleotide
  Target: LAMA2; (-) strand; PAM type: NRG; PAM sequence: CAG
tcctttagcagatatgtgca

SEQ ID NO: 63161 - DNA, 20 bp, Artificial Sequence
  Description of Artificial Sequence: Synthetic oligonucleotide
  Target: LAMA2; (-) strand; PAM type: NRG; PAM sequence: CAG
tagatgtgaaattcctttag

SEQ ID NO: 63162 - DNA, 20 bp, Artificial Sequence
  Description of Artificial Sequence: Synthetic oligonucleotide
  Target: LAMA2; (-) strand; PAM type: NRG; PAM sequence: TAG
ttatagatgtgaaattcctt

SEQ ID NO: 63163 - DNA, 20 bp, Artificial Sequence
  Description of Artificial Sequence: Synthetic oligonucleotide
  Target: LAMA2; (-) strand; PAM type: NRG; PAM sequence: TAG
aaaataagcttatttattta

SEQ ID NO: 63164 - DNA, 20 bp, Artificial Sequence
  Description of Artificial Sequence: Synthetic oligonucleotide
  Target: LAMA2; (-) strand; PAM type: NRG; PAM sequence: AAG
ctctgacaccatggaaaaat

SEQ ID NO: 63165 - DNA, 20 bp, Artificial Sequence
  Description of Artificial Sequence: Synthetic oligonucleotide
  Target: LAMA2; (-) strand; PAM type: NRG; PAM sequence: TGG
tcattatctctctgacacca

SEQ ID NO: 63166 - DNA, 20 bp, Artificial Sequence
  Description of Artificial Sequence: Synthetic oligonucleotide
  Target: LAMA2; (-) strand; PAM type: NRG; PAM sequence: AAG
gcaaaaatagttttatatga

SEQ ID NO: 63167 - DNA, 20 bp, Artificial Sequence
  Description of Artificial Sequence: Synthetic oligonucleotide
  Target: LAMA2; (-) strand; PAM type: NRG; PAM sequence: TAG
gatatttcagctggcaaaaa

SEQ ID NO: 63168 - DNA, 20 bp, Artificial Sequence
  Description of Artificial Sequence: Synthetic oligonucleotide
  Target: LAMA2; (-) strand; PAM type: NRG; PAM sequence: TGG
aacaatcatgatatttcagc

SEQ ID NO: 63169 - DNA, 20 bp, Artificial Sequence
  Description of Artificial Sequence: Synthetic oligonucleotide
  Target: LAMA2; (-) strand; PAM type: NRG; PAM sequence: CAG
gaataacaatcatgatattt

SEQ ID NO: 63170 - DNA, 20 bp, Artificial Sequence
  Description of Artificial Sequence: Synthetic oligonucleotide
  Target: LAMA2; (-) strand; PAM type: NRG; PAM sequence: TAG
agtctttgtggaggaaatat

SEQ ID NO: 63171 - DNA, 20 bp, Artificial Sequence
  Description of Artificial Sequence: Synthetic oligonucleotide
  Target: LAMA2; (-) strand; PAM type: NRG; PAM sequence: AGG
agttcactaagtctttgtgg

SEQ ID NO: 63172 - DNA, 20 bp, Artificial Sequence
  Description of Artificial Sequence: Synthetic oligonucleotide
  Target: LAMA2; (-) strand; PAM type: NRG; PAM sequence: GAG
cagttcactaagtctttgtg

SEQ ID NO: 63173 - DNA, 20 bp, Artificial Sequence
  Description of Artificial Sequence: Synthetic oligonucleotide
  Target: LAMA2; (-) strand; PAM type: NRG; PAM sequence: TGG
tgcagttcactaagtctttg

SEQ ID NO: 63174 - DNA, 20 bp, Artificial Sequence
  Description of Artificial Sequence: Synthetic oligonucleotide
  Target: LAMA2; (-) strand; PAM type: NRG; PAM sequence: AAG
aaatggacatgcagttcact

SEQ ID NO: 63175 - DNA, 20 bp, Artificial Sequence
  Description of Artificial Sequence: Synthetic oligonucleotide
  Target: LAMA2; (-) strand; PAM type: NRG; PAM sequence: CAG
tactttctaaaatggacatg

SEQ ID NO: 63176 - DNA, 20 bp, Artificial Sequence
  Description of Artificial Sequence: Synthetic oligonucleotide
  Target: LAMA2; (-) strand; PAM type: NRG; PAM sequence: TGG
tctactcctactttctaaaa

SEQ ID NO: 63177 - DNA, 20 bp, Artificial Sequence
  Description of Artificial Sequence: Synthetic oligonucleotide
  Target: LAMA2; (-) strand; PAM type: NRG; PAM sequence: AAG
gatagtagttctcaagaagc

SEQ ID NO: 63178 - DNA, 20 bp, Artificial Sequence
  Description of Artificial Sequence: Synthetic oligonucleotide
  Target: LAMA2; (-) strand; PAM type: NRG; PAM sequence: AAG
tgttgatagtagttctcaag

SEQ ID NO: 63179 - DNA, 20 bp, Artificial Sequence
  Description of Artificial Sequence: Synthetic oligonucleotide
  Target: LAMA2; (-) strand; PAM type: NRG; PAM sequence: AAG
tattgttgatagtagttctc

SEQ ID NO: 63180 - DNA, 20 bp, Artificial Sequence
  Description of Artificial Sequence: Synthetic oligonucleotide
  Target: LAMA2; (-) strand; PAM type: NRG; PAM sequence: TAG
gctttttttattgttgatag

SEQ ID NO: 63181 - DNA, 20 bp, Artificial Sequence
  Description of Artificial Sequence: Synthetic oligonucleotide
  Target: LAMA2; (-) strand; PAM type: NRG; PAM sequence: TAG
aaagctttttttattgttga

SEQ ID NO: 63182 - DNA, 20 bp, Artificial Sequence
  Description of Artificial Sequence: Synthetic oligonucleotide
  Target: LAMA2; (-) strand; PAM type: NRG; PAM sequence: AAG
agatatacacgttaaaatca

SEQ ID NO: 63183 - DNA, 20 bp, Artificial Sequence
  Description of Artificial Sequence: Synthetic oligonucleotide
  Target: LAMA2; (-) strand; PAM type: NRG; PAM sequence: AAG
tattgatcaaaagaaatctt

SEQ ID NO: 63184 - DNA, 20 bp, Artificial Sequence
  Description of Artificial Sequence: Synthetic oligonucleotide
  Target: LAMA2; (-) strand; PAM type: NRG; PAM sequence: AAG
ttttcattagtattgatcaa

SEQ ID NO: 63185 - DNA, 20 bp, Artificial Sequence
  Description of Artificial Sequence: Synthetic oligonucleotide
  Target: LAMA2; (-) strand; PAM type: NRG; PAM sequence: TAG
cgtttcaggtttattttcat

SEQ ID NO: 63186 - DNA, 20 bp, Artificial Sequence
  Description of Artificial Sequence: Synthetic oligonucleotide
  Target: LAMA2; (-) strand; PAM type: NRG; PAM sequence: AGG
tgtccaatgattcgcgtttc

SEQ ID NO: 63187 - DNA, 20 bp, Artificial Sequence
  Description of Artificial Sequence: Synthetic oligonucleotide
  Target: LAMA2; (-) strand; PAM type: NRG; PAM sequence: CAG
ttgtccaatgattcgcgttt

SEQ ID NO: 63188 - DNA, 20 bp, Artificial Sequence
  Description of Artificial Sequence: Synthetic oligonucleotide
  Target: LAMA2; (-) strand; PAM type: NRG; PAM sequence: AGG
tcaattaatgtataaattaa

SEQ ID NO: 63189 - DNA, 20 bp, Artificial Sequence
  Description of Artificial Sequence: Synthetic oligonucleotide
  Target: LAMA2; (-) strand; PAM type: NRG; PAM sequence: AAG
atcaattaatgtataaatta

SEQ ID NO: 63190 - DNA, 20 bp, Artificial Sequence
  Description of Artificial Sequence: Synthetic oligonucleotide
  Target: LAMA2; (-) strand; PAM type: NRG; PAM sequence: AGG
aattacaattgtaactggaa

SEQ ID NO: 63191 - DNA, 20 bp, Artificial Sequence
  Description of Artificial Sequence: Synthetic oligonucleotide
  Target: LAMA2; (-) strand; PAM type: NRG; PAM sequence: AAG
caattacaattgtaactgga

SEQ ID NO: 63192 - DNA, 20 bp, Artificial Sequence
  Description of Artificial Sequence: Synthetic oligonucleotide
  Target: LAMA2; (-) strand; PAM type: NRG; PAM sequence: TGG
gtgacaattacaattgtaac

SEQ ID NO: 63193 - DNA, 20 bp, Artificial Sequence
  Description of Artificial Sequence: Synthetic oligonucleotide
  Target: LAMA2; (-) strand; PAM type: NRG; PAM sequence: AAG
ccgtttgtttagtttgaggt

SEQ ID NO: 63194 - DNA, 20 bp, Artificial Sequence
  Description of Artificial Sequence: Synthetic oligonucleotide
  Target: LAMA2; (-) strand; PAM type: NRG; PAM sequence: AGG
gagtccgtttgtttagtttg

SEQ ID NO: 63195 - DNA, 20 bp, Artificial Sequence
  Description of Artificial Sequence: Synthetic oligonucleotide
  Target: LAMA2; (-) strand; PAM type: NRG; PAM sequence: GAG
agagtccgtttgtttagttt

SEQ ID NO: 63196 - DNA, 20 bp, Artificial Sequence
  Description of Artificial Sequence: Synthetic oligonucleotide
  Target: LAMA2; (-) strand; PAM type: NRG; PAM sequence: TAG
tgggaaagagtccgtttgtt

SEQ ID NO: 63197 - DNA, 20 bp, Artificial Sequence
  Description of Artificial Sequence: Synthetic oligonucleotide
  Target: LAMA2; (-) strand; PAM type: NRG; PAM sequence: GAG
aagtagaaaaatatgggaaa

SEQ ID NO: 63198 - DNA, 20 bp, Artificial Sequence
  Description of Artificial Sequence: Synthetic oligonucleotide
  Target: LAMA2; (-) strand; PAM type: NRG; PAM sequence: AAG
ccaagtagaaaaatatggga

SEQ ID NO: 63199 - DNA, 20 bp, Artificial Sequence
  Description of Artificial Sequence: Synthetic oligonucleotide
  Target: LAMA2; (-) strand; PAM type: NRG; PAM sequence: GGG
ttcaccaagtagaaaaatat

SEQ ID NO: 63200 - DNA, 20 bp, Artificial Sequence
  Description of Artificial Sequence: Synthetic oligonucleotide
  Target: LAMA2; (-) strand; PAM type: NRG; PAM sequence: TGG
cttcaccaagtagaaaaata

SEQ ID NO: 63201 - DNA, 20 bp, Artificial Sequence
  Description of Artificial Sequence: Synthetic oligonucleotide
  Target: LAMA2; (-) strand; PAM type: NRG; PAM sequence: TAG
ttagaatgtccttcaccaag

SEQ ID NO: 63202 - DNA, 20 bp, Artificial Sequence
  Description of Artificial Sequence: Synthetic oligonucleotide
  Target: LAMA2; (-) strand; PAM type: NRG; PAM sequence: AAG
tgattagaatgtccttcacc

SEQ ID NO: 63203 - DNA, 20 bp, Artificial Sequence
  Description of Artificial Sequence: Synthetic oligonucleotide
  Target: LAMA2; (-) strand; PAM type: NRG; PAM sequence: TAG
gacttaggcatctagatgat

SEQ ID NO: 63204 - DNA, 20 bp, Artificial Sequence
  Description of Artificial Sequence: Synthetic oligonucleotide
  Target: LAMA2; (-) strand; PAM type: NRG; PAM sequence: TAG
aggtttctgacttaggcatc

SEQ ID NO: 63205 - DNA, 20 bp, Artificial Sequence
  Description of Artificial Sequence: Synthetic oligonucleotide
  Target: LAMA2; (-) strand; PAM type: NRG; PAM sequence: AGG
gatgcctaggtttctgactt

SEQ ID NO: 63206 - DNA, 20 bp, Artificial Sequence
  Description of Artificial Sequence: Synthetic oligonucleotide
  Target: LAMA2; (-) strand; PAM type: NRG; PAM sequence: TAG
tgatgcctaggtttctgact

SEQ ID NO: 63207 - DNA, 20 bp, Artificial Sequence
  Description of Artificial Sequence: Synthetic oligonucleotide
  Target: LAMA2; (-) strand; PAM type: NRG; PAM sequence: AGG
agaatgaagggatgatgcct

SEQ ID NO: 63208 - DNA, 20 bp, Artificial Sequence
  Description of Artificial Sequence: Synthetic oligonucleotide
  Target: LAMA2; (-) strand; PAM type: NRG; PAM sequence: TAG
aagaatgaagggatgatgcc

SEQ ID NO: 63209 - DNA, 20 bp, Artificial Sequence
  Description of Artificial Sequence: Synthetic oligonucleotide
  Target: LAMA2; (-) strand; PAM type: NRG; PAM sequence: GGG
tgaggaacagaaagaatgaa

SEQ ID NO: 63210 - DNA, 20 bp, Artificial Sequence
  Description of Artificial Sequence: Synthetic oligonucleotide
  Target: LAMA2; (-) strand; PAM type: NRG; PAM sequence: AGG
gtgaggaacagaaagaatga

SEQ ID NO: 63211 - DNA, 20 bp, Artificial Sequence
  Description of Artificial Sequence: Synthetic oligonucleotide
  Target: LAMA2; (-) strand; PAM type: NRG; PAM sequence: AAG
tgtgaggaacagaaagaatg

SEQ ID NO: 63212 - DNA, 20 bp, Artificial Sequence
  Description of Artificial Sequence: Synthetic oligonucleotide
  Target: LAMA2; (-) strand; PAM type: NRG; PAM sequence: AAG
gtgtgactgtgaggaacaga

SEQ ID NO: 63213 - DNA, 20 bp, Artificial Sequence
  Description of Artificial Sequence: Synthetic oligonucleotide
  Target: LAMA2; (-) strand; PAM type: NRG; PAM sequence: CAG
ttaagtgtgactgtgaggaa

SEQ ID NO: 63214 - DNA, 20 bp, Artificial Sequence
  Description of Artificial Sequence: Synthetic oligonucleotide
  Target: LAMA2; (-) strand; PAM type: NRG; PAM sequence: AGG
attaattaagtgtgactgtg

SEQ ID NO: 63215 - DNA, 20 bp, Artificial Sequence
  Description of Artificial Sequence: Synthetic oligonucleotide
  Target: LAMA2; (-) strand; PAM type: NRG; PAM sequence: GAG
aattaattaagtgtgactgt

SEQ ID NO: 63216 - DNA, 20 bp, Artificial Sequence
  Description of Artificial Sequence: Synthetic oligonucleotide
  Target: LAMA2; (-) strand; PAM type: NRG; PAM sequence: AAG
cgaaaatcgttcaattaatt

SEQ ID NO: 63217 - DNA, 20 bp, Artificial Sequence
  Description of Artificial Sequence: Synthetic oligonucleotide
  Target: LAMA2; (-) strand; PAM type: NRG; PAM sequence: GGG
aggaaatcaggaagtatgta

SEQ ID NO: 63218 - DNA, 20 bp, Artificial Sequence
  Description of Artificial Sequence: Synthetic oligonucleotide
  Target: LAMA2; (-) strand; PAM type: NRG; PAM sequence: AGG
gaggaaatcaggaagtatgt

SEQ ID NO: 63219 - DNA, 20 bp, Artificial Sequence
  Description of Artificial Sequence: Synthetic oligonucleotide
  Target: LAMA2; (-) strand; PAM type: NRG; PAM sequence: TAG
ggaggaaatcaggaagtatg

SEQ ID NO: 63220 - DNA, 20 bp, Artificial Sequence
  Description of Artificial Sequence: Synthetic oligonucleotide
  Target: LAMA2; (-) strand; PAM type: NRG; PAM sequence: AAG
gcacaggggaggaaatcagg

SEQ ID NO: 63221 - DNA, 20 bp, Artificial Sequence
  Description of Artificial Sequence: Synthetic oligonucleotide
  Target: LAMA2; (-) strand; PAM type: NRG; PAM sequence: AGG
agggcacaggggaggaaatc

SEQ ID NO: 63222 - DNA, 20 bp, Artificial Sequence
  Description of Artificial Sequence: Synthetic oligonucleotide
  Target: LAMA2; (-) strand; PAM type: NRG; PAM sequence: CAG
tagggcacaggggaggaaat

SEQ ID NO: 63223 - DNA, 20 bp, Artificial Sequence
  Description of Artificial Sequence: Synthetic oligonucleotide
  Target: LAMA2; (-) strand; PAM type: NRG; PAM sequence: AGG
gaagcagtagggcacagggg

SEQ ID NO: 63224 - DNA, 20 bp, Artificial Sequence
  Description of Artificial Sequence: Synthetic oligonucleotide
  Target: LAMA2; (-) strand; PAM type: NRG; PAM sequence: GAG
agaagcagtagggcacaggg

SEQ ID NO: 63225 - DNA, 20 bp, Artificial Sequence
  Description of Artificial Sequence: Synthetic oligonucleotide
  Target: LAMA2; (-) strand; PAM type: NRG; PAM sequence: GGG
agagaagcagtagggcacag

SEQ ID NO: 63226 - DNA, 20 bp, Artificial Sequence
  Description of Artificial Sequence: Synthetic oligonucleotide
  Target: LAMA2; (-) strand; PAM type: NRG; PAM sequence: GGG
gagagaagcagtagggcaca

SEQ ID NO: 63227 - DNA, 20 bp, Artificial Sequence
  Description of Artificial Sequence: Synthetic oligonucleotide
  Target: LAMA2; (-) strand; PAM type: NRG; PAM sequence: AGG
ggagagaagcagtagggcac

SEQ ID NO: 63228 - DNA, 20 bp, Artificial Sequence
  Description of Artificial Sequence: Synthetic oligonucleotide
  Target: LAMA2; (-) strand; PAM type: NRG; PAM sequence: CAG
gggagagaagcagtagggca

SEQ ID NO: 63229 - DNA, 20 bp, Artificial Sequence
  Description of Artificial Sequence: Synthetic oligonucleotide
  Target: LAMA2; (-) strand; PAM type: NRG; PAM sequence: GGG
agttagggagagaagcagta

SEQ ID NO: 63230 - DNA, 20 bp, Artificial Sequence
  Description of Artificial Sequence: Synthetic oligonucleotide
  Target: LAMA2; (-) strand; PAM type: NRG; PAM sequence: AGG
gagttagggagagaagcagt

SEQ ID NO: 63231 - DNA, 20 bp, Artificial Sequence
  Description of Artificial Sequence: Synthetic oligonucleotide
  Target: LAMA2; (-) strand; PAM type: NRG; PAM sequence: TAG
tgagttagggagagaagcag

SEQ ID NO: 63232 - DNA, 20 bp, Artificial Sequence
  Description of Artificial Sequence: Synthetic oligonucleotide
  Target: LAMA2; (-) strand; PAM type: NRG; PAM sequence: CAG
atctgagttagggagagaag

SEQ ID NO: 63233 - DNA, 20 bp, Artificial Sequence
  Description of Artificial Sequence: Synthetic oligonucleotide
  Target: LAMA2; (-) strand; PAM type: NRG; PAM sequence: AAG
attatctgagttagggagag

SEQ ID NO: 63234 - DNA, 20 bp, Artificial Sequence
  Description of Artificial Sequence: Synthetic oligonucleotide
  Target: LAMA2; (-) strand; PAM type: NRG; PAM sequence: GAG
atcattatctgagttaggga

SEQ ID NO: 63235 - DNA, 20 bp, Artificial Sequence
  Description of Artificial Sequence: Synthetic oligonucleotide
  Target: LAMA2; (-) strand; PAM type: NRG; PAM sequence: GAG
aaatcattatctgagttagg

SEQ ID NO: 63236 - DNA, 20 bp, Artificial Sequence
  Description of Artificial Sequence: Synthetic oligonucleotide
  Target: LAMA2; (-) strand; PAM type: NRG; PAM sequence: GGG
agaaatcattatctgagtta

SEQ ID NO: 63237 - DNA, 20 bp, Artificial Sequence
  Description of Artificial Sequence: Synthetic oligonucleotide
  Target: LAMA2; (-) strand; PAM type: NRG; PAM sequence: AGG
gagaaatcattatctgagtt

SEQ ID NO: 63238 - DNA, 20 bp, Artificial Sequence
  Description of Artificial Sequence: Synthetic oligonucleotide
  Target: LAMA2; (-) strand; PAM type: NRG; PAM sequence: TAG
cgagaaatcattatctgagt

SEQ ID NO: 63239 - DNA, 20 bp, Artificial Sequence
  Description of Artificial Sequence: Synthetic oligonucleotide
  Target: LAMA2; (-) strand; PAM type: NRG; PAM sequence: GAG
tagtcgagaaatcattatct

SEQ ID NO: 63240 - DNA, 20 bp, Artificial Sequence
  Description of Artificial Sequence: Synthetic oligonucleotide
  Target: LAMA2; (-) strand; PAM type: NRG; PAM sequence: GAG
gatcttaaaataggatagtc

SEQ ID NO: 63241 - DNA, 20 bp, Artificial Sequence
  Description of Artificial Sequence: Synthetic oligonucleotide
  Target: LAMA2; (-) strand; PAM type: NRG; PAM sequence: TAG
agcctgatcttaaaatagga

SEQ ID NO: 63242 - DNA, 20 bp, Artificial Sequence
  Description of Artificial Sequence: Synthetic oligonucleotide
  Target: LAMA2; (-) strand; PAM type: NRG; PAM sequence: AGG
aaatagcctgatcttaaaat

SEQ ID NO: 63243 - DNA, 20 bp, Artificial Sequence
  Description of Artificial Sequence: Synthetic oligonucleotide
  Target: LAMA2; (-) strand; PAM type: NRG; PAM sequence: TAG
aaaatagcctgatcttaaaa

SEQ ID NO: 63244 - DNA, 20 bp, Artificial Sequence
  Description of Artificial Sequence: Synthetic oligonucleotide
  Target: LAMA2; (-) strand; PAM type: NRG; PAM sequence: TAG
atcattgcaaggagacaaaa

SEQ ID NO: 63245 - DNA, 20 bp, Artificial Sequence
  Description of Artificial Sequence: Synthetic oligonucleotide
  Target: LAMA2; (-) strand; PAM type: NRG; PAM sequence: GAG
tatagagagatcattgcaag

SEQ ID NO: 63246 - DNA, 20 bp, Artificial Sequence
  Description of Artificial Sequence: Synthetic oligonucleotide
  Target: LAMA2; (-) strand; PAM type: NRG; PAM sequence: AGG
gttatagagagatcattgca

SEQ ID NO: 63247 - DNA, 20 bp, Artificial Sequence
  Description of Artificial Sequence: Synthetic oligonucleotide
  Target: LAMA2; (-) strand; PAM type: NRG; PAM sequence: AAG
ggttatagagagatcattgc

SEQ ID NO: 63248 - DNA, 20 bp, Artificial Sequence
  Description of Artificial Sequence: Synthetic oligonucleotide
  Target: LAMA2; (-) strand; PAM type: NRG; PAM sequence: GAG
tgatattactaggttataga

SEQ ID NO: 63249 - DNA, 20 bp, Artificial Sequence
  Description of Artificial Sequence: Synthetic oligonucleotide
  Target: LAMA2; (-) strand; PAM type: NRG; PAM sequence: GAG
cttgatattactaggttata

SEQ ID NO: 63250 - DNA, 20 bp, Artificial Sequence
  Description of Artificial Sequence: Synthetic oligonucleotide
  Target: LAMA2; (-) strand; PAM type: NRG; PAM sequence: TAG
ggcttgatattactaggtta

SEQ ID NO: 63251 - DNA, 20 bp, Artificial Sequence
  Description of Artificial Sequence: Synthetic oligonucleotide
  Target: LAMA2; (-) strand; PAM type: NRG; PAM sequence: AGG
cattagggcttgatattact

SEQ ID NO: 63252 - DNA, 20 bp, Artificial Sequence
  Description of Artificial Sequence: Synthetic oligonucleotide
  Target: LAMA2; (-) strand; PAM type: NRG; PAM sequence: TAG
tcattagggcttgatattac

SEQ ID NO: 63253 - DNA, 20 bp, Artificial Sequence
  Description of Artificial Sequence: Synthetic oligonucleotide
  Target: LAMA2; (-) strand; PAM type: NRG; PAM sequence: GGG
cgaccaaagacttttcatta

SEQ ID NO: 63254 - DNA, 20 bp, Artificial Sequence
  Description of Artificial Sequence: Synthetic oligonucleotide
  Target: LAMA2; (-) strand; PAM type: NRG; PAM sequence: AGG
ccgaccaaagacttttcatt

SEQ ID NO: 63255 - DNA, 20 bp, Artificial Sequence
  Description of Artificial Sequence: Synthetic oligonucleotide
  Target: LAMA2; (-) strand; PAM type: NRG; PAM sequence: TAG
gccgaccaaagacttttcat

SEQ ID NO: 63256 - DNA, 20 bp, Artificial Sequence
  Description of Artificial Sequence: Synthetic oligonucleotide
  Target: LAMA2; (-) strand; PAM type: NRG; PAM sequence: AAG
tgggtgacagaagccgacca

SEQ ID NO: 63257 - DNA, 20 bp, Artificial Sequence
  Description of Artificial Sequence: Synthetic oligonucleotide
  Target: LAMA2; (-) strand; PAM type: NRG; PAM sequence: AAG
acgtttatcctgggtgacag

SEQ ID NO: 63258 - DNA, 20 bp, Artificial Sequence
  Description of Artificial Sequence: Synthetic oligonucleotide
  Target: LAMA2; (-) strand; PAM type: NRG; PAM sequence: CAG
ttcacgtttatcctgggtga

SEQ ID NO: 63259 - DNA, 20 bp, Artificial Sequence
  Description of Artificial Sequence: Synthetic oligonucleotide
  Target: LAMA2; (-) strand; PAM type: NRG; PAM sequence: GGG
aggagtttcacgtttatcct

SEQ ID NO: 63260 - DNA, 20 bp, Artificial Sequence
  Description of Artificial Sequence: Synthetic oligonucleotide
  Target: LAMA2; (-) strand; PAM type: NRG; PAM sequence: TGG
caggagtttcacgtttatcc

SEQ ID NO: 63261 - DNA, 20 bp, Artificial Sequence
  Description of Artificial Sequence: Synthetic oligonucleotide
  Target: LAMA2; (-) strand; PAM type: NRG; PAM sequence: GAG
gaagtagatccaactctcag

SEQ ID NO: 63262 - DNA, 20 bp, Artificial Sequence
  Description of Artificial Sequence: Synthetic oligonucleotide
  Target: LAMA2; (-) strand; PAM type: NRG; PAM sequence: AGG
aggaagtagatccaactctc

SEQ ID NO: 63263 - DNA, 20 bp, Artificial Sequence
  Description of Artificial Sequence: Synthetic oligonucleotide
  Target: LAMA2; (-) strand; PAM type: NRG; PAM sequence: CAG
aaggaagtagatccaactct

SEQ ID NO: 63264 - DNA, 20 bp, Artificial Sequence
  Description of Artificial Sequence: Synthetic oligonucleotide
  Target: LAMA2; (-) strand; PAM type: NRG; PAM sequence: TAG
ggtgagatgctgaaaggaag

SEQ ID NO: 63265 - DNA, 20 bp, Artificial Sequence
  Description of Artificial Sequence: Synthetic oligonucleotide
  Target: LAMA2; (-) strand; PAM type: NRG; PAM sequence: AAG
aagggtgagatgctgaaagg

SEQ ID NO: 63266 - DNA, 20 bp, Artificial Sequence
  Description of Artificial Sequence: Synthetic oligonucleotide
  Target: LAMA2; (-) strand; PAM type: NRG; PAM sequence: AGG
ggcaagggtgagatgctgaa

SEQ ID NO: 63267 - DNA, 20 bp, Artificial Sequence
  Description of Artificial Sequence: Synthetic oligonucleotide
  Target: LAMA2; (-) strand; PAM type: NRG; PAM sequence: AAG
aggcaagggtgagatgctga

SEQ ID NO: 63268 - DNA, 20 bp, Artificial Sequence
  Description of Artificial Sequence: Synthetic oligonucleotide
  Target: LAMA2; (-) strand; PAM type: NRG; PAM sequence: GAG
ctagaagtgcaggcaagggt

SEQ ID NO: 63269 - DNA, 20 bp, Artificial Sequence
  Description of Artificial Sequence: Synthetic oligonucleotide
  Target: LAMA2; (-) strand; PAM type: NRG; PAM sequence: GGG
gaggctagaagtgcaggcaa

SEQ ID NO: 63270 - DNA, 20 bp, Artificial Sequence
  Description of Artificial Sequence: Synthetic oligonucleotide
  Target: LAMA2; (-) strand; PAM type: NRG; PAM sequence: AGG
ggaggctagaagtgcaggca

SEQ ID NO: 63271 - DNA, 20 bp, Artificial Sequence
  Description of Artificial Sequence: Synthetic oligonucleotide
  Target: LAMA2; (-) strand; PAM type: NRG; PAM sequence: AAG
tggaggctagaagtgcaggc

SEQ ID NO: 63272 - DNA, 20 bp, Artificial Sequence
  Description of Artificial Sequence: Synthetic oligonucleotide
  Target: LAMA2; (-) strand; PAM type: NRG; PAM sequence: AGG
agagtggaggctagaagtgc

SEQ ID NO: 63273 - DNA, 20 bp, Artificial Sequence
  Description of Artificial Sequence: Synthetic oligonucleotide
  Target: LAMA2; (-) strand; PAM type: NRG; PAM sequence: CAG
gagagtggaggctagaagtg

SEQ ID NO: 63274 - DNA, 20 bp, Artificial Sequence
  Description of Artificial Sequence: Synthetic oligonucleotide
  Target: LAMA2; (-) strand; PAM type: NRG; PAM sequence: AAG
gttttgagagtggaggctag

SEQ ID NO: 63275 - DNA, 20 bp, Artificial Sequence
  Description of Artificial Sequence: Synthetic oligonucleotide
  Target: LAMA2; (-) strand; PAM type: NRG; PAM sequence: TAG
agagttttgagagtggaggc

SEQ ID NO: 63276 - DNA, 20 bp, Artificial Sequence
  Description of Artificial Sequence: Synthetic oligonucleotide
  Target: LAMA2; (-) strand; PAM type: NRG; PAM sequence: AGG
tgaaagagttttgagagtgg

SEQ ID NO: 63277 - DNA, 20 bp, Artificial Sequence
  Description of Artificial Sequence: Synthetic oligonucleotide
  Target: LAMA2; (-) strand; PAM type: NRG; PAM sequence: GAG
gtgaaagagttttgagagtg

SEQ ID NO: 63278 - DNA, 20 bp, Artificial Sequence
  Description of Artificial Sequence: Synthetic oligonucleotide
  Target: LAMA2; (-) strand; PAM type: NRG; PAM sequence: TGG
gtgtgaaagagttttgagag

SEQ ID NO: 63279 - DNA, 20 bp, Artificial Sequence
  Description of Artificial Sequence: Synthetic oligonucleotide
  Target: LAMA2; (-) strand; PAM type: NRG; PAM sequence: GAG
gatgtgtgaaagagttttga

SEQ ID NO: 63280 - DNA, 20 bp, Artificial Sequence
  Description of Artificial Sequence: Synthetic oligonucleotide
  Target: LAMA2; (-) strand; PAM type: NRG; PAM sequence: GAG
atgatgtgtgaaagagtttt

SEQ ID NO: 63281 - DNA, 20 bp, Artificial Sequence
  Description of Artificial Sequence: Synthetic oligonucleotide
  Target: LAMA2; (-) strand; PAM type: NRG; PAM sequence: GAG
ggttcaaatgatgtgtgaaa

SEQ ID NO: 63282 - DNA, 20 bp, Artificial Sequence
  Description of Artificial Sequence: Synthetic oligonucleotide
  Target: LAMA2; (-) strand; PAM type: NRG; PAM sequence: AAG
caggttcaaatgatgtgtga

SEQ ID NO: 63283 - DNA, 20 bp, Artificial Sequence
  Description of Artificial Sequence: Synthetic oligonucleotide
  Target: LAMA2; (-) strand; PAM type: NRG; PAM sequence: AGG
gaaggcatttttaatgtctc

SEQ ID NO: 63284 - DNA, 20 bp, Artificial Sequence
  Description of Artificial Sequence: Synthetic oligonucleotide
  Target: LAMA2; (-) strand; PAM type: NRG; PAM sequence: CAG
ggaaggcatttttaatgtct

SEQ ID NO: 63285 - DNA, 20 bp, Artificial Sequence
  Description of Artificial Sequence: Synthetic oligonucleotide
  Target: LAMA2; (-) strand; PAM type: NRG; PAM sequence: AGG
ccactgcaccaagccctgga

SEQ ID NO: 63286 - DNA, 20 bp, Artificial Sequence
  Description of Artificial Sequence: Synthetic oligonucleotide
  Target: LAMA2; (-) strand; PAM type: NRG; PAM sequence: AAG
gccactgcaccaagccctgg

SEQ ID NO: 63287 - DNA, 20 bp, Artificial Sequence
  Description of Artificial Sequence: Synthetic oligonucleotide
  Target: LAMA2; (-) strand; PAM type: NRG; PAM sequence: TGG
tgtgccactgcaccaagccc

SEQ ID NO: 63288 - DNA, 20 bp, Artificial Sequence
  Description of Artificial Sequence: Synthetic oligonucleotide
  Target: LAMA2; (-) strand; PAM type: NRG; PAM sequence: AAG
caggtgtgtgccactgcacc

SEQ ID NO: 63289 - DNA, 20 bp, Artificial Sequence
  Description of Artificial Sequence: Synthetic oligonucleotide
  Target: LAMA2; (-) strand; PAM type: NRG; PAM sequence: AGG
tcccaaagtgctgggattac

SEQ ID NO: 63290 - DNA, 20 bp, Artificial Sequence
  Description of Artificial Sequence: Synthetic oligonucleotide
  Target: LAMA2; (-) strand; PAM type: NRG; PAM sequence: CAG
ctcccaaagtgctgggatta

SEQ ID NO: 63291 - DNA, 20 bp, Artificial Sequence
  Description of Artificial Sequence: Synthetic oligonucleotide
  Target: LAMA2; (-) strand; PAM type: NRG; PAM sequence: GGG
ccttggcctcccaaagtgct

SEQ ID NO: 63292 - DNA, 20 bp, Artificial Sequence
  Description of Artificial Sequence: Synthetic oligonucleotide
  Target: LAMA2; (-) strand; PAM type: NRG; PAM sequence: TGG
gccttggcctcccaaagtgc

SEQ ID NO: 63293 - DNA, 20 bp, Artificial Sequence
  Description of Artificial Sequence: Synthetic oligonucleotide
  Target: LAMA2; (-) strand; PAM type: NRG; PAM sequence: AAG
ctgctggccttggcctccca

SEQ ID NO: 63294 - DNA, 20 bp, Artificial Sequence
  Description of Artificial Sequence: Synthetic oligonucleotide
  Target: LAMA2; (-) strand; PAM type: NRG; PAM sequence: TGG
ctcaagtgatctgctggcct

SEQ ID NO: 63295 - DNA, 20 bp, Artificial Sequence
  Description of Artificial Sequence: Synthetic oligonucleotide
  Target: LAMA2; (-) strand; PAM type: NRG; PAM sequence: TGG
cctgagctcaagtgatctgc

SEQ ID NO: 63296 - DNA, 20 bp, Artificial Sequence
  Description of Artificial Sequence: Synthetic oligonucleotide
  Target: LAMA2; (-) strand; PAM type: NRG; PAM sequence: AAG
ggtctcgaactcctgagctc

SEQ ID NO: 63297 - DNA, 20 bp, Artificial Sequence
  Description of Artificial Sequence: Synthetic oligonucleotide
  Target: LAMA2; (-) strand; PAM type: NRG; PAM sequence: GAG
caggctggtctcgaactcct

SEQ ID NO: 63298 - DNA, 20 bp, Artificial Sequence
  Description of Artificial Sequence: Synthetic oligonucleotide
  Target: LAMA2; (-) strand; PAM type: NRG; PAM sequence: TGG
gtttcgcatattgcccaggc

SEQ ID NO: 63299 - DNA, 20 bp, Artificial Sequence
  Description of Artificial Sequence: Synthetic oligonucleotide
  Target: LAMA2; (-) strand; PAM type: NRG; PAM sequence: AGG
tggggtttcgcatattgccc

SEQ ID NO: 63300 - DNA, 20 bp, Artificial Sequence
  Description of Artificial Sequence: Synthetic oligonucleotide
  Target: LAMA2; (-) strand; PAM type: NRG; PAM sequence: CAG
atggggtttcgcatattgcc

SEQ ID NO: 63301 - DNA, 20 bp, Artificial Sequence
  Description of Artificial Sequence: Synthetic oligonucleotide
  Target: LAMA2; (-) strand; PAM type: NRG; PAM sequence: GGG
ttttttttttggtagagatg

SEQ ID NO: 63302 - DNA, 20 bp, Artificial Sequence
  Description of Artificial Sequence: Synthetic oligonucleotide
  Target: LAMA2; (-) strand; PAM type: NRG; PAM sequence: GGG
tttttttttttggtagagat

SEQ ID NO: 63303 - DNA, 20 bp, Artificial Sequence
  Description of Artificial Sequence: Synthetic oligonucleotide
  Target: LAMA2; (-) strand; PAM type: NRG; PAM sequence: TGG
ttttttttttttggtagaga

SEQ ID NO: 63304 - DNA, 20 bp, Artificial Sequence
  Description of Artificial Sequence: Synthetic oligonucleotide
  Target: LAMA2; (-) strand; PAM type: NRG; PAM sequence: GAG
ttttttttttttttttggta

SEQ ID NO: 63305 - DNA, 20 bp, Artificial Sequence
  Description of Artificial Sequence: Synthetic oligonucleotide
  Target: LAMA2; (-) strand; PAM type: NRG; PAM sequence: TAG
ttttttttttttttttttgg

SEQ ID NO: 63306 - DNA, 20 bp, Artificial Sequence
  Description of Artificial Sequence: Synthetic oligonucleotide
  Target: LAMA2; (-) strand; PAM type: NRG; PAM sequence: TGG
tttttttttttttttttttt

SEQ ID NO: 63307 - DNA, 20 bp, Artificial Sequence
  Description of Artificial Sequence: Synthetic oligonucleotide
  Target: LAMA2; (-) strand; PAM type: NRG; PAM sequence: CAG
acaggctcaaccaccaagcc

SEQ ID NO: 63308 - DNA, 20 bp, Artificial Sequence
  Description of Artificial Sequence: Synthetic oligonucleotide
  Target: LAMA2; (-) strand; PAM type: NRG; PAM sequence: AAG
ggacgacaggctcaaccacc

SEQ ID NO: 63309 - DNA, 20 bp, Artificial Sequence
  Description of Artificial Sequence: Synthetic oligonucleotide
  Target: LAMA2; (-) strand; PAM type: NRG; PAM sequence: AGG
tcctgagtagctgggacgac

SEQ ID NO: 63310 - DNA, 20 bp, Artificial Sequence
  Description of Artificial Sequence: Synthetic oligonucleotide
  Target: LAMA2; (-) strand; PAM type: NRG; PAM sequence: CAG
ctcctgagtagctgggacga

SEQ ID NO: 63311 - DNA, 20 bp, Artificial Sequence
  Description of Artificial Sequence: Synthetic oligonucleotide
  Target: LAMA2; (-) strand; PAM type: NRG; PAM sequence: GGG
cctcagcctcctgagtagct

SEQ ID NO: 63312 - DNA, 20 bp, Artificial Sequence
  Description of Artificial Sequence: Synthetic oligonucleotide
  Target: LAMA2; (-) strand; PAM type: NRG; PAM sequence: TGG
acctcagcctcctgagtagc

SEQ ID NO: 63313 - DNA, 20 bp, Artificial Sequence
  Description of Artificial Sequence: Synthetic oligonucleotide
  Target: LAMA2; (-) strand; PAM type: NRG; PAM sequence: TAG
tcccacctcagcctcctgag

SEQ ID NO: 63314 - DNA, 20 bp, Artificial Sequence
  Description of Artificial Sequence: Synthetic oligonucleotide
  Target: LAMA2; (-) strand; PAM type: NRG; PAM sequence: GAG
tcctcccacctcagcctcct

SEQ ID NO: 63315 - DNA, 20 bp, Artificial Sequence
  Description of Artificial Sequence: Synthetic oligonucleotide
  Target: LAMA2; (-) strand; PAM type: NRG; PAM sequence: CAG
ctcaagggatcctcccacct

SEQ ID NO: 63316 - DNA, 20 bp, Artificial Sequence
  Description of Artificial Sequence: Synthetic oligonucleotide
  Target: LAMA2; (-) strand; PAM type: NRG; PAM sequence: GGG
ccttgaacttctgaactcaa

SEQ ID NO: 63317 - DNA, 20 bp, Artificial Sequence
  Description of Artificial Sequence: Synthetic oligonucleotide
  Target: LAMA2; (-) strand; PAM type: NRG; PAM sequence: AGG
gccttgaacttctgaactca

SEQ ID NO: 63318 - DNA, 20 bp, Artificial Sequence
  Description of Artificial Sequence: Synthetic oligonucleotide
  Target: LAMA2; (-) strand; PAM type: NRG; PAM sequence: AAG
agccttgaacttctgaactc

SEQ ID NO: 63319 - DNA, 20 bp, Artificial Sequence
  Description of Artificial Sequence: Synthetic oligonucleotide
  Target: LAMA2; (-) strand; PAM type: NRG; PAM sequence: CAG
ggctcaatctctgctcactg

SEQ ID NO: 63320 - DNA, 20 bp, Artificial Sequence
  Description of Artificial Sequence: Synthetic oligonucleotide
  Target: LAMA2; (-) strand; PAM type: NRG; PAM sequence: TGG
tcacctatgctggagtgcag

SEQ ID NO: 63321 - DNA, 20 bp, Artificial Sequence
  Description of Artificial Sequence: Synthetic oligonucleotide
  Target: LAMA2; (-) strand; PAM type: NRG; PAM sequence: CAG
ctgtcacctatgctggagtg

SEQ ID NO: 63322 - DNA, 20 bp, Artificial Sequence
  Description of Artificial Sequence: Synthetic oligonucleotide
  Target: LAMA2; (-) strand; PAM type: NRG; PAM sequence: GAG
tggctctgtcacctatgctg

SEQ ID NO: 63323 - DNA, 20 bp, Artificial Sequence
  Description of Artificial Sequence: Synthetic oligonucleotide
  Target: LAMA2; (-) strand; PAM type: NRG; PAM sequence: TGG
tctggctctgtcacctatgc

SEQ ID NO: 63324 - DNA, 20 bp, Artificial Sequence
  Description of Artificial Sequence: Synthetic oligonucleotide
  Target: LAMA2; (-) strand; PAM type: NRG; PAM sequence: TGG
tttctttttgagacaggctc

SEQ ID NO: 63325 - DNA, 20 bp, Artificial Sequence
  Description of Artificial Sequence: Synthetic oligonucleotide
  Target: LAMA2; (-) strand; PAM type: NRG; PAM sequence: AGG
tattattttctttttgagac

SEQ ID NO: 63326 - DNA, 20 bp, Artificial Sequence
  Description of Artificial Sequence: Synthetic oligonucleotide
  Target: LAMA2; (-) strand; PAM type: NRG; PAM sequence: CAG
ttattattttctttttgaga

SEQ ID NO: 63327 - DNA, 20 bp, Artificial Sequence
  Description of Artificial Sequence: Synthetic oligonucleotide
  Target: LAMA2; (-) strand; PAM type: NRG; PAM sequence: GAG
attattattattttcttttt

SEQ ID NO: 63328 - DNA, 20 bp, Artificial Sequence
  Description of Artificial Sequence: Synthetic oligonucleotide
  Target: LAMA2; (-) strand; PAM type: NRG; PAM sequence: CAG
attttggaggaactggaagg

SEQ ID NO: 63329 - DNA, 20 bp, Artificial Sequence
  Description of Artificial Sequence: Synthetic oligonucleotide
  Target: LAMA2; (-) strand; PAM type: NRG; PAM sequence: AGG
gttattttggaggaactgga

SEQ ID NO: 63330 - DNA, 20 bp, Artificial Sequence
  Description of Artificial Sequence: Synthetic oligonucleotide
  Target: LAMA2; (-) strand; PAM type: NRG; PAM sequence: AAG
tgttattttggaggaactgg

SEQ ID NO: 63331 - DNA, 20 bp, Artificial Sequence
  Description of Artificial Sequence: Synthetic oligonucleotide
  Target: LAMA2; (-) strand; PAM type: NRG; PAM sequence: TGG
acatgttattttggaggaac

SEQ ID NO: 63332 - DNA, 20 bp, Artificial Sequence
  Description of Artificial Sequence: Synthetic oligonucleotide
  Target: LAMA2; (-) strand; PAM type: NRG; PAM sequence: AGG
ggaaagacatgttattttgg

SEQ ID NO: 63333 - DNA, 20 bp, Artificial Sequence
  Description of Artificial Sequence: Synthetic oligonucleotide
  Target: LAMA2; (-) strand; PAM type: NRG; PAM sequence: GAG
aggaaagacatgttattttg

SEQ ID NO: 63334 - DNA, 20 bp, Artificial Sequence
  Description of Artificial Sequence: Synthetic oligonucleotide
  Target: LAMA2; (-) strand; PAM type: NRG; PAM sequence: TGG
caaggaaagacatgttattt

SEQ ID NO: 63335 - DNA, 20 bp, Artificial Sequence
  Description of Artificial Sequence: Synthetic oligonucleotide
  Target: LAMA2; (-) strand; PAM type: NRG; PAM sequence: AAG
agaagagtatttaccaagga

SEQ ID NO: 63336 - DNA, 20 bp, Artificial Sequence
  Description of Artificial Sequence: Synthetic oligonucleotide
  Target: LAMA2; (-) strand; PAM type: NRG; PAM sequence: AGG
agtaagaagagtatttacca

SEQ ID NO: 63337 - DNA, 20 bp, Artificial Sequence
  Description of Artificial Sequence: Synthetic oligonucleotide
  Target: LAMA2; (-) strand; PAM type: NRG; PAM sequence: AAG
cagtaagaagagtatttacc

SEQ ID NO: 63338 - DNA, 20 bp, Artificial Sequence
  Description of Artificial Sequence: Synthetic oligonucleotide
  Target: LAMA2; (-) strand; PAM type: NRG; PAM sequence: GAG
tctgctgaaagcagtaagaa

SEQ ID NO: 63339 - DNA, 20 bp, Artificial Sequence
  Description of Artificial Sequence: Synthetic oligonucleotide
  Target: LAMA2; (-) strand; PAM type: NRG; PAM sequence: AAG
tgtctgctgaaagcagtaag

SEQ ID NO: 63340 - DNA, 20 bp, Artificial Sequence
  Description of Artificial Sequence: Synthetic oligonucleotide
  Target: LAMA2; (-) strand; PAM type: NRG; PAM sequence: AAG
gaatgtctgctgaaagcagt

SEQ ID NO: 63341 - DNA, 20 bp, Artificial Sequence
  Description of Artificial Sequence: Synthetic oligonucleotide
  Target: LAMA2; (-) strand; PAM type: NRG; PAM sequence: CAG
ggttgaatgtctgctgaaag

SEQ ID NO: 63342 - DNA, 20 bp, Artificial Sequence
  Description of Artificial Sequence: Synthetic oligonucleotide
  Target: LAMA2; (-) strand; PAM type: NRG; PAM sequence: AAG
gtgggttgaatgtctgctga

SEQ ID NO: 63343 - DNA, 20 bp, Artificial Sequence
  Description of Artificial Sequence: Synthetic oligonucleotide
  Target: LAMA2; (-) strand; PAM type: NRG; PAM sequence: GGG
gtcaacgacctgggacctgt

SEQ ID NO: 63344 - DNA, 20 bp, Artificial Sequence
  Description of Artificial Sequence: Synthetic oligonucleotide
  Target: LAMA2; (-) strand; PAM type: NRG; PAM sequence: TGG
agtcaacgacctgggacctg

SEQ ID NO: 63345 - DNA, 20 bp, Artificial Sequence
  Description of Artificial Sequence: Synthetic oligonucleotide
  Target: LAMA2; (-) strand; PAM type: NRG; PAM sequence: GGG
tgagaatgagtcaacgacct

SEQ ID NO: 63346 - DNA, 20 bp, Artificial Sequence
  Description of Artificial Sequence: Synthetic oligonucleotide
  Target: LAMA2; (-) strand; PAM type: NRG; PAM sequence: TGG
atgagaatgagtcaacgacc

SEQ ID NO: 63347 - DNA, 20 bp, Artificial Sequence
  Description of Artificial Sequence: Synthetic oligonucleotide
  Target: LAMA2; (-) strand; PAM type: NRG; PAM sequence: GAG
agcaattaagagatgagaat

SEQ ID NO: 63348 - DNA, 20 bp, Artificial Sequence
  Description of Artificial Sequence: Synthetic oligonucleotide
  Target: LAMA2; (-) strand; PAM type: NRG; PAM sequence: GAG
ctggctagcaattaagagat

SEQ ID NO: 63349 - DNA, 20 bp, Artificial Sequence
  Description of Artificial Sequence: Synthetic oligonucleotide
  Target: LAMA2; (-) strand; PAM type: NRG; PAM sequence: GAG
aaggcctggctagcaattaa

SEQ ID NO: 63350 - DNA, 20 bp, Artificial Sequence
  Description of Artificial Sequence: Synthetic oligonucleotide
  Target: LAMA2; (-) strand; PAM type: NRG; PAM sequence: AAG
caaaggcctggctagcaatt

SEQ ID NO: 63351 - DNA, 20 bp, Artificial Sequence
  Description of Artificial Sequence: Synthetic oligonucleotide
  Target: LAMA2; (-) strand; PAM type: NRG; PAM sequence: TAG
cggcttcccaaaggcctggc

SEQ ID NO: 63352 - DNA, 20 bp, Artificial Sequence
  Description of Artificial Sequence: Synthetic oligonucleotide
  Target: LAMA2; (-) strand; PAM type: NRG; PAM sequence: TGG
agaacggcttcccaaaggcc

SEQ ID NO: 63353 - DNA, 20 bp, Artificial Sequence
  Description of Artificial Sequence: Synthetic oligonucleotide
  Target: LAMA2; (-) strand; PAM type: NRG; PAM sequence: AGG
actagagaacggcttcccaa

SEQ ID NO: 63354 - DNA, 20 bp, Artificial Sequence
  Description of Artificial Sequence: Synthetic oligonucleotide
  Target: LAMA2; (-) strand; PAM type: NRG; PAM sequence: AAG
aactagagaacggcttccca

SEQ ID NO: 63355 - DNA, 20 bp, Artificial Sequence
  Description of Artificial Sequence: Synthetic oligonucleotide
  Target: LAMA2; (-) strand; PAM type: NRG; PAM sequence: CGG
actgagtaggaactagagaa

SEQ ID NO: 63356 - DNA, 20 bp, Artificial Sequence
  Description of Artificial Sequence: Synthetic oligonucleotide
  Target: LAMA2; (-) strand; PAM type: NRG; PAM sequence: GAG
gcctaactgagtaggaacta

SEQ ID NO: 63357 - DNA, 20 bp, Artificial Sequence
  Description of Artificial Sequence: Synthetic oligonucleotide
  Target: LAMA2; (-) strand; PAM type: NRG; PAM sequence: TAG
gtgcctaactgagtaggaac

SEQ ID NO: 63358 - DNA, 20 bp, Artificial Sequence
  Description of Artificial Sequence: Synthetic oligonucleotide
  Target: LAMA2; (-) strand; PAM type: NRG; PAM sequence: AGG
ggttgggtgcctaactgagt

SEQ ID NO: 63359 - DNA, 20 bp, Artificial Sequence
  Description of Artificial Sequence: Synthetic oligonucleotide
  Target: LAMA2; (-) strand; PAM type: NRG; PAM sequence: TAG
aggttgggtgcctaactgag

SEQ ID NO: 63360 - DNA, 20 bp, Artificial Sequence
  Description of Artificial Sequence: Synthetic oligonucleotide
  Target: LAMA2; (-) strand; PAM type: NRG; PAM sequence: GAG
gagaggttgggtgcctaact

SEQ ID NO: 63361 - DNA, 20 bp, Artificial Sequence
  Description of Artificial Sequence: Synthetic oligonucleotide
  Target: LAMA2; (-) strand; PAM type: NRG; PAM sequence: GGG
gctatgagagcagagaggtt

SEQ ID NO: 63362 - DNA, 20 bp, Artificial Sequence
  Description of Artificial Sequence: Synthetic oligonucleotide
  Target: LAMA2; (-) strand; PAM type: NRG; PAM sequence: TGG
tgctatgagagcagagaggt

SEQ ID NO: 63363 - DNA, 20 bp, Artificial Sequence
  Description of Artificial Sequence: Synthetic oligonucleotide
  Target: LAMA2; (-) strand; PAM type: NRG; PAM sequence: AGG
tatgtgctatgagagcagag

SEQ ID NO: 63364 - DNA, 20 bp, Artificial Sequence
  Description of Artificial Sequence: Synthetic oligonucleotide
  Target: LAMA2; (-) strand; PAM type: NRG; PAM sequence: GAG
ctatgtgctatgagagcaga

SEQ ID NO: 63365 - DNA, 20 bp, Artificial Sequence
  Description of Artificial Sequence: Synthetic oligonucleotide
  Target: LAMA2; (-) strand; PAM type: NRG; PAM sequence: GAG
gcctatgtgctatgagagca

SEQ ID NO: 63366 - DNA, 20 bp, Artificial Sequence
  Description of Artificial Sequence: Synthetic oligonucleotide
  Target: LAMA2; (-) strand; PAM type: NRG; PAM sequence: CAG
cagcctatgtgctatgagag

SEQ ID NO: 63367 - DNA, 20 bp, Artificial Sequence
  Description of Artificial Sequence: Synthetic oligonucleotide
  Target: LAMA2; (-) strand; PAM type: NRG; PAM sequence: GAG
ggacagcctatgtgctatga

SEQ ID NO: 63368 - DNA, 20 bp, Artificial Sequence
  Description of Artificial Sequence: Synthetic oligonucleotide
  Target: LAMA2; (-) strand; PAM type: NRG; PAM sequence: GAG
agggacagcctatgtgctat

SEQ ID NO: 63369 - DNA, 20 bp, Artificial Sequence
  Description of Artificial Sequence: Synthetic oligonucleotide
  Target: LAMA2; (-) strand; PAM type: NRG; PAM sequence: CAG
ctcatgctatgttagaggga

SEQ ID NO: 63370 - DNA, 20 bp, Artificial Sequence
  Description of Artificial Sequence: Synthetic oligonucleotide
  Target: LAMA2; (-) strand; PAM type: NRG; PAM sequence: GGG
gtgactcatgctatgttaga

SEQ ID NO: 63371 - DNA, 20 bp, Artificial Sequence
  Description of Artificial Sequence: Synthetic oligonucleotide
  Target: LAMA2; (-) strand; PAM type: NRG; PAM sequence: AGG
tgtgactcatgctatgttag

SEQ ID NO: 63372 - DNA, 20 bp, Artificial Sequence
  Description of Artificial Sequence: Synthetic oligonucleotide
  Target: LAMA2; (-) strand; PAM type: NRG; PAM sequence: GAG
gtgtgactcatgctatgtta

SEQ ID NO: 63373 - DNA, 20 bp, Artificial Sequence
  Description of Artificial Sequence: Synthetic oligonucleotide
  Target: LAMA2; (-) strand; PAM type: NRG; PAM sequence: TAG
gcgtgtgactcatgctatgt

SEQ ID NO: 63374 - DNA, 20 bp, Artificial Sequence
  Description of Artificial Sequence: Synthetic oligonucleotide
  Target: LAMA2; (-) strand; PAM type: NRG; PAM sequence: AAG
caggtaaacaccagtttgga

SEQ ID NO: 63375 - DNA, 20 bp, Artificial Sequence
  Description of Artificial Sequence: Synthetic oligonucleotide
  Target: LAMA2; (-) strand; PAM type: NRG; PAM sequence: TGG
caagcaggtaaacaccagtt

SEQ ID NO: 63376 - DNA, 20 bp, Artificial Sequence
  Description of Artificial Sequence: Synthetic oligonucleotide
  Target: LAMA2; (-) strand; PAM type: NRG; PAM sequence: CAG
gaagacaagcaggtaaacac

SEQ ID NO: 63377 - DNA, 20 bp, Artificial Sequence
  Description of Artificial Sequence: Synthetic oligonucleotide
  Target: LAMA2; (-) strand; PAM type: NRG; PAM sequence: AGG
atgcagtaaagaagacaagc

SEQ ID NO: 63378 - DNA, 20 bp, Artificial Sequence
  Description of Artificial Sequence: Synthetic oligonucleotide
  Target: LAMA2; (-) strand; PAM type: NRG; PAM sequence: CAG
aatgcagtaaagaagacaag

SEQ ID NO: 63379 - DNA, 20 bp, Artificial Sequence
  Description of Artificial Sequence: Synthetic oligonucleotide
  Target: LAMA2; (-) strand; PAM type: NRG; PAM sequence: AAG
agcaatgcagtaaagaagac

SEQ ID NO: 63380 - DNA, 20 bp, Artificial Sequence
  Description of Artificial Sequence: Synthetic oligonucleotide
  Target: LAMA2; (-) strand; PAM type: NRG; PAM sequence: AAG
caaggagcaatgcagtaaag

SEQ ID NO: 63381 - DNA, 20 bp, Artificial Sequence
  Description of Artificial Sequence: Synthetic oligonucleotide
  Target: LAMA2; (-) strand; PAM type: NRG; PAM sequence: AAG
cctcaaggagcaatgcagta

SEQ ID NO: 63382 - DNA, 20 bp, Artificial Sequence
  Description of Artificial Sequence: Synthetic oligonucleotide
  Target: LAMA2; (-) strand; PAM type: NRG; PAM sequence: CAG
tgctacctcaaggagcaatg

SEQ ID NO: 63383 - DNA, 20 bp, Artificial Sequence
  Description of Artificial Sequence: Synthetic oligonucleotide
  Target: LAMA2; (-) strand; PAM type: NRG; PAM sequence: GAG
gacatccttgctacctcaag

SEQ ID NO: 63384 - DNA, 20 bp, Artificial Sequence
  Description of Artificial Sequence: Synthetic oligonucleotide
  Target: LAMA2; (-) strand; PAM type: NRG; PAM sequence: AGG
aagacatccttgctacctca

SEQ ID NO: 63385 - DNA, 20 bp, Artificial Sequence
  Description of Artificial Sequence: Synthetic oligonucleotide
  Target: LAMA2; (-) strand; PAM type: NRG; PAM sequence: AAG
gaagacatccttgctacctc

SEQ ID NO: 63386 - DNA, 20 bp, Artificial Sequence
  Description of Artificial Sequence: Synthetic oligonucleotide
  Target: LAMA2; (-) strand; PAM type: NRG; PAM sequence: AAG
gtataaaaaagctaataaag

SEQ ID NO: 63387 - DNA, 20 bp, Artificial Sequence
  Description of Artificial Sequence: Synthetic oligonucleotide
  Target: LAMA2; (-) strand; PAM type: NRG; PAM sequence: AAG
tcagtataaaaaagctaata

SEQ ID NO: 63388 - DNA, 20 bp, Artificial Sequence
  Description of Artificial Sequence: Synthetic oligonucleotide
  Target: LAMA2; (-) strand; PAM type: NRG; PAM sequence: AAG
aaaattttctcagtataaaa

SEQ ID NO: 63389 - DNA, 20 bp, Artificial Sequence
  Description of Artificial Sequence: Synthetic oligonucleotide
  Target: LAMA2; (-) strand; PAM type: NRG; PAM sequence: CAG
cctgtattttaaaattttct

SEQ ID NO: 63390 - DNA, 20 bp, Artificial Sequence
  Description of Artificial Sequence: Synthetic oligonucleotide
  Target: LAMA2; (-) strand; PAM type: NRG; PAM sequence: GGG
tttctatgagttaggaatgt

SEQ ID NO: 63391 - DNA, 20 bp, Artificial Sequence
  Description of Artificial Sequence: Synthetic oligonucleotide
  Target: LAMA2; (-) strand; PAM type: NRG; PAM sequence: TGG
atttctatgagttaggaatg

SEQ ID NO: 63392 - DNA, 20 bp, Artificial Sequence
  Description of Artificial Sequence: Synthetic oligonucleotide
  Target: LAMA2; (-) strand; PAM type: NRG; PAM sequence: AGG
aacagttatttctatgagtt

SEQ ID NO: 63393 - DNA, 20 bp, Artificial Sequence
  Description of Artificial Sequence: Synthetic oligonucleotide
  Target: LAMA2; (-) strand; PAM type: NRG; PAM sequence: TAG
caacagttatttctatgagt

SEQ ID NO: 63394 - DNA, 20 bp, Artificial Sequence
  Description of Artificial Sequence: Synthetic oligonucleotide
  Target: LAMA2; (-) strand; PAM type: NRG; PAM sequence: GAG
atgtcaacagttatttctat

SEQ ID NO: 63395 - DNA, 20 bp, Artificial Sequence
  Description of Artificial Sequence: Synthetic oligonucleotide
  Target: LAMA2; (-) strand; PAM type: NRG; PAM sequence: CAG
aaaacatgacaaaatgtcaa

SEQ ID NO: 63396 - DNA, 20 bp, Artificial Sequence
  Description of Artificial Sequence: Synthetic oligonucleotide
  Target: LAMA2; (-) strand; PAM type: NRG; PAM sequence: AAG
ttttctttctctagtaagaa

SEQ ID NO: 63397 - DNA, 20 bp, Artificial Sequence
  Description of Artificial Sequence: Synthetic oligonucleotide
  Target: LAMA2; (-) strand; PAM type: NRG; PAM sequence: AAG
tctcattttctttctctagt

SEQ ID NO: 63398 - DNA, 20 bp, Artificial Sequence
  Description of Artificial Sequence: Synthetic oligonucleotide
  Target: LAMA2; (-) strand; PAM type: NRG; PAM sequence: TAG
tttatctcattttctttctc

SEQ ID NO: 63399 - DNA, 20 bp, Artificial Sequence
  Description of Artificial Sequence: Synthetic oligonucleotide
  Target: LAMA2; (-) strand; PAM type: NRG; PAM sequence: TAG
agtaggatagaaatgcaggt

SEQ ID NO: 63400 - DNA, 20 bp, Artificial Sequence
  Description of Artificial Sequence: Synthetic oligonucleotide
  Target: LAMA2; (-) strand; PAM type: NRG; PAM sequence: AGG
gaaaagtaggatagaaatgc

SEQ ID NO: 63401 - DNA, 20 bp, Artificial Sequence
  Description of Artificial Sequence: Synthetic oligonucleotide
  Target: LAMA2; (-) strand; PAM type: NRG; PAM sequence: CAG
agaaaagtaggatagaaatg

SEQ ID NO: 63402 - DNA, 20 bp, Artificial Sequence
  Description of Artificial Sequence: Synthetic oligonucleotide
  Target: LAMA2; (-) strand; PAM type: NRG; PAM sequence: TAG
agacaggcagaaaagtagga

SEQ ID NO: 63403 - DNA, 20 bp, Artificial Sequence
  Description of Artificial Sequence: Synthetic oligonucleotide
  Target: LAMA2; (-) strand; PAM type: NRG; PAM sequence: AGG
tctaagacaggcagaaaagt

SEQ ID NO: 63404 - DNA, 20 bp, Artificial Sequence
  Description of Artificial Sequence: Synthetic oligonucleotide
  Target: LAMA2; (-) strand; PAM type: NRG; PAM sequence: TAG
ctctaagacaggcagaaaag

SEQ ID NO: 63405 - DNA, 20 bp, Artificial Sequence
  Description of Artificial Sequence: Synthetic oligonucleotide
  Target: LAMA2; (-) strand; PAM type: NRG; PAM sequence: AAG
tgcctctaagacaggcagaa

SEQ ID NO: 63406 - DNA, 20 bp, Artificial Sequence
  Description of Artificial Sequence: Synthetic oligonucleotide
  Target: LAMA2; (-) strand; PAM type: NRG; PAM sequence: CAG
gtgtttgcctctaagacagg

SEQ ID NO: 63407 - DNA, 20 bp, Artificial Sequence
  Description of Artificial Sequence: Synthetic oligonucleotide
  Target: LAMA2; (-) strand; PAM type: NRG; PAM sequence: AGG
ttggtgtttgcctctaagac

SEQ ID NO: 63408 - DNA, 20 bp, Artificial Sequence
  Description of Artificial Sequence: Synthetic oligonucleotide
  Target: LAMA2; (-) strand; PAM type: NRG; PAM sequence: CAG
gttggtgtttgcctctaaga

SEQ ID NO: 63409 - DNA, 20 bp, Artificial Sequence
  Description of Artificial Sequence: Synthetic oligonucleotide
  Target: LAMA2; (-) strand; PAM type: NRG; PAM sequence: AAG
ctgtgttggtgtttgcctct

SEQ ID NO: 63410 - DNA, 20 bp, Artificial Sequence
  Description of Artificial Sequence: Synthetic oligonucleotide
  Target: LAMA2; (-) strand; PAM type: NRG; PAM sequence: TGG
aattgacaacaaacctgtgt

SEQ ID NO: 63411 - DNA, 20 bp, Artificial Sequence
  Description of Artificial Sequence: Synthetic oligonucleotide
  Target: LAMA2; (-) strand; PAM type: NRG; PAM sequence: AGG
taaaagtatttttaatggga

SEQ ID NO: 63412 - DNA, 20 bp, Artificial Sequence
  Description of Artificial Sequence: Synthetic oligonucleotide
  Target: LAMA2; (-) strand; PAM type: NRG; PAM sequence: AAG
gtaaaagtatttttaatggg

SEQ ID NO: 63413 - DNA, 20 bp, Artificial Sequence
  Description of Artificial Sequence: Synthetic oligonucleotide
  Target: LAMA2; (-) strand; PAM type: NRG; PAM sequence: GGG
tatgtaaaagtatttttaat

SEQ ID NO: 63414 - DNA, 20 bp, Artificial Sequence
  Description of Artificial Sequence: Synthetic oligonucleotide
  Target: LAMA2; (-) strand; PAM type: NRG; PAM sequence: TGG
gtatgtaaaagtatttttaa

SEQ ID NO: 63415 - DNA, 20 bp, Artificial Sequence
  Description of Artificial Sequence: Synthetic oligonucleotide
  Target: LAMA2; (-) strand; PAM type: NRG; PAM sequence: AAG
gatacacagtaggtatgtaa

SEQ ID NO: 63416 - DNA, 20 bp, Artificial Sequence
  Description of Artificial Sequence: Synthetic oligonucleotide
  Target: LAMA2; (-) strand; PAM type: NRG; PAM sequence: AGG
gttggctatagatacacagt

SEQ ID NO: 63417 - DNA, 20 bp, Artificial Sequence
  Description of Artificial Sequence: Synthetic oligonucleotide
  Target: LAMA2; (-) strand; PAM type: NRG; PAM sequence: TAG
tgttggctatagatacacag

SEQ ID NO: 63418 - DNA, 20 bp, Artificial Sequence
  Description of Artificial Sequence: Synthetic oligonucleotide
  Target: LAMA2; (-) strand; PAM type: NRG; PAM sequence: CAG
atctgttggctatagataca

SEQ ID NO: 63419 - DNA, 20 bp, Artificial Sequence
  Description of Artificial Sequence: Synthetic oligonucleotide
  Target: LAMA2; (-) strand; PAM type: NRG; PAM sequence: TAG
aatataagatctgttggcta

SEQ ID NO: 63420 - DNA, 20 bp, Artificial Sequence
  Description of Artificial Sequence: Synthetic oligonucleotide
  Target: LAMA2; (-) strand; PAM type: NRG; PAM sequence: TGG
cacataaatataagatctgt

SEQ ID NO: 63421 - DNA, 20 bp, Artificial Sequence
  Description of Artificial Sequence: Synthetic oligonucleotide
  Target: LAMA2; (-) strand; PAM type: NRG; PAM sequence: AAG
cgcaaacaccacataaatat

SEQ ID NO: 63422 - DNA, 20 bp, Artificial Sequence
  Description of Artificial Sequence: Synthetic oligonucleotide
  Target: LAMA2; (-) strand; PAM type: NRG; PAM sequence: TGG
taggaaaccatttctaaaat

SEQ ID NO: 63423 - DNA, 20 bp, Artificial Sequence
  Description of Artificial Sequence: Synthetic oligonucleotide
  Target: LAMA2; (-) strand; PAM type: NRG; PAM sequence: AGG
agtcgtaggttaagaaaggt

SEQ ID NO: 63424 - DNA, 20 bp, Artificial Sequence
  Description of Artificial Sequence: Synthetic oligonucleotide
  Target: LAMA2; (-) strand; PAM type: NRG; PAM sequence: TAG
aagtcgtaggttaagaaagg

SEQ ID NO: 63425 - DNA, 20 bp, Artificial Sequence
  Description of Artificial Sequence: Synthetic oligonucleotide
  Target: LAMA2; (-) strand; PAM type: NRG; PAM sequence: AGG
cagaagtcgtaggttaagaa

SEQ ID NO: 63426 - DNA, 20 bp, Artificial Sequence
  Description of Artificial Sequence: Synthetic oligonucleotide
  Target: LAMA2; (-) strand; PAM type: NRG; PAM sequence: AAG
tcagaagtcgtaggttaaga

SEQ ID NO: 63427 - DNA, 20 bp, Artificial Sequence
  Description of Artificial Sequence: Synthetic oligonucleotide
  Target: LAMA2; (-) strand; PAM type: NRG; PAM sequence: AAG
attgtcagaagtcgtaggtt

SEQ ID NO: 63428 - DNA, 20 bp, Artificial Sequence
  Description of Artificial Sequence: Synthetic oligonucleotide
  Target: LAMA2; (-) strand; PAM type: NRG; PAM sequence: AGG
ataaaattgtcagaagtcgt

SEQ ID NO: 63429 - DNA, 20 bp, Artificial Sequence
  Description of Artificial Sequence: Synthetic oligonucleotide
  Target: LAMA2; (-) strand; PAM type: NRG; PAM sequence: TAG
aataaaattgtcagaagtcg

SEQ ID NO: 63430 - DNA, 20 bp, Artificial Sequence
  Description of Artificial Sequence: Synthetic oligonucleotide
  Target: LAMA2; (-) strand; PAM type: NRG; PAM sequence: AAG
ttttgaaataaaattgtcag

SEQ ID NO: 63431 - DNA, 20 bp, Artificial Sequence
  Description of Artificial Sequence: Synthetic oligonucleotide
  Target: LAMA2; (-) strand; PAM type: NRG; PAM sequence: CAG
taattttgaaataaaattgt

SEQ ID NO: 63432 - DNA, 20 bp, Artificial Sequence
  Description of Artificial Sequence: Synthetic oligonucleotide
  Target: LAMA2; (-) strand; PAM type: NRG; PAM sequence: TGG
tttttgagatctatacatat

SEQ ID NO: 63433 - DNA, 20 bp, Artificial Sequence
  Description of Artificial Sequence: Synthetic oligonucleotide
  Target: LAMA2; (-) strand; PAM type: NRG; PAM sequence: GAG
tcactcaatgttatgttttt

SEQ ID NO: 63434 - DNA, 20 bp, Artificial Sequence
  Description of Artificial Sequence: Synthetic oligonucleotide
  Target: LAMA2; (-) strand; PAM type: NRG; PAM sequence: TGG
ttacatgacattctacctat

SEQ ID NO: 63435 - DNA, 20 bp, Artificial Sequence
  Description of Artificial Sequence: Synthetic oligonucleotide
  Target: LAMA2; (-) strand; PAM type: NRG; PAM sequence: CAG
aaaaaggtaaataaaaacaa

SEQ ID NO: 63436 - DNA, 20 bp, Artificial Sequence
  Description of Artificial Sequence: Synthetic oligonucleotide
  Target: LAMA2; (-) strand; PAM type: NRG; PAM sequence: AGG
ggaaaaaaactggtaaaaaa

SEQ ID NO: 63437 - DNA, 20 bp, Artificial Sequence
  Description of Artificial Sequence: Synthetic oligonucleotide
  Target: LAMA2; (-) strand; PAM type: NRG; PAM sequence: AAG
tggaaaaaaactggtaaaaa

SEQ ID NO: 63438 - DNA, 20 bp, Artificial Sequence
  Description of Artificial Sequence: Synthetic oligonucleotide
  Target: LAMA2; (-) strand; PAM type: NRG; PAM sequence: TGG
aaacaaaactggaaaaaaac

SEQ ID NO: 63439 - DNA, 20 bp, Artificial Sequence
  Description of Artificial Sequence: Synthetic oligonucleotide
  Target: LAMA2; (-) strand; PAM type: NRG; PAM sequence: TGG
aaataataataaaacaaaac

SEQ ID NO: 63440 - DNA, 20 bp, Artificial Sequence
  Description of Artificial Sequence: Synthetic oligonucleotide
  Target: LAMA2; (-) strand; PAM type: NRG; PAM sequence: AAG
cacatgtaccctaaaactta

SEQ ID NO: 63441 - DNA, 20 bp, Artificial Sequence
  Description of Artificial Sequence: Synthetic oligonucleotide
  Target: LAMA2; (-) strand; PAM type: NRG; PAM sequence: AGG
aatgggtgcagcacaccagc

SEQ ID NO: 63442 - DNA, 20 bp, Artificial Sequence
  Description of Artificial Sequence: Synthetic oligonucleotide
  Target: LAMA2; (-) strand; PAM type: NRG; PAM sequence: CAG
taatgggtgcagcacaccag

SEQ ID NO: 63443 - DNA, 20 bp, Artificial Sequence
  Description of Artificial Sequence: Synthetic oligonucleotide
  Target: LAMA2; (-) strand; PAM type: NRG; PAM sequence: CAG
agttaatgggtgcagcacac

SEQ ID NO: 63444 - DNA, 20 bp, Artificial Sequence
  Description of Artificial Sequence: Synthetic oligonucleotide
  Target: LAMA2; (-) strand; PAM type: NRG; PAM sequence: CAG
aaatgacgagttaatgggtg

SEQ ID NO: 63445 - DNA, 20 bp, Artificial Sequence
  Description of Artificial Sequence: Synthetic oligonucleotide
  Target: LAMA2; (-) strand; PAM type: NRG; PAM sequence: GGG
atgctaaatgacgagttaat

SEQ ID NO: 63446 - DNA, 20 bp, Artificial Sequence
  Description of Artificial Sequence: Synthetic oligonucleotide
  Target: LAMA2; (-) strand; PAM type: NRG; PAM sequence: TGG
aatgctaaatgacgagttaa

SEQ ID NO: 63447 - DNA, 20 bp, Artificial Sequence
  Description of Artificial Sequence: Synthetic oligonucleotide
  Target: LAMA2; (-) strand; PAM type: NRG; PAM sequence: GAG
tatacctaatgctaaatgac

SEQ ID NO: 63448 - DNA, 20 bp, Artificial Sequence
  Description of Artificial Sequence: Synthetic oligonucleotide
  Target: LAMA2; (-) strand; PAM type: NRG; PAM sequence: GAG
ggggggagggatagcattag

SEQ ID NO: 63449 - DNA, 20 bp, Artificial Sequence
  Description of Artificial Sequence: Synthetic oligonucleotide
  Target: LAMA2; (-) strand; PAM type: NRG; PAM sequence: AGG
gaggggggagggatagcatt

SEQ ID NO: 63450 - DNA, 20 bp, Artificial Sequence
  Description of Artificial Sequence: Synthetic oligonucleotide
  Target: LAMA2; (-) strand; PAM type: NRG; PAM sequence: TAG
ggaggggggagggatagcat

SEQ ID NO: 63451 - DNA, 20 bp, Artificial Sequence
  Description of Artificial Sequence: Synthetic oligonucleotide
  Target: LAMA2; (-) strand; PAM type: NRG; PAM sequence: TAG
gtggggggaggggggaggga

SEQ ID NO: 63452 - DNA, 20 bp, Artificial Sequence
  Description of Artificial Sequence: Synthetic oligonucleotide
  Target: LAMA2; (-) strand; PAM type: NRG; PAM sequence: GGG
tggggtggggggagggggga

SEQ ID NO: 63453 - DNA, 20 bp, Artificial Sequence
  Description of Artificial Sequence: Synthetic oligonucleotide
  Target: LAMA2; (-) strand; PAM type: NRG; PAM sequence: AGG
gtggggtggggggagggggg

SEQ ID NO: 63454 - DNA, 20 bp, Artificial Sequence
  Description of Artificial Sequence: Synthetic oligonucleotide
  Target: LAMA2; (-) strand; PAM type: NRG; PAM sequence: GAG
ggtggggtggggggaggggg

SEQ ID NO: 63455 - DNA, 20 bp, Artificial Sequence
  Description of Artificial Sequence: Synthetic oligonucleotide
  Target: LAMA2; (-) strand; PAM type: NRG; PAM sequence: GGG
ggggtggggtggggggaggg

SEQ ID NO: 63456 - DNA, 20 bp, Artificial Sequence
  Description of Artificial Sequence: Synthetic oligonucleotide
  Target: LAMA2; (-) strand; PAM type: NRG; PAM sequence: GGG
tggggtggggtggggggagg

SEQ ID NO: 63457 - DNA, 20 bp, Artificial Sequence
  Description of Artificial Sequence: Synthetic oligonucleotide
  Target: LAMA2; (-) strand; PAM type: NRG; PAM sequence: GGG
gtggggtggggtggggggag

SEQ ID NO: 63458 - DNA, 20 bp, Artificial Sequence
  Description of Artificial Sequence: Synthetic oligonucleotide
  Target: LAMA2; (-) strand; PAM type: NRG; PAM sequence: GGG
tgtggggtggggtgggggga

SEQ ID NO: 63459 - DNA, 20 bp, Artificial Sequence
  Description of Artificial Sequence: Synthetic oligonucleotide
  Target: LAMA2; (-) strand; PAM type: NRG; PAM sequence: AGG
ttgtggggtggggtgggggg

SEQ ID NO: 63460 - DNA, 20 bp, Artificial Sequence
  Description of Artificial Sequence: Synthetic oligonucleotide
  Target: LAMA2; (-) strand; PAM type: NRG; PAM sequence: GAG
gttgtggggtggggtggggg

SEQ ID NO: 63461 - DNA, 20 bp, Artificial Sequence
  Description of Artificial Sequence: Synthetic oligonucleotide
  Target: LAMA2; (-) strand; PAM type: NRG; PAM sequence: GGG
ctgttgtggggtggggtggg

SEQ ID NO: 63462 - DNA, 20 bp, Artificial Sequence
  Description of Artificial Sequence: Synthetic oligonucleotide
  Target: LAMA2; (-) strand; PAM type: NRG; PAM sequence: GGG
actgttgtggggtggggtgg

SEQ ID NO: 63463 - DNA, 20 bp, Artificial Sequence
  Description of Artificial Sequence: Synthetic oligonucleotide
  Target: LAMA2; (-) strand; PAM type: NRG; PAM sequence: GGG
gactgttgtggggtggggtg

SEQ ID NO: 63464 - DNA, 20 bp, Artificial Sequence
  Description of Artificial Sequence: Synthetic oligonucleotide
  Target: LAMA2; (-) strand; PAM type: NRG; PAM sequence: GGG
ggactgttgtggggtggggt

SEQ ID NO: 63465 - DNA, 20 bp, Artificial Sequence
  Description of Artificial Sequence: Synthetic oligonucleotide
  Target: LAMA2; (-) strand; PAM type: NRG; PAM sequence: TGG
gggactgttgtggggtgggg

SEQ ID NO: 63466 - DNA, 20 bp, Artificial Sequence
  Description of Artificial Sequence: Synthetic oligonucleotide
  Target: LAMA2; (-) strand; PAM type: NRG; PAM sequence: GGG
ctggggactgttgtggggtg

SEQ ID NO: 63467 - DNA, 20 bp, Artificial Sequence
  Description of Artificial Sequence: Synthetic oligonucleotide
  Target: LAMA2; (-) strand; PAM type: NRG; PAM sequence: GGG
tctggggactgttgtggggt

SEQ ID NO: 63468 - DNA, 20 bp, Artificial Sequence
  Description of Artificial Sequence: Synthetic oligonucleotide
  Target: LAMA2; (-) strand; PAM type: NRG; PAM sequence: TGG
ctctggggactgttgtgggg

SEQ ID NO: 63469 - DNA, 20 bp, Artificial Sequence
  Description of Artificial Sequence: Synthetic oligonucleotide
  Target: LAMA2; (-) strand; PAM type: NRG; PAM sequence: GGG
acactctggggactgttgtg

SEQ ID NO: 63470 - DNA, 20 bp, Artificial Sequence
  Description of Artificial Sequence: Synthetic oligonucleotide
  Target: LAMA2; (-) strand; PAM type: NRG; PAM sequence: GGG
cacactctggggactgttgt

SEQ ID NO: 63471 - DNA, 20 bp, Artificial Sequence
  Description of Artificial Sequence: Synthetic oligonucleotide
  Target: LAMA2; (-) strand; PAM type: NRG; PAM sequence: TGG
tcacactctggggactgttg

SEQ ID NO: 63472 - DNA, 20 bp, Artificial Sequence
  Description of Artificial Sequence: Synthetic oligonucleotide
  Target: LAMA2; (-) strand; PAM type: NRG; PAM sequence: GGG
aaggggaacatcacactctg

SEQ ID NO: 63473 - DNA, 20 bp, Artificial Sequence
  Description of Artificial Sequence: Synthetic oligonucleotide
  Target: LAMA2; (-) strand; PAM type: NRG; PAM sequence: GGG
gaaggggaacatcacactct

SEQ ID NO: 63474 - DNA, 20 bp, Artificial Sequence
  Description of Artificial Sequence: Synthetic oligonucleotide
  Target: LAMA2; (-) strand; PAM type: NRG; PAM sequence: TGG
agaaggggaacatcacactc

SEQ ID NO: 63475 - DNA, 20 bp, Artificial Sequence
  Description of Artificial Sequence: Synthetic oligonucleotide
  Target: LAMA2; (-) strand; PAM type: NRG; PAM sequence: GGG
gaacacatggacacaagaag

SEQ ID NO: 63476 - DNA, 20 bp, Artificial Sequence
  Description of Artificial Sequence: Synthetic oligonucleotide
  Target: LAMA2; (-) strand; PAM type: NRG; PAM sequence: GGG
agaacacatggacacaagaa

SEQ ID NO: 63477 - DNA, 20 bp, Artificial Sequence
  Description of Artificial Sequence: Synthetic oligonucleotide
  Target: LAMA2; (-) strand; PAM type: NRG; PAM sequence: AGG
gagaacacatggacacaaga

SEQ ID NO: 63478 - DNA, 20 bp, Artificial Sequence
  Description of Artificial Sequence: Synthetic oligonucleotide
  Target: LAMA2; (-) strand; PAM type: NRG; PAM sequence: AAG
tgagaacacatggacacaag

SEQ ID NO: 63479 - DNA, 20 bp, Artificial Sequence
  Description of Artificial Sequence: Synthetic oligonucleotide
  Target: LAMA2; (-) strand; PAM type: NRG; PAM sequence: AAG
caatgagaacacatggacac

SEQ ID NO: 63480 - DNA, 20 bp, Artificial Sequence
  Description of Artificial Sequence: Synthetic oligonucleotide
  Target: LAMA2; (-) strand; PAM type: NRG; PAM sequence: TGG
aattgaacaatgagaacaca

SEQ ID NO: 63481 - DNA, 20 bp, Artificial Sequence
  Description of Artificial Sequence: Synthetic oligonucleotide
  Target: LAMA2; (-) strand; PAM type: NRG; PAM sequence: GAG
ataggtgggaattgaacaat

SEQ ID NO: 63482 - DNA, 20 bp, Artificial Sequence
  Description of Artificial Sequence: Synthetic oligonucleotide
  Target: LAMA2; (-) strand; PAM type: NRG; PAM sequence: GGG
gcatgttctcactcataggt

SEQ ID NO: 63483 - DNA, 20 bp, Artificial Sequence
  Description of Artificial Sequence: Synthetic oligonucleotide
  Target: LAMA2; (-) strand; PAM type: NRG; PAM sequence: TGG
cgcatgttctcactcatagg

SEQ ID NO: 63484 - DNA, 20 bp, Artificial Sequence
  Description of Artificial Sequence: Synthetic oligonucleotide
  Target: LAMA2; (-) strand; PAM type: NRG; PAM sequence: AGG
caccgcatgttctcactcat

SEQ ID NO: 63485 - DNA, 20 bp, Artificial Sequence
  Description of Artificial Sequence: Synthetic oligonucleotide
  Target: LAMA2; (-) strand; PAM type: NRG; PAM sequence: TAG
acaccgcatgttctcactca

SEQ ID NO: 63486 - DNA, 20 bp, Artificial Sequence
  Description of Artificial Sequence: Synthetic oligonucleotide
  Target: LAMA2; (-) strand; PAM type: NRG; PAM sequence: AGG
attctcagtaaactatcaca

SEQ ID NO: 63487 - DNA, 20 bp, Artificial Sequence
  Description of Artificial Sequence: Synthetic oligonucleotide
  Target: LAMA2; (-) strand; PAM type: NRG; PAM sequence: AAG
cattctcagtaaactatcac

SEQ ID NO: 63488 - DNA, 20 bp, Artificial Sequence
  Description of Artificial Sequence: Synthetic oligonucleotide
  Target: LAMA2; (-) strand; PAM type: NRG; PAM sequence: CAG
atactggaaatcatcattct

SEQ ID NO: 63489 - DNA, 20 bp, Artificial Sequence
  Description of Artificial Sequence: Synthetic oligonucleotide
  Target: LAMA2; (-) strand; PAM type: NRG; PAM sequence: TGG
tgtagggacatggacgatac

SEQ ID NO: 63490 - DNA, 20 bp, Artificial Sequence
  Description of Artificial Sequence: Synthetic oligonucleotide
  Target: LAMA2; (-) strand; PAM type: NRG; PAM sequence: TGG
tcctgtcctttgtagggaca

SEQ ID NO: 63491 - DNA, 20 bp, Artificial Sequence
  Description of Artificial Sequence: Synthetic oligonucleotide
  Target: LAMA2; (-) strand; PAM type: NRG; PAM sequence: GGG
atgagttcctgtcctttgta

SEQ ID NO: 63492 - DNA, 20 bp, Artificial Sequence
  Description of Artificial Sequence: Synthetic oligonucleotide
  Target: LAMA2; (-) strand; PAM type: NRG; PAM sequence: AGG
gatgagttcctgtcctttgt

SEQ ID NO: 63493 - DNA, 20 bp, Artificial Sequence
  Description of Artificial Sequence: Synthetic oligonucleotide
  Target: LAMA2; (-) strand; PAM type: NRG; PAM sequence: TAG
tgatgagttcctgtcctttg

SEQ ID NO: 63494 - DNA, 20 bp, Artificial Sequence
  Description of Artificial Sequence: Synthetic oligonucleotide
  Target: LAMA2; (-) strand; PAM type: NRG; PAM sequence: GAG
tgcagccataaaaaaatgat

SEQ ID NO: 63495 - DNA, 20 bp, Artificial Sequence
  Description of Artificial Sequence: Synthetic oligonucleotide
  Target: LAMA2; (-) strand; PAM type: NRG; PAM sequence: CAG
atacaccatggaatactatg

SEQ ID NO: 63496 - DNA, 20 bp, Artificial Sequence
  Description of Artificial Sequence: Synthetic oligonucleotide
  Target: LAMA2; (-) strand; PAM type: NRG; PAM sequence: TGG
aatgtggcacatatacacca

SEQ ID NO: 63497 - DNA, 20 bp, Artificial Sequence
  Description of Artificial Sequence: Synthetic oligonucleotide
  Target: LAMA2; (-) strand; PAM type: NRG; PAM sequence: TGG
tagactggattaagaaaatg

SEQ ID NO: 63498 - DNA, 20 bp, Artificial Sequence
  Description of Artificial Sequence: Synthetic oligonucleotide
  Target: LAMA2; (-) strand; PAM type: NRG; PAM sequence: AAG
caacaatgatagactggatt

SEQ ID NO: 63499 - DNA, 20 bp, Artificial Sequence
  Description of Artificial Sequence: Synthetic oligonucleotide
  Target: LAMA2; (-) strand; PAM type: NRG; PAM sequence: TGG
aatgtacaacaatgatagac

SEQ ID NO: 63500 - DNA, 20 bp, Artificial Sequence
  Description of Artificial Sequence: Synthetic oligonucleotide
  Target: LAMA2; (-) strand; PAM type: NRG; PAM sequence: TAG
acccaaatgtacaacaatga

SEQ ID NO: 63501 - DNA, 20 bp, Artificial Sequence
  Description of Artificial Sequence: Synthetic oligonucleotide
  Target: LAMA2; (-) strand; PAM type: NRG; PAM sequence: TGG
tattcacaatagcaaagact

SEQ ID NO: 63502 - DNA, 20 bp, Artificial Sequence
  Description of Artificial Sequence: Synthetic oligonucleotide
  Target: LAMA2; (-) strand; PAM type: NRG; PAM sequence: AAG
cggcactattcacaatagca

SEQ ID NO: 63503 - DNA, 20 bp, Artificial Sequence
  Description of Artificial Sequence: Synthetic oligonucleotide
  Target: LAMA2; (-) strand; PAM type: NRG; PAM sequence: TAG
tattgcggcactattcacaa

SEQ ID NO: 63504 - DNA, 20 bp, Artificial Sequence
  Description of Artificial Sequence: Synthetic oligonucleotide
  Target: LAMA2; (-) strand; PAM type: NRG; PAM sequence: CGG
atgcacacgtatgtttattg

SEQ ID NO: 63505 - DNA, 20 bp, Artificial Sequence
  Description of Artificial Sequence: Synthetic oligonucleotide
  Target: LAMA2; (-) strand; PAM type: NRG; PAM sequence: AAG
ctataaatcatgctgctata

SEQ ID NO: 63506 - DNA, 20 bp, Artificial Sequence
  Description of Artificial Sequence: Synthetic oligonucleotide
  Target: LAMA2; (-) strand; PAM type: NRG; PAM sequence: AGG
attactgggtatgtacccaa

SEQ ID NO: 63507 - DNA, 20 bp, Artificial Sequence
  Description of Artificial Sequence: Synthetic oligonucleotide
  Target: LAMA2; (-) strand; PAM type: NRG; PAM sequence: AAG
cattactgggtatgtaccca

SEQ ID NO: 63508 - DNA, 20 bp, Artificial Sequence
  Description of Artificial Sequence: Synthetic oligonucleotide
  Target: LAMA2; (-) strand; PAM type: NRG; PAM sequence: GGG
gacccagccatcccattact

SEQ ID NO: 63509 - DNA, 20 bp, Artificial Sequence
  Description of Artificial Sequence: Synthetic oligonucleotide
  Target: LAMA2; (-) strand; PAM type: NRG; PAM sequence: TGG
tgacccagccatcccattac

SEQ ID NO: 63510 - DNA, 20 bp, Artificial Sequence
  Description of Artificial Sequence: Synthetic oligonucleotide
  Target: LAMA2; (-) strand; PAM type: NRG; PAM sequence: CAG
actagaaataccctttgacc

SEQ ID NO: 63511 - DNA, 20 bp, Artificial Sequence
  Description of Artificial Sequence: Synthetic oligonucleotide
  Target: LAMA2; (-) strand; PAM type: NRG; PAM sequence: TAG
attcctcagggatctagaac

SEQ ID NO: 63512 - DNA, 20 bp, Artificial Sequence
  Description of Artificial Sequence: Synthetic oligonucleotide
  Target: LAMA2; (-) strand; PAM type: NRG; PAM sequence: TAG
gtggcgattcctcagggatc

SEQ ID NO: 63513 - DNA, 20 bp, Artificial Sequence
  Description of Artificial Sequence: Synthetic oligonucleotide
  Target: LAMA2; (-) strand; PAM type: NRG; PAM sequence: GGG
gtcagtgtggcgattcctca

SEQ ID NO: 63514 - DNA, 20 bp, Artificial Sequence
  Description of Artificial Sequence: Synthetic oligonucleotide
  Target: LAMA2; (-) strand; PAM type: NRG; PAM sequence: AGG
agtcagtgtggcgattcctc

SEQ ID NO: 63515 - DNA, 20 bp, Artificial Sequence
  Description of Artificial Sequence: Synthetic oligonucleotide
  Target: LAMA2; (-) strand; PAM type: NRG; PAM sequence: CAG
aagtcagtgtggcgattcct

SEQ ID NO: 63516 - DNA, 20 bp, Artificial Sequence
  Description of Artificial Sequence: Synthetic oligonucleotide
  Target: LAMA2; (-) strand; PAM type: NRG; PAM sequence: TGG
aaccattgtggaagtcagtg

SEQ ID NO: 63517 - DNA, 20 bp, Artificial Sequence
  Description of Artificial Sequence: Synthetic oligonucleotide
  Target: LAMA2; (-) strand; PAM type: NRG; PAM sequence: CAG
agttcaaccattgtggaagt

SEQ ID NO: 63518 - DNA, 20 bp, Artificial Sequence
  Description of Artificial Sequence: Synthetic oligonucleotide
  Target: LAMA2; (-) strand; PAM type: NRG; PAM sequence: AAG
aactagttcaaccattgtgg

SEQ ID NO: 63519 - DNA, 20 bp, Artificial Sequence
  Description of Artificial Sequence: Synthetic oligonucleotide
  Target: LAMA2; (-) strand; PAM type: NRG; PAM sequence: TGG
gtaaactagttcaaccattg

SEQ ID NO: 63520 - DNA, 20 bp, Artificial Sequence
  Description of Artificial Sequence: Synthetic oligonucleotide
  Target: LAMA2; (-) strand; PAM type: NRG; PAM sequence: TAG
ctgttggtgggactgtaaac

SEQ ID NO: 63521 - DNA, 20 bp, Artificial Sequence
  Description of Artificial Sequence: Synthetic oligonucleotide
  Target: LAMA2; (-) strand; PAM type: NRG; PAM sequence: GGG
aacacttttacactgttggt

SEQ ID NO: 63522 - DNA, 20 bp, Artificial Sequence
  Description of Artificial Sequence: Synthetic oligonucleotide
  Target: LAMA2; (-) strand; PAM type: NRG; PAM sequence: TGG
gaacacttttacactgttgg

SEQ ID NO: 63523 - DNA, 20 bp, Artificial Sequence
  Description of Artificial Sequence: Synthetic oligonucleotide
  Target: LAMA2; (-) strand; PAM type: NRG; PAM sequence: TGG
taggaacacttttacactgt

SEQ ID NO: 63524 - DNA, 20 bp, Artificial Sequence
  Description of Artificial Sequence: Synthetic oligonucleotide
  Target: LAMA2; (-) strand; PAM type: NRG; PAM sequence: AGG
tggagaggatatggagaaat

SEQ ID NO: 63525 - DNA, 20 bp, Artificial Sequence
  Description of Artificial Sequence: Synthetic oligonucleotide
  Target: LAMA2; (-) strand; PAM type: NRG; PAM sequence: TAG
ctggagaggatatggagaaa

SEQ ID NO: 63526 - DNA, 20 bp, Artificial Sequence
  Description of Artificial Sequence: Synthetic oligonucleotide
  Target: LAMA2; (-) strand; PAM type: NRG; PAM sequence: GAG
caggggctggagaggatatg

SEQ ID NO: 63527 - DNA, 20 bp, Artificial Sequence
  Description of Artificial Sequence: Synthetic oligonucleotide
  Target: LAMA2; (-) strand; PAM type: NRG; PAM sequence: TGG
aacaggggctggagaggata

SEQ ID NO: 63528 - DNA, 20 bp, Artificial Sequence
  Description of Artificial Sequence: Synthetic oligonucleotide
  Target: LAMA2; (-) strand; PAM type: NRG; PAM sequence: AGG
ggaaacaacaggggctggag

SEQ ID NO: 63529 - DNA, 20 bp, Artificial Sequence
  Description of Artificial Sequence: Synthetic oligonucleotide
  Target: LAMA2; (-) strand; PAM type: NRG; PAM sequence: GAG
aggaaacaacaggggctgga

SEQ ID NO: 63530 - DNA, 20 bp, Artificial Sequence
  Description of Artificial Sequence: Synthetic oligonucleotide
  Target: LAMA2; (-) strand; PAM type: NRG; PAM sequence: GAG
tcaggaaacaacaggggctg

SEQ ID NO: 63531 - DNA, 20 bp, Artificial Sequence
  Description of Artificial Sequence: Synthetic oligonucleotide
  Target: LAMA2; (-) strand; PAM type: NRG; PAM sequence: TGG
agtcaggaaacaacaggggc

SEQ ID NO: 63532 - DNA, 20 bp, Artificial Sequence
  Description of Artificial Sequence: Synthetic oligonucleotide
  Target: LAMA2; (-) strand; PAM type: NRG; PAM sequence: GGG
aaaaagtcaggaaacaacag

SEQ ID NO: 63533 - DNA, 20 bp, Artificial Sequence
  Description of Artificial Sequence: Synthetic oligonucleotide
  Target: LAMA2; (-) strand; PAM type: NRG; PAM sequence: GGG
taaaaagtcaggaaacaaca

SEQ ID NO: 63534 - DNA, 20 bp, Artificial Sequence
  Description of Artificial Sequence: Synthetic oligonucleotide
  Target: LAMA2; (-) strand; PAM type: NRG; PAM sequence: AGG
ttaaaaagtcaggaaacaac

SEQ ID NO: 63535 - DNA, 20 bp, Artificial Sequence
  Description of Artificial Sequence: Synthetic oligonucleotide
  Target: LAMA2; (-) strand; PAM type: NRG; PAM sequence: CAG
attaaaaagtcaggaaacaa

SEQ ID NO: 63536 - DNA, 20 bp, Artificial Sequence
  Description of Artificial Sequence: Synthetic oligonucleotide
  Target: LAMA2; (-) strand; PAM type: NRG; PAM sequence: AGG
atggcaatcattaaaaagtc

SEQ ID NO: 63537 - DNA, 20 bp, Artificial Sequence
  Description of Artificial Sequence: Synthetic oligonucleotide
  Target: LAMA2; (-) strand; PAM type: NRG; PAM sequence: CAG
aatggcaatcattaaaaagt

SEQ ID NO: 63538 - DNA, 20 bp, Artificial Sequence
  Description of Artificial Sequence: Synthetic oligonucleotide
  Target: LAMA2; (-) strand; PAM type: NRG; PAM sequence: AAG
ttagaatggcaatcattaaa

SEQ ID NO: 63539 - DNA, 20 bp, Artificial Sequence
  Description of Artificial Sequence: Synthetic oligonucleotide
  Target: LAMA2; (-) strand; PAM type: NRG; PAM sequence: TGG
ccatctcacaccagttagaa

SEQ ID NO: 63540 - DNA, 20 bp, Artificial Sequence
  Description of Artificial Sequence: Synthetic oligonucleotide
  Target: LAMA2; (-) strand; PAM type: NRG; PAM sequence: TAG
agataccatctcacaccagt

SEQ ID NO: 63541 - DNA, 20 bp, Artificial Sequence
  Description of Artificial Sequence: Synthetic oligonucleotide
  Target: LAMA2; (-) strand; PAM type: NRG; PAM sequence: CAG
aatgagataccatctcacac

SEQ ID NO: 63542 - DNA, 20 bp, Artificial Sequence
  Description of Artificial Sequence: Synthetic oligonucleotide
  Target: LAMA2; (-) strand; PAM type: NRG; PAM sequence: GAG
atgcaaaccaaaaccacaat

SEQ ID NO: 63543 - DNA, 20 bp, Artificial Sequence
  Description of Artificial Sequence: Synthetic oligonucleotide
  Target: LAMA2; (-) strand; PAM type: NRG; PAM sequence: GAG
ctcaccatcactggccatca

SEQ ID NO: 63544 - DNA, 20 bp, Artificial Sequence
  Description of Artificial Sequence: Synthetic oligonucleotide
  Target: LAMA2; (-) strand; PAM type: NRG; PAM sequence: CAG
tgctcaccatcactggccat

SEQ ID NO: 63545 - DNA, 20 bp, Artificial Sequence
  Description of Artificial Sequence: Synthetic oligonucleotide
  Target: LAMA2; (-) strand; PAM type: NRG; PAM sequence: TGG
gaaaaaatgctcaccatcac

SEQ ID NO: 63546 - DNA, 20 bp, Artificial Sequence
  Description of Artificial Sequence: Synthetic oligonucleotide
  Target: LAMA2; (-) strand; PAM type: NRG; PAM sequence: CAG
catcaaagaagacatttatg

SEQ ID NO: 63547 - DNA, 20 bp, Artificial Sequence
  Description of Artificial Sequence: Synthetic oligonucleotide
  Target: LAMA2; (-) strand; PAM type: NRG; PAM sequence: AAG
aatctcattattcatcaaag

SEQ ID NO: 63548 - DNA, 20 bp, Artificial Sequence
  Description of Artificial Sequence: Synthetic oligonucleotide
  Target: LAMA2; (-) strand; PAM type: NRG; PAM sequence: AAG
ttaaatctcattattcatca

SEQ ID NO: 63549 - DNA, 20 bp, Artificial Sequence
  Description of Artificial Sequence: Synthetic oligonucleotide
  Target: LAMA2; (-) strand; PAM type: NRG; PAM sequence: AAG
tgtgaatggtcaatgggaaa

SEQ ID NO: 63550 - DNA, 20 bp, Artificial Sequence
  Description of Artificial Sequence: Synthetic oligonucleotide
  Target: LAMA2; (-) strand; PAM type: NRG; PAM sequence: GGG
ggaacatgtgaatggtcaat

SEQ ID NO: 63551 - DNA, 20 bp, Artificial Sequence
  Description of Artificial Sequence: Synthetic oligonucleotide
  Target: LAMA2; (-) strand; PAM type: NRG; PAM sequence: TGG
gggaacatgtgaatggtcaa

SEQ ID NO: 63552 - DNA, 20 bp, Artificial Sequence
  Description of Artificial Sequence: Synthetic oligonucleotide
  Target: LAMA2; (-) strand; PAM type: NRG; PAM sequence: TGG
cagagttgggaacatgtgaa

SEQ ID NO: 63553 - DNA, 20 bp, Artificial Sequence
  Description of Artificial Sequence: Synthetic oligonucleotide
  Target: LAMA2; (-) strand; PAM type: NRG; PAM sequence: GGG
tttactagaaattcagagtt

SEQ ID NO: 63554 - DNA, 20 bp, Artificial Sequence
  Description of Artificial Sequence: Synthetic oligonucleotide
  Target: LAMA2; (-) strand; PAM type: NRG; PAM sequence: TGG
atttactagaaattcagagt

SEQ ID NO: 63555 - DNA, 20 bp, Artificial Sequence
  Description of Artificial Sequence: Synthetic oligonucleotide
  Target: LAMA2; (-) strand; PAM type: NRG; PAM sequence: GAG
atgaatttactagaaattca

SEQ ID NO: 63556 - DNA, 20 bp, Artificial Sequence
  Description of Artificial Sequence: Synthetic oligonucleotide
  Target: LAMA2; (-) strand; PAM type: NRG; PAM sequence: CAG
acatgaatttactagaaatt

SEQ ID NO: 63557 - DNA, 20 bp, Artificial Sequence
  Description of Artificial Sequence: Synthetic oligonucleotide
  Target: LAMA2; (-) strand; PAM type: NRG; PAM sequence: TAG
ctggaaaaacatgaatttac

SEQ ID NO: 63558 - DNA, 20 bp, Artificial Sequence
  Description of Artificial Sequence: Synthetic oligonucleotide
  Target: LAMA2; (-) strand; PAM type: NRG; PAM sequence: TGG
ccattcactctttcattctc

SEQ ID NO: 63559 - DNA, 20 bp, Artificial Sequence
  Description of Artificial Sequence: Synthetic oligonucleotide
  Target: LAMA2; (-) strand; PAM type: NRG; PAM sequence: TGG
ctcccatttcctcaagacag

SEQ ID NO: 63560 - DNA, 20 bp, Artificial Sequence
  Description of Artificial Sequence: Synthetic oligonucleotide
  Target: LAMA2; (-) strand; PAM type: NRG; PAM sequence: CAG
atactcccatttcctcaaga

SEQ ID NO: 63561 - DNA, 20 bp, Artificial Sequence
  Description of Artificial Sequence: Synthetic oligonucleotide
  Target: LAMA2; (-) strand; PAM type: NRG; PAM sequence: AAG
tagaatactcccatttcctc

SEQ ID NO: 63562 - DNA, 20 bp, Artificial Sequence
  Description of Artificial Sequence: Synthetic oligonucleotide
  Target: LAMA2; (-) strand; PAM type: NRG; PAM sequence: TAG
acactgcctgactatgcatc

SEQ ID NO: 63563 - DNA, 20 bp, Artificial Sequence
  Description of Artificial Sequence: Synthetic oligonucleotide
  Target: LAMA2; (-) strand; PAM type: NRG; PAM sequence: AGG
aaaatccaaactttttagca

SEQ ID NO: 63564 - DNA, 20 bp, Artificial Sequence
  Description of Artificial Sequence: Synthetic oligonucleotide
  Target: LAMA2; (-) strand; PAM type: NRG; PAM sequence: AAG
caaaatccaaactttttagc

SEQ ID NO: 63565 - DNA, 20 bp, Artificial Sequence
  Description of Artificial Sequence: Synthetic oligonucleotide
  Target: LAMA2; (-) strand; PAM type: NRG; PAM sequence: TAG
aagacaaaatccaaactttt

SEQ ID NO: 63566 - DNA, 20 bp, Artificial Sequence
  Description of Artificial Sequence: Synthetic oligonucleotide
  Target: LAMA2; (-) strand; PAM type: NRG; PAM sequence: AAG
cagtacatttctatcactag

SEQ ID NO: 63567 - DNA, 20 bp, Artificial Sequence
  Description of Artificial Sequence: Synthetic oligonucleotide
  Target: LAMA2; (-) strand; PAM type: NRG; PAM sequence: TAG
catcagtacatttctatcac

SEQ ID NO: 63568 - DNA, 20 bp, Artificial Sequence
  Description of Artificial Sequence: Synthetic oligonucleotide
  Target: LAMA2; (-) strand; PAM type: NRG; PAM sequence: CAG
ttacccatgtcagggaccat

SEQ ID NO: 63569 - DNA, 20 bp, Artificial Sequence
  Description of Artificial Sequence: Synthetic oligonucleotide
  Target: LAMA2; (-) strand; PAM type: NRG; PAM sequence: GGG
agcagctgttacccatgtca

SEQ ID NO: 63570 - DNA, 20 bp, Artificial Sequence
  Description of Artificial Sequence: Synthetic oligonucleotide
  Target: LAMA2; (-) strand; PAM type: NRG; PAM sequence: AGG
aagcagctgttacccatgtc

SEQ ID NO: 63571 - DNA, 20 bp, Artificial Sequence
  Description of Artificial Sequence: Synthetic oligonucleotide
  Target: LAMA2; (-) strand; PAM type: NRG; PAM sequence: CAG
aaagcagctgttacccatgt

SEQ ID NO: 63572 - DNA, 20 bp, Artificial Sequence
  Description of Artificial Sequence: Synthetic oligonucleotide
  Target: LAMA2; (-) strand; PAM type: NRG; PAM sequence: CAG
cttgaaattcagctctaaag

SEQ ID NO: 63573 - DNA, 20 bp, Artificial Sequence
  Description of Artificial Sequence: Synthetic oligonucleotide
  Target: LAMA2; (-) strand; PAM type: NRG; PAM sequence: AAG
attcttgaaattcagctcta

SEQ ID NO: 63574 - DNA, 20 bp, Artificial Sequence
  Description of Artificial Sequence: Synthetic oligonucleotide
  Target: LAMA2; (-) strand; PAM type: NRG; PAM sequence: CAG
acaagctgattcttgaaatt

SEQ ID NO: 63575 - DNA, 20 bp, Artificial Sequence
  Description of Artificial Sequence: Synthetic oligonucleotide
  Target: LAMA2; (-) strand; PAM type: NRG; PAM sequence: AAG
atctccaaagcattgttcac

SEQ ID NO: 63576 - DNA, 20 bp, Artificial Sequence
  Description of Artificial Sequence: Synthetic oligonucleotide
  Target: LAMA2; (-) strand; PAM type: NRG; PAM sequence: AAG
tcctactgtcttaatctcca

SEQ ID NO: 63577 - DNA, 20 bp, Artificial Sequence
  Description of Artificial Sequence: Synthetic oligonucleotide
  Target: LAMA2; (-) strand; PAM type: NRG; PAM sequence: TAG
tcttgtctggtccattgaaa

SEQ ID NO: 63578 - DNA, 20 bp, Artificial Sequence
  Description of Artificial Sequence: Synthetic oligonucleotide
  Target: LAMA2; (-) strand; PAM type: NRG; PAM sequence: TGG
ggccattaccatttcttgtc

SEQ ID NO: 63579 - DNA, 20 bp, Artificial Sequence
  Description of Artificial Sequence: Synthetic oligonucleotide
  Target: LAMA2; (-) strand; PAM type: NRG; PAM sequence: AGG
ccactccctccactcatttc

SEQ ID NO: 63580 - DNA, 20 bp, Artificial Sequence
  Description of Artificial Sequence: Synthetic oligonucleotide
  Target: LAMA2; (-) strand; PAM type: NRG; PAM sequence: CAG
tccactccctccactcattt

SEQ ID NO: 63581 - DNA, 20 bp, Artificial Sequence
  Description of Artificial Sequence: Synthetic oligonucleotide
  Target: LAMA2; (-) strand; PAM type: NRG; PAM sequence: CAG
tctccaataaatggcaactg

SEQ ID NO: 63582 - DNA, 20 bp, Artificial Sequence
  Description of Artificial Sequence: Synthetic oligonucleotide
  Target: LAMA2; (-) strand; PAM type: NRG; PAM sequence: TGG
aattcagtttctccaataaa

SEQ ID NO: 63583 - DNA, 20 bp, Artificial Sequence
  Description of Artificial Sequence: Synthetic oligonucleotide
  Target: LAMA2; (-) strand; PAM type: NRG; PAM sequence: CAG
tgatccaaatccctgaaatt

SEQ ID NO: 63584 - DNA, 20 bp, Artificial Sequence
  Description of Artificial Sequence: Synthetic oligonucleotide
  Target: LAMA2; (-) strand; PAM type: NRG; PAM sequence: TGG
aaataaatatcattaatatt

SEQ ID NO: 63585 - DNA, 20 bp, Artificial Sequence
  Description of Artificial Sequence: Synthetic oligonucleotide
  Target: LAMA2; (-) strand; PAM type: NRG; PAM sequence: TGG
aaggaaaaaacaaatatcac

SEQ ID NO: 63586 - DNA, 20 bp, Artificial Sequence
  Description of Artificial Sequence: Synthetic oligonucleotide
  Target: LAMA2; (-) strand; PAM type: NRG; PAM sequence: AGG
cttaatcttcagtttagcga

SEQ ID NO: 63587 - DNA, 20 bp, Artificial Sequence
  Description of Artificial Sequence: Synthetic oligonucleotide
  Target: LAMA2; (-) strand; PAM type: NRG; PAM sequence: AAG
ccttaatcttcagtttagcg

SEQ ID NO: 63588 - DNA, 20 bp, Artificial Sequence
  Description of Artificial Sequence: Synthetic oligonucleotide
  Target: LAMA2; (-) strand; PAM type: NRG; PAM sequence: TAG
gattgccttaatcttcagtt

SEQ ID NO: 63589 - DNA, 20 bp, Artificial Sequence
  Description of Artificial Sequence: Synthetic oligonucleotide
  Target: LAMA2; (-) strand; PAM type: NRG; PAM sequence: CAG
gttctgattgccttaatctt

SEQ ID NO: 63590 - DNA, 20 bp, Artificial Sequence
  Description of Artificial Sequence: Synthetic oligonucleotide
  Target: LAMA2; (-) strand; PAM type: NRG; PAM sequence: AGG
tgaattcagcaatgtttact

SEQ ID NO: 63591 - DNA, 20 bp, Artificial Sequence
  Description of Artificial Sequence: Synthetic oligonucleotide
  Target: LAMA2; (-) strand; PAM type: NRG; PAM sequence: TAG
gtgaattcagcaatgtttac

SEQ ID NO: 63592 - DNA, 20 bp, Artificial Sequence
  Description of Artificial Sequence: Synthetic oligonucleotide
  Target: LAMA2; (-) strand; PAM type: NRG; PAM sequence: CAG
gggggatacaatggtgaatt

SEQ ID NO: 63593 - DNA, 20 bp, Artificial Sequence
  Description of Artificial Sequence: Synthetic oligonucleotide
  Target: LAMA2; (-) strand; PAM type: NRG; PAM sequence: TGG
attagcactgggggatacaa

SEQ ID NO: 63594 - DNA, 20 bp, Artificial Sequence
  Description of Artificial Sequence: Synthetic oligonucleotide
  Target: LAMA2; (-) strand; PAM type: NRG; PAM sequence: GGG
tttttgtgtattagcactgg

SEQ ID NO: 63595 - DNA, 20 bp, Artificial Sequence
  Description of Artificial Sequence: Synthetic oligonucleotide
  Target: LAMA2; (-) strand; PAM type: NRG; PAM sequence: GGG
ctttttgtgtattagcactg

SEQ ID NO: 63596 - DNA, 20 bp, Artificial Sequence
  Description of Artificial Sequence: Synthetic oligonucleotide
  Target: LAMA2; (-) strand; PAM type: NRG; PAM sequence: GGG
actttttgtgtattagcact

SEQ ID NO: 63597 - DNA, 20 bp, Artificial Sequence
  Description of Artificial Sequence: Synthetic oligonucleotide
  Target: LAMA2; (-) strand; PAM type: NRG; PAM sequence: TGG
tactttttgtgtattagcac

SEQ ID NO: 63598 - DNA, 20 bp, Artificial Sequence
  Description of Artificial Sequence: Synthetic oligonucleotide
  Target: LAMA2; (-) strand; PAM type: NRG; PAM sequence: TAG
attgtatactttttgtgtat

SEQ ID NO: 63599 - DNA, 20 bp, Artificial Sequence
  Description of Artificial Sequence: Synthetic oligonucleotide
  Target: LAMA2; (-) strand; PAM type: NRG; PAM sequence: TAG
acactgcgaaaggtaggtag

SEQ ID NO: 63600 - DNA, 20 bp, Artificial Sequence
  Description of Artificial Sequence: Synthetic oligonucleotide
  Target: LAMA2; (-) strand; PAM type: NRG; PAM sequence: TAG
gccacactgcgaaaggtagg

SEQ ID NO: 63601 - DNA, 20 bp, Artificial Sequence
  Description of Artificial Sequence: Synthetic oligonucleotide
  Target: LAMA2; (-) strand; PAM type: NRG; PAM sequence: AGG
atagccacactgcgaaaggt

SEQ ID NO: 63602 - DNA, 20 bp, Artificial Sequence
  Description of Artificial Sequence: Synthetic oligonucleotide
  Target: LAMA2; (-) strand; PAM type: NRG; PAM sequence: TAG
gatagccacactgcgaaagg

SEQ ID NO: 63603 - DNA, 20 bp, Artificial Sequence
  Description of Artificial Sequence: Synthetic oligonucleotide
  Target: LAMA2; (-) strand; PAM type: NRG; PAM sequence: AGG
aaggatagccacactgcgaa

SEQ ID NO: 63604 - DNA, 20 bp, Artificial Sequence
  Description of Artificial Sequence: Synthetic oligonucleotide
  Target: LAMA2; (-) strand; PAM type: NRG; PAM sequence: AAG
caaggatagccacactgcga

SEQ ID NO: 63605 - DNA, 20 bp, Artificial Sequence
  Description of Artificial Sequence: Synthetic oligonucleotide
  Target: LAMA2; (-) strand; PAM type: NRG; PAM sequence: TAG
aagggtgaaatttgcaagga

SEQ ID NO: 63606 - DNA, 20 bp, Artificial Sequence
  Description of Artificial Sequence: Synthetic oligonucleotide
  Target: LAMA2; (-) strand; PAM type: NRG; PAM sequence: AGG
gggaaagggtgaaatttgca

SEQ ID NO: 63607 - DNA, 20 bp, Artificial Sequence
  Description of Artificial Sequence: Synthetic oligonucleotide
  Target: LAMA2; (-) strand; PAM type: NRG; PAM sequence: AAG
agggaaagggtgaaatttgc

SEQ ID NO: 63608 - DNA, 20 bp, Artificial Sequence
  Description of Artificial Sequence: Synthetic oligonucleotide
  Target: LAMA2; (-) strand; PAM type: NRG; PAM sequence: GGG
atgactgaaaggaagggaaa

SEQ ID NO: 63609 - DNA, 20 bp, Artificial Sequence
  Description of Artificial Sequence: Synthetic oligonucleotide
  Target: LAMA2; (-) strand; PAM type: NRG; PAM sequence: AGG
aatgactgaaaggaagggaa

SEQ ID NO: 63610 - DNA, 20 bp, Artificial Sequence
  Description of Artificial Sequence: Synthetic oligonucleotide
  Target: LAMA2; (-) strand; PAM type: NRG; PAM sequence: AAG
gaatgactgaaaggaaggga

SEQ ID NO: 63611 - DNA, 20 bp, Artificial Sequence
  Description of Artificial Sequence: Synthetic oligonucleotide
  Target: LAMA2; (-) strand; PAM type: NRG; PAM sequence: GGG
acaagaatgactgaaaggaa

SEQ ID NO: 63612 - DNA, 20 bp, Artificial Sequence
  Description of Artificial Sequence: Synthetic oligonucleotide
  Target: LAMA2; (-) strand; PAM type: NRG; PAM sequence: AGG
aacaagaatgactgaaagga

SEQ ID NO: 63613 - DNA, 20 bp, Artificial Sequence
  Description of Artificial Sequence: Synthetic oligonucleotide
  Target: LAMA2; (-) strand; PAM type: NRG; PAM sequence: AAG
aaacaagaatgactgaaagg

SEQ ID NO: 63614 - DNA, 20 bp, Artificial Sequence
  Description of Artificial Sequence: Synthetic oligonucleotide
  Target: LAMA2; (-) strand; PAM type: NRG; PAM sequence: AGG
gggaaacaagaatgactgaa

SEQ ID NO: 63615 - DNA, 20 bp, Artificial Sequence
  Description of Artificial Sequence: Synthetic oligonucleotide
  Target: LAMA2; (-) strand; PAM type: NRG; PAM sequence: AAG
ggggaaacaagaatgactga

SEQ ID NO: 63616 - DNA, 20 bp, Artificial Sequence
  Description of Artificial Sequence: Synthetic oligonucleotide
  Target: LAMA2; (-) strand; PAM type: NRG; PAM sequence: AAG
tctatggagcatggggaaac

SEQ ID NO: 63617 - DNA, 20 bp, Artificial Sequence
  Description of Artificial Sequence: Synthetic oligonucleotide
  Target: LAMA2; (-) strand; PAM type: NRG; PAM sequence: GGG
taaatgatctatggagcatg

SEQ ID NO: 63618 - DNA, 20 bp, Artificial Sequence
  Description of Artificial Sequence: Synthetic oligonucleotide
  Target: LAMA2; (-) strand; PAM type: NRG; PAM sequence: GGG
ctaaatgatctatggagcat

SEQ ID NO: 63619 - DNA, 20 bp, Artificial Sequence
  Description of Artificial Sequence: Synthetic oligonucleotide
  Target: LAMA2; (-) strand; PAM type: NRG; PAM sequence: TGG
gctaaatgatctatggagca

SEQ ID NO: 63620 - DNA, 20 bp, Artificial Sequence
  Description of Artificial Sequence: Synthetic oligonucleotide
  Target: LAMA2; (-) strand; PAM type: NRG; PAM sequence: GAG
tggtggctaaatgatctatg

SEQ ID NO: 63621 - DNA, 20 bp, Artificial Sequence
  Description of Artificial Sequence: Synthetic oligonucleotide
  Target: LAMA2; (-) strand; PAM type: NRG; PAM sequence: TGG
tgtggtggctaaatgatcta

SEQ ID NO: 63622 - DNA, 20 bp, Artificial Sequence
  Description of Artificial Sequence: Synthetic oligonucleotide
  Target: LAMA2; (-) strand; PAM type: NRG; PAM sequence: TGG
aataacacaaaaagatgtgg

SEQ ID NO: 63623 - DNA, 20 bp, Artificial Sequence
  Description of Artificial Sequence: Synthetic oligonucleotide
  Target: LAMA2; (-) strand; PAM type: NRG; PAM sequence: TGG
caaaataacacaaaaagatg

SEQ ID NO: 63624 - DNA, 20 bp, Artificial Sequence
  Description of Artificial Sequence: Synthetic oligonucleotide
  Target: LAMA2; (-) strand; PAM type: NRG; PAM sequence: AAG
agaaaacaaaataacacaaa

SEQ ID NO: 63625 - DNA, 20 bp, Artificial Sequence
  Description of Artificial Sequence: Synthetic oligonucleotide
  Target: LAMA2; (-) strand; PAM type: NRG; PAM sequence: CAG
gaattataccagcatcattg

SEQ ID NO: 63626 - DNA, 20 bp, Artificial Sequence
  Description of Artificial Sequence: Synthetic oligonucleotide
  Target: LAMA2; (-) strand; PAM type: NRG; PAM sequence: CAG
ctagtagttctgaattatac

SEQ ID NO: 63627 - DNA, 20 bp, Artificial Sequence
  Description of Artificial Sequence: Synthetic oligonucleotide
  Target: LAMA2; (-) strand; PAM type: NRG; PAM sequence: TAG
tagagatgagattttgctag

SEQ ID NO: 63628 - DNA, 20 bp, Artificial Sequence
  Description of Artificial Sequence: Synthetic oligonucleotide
  Target: LAMA2; (-) strand; PAM type: NRG; PAM sequence: TAG
agctagagatgagattttgc

SEQ ID NO: 63629 - DNA, 20 bp, Artificial Sequence
  Description of Artificial Sequence: Synthetic oligonucleotide
  Target: LAMA2; (-) strand; PAM type: NRG; PAM sequence: GAG
tatcacatgaagctagagat

SEQ ID NO: 63630 - DNA, 20 bp, Artificial Sequence
  Description of Artificial Sequence: Synthetic oligonucleotide
  Target: LAMA2; (-) strand; PAM type: NRG; PAM sequence: GAG
gaaaatatcacatgaagcta

SEQ ID NO: 63631 - DNA, 20 bp, Artificial Sequence
  Description of Artificial Sequence: Synthetic oligonucleotide
  Target: LAMA2; (-) strand; PAM type: NRG; PAM sequence: TAG
aggaaaatatcacatgaagc

SEQ ID NO: 63632 - DNA, 20 bp, Artificial Sequence
  Description of Artificial Sequence: Synthetic oligonucleotide
  Target: LAMA2; (-) strand; PAM type: NRG; PAM sequence: AAG
aagcaggaaaatatcacatg

SEQ ID NO: 63633 - DNA, 20 bp, Artificial Sequence
  Description of Artificial Sequence: Synthetic oligonucleotide
  Target: LAMA2; (-) strand; PAM type: NRG; PAM sequence: AGG
aatatgggtagtttataagc

SEQ ID NO: 63634 - DNA, 20 bp, Artificial Sequence
  Description of Artificial Sequence: Synthetic oligonucleotide
  Target: LAMA2; (-) strand; PAM type: NRG; PAM sequence: CAG
gaatatgggtagtttataag

SEQ ID NO: 63635 - DNA, 20 bp, Artificial Sequence
  Description of Artificial Sequence: Synthetic oligonucleotide
  Target: LAMA2; (-) strand; PAM type: NRG; PAM sequence: AAG
caagaatatgggtagtttat

SEQ ID NO: 63636 - DNA, 20 bp, Artificial Sequence
  Description of Artificial Sequence: Synthetic oligonucleotide
  Target: LAMA2; (-) strand; PAM type: NRG; PAM sequence: TAG
tagcacagcaagaatatggg

SEQ ID NO: 63637 - DNA, 20 bp, Artificial Sequence
  Description of Artificial Sequence: Synthetic oligonucleotide
  Target: LAMA2; (-) strand; PAM type: NRG; PAM sequence: GGG
ctatagcacagcaagaatat

SEQ ID NO: 63638 - DNA, 20 bp, Artificial Sequence
  Description of Artificial Sequence: Synthetic oligonucleotide
  Target: LAMA2; (-) strand; PAM type: NRG; PAM sequence: TGG
actatagcacagcaagaata

SEQ ID NO: 63639 - DNA, 20 bp, Artificial Sequence
  Description of Artificial Sequence: Synthetic oligonucleotide
  Target: LAMA2; (-) strand; PAM type: NRG; PAM sequence: AAG
catattgactatagcacagc

SEQ ID NO: 63640 - DNA, 20 bp, Artificial Sequence
  Description of Artificial Sequence: Synthetic oligonucleotide
  Target: LAMA2; (-) strand; PAM type: NRG; PAM sequence: CAG
tacacatattgactatagca

SEQ ID NO: 63641 - DNA, 20 bp, Artificial Sequence
  Description of Artificial Sequence: Synthetic oligonucleotide
  Target: LAMA2; (-) strand; PAM type: NRG; PAM sequence: TAG
agagttacacatattgacta

SEQ ID NO: 63642 - DNA, 20 bp, Artificial Sequence
  Description of Artificial Sequence: Synthetic oligonucleotide
  Target: LAMA2; (-) strand; PAM type: NRG; PAM sequence: GAG
tgaatgaggaggcctcagaa

SEQ ID NO: 63643 - DNA, 20 bp, Artificial Sequence
  Description of Artificial Sequence: Synthetic oligonucleotide
  Target: LAMA2; (-) strand; PAM type: NRG; PAM sequence: AAG
aatgaatgaggaggcctcag

SEQ ID NO: 63644 - DNA, 20 bp, Artificial Sequence
  Description of Artificial Sequence: Synthetic oligonucleotide
  Target: LAMA2; (-) strand; PAM type: NRG; PAM sequence: CAG
tgcaatgaatgaggaggcct

SEQ ID NO: 63645 - DNA, 20 bp, Artificial Sequence
  Description of Artificial Sequence: Synthetic oligonucleotide
  Target: LAMA2; (-) strand; PAM type: NRG; PAM sequence: AGG
aacatctgcaatgaatgagg

SEQ ID NO: 63646 - DNA, 20 bp, Artificial Sequence
  Description of Artificial Sequence: Synthetic oligonucleotide
  Target: LAMA2; (-) strand; PAM type: NRG; PAM sequence: GAG
aaacatctgcaatgaatgag

SEQ ID NO: 63647 - DNA, 20 bp, Artificial Sequence
  Description of Artificial Sequence: Synthetic oligonucleotide
  Target: LAMA2; (-) strand; PAM type: NRG; PAM sequence: AGG
gcaaacatctgcaatgaatg

SEQ ID NO: 63648 - DNA, 20 bp, Artificial Sequence
  Description of Artificial Sequence: Synthetic oligonucleotide
  Target: LAMA2; (-) strand; PAM type: NRG; PAM sequence: GAG
tgcaaacatctgcaatgaat

SEQ ID NO: 63649 - DNA, 20 bp, Artificial Sequence
  Description of Artificial Sequence: Synthetic oligonucleotide
  Target: LAMA2; (-) strand; PAM type: NRG; PAM sequence: AAG
gggcccttaagaagagaggt

SEQ ID NO: 63650 - DNA, 20 bp, Artificial Sequence
  Description of Artificial Sequence: Synthetic oligonucleotide
  Target: LAMA2; (-) strand; PAM type: NRG; PAM sequence: AGG
gaatgggcccttaagaagag

SEQ ID NO: 63651 - DNA, 20 bp, Artificial Sequence
  Description of Artificial Sequence: Synthetic oligonucleotide
  Target: LAMA2; (-) strand; PAM type: NRG; PAM sequence: GAG
cgaatgggcccttaagaaga

SEQ ID NO: 63652 - DNA, 20 bp, Artificial Sequence
  Description of Artificial Sequence: Synthetic oligonucleotide
  Target: LAMA2; (-) strand; PAM type: NRG; PAM sequence: GAG
tacgaatgggcccttaagaa

SEQ ID NO: 63653 - DNA, 20 bp, Artificial Sequence
  Description of Artificial Sequence: Synthetic oligonucleotide
  Target: LAMA2; (-) strand; PAM type: NRG; PAM sequence: AAG
catacgaatgggcccttaag

SEQ ID NO: 63654 - DNA, 20 bp, Artificial Sequence
  Description of Artificial Sequence: Synthetic oligonucleotide
  Target: LAMA2; (-) strand; PAM type: NRG; PAM sequence: AAG
gtacatacgaatgggccctt

SEQ ID NO: 63655 - DNA, 20 bp, Artificial Sequence
  Description of Artificial Sequence: Synthetic oligonucleotide
  Target: LAMA2; (-) strand; PAM type: NRG; PAM sequence: GGG
ctatttaagtacatacgaat

SEQ ID NO: 63656 - DNA, 20 bp, Artificial Sequence
  Description of Artificial Sequence: Synthetic oligonucleotide
  Target: LAMA2; (-) strand; PAM type: NRG; PAM sequence: TGG
cctatttaagtacatacgaa

SEQ ID NO: 63657 - DNA, 20 bp, Artificial Sequence
  Description of Artificial Sequence: Synthetic oligonucleotide
  Target: LAMA2; (-) strand; PAM type: NRG; PAM sequence: AAG
ctctgatgatcttcctattt

SEQ ID NO: 63658 - DNA, 20 bp, Artificial Sequence
  Description of Artificial Sequence: Synthetic oligonucleotide
  Target: LAMA2; (-) strand; PAM type: NRG; PAM sequence: TGG
tagctaagggagttcacatg

SEQ ID NO: 63659 - DNA, 20 bp, Artificial Sequence
  Description of Artificial Sequence: Synthetic oligonucleotide
  Target: LAMA2; (-) strand; PAM type: NRG; PAM sequence: GAG
gaaaagaacagtagctaagg

SEQ ID NO: 63660 - DNA, 20 bp, Artificial Sequence
  Description of Artificial Sequence: Synthetic oligonucleotide
  Target: LAMA2; (-) strand; PAM type: NRG; PAM sequence: GGG
gagaaaagaacagtagctaa

SEQ ID NO: 63661 - DNA, 20 bp, Artificial Sequence
  Description of Artificial Sequence: Synthetic oligonucleotide
  Target: LAMA2; (-) strand; PAM type: NRG; PAM sequence: AGG
agagaaaagaacagtagcta

SEQ ID NO: 63662 - DNA, 20 bp, Artificial Sequence
  Description of Artificial Sequence: Synthetic oligonucleotide
  Target: LAMA2; (-) strand; PAM type: NRG; PAM sequence: AAG
tagagaaaagaacagtagct

SEQ ID NO: 63663 - DNA, 20 bp, Artificial Sequence
  Description of Artificial Sequence: Synthetic oligonucleotide
  Target: LAMA2; (-) strand; PAM type: NRG; PAM sequence: TAG
aaatttagagaaaagaacag

SEQ ID NO: 63664 - DNA, 20 bp, Artificial Sequence
  Description of Artificial Sequence: Synthetic oligonucleotide
  Target: LAMA2; (-) strand; PAM type: NRG; PAM sequence: CAG
gagaaatttagagaaaagaa

SEQ ID NO: 63665 - DNA, 20 bp, Artificial Sequence
  Description of Artificial Sequence: Synthetic oligonucleotide
  Target: LAMA2; (-) strand; PAM type: NRG; PAM sequence: AAG
aaaaagagaaatttagagaa

SEQ ID NO: 63666 - DNA, 20 bp, Artificial Sequence
  Description of Artificial Sequence: Synthetic oligonucleotide
  Target: LAMA2; (-) strand; PAM type: NRG; PAM sequence: GAG
cagagaaaaagagaaattta

SEQ ID NO: 63667 - DNA, 20 bp, Artificial Sequence
  Description of Artificial Sequence: Synthetic oligonucleotide
  Target: LAMA2; (-) strand; PAM type: NRG; PAM sequence: TAG
aacagagaaaaagagaaatt

SEQ ID NO: 63668 - DNA, 20 bp, Artificial Sequence
  Description of Artificial Sequence: Synthetic oligonucleotide
  Target: LAMA2; (-) strand; PAM type: NRG; PAM sequence: GAG
attttttgaacagagaaaaa

SEQ ID NO: 63669 - DNA, 20 bp, Artificial Sequence
  Description of Artificial Sequence: Synthetic oligonucleotide
  Target: LAMA2; (-) strand; PAM type: NRG; PAM sequence: AAG
aaattttttgaacagagaaa

SEQ ID NO: 63670 - DNA, 20 bp, Artificial Sequence
  Description of Artificial Sequence: Synthetic oligonucleotide
  Target: LAMA2; (-) strand; PAM type: NRG; PAM sequence: GAG
agttggaaattttttgaaca

SEQ ID NO: 63671 - DNA, 20 bp, Artificial Sequence
  Description of Artificial Sequence: Synthetic oligonucleotide
  Target: LAMA2; (-) strand; PAM type: NRG; PAM sequence: CAG
aaagttggaaattttttgaa

SEQ ID NO: 63672 - DNA, 20 bp, Artificial Sequence
  Description of Artificial Sequence: Synthetic oligonucleotide
  Target: LAMA2; (-) strand; PAM type: NRG; PAM sequence: TGG
gtgtccacaaagttgaaagt

SEQ ID NO: 63673 - DNA, 20 bp, Artificial Sequence
  Description of Artificial Sequence: Synthetic oligonucleotide
  Target: LAMA2; (-) strand; PAM type: NRG; PAM sequence: AAG
agaagtgtccacaaagttga

SEQ ID NO: 63674 - DNA, 20 bp, Artificial Sequence
  Description of Artificial Sequence: Synthetic oligonucleotide
  Target: LAMA2; (-) strand; PAM type: NRG; PAM sequence: AAG
tttttccagaagtgtccaca

SEQ ID NO: 63675 - DNA, 20 bp, Artificial Sequence
  Description of Artificial Sequence: Synthetic oligonucleotide
  Target: LAMA2; (-) strand; PAM type: NRG; PAM sequence: AAG
acgactttctttttttccag

SEQ ID NO: 63676 - DNA, 20 bp, Artificial Sequence
  Description of Artificial Sequence: Synthetic oligonucleotide
  Target: LAMA2; (-) strand; PAM type: NRG; PAM sequence: CAG
gacacgactttctttttttc

SEQ ID NO: 63677 - DNA, 20 bp, Artificial Sequence
  Description of Artificial Sequence: Synthetic oligonucleotide
  Target: LAMA2; (-) strand; PAM type: NRG; PAM sequence: AAG
ttcaattctgcaaaattggt

SEQ ID NO: 63678 - DNA, 20 bp, Artificial Sequence
  Description of Artificial Sequence: Synthetic oligonucleotide
  Target: LAMA2; (-) strand; PAM type: NRG; PAM sequence: TGG
gtaattcaattctgcaaaat

SEQ ID NO: 63679 - DNA, 20 bp, Artificial Sequence
  Description of Artificial Sequence: Synthetic oligonucleotide
  Target: LAMA2; (-) strand; PAM type: NRG; PAM sequence: GAG
atagaaaaatgtcttagtat

SEQ ID NO: 63680 - DNA, 20 bp, Artificial Sequence
  Description of Artificial Sequence: Synthetic oligonucleotide
  Target: LAMA2; (-) strand; PAM type: NRG; PAM sequence: TAG
tcttccatagaaaaatgtct

SEQ ID NO: 63681 - DNA, 20 bp, Artificial Sequence
  Description of Artificial Sequence: Synthetic oligonucleotide
  Target: LAMA2; (-) strand; PAM type: NRG; PAM sequence: TAG
aaagaaccttgtttcttcca

SEQ ID NO: 63682 - DNA, 20 bp, Artificial Sequence
  Description of Artificial Sequence: Synthetic oligonucleotide
  Target: LAMA2; (-) strand; PAM type: NRG; PAM sequence: AAG
ttaaattctcatctctacaa

SEQ ID NO: 63683 - DNA, 20 bp, Artificial Sequence
  Description of Artificial Sequence: Synthetic oligonucleotide
  Target: LAMA2; (-) strand; PAM type: NRG; PAM sequence: GAG
tgaaaaccagtaagactagt

SEQ ID NO: 63684 - DNA, 20 bp, Artificial Sequence
  Description of Artificial Sequence: Synthetic oligonucleotide
  Target: LAMA2; (-) strand; PAM type: NRG; PAM sequence: TAG
cagatgaaaaccagtaagac

SEQ ID NO: 63685 - DNA, 20 bp, Artificial Sequence
  Description of Artificial Sequence: Synthetic oligonucleotide
  Target: LAMA2; (-) strand; PAM type: NRG; PAM sequence: AAG
aaagtcagatgaaaaccagt

SEQ ID NO: 63686 - DNA, 20 bp, Artificial Sequence
  Description of Artificial Sequence: Synthetic oligonucleotide
  Target: LAMA2; (-) strand; PAM type: NRG; PAM sequence: CAG
ctataaagtcagatgaaaac

SEQ ID NO: 63687 - DNA, 20 bp, Artificial Sequence
  Description of Artificial Sequence: Synthetic oligonucleotide
  Target: LAMA2; (-) strand; PAM type: NRG; PAM sequence: CAG
tcaattttaaactataaagt

SEQ ID NO: 63688 - DNA, 20 bp, Artificial Sequence
  Description of Artificial Sequence: Synthetic oligonucleotide
  Target: LAMA2; (-) strand; PAM type: NRG; PAM sequence: AAG
gctatcaattttaaactata

SEQ ID NO: 63689 - DNA, 20 bp, Artificial Sequence
  Description of Artificial Sequence: Synthetic oligonucleotide
  Target: LAMA2; (-) strand; PAM type: NRG; PAM sequence: TGG
catgtgtgttgccatcaaaa

SEQ ID NO: 63690 - DNA, 20 bp, Artificial Sequence
  Description of Artificial Sequence: Synthetic oligonucleotide
  Target: LAMA2; (-) strand; PAM type: NRG; PAM sequence: GAG
cctcaggaaaactgaggacg

SEQ ID NO: 63691 - DNA, 20 bp, Artificial Sequence
  Description of Artificial Sequence: Synthetic oligonucleotide
  Target: LAMA2; (-) strand; PAM type: NRG; PAM sequence: CGG
tccctcaggaaaactgagga

SEQ ID NO: 63692 - DNA, 20 bp, Artificial Sequence
  Description of Artificial Sequence: Synthetic oligonucleotide
  Target: LAMA2; (-) strand; PAM type: NRG; PAM sequence: AGG
acactccctcaggaaaactg

SEQ ID NO: 63693 - DNA, 20 bp, Artificial Sequence
  Description of Artificial Sequence: Synthetic oligonucleotide
  Target: LAMA2; (-) strand; PAM type: NRG; PAM sequence: GAG
gacactccctcaggaaaact

SEQ ID NO: 63694 - DNA, 20 bp, Artificial Sequence
  Description of Artificial Sequence: Synthetic oligonucleotide
  Target: LAMA2; (-) strand; PAM type: NRG; PAM sequence: AGG
acagtagctgacactccctc

SEQ ID NO: 63695 - DNA, 20 bp, Artificial Sequence
  Description of Artificial Sequence: Synthetic oligonucleotide
  Target: LAMA2; (-) strand; PAM type: NRG; PAM sequence: CAG
cacagtagctgacactccct

SEQ ID NO: 63696 - DNA, 20 bp, Artificial Sequence
  Description of Artificial Sequence: Synthetic oligonucleotide
  Target: LAMA2; (-) strand; PAM type: NRG; PAM sequence: TAG
gttttgtaaagaaaacacag

SEQ ID NO: 63697 - DNA, 20 bp, Artificial Sequence
  Description of Artificial Sequence: Synthetic oligonucleotide
  Target: LAMA2; (-) strand; PAM type: NRG; PAM sequence: CAG
gttgttttgtaaagaaaaca

SEQ ID NO: 63698 - DNA, 20 bp, Artificial Sequence
  Description of Artificial Sequence: Synthetic oligonucleotide
  Target: LAMA2; (-) strand; PAM type: NRG; PAM sequence: AAG
ggaatttatgttgttttgta

SEQ ID NO: 63699 - DNA, 20 bp, Artificial Sequence
  Description of Artificial Sequence: Synthetic oligonucleotide
  Target: LAMA2; (-) strand; PAM type: NRG; PAM sequence: TGG
tgattcccagggtggataca

SEQ ID NO: 63700 - DNA, 20 bp, Artificial Sequence
  Description of Artificial Sequence: Synthetic oligonucleotide
  Target: LAMA2; (-) strand; PAM type: NRG; PAM sequence: TGG
cagtgaagtgattcccaggg

SEQ ID NO: 63701 - DNA, 20 bp, Artificial Sequence
  Description of Artificial Sequence: Synthetic oligonucleotide
  Target: LAMA2; (-) strand; PAM type: NRG; PAM sequence: GGG
acgcagtgaagtgattccca

SEQ ID NO: 63702 - DNA, 20 bp, Artificial Sequence
  Description of Artificial Sequence: Synthetic oligonucleotide
  Target: LAMA2; (-) strand; PAM type: NRG; PAM sequence: AGG
aacgcagtgaagtgattccc

SEQ ID NO: 63703 - DNA, 20 bp, Artificial Sequence
  Description of Artificial Sequence: Synthetic oligonucleotide
  Target: LAMA2; (-) strand; PAM type: NRG; PAM sequence: CAG
caacgcagtgaagtgattcc

SEQ ID NO: 63704 - DNA, 20 bp, Artificial Sequence
  Description of Artificial Sequence: Synthetic oligonucleotide
  Target: LAMA2; (-) strand; PAM type: NRG; PAM sequence: AAG
tatccagattcaacgcagtg

SEQ ID NO: 63705 - DNA, 20 bp, Artificial Sequence
  Description of Artificial Sequence: Synthetic oligonucleotide
  Target: LAMA2; (-) strand; PAM type: NRG; PAM sequence: CAG
tttcctatccagattcaacg

SEQ ID NO: 63706 - DNA, 20 bp, Artificial Sequence
  Description of Artificial Sequence: Synthetic oligonucleotide
  Target: LAMA2; (-) strand; PAM type: NRG; PAM sequence: CAG
atgaatctttatttcctatc

SEQ ID NO: 63707 - DNA, 20 bp, Artificial Sequence
  Description of Artificial Sequence: Synthetic oligonucleotide
  Target: LAMA2; (-) strand; PAM type: NRG; PAM sequence: TAG
agcaagaaagtgatggttcc

SEQ ID NO: 63708 - DNA, 20 bp, Artificial Sequence
  Description of Artificial Sequence: Synthetic oligonucleotide
  Target: LAMA2; (-) strand; PAM type: NRG; PAM sequence: TGG
acggaagagcaagaaagtga

SEQ ID NO: 63709 - DNA, 20 bp, Artificial Sequence
  Description of Artificial Sequence: Synthetic oligonucleotide
  Target: LAMA2; (-) strand; PAM type: NRG; PAM sequence: AAG
atccacacggaagagcaaga

SEQ ID NO: 63710 - DNA, 20 bp, Artificial Sequence
  Description of Artificial Sequence: Synthetic oligonucleotide
  Target: LAMA2; (-) strand; PAM type: NRG; PAM sequence: AAG
gaaaatccacacggaagagc

SEQ ID NO: 63711 - DNA, 20 bp, Artificial Sequence
  Description of Artificial Sequence: Synthetic oligonucleotide
  Target: LAMA2; (-) strand; PAM type: NRG; PAM sequence: GAG
agtagaaaatccacacggaa

SEQ ID NO: 63712 - DNA, 20 bp, Artificial Sequence
  Description of Artificial Sequence: Synthetic oligonucleotide
  Target: LAMA2; (-) strand; PAM type: NRG; PAM sequence: AAG
ttagtagaaaatccacacgg

SEQ ID NO: 63713 - DNA, 20 bp, Artificial Sequence
  Description of Artificial Sequence: Synthetic oligonucleotide
  Target: LAMA2; (-) strand; PAM type: NRG; PAM sequence: CGG
taattagtagaaaatccaca

SEQ ID NO: 63714 - DNA, 20 bp, Artificial Sequence
  Description of Artificial Sequence: Synthetic oligonucleotide
  Target: LAMA2; (-) strand; PAM type: NRG; PAM sequence: TAG
cataccaagtaactaattag

SEQ ID NO: 63715 - DNA, 20 bp, Artificial Sequence
  Description of Artificial Sequence: Synthetic oligonucleotide
  Target: LAMA2; (-) strand; PAM type: NRG; PAM sequence: TAG
agacataccaagtaactaat

SEQ ID NO: 63716 - DNA, 20 bp, Artificial Sequence
  Description of Artificial Sequence: Synthetic oligonucleotide
  Target: LAMA2; (-) strand; PAM type: NRG; PAM sequence: AAG
taacgtatcttagacatacc

SEQ ID NO: 63717 - DNA, 20 bp, Artificial Sequence
  Description of Artificial Sequence: Synthetic oligonucleotide
  Target: LAMA2; (-) strand; PAM type: NRG; PAM sequence: TAG
ataataaaaataacgtatct

SEQ ID NO: 63718 - DNA, 20 bp, Artificial Sequence
  Description of Artificial Sequence: Synthetic oligonucleotide
  Target: LAMA2; (-) strand; PAM type: NRG; PAM sequence: CAG
caaaggaataaaaagtgata

SEQ ID NO: 63719 - DNA, 20 bp, Artificial Sequence
  Description of Artificial Sequence: Synthetic oligonucleotide
  Target: LAMA2; (-) strand; PAM type: NRG; PAM sequence: AAG
atttatatcaaaggaataaa

SEQ ID NO: 63720 - DNA, 20 bp, Artificial Sequence
  Description of Artificial Sequence: Synthetic oligonucleotide
  Target: LAMA2; (-) strand; PAM type: NRG; PAM sequence: AGG
tgtattatgatttatatcaa

SEQ ID NO: 63721 - DNA, 20 bp, Artificial Sequence
  Description of Artificial Sequence: Synthetic oligonucleotide
  Target: LAMA2; (-) strand; PAM type: NRG; PAM sequence: AAG
ctgtattatgatttatatca

SEQ ID NO: 63722 - DNA, 20 bp, Artificial Sequence
  Description of Artificial Sequence: Synthetic oligonucleotide
  Target: LAMA2; (-) strand; PAM type: NRG; PAM sequence: CAG
ttttaaaaagctgtacttat

SEQ ID NO: 63723 - DNA, 20 bp, Artificial Sequence
  Description of Artificial Sequence: Synthetic oligonucleotide
  Target: LAMA2; (-) strand; PAM type: NRG; PAM sequence: AAG
ctatgaaaagagtttttaaa

SEQ ID NO: 63724 - DNA, 20 bp, Artificial Sequence
  Description of Artificial Sequence: Synthetic oligonucleotide
  Target: LAMA2; (-) strand; PAM type: NRG; PAM sequence: GAG
aataagacagtctatgaaaa

SEQ ID NO: 63725 - DNA, 20 bp, Artificial Sequence
  Description of Artificial Sequence: Synthetic oligonucleotide
  Target: LAMA2; (-) strand; PAM type: NRG; PAM sequence: AAG
agaataagacagtctatgaa

SEQ ID NO: 63726 - DNA, 20 bp, Artificial Sequence
  Description of Artificial Sequence: Synthetic oligonucleotide
  Target: LAMA2; (-) strand; PAM type: NRG; PAM sequence: CAG
taaatctaaaaagaataaga

SEQ ID NO: 63727 - DNA, 20 bp, Artificial Sequence
  Description of Artificial Sequence: Synthetic oligonucleotide
  Target: LAMA2; (-) strand; PAM type: NRG; PAM sequence: AAG
ggcataaatctaaaaagaat

SEQ ID NO: 63728 - DNA, 20 bp, Artificial Sequence
  Description of Artificial Sequence: Synthetic oligonucleotide
  Target: LAMA2; (-) strand; PAM type: NRG; PAM sequence: AAG
atcatgggcataaatctaaa

SEQ ID NO: 63729 - DNA, 20 bp, Artificial Sequence
  Description of Artificial Sequence: Synthetic oligonucleotide
  Target: LAMA2; (-) strand; PAM type: NRG; PAM sequence: GGG
ttcaggaccatgcacatcat

SEQ ID NO: 63730 - DNA, 20 bp, Artificial Sequence
  Description of Artificial Sequence: Synthetic oligonucleotide
  Target: LAMA2; (-) strand; PAM type: NRG; PAM sequence: TGG
attcaggaccatgcacatca

SEQ ID NO: 63731 - DNA, 20 bp, Artificial Sequence
  Description of Artificial Sequence: Synthetic oligonucleotide
  Target: LAMA2; (-) strand; PAM type: NRG; PAM sequence: AGG
gagagacccattccacattc

SEQ ID NO: 63732 - DNA, 20 bp, Artificial Sequence
  Description of Artificial Sequence: Synthetic oligonucleotide
  Target: LAMA2; (-) strand; PAM type: NRG; PAM sequence: CAG
agagagacccattccacatt

SEQ ID NO: 63733 - DNA, 20 bp, Artificial Sequence
  Description of Artificial Sequence: Synthetic oligonucleotide
  Target: LAMA2; (-) strand; PAM type: NRG; PAM sequence: GAG
ctgacccacttttcttcaga

SEQ ID NO: 63734 - DNA, 20 bp, Artificial Sequence
  Description of Artificial Sequence: Synthetic oligonucleotide
  Target: LAMA2; (-) strand; PAM type: NRG; PAM sequence: GAG
atctgacccacttttcttca

SEQ ID NO: 63735 - DNA, 20 bp, Artificial Sequence
  Description of Artificial Sequence: Synthetic oligonucleotide
  Target: LAMA2; (-) strand; PAM type: NRG; PAM sequence: CAG
ccatctgacccacttttctt

SEQ ID NO: 63736 - DNA, 20 bp, Artificial Sequence
  Description of Artificial Sequence: Synthetic oligonucleotide
  Target: LAMA2; (-) strand; PAM type: NRG; PAM sequence: AAG
agtttctttccaatatgcac

SEQ ID NO: 63737 - DNA, 20 bp, Artificial Sequence
  Description of Artificial Sequence: Synthetic oligonucleotide
  Target: LAMA2; (-) strand; PAM type: NRG; PAM sequence: CAG
aaaagagaccaggaagctat

SEQ ID NO: 63738 - DNA, 20 bp, Artificial Sequence
  Description of Artificial Sequence: Synthetic oligonucleotide
  Target: LAMA2; (-) strand; PAM type: NRG; PAM sequence: AAG
acccttcaaaagagaccagg

SEQ ID NO: 63739 - DNA, 20 bp, Artificial Sequence
  Description of Artificial Sequence: Synthetic oligonucleotide
  Target: LAMA2; (-) strand; PAM type: NRG; PAM sequence: AGG
agcacccttcaaaagagacc

SEQ ID NO: 63740 - DNA, 20 bp, Artificial Sequence
  Description of Artificial Sequence: Synthetic oligonucleotide
  Target: LAMA2; (-) strand; PAM type: NRG; PAM sequence: CAG
cagcacccttcaaaagagac

SEQ ID NO: 63741 - DNA, 20 bp, Artificial Sequence
  Description of Artificial Sequence: Synthetic oligonucleotide
  Target: LAMA2; (-) strand; PAM type: NRG; PAM sequence: GAG
tacaacagcacccttcaaaa

SEQ ID NO: 63742 - DNA, 20 bp, Artificial Sequence
  Description of Artificial Sequence: Synthetic oligonucleotide
  Target: LAMA2; (-) strand; PAM type: NRG; PAM sequence: AAG
tttacaacagcacccttcaa

SEQ ID NO: 63743 - DNA, 20 bp, Artificial Sequence
  Description of Artificial Sequence: Synthetic oligonucleotide
  Target: LAMA2; (-) strand; PAM type: NRG; PAM sequence: CAG
gactaatctgtattttacaa

SEQ ID NO: 63744 - DNA, 20 bp, Artificial Sequence
  Description of Artificial Sequence: Synthetic oligonucleotide
  Target: LAMA2; (-) strand; PAM type: NRG; PAM sequence: CAG
tgaagtgttcaggctagtaa

SEQ ID NO: 63745 - DNA, 20 bp, Artificial Sequence
  Description of Artificial Sequence: Synthetic oligonucleotide
  Target: LAMA2; (-) strand; PAM type: NRG; PAM sequence: TAG
gtggtttgaagtgttcaggc

SEQ ID NO: 63746 - DNA, 20 bp, Artificial Sequence
  Description of Artificial Sequence: Synthetic oligonucleotide
  Target: LAMA2; (-) strand; PAM type: NRG; PAM sequence: AGG
catggtggtttgaagtgttc

SEQ ID NO: 63747 - DNA, 20 bp, Artificial Sequence
  Description of Artificial Sequence: Synthetic oligonucleotide
  Target: LAMA2; (-) strand; PAM type: NRG; PAM sequence: CAG
gcatggtggtttgaagtgtt

SEQ ID NO: 63748 - DNA, 20 bp, Artificial Sequence
  Description of Artificial Sequence: Synthetic oligonucleotide
  Target: LAMA2; (-) strand; PAM type: NRG; PAM sequence: AAG
ttaaactgcatggtggtttg

SEQ ID NO: 63749 - DNA, 20 bp, Artificial Sequence
  Description of Artificial Sequence: Synthetic oligonucleotide
  Target: LAMA2; (-) strand; PAM type: NRG; PAM sequence: TGG
aatagttttaaactgcatgg

SEQ ID NO: 63750 - DNA, 20 bp, Artificial Sequence
  Description of Artificial Sequence: Synthetic oligonucleotide
  Target: LAMA2; (-) strand; PAM type: NRG; PAM sequence: TGG
ctgaatagttttaaactgca

SEQ ID NO: 63751 - DNA, 20 bp, Artificial Sequence
  Description of Artificial Sequence: Synthetic oligonucleotide
  Target: LAMA2; (-) strand; PAM type: NRG; PAM sequence: TAG
attttgccataagcactgaa

SEQ ID NO: 63752 - DNA, 20 bp, Artificial Sequence
  Description of Artificial Sequence: Synthetic oligonucleotide
  Target: LAMA2; (-) strand; PAM type: NRG; PAM sequence: AAG
aaagacctgaattttgccat

SEQ ID NO: 63753 - DNA, 20 bp, Artificial Sequence
  Description of Artificial Sequence: Synthetic oligonucleotide
  Target: LAMA2; (-) strand; PAM type: NRG; PAM sequence: AAG
tactcctgccccaacatcaa

SEQ ID NO: 63754 - DNA, 20 bp, Artificial Sequence
  Description of Artificial Sequence: Synthetic oligonucleotide
  Target: LAMA2; (-) strand; PAM type: NRG; PAM sequence: AAG
taaaaaattattattaaggt

SEQ ID NO: 63755 - DNA, 20 bp, Artificial Sequence
  Description of Artificial Sequence: Synthetic oligonucleotide
  Target: LAMA2; (-) strand; PAM type: NRG; PAM sequence: AGG
ggtataaaaaattattatta

SEQ ID NO: 63756 - DNA, 20 bp, Artificial Sequence
  Description of Artificial Sequence: Synthetic oligonucleotide
  Target: LAMA2; (-) strand; PAM type: NRG; PAM sequence: AAG
aggtataaaaaattattatt

SEQ ID NO: 63757 - DNA, 20 bp, Artificial Sequence
  Description of Artificial Sequence: Synthetic oligonucleotide
  Target: LAMA2; (-) strand; PAM type: NRG; PAM sequence: AGG
cttgacatttctggatttaa

SEQ ID NO: 63758 - DNA, 20 bp, Artificial Sequence
  Description of Artificial Sequence: Synthetic oligonucleotide
  Target: LAMA2; (-) strand; PAM type: NRG; PAM sequence: AAG
tcttgacatttctggattta

SEQ ID NO: 63759 - DNA, 20 bp, Artificial Sequence
  Description of Artificial Sequence: Synthetic oligonucleotide
  Target: LAMA2; (-) strand; PAM type: NRG; PAM sequence: TGG
tgtcattttcttgacatttc

SEQ ID NO: 63760 - DNA, 20 bp, Artificial Sequence
  Description of Artificial Sequence: Synthetic oligonucleotide
  Target: LAMA2; (-) strand; PAM type: NRG; PAM sequence: AGG
tcaatgtcagatttttaagc

SEQ ID NO: 63761 - DNA, 20 bp, Artificial Sequence
  Description of Artificial Sequence: Synthetic oligonucleotide
  Target: LAMA2; (-) strand; PAM type: NRG; PAM sequence: CAG
atcaatgtcagatttttaag

SEQ ID NO: 63762 - DNA, 20 bp, Artificial Sequence
  Description of Artificial Sequence: Synthetic oligonucleotide
  Target: LAMA2; (-) strand; PAM type: NRG; PAM sequence: AAG
aagatcaatgtcagattttt

SEQ ID NO: 63763 - DNA, 20 bp, Artificial Sequence
  Description of Artificial Sequence: Synthetic oligonucleotide
  Target: LAMA2; (-) strand; PAM type: NRG; PAM sequence: CAG
aggcattggaagatcaatgt

SEQ ID NO: 63764 - DNA, 20 bp, Artificial Sequence
  Description of Artificial Sequence: Synthetic oligonucleotide
  Target: LAMA2; (-) strand; PAM type: NRG; PAM sequence: AAG
aaacatttttaaggcattgg

SEQ ID NO: 63765 - DNA, 20 bp, Artificial Sequence
  Description of Artificial Sequence: Synthetic oligonucleotide
  Target: LAMA2; (-) strand; PAM type: NRG; PAM sequence: TGG
taaaaacatttttaaggcat

SEQ ID NO: 63766 - DNA, 20 bp, Artificial Sequence
  Description of Artificial Sequence: Synthetic oligonucleotide
  Target: LAMA2; (-) strand; PAM type: NRG; PAM sequence: AGG
tcataataaaaacattttta

SEQ ID NO: 63767 - DNA, 20 bp, Artificial Sequence
  Description of Artificial Sequence: Synthetic oligonucleotide
  Target: LAMA2; (-) strand; PAM type: NRG; PAM sequence: AAG
ttcataataaaaacattttt

SEQ ID NO: 63768 - DNA, 20 bp, Artificial Sequence
  Description of Artificial Sequence: Synthetic oligonucleotide
  Target: LAMA2; (-) strand; PAM type: NRG; PAM sequence: GGG
agcaagtaatgtgtacttga

SEQ ID NO: 63769 - DNA, 20 bp, Artificial Sequence
  Description of Artificial Sequence: Synthetic oligonucleotide
  Target: LAMA2; (-) strand; PAM type: NRG; PAM sequence: AGG
aagcaagtaatgtgtacttg

SEQ ID NO: 63770 - DNA, 20 bp, Artificial Sequence
  Description of Artificial Sequence: Synthetic oligonucleotide
  Target: LAMA2; (-) strand; PAM type: NRG; PAM sequence: GAG
gaagcaagtaatgtgtactt

SEQ ID NO: 63771 - DNA, 20 bp, Artificial Sequence
  Description of Artificial Sequence: Synthetic oligonucleotide
  Target: LAMA2; (-) strand; PAM type: NRG; PAM sequence: AAG
tgggtgataattattgaagc

SEQ ID NO: 63772 - DNA, 20 bp, Artificial Sequence
  Description of Artificial Sequence: Synthetic oligonucleotide
  Target: LAMA2; (-) strand; PAM type: NRG; PAM sequence: AAG
ttgatgggtgataattattg

SEQ ID NO: 63773 - DNA, 20 bp, Artificial Sequence
  Description of Artificial Sequence: Synthetic oligonucleotide
  Target: LAMA2; (-) strand; PAM type: NRG; PAM sequence: GGG
gaaaaaaaaaattagttgat

SEQ ID NO: 63774 - DNA, 20 bp, Artificial Sequence
  Description of Artificial Sequence: Synthetic oligonucleotide
  Target: LAMA2; (-) strand; PAM type: NRG; PAM sequence: TGG
tgaaaaaaaaaattagttga

SEQ ID NO: 63775 - DNA, 20 bp, Artificial Sequence
  Description of Artificial Sequence: Synthetic oligonucleotide
  Target: LAMA2; (-) strand; PAM type: NRG; PAM sequence: TAG
ttacagatgaaaaaaaaaat

SEQ ID NO: 63776 - DNA, 20 bp, Artificial Sequence
  Description of Artificial Sequence: Synthetic oligonucleotide
  Target: LAMA2; (-) strand; PAM type: NRG; PAM sequence: CAG
gagaacagttggtagggtta

SEQ ID NO: 63777 - DNA, 20 bp, Artificial Sequence
  Description of Artificial Sequence: Synthetic oligonucleotide
  Target: LAMA2; (-) strand; PAM type: NRG; PAM sequence: GGG
ggaaaggagaacagttggta

SEQ ID NO: 63778 - DNA, 20 bp, Artificial Sequence
  Description of Artificial Sequence: Synthetic oligonucleotide
  Target: LAMA2; (-) strand; PAM type: NRG; PAM sequence: AGG
gggaaaggagaacagttggt

SEQ ID NO: 63779 - DNA, 20 bp, Artificial Sequence
  Description of Artificial Sequence: Synthetic oligonucleotide
  Target: LAMA2; (-) strand; PAM type: NRG; PAM sequence: TAG
tgggaaaggagaacagttgg

SEQ ID NO: 63780 - DNA, 20 bp, Artificial Sequence
  Description of Artificial Sequence: Synthetic oligonucleotide
  Target: LAMA2; (-) strand; PAM type: NRG; PAM sequence: TGG
cagtgggaaaggagaacagt

SEQ ID NO: 63781 - DNA, 20 bp, Artificial Sequence
  Description of Artificial Sequence: Synthetic oligonucleotide
  Target: LAMA2; (-) strand; PAM type: NRG; PAM sequence: CAG
attccagtgggaaaggagaa

SEQ ID NO: 63782 - DNA, 20 bp, Artificial Sequence
  Description of Artificial Sequence: Synthetic oligonucleotide
  Target: LAMA2; (-) strand; PAM type: NRG; PAM sequence: GAG
aaaatattccagtgggaaag

SEQ ID NO: 63783 - DNA, 20 bp, Artificial Sequence
  Description of Artificial Sequence: Synthetic oligonucleotide
  Target: LAMA2; (-) strand; PAM type: NRG; PAM sequence: AGG
tcaaaatattccagtgggaa

SEQ ID NO: 63784 - DNA, 20 bp, Artificial Sequence
  Description of Artificial Sequence: Synthetic oligonucleotide
  Target: LAMA2; (-) strand; PAM type: NRG; PAM sequence: AAG
ttcaaaatattccagtggga

SEQ ID NO: 63785 - DNA, 20 bp, Artificial Sequence
  Description of Artificial Sequence: Synthetic oligonucleotide
  Target: LAMA2; (-) strand; PAM type: NRG; PAM sequence: GGG
ttgcttcaaaatattccagt

SEQ ID NO: 63786 - DNA, 20 bp, Artificial Sequence
  Description of Artificial Sequence: Synthetic oligonucleotide
  Target: LAMA2; (-) strand; PAM type: NRG; PAM sequence: TGG
tttgcttcaaaatattccag

SEQ ID NO: 63787 - DNA, 20 bp, Artificial Sequence
  Description of Artificial Sequence: Synthetic oligonucleotide
  Target: LAMA2; (-) strand; PAM type: NRG; PAM sequence: CAG
tgatttgcttcaaaatattc

SEQ ID NO: 63788 - DNA, 20 bp, Artificial Sequence
  Description of Artificial Sequence: Synthetic oligonucleotide
  Target: LAMA2; (-) strand; PAM type: NRG; PAM sequence: CAG
acttaaatatttgcagatta

SEQ ID NO: 63789 - DNA, 20 bp, Artificial Sequence
  Description of Artificial Sequence: Synthetic oligonucleotide
  Target: LAMA2; (-) strand; PAM type: NRG; PAM sequence: CAG
tatgcatacttaaatatttg

SEQ ID NO: 63790 - DNA, 20 bp, Artificial Sequence
  Description of Artificial Sequence: Synthetic oligonucleotide
  Target: LAMA2; (-) strand; PAM type: NRG; PAM sequence: TAG
ttaaaaagaattctaacttt

SEQ ID NO: 63791 - DNA, 20 bp, Artificial Sequence
  Description of Artificial Sequence: Synthetic oligonucleotide
  Target: LAMA2; (-) strand; PAM type: NRG; PAM sequence: AAG
actgagattatgattttaaa

SEQ ID NO: 63792 - DNA, 20 bp, Artificial Sequence
  Description of Artificial Sequence: Synthetic oligonucleotide
  Target: LAMA2; (-) strand; PAM type: NRG; PAM sequence: GAG
ttttagtgtgtcattatact

SEQ ID NO: 63793 - DNA, 20 bp, Artificial Sequence
  Description of Artificial Sequence: Synthetic oligonucleotide
  Target: LAMA2; (-) strand; PAM type: NRG; PAM sequence: TAG
aataattattgttcattttt

SEQ ID NO: 63794 - DNA, 20 bp, Artificial Sequence
  Description of Artificial Sequence: Synthetic oligonucleotide
  Target: LAMA2; (-) strand; PAM type: NRG; PAM sequence: GGG
atagcttgtcaatatttgat

SEQ ID NO: 63795 - DNA, 20 bp, Artificial Sequence
  Description of Artificial Sequence: Synthetic oligonucleotide
  Target: LAMA2; (-) strand; PAM type: NRG; PAM sequence: TGG
aatagcttgtcaatatttga

SEQ ID NO: 63796 - DNA, 20 bp, Artificial Sequence
  Description of Artificial Sequence: Synthetic oligonucleotide
  Target: LAMA2; (-) strand; PAM type: NRG; PAM sequence: TAG
aatatatagtaaaagaataa

SEQ ID NO: 63797 - DNA, 20 bp, Artificial Sequence
  Description of Artificial Sequence: Synthetic oligonucleotide
  Target: LAMA2; (-) strand; PAM type: NRG; PAM sequence: AAG
ttctagccaatatatagtaa

SEQ ID NO: 63798 - DNA, 20 bp, Artificial Sequence
  Description of Artificial Sequence: Synthetic oligonucleotide
  Target: LAMA2; (-) strand; PAM type: NRG; PAM sequence: TAG
ataaaattctagccaatata

SEQ ID NO: 63799 - DNA, 20 bp, Artificial Sequence
  Description of Artificial Sequence: Synthetic oligonucleotide
  Target: LAMA2; (-) strand; PAM type: NRG; PAM sequence: TAG
cttttctttacataaaattc

SEQ ID NO: 63800 - DNA, 20 bp, Artificial Sequence
  Description of Artificial Sequence: Synthetic oligonucleotide
  Target: LAMA2; (-) strand; PAM type: NRG; PAM sequence: AAG
aaataagagtcaatggtgaa

SEQ ID NO: 63801 - DNA, 20 bp, Artificial Sequence
  Description of Artificial Sequence: Synthetic oligonucleotide
  Target: LAMA2; (-) strand; PAM type: NRG; PAM sequence: TGG
tgtaggtaaataagagtcaa

SEQ ID NO: 63802 - DNA, 20 bp, Artificial Sequence
  Description of Artificial Sequence: Synthetic oligonucleotide
  Target: LAMA2; (-) strand; PAM type: NRG; PAM sequence: GAG
ttctacctgtaggtaaataa

SEQ ID NO: 63803 - DNA, 20 bp, Artificial Sequence
  Description of Artificial Sequence: Synthetic oligonucleotide
  Target: LAMA2; (-) strand; PAM type: NRG; PAM sequence: AAG
aattctacctgtaggtaaat

SEQ ID NO: 63804 - DNA, 20 bp, Artificial Sequence
  Description of Artificial Sequence: Synthetic oligonucleotide
  Target: LAMA2; (-) strand; PAM type: NRG; PAM sequence: AGG
cctgtttgaattctacctgt

SEQ ID NO: 63805 - DNA, 20 bp, Artificial Sequence
  Description of Artificial Sequence: Synthetic oligonucleotide
  Target: LAMA2; (-) strand; PAM type: NRG; PAM sequence: TAG
tcctgtttgaattctacctg

SEQ ID NO: 63806 - DNA, 20 bp, Artificial Sequence
  Description of Artificial Sequence: Synthetic oligonucleotide
  Target: LAMA2; (-) strand; PAM type: NRG; PAM sequence: AAG
ggaaataaaaagaaagaatc

SEQ ID NO: 63807 - DNA, 20 bp, Artificial Sequence
  Description of Artificial Sequence: Synthetic oligonucleotide
  Target: LAMA2; (-) strand; PAM type: NRG; PAM sequence: AAG
aaaactgggaaataaaaaga

SEQ ID NO: 63808 - DNA, 20 bp, Artificial Sequence
  Description of Artificial Sequence: Synthetic oligonucleotide
  Target: LAMA2; (-) strand; PAM type: NRG; PAM sequence: AAG
tctaaaaactgggaaataaa

SEQ ID NO: 63809 - DNA, 20 bp, Artificial Sequence
  Description of Artificial Sequence: Synthetic oligonucleotide
  Target: LAMA2; (-) strand; PAM type: NRG; PAM sequence: GGG
actcattttttctaaaaact

SEQ ID NO: 63810 - DNA, 20 bp, Artificial Sequence
  Description of Artificial Sequence: Synthetic oligonucleotide
  Target: LAMA2; (-) strand; PAM type: NRG; PAM sequence: TGG
aactcattttttctaaaaac

SEQ ID NO: 63811 - DNA, 20 bp, Artificial Sequence
  Description of Artificial Sequence: Synthetic oligonucleotide
  Target: LAMA2; (-) strand; PAM type: NRG; PAM sequence: TAG
tggttatcattaaaggatac

SEQ ID NO: 63812 - DNA, 20 bp, Artificial Sequence
  Description of Artificial Sequence: Synthetic oligonucleotide
  Target: LAMA2; (-) strand; PAM type: NRG; PAM sequence: AGG
agcaaactggttatcattaa

SEQ ID NO: 63813 - DNA, 20 bp, Artificial Sequence
  Description of Artificial Sequence: Synthetic oligonucleotide
  Target: LAMA2; (-) strand; PAM type: NRG; PAM sequence: AAG
aagcaaactggttatcatta

SEQ ID NO: 63814 - DNA, 20 bp, Artificial Sequence
  Description of Artificial Sequence: Synthetic oligonucleotide
  Target: LAMA2; (-) strand; PAM type: NRG; PAM sequence: TGG
tagagatacaaaaagcaaac

SEQ ID NO: 63815 - DNA, 20 bp, Artificial Sequence
  Description of Artificial Sequence: Synthetic oligonucleotide
  Target: LAMA2; (-) strand; PAM type: NRG; PAM sequence: AAG
tgagttcatagagatacaaa

SEQ ID NO: 63816 - DNA, 20 bp, Artificial Sequence
  Description of Artificial Sequence: Synthetic oligonucleotide
  Target: LAMA2; (-) strand; PAM type: NRG; PAM sequence: GAG
ttaaaatctatgagttcata

SEQ ID NO: 63817 - DNA, 20 bp, Artificial Sequence
  Description of Artificial Sequence: Synthetic oligonucleotide
  Target: LAMA2; (-) strand; PAM type: NRG; PAM sequence: TAG
atttaaaatctatgagttca

SEQ ID NO: 63818 - DNA, 20 bp, Artificial Sequence
  Description of Artificial Sequence: Synthetic oligonucleotide
  Target: LAMA2; (-) strand; PAM type: NRG; PAM sequence: GAG
caaatatatttaaaatctat

SEQ ID NO: 63819 - DNA, 20 bp, Artificial Sequence
  Description of Artificial Sequence: Synthetic oligonucleotide
  Target: LAMA2; (-) strand; PAM type: NRG; PAM sequence: AAG
gagacaatttgattattgaa

SEQ ID NO: 63820 - DNA, 20 bp, Artificial Sequence
  Description of Artificial Sequence: Synthetic oligonucleotide
  Target: LAMA2; (-) strand; PAM type: NRG; PAM sequence: GAG
cactcttaccaaccaaagat

SEQ ID NO: 63821 - DNA, 20 bp, Artificial Sequence
  Description of Artificial Sequence: Synthetic oligonucleotide
  Target: LAMA2; (-) strand; PAM type: NRG; PAM sequence: AAG
gaagacactcttaccaacca

SEQ ID NO: 63822 - DNA, 20 bp, Artificial Sequence
  Description of Artificial Sequence: Synthetic oligonucleotide
  Target: LAMA2; (-) strand; PAM type: NRG; PAM sequence: AAG
aggactagaaagccaagttg

SEQ ID NO: 63823 - DNA, 20 bp, Artificial Sequence
  Description of Artificial Sequence: Synthetic oligonucleotide
  Target: LAMA2; (-) strand; PAM type: NRG; PAM sequence: AAG
gtttaaaggactagaaagcc

SEQ ID NO: 63824 - DNA, 20 bp, Artificial Sequence
  Description of Artificial Sequence: Synthetic oligonucleotide
  Target: LAMA2; (-) strand; PAM type: NRG; PAM sequence: AAG
actgagtttaaaggactaga

SEQ ID NO: 63825 - DNA, 20 bp, Artificial Sequence
  Description of Artificial Sequence: Synthetic oligonucleotide
  Target: LAMA2; (-) strand; PAM type: NRG; PAM sequence: TAG
gaaaactgagtttaaaggac

SEQ ID NO: 63826 - DNA, 20 bp, Artificial Sequence
  Description of Artificial Sequence: Synthetic oligonucleotide
  Target: LAMA2; (-) strand; PAM type: NRG; PAM sequence: AGG
ttaaggaaaactgagtttaa

SEQ ID NO: 63827 - DNA, 20 bp, Artificial Sequence
  Description of Artificial Sequence: Synthetic oligonucleotide
  Target: LAMA2; (-) strand; PAM type: NRG; PAM sequence: AAG
attaaggaaaactgagttta

SEQ ID NO: 63828 - DNA, 20 bp, Artificial Sequence
  Description of Artificial Sequence: Synthetic oligonucleotide
  Target: LAMA2; (-) strand; PAM type: NRG; PAM sequence: GAG
gagaatcattaaggaaaact

SEQ ID NO: 63829 - DNA, 20 bp, Artificial Sequence
  Description of Artificial Sequence: Synthetic oligonucleotide
  Target: LAMA2; (-) strand; PAM type: NRG; PAM sequence: AGG
gaaaagcatgagaatcatta

SEQ ID NO: 63830 - DNA, 20 bp, Artificial Sequence
  Description of Artificial Sequence: Synthetic oligonucleotide
  Target: LAMA2; (-) strand; PAM type: NRG; PAM sequence: AAG
tgaaaagcatgagaatcatt

SEQ ID NO: 63831 - DNA, 20 bp, Artificial Sequence
  Description of Artificial Sequence: Synthetic oligonucleotide
  Target: LAMA2; (-) strand; PAM type: NRG; PAM sequence: GAG
atcttaacactgaaaagcat

SEQ ID NO: 63832 - DNA, 20 bp, Artificial Sequence
  Description of Artificial Sequence: Synthetic oligonucleotide
  Target: LAMA2; (-) strand; PAM type: NRG; PAM sequence: AAG
taccacatcttaacactgaa

SEQ ID NO: 63833 - DNA, 20 bp, Artificial Sequence
  Description of Artificial Sequence: Synthetic oligonucleotide
  Target: LAMA2; (-) strand; PAM type: NRG; PAM sequence: AGG
actgtttctaaaaccaggac

SEQ ID NO: 63834 - DNA, 20 bp, Artificial Sequence
  Description of Artificial Sequence: Synthetic oligonucleotide
  Target: LAMA2; (-) strand; PAM type: NRG; PAM sequence: CAG
gactgtttctaaaaccagga

SEQ ID NO: 63835 - DNA, 20 bp, Artificial Sequence
  Description of Artificial Sequence: Synthetic oligonucleotide
  Target: LAMA2; (-) strand; PAM type: NRG; PAM sequence: AGG
aaatgactgtttctaaaacc

SEQ ID NO: 63836 - DNA, 20 bp, Artificial Sequence
  Description of Artificial Sequence: Synthetic oligonucleotide
  Target: LAMA2; (-) strand; PAM type: NRG; PAM sequence: CAG
gaaatgactgtttctaaaac

SEQ ID NO: 63837 - DNA, 20 bp, Artificial Sequence
  Description of Artificial Sequence: Synthetic oligonucleotide
  Target: LAMA2; (-) strand; PAM type: NRG; PAM sequence: AAG
taaggaaccagggctcctcc

SEQ ID NO: 63838 - DNA, 20 bp, Artificial Sequence
  Description of Artificial Sequence: Synthetic oligonucleotide
  Target: LAMA2; (-) strand; PAM type: NRG; PAM sequence: GGG
tttttcactataaggaacca

SEQ ID NO: 63839 - DNA, 20 bp, Artificial Sequence
  Description of Artificial Sequence: Synthetic oligonucleotide
  Target: LAMA2; (-) strand; PAM type: NRG; PAM sequence: AGG
ctttttcactataaggaacc

SEQ ID NO: 63840 - DNA, 20 bp, Artificial Sequence
  Description of Artificial Sequence: Synthetic oligonucleotide
  Target: LAMA2; (-) strand; PAM type: NRG; PAM sequence: CAG
cctttttcactataaggaac

SEQ ID NO: 63841 - DNA, 20 bp, Artificial Sequence
  Description of Artificial Sequence: Synthetic oligonucleotide
  Target: LAMA2; (-) strand; PAM type: NRG; PAM sequence: AGG
aaataccctttttcactata

SEQ ID NO: 63842 - DNA, 20 bp, Artificial Sequence
  Description of Artificial Sequence: Synthetic oligonucleotide
  Target: LAMA2; (-) strand; PAM type: NRG; PAM sequence: AAG
gaaataccctttttcactat

SEQ ID NO: 63843 - DNA, 20 bp, Artificial Sequence
  Description of Artificial Sequence: Synthetic oligonucleotide
  Target: LAMA2; (-) strand; PAM type: NRG; PAM sequence: TGG
tgaacagccctaccgacctg

SEQ ID NO: 63844 - DNA, 20 bp, Artificial Sequence
  Description of Artificial Sequence: Synthetic oligonucleotide
  Target: LAMA2; (-) strand; PAM type: NRG; PAM sequence: CAG
acctacatattaacagtgaa

SEQ ID NO: 63845 - DNA, 20 bp, Artificial Sequence
  Description of Artificial Sequence: Synthetic oligonucleotide
  Target: LAMA2; (-) strand; PAM type: NRG; PAM sequence: CAG
agaaacaacctacatattaa

SEQ ID NO: 63846 - DNA, 20 bp, Artificial Sequence
  Description of Artificial Sequence: Synthetic oligonucleotide
  Target: LAMA2; (-) strand; PAM type: NRG; PAM sequence: TAG
cctgatccactgaaaagacc

SEQ ID NO: 63847 - DNA, 20 bp, Artificial Sequence
  Description of Artificial Sequence: Synthetic oligonucleotide
  Target: LAMA2; (-) strand; PAM type: NRG; PAM sequence: AAG
ttcccacctgatccactgaa

SEQ ID NO: 63848 - DNA, 20 bp, Artificial Sequence
  Description of Artificial Sequence: Synthetic oligonucleotide
  Target: LAMA2; (-) strand; PAM type: NRG; PAM sequence: CAG
atattcctaaatgggcatgt

SEQ ID NO: 63849 - DNA, 20 bp, Artificial Sequence
  Description of Artificial Sequence: Synthetic oligonucleotide
  Target: LAMA2; (-) strand; PAM type: NRG; PAM sequence: GGG
taagcctcatattcctaaat

SEQ ID NO: 63850 - DNA, 20 bp, Artificial Sequence
  Description of Artificial Sequence: Synthetic oligonucleotide
  Target: LAMA2; (-) strand; PAM type: NRG; PAM sequence: TGG
ataagcctcatattcctaaa

SEQ ID NO: 63851 - DNA, 20 bp, Artificial Sequence
  Description of Artificial Sequence: Synthetic oligonucleotide
  Target: LAMA2; (-) strand; PAM type: NRG; PAM sequence: AAG
aaattaatgaatttaactat

SEQ ID NO: 63852 - DNA, 20 bp, Artificial Sequence
  Description of Artificial Sequence: Synthetic oligonucleotide
  Target: LAMA2; (-) strand; PAM type: NRG; PAM sequence: AAG
actttcagtggatgagaaaa

SEQ ID NO: 63853 - DNA, 20 bp, Artificial Sequence
  Description of Artificial Sequence: Synthetic oligonucleotide
  Target: LAMA2; (-) strand; PAM type: NRG; PAM sequence: GAG
aatcaaaactttcagtggat

SEQ ID NO: 63854 - DNA, 20 bp, Artificial Sequence
  Description of Artificial Sequence: Synthetic oligonucleotide
  Target: LAMA2; (-) strand; PAM type: NRG; PAM sequence: TGG
ttaggaatcaaaactttcag

SEQ ID NO: 63855 - DNA, 20 bp, Artificial Sequence
  Description of Artificial Sequence: Synthetic oligonucleotide
  Target: LAMA2; (-) strand; PAM type: NRG; PAM sequence: CAG
ttattaggaatcaaaacttt

SEQ ID NO: 63856 - DNA, 20 bp, Artificial Sequence
  Description of Artificial Sequence: Synthetic oligonucleotide
  Target: LAMA2; (-) strand; PAM type: NRG; PAM sequence: AGG
gatagagcaaataagttatt

SEQ ID NO: 63857 - DNA, 20 bp, Artificial Sequence
  Description of Artificial Sequence: Synthetic oligonucleotide
  Target: LAMA2; (-) strand; PAM type: NRG; PAM sequence: TAG
tgatagagcaaataagttat

SEQ ID NO: 63858 - DNA, 20 bp, Artificial Sequence
  Description of Artificial Sequence: Synthetic oligonucleotide
  Target: LAMA2; (-) strand; PAM type: NRG; PAM sequence: AAG
agagctatgatagagcaaat

SEQ ID NO: 63859 - DNA, 20 bp, Artificial Sequence
  Description of Artificial Sequence: Synthetic oligonucleotide
  Target: LAMA2; (-) strand; PAM type: NRG; PAM sequence: GAG
atatatagagagctatgata

SEQ ID NO: 63860 - DNA, 20 bp, Artificial Sequence
  Description of Artificial Sequence: Synthetic oligonucleotide
  Target: LAMA2; (-) strand; PAM type: NRG; PAM sequence: TAG
tgatatatagagagctatga

SEQ ID NO: 63861 - DNA, 20 bp, Artificial Sequence
  Description of Artificial Sequence: Synthetic oligonucleotide
  Target: LAMA2; (-) strand; PAM type: NRG; PAM sequence: GAG
attatgaaatgatatataga

SEQ ID NO: 63862 - DNA, 20 bp, Artificial Sequence
  Description of Artificial Sequence: Synthetic oligonucleotide
  Target: LAMA2; (-) strand; PAM type: NRG; PAM sequence: GAG
ttattatgaaatgatatata

SEQ ID NO: 63863 - DNA, 20 bp, Artificial Sequence
  Description of Artificial Sequence: Synthetic oligonucleotide
  Target: LAMA2; (-) strand; PAM type: NRG; PAM sequence: TAG
tattattatgaaatgatata

SEQ ID NO: 63864 - DNA, 20 bp, Artificial Sequence
  Description of Artificial Sequence: Synthetic oligonucleotide
  Target: LAMA2; (-) strand; PAM type: NRG; PAM sequence: CAG
gaaatctttcaaagtcattt

SEQ ID NO: 63865 - DNA, 20 bp, Artificial Sequence
  Description of Artificial Sequence: Synthetic oligonucleotide
  Target: LAMA2; (-) strand; PAM type: NRG; PAM sequence: AAG
cgtggctaagaaatctttca

SEQ ID NO: 63866 - DNA, 20 bp, Artificial Sequence
  Description of Artificial Sequence: Synthetic oligonucleotide
  Target: LAMA2; (-) strand; PAM type: NRG; PAM sequence: AAG
ataaatataaaatcgtggct

SEQ ID NO: 63867 - DNA, 20 bp, Artificial Sequence
  Description of Artificial Sequence: Synthetic oligonucleotide
  Target: LAMA2; (-) strand; PAM type: NRG; PAM sequence: TGG
gctttataaatataaaatcg

SEQ ID NO: 63868 - DNA, 20 bp, Artificial Sequence
  Description of Artificial Sequence: Synthetic oligonucleotide
  Target: LAMA2; (-) strand; PAM type: NRG; PAM sequence: GGG
tttgattgtagatgcctagt

SEQ ID NO: 63869 - DNA, 20 bp, Artificial Sequence
  Description of Artificial Sequence: Synthetic oligonucleotide
  Target: LAMA2; (-) strand; PAM type: NRG; PAM sequence: TGG
atttgattgtagatgcctag

SEQ ID NO: 63870 - DNA, 20 bp, Artificial Sequence
  Description of Artificial Sequence: Synthetic oligonucleotide
  Target: LAMA2; (-) strand; PAM type: NRG; PAM sequence: TAG
gtaatttgattgtagatgcc

SEQ ID NO: 63871 - DNA, 20 bp, Artificial Sequence
  Description of Artificial Sequence: Synthetic oligonucleotide
  Target: LAMA2; (-) strand; PAM type: NRG; PAM sequence: TAG
aaaaaaaggtaatttgattg

SEQ ID NO: 63872 - DNA, 20 bp, Artificial Sequence
  Description of Artificial Sequence: Synthetic oligonucleotide
  Target: LAMA2; (-) strand; PAM type: NRG; PAM sequence: AGG
agtgatttttttttaaaaaa

SEQ ID NO: 63873 - DNA, 20 bp, Artificial Sequence
  Description of Artificial Sequence: Synthetic oligonucleotide
  Target: LAMA2; (-) strand; PAM type: NRG; PAM sequence: AAG
aagtgatttttttttaaaaa

SEQ ID NO: 63874 - DNA, 20 bp, Artificial Sequence
  Description of Artificial Sequence: Synthetic oligonucleotide
  Target: LAMA2; (-) strand; PAM type: NRG; PAM sequence: AAG
aaccataaaataattttttc

SEQ ID NO: 63875 - DNA, 20 bp, Artificial Sequence
  Description of Artificial Sequence: Synthetic oligonucleotide
  Target: LAMA2; (-) strand; PAM type: NRG; PAM sequence: TGG
aagcaaatgaagttgtttgg

SEQ ID NO: 63876 - DNA, 20 bp, Artificial Sequence
  Description of Artificial Sequence: Synthetic oligonucleotide
  Target: LAMA2; (-) strand; PAM type: NRG; PAM sequence: TGG
atgaagcaaatgaagttgtt

SEQ ID NO: 63877 - DNA, 20 bp, Artificial Sequence
  Description of Artificial Sequence: Synthetic oligonucleotide
  Target: LAMA2; (-) strand; PAM type: NRG; PAM sequence: AAG
aaagtcaaatgaagcaaatg

SEQ ID NO: 63878 - DNA, 20 bp, Artificial Sequence
  Description of Artificial Sequence: Synthetic oligonucleotide
  Target: LAMA2; (-) strand; PAM type: NRG; PAM sequence: AAG
ttcaggcaaaaagtcaaatg

SEQ ID NO: 63879 - DNA, 20 bp, Artificial Sequence
  Description of Artificial Sequence: Synthetic oligonucleotide
  Target: LAMA2; (-) strand; PAM type: NRG; PAM sequence: AAG
ttaaaatactttcaggcaaa

SEQ ID NO: 63880 - DNA, 20 bp, Artificial Sequence
  Description of Artificial Sequence: Synthetic oligonucleotide
  Target: LAMA2; (-) strand; PAM type: NRG; PAM sequence: AGG
caaatatttaaaatactttc

SEQ ID NO: 63881 - DNA, 20 bp, Artificial Sequence
  Description of Artificial Sequence: Synthetic oligonucleotide
  Target: LAMA2; (-) strand; PAM type: NRG; PAM sequence: CAG
acaaatatttaaaatacttt

SEQ ID NO: 63882 - DNA, 20 bp, Artificial Sequence
  Description of Artificial Sequence: Synthetic oligonucleotide
  Target: LAMA2; (-) strand; PAM type: NRG; PAM sequence: AAG
ttgaccttgaaactatgtaa

SEQ ID NO: 63883 - DNA, 20 bp, Artificial Sequence
  Description of Artificial Sequence: Synthetic oligonucleotide
  Target: LAMA2; (-) strand; PAM type: NRG; PAM sequence: TAG
atgaatggatctagagagtc

SEQ ID NO: 63884 - DNA, 20 bp, Artificial Sequence
  Description of Artificial Sequence: Synthetic oligonucleotide
  Target: LAMA2; (-) strand; PAM type: NRG; PAM sequence: GAG
acaggatgaatggatctaga

SEQ ID NO: 63885 - DNA, 20 bp, Artificial Sequence
  Description of Artificial Sequence: Synthetic oligonucleotide
  Target: LAMA2; (-) strand; PAM type: NRG; PAM sequence: GAG
aaacaggatgaatggatcta

SEQ ID NO: 63886 - DNA, 20 bp, Artificial Sequence
  Description of Artificial Sequence: Synthetic oligonucleotide
  Target: LAMA2; (-) strand; PAM type: NRG; PAM sequence: TAG
gaaaacaggatgaatggatc

SEQ ID NO: 63887 - DNA, 20 bp, Artificial Sequence
  Description of Artificial Sequence: Synthetic oligonucleotide
  Target: LAMA2; (-) strand; PAM type: NRG; PAM sequence: TGG
gaggaagaaaacaggatgaa

SEQ ID NO: 63888 - DNA, 20 bp, Artificial Sequence
  Description of Artificial Sequence: Synthetic oligonucleotide
  Target: LAMA2; (-) strand; PAM type: NRG; PAM sequence: AGG
acattagtgaggaagaaaac

SEQ ID NO: 63889 - DNA, 20 bp, Artificial Sequence
  Description of Artificial Sequence: Synthetic oligonucleotide
  Target: LAMA2; (-) strand; PAM type: NRG; PAM sequence: CAG
cacattagtgaggaagaaaa

SEQ ID NO: 63890 - DNA, 20 bp, Artificial Sequence
  Description of Artificial Sequence: Synthetic oligonucleotide
  Target: LAMA2; (-) strand; PAM type: NRG; PAM sequence: AAG
atggttacacattagtgagg

SEQ ID NO: 63891 - DNA, 20 bp, Artificial Sequence
  Description of Artificial Sequence: Synthetic oligonucleotide
  Target: LAMA2; (-) strand; PAM type: NRG; PAM sequence: AGG
aaaatggttacacattagtg

SEQ ID NO: 63892 - DNA, 20 bp, Artificial Sequence
  Description of Artificial Sequence: Synthetic oligonucleotide
  Target: LAMA2; (-) strand; PAM type: NRG; PAM sequence: GAG
taaaatggttacacattagt

SEQ ID NO: 63893 - DNA, 20 bp, Artificial Sequence
  Description of Artificial Sequence: Synthetic oligonucleotide
  Target: LAMA2; (-) strand; PAM type: NRG; PAM sequence: TAG
taaataaaatggttacacat

SEQ ID NO: 63894 - DNA, 20 bp, Artificial Sequence
  Description of Artificial Sequence: Synthetic oligonucleotide
  Target: LAMA2; (-) strand; PAM type: NRG; PAM sequence: TGG
aaagataaccctaaataaaa

SEQ ID NO: 63895 - DNA, 20 bp, Artificial Sequence
  Description of Artificial Sequence: Synthetic oligonucleotide
  Target: LAMA2; (-) strand; PAM type: NRG; PAM sequence: AAG
taatatttctaacaaatgga

SEQ ID NO: 63896 - DNA, 20 bp, Artificial Sequence
  Description of Artificial Sequence: Synthetic oligonucleotide
  Target: LAMA2; (-) strand; PAM type: NRG; PAM sequence: TGG
tatataatatttctaacaaa

SEQ ID NO: 63897 - DNA, 20 bp, Artificial Sequence
  Description of Artificial Sequence: Synthetic oligonucleotide
  Target: LAMA2; (-) strand; PAM type: NRG; PAM sequence: CGG
actagaaaaatattcttaag

SEQ ID NO: 63898 - DNA, 20 bp, Artificial Sequence
  Description of Artificial Sequence: Synthetic oligonucleotide
  Target: LAMA2; (-) strand; PAM type: NRG; PAM sequence: AAG
aagactagaaaaatattctt

SEQ ID NO: 63899 - DNA, 20 bp, Artificial Sequence
  Description of Artificial Sequence: Synthetic oligonucleotide
  Target: LAMA2; (-) strand; PAM type: NRG; PAM sequence: TAG
tatttgtagcagcaaaagac

SEQ ID NO: 63900 - DNA, 20 bp, Artificial Sequence
  Description of Artificial Sequence: Synthetic oligonucleotide
  Target: LAMA2; (-) strand; PAM type: NRG; PAM sequence: AAG
aagattatttgtagcagcaa

SEQ ID NO: 63901 - DNA, 20 bp, Artificial Sequence
  Description of Artificial Sequence: Synthetic oligonucleotide
  Target: LAMA2; (-) strand; PAM type: NRG; PAM sequence: CAG
gattgcaagattatttgtag

SEQ ID NO: 63902 - DNA, 20 bp, Artificial Sequence
  Description of Artificial Sequence: Synthetic oligonucleotide
  Target: LAMA2; (-) strand; PAM type: NRG; PAM sequence: TAG
actgattgcaagattatttg

SEQ ID NO: 63903 - DNA, 20 bp, Artificial Sequence
  Description of Artificial Sequence: Synthetic oligonucleotide
  Target: LAMA2; (-) strand; PAM type: NRG; PAM sequence: AAG
tgcacaaaacaactgattgc

SEQ ID NO: 63904 - DNA, 20 bp, Artificial Sequence
  Description of Artificial Sequence: Synthetic oligonucleotide
  Target: LAMA2; (-) strand; PAM type: NRG; PAM sequence: AAG
gatgcaatgacaaaaagcaa

SEQ ID NO: 63905 - DNA, 20 bp, Artificial Sequence
  Description of Artificial Sequence: Synthetic oligonucleotide
  Target: LAMA2; (-) strand; PAM type: NRG; PAM sequence: AAG
cctaaagatgcaatgacaaa

SEQ ID NO: 63906 - DNA, 20 bp, Artificial Sequence
  Description of Artificial Sequence: Synthetic oligonucleotide
  Target: LAMA2; (-) strand; PAM type: NRG; PAM sequence: AAG
aaaaaaaacaaactatccta

SEQ ID NO: 63907 - DNA, 20 bp, Artificial Sequence
  Description of Artificial Sequence: Synthetic oligonucleotide
  Target: LAMA2; (-) strand; PAM type: NRG; PAM sequence: GAG
tccagcctgggtgacagaga

SEQ ID NO: 63908 - DNA, 20 bp, Artificial Sequence
  Description of Artificial Sequence: Synthetic oligonucleotide
  Target: LAMA2; (-) strand; PAM type: NRG; PAM sequence: GAG
actccagcctgggtgacaga

SEQ ID NO: 63909 - DNA, 20 bp, Artificial Sequence
  Description of Artificial Sequence: Synthetic oligonucleotide
  Target: LAMA2; (-) strand; PAM type: NRG; PAM sequence: GAG
gcactccagcctgggtgaca

SEQ ID NO: 63910 - DNA, 20 bp, Artificial Sequence
  Description of Artificial Sequence: Synthetic oligonucleotide
  Target: LAMA2; (-) strand; PAM type: NRG; PAM sequence: CAG
ctgcactccagcctgggtga

SEQ ID NO: 63911 - DNA, 20 bp, Artificial Sequence
  Description of Artificial Sequence: Synthetic oligonucleotide
  Target: LAMA2; (-) strand; PAM type: NRG; PAM sequence: GGG
ctgccactgcactccagcct

SEQ ID NO: 63912 - DNA, 20 bp, Artificial Sequence
  Description of Artificial Sequence: Synthetic oligonucleotide
  Target: LAMA2; (-) strand; PAM type: NRG; PAM sequence: TGG
cctgccactgcactccagcc

SEQ ID NO: 63913 - DNA, 20 bp, Artificial Sequence
  Description of Artificial Sequence: Synthetic oligonucleotide
  Target: LAMA2; (-) strand; PAM type: NRG; PAM sequence: CAG
gagatcctgccactgcactc

SEQ ID NO: 63914 - DNA, 20 bp, Artificial Sequence
  Description of Artificial Sequence: Synthetic oligonucleotide
  Target: LAMA2; (-) strand; PAM type: NRG; PAM sequence: GAG
gcaagagtttacagtgagct

SEQ ID NO: 63915 - DNA, 20 bp, Artificial Sequence
  Description of Artificial Sequence: Synthetic oligonucleotide
  Target: LAMA2; (-) strand; PAM type: NRG; PAM sequence: GAG
gggaagcaagagtttacagt

SEQ ID NO: 63916 - DNA, 20 bp, Artificial Sequence
  Description of Artificial Sequence: Synthetic oligonucleotide
  Target: LAMA2; (-) strand; PAM type: NRG; PAM sequence: CAG
acctgggaagcaagagttta

SEQ ID NO: 63917 - DNA, 20 bp, Artificial Sequence
  Description of Artificial Sequence: Synthetic oligonucleotide
  Target: LAMA2; (-) strand; PAM type: NRG; PAM sequence: GAG
cacttgaacctgggaagcaa

SEQ ID NO: 63918 - DNA, 20 bp, Artificial Sequence
  Description of Artificial Sequence: Synthetic oligonucleotide
  Target: LAMA2; (-) strand; PAM type: NRG; PAM sequence: AAG
ctcacttgaacctgggaagc

SEQ ID NO: 63919 - DNA, 20 bp, Artificial Sequence
  Description of Artificial Sequence: Synthetic oligonucleotide
  Target: LAMA2; (-) strand; PAM type: NRG; PAM sequence: AAG
aagactcacttgaacctggg

SEQ ID NO: 63920 - DNA, 20 bp, Artificial Sequence
  Description of Artificial Sequence: Synthetic oligonucleotide
  Target: LAMA2; (-) strand; PAM type: NRG; PAM sequence: GGG
cagaagactcacttgaacct

SEQ ID NO: 63921 - DNA, 20 bp, Artificial Sequence
  Description of Artificial Sequence: Synthetic oligonucleotide
  Target: LAMA2; (-) strand; PAM type: NRG; PAM sequence: TGG
gcagaagactcacttgaacc

SEQ ID NO: 63922 - DNA, 20 bp, Artificial Sequence
  Description of Artificial Sequence: Synthetic oligonucleotide
  Target: LAMA2; (-) strand; PAM type: NRG; PAM sequence: AAG
tactagggaggctgaagcag

SEQ ID NO: 63923 - DNA, 20 bp, Artificial Sequence
  Description of Artificial Sequence: Synthetic oligonucleotide
  Target: LAMA2; (-) strand; PAM type: NRG; PAM sequence: CAG
agctactagggaggctgaag

SEQ ID NO: 63924 - DNA, 20 bp, Artificial Sequence
  Description of Artificial Sequence: Synthetic oligonucleotide
  Target: LAMA2; (-) strand; PAM type: NRG; PAM sequence: AAG
cttagctactagggaggctg

SEQ ID NO: 63925 - DNA, 20 bp, Artificial Sequence
  Description of Artificial Sequence: Synthetic oligonucleotide
  Target: LAMA2; (-) strand; PAM type: NRG; PAM sequence: AGG
tgtagtcttagctactaggg

SEQ ID NO: 63926 - DNA, 20 bp, Artificial Sequence
  Description of Artificial Sequence: Synthetic oligonucleotide
  Target: LAMA2; (-) strand; PAM type: NRG; PAM sequence: GAG
ctgtagtcttagctactagg

SEQ ID NO: 63927 - DNA, 20 bp, Artificial Sequence
  Description of Artificial Sequence: Synthetic oligonucleotide
  Target: LAMA2; (-) strand; PAM type: NRG; PAM sequence: GGG
gcctgtagtcttagctacta

SEQ ID NO: 63928 - DNA, 20 bp, Artificial Sequence
  Description of Artificial Sequence: Synthetic oligonucleotide
  Target: LAMA2; (-) strand; PAM type: NRG; PAM sequence: AGG
cgcctgtagtcttagctact

SEQ ID NO: 63929 - DNA, 20 bp, Artificial Sequence
  Description of Artificial Sequence: Synthetic oligonucleotide
  Target: LAMA2; (-) strand; PAM type: NRG; PAM sequence: TAG
acgcctgtagtcttagctac

SEQ ID NO: 63930 - DNA, 20 bp, Artificial Sequence
  Description of Artificial Sequence: Synthetic oligonucleotide
  Target: LAMA2; (-) strand; PAM type: NRG; PAM sequence: TAG
ggggcacacgcctgtagtct

SEQ ID NO: 63931 - DNA, 20 bp, Artificial Sequence
  Description of Artificial Sequence: Synthetic oligonucleotide
  Target: LAMA2; (-) strand; PAM type: NRG; PAM sequence: TAG
aggtgtggggcacacgcctg

SEQ ID NO: 63932 - DNA, 20 bp, Artificial Sequence
  Description of Artificial Sequence: Synthetic oligonucleotide
  Target: LAMA2; (-) strand; PAM type: NRG; PAM sequence: GGG
aaaaagaaaagccaggtgtg

SEQ ID NO: 63933 - DNA, 20 bp, Artificial Sequence
  Description of Artificial Sequence: Synthetic oligonucleotide
  Target: LAMA2; (-) strand; PAM type: NRG; PAM sequence: GGG
aaaaaagaaaagccaggtgt

SEQ ID NO: 63934 - DNA, 20 bp, Artificial Sequence
  Description of Artificial Sequence: Synthetic oligonucleotide
  Target: LAMA2; (-) strand; PAM type: NRG; PAM sequence: TGG
aaaaaaagaaaagccaggtg

SEQ ID NO: 63935 - DNA, 20 bp, Artificial Sequence
  Description of Artificial Sequence: Synthetic oligonucleotide
  Target: LAMA2; (-) strand; PAM type: NRG; PAM sequence: AGG
atgcgaaaaaaagaaaagcc

SEQ ID NO: 63936 - DNA, 20 bp, Artificial Sequence
  Description of Artificial Sequence: Synthetic oligonucleotide
  Target: LAMA2; (-) strand; PAM type: NRG; PAM sequence: CAG
aatgcgaaaaaaagaaaagc

SEQ ID NO: 63937 - DNA, 20 bp, Artificial Sequence
  Description of Artificial Sequence: Synthetic oligonucleotide
  Target: LAMA2; (-) strand; PAM type: NRG; PAM sequence: AAG
caaaaatgcgaaaaaaagaa

SEQ ID NO: 63938 - DNA, 20 bp, Artificial Sequence
  Description of Artificial Sequence: Synthetic oligonucleotide
  Target: LAMA2; (-) strand; PAM type: NRG; PAM sequence: AAG
tctaccaaaaatgcgaaaaa

SEQ ID NO: 63939 - DNA, 20 bp, Artificial Sequence
  Description of Artificial Sequence: Synthetic oligonucleotide
  Target: LAMA2; (-) strand; PAM type: NRG; PAM sequence: TGG
tgagaccagcctcgccaaaa

SEQ ID NO: 63940 - DNA, 20 bp, Artificial Sequence
  Description of Artificial Sequence: Synthetic oligonucleotide
  Target: LAMA2; (-) strand; PAM type: NRG; PAM sequence: CAG
caaggtcaggactttgagac

SEQ ID NO: 63941 - DNA, 20 bp, Artificial Sequence
  Description of Artificial Sequence: Synthetic oligonucleotide
  Target: LAMA2; (-) strand; PAM type: NRG; PAM sequence: GAG
gatcccaaggtcaggacttt

SEQ ID NO: 63942 - DNA, 20 bp, Artificial Sequence
  Description of Artificial Sequence: Synthetic oligonucleotide
  Target: LAMA2; (-) strand; PAM type: NRG; PAM sequence: AGG
ggcggttggatcccaaggtc

SEQ ID NO: 63943 - DNA, 20 bp, Artificial Sequence
  Description of Artificial Sequence: Synthetic oligonucleotide
  Target: LAMA2; (-) strand; PAM type: NRG; PAM sequence: CAG
aggcggttggatcccaaggt

SEQ ID NO: 63944 - DNA, 20 bp, Artificial Sequence
  Description of Artificial Sequence: Synthetic oligonucleotide
  Target: LAMA2; (-) strand; PAM type: NRG; PAM sequence: AGG
gccgaggcggttggatccca

SEQ ID NO: 63945 - DNA, 20 bp, Artificial Sequence
  Description of Artificial Sequence: Synthetic oligonucleotide
  Target: LAMA2; (-) strand; PAM type: NRG; PAM sequence: AAG
ggccgaggcggttggatccc

SEQ ID NO: 63946 - DNA, 20 bp, Artificial Sequence
  Description of Artificial Sequence: Synthetic oligonucleotide
  Target: LAMA2; (-) strand; PAM type: NRG; PAM sequence: TGG
gtttgggaggccgaggcggt

SEQ ID NO: 63947 - DNA, 20 bp, Artificial Sequence
  Description of Artificial Sequence: Synthetic oligonucleotide
  Target: LAMA2; (-) strand; PAM type: NRG; PAM sequence: CGG
agcagtttgggaggccgagg

SEQ ID NO: 63948 - DNA, 20 bp, Artificial Sequence
  Description of Artificial Sequence: Synthetic oligonucleotide
  Target: LAMA2; (-) strand; PAM type: NRG; PAM sequence: AGG
cccagcagtttgggaggccg

SEQ ID NO: 63949 - DNA, 20 bp, Artificial Sequence
  Description of Artificial Sequence: Synthetic oligonucleotide
  Target: LAMA2; (-) strand; PAM type: NRG; PAM sequence: GAG
tcccagcagtttgggaggcc

SEQ ID NO: 63950 - DNA, 20 bp, Artificial Sequence
  Description of Artificial Sequence: Synthetic oligonucleotide
  Target: LAMA2; (-) strand; PAM type: NRG; PAM sequence: AGG
tgtaatcccagcagtttggg

SEQ ID NO: 63951 - DNA, 20 bp, Artificial Sequence
  Description of Artificial Sequence: Synthetic oligonucleotide
  Target: LAMA2; (-) strand; PAM type: NRG; PAM sequence: GAG
ctgtaatcccagcagtttgg

SEQ ID NO: 63952 - DNA, 20 bp, Artificial Sequence
  Description of Artificial Sequence: Synthetic oligonucleotide
  Target: LAMA2; (-) strand; PAM type: NRG; PAM sequence: GGG
aactgtaatcccagcagttt

SEQ ID NO: 63953 - DNA, 20 bp, Artificial Sequence
  Description of Artificial Sequence: Synthetic oligonucleotide
  Target: LAMA2; (-) strand; PAM type: NRG; PAM sequence: TGG
caactgtaatcccagcagtt

SEQ ID NO: 63954 - DNA, 20 bp, Artificial Sequence
  Description of Artificial Sequence: Synthetic oligonucleotide
  Target: LAMA2; (-) strand; PAM type: NRG; PAM sequence: CAG
gctcacaactgtaatcccag

SEQ ID NO: 63955 - DNA, 20 bp, Artificial Sequence
  Description of Artificial Sequence: Synthetic oligonucleotide
  Target: LAMA2; (-) strand; PAM type: NRG; PAM sequence: CAG
gtagctcacaactgtaatcc

SEQ ID NO: 63956 - DNA, 20 bp, Artificial Sequence
  Description of Artificial Sequence: Synthetic oligonucleotide
  Target: LAMA2; (-) strand; PAM type: NRG; PAM sequence: TAG
tctatcctggcagggcacgg

SEQ ID NO: 63957 - DNA, 20 bp, Artificial Sequence
  Description of Artificial Sequence: Synthetic oligonucleotide
  Target: LAMA2; (-) strand; PAM type: NRG; PAM sequence: CGG
aaatctatcctggcagggca

SEQ ID NO: 63958 - DNA, 20 bp, Artificial Sequence
  Description of Artificial Sequence: Synthetic oligonucleotide
  Target: LAMA2; (-) strand; PAM type: NRG; PAM sequence: GGG
tttagaaatctatcctggca

SEQ ID NO: 63959 - DNA, 20 bp, Artificial Sequence
  Description of Artificial Sequence: Synthetic oligonucleotide
  Target: LAMA2; (-) strand; PAM type: NRG; PAM sequence: AGG
ttttagaaatctatcctggc

SEQ ID NO: 63960 - DNA, 20 bp, Artificial Sequence
  Description of Artificial Sequence: Synthetic oligonucleotide
  Target: LAMA2; (-) strand; PAM type: NRG; PAM sequence: CAG
cttttagaaatctatcctgg

SEQ ID NO: 63961 - DNA, 20 bp, Artificial Sequence
  Description of Artificial Sequence: Synthetic oligonucleotide
  Target: LAMA2; (-) strand; PAM type: NRG; PAM sequence: TGG
acacttttagaaatctatcc

SEQ ID NO: 63962 - DNA, 20 bp, Artificial Sequence
  Description of Artificial Sequence: Synthetic oligonucleotide
  Target: LAMA2; (-) strand; PAM type: NRG; PAM sequence: TAG
tgactgagtaatcacacttt

SEQ ID NO: 63963 - DNA, 20 bp, Artificial Sequence
  Description of Artificial Sequence: Synthetic oligonucleotide
  Target: LAMA2; (-) strand; PAM type: NRG; PAM sequence: GAG
tctacttttaccttttgact

SEQ ID NO: 63964 - DNA, 20 bp, Artificial Sequence
  Description of Artificial Sequence: Synthetic oligonucleotide
  Target: LAMA2; (-) strand; PAM type: NRG; PAM sequence: AAG
aaatggcattactcccaaag

SEQ ID NO: 63965 - DNA, 20 bp, Artificial Sequence
  Description of Artificial Sequence: Synthetic oligonucleotide
  Target: LAMA2; (-) strand; PAM type: NRG; PAM sequence: AAG
ggaaaatggcattactccca

SEQ ID NO: 63966 - DNA, 20 bp, Artificial Sequence
  Description of Artificial Sequence: Synthetic oligonucleotide
  Target: LAMA2; (-) strand; PAM type: NRG; PAM sequence: TGG
ctgatcttaggattggaaaa

SEQ ID NO: 63967 - DNA, 20 bp, Artificial Sequence
  Description of Artificial Sequence: Synthetic oligonucleotide
  Target: LAMA2; (-) strand; PAM type: NRG; PAM sequence: TGG
tcacatgctgatcttaggat

SEQ ID NO: 63968 - DNA, 20 bp, Artificial Sequence
  Description of Artificial Sequence: Synthetic oligonucleotide
  Target: LAMA2; (-) strand; PAM type: NRG; PAM sequence: AGG
cattctcacatgctgatctt

SEQ ID NO: 63969 - DNA, 20 bp, Artificial Sequence
  Description of Artificial Sequence: Synthetic oligonucleotide
  Target: LAMA2; (-) strand; PAM type: NRG; PAM sequence: TAG
acattctcacatgctgatct

SEQ ID NO: 63970 - DNA, 20 bp, Artificial Sequence
  Description of Artificial Sequence: Synthetic oligonucleotide
  Target: LAMA2; (-) strand; PAM type: NRG; PAM sequence: CAG
tgttggagaacctatggaaa

SEQ ID NO: 63971 - DNA, 20 bp, Artificial Sequence
  Description of Artificial Sequence: Synthetic oligonucleotide
  Target: LAMA2; (-) strand; PAM type: NRG; PAM sequence: TGG
ataatttgttggagaaccta

SEQ ID NO: 63972 - DNA, 20 bp, Artificial Sequence
  Description of Artificial Sequence: Synthetic oligonucleotide
  Target: LAMA2; (-) strand; PAM type: NRG; PAM sequence: GAG
tttggcaatataatttgttg

SEQ ID NO: 63973 - DNA, 20 bp, Artificial Sequence
  Description of Artificial Sequence: Synthetic oligonucleotide
  Target: LAMA2; (-) strand; PAM type: NRG; PAM sequence: TGG
agtttggcaatataatttgt

SEQ ID NO: 63974 - DNA, 20 bp, Artificial Sequence
  Description of Artificial Sequence: Synthetic oligonucleotide
  Target: LAMA2; (-) strand; PAM type: NRG; PAM sequence: TGG
aagctttggaacataaagtt

SEQ ID NO: 63975 - DNA, 20 bp, Artificial Sequence
  Description of Artificial Sequence: Synthetic oligonucleotide
  Target: LAMA2; (-) strand; PAM type: NRG; PAM sequence: AAG
ccacaaagctttggaacata

SEQ ID NO: 63976 - DNA, 20 bp, Artificial Sequence
  Description of Artificial Sequence: Synthetic oligonucleotide
  Target: LAMA2; (-) strand; PAM type: NRG; PAM sequence: TGG
gacatatccccacaaagctt

SEQ ID NO: 63977 - DNA, 20 bp, Artificial Sequence
  Description of Artificial Sequence: Synthetic oligonucleotide
  Target: LAMA2; (-) strand; PAM type: NRG; PAM sequence: AAG
ctaccagacatatccccaca

SEQ ID NO: 63978 - DNA, 20 bp, Artificial Sequence
  Description of Artificial Sequence: Synthetic oligonucleotide
  Target: LAMA2; (-) strand; PAM type: NRG; PAM sequence: CAG
tctctgccccaatcaactac

SEQ ID NO: 63979 - DNA, 20 bp, Artificial Sequence
  Description of Artificial Sequence: Synthetic oligonucleotide
  Target: LAMA2; (-) strand; PAM type: NRG; PAM sequence: AAG
aagactcttttcttcatact

SEQ ID NO: 63980 - DNA, 20 bp, Artificial Sequence
  Description of Artificial Sequence: Synthetic oligonucleotide
  Target: LAMA2; (-) strand; PAM type: NRG; PAM sequence: AAG
tgtgtcttaatttcaagcct

SEQ ID NO: 63981 - DNA, 20 bp, Artificial Sequence
  Description of Artificial Sequence: Synthetic oligonucleotide
  Target: LAMA2; (-) strand; PAM type: NRG; PAM sequence: AAG
taaacctgtgtcttaatttc

SEQ ID NO: 63982 - DNA, 20 bp, Artificial Sequence
  Description of Artificial Sequence: Synthetic oligonucleotide
  Target: LAMA2; (-) strand; PAM type: NRG; PAM sequence: AAG
acaagtgatcagcaatggtc

SEQ ID NO: 63983 - DNA, 20 bp, Artificial Sequence
  Description of Artificial Sequence: Synthetic oligonucleotide
  Target: LAMA2; (-) strand; PAM type: NRG; PAM sequence: TGG
gtgaaacaagtgatcagcaa

SEQ ID NO: 63984 - DNA, 20 bp, Artificial Sequence
  Description of Artificial Sequence: Synthetic oligonucleotide
  Target: LAMA2; (-) strand; PAM type: NRG; PAM sequence: CAG
tctaaggtgaaacaagtgat

SEQ ID NO: 63985 - DNA, 20 bp, Artificial Sequence
  Description of Artificial Sequence: Synthetic oligonucleotide
  Target: LAMA2; (-) strand; PAM type: NRG; PAM sequence: AAG
tgacttgtctaaggtgaaac

SEQ ID NO: 63986 - DNA, 20 bp, Artificial Sequence
  Description of Artificial Sequence: Synthetic oligonucleotide
  Target: LAMA2; (-) strand; PAM type: NRG; PAM sequence: AGG
aaagttggctgacttgtcta

SEQ ID NO: 63987 - DNA, 20 bp, Artificial Sequence
  Description of Artificial Sequence: Synthetic oligonucleotide
  Target: LAMA2; (-) strand; PAM type: NRG; PAM sequence: AAG
aaaagttggctgacttgtct

SEQ ID NO: 63988 - DNA, 20 bp, Artificial Sequence
  Description of Artificial Sequence: Synthetic oligonucleotide
  Target: LAMA2; (-) strand; PAM type: NRG; PAM sequence: TGG
gtggagcagatgaaaaaagt

SEQ ID NO: 63989 - DNA, 20 bp, Artificial Sequence
  Description of Artificial Sequence: Synthetic oligonucleotide
  Target: LAMA2; (-) strand; PAM type: NRG; PAM sequence: AAG
atctgtggagcagatgaaaa

SEQ ID NO: 63990 - DNA, 20 bp, Artificial Sequence
  Description of Artificial Sequence: Synthetic oligonucleotide
  Target: LAMA2; (-) strand; PAM type: NRG; PAM sequence: CAG
cttaccacagatctgtggag

SEQ ID NO: 63991 - DNA, 20 bp, Artificial Sequence
  Description of Artificial Sequence: Synthetic oligonucleotide
  Target: LAMA2; (-) strand; PAM type: NRG; PAM sequence: GAG
atccttaccacagatctgtg

SEQ ID NO: 63992 - DNA, 20 bp, Artificial Sequence
  Description of Artificial Sequence: Synthetic oligonucleotide
  Target: LAMA2; (-) strand; PAM type: NRG; PAM sequence: TGG
taatccttaccacagatctg

SEQ ID NO: 63993 - DNA, 20 bp, Artificial Sequence
  Description of Artificial Sequence: Synthetic oligonucleotide
  Target: LAMA2; (-) strand; PAM type: NRG; PAM sequence: CAG
atctcatttaatccttacca

SEQ ID NO: 63994 - DNA, 20 bp, Artificial Sequence
  Description of Artificial Sequence: Synthetic oligonucleotide
  Target: LAMA2; (-) strand; PAM type: NRG; PAM sequence: TGG
gtattctgtcatatgtttca

SEQ ID NO: 63995 - DNA, 20 bp, Artificial Sequence
  Description of Artificial Sequence: Synthetic oligonucleotide
  Target: LAMA2; (-) strand; PAM type: NRG; PAM sequence: AGG
gctgagtagccactatggca

SEQ ID NO: 63996 - DNA, 20 bp, Artificial Sequence
  Description of Artificial Sequence: Synthetic oligonucleotide
  Target: LAMA2; (-) strand; PAM type: NRG; PAM sequence: AAG
tgctgagtagccactatggc

SEQ ID NO: 63997 - DNA, 20 bp, Artificial Sequence
  Description of Artificial Sequence: Synthetic oligonucleotide
  Target: LAMA2; (-) strand; PAM type: NRG; PAM sequence: TGG
tacatgctgagtagccacta

SEQ ID NO: 63998 - DNA, 20 bp, Artificial Sequence
  Description of Artificial Sequence: Synthetic oligonucleotide
  Target: LAMA2; (-) strand; PAM type: NRG; PAM sequence: TAG
caaaaaacttacatgctgag

SEQ ID NO: 63999 - DNA, 20 bp, Artificial Sequence
  Description of Artificial Sequence: Synthetic oligonucleotide
  Target: LAMA2; (-) strand; PAM type: NRG; PAM sequence: GAG
aaacaaaaaacttacatgct

SEQ ID NO: 64000 - DNA, 20 bp, Artificial Sequence
  Description of Artificial Sequence: Synthetic oligonucleotide
  Target: LAMA2; (-) strand; PAM type: NRG; PAM sequence: AAG
cagagggagactctgtctca

SEQ ID NO: 64001 - DNA, 20 bp, Artificial Sequence
  Description of Artificial Sequence: Synthetic oligonucleotide
  Target: LAMA2; (-) strand; PAM type: NRG; PAM sequence: GAG
ctccagcctggtgacagagg

SEQ ID NO: 64002 - DNA, 20 bp, Artificial Sequence
  Description of Artificial Sequence: Synthetic oligonucleotide
  Target: LAMA2; (-) strand; PAM type: NRG; PAM sequence: GGG
cactccagcctggtgacaga

SEQ ID NO: 64003 - DNA, 20 bp, Artificial Sequence
  Description of Artificial Sequence: Synthetic oligonucleotide
  Target: LAMA2; (-) strand; PAM type: NRG; PAM sequence: AGG
gcactccagcctggtgacag

SEQ ID NO: 64004 - DNA, 20 bp, Artificial Sequence
  Description of Artificial Sequence: Synthetic oligonucleotide
  Target: LAMA2; (-) strand; PAM type: NRG; PAM sequence: GAG
tgcactccagcctggtgaca

SEQ ID NO: 64005 - DNA, 20 bp, Artificial Sequence
  Description of Artificial Sequence: Synthetic oligonucleotide
  Target: LAMA2; (-) strand; PAM type: NRG; PAM sequence: CAG
actgcactccagcctggtga

SEQ ID NO: 64006 - DNA, 20 bp, Artificial Sequence
  Description of Artificial Sequence: Synthetic oligonucleotide
  Target: LAMA2; (-) strand; PAM type: NRG; PAM sequence: TGG
ctcgccactgcactccagcc

SEQ ID NO: 64007 - DNA, 20 bp, Artificial Sequence
  Description of Artificial Sequence: Synthetic oligonucleotide
  Target: LAMA2; (-) strand; PAM type: NRG; PAM sequence: CAG
gagatctcgccactgcactc

SEQ ID NO: 64008 - DNA, 20 bp, Artificial Sequence
  Description of Artificial Sequence: Synthetic oligonucleotide
  Target: LAMA2; (-) strand; PAM type: NRG; PAM sequence: GAG
ggcagaggttgcagtgagca

SEQ ID NO: 64009 - DNA, 20 bp, Artificial Sequence
  Description of Artificial Sequence: Synthetic oligonucleotide
  Target: LAMA2; (-) strand; PAM type: NRG; PAM sequence: CAG
caggcagaggttgcagtgag

SEQ ID NO: 64010 - DNA, 20 bp, Artificial Sequence
  Description of Artificial Sequence: Synthetic oligonucleotide
  Target: LAMA2; (-) strand; PAM type: NRG; PAM sequence: GAG
cagcaggcagaggttgcagt

SEQ ID NO: 64011 - DNA, 20 bp, Artificial Sequence
  Description of Artificial Sequence: Synthetic oligonucleotide
  Target: LAMA2; (-) strand; PAM type: NRG; PAM sequence: CAG
aatccagcaggcagaggttg

SEQ ID NO: 64012 - DNA, 20 bp, Artificial Sequence
  Description of Artificial Sequence: Synthetic oligonucleotide
  Target: LAMA2; (-) strand; PAM type: NRG; PAM sequence: AGG
cacttgaatccagcaggcag

SEQ ID NO: 64013 - DNA, 20 bp, Artificial Sequence
  Description of Artificial Sequence: Synthetic oligonucleotide
  Target: LAMA2; (-) strand; PAM type: NRG; PAM sequence: GAG
tcacttgaatccagcaggca

SEQ ID NO: 64014 - DNA, 20 bp, Artificial Sequence
  Description of Artificial Sequence: Synthetic oligonucleotide
  Target: LAMA2; (-) strand; PAM type: NRG; PAM sequence: CAG
aatcacttgaatccagcagg

SEQ ID NO: 64015 - DNA, 20 bp, Artificial Sequence
  Description of Artificial Sequence: Synthetic oligonucleotide
  Target: LAMA2; (-) strand; PAM type: NRG; PAM sequence: AGG
gagaatcacttgaatccagc

SEQ ID NO: 64016 - DNA, 20 bp, Artificial Sequence
  Description of Artificial Sequence: Synthetic oligonucleotide
  Target: LAMA2; (-) strand; PAM type: NRG; PAM sequence: CAG
ggagaatcacttgaatccag

SEQ ID NO: 64017 - DNA, 20 bp, Artificial Sequence
  Description of Artificial Sequence: Synthetic oligonucleotide
  Target: LAMA2; (-) strand; PAM type: NRG; PAM sequence: CAG
ggaggagaatcacttgaatc

SEQ ID NO: 64018 - DNA, 20 bp, Artificial Sequence
  Description of Artificial Sequence: Synthetic oligonucleotide
  Target: LAMA2; (-) strand; PAM type: NRG; PAM sequence: GAG
taatcccagctatttgggag

SEQ ID NO: 64019 - DNA, 20 bp, Artificial Sequence
  Description of Artificial Sequence: Synthetic oligonucleotide
  Target: LAMA2; (-) strand; PAM type: NRG; PAM sequence: AGG
tgtaatcccagctatttggg

SEQ ID NO: 64020 - DNA, 20 bp, Artificial Sequence
  Description of Artificial Sequence: Synthetic oligonucleotide
  Target: LAMA2; (-) strand; PAM type: NRG; PAM sequence: GAG
ctgtaatcccagctatttgg

SEQ ID NO: 64021 - DNA, 20 bp, Artificial Sequence
  Description of Artificial Sequence: Synthetic oligonucleotide
  Target: LAMA2; (-) strand; PAM type: NRG; PAM sequence: GGG
gcctgtaatcccagctattt

SEQ ID NO: 64022 - DNA, 20 bp, Artificial Sequence
  Description of Artificial Sequence: Synthetic oligonucleotide
  Target: LAMA2; (-) strand; PAM type: NRG; PAM sequence: TGG
tgcctgtaatcccagctatt

SEQ ID NO: 64023 - DNA, 20 bp, Artificial Sequence
  Description of Artificial Sequence: Synthetic oligonucleotide
  Target: LAMA2; (-) strand; PAM type: NRG; PAM sequence: CAG
gtgccggatgcctgtaatcc

SEQ ID NO: 64024 - DNA, 20 bp, Artificial Sequence
  Description of Artificial Sequence: Synthetic oligonucleotide
  Target: LAMA2; (-) strand; PAM type: NRG; PAM sequence: CGG
aaattagctgggcctggtgc

SEQ ID NO: 64025 - DNA, 20 bp, Artificial Sequence
  Description of Artificial Sequence: Synthetic oligonucleotide
  Target: LAMA2; (-) strand; PAM type: NRG; PAM sequence: TGG
tacaaaaaattagctgggcc

SEQ ID NO: 64026 - DNA, 20 bp, Artificial Sequence
  Description of Artificial Sequence: Synthetic oligonucleotide
  Target: LAMA2; (-) strand; PAM type: NRG; PAM sequence: GGG
aaaaatacaaaaaattagct

SEQ ID NO: 64027 - DNA, 20 bp, Artificial Sequence
  Description of Artificial Sequence: Synthetic oligonucleotide
  Target: LAMA2; (-) strand; PAM type: NRG; PAM sequence: TGG
taaaaatacaaaaaattagc

SEQ ID NO: 64028 - DNA, 20 bp, Artificial Sequence
  Description of Artificial Sequence: Synthetic oligonucleotide
  Target: LAMA2; (-) strand; PAM type: NRG; PAM sequence: TAG
ctactaaaaatacaaaaaat

SEQ ID NO: 64029 - DNA, 20 bp, Artificial Sequence
  Description of Artificial Sequence: Synthetic oligonucleotide
  Target: LAMA2; (-) strand; PAM type: NRG; PAM sequence: TGG
cgagaccagcctggccaaca

SEQ ID NO: 64030 - DNA, 20 bp, Artificial Sequence
  Description of Artificial Sequence: Synthetic oligonucleotide
  Target: LAMA2; (-) strand; PAM type: NRG; PAM sequence: TGG
tcaggagttcgagaccagcc

SEQ ID NO: 64031 - DNA, 20 bp, Artificial Sequence
  Description of Artificial Sequence: Synthetic oligonucleotide
  Target: LAMA2; (-) strand; PAM type: NRG; PAM sequence: CAG
cgaggtcaggagttcgagac

SEQ ID NO: 64032 - DNA, 20 bp, Artificial Sequence
  Description of Artificial Sequence: Synthetic oligonucleotide
  Target: LAMA2; (-) strand; PAM type: NRG; PAM sequence: GAG
ttacccgaggtcaggagttc

SEQ ID NO: 64033 - DNA, 20 bp, Artificial Sequence
  Description of Artificial Sequence: Synthetic oligonucleotide
  Target: LAMA2; (-) strand; PAM type: NRG; PAM sequence: GAG
agcagattacccgaggtcag

SEQ ID NO: 64034 - DNA, 20 bp, Artificial Sequence
  Description of Artificial Sequence: Synthetic oligonucleotide
  Target: LAMA2; (-) strand; PAM type: NRG; PAM sequence: AGG
cgagcagattacccgaggtc

SEQ ID NO: 64035 - DNA, 20 bp, Artificial Sequence
  Description of Artificial Sequence: Synthetic oligonucleotide
  Target: LAMA2; (-) strand; PAM type: NRG; PAM sequence: CAG
acgagcagattacccgaggt

SEQ ID NO: 64036 - DNA, 20 bp, Artificial Sequence
  Description of Artificial Sequence: Synthetic oligonucleotide
  Target: LAMA2; (-) strand; PAM type: NRG; PAM sequence: AGG
caagacgagcagattacccg

SEQ ID NO: 64037 - DNA, 20 bp, Artificial Sequence
  Description of Artificial Sequence: Synthetic oligonucleotide
  Target: LAMA2; (-) strand; PAM type: NRG; PAM sequence: GAG
ccaagacgagcagattaccc

SEQ ID NO: 64038 - DNA, 20 bp, Artificial Sequence
  Description of Artificial Sequence: Synthetic oligonucleotide
  Target: LAMA2; (-) strand; PAM type: NRG; PAM sequence: CAG
ctttgggaggccaagacgag

SEQ ID NO: 64039 - DNA, 20 bp, Artificial Sequence
  Description of Artificial Sequence: Synthetic oligonucleotide
  Target: LAMA2; (-) strand; PAM type: NRG; PAM sequence: GAG
gcactttgggaggccaagac

SEQ ID NO: 64040 - DNA, 20 bp, Artificial Sequence
  Description of Artificial Sequence: Synthetic oligonucleotide
  Target: LAMA2; (-) strand; PAM type: NRG; PAM sequence: AAG
tcccagcactttgggaggcc

SEQ ID NO: 64041 - DNA, 20 bp, Artificial Sequence
  Description of Artificial Sequence: Synthetic oligonucleotide
  Target: LAMA2; (-) strand; PAM type: NRG; PAM sequence: AGG
tataatcccagcactttggg

SEQ ID NO: 64042 - DNA, 20 bp, Artificial Sequence
  Description of Artificial Sequence: Synthetic oligonucleotide
  Target: LAMA2; (-) strand; PAM type: NRG; PAM sequence: GAG
ctataatcccagcactttgg

SEQ ID NO: 64043 - DNA, 20 bp, Artificial Sequence
  Description of Artificial Sequence: Synthetic oligonucleotide
  Target: LAMA2; (-) strand; PAM type: NRG; PAM sequence: GGG
gcctataatcccagcacttt

SEQ ID NO: 64044 - DNA, 20 bp, Artificial Sequence
  Description of Artificial Sequence: Synthetic oligonucleotide
  Target: LAMA2; (-) strand; PAM type: NRG; PAM sequence: TGG
tgcctataatcccagcactt

SEQ ID NO: 64045 - DNA, 20 bp, Artificial Sequence
  Description of Artificial Sequence: Synthetic oligonucleotide
  Target: LAMA2; (-) strand; PAM type: NRG; PAM sequence: CAG
gtggttcatgcctataatcc

SEQ ID NO: 64046 - DNA, 20 bp, Artificial Sequence
  Description of Artificial Sequence: Synthetic oligonucleotide
  Target: LAMA2; (-) strand; PAM type: NRG; PAM sequence: TGG
acatgctaggccgggcacag

SEQ ID NO: 64047 - DNA, 20 bp, Artificial Sequence
  Description of Artificial Sequence: Synthetic oligonucleotide
  Target: LAMA2; (-) strand; PAM type: NRG; PAM sequence: CAG
actacatgctaggccgggca

SEQ ID NO: 64048 - DNA, 20 bp, Artificial Sequence
  Description of Artificial Sequence: Synthetic oligonucleotide
  Target: LAMA2; (-) strand; PAM type: NRG; PAM sequence: GGG
taaaaactacatgctaggcc

SEQ ID NO: 64049 - DNA, 20 bp, Artificial Sequence
  Description of Artificial Sequence: Synthetic oligonucleotide
  Target: LAMA2; (-) strand; PAM type: NRG; PAM sequence: CGG
ttaaaaactacatgctaggc

SEQ ID NO: 64050 - DNA, 20 bp, Artificial Sequence
  Description of Artificial Sequence: Synthetic oligonucleotide
  Target: LAMA2; (-) strand; PAM type: NRG; PAM sequence: AGG
ccttttaaaaactacatgct

SEQ ID NO: 64051 - DNA, 20 bp, Artificial Sequence
  Description of Artificial Sequence: Synthetic oligonucleotide
  Target: LAMA2; (-) strand; PAM type: NRG; PAM sequence: TAG
gccttttaaaaactacatgc

SEQ ID NO: 64052 - DNA, 20 bp, Artificial Sequence
  Description of Artificial Sequence: Synthetic oligonucleotide
  Target: LAMA2; (-) strand; PAM type: NRG; PAM sequence: TAG
ttctcgtcaaataacttttg

SEQ ID NO: 64053 - DNA, 20 bp, Artificial Sequence
  Description of Artificial Sequence: Synthetic oligonucleotide
  Target: LAMA2; (-) strand; PAM type: NRG; PAM sequence: GAG
ctaaaattaccagtccataa

SEQ ID NO: 64054 - DNA, 20 bp, Artificial Sequence
  Description of Artificial Sequence: Synthetic oligonucleotide
  Target: LAMA2; (-) strand; PAM type: NRG; PAM sequence: AAG
tcctaaaattaccagtccat

SEQ ID NO: 64055 - DNA, 20 bp, Artificial Sequence
  Description of Artificial Sequence: Synthetic oligonucleotide
  Target: LAMA2; (-) strand; PAM type: NRG; PAM sequence: CAG
gtagacaatcctaaaattac

SEQ ID NO: 64056 - DNA, 20 bp, Artificial Sequence
  Description of Artificial Sequence: Synthetic oligonucleotide
  Target: LAMA2; (-) strand; PAM type: NRG; PAM sequence: TAG
gatatttagttaacatcaag

SEQ ID NO: 64057 - DNA, 20 bp, Artificial Sequence
  Description of Artificial Sequence: Synthetic oligonucleotide
  Target: LAMA2; (-) strand; PAM type: NRG; PAM sequence: AAG
aaggatatttagttaacatc

SEQ ID NO: 64058 - DNA, 20 bp, Artificial Sequence
  Description of Artificial Sequence: Synthetic oligonucleotide
  Target: LAMA2; (-) strand; PAM type: NRG; PAM sequence: TAG
ttggcattaggaaggatatt

SEQ ID NO: 64059 - DNA, 20 bp, Artificial Sequence
  Description of Artificial Sequence: Synthetic oligonucleotide
  Target: LAMA2; (-) strand; PAM type: NRG; PAM sequence: AGG
gtgttggtttggcattagga

SEQ ID NO: 64060 - DNA, 20 bp, Artificial Sequence
  Description of Artificial Sequence: Synthetic oligonucleotide
  Target: LAMA2; (-) strand; PAM type: NRG; PAM sequence: AAG
tgtgttggtttggcattagg

SEQ ID NO: 64061 - DNA, 20 bp, Artificial Sequence
  Description of Artificial Sequence: Synthetic oligonucleotide
  Target: LAMA2; (-) strand; PAM type: NRG; PAM sequence: AGG
ccatgtgttggtttggcatt

SEQ ID NO: 64062 - DNA, 20 bp, Artificial Sequence
  Description of Artificial Sequence: Synthetic oligonucleotide
  Target: LAMA2; (-) strand; PAM type: NRG; PAM sequence: TAG
cccatgtgttggtttggcat

SEQ ID NO: 64063 - DNA, 20 bp, Artificial Sequence
  Description of Artificial Sequence: Synthetic oligonucleotide
  Target: LAMA2; (-) strand; PAM type: NRG; PAM sequence: TGG
tcttaccccatgtgttggtt

SEQ ID NO: 64064 - DNA, 20 bp, Artificial Sequence
  Description of Artificial Sequence: Synthetic oligonucleotide
  Target: LAMA2; (-) strand; PAM type: NRG; PAM sequence: TGG
cttattcttaccccatgtgt

SEQ ID NO: 64065 - DNA, 20 bp, Artificial Sequence
  Description of Artificial Sequence: Synthetic oligonucleotide
  Target: LAMA2; (-) strand; PAM type: NRG; PAM sequence: CAG
atcaaattttttttttagtc

SEQ ID NO: 64066 - DNA, 20 bp, Artificial Sequence
  Description of Artificial Sequence: Synthetic oligonucleotide
  Target: LAMA2; (-) strand; PAM type: NRG; PAM sequence: TAG
gagaaatcaaattttttttt

SEQ ID NO: 64067 - DNA, 20 bp, Artificial Sequence
  Description of Artificial Sequence: Synthetic oligonucleotide
  Target: LAMA2; (-) strand; PAM type: NRG; PAM sequence: GAG
acctaaaagtacatttgata

SEQ ID NO: 64068 - DNA, 20 bp, Artificial Sequence
  Description of Artificial Sequence: Synthetic oligonucleotide
  Target: LAMA2; (-) strand; PAM type: NRG; PAM sequence: TAG
ttacctaaaagtacatttga

SEQ ID NO: 64069 - DNA, 20 bp, Artificial Sequence
  Description of Artificial Sequence: Synthetic oligonucleotide
  Target: LAMA2; (-) strand; PAM type: NRG; PAM sequence: AAG
gcatatttttttttacctaa

SEQ ID NO: 64070 - DNA, 20 bp, Artificial Sequence
  Description of Artificial Sequence: Synthetic oligonucleotide
  Target: LAMA2; (-) strand; PAM type: NRG; PAM sequence: TAG
gaaaataacccaaacaccct

SEQ ID NO: 64071 - DNA, 20 bp, Artificial Sequence
  Description of Artificial Sequence: Synthetic oligonucleotide
  Target: LAMA2; (-) strand; PAM type: NRG; PAM sequence: TAG
gtttagcaggttttgttcaa

SEQ ID NO: 64072 - DNA, 20 bp, Artificial Sequence
  Description of Artificial Sequence: Synthetic oligonucleotide
  Target: LAMA2; (-) strand; PAM type: NRG; PAM sequence: AGG
gcatcttatgctggtttagc

SEQ ID NO: 64073 - DNA, 20 bp, Artificial Sequence
  Description of Artificial Sequence: Synthetic oligonucleotide
  Target: LAMA2; (-) strand; PAM type: NRG; PAM sequence: CAG
tgcatcttatgctggtttag

SEQ ID NO: 64074 - DNA, 20 bp, Artificial Sequence
  Description of Artificial Sequence: Synthetic oligonucleotide
  Target: LAMA2; (-) strand; PAM type: NRG; PAM sequence: TAG
cagtgcatcttatgctggtt

SEQ ID NO: 64075 - DNA, 20 bp, Artificial Sequence
  Description of Artificial Sequence: Synthetic oligonucleotide
  Target: LAMA2; (-) strand; PAM type: NRG; PAM sequence: TGG
tagttcagtgcatcttatgc

SEQ ID NO: 64076 - DNA, 20 bp, Artificial Sequence
  Description of Artificial Sequence: Synthetic oligonucleotide
  Target: LAMA2; (-) strand; PAM type: NRG; PAM sequence: CAG
atctctgctgcactttagtt

SEQ ID NO: 64077 - DNA, 20 bp, Artificial Sequence
  Description of Artificial Sequence: Synthetic oligonucleotide
  Target: LAMA2; (-) strand; PAM type: NRG; PAM sequence: TAG
gtagcatctctgctgcactt

SEQ ID NO: 64078 - DNA, 20 bp, Artificial Sequence
  Description of Artificial Sequence: Synthetic oligonucleotide
  Target: LAMA2; (-) strand; PAM type: NRG; PAM sequence: TAG
aatccttctcttgctgacag

SEQ ID NO: 64079 - DNA, 20 bp, Artificial Sequence
  Description of Artificial Sequence: Synthetic oligonucleotide
  Target: LAMA2; (-) strand; PAM type: NRG; PAM sequence: CAG
ttgaatccttctcttgctga

SEQ ID NO: 64080 - DNA, 20 bp, Artificial Sequence
  Description of Artificial Sequence: Synthetic oligonucleotide
  Target: LAMA2; (-) strand; PAM type: NRG; PAM sequence: GGG
gtccaggtaatgctcggatt

SEQ ID NO: 64081 - DNA, 20 bp, Artificial Sequence
  Description of Artificial Sequence: Synthetic oligonucleotide
  Target: LAMA2; (-) strand; PAM type: NRG; PAM sequence: TGG
tgtccaggtaatgctcggat

SEQ ID NO: 64082 - DNA, 20 bp, Artificial Sequence
  Description of Artificial Sequence: Synthetic oligonucleotide
  Target: LAMA2; (-) strand; PAM type: NRG; PAM sequence: CGG
ttaattgtccaggtaatgct

SEQ ID NO: 64083 - DNA, 20 bp, Artificial Sequence
  Description of Artificial Sequence: Synthetic oligonucleotide
  Target: LAMA2; (-) strand; PAM type: NRG; PAM sequence: AGG
aactgactgtttaattgtcc

SEQ ID NO: 64084 - DNA, 20 bp, Artificial Sequence
  Description of Artificial Sequence: Synthetic oligonucleotide
  Target: LAMA2; (-) strand; PAM type: NRG; PAM sequence: CAG
taactgactgtttaattgtc

SEQ ID NO: 64085 - DNA, 20 bp, Artificial Sequence
  Description of Artificial Sequence: Synthetic oligonucleotide
  Target: LAMA2; (-) strand; PAM type: NRG; PAM sequence: AAG
ttgtgaaagttaaaaaagct

SEQ ID NO: 64086 - DNA, 20 bp, Artificial Sequence
  Description of Artificial Sequence: Synthetic oligonucleotide
  Target: LAMA2; (-) strand; PAM type: NRG; PAM sequence: AAG
aagaattgtgaaagttaaaa

SEQ ID NO: 64087 - DNA, 20 bp, Artificial Sequence
  Description of Artificial Sequence: Synthetic oligonucleotide
  Target: LAMA2; (-) strand; PAM type: NRG; PAM sequence: AAG
aaaaaagctaagaattgtga

SEQ ID NO: 64088 - DNA, 20 bp, Artificial Sequence
  Description of Artificial Sequence: Synthetic oligonucleotide
  Target: LAMA2; (-) strand; PAM type: NRG; PAM sequence: AAG
aactcaaagttaaaaaagct

SEQ ID NO: 64089 - DNA, 20 bp, Artificial Sequence
  Description of Artificial Sequence: Synthetic oligonucleotide
  Target: LAMA2; (-) strand; PAM type: NRG; PAM sequence: AAG
tttaaaactcaaagttaaaa

SEQ ID NO: 64090 - DNA, 20 bp, Artificial Sequence
  Description of Artificial Sequence: Synthetic oligonucleotide
  Target: LAMA2; (-) strand; PAM type: NRG; PAM sequence: AAG
atcatgatttttaaaactca

SEQ ID NO: 64091 - DNA, 20 bp, Artificial Sequence
  Description of Artificial Sequence: Synthetic oligonucleotide
  Target: LAMA2; (-) strand; PAM type: NRG; PAM sequence: AAG
aagcccagaaaataaaagtt

SEQ ID NO: 64092 - DNA, 20 bp, Artificial Sequence
  Description of Artificial Sequence: Synthetic oligonucleotide
  Target: LAMA2; (-) strand; PAM type: NRG; PAM sequence: AAG
tcatcaagcccagaaaataa

SEQ ID NO: 64093 - DNA, 20 bp, Artificial Sequence
  Description of Artificial Sequence: Synthetic oligonucleotide
  Target: LAMA2; (-) strand; PAM type: NRG; PAM sequence: CAG
aattcaatcttcatcaagcc

SEQ ID NO: 64094 - DNA, 20 bp, Artificial Sequence
  Description of Artificial Sequence: Synthetic oligonucleotide
  Target: LAMA2; (-) strand; PAM type: NRG; PAM sequence: AAG
gatgaaattcaatcttcatc

SEQ ID NO: 64095 - DNA, 20 bp, Artificial Sequence
  Description of Artificial Sequence: Synthetic oligonucleotide
  Target: LAMA2; (-) strand; PAM type: NRG; PAM sequence: TAG
tgcttcagttttaatttgtt

SEQ ID NO: 64096 - DNA, 20 bp, Artificial Sequence
  Description of Artificial Sequence: Synthetic oligonucleotide
  Target: LAMA2; (-) strand; PAM type: NRG; PAM sequence: CAG
gttttctaaattaaatgctt

SEQ ID NO: 64097 - DNA, 20 bp, Artificial Sequence
  Description of Artificial Sequence: Synthetic oligonucleotide
  Target: LAMA2; (-) strand; PAM type: NRG; PAM sequence: GAG
attttaggctgaagaaattt

SEQ ID NO: 64098 - DNA, 20 bp, Artificial Sequence
  Description of Artificial Sequence: Synthetic oligonucleotide
  Target: LAMA2; (-) strand; PAM type: NRG; PAM sequence: AAG
aaatgaacaattttaggctg

SEQ ID NO: 64099 - DNA, 20 bp, Artificial Sequence
  Description of Artificial Sequence: Synthetic oligonucleotide
  Target: LAMA2; (-) strand; PAM type: NRG; PAM sequence: AGG
ttgtttaaatgaacaatttt

SEQ ID NO: 64100 - DNA, 20 bp, Artificial Sequence
  Description of Artificial Sequence: Synthetic oligonucleotide
  Target: LAMA2; (-) strand; PAM type: NRG; PAM sequence: TAG
cttgtttaaatgaacaattt

SEQ ID NO: 64101 - DNA, 20 bp, Artificial Sequence
  Description of Artificial Sequence: Synthetic oligonucleotide
  Target: LAMA2; (-) strand; PAM type: NRG; PAM sequence: GAG
attcagtatcctattaattt

SEQ ID NO: 64102 - DNA, 20 bp, Artificial Sequence
  Description of Artificial Sequence: Synthetic oligonucleotide
  Target: LAMA2; (-) strand; PAM type: NRG; PAM sequence: CAG
agaataatttcatatttatt

SEQ ID NO: 64103 - DNA, 20 bp, Artificial Sequence
  Description of Artificial Sequence: Synthetic oligonucleotide
  Target: LAMA2; (-) strand; PAM type: NRG; PAM sequence: AAG
ttccatttaactttccagga

SEQ ID NO: 64104 - DNA, 20 bp, Artificial Sequence
  Description of Artificial Sequence: Synthetic oligonucleotide
  Target: LAMA2; (-) strand; PAM type: NRG; PAM sequence: AGG
gtttttccatttaactttcc

SEQ ID NO: 64105 - DNA, 20 bp, Artificial Sequence
  Description of Artificial Sequence: Synthetic oligonucleotide
  Target: LAMA2; (-) strand; PAM type: NRG; PAM sequence: CAG
tgtttttccatttaactttc

SEQ ID NO: 64106 - DNA, 20 bp, Artificial Sequence
  Description of Artificial Sequence: Synthetic oligonucleotide
  Target: LAMA2; (-) strand; PAM type: NRG; PAM sequence: TAG
aatatgtattagttataaaa

SEQ ID NO: 64107 - DNA, 20 bp, Artificial Sequence
  Description of Artificial Sequence: Synthetic oligonucleotide
  Target: LAMA2; (-) strand; PAM type: NRG; PAM sequence: TAG
tttcttgacttaatatgtat

SEQ ID NO: 64108 - DNA, 20 bp, Artificial Sequence
  Description of Artificial Sequence: Synthetic oligonucleotide
  Target: LAMA2; (-) strand; PAM type: NRG; PAM sequence: AAG
ctttacaggatgttttcttg

SEQ ID NO: 64109 - DNA, 20 bp, Artificial Sequence
  Description of Artificial Sequence: Synthetic oligonucleotide
  Target: LAMA2; (-) strand; PAM type: NRG; PAM sequence: AGG
ccaacattgccattctttac

SEQ ID NO: 64110 - DNA, 20 bp, Artificial Sequence
  Description of Artificial Sequence: Synthetic oligonucleotide
  Target: LAMA2; (-) strand; PAM type: NRG; PAM sequence: CAG
accaacattgccattcttta

SEQ ID NO: 64111 - DNA, 20 bp, Artificial Sequence
  Description of Artificial Sequence: Synthetic oligonucleotide
  Target: LAMA2; (-) strand; PAM type: NRG; PAM sequence: AAG
tctagataatcattcttttt

SEQ ID NO: 64112 - DNA, 20 bp, Artificial Sequence
  Description of Artificial Sequence: Synthetic oligonucleotide
  Target: LAMA2; (-) strand; PAM type: NRG; PAM sequence: TAG
ataacatgtataacatcttc

SEQ ID NO: 64113 - DNA, 20 bp, Artificial Sequence
  Description of Artificial Sequence: Synthetic oligonucleotide
  Target: LAMA2; (-) strand; PAM type: NRG; PAM sequence: AAG
aattagagaaggcagactta

SEQ ID NO: 64114 - DNA, 20 bp, Artificial Sequence
  Description of Artificial Sequence: Synthetic oligonucleotide
  Target: LAMA2; (-) strand; PAM type: NRG; PAM sequence: CAG
acttacagaattagagaagg

SEQ ID NO: 64115 - DNA, 20 bp, Artificial Sequence
  Description of Artificial Sequence: Synthetic oligonucleotide
  Target: LAMA2; (-) strand; PAM type: NRG; PAM sequence: AGG
ttaacttacagaattagaga

SEQ ID NO: 64116 - DNA, 20 bp, Artificial Sequence
  Description of Artificial Sequence: Synthetic oligonucleotide
  Target: LAMA2; (-) strand; PAM type: NRG; PAM sequence: AAG
tttaacttacagaattagag

SEQ ID NO: 64117 - DNA, 20 bp, Artificial Sequence
  Description of Artificial Sequence: Synthetic oligonucleotide
  Target: LAMA2; (-) strand; PAM type: NRG; PAM sequence: GAG
gtgtttaacttacagaatta

SEQ ID NO: 64118 - DNA, 20 bp, Artificial Sequence
  Description of Artificial Sequence: Synthetic oligonucleotide
  Target: LAMA2; (-) strand; PAM type: NRG; PAM sequence: TAG
ttgtgtttaacttacagaat

SEQ ID NO: 64119 - DNA, 20 bp, Artificial Sequence
  Description of Artificial Sequence: Synthetic oligonucleotide
  Target: LAMA2; (-) strand; PAM type: NRG; PAM sequence: CAG
caatatttgtgtttaactta

SEQ ID NO: 64120 - DNA, 20 bp, Artificial Sequence
  Description of Artificial Sequence: Synthetic oligonucleotide
  Target: LAMA2; (-) strand; PAM type: NRG; PAM sequence: AAG
taaaaatattttaaaaatta

SEQ ID NO: 64121 - DNA, 20 bp, Artificial Sequence
  Description of Artificial Sequence: Synthetic oligonucleotide
  Target: LAMA2; (-) strand; PAM type: NRG; PAM sequence: CAG
gaaggatggagccccatttt

SEQ ID NO: 64122 - DNA, 20 bp, Artificial Sequence
  Description of Artificial Sequence: Synthetic oligonucleotide
  Target: LAMA2; (-) strand; PAM type: NRG; PAM sequence: GAG
tgttagaactttgaaggatg

SEQ ID NO: 64123 - DNA, 20 bp, Artificial Sequence
  Description of Artificial Sequence: Synthetic oligonucleotide
  Target: LAMA2; (-) strand; PAM type: NRG; PAM sequence: TGG
attgttagaactttgaagga

SEQ ID NO: 64124 - DNA, 20 bp, Artificial Sequence
  Description of Artificial Sequence: Synthetic oligonucleotide
  Target: LAMA2; (-) strand; PAM type: NRG; PAM sequence: AGG
ttgtattgttagaactttga

SEQ ID NO: 64125 - DNA, 20 bp, Artificial Sequence
  Description of Artificial Sequence: Synthetic oligonucleotide
  Target: LAMA2; (-) strand; PAM type: NRG; PAM sequence: AAG
attgtattgttagaactttg

SEQ ID NO: 64126 - DNA, 20 bp, Artificial Sequence
  Description of Artificial Sequence: Synthetic oligonucleotide
  Target: LAMA2; (-) strand; PAM type: NRG; PAM sequence: TAG
tttactataaattgtattgt

SEQ ID NO: 64127 - DNA, 20 bp, Artificial Sequence
  Description of Artificial Sequence: Synthetic oligonucleotide
  Target: LAMA2; (-) strand; PAM type: NRG; PAM sequence: AAG
tttgatttttctgaacttct

SEQ ID NO: 64128 - DNA, 20 bp, Artificial Sequence
  Description of Artificial Sequence: Synthetic oligonucleotide
  Target: LAMA2; (-) strand; PAM type: NRG; PAM sequence: CAG
aaactcacttgattcagaat

SEQ ID NO: 64129 - DNA, 20 bp, Artificial Sequence
  Description of Artificial Sequence: Synthetic oligonucleotide
  Target: LAMA2; (-) strand; PAM type: NRG; PAM sequence: CAG
aagctaaaactcacttgatt

SEQ ID NO: 64130 - DNA, 20 bp, Artificial Sequence
  Description of Artificial Sequence: Synthetic oligonucleotide
  Target: LAMA2; (-) strand; PAM type: NRG; PAM sequence: AAG
tgcatgatttcacttaaaag

SEQ ID NO: 64131 - DNA, 20 bp, Artificial Sequence
  Description of Artificial Sequence: Synthetic oligonucleotide
  Target: LAMA2; (-) strand; PAM type: NRG; PAM sequence: AAG
gcatgcatgatttcacttaa

SEQ ID NO: 64132 - DNA, 20 bp, Artificial Sequence
  Description of Artificial Sequence: Synthetic oligonucleotide
  Target: LAMA2; (-) strand; PAM type: NRG; PAM sequence: GAG
tatacattagcatatgtgag

SEQ ID NO: 64133 - DNA, 20 bp, Artificial Sequence
  Description of Artificial Sequence: Synthetic oligonucleotide
  Target: LAMA2; (-) strand; PAM type: NRG; PAM sequence: AGG
tttatacattagcatatgtg

SEQ ID NO: 64134 - DNA, 20 bp, Artificial Sequence
  Description of Artificial Sequence: Synthetic oligonucleotide
  Target: LAMA2; (-) strand; PAM type: NRG; PAM sequence: GAG
ttttatacattagcatatgt

SEQ ID NO: 64135 - DNA, 20 bp, Artificial Sequence
  Description of Artificial Sequence: Synthetic oligonucleotide
  Target: LAMA2; (-) strand; PAM type: NRG; PAM sequence: TAG
taaattgatgttttatacat

SEQ ID NO: 64136 - DNA, 20 bp, Artificial Sequence
  Description of Artificial Sequence: Synthetic oligonucleotide
  Target: LAMA2; (-) strand; PAM type: NRG; PAM sequence: AGG
taggcttgcaaagcctaggc

SEQ ID NO: 64137 - DNA, 20 bp, Artificial Sequence
  Description of Artificial Sequence: Synthetic oligonucleotide
  Target: LAMA2; (-) strand; PAM type: NRG; PAM sequence: CAG
ctaggcttgcaaagcctagg

SEQ ID NO: 64138 - DNA, 20 bp, Artificial Sequence
  Description of Artificial Sequence: Synthetic oligonucleotide
  Target: LAMA2; (-) strand; PAM type: NRG; PAM sequence: AGG
ggtctaggcttgcaaagcct

SEQ ID NO: 64139 - DNA, 20 bp, Artificial Sequence
  Description of Artificial Sequence: Synthetic oligonucleotide
  Target: LAMA2; (-) strand; PAM type: NRG; PAM sequence: TAG
aggtctaggcttgcaaagcc

SEQ ID NO: 64140 - DNA, 20 bp, Artificial Sequence
  Description of Artificial Sequence: Synthetic oligonucleotide
  Target: LAMA2; (-) strand; PAM type: NRG; PAM sequence: AAG
ttcaaaggtctaggcttgca

SEQ ID NO: 64141 - DNA, 20 bp, Artificial Sequence
  Description of Artificial Sequence: Synthetic oligonucleotide
  Target: LAMA2; (-) strand; PAM type: NRG; PAM sequence: AGG
gaatgcaaattcaaaggtct

SEQ ID NO: 64142 - DNA, 20 bp, Artificial Sequence
  Description of Artificial Sequence: Synthetic oligonucleotide
  Target: LAMA2; (-) strand; PAM type: NRG; PAM sequence: TAG
tgaatgcaaattcaaaggtc

SEQ ID NO: 64143 - DNA, 20 bp, Artificial Sequence
  Description of Artificial Sequence: Synthetic oligonucleotide
  Target: LAMA2; (-) strand; PAM type: NRG; PAM sequence: AGG
gaatttgaatgcaaattcaa

SEQ ID NO: 64144 - DNA, 20 bp, Artificial Sequence
  Description of Artificial Sequence: Synthetic oligonucleotide
  Target: LAMA2; (-) strand; PAM type: NRG; PAM sequence: AAG
agaatttgaatgcaaattca

SEQ ID NO: 64145 - DNA, 20 bp, Artificial Sequence
  Description of Artificial Sequence: Synthetic oligonucleotide
  Target: LAMA2; (-) strand; PAM type: NRG; PAM sequence: AAG
ccagctagaaaatgtacatc

SEQ ID NO: 64146 - DNA, 20 bp, Artificial Sequence
  Description of Artificial Sequence: Synthetic oligonucleotide
  Target: LAMA2; (-) strand; PAM type: NRG; PAM sequence: TAG
ttgctttctagtcccccagc

SEQ ID NO: 64147 - DNA, 20 bp, Artificial Sequence
  Description of Artificial Sequence: Synthetic oligonucleotide
  Target: LAMA2; (-) strand; PAM type: NRG; PAM sequence: CAG
tgtcttgctttctagtcccc

SEQ ID NO: 64148 - DNA, 20 bp, Artificial Sequence
  Description of Artificial Sequence: Synthetic oligonucleotide
  Target: LAMA2; (-) strand; PAM type: NRG; PAM sequence: TAG
aaggaaagtgtcttgctttc

SEQ ID NO: 64149 - DNA, 20 bp, Artificial Sequence
  Description of Artificial Sequence: Synthetic oligonucleotide
  Target: LAMA2; (-) strand; PAM type: NRG; PAM sequence: AAG
agcccaaggtactgaaagga

SEQ ID NO: 64150 - DNA, 20 bp, Artificial Sequence
  Description of Artificial Sequence: Synthetic oligonucleotide
  Target: LAMA2; (-) strand; PAM type: NRG; PAM sequence: AGG
ggggagcccaaggtactgaa

SEQ ID NO: 64151 - DNA, 20 bp, Artificial Sequence
  Description of Artificial Sequence: Synthetic oligonucleotide
  Target: LAMA2; (-) strand; PAM type: NRG; PAM sequence: AAG
tggggagcccaaggtactga

SEQ ID NO: 64152 - DNA, 20 bp, Artificial Sequence
  Description of Artificial Sequence: Synthetic oligonucleotide
  Target: LAMA2; (-) strand; PAM type: NRG; PAM sequence: AGG
cttaatagatggggagccca

SEQ ID NO: 64153 - DNA, 20 bp, Artificial Sequence
  Description of Artificial Sequence: Synthetic oligonucleotide
  Target: LAMA2; (-) strand; PAM type: NRG; PAM sequence: AAG
acttaatagatggggagccc

SEQ ID NO: 64154 - DNA, 20 bp, Artificial Sequence
  Description of Artificial Sequence: Synthetic oligonucleotide
  Target: LAMA2; (-) strand; PAM type: NRG; PAM sequence: GAG
atctccacttaatagatggg

SEQ ID NO: 64155 - DNA, 20 bp, Artificial Sequence
  Description of Artificial Sequence: Synthetic oligonucleotide
  Target: LAMA2; (-) strand; PAM type: NRG; PAM sequence: GGG
tgatctccacttaatagatg

SEQ ID NO: 64156 - DNA, 20 bp, Artificial Sequence
  Description of Artificial Sequence: Synthetic oligonucleotide
  Target: LAMA2; (-) strand; PAM type: NRG; PAM sequence: GGG
atgatctccacttaatagat

SEQ ID NO: 64157 - DNA, 20 bp, Artificial Sequence
  Description of Artificial Sequence: Synthetic oligonucleotide
  Target: LAMA2; (-) strand; PAM type: NRG; PAM sequence: TGG
aatgatctccacttaataga

SEQ ID NO: 64158 - DNA, 20 bp, Artificial Sequence
  Description of Artificial Sequence: Synthetic oligonucleotide
  Target: LAMA2; (-) strand; PAM type: NRG; PAM sequence: TAG
ttttaatgatctccacttaa

SEQ ID NO: 64159 - DNA, 20 bp, Artificial Sequence
  Description of Artificial Sequence: Synthetic oligonucleotide
  Target: LAMA2; (-) strand; PAM type: NRG; PAM sequence: CAG
cttaggacagcggtgcaagg

SEQ ID NO: 64160 - DNA, 20 bp, Artificial Sequence
  Description of Artificial Sequence: Synthetic oligonucleotide
  Target: LAMA2; (-) strand; PAM type: NRG; PAM sequence: AGG
atccttaggacagcggtgca

SEQ ID NO: 64161 - DNA, 20 bp, Artificial Sequence
  Description of Artificial Sequence: Synthetic oligonucleotide
  Target: LAMA2; (-) strand; PAM type: NRG; PAM sequence: AAG
aatccttaggacagcggtgc

SEQ ID NO: 64162 - DNA, 20 bp, Artificial Sequence
  Description of Artificial Sequence: Synthetic oligonucleotide
  Target: LAMA2; (-) strand; PAM type: NRG; PAM sequence: CGG
atctcaaatccttaggacag

SEQ ID NO: 64163 - DNA, 20 bp, Artificial Sequence
  Description of Artificial Sequence: Synthetic oligonucleotide
  Target: LAMA2; (-) strand; PAM type: NRG; PAM sequence: CAG
tttatctcaaatccttagga

SEQ ID NO: 64164 - DNA, 20 bp, Artificial Sequence
  Description of Artificial Sequence: Synthetic oligonucleotide
  Target: LAMA2; (-) strand; PAM type: NRG; PAM sequence: AGG
atgctttatctcaaatcctt

SEQ ID NO: 64165 - DNA, 20 bp, Artificial Sequence
  Description of Artificial Sequence: Synthetic oligonucleotide
  Target: LAMA2; (-) strand; PAM type: NRG; PAM sequence: TAG
tatgctttatctcaaatcct

SEQ ID NO: 64166 - DNA, 20 bp, Artificial Sequence
  Description of Artificial Sequence: Synthetic oligonucleotide
  Target: LAMA2; (-) strand; PAM type: NRG; PAM sequence: AAG
aggagcacctactatgtgcc

SEQ ID NO: 64167 - DNA, 20 bp, Artificial Sequence
  Description of Artificial Sequence: Synthetic oligonucleotide
  Target: LAMA2; (-) strand; PAM type: NRG; PAM sequence: GAG
agaataaagttaccatttag

SEQ ID NO: 64168 - DNA, 20 bp, Artificial Sequence
  Description of Artificial Sequence: Synthetic oligonucleotide
  Target: LAMA2; (-) strand; PAM type: NRG; PAM sequence: AGG
gaagaataaagttaccattt

SEQ ID NO: 64169 - DNA, 20 bp, Artificial Sequence
  Description of Artificial Sequence: Synthetic oligonucleotide
  Target: LAMA2; (-) strand; PAM type: NRG; PAM sequence: TAG
tgaagaataaagttaccatt

SEQ ID NO: 64170 - DNA, 20 bp, Artificial Sequence
  Description of Artificial Sequence: Synthetic oligonucleotide
  Target: LAMA2; (-) strand; PAM type: NRG; PAM sequence: AAG
aaagcctgatgtgaagaata

SEQ ID NO: 64171 - DNA, 20 bp, Artificial Sequence
  Description of Artificial Sequence: Synthetic oligonucleotide
  Target: LAMA2; (-) strand; PAM type: NRG; PAM sequence: AAG
tataagcaaagcctgatgtg

SEQ ID NO: 64172 - DNA, 20 bp, Artificial Sequence
  Description of Artificial Sequence: Synthetic oligonucleotide
  Target: LAMA2; (-) strand; PAM type: NRG; PAM sequence: AAG
ggcttttataagtataagca

SEQ ID NO: 64173 - DNA, 20 bp, Artificial Sequence
  Description of Artificial Sequence: Synthetic oligonucleotide
  Target: LAMA2; (-) strand; PAM type: NRG; PAM sequence: AAG
aaactggcttttataagtat

SEQ ID NO: 64174 - DNA, 20 bp, Artificial Sequence
  Description of Artificial Sequence: Synthetic oligonucleotide
  Target: LAMA2; (-) strand; PAM type: NRG; PAM sequence: AAG
tctacaaaactggcttttat

SEQ ID NO: 64175 - DNA, 20 bp, Artificial Sequence
  Description of Artificial Sequence: Synthetic oligonucleotide
  Target: LAMA2; (-) strand; PAM type: NRG; PAM sequence: TGG
cagcaaattatctacaaaac

SEQ ID NO: 64176 - DNA, 20 bp, Artificial Sequence
  Description of Artificial Sequence: Synthetic oligonucleotide
  Target: LAMA2; (-) strand; PAM type: NRG; PAM sequence: CAG
taactattcttagttctatt

SEQ ID NO: 64177 - DNA, 20 bp, Artificial Sequence
  Description of Artificial Sequence: Synthetic oligonucleotide
  Target: LAMA2; (-) strand; PAM type: NRG; PAM sequence: TAG
ccaatatttataactattct

SEQ ID NO: 64178 - DNA, 20 bp, Artificial Sequence
  Description of Artificial Sequence: Synthetic oligonucleotide
  Target: LAMA2; (-) strand; PAM type: NRG; PAM sequence: CAG
tttatggtatgttatcatag

SEQ ID NO: 64179 - DNA, 20 bp, Artificial Sequence
  Description of Artificial Sequence: Synthetic oligonucleotide
  Target: LAMA2; (-) strand; PAM type: NRG; PAM sequence: TAG
cagtttatggtatgttatca

SEQ ID NO: 64180 - DNA, 20 bp, Artificial Sequence
  Description of Artificial Sequence: Synthetic oligonucleotide
  Target: LAMA2; (-) strand; PAM type: NRG; PAM sequence: TGG
cttataatccatccagttta

SEQ ID NO: 64181 - DNA, 20 bp, Artificial Sequence
  Description of Artificial Sequence: Synthetic oligonucleotide
  Target: LAMA2; (-) strand; PAM type: NRG; PAM sequence: CAG
atctttgcttataatccatc

SEQ ID NO: 64182 - DNA, 20 bp, Artificial Sequence
  Description of Artificial Sequence: Synthetic oligonucleotide
  Target: LAMA2; (-) strand; PAM type: NRG; PAM sequence: GAG
cttcccagcctccagactgt

SEQ ID NO: 64183 - DNA, 20 bp, Artificial Sequence
  Description of Artificial Sequence: Synthetic oligonucleotide
  Target: LAMA2; (-) strand; PAM type: NRG; PAM sequence: CAG
gtcttggacttcccagcctc

SEQ ID NO: 64184 - DNA, 20 bp, Artificial Sequence
  Description of Artificial Sequence: Synthetic oligonucleotide
  Target: LAMA2; (-) strand; PAM type: NRG; PAM sequence: CAG
tgctgtggtcttggacttcc

SEQ ID NO: 64185 - DNA, 20 bp, Artificial Sequence
  Description of Artificial Sequence: Synthetic oligonucleotide
  Target: LAMA2; (-) strand; PAM type: NRG; PAM sequence: TGG
atttgccactgctgtggtct

SEQ ID NO: 64186 - DNA, 20 bp, Artificial Sequence
  Description of Artificial Sequence: Synthetic oligonucleotide
  Target: LAMA2; (-) strand; PAM type: NRG; PAM sequence: TGG
cactgaatttgccactgctg

SEQ ID NO: 64187 - DNA, 20 bp, Artificial Sequence
  Description of Artificial Sequence: Synthetic oligonucleotide
  Target: LAMA2; (-) strand; PAM type: NRG; PAM sequence: TGG
acaggaaagcaggtactcac

SEQ ID NO: 64188 - DNA, 20 bp, Artificial Sequence
  Description of Artificial Sequence: Synthetic oligonucleotide
  Target: LAMA2; (-) strand; PAM type: NRG; PAM sequence: AGG
ctgtctataaacaggaaagc

SEQ ID NO: 64189 - DNA, 20 bp, Artificial Sequence
  Description of Artificial Sequence: Synthetic oligonucleotide
  Target: LAMA2; (-) strand; PAM type: NRG; PAM sequence: CAG
gctgtctataaacaggaaag

SEQ ID NO: 64190 - DNA, 20 bp, Artificial Sequence
  Description of Artificial Sequence: Synthetic oligonucleotide
  Target: LAMA2; (-) strand; PAM type: NRG; PAM sequence: AAG
cgtgctgtctataaacagga

SEQ ID NO: 64191 - DNA, 20 bp, Artificial Sequence
  Description of Artificial Sequence: Synthetic oligonucleotide
  Target: LAMA2; (-) strand; PAM type: NRG; PAM sequence: AGG
aaaacgtgctgtctataaac

SEQ ID NO: 64192 - DNA, 20 bp, Artificial Sequence
  Description of Artificial Sequence: Synthetic oligonucleotide
  Target: LAMA2; (-) strand; PAM type: NRG; PAM sequence: CAG
aaaaacgtgctgtctataaa

SEQ ID NO: 64193 - DNA, 20 bp, Artificial Sequence
  Description of Artificial Sequence: Synthetic oligonucleotide
  Target: LAMA2; (-) strand; PAM type: NRG; PAM sequence: CAG
cctttcatcatgcgaggcta

SEQ ID NO: 64194 - DNA, 20 bp, Artificial Sequence
  Description of Artificial Sequence: Synthetic oligonucleotide
  Target: LAMA2; (-) strand; PAM type: NRG; PAM sequence: AGG
ttgctccctttcatcatgcg

SEQ ID NO: 64195 - DNA, 20 bp, Artificial Sequence
  Description of Artificial Sequence: Synthetic oligonucleotide
  Target: LAMA2; (-) strand; PAM type: NRG; PAM sequence: GAG
cttgctccctttcatcatgc

SEQ ID NO: 64196 - DNA, 20 bp, Artificial Sequence
  Description of Artificial Sequence: Synthetic oligonucleotide
  Target: LAMA2; (-) strand; PAM type: NRG; PAM sequence: AGG
aggtgaccagcgtctgaaag

SEQ ID NO: 64197 - DNA, 20 bp, Artificial Sequence
  Description of Artificial Sequence: Synthetic oligonucleotide
  Target: LAMA2; (-) strand; PAM type: NRG; PAM sequence: GAG
gaggtgaccagcgtctgaaa

SEQ ID NO: 64198 - DNA, 20 bp, Artificial Sequence
  Description of Artificial Sequence: Synthetic oligonucleotide
  Target: LAMA2; (-) strand; PAM type: NRG; PAM sequence: AAG
gggaggtgaccagcgtctga

SEQ ID NO: 64199 - DNA, 20 bp, Artificial Sequence
  Description of Artificial Sequence: Synthetic oligonucleotide
  Target: LAMA2; (-) strand; PAM type: NRG; PAM sequence: CAG
tggggctttagggaggtgac

SEQ ID NO: 64200 - DNA, 20 bp, Artificial Sequence
  Description of Artificial Sequence: Synthetic oligonucleotide
  Target: LAMA2; (-) strand; PAM type: NRG; PAM sequence: AGG
caggaggtggggctttaggg

SEQ ID NO: 64201 - DNA, 20 bp, Artificial Sequence
  Description of Artificial Sequence: Synthetic oligonucleotide
  Target: LAMA2; (-) strand; PAM type: NRG; PAM sequence: GAG
tcaggaggtggggctttagg

SEQ ID NO: 64202 - DNA, 20 bp, Artificial Sequence
  Description of Artificial Sequence: Synthetic oligonucleotide
  Target: LAMA2; (-) strand; PAM type: NRG; PAM sequence: GGG
tatcaggaggtggggcttta

SEQ ID NO: 64203 - DNA, 20 bp, Artificial Sequence
  Description of Artificial Sequence: Synthetic oligonucleotide
  Target: LAMA2; (-) strand; PAM type: NRG; PAM sequence: AGG
atatcaggaggtggggcttt

SEQ ID NO: 64204 - DNA, 20 bp, Artificial Sequence
  Description of Artificial Sequence: Synthetic oligonucleotide
  Target: LAMA2; (-) strand; PAM type: NRG; PAM sequence: TAG
gatatcaggaggtggggctt

SEQ ID NO: 64205 - DNA, 20 bp, Artificial Sequence
  Description of Artificial Sequence: Synthetic oligonucleotide
  Target: LAMA2; (-) strand; PAM type: NRG; PAM sequence: GGG
tgtgaggatatcaggaggtg

SEQ ID NO: 64206 - DNA, 20 bp, Artificial Sequence
  Description of Artificial Sequence: Synthetic oligonucleotide
  Target: LAMA2; (-) strand; PAM type: NRG; PAM sequence: GGG
atgtgaggatatcaggaggt

SEQ ID NO: 64207 - DNA, 20 bp, Artificial Sequence
  Description of Artificial Sequence: Synthetic oligonucleotide
  Target: LAMA2; (-) strand; PAM type: NRG; PAM sequence: TGG
aatgtgaggatatcaggagg

SEQ ID NO: 64208 - DNA, 20 bp, Artificial Sequence
  Description of Artificial Sequence: Synthetic oligonucleotide
  Target: LAMA2; (-) strand; PAM type: NRG; PAM sequence: AGG
tccaatgtgaggatatcagg

SEQ ID NO: 64209 - DNA, 20 bp, Artificial Sequence
  Description of Artificial Sequence: Synthetic oligonucleotide
  Target: LAMA2; (-) strand; PAM type: NRG; PAM sequence: GAG
ctccaatgtgaggatatcag

SEQ ID NO: 64210 - DNA, 20 bp, Artificial Sequence
  Description of Artificial Sequence: Synthetic oligonucleotide
  Target: LAMA2; (-) strand; PAM type: NRG; PAM sequence: AGG
atctccaatgtgaggatatc

SEQ ID NO: 64211 - DNA, 20 bp, Artificial Sequence
  Description of Artificial Sequence: Synthetic oligonucleotide
  Target: LAMA2; (-) strand; PAM type: NRG; PAM sequence: CAG
aatctccaatgtgaggatat

SEQ ID NO: 64212 - DNA, 20 bp, Artificial Sequence
  Description of Artificial Sequence: Synthetic oligonucleotide
  Target: LAMA2; (-) strand; PAM type: NRG; PAM sequence: AGG
gaaacctaatctccaatgtg

SEQ ID NO: 64213 - DNA, 20 bp, Artificial Sequence
  Description of Artificial Sequence: Synthetic oligonucleotide
  Target: LAMA2; (-) strand; PAM type: NRG; PAM sequence: GAG
tgaaacctaatctccaatgt

SEQ ID NO: 64214 - DNA, 20 bp, Artificial Sequence
  Description of Artificial Sequence: Synthetic oligonucleotide
  Target: LAMA2; (-) strand; PAM type: NRG; PAM sequence: AAG
ggtcataataaagaataaga

SEQ ID NO: 64215 - DNA, 20 bp, Artificial Sequence
  Description of Artificial Sequence: Synthetic oligonucleotide
  Target: LAMA2; (-) strand; PAM type: NRG; PAM sequence: AAG
tagtggtcataataaagaat

SEQ ID NO: 64216 - DNA, 20 bp, Artificial Sequence
  Description of Artificial Sequence: Synthetic oligonucleotide
  Target: LAMA2; (-) strand; PAM type: NRG; PAM sequence: AAG
ttttaatagtggtcataata

SEQ ID NO: 64217 - DNA, 20 bp, Artificial Sequence
  Description of Artificial Sequence: Synthetic oligonucleotide
  Target: LAMA2; (-) strand; PAM type: NRG; PAM sequence: TGG
tttctgtttggttttaatag

SEQ ID NO: 64218 - DNA, 20 bp, Artificial Sequence
  Description of Artificial Sequence: Synthetic oligonucleotide
  Target: LAMA2; (-) strand; PAM type: NRG; PAM sequence: TAG
agttttctgtttggttttaa

SEQ ID NO: 64219 - DNA, 20 bp, Artificial Sequence
  Description of Artificial Sequence: Synthetic oligonucleotide
  Target: LAMA2; (-) strand; PAM type: NRG; PAM sequence: TGG
tagttctacagttttctgtt

SEQ ID NO: 64220 - DNA, 20 bp, Artificial Sequence
  Description of Artificial Sequence: Synthetic oligonucleotide
  Target: LAMA2; (-) strand; PAM type: NRG; PAM sequence: CAG
agataccttggctagttcta

SEQ ID NO: 64221 - DNA, 20 bp, Artificial Sequence
  Description of Artificial Sequence: Synthetic oligonucleotide
  Target: LAMA2; (-) strand; PAM type: NRG; PAM sequence: TAG
tctctgtaagataccttggc

SEQ ID NO: 64222 - DNA, 20 bp, Artificial Sequence
  Description of Artificial Sequence: Synthetic oligonucleotide
  Target: LAMA2; (-) strand; PAM type: NRG; PAM sequence: TGG
catatctctgtaagatacct

SEQ ID NO: 64223 - DNA, 20 bp, Artificial Sequence
  Description of Artificial Sequence: Synthetic oligonucleotide
  Target: LAMA2; (-) strand; PAM type: NRG; PAM sequence: AAG
cctctgaaacatatctctgt

SEQ ID NO: 64224 - DNA, 20 bp, Artificial Sequence
  Description of Artificial Sequence: Synthetic oligonucleotide
  Target: LAMA2; (-) strand; PAM type: NRG; PAM sequence: CAG
taaacaaatagtgtatacaa

SEQ ID NO: 64225 - DNA, 20 bp, Artificial Sequence
  Description of Artificial Sequence: Synthetic oligonucleotide
  Target: LAMA2; (-) strand; PAM type: NRG; PAM sequence: TAG
aacagaaaaagctaaacaaa

SEQ ID NO: 64226 - DNA, 20 bp, Artificial Sequence
  Description of Artificial Sequence: Synthetic oligonucleotide
  Target: LAMA2; (-) strand; PAM type: NRG; PAM sequence: AAG
gaggacctaaaaaacagaaa

SEQ ID NO: 64227 - DNA, 20 bp, Artificial Sequence
  Description of Artificial Sequence: Synthetic oligonucleotide
  Target: LAMA2; (-) strand; PAM type: NRG; PAM sequence: CAG
taggccgaggacctaaaaaa

SEQ ID NO: 64228 - DNA, 20 bp, Artificial Sequence
  Description of Artificial Sequence: Synthetic oligonucleotide
  Target: LAMA2; (-) strand; PAM type: NRG; PAM sequence: AGG
ttctgtaatagcataggccg

SEQ ID NO: 64229 - DNA, 20 bp, Artificial Sequence
  Description of Artificial Sequence: Synthetic oligonucleotide
  Target: LAMA2; (-) strand; PAM type: NRG; PAM sequence: GAG
tttctgtaatagcataggcc

SEQ ID NO: 64230 - DNA, 20 bp, Artificial Sequence
  Description of Artificial Sequence: Synthetic oligonucleotide
  Target: LAMA2; (-) strand; PAM type: NRG; PAM sequence: AGG
tattctttctgtaatagcat

SEQ ID NO: 64231 - DNA, 20 bp, Artificial Sequence
  Description of Artificial Sequence: Synthetic oligonucleotide
  Target: LAMA2; (-) strand; PAM type: NRG; PAM sequence: TAG
atattctttctgtaatagca

SEQ ID NO: 64232 - DNA, 20 bp, Artificial Sequence
  Description of Artificial Sequence: Synthetic oligonucleotide
  Target: LAMA2; (-) strand; PAM type: NRG; PAM sequence: TAG
gagtaatattctttctgtaa

SEQ ID NO: 64233 - DNA, 20 bp, Artificial Sequence
  Description of Artificial Sequence: Synthetic oligonucleotide
  Target: LAMA2; (-) strand; PAM type: NRG; PAM sequence: GAG
ccaatagtaaatacaaaaga

SEQ ID NO: 64234 - DNA, 20 bp, Artificial Sequence
  Description of Artificial Sequence: Synthetic oligonucleotide
  Target: LAMA2; (-) strand; PAM type: NRG; PAM sequence: GAG
aaccaatagtaaatacaaaa

SEQ ID NO: 64235 - DNA, 20 bp, Artificial Sequence
  Description of Artificial Sequence: Synthetic oligonucleotide
  Target: LAMA2; (-) strand; PAM type: NRG; PAM sequence: AAG
gaaaccaatagtaaatacaa

SEQ ID NO: 64236 - DNA, 20 bp, Artificial Sequence
  Description of Artificial Sequence: Synthetic oligonucleotide
  Target: LAMA2; (-) strand; PAM type: NRG; PAM sequence: TAG
tgcttccctcaggaaaccaa

SEQ ID NO: 64237 - DNA, 20 bp, Artificial Sequence
  Description of Artificial Sequence: Synthetic oligonucleotide
  Target: LAMA2; (-) strand; PAM type: NRG; PAM sequence: AGG
ttaaaataattgcttccctc

SEQ ID NO: 64238 - DNA, 20 bp, Artificial Sequence
  Description of Artificial Sequence: Synthetic oligonucleotide
  Target: LAMA2; (-) strand; PAM type: NRG; PAM sequence: CAG
attaaaataattgcttccct

SEQ ID NO: 64239 - DNA, 20 bp, Artificial Sequence
  Description of Artificial Sequence: Synthetic oligonucleotide
  Target: LAMA2; (-) strand; PAM type: NRG; PAM sequence: TGG
tcctgtgagttagaatacaa

SEQ ID NO: 64240 - DNA, 20 bp, Artificial Sequence
  Description of Artificial Sequence: Synthetic oligonucleotide
  Target: LAMA2; (-) strand; PAM type: NRG; PAM sequence: TAG
attgttttattcctgtgagt

SEQ ID NO: 64241 - DNA, 20 bp, Artificial Sequence
  Description of Artificial Sequence: Synthetic oligonucleotide
  Target: LAMA2; (-) strand; PAM type: NRG; PAM sequence: GAG
tgttattgttttattcctgt

SEQ ID NO: 64242 - DNA, 20 bp, Artificial Sequence
  Description of Artificial Sequence: Synthetic oligonucleotide
  Target: LAMA2; (-) strand; PAM type: NRG; PAM sequence: GAG
tttgttaggtacacatttat

SEQ ID NO: 64243 - DNA, 20 bp, Artificial Sequence
  Description of Artificial Sequence: Synthetic oligonucleotide
  Target: LAMA2; (-) strand; PAM type: NRG; PAM sequence: AGG
agatgtatgttttatttgtt

SEQ ID NO: 64244 - DNA, 20 bp, Artificial Sequence
  Description of Artificial Sequence: Synthetic oligonucleotide
  Target: LAMA2; (-) strand; PAM type: NRG; PAM sequence: TAG
aagatgtatgttttatttgt

SEQ ID NO: 64245 - DNA, 20 bp, Artificial Sequence
  Description of Artificial Sequence: Synthetic oligonucleotide
  Target: LAMA2; (-) strand; PAM type: NRG; PAM sequence: AAG
taaatgcatattcgtatttg

SEQ ID NO: 64246 - DNA, 20 bp, Artificial Sequence
  Description of Artificial Sequence: Synthetic oligonucleotide
  Target: LAMA2; (-) strand; PAM type: NRG; PAM sequence: AGG
aagacctcagacagcaagcc

SEQ ID NO: 64247 - DNA, 20 bp, Artificial Sequence
  Description of Artificial Sequence: Synthetic oligonucleotide
  Target: LAMA2; (-) strand; PAM type: NRG; PAM sequence: CAG
taagacctcagacagcaagc

SEQ ID NO: 64248 - DNA, 20 bp, Artificial Sequence
  Description of Artificial Sequence: Synthetic oligonucleotide
  Target: LAMA2; (-) strand; PAM type: NRG; PAM sequence: AAG
aagttaagacctcagacagc

SEQ ID NO: 64249 - DNA, 20 bp, Artificial Sequence
  Description of Artificial Sequence: Synthetic oligonucleotide
  Target: LAMA2; (-) strand; PAM type: NRG; PAM sequence: CAG
gaacaagttaagacctcaga

SEQ ID NO: 64250 - DNA, 20 bp, Artificial Sequence
  Description of Artificial Sequence: Synthetic oligonucleotide
  Target: LAMA2; (-) strand; PAM type: NRG; PAM sequence: CAG
cacagaacaagttaagacct

SEQ ID NO: 64251 - DNA, 20 bp, Artificial Sequence
  Description of Artificial Sequence: Synthetic oligonucleotide
  Target: LAMA2; (-) strand; PAM type: NRG; PAM sequence: AAG
gttgaagcacagaacaagtt

SEQ ID NO: 64252 - DNA, 20 bp, Artificial Sequence
  Description of Artificial Sequence: Synthetic oligonucleotide
  Target: LAMA2; (-) strand; PAM type: NRG; PAM sequence: AAG
agggagttgaagcacagaac

SEQ ID NO: 64253 - DNA, 20 bp, Artificial Sequence
  Description of Artificial Sequence: Synthetic oligonucleotide
  Target: LAMA2; (-) strand; PAM type: NRG; PAM sequence: CAG
tataatagggagttgaagca

SEQ ID NO: 64254 - DNA, 20 bp, Artificial Sequence
  Description of Artificial Sequence: Synthetic oligonucleotide
  Target: LAMA2; (-) strand; PAM type: NRG; PAM sequence: AAG
tccattataatagggagttg

SEQ ID NO: 64255 - DNA, 20 bp, Artificial Sequence
  Description of Artificial Sequence: Synthetic oligonucleotide
  Target: LAMA2; (-) strand; PAM type: NRG; PAM sequence: GAG
gtagcatccattataatagg

SEQ ID NO: 64256 - DNA, 20 bp, Artificial Sequence
  Description of Artificial Sequence: Synthetic oligonucleotide
  Target: LAMA2; (-) strand; PAM type: NRG; PAM sequence: GGG
gtgtagcatccattataata

SEQ ID NO: 64257 - DNA, 20 bp, Artificial Sequence
  Description of Artificial Sequence: Synthetic oligonucleotide
  Target: LAMA2; (-) strand; PAM type: NRG; PAM sequence: AGG
tgtgtagcatccattataat

SEQ ID NO: 64258 - DNA, 20 bp, Artificial Sequence
  Description of Artificial Sequence: Synthetic oligonucleotide
  Target: LAMA2; (-) strand; PAM type: NRG; PAM sequence: TAG
atgtgtagcatccattataa

SEQ ID NO: 64259 - DNA, 20 bp, Artificial Sequence
  Description of Artificial Sequence: Synthetic oligonucleotide
  Target: LAMA2; (-) strand; PAM type: NRG; PAM sequence: TAG
gacccaagagcttccatgtg

SEQ ID NO: 64260 - DNA, 20 bp, Artificial Sequence
  Description of Artificial Sequence: Synthetic oligonucleotide
  Target: LAMA2; (-) strand; PAM type: NRG; PAM sequence: GAG
tacctccaatggtgacccaa

SEQ ID NO: 64261 - DNA, 20 bp, Artificial Sequence
  Description of Artificial Sequence: Synthetic oligonucleotide
  Target: LAMA2; (-) strand; PAM type: NRG; PAM sequence: AAG
attacctccaatggtgaccc

SEQ ID NO: 64262 - DNA, 20 bp, Artificial Sequence
  Description of Artificial Sequence: Synthetic oligonucleotide
  Target: LAMA2; (-) strand; PAM type: NRG; PAM sequence: TGG
tagggcgctattacctccaa

SEQ ID NO: 64263 - DNA, 20 bp, Artificial Sequence
  Description of Artificial Sequence: Synthetic oligonucleotide
  Target: LAMA2; (-) strand; PAM type: NRG; PAM sequence: GGG
cccagacacaaaactctata

SEQ ID NO: 64264 - DNA, 20 bp, Artificial Sequence
  Description of Artificial Sequence: Synthetic oligonucleotide
  Target: LAMA2; (-) strand; PAM type: NRG; PAM sequence: AGG
tcccagacacaaaactctat

SEQ ID NO: 64265 - DNA, 20 bp, Artificial Sequence
  Description of Artificial Sequence: Synthetic oligonucleotide
  Target: LAMA2; (-) strand; PAM type: NRG; PAM sequence: TAG
ttcccagacacaaaactcta

SEQ ID NO: 64266 - DNA, 20 bp, Artificial Sequence
  Description of Artificial Sequence: Synthetic oligonucleotide
  Target: LAMA2; (-) strand; PAM type: NRG; PAM sequence: CAG
ctacaaagtccacttcttcc

SEQ ID NO: 64267 - DNA, 20 bp, Artificial Sequence
  Description of Artificial Sequence: Synthetic oligonucleotide
  Target: LAMA2; (-) strand; PAM type: NRG; PAM sequence: AAG
tatttaatcgcctaactaca

SEQ ID NO: 64268 - DNA, 20 bp, Artificial Sequence
  Description of Artificial Sequence: Synthetic oligonucleotide
  Target: LAMA2; (-) strand; PAM type: NRG; PAM sequence: TGG
gtacttggcttaaggcaagc

SEQ ID NO: 64269 - DNA, 20 bp, Artificial Sequence
  Description of Artificial Sequence: Synthetic oligonucleotide
  Target: LAMA2; (-) strand; PAM type: NRG; PAM sequence: AAG
acatgtacttggcttaaggc

SEQ ID NO: 64270 - DNA, 20 bp, Artificial Sequence
  Description of Artificial Sequence: Synthetic oligonucleotide
  Target: LAMA2; (-) strand; PAM type: NRG; PAM sequence: AGG
tttaacatgtacttggctta

SEQ ID NO: 64271 - DNA, 20 bp, Artificial Sequence
  Description of Artificial Sequence: Synthetic oligonucleotide
  Target: LAMA2; (-) strand; PAM type: NRG; PAM sequence: AAG
ctttaacatgtacttggctt

SEQ ID NO: 64272 - DNA, 20 bp, Artificial Sequence
  Description of Artificial Sequence: Synthetic oligonucleotide
  Target: LAMA2; (-) strand; PAM type: NRG; PAM sequence: TGG
atagtcctttaacatgtact

SEQ ID NO: 64273 - DNA, 20 bp, Artificial Sequence
  Description of Artificial Sequence: Synthetic oligonucleotide
  Target: LAMA2; (-) strand; PAM type: NRG; PAM sequence: TAG
aacaaaataataatacaaaa

SEQ ID NO: 64274 - DNA, 20 bp, Artificial Sequence
  Description of Artificial Sequence: Synthetic oligonucleotide
  Target: LAMA2; (-) strand; PAM type: NRG; PAM sequence: GGG
aagataaatatgagagaaag

SEQ ID NO: 64275 - DNA, 20 bp, Artificial Sequence
  Description of Artificial Sequence: Synthetic oligonucleotide
  Target: LAMA2; (-) strand; PAM type: NRG; PAM sequence: GGG
caagataaatatgagagaaa

SEQ ID NO: 64276 - DNA, 20 bp, Artificial Sequence
  Description of Artificial Sequence: Synthetic oligonucleotide
  Target: LAMA2; (-) strand; PAM type: NRG; PAM sequence: AGG
gcaagataaatatgagagaa

SEQ ID NO: 64277 - DNA, 20 bp, Artificial Sequence
  Description of Artificial Sequence: Synthetic oligonucleotide
  Target: LAMA2; (-) strand; PAM type: NRG; PAM sequence: AAG
ggcaagataaatatgagaga

SEQ ID NO: 64278 - DNA, 20 bp, Artificial Sequence
  Description of Artificial Sequence: Synthetic oligonucleotide
  Target: LAMA2; (-) strand; PAM type: NRG; PAM sequence: GAG
ttaaggcaagataaatatga

SEQ ID NO: 64279 - DNA, 20 bp, Artificial Sequence
  Description of Artificial Sequence: Synthetic oligonucleotide
  Target: LAMA2; (-) strand; PAM type: NRG; PAM sequence: GAG
aattaaggcaagataaatat

SEQ ID NO: 64280 - DNA, 20 bp, Artificial Sequence
  Description of Artificial Sequence: Synthetic oligonucleotide
  Target: LAMA2; (-) strand; PAM type: NRG; PAM sequence: AAG
ataaactccctaattaaggc

SEQ ID NO: 64281 - DNA, 20 bp, Artificial Sequence
  Description of Artificial Sequence: Synthetic oligonucleotide
  Target: LAMA2; (-) strand; PAM type: NRG; PAM sequence: AGG
aacaataaactccctaatta

SEQ ID NO: 64282 - DNA, 20 bp, Artificial Sequence
  Description of Artificial Sequence: Synthetic oligonucleotide
  Target: LAMA2; (-) strand; PAM type: NRG; PAM sequence: AAG
aaacaataaactccctaatt

SEQ ID NO: 64283 - DNA, 20 bp, Artificial Sequence
  Description of Artificial Sequence: Synthetic oligonucleotide
  Target: LAMA2; (-) strand; PAM type: NRG; PAM sequence: AAG
aatgaaagtagttcagatta

SEQ ID NO: 64284 - DNA, 20 bp, Artificial Sequence
  Description of Artificial Sequence: Synthetic oligonucleotide
  Target: LAMA2; (-) strand; PAM type: NRG; PAM sequence: CAG
cccacacaatgaaagtagtt

SEQ ID NO: 64285 - DNA, 20 bp, Artificial Sequence
  Description of Artificial Sequence: Synthetic oligonucleotide
  Target: LAMA2; (-) strand; PAM type: NRG; PAM sequence: TAG
acacacccacacaatgaaag

SEQ ID NO: 64286 - DNA, 20 bp, Artificial Sequence
  Description of Artificial Sequence: Synthetic oligonucleotide
  Target: LAMA2; (-) strand; PAM type: NRG; PAM sequence: AAG
cacacacacccacacaatga

SEQ ID NO: 64287 - DNA, 20 bp, Artificial Sequence
  Description of Artificial Sequence: Synthetic oligonucleotide
  Target: LAMA2; (-) strand; PAM type: NRG; PAM sequence: CAG
tttagttcatttgtttcaaa

SEQ ID NO: 64288 - DNA, 20 bp, Artificial Sequence
  Description of Artificial Sequence: Synthetic oligonucleotide
  Target: LAMA2; (-) strand; PAM type: NRG; PAM sequence: TAG
agctcaattaaaaacatttt

SEQ ID NO: 64289 - DNA, 20 bp, Artificial Sequence
  Description of Artificial Sequence: Synthetic oligonucleotide
  Target: LAMA2; (-) strand; PAM type: NRG; PAM sequence: CAG
tattgacaagtcttcacttg

SEQ ID NO: 64290 - DNA, 20 bp, Artificial Sequence
  Description of Artificial Sequence: Synthetic oligonucleotide
  Target: LAMA2; (-) strand; PAM type: NRG; PAM sequence: AAG
tgtataatttatgtattgac

SEQ ID NO: 64291 - DNA, 20 bp, Artificial Sequence
  Description of Artificial Sequence: Synthetic oligonucleotide
  Target: LAMA2; (-) strand; PAM type: NRG; PAM sequence: GAG
atcctctttatgcatatata

SEQ ID NO: 64292 - DNA, 20 bp, Artificial Sequence
  Description of Artificial Sequence: Synthetic oligonucleotide
  Target: LAMA2; (-) strand; PAM type: NRG; PAM sequence: TAG
atatcctctttatgcatata

SEQ ID NO: 64293 - DNA, 20 bp, Artificial Sequence
  Description of Artificial Sequence: Synthetic oligonucleotide
  Target: LAMA2; (-) strand; PAM type: NRG; PAM sequence: GGG
tcttttaacttttaaataca

SEQ ID NO: 64294 - DNA, 20 bp, Artificial Sequence
  Description of Artificial Sequence: Synthetic oligonucleotide
  Target: LAMA2; (-) strand; PAM type: NRG; PAM sequence: AGG
ttcttttaacttttaaatac

SEQ ID NO: 64295 - DNA, 20 bp, Artificial Sequence
  Description of Artificial Sequence: Synthetic oligonucleotide
  Target: LAMA2; (-) strand; PAM type: NRG; PAM sequence: CAG
gttcttttaacttttaaata

SEQ ID NO: 64296 - DNA, 20 bp, Artificial Sequence
  Description of Artificial Sequence: Synthetic oligonucleotide
  Target: LAMA2; (-) strand; PAM type: NRG; PAM sequence: CGG
gtattcttagctctgtagag

SEQ ID NO: 64297 - DNA, 20 bp, Artificial Sequence
  Description of Artificial Sequence: Synthetic oligonucleotide
  Target: LAMA2; (-) strand; PAM type: NRG; PAM sequence: GAG
cctgtattcttagctctgta

SEQ ID NO: 64298 - DNA, 20 bp, Artificial Sequence
  Description of Artificial Sequence: Synthetic oligonucleotide
  Target: LAMA2; (-) strand; PAM type: NRG; PAM sequence: TAG
tacctgtattcttagctctg

SEQ ID NO: 64299 - DNA, 20 bp, Artificial Sequence
  Description of Artificial Sequence: Synthetic oligonucleotide
  Target: LAMA2; (-) strand; PAM type: NRG; PAM sequence: TAG
aattaaaatacctgtattct

SEQ ID NO: 64300 - DNA, 20 bp, Artificial Sequence
  Description of Artificial Sequence: Synthetic oligonucleotide
  Target: LAMA2; (-) strand; PAM type: NRG; PAM sequence: TGG
aaacactaaagaaacaacag

SEQ ID NO: 64301 - DNA, 20 bp, Artificial Sequence
  Description of Artificial Sequence: Synthetic oligonucleotide
  Target: LAMA2; (-) strand; PAM type: NRG; PAM sequence: CAG
atcaaacactaaagaaacaa

SEQ ID NO: 64302 - DNA, 20 bp, Artificial Sequence
  Description of Artificial Sequence: Synthetic oligonucleotide
  Target: LAMA2; (-) strand; PAM type: NRG; PAM sequence: AAG
caatccctcatcaaacacta

SEQ ID NO: 64303 - DNA, 20 bp, Artificial Sequence
  Description of Artificial Sequence: Synthetic oligonucleotide
  Target: LAMA2; (-) strand; PAM type: NRG; PAM sequence: TAG
ttatagtcgtttaaactgat

SEQ ID NO: 64304 - DNA, 20 bp, Artificial Sequence
  Description of Artificial Sequence: Synthetic oligonucleotide
  Target: LAMA2; (-) strand; PAM type: NRG; PAM sequence: TAG
aatgatcatcgctgtgttta

SEQ ID NO: 64305 - DNA, 20 bp, Artificial Sequence
  Description of Artificial Sequence: Synthetic oligonucleotide
  Target: LAMA2; (-) strand; PAM type: NRG; PAM sequence: AAG
tgtgcaataccctaaattcc

SEQ ID NO: 64306 - DNA, 20 bp, Artificial Sequence
  Description of Artificial Sequence: Synthetic oligonucleotide
  Target: LAMA2; (-) strand; PAM type: NRG; PAM sequence: CAG
tttttttcccctgtatggga

SEQ ID NO: 64307 - DNA, 20 bp, Artificial Sequence
  Description of Artificial Sequence: Synthetic oligonucleotide
  Target: LAMA2; (-) strand; PAM type: NRG; PAM sequence: GGG
gatttttttttcccctgtat

SEQ ID NO: 64308 - DNA, 20 bp, Artificial Sequence
  Description of Artificial Sequence: Synthetic oligonucleotide
  Target: LAMA2; (-) strand; PAM type: NRG; PAM sequence: TGG
tgatttttttttcccctgta

SEQ ID NO: 64309 - DNA, 20 bp, Artificial Sequence
  Description of Artificial Sequence: Synthetic oligonucleotide
  Target: LAMA2; (-) strand; PAM type: NRG; PAM sequence: AGG
aattagtaaaaatcacaagt

SEQ ID NO: 64310 - DNA, 20 bp, Artificial Sequence
  Description of Artificial Sequence: Synthetic oligonucleotide
  Target: LAMA2; (-) strand; PAM type: NRG; PAM sequence: TAG
aaattagtaaaaatcacaag

SEQ ID NO: 64311 - DNA, 20 bp, Artificial Sequence
  Description of Artificial Sequence: Synthetic oligonucleotide
  Target: LAMA2; (-) strand; PAM type: NRG; PAM sequence: AAG
aaaaaattagtaaaaatcac

SEQ ID NO: 64312 - DNA, 20 bp, Artificial Sequence
  Description of Artificial Sequence: Synthetic oligonucleotide
  Target: LAMA2; (-) strand; PAM type: NRG; PAM sequence: TAG
ctattctcacggaaaaaaat

SEQ ID NO: 64313 - DNA, 20 bp, Artificial Sequence
  Description of Artificial Sequence: Synthetic oligonucleotide
  Target: LAMA2; (-) strand; PAM type: NRG; PAM sequence: CGG
ccagcaggattctattctca

SEQ ID NO: 64314 - DNA, 20 bp, Artificial Sequence
  Description of Artificial Sequence: Synthetic oligonucleotide
  Target: LAMA2; (-) strand; PAM type: NRG; PAM sequence: AGG
aataaaataagcttcccagc

SEQ ID NO: 64315 - DNA, 20 bp, Artificial Sequence
  Description of Artificial Sequence: Synthetic oligonucleotide
  Target: LAMA2; (-) strand; PAM type: NRG; PAM sequence: CAG
gaataaaataagcttcccag

SEQ ID NO: 64316 - DNA, 20 bp, Artificial Sequence
  Description of Artificial Sequence: Synthetic oligonucleotide
  Target: LAMA2; (-) strand; PAM type: NRG; PAM sequence: CAG
agagaataaaataagcttcc

SEQ ID NO: 64317 - DNA, 20 bp, Artificial Sequence
  Description of Artificial Sequence: Synthetic oligonucleotide
  Target: LAMA2; (-) strand; PAM type: NRG; PAM sequence: AAG
caaatctaagagaataaaat

SEQ ID NO: 64318 - DNA, 20 bp, Artificial Sequence
  Description of Artificial Sequence: Synthetic oligonucleotide
  Target: LAMA2; (-) strand; PAM type: NRG; PAM sequence: GAG
aaaggaggaagcaaatctaa

SEQ ID NO: 64319 - DNA, 20 bp, Artificial Sequence
  Description of Artificial Sequence: Synthetic oligonucleotide
  Target: LAMA2; (-) strand; PAM type: NRG; PAM sequence: AAG
aaaaaggaggaagcaaatct

SEQ ID NO: 64320 - DNA, 20 bp, Artificial Sequence
  Description of Artificial Sequence: Synthetic oligonucleotide
  Target: LAMA2; (-) strand; PAM type: NRG; PAM sequence: AAG
ggagggggaaaaaaaggagg

SEQ ID NO: 64321 - DNA, 20 bp, Artificial Sequence
  Description of Artificial Sequence: Synthetic oligonucleotide
  Target: LAMA2; (-) strand; PAM type: NRG; PAM sequence: AGG
tccggagggggaaaaaaagg

SEQ ID NO: 64322 - DNA, 20 bp, Artificial Sequence
  Description of Artificial Sequence: Synthetic oligonucleotide
  Target: LAMA2; (-) strand; PAM type: NRG; PAM sequence: GAG
ctccggagggggaaaaaaag

SEQ ID NO: 64323 - DNA, 20 bp, Artificial Sequence
  Description of Artificial Sequence: Synthetic oligonucleotide
  Target: LAMA2; (-) strand; PAM type: NRG; PAM sequence: AGG
ttctccggagggggaaaaaa

SEQ ID NO: 64324 - DNA, 20 bp, Artificial Sequence
  Description of Artificial Sequence: Synthetic oligonucleotide
  Target: LAMA2; (-) strand; PAM type: NRG; PAM sequence: AAG
gttctccggagggggaaaaa

SEQ ID NO: 64325 - DNA, 20 bp, Artificial Sequence
  Description of Artificial Sequence: Synthetic oligonucleotide
  Target: LAMA2; (-) strand; PAM type: NRG; PAM sequence: GGG
cagtcatcgttctccggagg

SEQ ID NO: 64326 - DNA, 20 bp, Artificial Sequence
  Description of Artificial Sequence: Synthetic oligonucleotide
  Target: LAMA2; (-) strand; PAM type: NRG; PAM sequence: GGG
ccagtcatcgttctccggag

SEQ ID NO: 64327 - DNA, 20 bp, Artificial Sequence
  Description of Artificial Sequence: Synthetic oligonucleotide
  Target: LAMA2; (-) strand; PAM type: NRG; PAM sequence: GGG
accagtcatcgttctccgga

SEQ ID NO: 64328 - DNA, 20 bp, Artificial Sequence
  Description of Artificial Sequence: Synthetic oligonucleotide
  Target: LAMA2; (-) strand; PAM type: NRG; PAM sequence: AGG
aaccagtcatcgttctccgg

SEQ ID NO: 64329 - DNA, 20 bp, Artificial Sequence
  Description of Artificial Sequence: Synthetic oligonucleotide
  Target: LAMA2; (-) strand; PAM type: NRG; PAM sequence: GAG
aaaccagtcatcgttctccg

SEQ ID NO: 64330 - DNA, 20 bp, Artificial Sequence
  Description of Artificial Sequence: Synthetic oligonucleotide
  Target: LAMA2; (-) strand; PAM type: NRG; PAM sequence: CGG
gtaaaccagtcatcgttctc

SEQ ID NO: 64331 - DNA, 20 bp, Artificial Sequence
  Description of Artificial Sequence: Synthetic oligonucleotide
  Target: LAMA2; (-) strand; PAM type: NRG; PAM sequence: CAG
ataaattgctatttgtaaac

SEQ ID NO: 64332 - DNA, 20 bp, Artificial Sequence
  Description of Artificial Sequence: Synthetic oligonucleotide
  Target: LAMA2; (-) strand; PAM type: NRG; PAM sequence: CAG
ataaggaaaaaggactgtgt

SEQ ID NO: 64333 - DNA, 20 bp, Artificial Sequence
  Description of Artificial Sequence: Synthetic oligonucleotide
  Target: LAMA2; (-) strand; PAM type: NRG; PAM sequence: AGG
gatcaacagtataaggaaaa

SEQ ID NO: 64334 - DNA, 20 bp, Artificial Sequence
  Description of Artificial Sequence: Synthetic oligonucleotide
  Target: LAMA2; (-) strand; PAM type: NRG; PAM sequence: AAG
agatcaacagtataaggaaa

SEQ ID NO: 64335 - DNA, 20 bp, Artificial Sequence
  Description of Artificial Sequence: Synthetic oligonucleotide
  Target: LAMA2; (-) strand; PAM type: NRG; PAM sequence: AGG
gttctgagatcaacagtata

SEQ ID NO: 64336 - DNA, 20 bp, Artificial Sequence
  Description of Artificial Sequence: Synthetic oligonucleotide
  Target: LAMA2; (-) strand; PAM type: NRG; PAM sequence: AAG
agttctgagatcaacagtat

SEQ ID NO: 64337 - DNA, 20 bp, Artificial Sequence
  Description of Artificial Sequence: Synthetic oligonucleotide
  Target: LAMA2; (-) strand; PAM type: NRG; PAM sequence: CAG
cagaacagttctgagatcaa

SEQ ID NO: 64338 - DNA, 20 bp, Artificial Sequence
  Description of Artificial Sequence: Synthetic oligonucleotide
  Target: LAMA2; (-) strand; PAM type: NRG; PAM sequence: GAG
caggactgcagaacagttct

SEQ ID NO: 64339 - DNA, 20 bp, Artificial Sequence
  Description of Artificial Sequence: Synthetic oligonucleotide
  Target: LAMA2; (-) strand; PAM type: NRG; PAM sequence: CAG
catacttcaggactgcagaa

SEQ ID NO: 64340 - DNA, 20 bp, Artificial Sequence
  Description of Artificial Sequence: Synthetic oligonucleotide
  Target: LAMA2; (-) strand; PAM type: NRG; PAM sequence: CAG
tgtttcatacttcaggactg

SEQ ID NO: 64341 - DNA, 20 bp, Artificial Sequence
  Description of Artificial Sequence: Synthetic oligonucleotide
  Target: LAMA2; (-) strand; PAM type: NRG; PAM sequence: AGG
gcaatagtgtttcatacttc

SEQ ID NO: 64342 - DNA, 20 bp, Artificial Sequence
  Description of Artificial Sequence: Synthetic oligonucleotide
  Target: LAMA2; (-) strand; PAM type: NRG; PAM sequence: CAG
ggcaatagtgtttcatactt

SEQ ID NO: 64343 - DNA, 20 bp, Artificial Sequence
  Description of Artificial Sequence: Synthetic oligonucleotide
  Target: LAMA2; (-) strand; PAM type: NRG; PAM sequence: TAG
gctgtaccaaaaaatggcaa

SEQ ID NO: 64344 - DNA, 20 bp, Artificial Sequence
  Description of Artificial Sequence: Synthetic oligonucleotide
  Target: LAMA2; (-) strand; PAM type: NRG; PAM sequence: TGG
gcactggctgtaccaaaaaa

SEQ ID NO: 64345 - DNA, 20 bp, Artificial Sequence
  Description of Artificial Sequence: Synthetic oligonucleotide
  Target: LAMA2; (-) strand; PAM type: NRG; PAM sequence: TGG
atttacattttttagagcac

SEQ ID NO: 64346 - DNA, 20 bp, Artificial Sequence
  Description of Artificial Sequence: Synthetic oligonucleotide
  Target: LAMA2; (-) strand; PAM type: NRG; PAM sequence: GAG
tcatccatttacatttttta

SEQ ID NO: 64347 - DNA, 20 bp, Artificial Sequence
  Description of Artificial Sequence: Synthetic oligonucleotide
  Target: LAMA2; (-) strand; PAM type: NRG; PAM sequence: TAG
tttcatccatttacattttt

SEQ ID NO: 64348 - DNA, 20 bp, Artificial Sequence
  Description of Artificial Sequence: Synthetic oligonucleotide
  Target: LAMA2; (-) strand; PAM type: NRG; PAM sequence: TAG
agatgtttctgcttccataa

SEQ ID NO: 64349 - DNA, 20 bp, Artificial Sequence
  Description of Artificial Sequence: Synthetic oligonucleotide
  Target: LAMA2; (-) strand; PAM type: NRG; PAM sequence: AAG
aaatttgtaaagcaaatagg

SEQ ID NO: 64350 - DNA, 20 bp, Artificial Sequence
  Description of Artificial Sequence: Synthetic oligonucleotide
  Target: LAMA2; (-) strand; PAM type: NRG; PAM sequence: AGG
gaaaaatttgtaaagcaaat

SEQ ID NO: 64351 - DNA, 20 bp, Artificial Sequence
  Description of Artificial Sequence: Synthetic oligonucleotide
  Target: LAMA2; (-) strand; PAM type: NRG; PAM sequence: TAG
ggaaaaatttgtaaagcaaa

SEQ ID NO: 64352 - DNA, 20 bp, Artificial Sequence
  Description of Artificial Sequence: Synthetic oligonucleotide
  Target: LAMA2; (-) strand; PAM type: NRG; PAM sequence: AAG
tttactcggaaaaatttgta

SEQ ID NO: 64353 - DNA, 20 bp, Artificial Sequence
  Description of Artificial Sequence: Synthetic oligonucleotide
  Target: LAMA2; (-) strand; PAM type: NRG; PAM sequence: CGG
aaacctgactgcattttact

SEQ ID NO: 64354 - DNA, 20 bp, Artificial Sequence
  Description of Artificial Sequence: Synthetic oligonucleotide
  Target: LAMA2; (-) strand; PAM type: NRG; PAM sequence: AAG
agtgtaaagaattctaaaac

SEQ ID NO: 64355 - DNA, 20 bp, Artificial Sequence
  Description of Artificial Sequence: Synthetic oligonucleotide
  Target: LAMA2; (-) strand; PAM type: NRG; PAM sequence: AAG
atcatctttaatttagtgta

SEQ ID NO: 64356 - DNA, 20 bp, Artificial Sequence
  Description of Artificial Sequence: Synthetic oligonucleotide
  Target: LAMA2; (-) strand; PAM type: NRG; PAM sequence: TAG
ttgctttatcatctttaatt

SEQ ID NO: 64357 - DNA, 20 bp, Artificial Sequence
  Description of Artificial Sequence: Synthetic oligonucleotide
  Target: LAMA2; (-) strand; PAM type: NRG; PAM sequence: CAG
tcactgtttagtatgaaaag

SEQ ID NO: 64358 - DNA, 20 bp, Artificial Sequence
  Description of Artificial Sequence: Synthetic oligonucleotide
  Target: LAMA2; (-) strand; PAM type: NRG; PAM sequence: AAG
acttcactgtttagtatgaa

SEQ ID NO: 64359 - DNA, 20 bp, Artificial Sequence
  Description of Artificial Sequence: Synthetic oligonucleotide
  Target: LAMA2; (-) strand; PAM type: NRG; PAM sequence: TAG
atgcttttcacttcactgtt

SEQ ID NO: 64360 - DNA, 20 bp, Artificial Sequence
  Description of Artificial Sequence: Synthetic oligonucleotide
  Target: LAMA2; (-) strand; PAM type: NRG; PAM sequence: CAG
aatttcgtacactaacaaaa

SEQ ID NO: 64361 - DNA, 20 bp, Artificial Sequence
  Description of Artificial Sequence: Synthetic oligonucleotide
  Target: LAMA2; (-) strand; PAM type: NRG; PAM sequence: CAG
aaagaagttagccactatta

SEQ ID NO: 64362 - DNA, 20 bp, Artificial Sequence
  Description of Artificial Sequence: Synthetic oligonucleotide
  Target: LAMA2; (-) strand; PAM type: NRG; PAM sequence: TAG
aaaaaggttcctaaagaagt

SEQ ID NO: 64363 - DNA, 20 bp, Artificial Sequence
  Description of Artificial Sequence: Synthetic oligonucleotide
  Target: LAMA2; (-) strand; PAM type: NRG; PAM sequence: AAG
acctaaaaaggttcctaaag

SEQ ID NO: 64364 - DNA, 20 bp, Artificial Sequence
  Description of Artificial Sequence: Synthetic oligonucleotide
  Target: LAMA2; (-) strand; PAM type: NRG; PAM sequence: AAG
ttcacctaaaaaggttccta

SEQ ID NO: 64365 - DNA, 20 bp, Artificial Sequence
  Description of Artificial Sequence: Synthetic oligonucleotide
  Target: LAMA2; (-) strand; PAM type: NRG; PAM sequence: AGG
atcataagtttcacctaaaa

SEQ ID NO: 64366 - DNA, 20 bp, Artificial Sequence
  Description of Artificial Sequence: Synthetic oligonucleotide
  Target: LAMA2; (-) strand; PAM type: NRG; PAM sequence: AAG
aatcataagtttcacctaaa

SEQ ID NO: 64367 - DNA, 20 bp, Artificial Sequence
  Description of Artificial Sequence: Synthetic oligonucleotide
  Target: LAMA2; (-) strand; PAM type: NRG; PAM sequence: AAG
tagatttcatagtcaatcat

SEQ ID NO: 64368 - DNA, 20 bp, Artificial Sequence
  Description of Artificial Sequence: Synthetic oligonucleotide
  Target: LAMA2; (-) strand; PAM type: NRG; PAM sequence: TAG
ttgtcctagaatagatttca

SEQ ID NO: 64369 - DNA, 20 bp, Artificial Sequence
  Description of Artificial Sequence: Synthetic oligonucleotide
  Target: LAMA2; (-) strand; PAM type: NRG; PAM sequence: TAG
cattttattttgtcctagaa

SEQ ID NO: 64370 - DNA, 20 bp, Artificial Sequence
  Description of Artificial Sequence: Synthetic oligonucleotide
  Target: LAMA2; (-) strand; PAM type: NRG; PAM sequence: TAG
attctcattttattttgtcc

SEQ ID NO: 64371 - DNA, 20 bp, Artificial Sequence
  Description of Artificial Sequence: Synthetic oligonucleotide
  Target: LAMA2; (-) strand; PAM type: NRG; PAM sequence: TAG
gcctagatatatcatttaat

SEQ ID NO: 64372 - DNA, 20 bp, Artificial Sequence
  Description of Artificial Sequence: Synthetic oligonucleotide
  Target: LAMA2; (-) strand; PAM type: NRG; PAM sequence: TAG
acttgaatggttagtttgcc

SEQ ID NO: 64373 - DNA, 20 bp, Artificial Sequence
  Description of Artificial Sequence: Synthetic oligonucleotide
  Target: LAMA2; (-) strand; PAM type: NRG; PAM sequence: TAG
aaaattaaaacttgaatggt

SEQ ID NO: 64374 - DNA, 20 bp, Artificial Sequence
  Description of Artificial Sequence: Synthetic oligonucleotide
  Target: LAMA2; (-) strand; PAM type: NRG; PAM sequence: TGG
cataaaaattaaaacttgaa

SEQ ID NO: 64375 - DNA, 20 bp, Artificial Sequence
  Description of Artificial Sequence: Synthetic oligonucleotide
  Target: LAMA2; (-) strand; PAM type: NRG; PAM sequence: AAG
agatgtcaggggcacataga

SEQ ID NO: 64376 - DNA, 20 bp, Artificial Sequence
  Description of Artificial Sequence: Synthetic oligonucleotide
  Target: LAMA2; (-) strand; PAM type: NRG; PAM sequence: TAG
gtacagatgtcaggggcaca

SEQ ID NO: 64377 - DNA, 20 bp, Artificial Sequence
  Description of Artificial Sequence: Synthetic oligonucleotide
  Target: LAMA2; (-) strand; PAM type: NRG; PAM sequence: GGG
aacacatgtacagatgtcag

SEQ ID NO: 64378 - DNA, 20 bp, Artificial Sequence
  Description of Artificial Sequence: Synthetic oligonucleotide
  Target: LAMA2; (-) strand; PAM type: NRG; PAM sequence: GGG
aaacacatgtacagatgtca

SEQ ID NO: 64379 - DNA, 20 bp, Artificial Sequence
  Description of Artificial Sequence: Synthetic oligonucleotide
  Target: LAMA2; (-) strand; PAM type: NRG; PAM sequence: AGG
taaacacatgtacagatgtc

SEQ ID NO: 64380 - DNA, 20 bp, Artificial Sequence
  Description of Artificial Sequence: Synthetic oligonucleotide
  Target: LAMA2; (-) strand; PAM type: NRG; PAM sequence: CAG
ttaaacacatgtacagatgt

SEQ ID NO: 64381 - DNA, 20 bp, Artificial Sequence
  Description of Artificial Sequence: Synthetic oligonucleotide
  Target: LAMA2; (-) strand; PAM type: NRG; PAM sequence: CAG
ctggaaattaaacacatgta

SEQ ID NO: 64382 - DNA, 20 bp, Artificial Sequence
  Description of Artificial Sequence: Synthetic oligonucleotide
  Target: LAMA2; (-) strand; PAM type: NRG; PAM sequence: TGG
ttgaagtattttgagctcac

SEQ ID NO: 64383 - DNA, 20 bp, Artificial Sequence
  Description of Artificial Sequence: Synthetic oligonucleotide
  Target: LAMA2; (-) strand; PAM type: NRG; PAM sequence: GAG
gagatcacttgaagtatttt

SEQ ID NO: 64384 - DNA, 20 bp, Artificial Sequence
  Description of Artificial Sequence: Synthetic oligonucleotide
  Target: LAMA2; (-) strand; PAM type: NRG; PAM sequence: AAG
tactcaaatgagatcacttg

SEQ ID NO: 64385 - DNA, 20 bp, Artificial Sequence
  Description of Artificial Sequence: Synthetic oligonucleotide
  Target: LAMA2; (-) strand; PAM type: NRG; PAM sequence: GAG
tccctagttaatactcaaat

SEQ ID NO: 64386 - DNA, 20 bp, Artificial Sequence
  Description of Artificial Sequence: Synthetic oligonucleotide
  Target: LAMA2; (-) strand; PAM type: NRG; PAM sequence: TAG
ggactgtgaatgtatttccc

SEQ ID NO: 64387 - DNA, 20 bp, Artificial Sequence
  Description of Artificial Sequence: Synthetic oligonucleotide
  Target: LAMA2; (-) strand; PAM type: NRG; PAM sequence: TGG
tagacataaaagaaaattgc

SEQ ID NO: 64388 - DNA, 20 bp, Artificial Sequence
  Description of Artificial Sequence: Synthetic oligonucleotide
  Target: LAMA2; (-) strand; PAM type: NRG; PAM sequence: AAG
ttaaaataatgtagacataa

SEQ ID NO: 64389 - DNA, 20 bp, Artificial Sequence
  Description of Artificial Sequence: Synthetic oligonucleotide
  Target: LAMA2; (-) strand; PAM type: NRG; PAM sequence: TAG
tgctatgatttaaaataatg

SEQ ID NO: 64390 - DNA, 20 bp, Artificial Sequence
  Description of Artificial Sequence: Synthetic oligonucleotide
  Target: LAMA2; (-) strand; PAM type: NRG; PAM sequence: TGG
gttctggtcataaagcacag

SEQ ID NO: 64391 - DNA, 20 bp, Artificial Sequence
  Description of Artificial Sequence: Synthetic oligonucleotide
  Target: LAMA2; (-) strand; PAM type: NRG; PAM sequence: CAG
tgtgttctggtcataaagca

SEQ ID NO: 64392 - DNA, 20 bp, Artificial Sequence
  Description of Artificial Sequence: Synthetic oligonucleotide
  Target: LAMA2; (-) strand; PAM type: NRG; PAM sequence: AAG
ataaatgtgttctggtcata

SEQ ID NO: 64393 - DNA, 20 bp, Artificial Sequence
  Description of Artificial Sequence: Synthetic oligonucleotide
  Target: LAMA2; (-) strand; PAM type: NRG; PAM sequence: TGG
ctttgcaaataaatgtgttc

SEQ ID NO: 64394 - DNA, 20 bp, Artificial Sequence
  Description of Artificial Sequence: Synthetic oligonucleotide
  Target: LAMA2; (-) strand; PAM type: NRG; PAM sequence: AAG
tacatactacaatataaggt

SEQ ID NO: 64395 - DNA, 20 bp, Artificial Sequence
  Description of Artificial Sequence: Synthetic oligonucleotide
  Target: LAMA2; (-) strand; PAM type: NRG; PAM sequence: AGG
atactacatactacaatata

SEQ ID NO: 64396 - DNA, 20 bp, Artificial Sequence
  Description of Artificial Sequence: Synthetic oligonucleotide
  Target: LAMA2; (-) strand; PAM type: NRG; PAM sequence: AAG
tatactacatactacaatat

SEQ ID NO: 64397 - DNA, 20 bp, Artificial Sequence
  Description of Artificial Sequence: Synthetic oligonucleotide
  Target: LAMA2; (-) strand; PAM type: NRG; PAM sequence: CAG
attgcatctgacgttttaaa

SEQ ID NO: 64398 - DNA, 20 bp, Artificial Sequence
  Description of Artificial Sequence: Synthetic oligonucleotide
  Target: LAMA2; (-) strand; PAM type: NRG; PAM sequence: AGG
tgctacatctataaatgcta

SEQ ID NO: 64399 - DNA, 20 bp, Artificial Sequence
  Description of Artificial Sequence: Synthetic oligonucleotide
  Target: LAMA2; (-) strand; PAM type: NRG; PAM sequence: AAG
atgctacatctataaatgct

SEQ ID NO: 64400 - DNA, 20 bp, Artificial Sequence
  Description of Artificial Sequence: Synthetic oligonucleotide
  Target: LAMA2; (-) strand; PAM type: NRG; PAM sequence: GAG
acaaatgtctgaaactgaaa

SEQ ID NO: 64401 - DNA, 20 bp, Artificial Sequence
  Description of Artificial Sequence: Synthetic oligonucleotide
  Target: LAMA2; (-) strand; PAM type: NRG; PAM sequence: AAG
tcacaaatgtctgaaactga

SEQ ID NO: 64402 - DNA, 20 bp, Artificial Sequence
  Description of Artificial Sequence: Synthetic oligonucleotide
  Target: LAMA2; (-) strand; PAM type: NRG; PAM sequence: GAG
aaaccatattacacacctat

SEQ ID NO: 64403 - DNA, 20 bp, Artificial Sequence
  Description of Artificial Sequence: Synthetic oligonucleotide
  Target: LAMA2; (-) strand; PAM type: NRG; PAM sequence: GAG
gccgccaatgactagagtca

SEQ ID NO: 64404 - DNA, 20 bp, Artificial Sequence
  Description of Artificial Sequence: Synthetic oligonucleotide
  Target: LAMA2; (-) strand; PAM type: NRG; PAM sequence: CAG
tggccgccaatgactagagt

SEQ ID NO: 64405 - DNA, 20 bp, Artificial Sequence
  Description of Artificial Sequence: Synthetic oligonucleotide
  Target: LAMA2; (-) strand; PAM type: NRG; PAM sequence: GAG
tcactggccgccaatgacta

SEQ ID NO: 64406 - DNA, 20 bp, Artificial Sequence
  Description of Artificial Sequence: Synthetic oligonucleotide
  Target: LAMA2; (-) strand; PAM type: NRG; PAM sequence: TAG
gctcactggccgccaatgac

SEQ ID NO: 64407 - DNA, 20 bp, Artificial Sequence
  Description of Artificial Sequence: Synthetic oligonucleotide
  Target: LAMA2; (-) strand; PAM type: NRG; PAM sequence: TGG
gatcagttgcgcttgctcac

SEQ ID NO: 64408 - DNA, 20 bp, Artificial Sequence
  Description of Artificial Sequence: Synthetic oligonucleotide
  Target: LAMA2; (-) strand; PAM type: NRG; PAM sequence: CAG
tgaagttgatactgggtgat

SEQ ID NO: 64409 - DNA, 20 bp, Artificial Sequence
  Description of Artificial Sequence: Synthetic oligonucleotide
  Target: LAMA2; (-) strand; PAM type: NRG; PAM sequence: GGG
cacattgtgaagttgatact

SEQ ID NO: 64410 - DNA, 20 bp, Artificial Sequence
  Description of Artificial Sequence: Synthetic oligonucleotide
  Target: LAMA2; (-) strand; PAM type: NRG; PAM sequence: TGG
ccacattgtgaagttgatac

SEQ ID NO: 64411 - DNA, 20 bp, Artificial Sequence
  Description of Artificial Sequence: Synthetic oligonucleotide
  Target: LAMA2; (-) strand; PAM type: NRG; PAM sequence: AAG
ttagtggaaaccacattgtg

SEQ ID NO: 64412 - DNA, 20 bp, Artificial Sequence
  Description of Artificial Sequence: Synthetic oligonucleotide
  Target: LAMA2; (-) strand; PAM type: NRG; PAM sequence: TGG
taatataaggtgccgattag

SEQ ID NO: 64413 - DNA, 20 bp, Artificial Sequence
  Description of Artificial Sequence: Synthetic oligonucleotide
  Target: LAMA2; (-) strand; PAM type: NRG; PAM sequence: TAG
aattaatataaggtgccgat

SEQ ID NO: 64414 - DNA, 20 bp, Artificial Sequence
  Description of Artificial Sequence: Synthetic oligonucleotide
  Target: LAMA2; (-) strand; PAM type: NRG; PAM sequence: AGG
atttcataaaaattaatata

SEQ ID NO: 64415 - DNA, 20 bp, Artificial Sequence
  Description of Artificial Sequence: Synthetic oligonucleotide
  Target: LAMA2; (-) strand; PAM type: NRG; PAM sequence: AAG
tatttcataaaaattaatat

SEQ ID NO: 64416 - DNA, 20 bp, Artificial Sequence
  Description of Artificial Sequence: Synthetic oligonucleotide
  Target: LAMA2; (-) strand; PAM type: NRG; PAM sequence: AGG
cccgctcctgctatgaaata

SEQ ID NO: 64417 - DNA, 20 bp, Artificial Sequence
  Description of Artificial Sequence: Synthetic oligonucleotide
  Target: LAMA2; (-) strand; PAM type: NRG; PAM sequence: AAG
acccgctcctgctatgaaat

SEQ ID NO: 64418 - DNA, 20 bp, Artificial Sequence
  Description of Artificial Sequence: Synthetic oligonucleotide
  Target: LAMA2; (-) strand; PAM type: NRG; PAM sequence: GGG
tagccatttaactacttttt

SEQ ID NO: 64419 - DNA, 20 bp, Artificial Sequence
  Description of Artificial Sequence: Synthetic oligonucleotide
  Target: LAMA2; (-) strand; PAM type: NRG; PAM sequence: TGG
ttagccatttaactactttt

SEQ ID NO: 64420 - DNA, 20 bp, Artificial Sequence
  Description of Artificial Sequence: Synthetic oligonucleotide
  Target: LAMA2; (-) strand; PAM type: NRG; PAM sequence: TAG
acataaaaactgtaaaggat

SEQ ID NO: 64421 - DNA, 20 bp, Artificial Sequence
  Description of Artificial Sequence: Synthetic oligonucleotide
  Target: LAMA2; (-) strand; PAM type: NRG; PAM sequence: AGG
caaaaacataaaaactgtaa

SEQ ID NO: 64422 - DNA, 20 bp, Artificial Sequence
  Description of Artificial Sequence: Synthetic oligonucleotide
  Target: LAMA2; (-) strand; PAM type: NRG; PAM sequence: AAG
ccaaaaacataaaaactgta

SEQ ID NO: 64423 - DNA, 20 bp, Artificial Sequence
  Description of Artificial Sequence: Synthetic oligonucleotide
  Target: LAMA2; (-) strand; PAM type: NRG; PAM sequence: GAG
cattcttgagggatagtctt

SEQ ID NO: 64424 - DNA, 20 bp, Artificial Sequence
  Description of Artificial Sequence: Synthetic oligonucleotide
  Target: LAMA2; (-) strand; PAM type: NRG; PAM sequence: TAG
accttgacattcttgaggga

SEQ ID NO: 64425 - DNA, 20 bp, Artificial Sequence
  Description of Artificial Sequence: Synthetic oligonucleotide
  Target: LAMA2; (-) strand; PAM type: NRG; PAM sequence: GGG
caaaaccttgacattcttga

SEQ ID NO: 64426 - DNA, 20 bp, Artificial Sequence
  Description of Artificial Sequence: Synthetic oligonucleotide
  Target: LAMA2; (-) strand; PAM type: NRG; PAM sequence: AGG
gcaaaaccttgacattcttg

SEQ ID NO: 64427 - DNA, 20 bp, Artificial Sequence
  Description of Artificial Sequence: Synthetic oligonucleotide
  Target: LAMA2; (-) strand; PAM type: NRG; PAM sequence: GAG
agcaaaaccttgacattctt

SEQ ID NO: 64428 - DNA, 20 bp, Artificial Sequence
  Description of Artificial Sequence: Synthetic oligonucleotide
  Target: LAMA2; (-) strand; PAM type: NRG; PAM sequence: CAG
ataacaaatgtctttaactt

SEQ ID NO: 64429 - DNA, 20 bp, Artificial Sequence
  Description of Artificial Sequence: Synthetic oligonucleotide
  Target: LAMA2; (-) strand; PAM type: NRG; PAM sequence: CAG
ctactgaaataatctgacca

SEQ ID NO: 64430 - DNA, 20 bp, Artificial Sequence
  Description of Artificial Sequence: Synthetic oligonucleotide
  Target: LAMA2; (-) strand; PAM type: NRG; PAM sequence: GAG
gcagatttctcccttaatgt

SEQ ID NO: 64431 - DNA, 20 bp, Artificial Sequence
  Description of Artificial Sequence: Synthetic oligonucleotide
  Target: LAMA2; (-) strand; PAM type: NRG; PAM sequence: CAG
tgcaaaccatttctagtttg

SEQ ID NO: 64432 - DNA, 20 bp, Artificial Sequence
  Description of Artificial Sequence: Synthetic oligonucleotide
  Target: LAMA2; (-) strand; PAM type: NRG; PAM sequence: TAG
tgccatttgcaaaccatttc

SEQ ID NO: 64433 - DNA, 20 bp, Artificial Sequence
  Description of Artificial Sequence: Synthetic oligonucleotide
  Target: LAMA2; (-) strand; PAM type: NRG; PAM sequence: CAG
gagatttttatcacatgtaa

SEQ ID NO: 64434 - DNA, 20 bp, Artificial Sequence
  Description of Artificial Sequence: Synthetic oligonucleotide
  Target: LAMA2; (-) strand; PAM type: NRG; PAM sequence: GAG
tgtcatcctgaaacccaaaa

SEQ ID NO: 64435 - DNA, 20 bp, Artificial Sequence
  Description of Artificial Sequence: Synthetic oligonucleotide
  Target: LAMA2; (-) strand; PAM type: NRG; PAM sequence: AAG
cttgtcatcctgaaacccaa

SEQ ID NO: 64436 - DNA, 20 bp, Artificial Sequence
  Description of Artificial Sequence: Synthetic oligonucleotide
  Target: LAMA2; (-) strand; PAM type: NRG; PAM sequence: GGG
ctctttaaatgccagtccct

SEQ ID NO: 64437 - DNA, 20 bp, Artificial Sequence
  Description of Artificial Sequence: Synthetic oligonucleotide
  Target: LAMA2; (-) strand; PAM type: NRG; PAM sequence: TGG
tctctttaaatgccagtccc

SEQ ID NO: 64438 - DNA, 20 bp, Artificial Sequence
  Description of Artificial Sequence: Synthetic oligonucleotide
  Target: LAMA2; (-) strand; PAM type: NRG; PAM sequence: CAG
taggagttctctttaaatgc

SEQ ID NO: 64439 - DNA, 20 bp, Artificial Sequence
  Description of Artificial Sequence: Synthetic oligonucleotide
  Target: LAMA2; (-) strand; PAM type: NRG; PAM sequence: GAG
gaatttaagtgtgtgtatag

SEQ ID NO: 64440 - DNA, 20 bp, Artificial Sequence
  Description of Artificial Sequence: Synthetic oligonucleotide
  Target: LAMA2; (-) strand; PAM type: NRG; PAM sequence: AGG
ttgaatttaagtgtgtgtat

SEQ ID NO: 64441 - DNA, 20 bp, Artificial Sequence
  Description of Artificial Sequence: Synthetic oligonucleotide
  Target: LAMA2; (-) strand; PAM type: NRG; PAM sequence: TAG
gttgaatttaagtgtgtgta

SEQ ID NO: 64442 - DNA, 20 bp, Artificial Sequence
  Description of Artificial Sequence: Synthetic oligonucleotide
  Target: LAMA2; (-) strand; PAM type: NRG; PAM sequence: AAG
cagacttttttgttgaattt

SEQ ID NO: 64443 - DNA, 20 bp, Artificial Sequence
  Description of Artificial Sequence: Synthetic oligonucleotide
  Target: LAMA2; (-) strand; PAM type: NRG; PAM sequence: CAG
taattggatattatagaata

SEQ ID NO: 64444 - DNA, 20 bp, Artificial Sequence
  Description of Artificial Sequence: Synthetic oligonucleotide
  Target: LAMA2; (-) strand; PAM type: NRG; PAM sequence: TAG
attaaggtaattggatatta

SEQ ID NO: 64445 - DNA, 20 bp, Artificial Sequence
  Description of Artificial Sequence: Synthetic oligonucleotide
  Target: LAMA2; (-) strand; PAM type: NRG; PAM sequence: TGG
cactacacaattaaggtaat

SEQ ID NO: 64446 - DNA, 20 bp, Artificial Sequence
  Description of Artificial Sequence: Synthetic oligonucleotide
  Target: LAMA2; (-) strand; PAM type: NRG; PAM sequence: AGG
ttttccccactacacaatta

SEQ ID NO: 64447 - DNA, 20 bp, Artificial Sequence
  Description of Artificial Sequence: Synthetic oligonucleotide
  Target: LAMA2; (-) strand; PAM type: NRG; PAM sequence: AAG
attttccccactacacaatt

SEQ ID NO: 64448 - DNA, 20 bp, Artificial Sequence
  Description of Artificial Sequence: Synthetic oligonucleotide
  Target: LAMA2; (-) strand; PAM type: NRG; PAM sequence: CAG
cctaccctagtctagctaac

SEQ ID NO: 64449 - DNA, 20 bp, Artificial Sequence
  Description of Artificial Sequence: Synthetic oligonucleotide
  Target: LAMA2; (-) strand; PAM type: NRG; PAM sequence: TAG
ggtgtcttcctaccctagtc

SEQ ID NO: 64450 - DNA, 20 bp, Artificial Sequence
  Description of Artificial Sequence: Synthetic oligonucleotide
  Target: LAMA2; (-) strand; PAM type: NRG; PAM sequence: TAG
gagctggtgtcttcctaccc

SEQ ID NO: 64451 - DNA, 20 bp, Artificial Sequence
  Description of Artificial Sequence: Synthetic oligonucleotide
  Target: LAMA2; (-) strand; PAM type: NRG; PAM sequence: TGG
gcacaaaacaaacaaagagc

SEQ ID NO: 64452 - DNA, 20 bp, Artificial Sequence
  Description of Artificial Sequence: Synthetic oligonucleotide
  Target: LAMA2; (-) strand; PAM type: NRG; PAM sequence: GAG
caaagcacaaaacaaacaaa

SEQ ID NO: 64453 - DNA, 20 bp, Artificial Sequence
  Description of Artificial Sequence: Synthetic oligonucleotide
  Target: LAMA2; (-) strand; PAM type: NRG; PAM sequence: AAG
gtcaaagcacaaaacaaaca

SEQ ID NO: 64454 - DNA, 20 bp, Artificial Sequence
  Description of Artificial Sequence: Synthetic oligonucleotide
  Target: LAMA2; (-) strand; PAM type: NRG; PAM sequence: AAG
gcgggaaaattgaaatgtca

SEQ ID NO: 64455 - DNA, 20 bp, Artificial Sequence
  Description of Artificial Sequence: Synthetic oligonucleotide
  Target: LAMA2; (-) strand; PAM type: NRG; PAM sequence: GGG
acagaaggacaaagccaagc

SEQ ID NO: 64456 - DNA, 20 bp, Artificial Sequence
  Description of Artificial Sequence: Synthetic oligonucleotide
  Target: LAMA2; (-) strand; PAM type: NRG; PAM sequence: CGG
gacagaaggacaaagccaag

SEQ ID NO: 64457 - DNA, 20 bp, Artificial Sequence
  Description of Artificial Sequence: Synthetic oligonucleotide
  Target: LAMA2; (-) strand; PAM type: NRG; PAM sequence: AAG
gaagacagaaggacaaagcc

SEQ ID NO: 64458 - DNA, 20 bp, Artificial Sequence
  Description of Artificial Sequence: Synthetic oligonucleotide
  Target: LAMA2; (-) strand; PAM type: NRG; PAM sequence: AAG
caagggaagacagaaggaca

SEQ ID NO: 64459 - DNA, 20 bp, Artificial Sequence
  Description of Artificial Sequence: Synthetic oligonucleotide
  Target: LAMA2; (-) strand; PAM type: NRG; PAM sequence: AGG
caatgtcaagggaagacaga

SEQ ID NO: 64460 - DNA, 20 bp, Artificial Sequence
  Description of Artificial Sequence: Synthetic oligonucleotide
  Target: LAMA2; (-) strand; PAM type: NRG; PAM sequence: AAG
tcaatgtcaagggaagacag

SEQ ID NO: 64461 - DNA, 20 bp, Artificial Sequence
  Description of Artificial Sequence: Synthetic oligonucleotide
  Target: LAMA2; (-) strand; PAM type: NRG; PAM sequence: CAG
tcatcaatgtcaagggaaga

SEQ ID NO: 64462 - DNA, 20 bp, Artificial Sequence
  Description of Artificial Sequence: Synthetic oligonucleotide
  Target: LAMA2; (-) strand; PAM type: NRG; PAM sequence: AAG
aaaatcatcaatgtcaaggg

SEQ ID NO: 64463 - DNA, 20 bp, Artificial Sequence
  Description of Artificial Sequence: Synthetic oligonucleotide
  Target: LAMA2; (-) strand; PAM type: NRG; PAM sequence: GGG
aacaaaatcatcaatgtcaa

SEQ ID NO: 64464 - DNA, 20 bp, Artificial Sequence
  Description of Artificial Sequence: Synthetic oligonucleotide
  Target: LAMA2; (-) strand; PAM type: NRG; PAM sequence: AGG
caacaaaatcatcaatgtca

SEQ ID NO: 64465 - DNA, 20 bp, Artificial Sequence
  Description of Artificial Sequence: Synthetic oligonucleotide
  Target: LAMA2; (-) strand; PAM type: NRG; PAM sequence: AAG
acaacaaaatcatcaatgtc

SEQ ID NO: 64466 - DNA, 20 bp, Artificial Sequence
  Description of Artificial Sequence: Synthetic oligonucleotide
  Target: LAMA2; (-) strand; PAM type: NRG; PAM sequence: AGG
tcatatcagtagattcaagg

SEQ ID NO: 64467 - DNA, 20 bp, Artificial Sequence
  Description of Artificial Sequence: Synthetic oligonucleotide
  Target: LAMA2; (-) strand; PAM type: NRG; PAM sequence: GAG
ttcatatcagtagattcaag

SEQ ID NO: 64468 - DNA, 20 bp, Artificial Sequence
  Description of Artificial Sequence: Synthetic oligonucleotide
  Target: LAMA2; (-) strand; PAM type: NRG; PAM sequence: AGG
tcttcatatcagtagattca

SEQ ID NO: 64469 - DNA, 20 bp, Artificial Sequence
  Description of Artificial Sequence: Synthetic oligonucleotide
  Target: LAMA2; (-) strand; PAM type: NRG; PAM sequence: AAG
ctcttcatatcagtagattc

SEQ ID NO: 64470 - DNA, 20 bp, Artificial Sequence
  Description of Artificial Sequence: Synthetic oligonucleotide
  Target: LAMA2; (-) strand; PAM type: NRG; PAM sequence: TAG
tagctttctcttcatatcag

SEQ ID NO: 64471 - DNA, 20 bp, Artificial Sequence
  Description of Artificial Sequence: Synthetic oligonucleotide
  Target: LAMA2; (-) strand; PAM type: NRG; PAM sequence: CAG
ttatagctttctcttcatat

SEQ ID NO: 64472 - DNA, 20 bp, Artificial Sequence
  Description of Artificial Sequence: Synthetic oligonucleotide
  Target: LAMA2; (-) strand; PAM type: NRG; PAM sequence: TAG
cattgtcttaactttagtta

SEQ ID NO: 64473 - DNA, 20 bp, Artificial Sequence
  Description of Artificial Sequence: Synthetic oligonucleotide
  Target: LAMA2; (-) strand; PAM type: NRG; PAM sequence: TAG
ctttaacattgtcttaactt

SEQ ID NO: 64474 - DNA, 20 bp, Artificial Sequence
  Description of Artificial Sequence: Synthetic oligonucleotide
  Target: LAMA2; (-) strand; PAM type: NRG; PAM sequence: TGG
ccctgtagataactgagaat

SEQ ID NO: 64475 - DNA, 20 bp, Artificial Sequence
  Description of Artificial Sequence: Synthetic oligonucleotide
  Target: LAMA2; (-) strand; PAM type: NRG; PAM sequence: GAG
ggatagccctgtagataact

SEQ ID NO: 64476 - DNA, 20 bp, Artificial Sequence
  Description of Artificial Sequence: Synthetic oligonucleotide
  Target: LAMA2; (-) strand; PAM type: NRG; PAM sequence: TAG
ttttcttttggatagccctg

SEQ ID NO: 64477 - DNA, 20 bp, Artificial Sequence
  Description of Artificial Sequence: Synthetic oligonucleotide
  Target: LAMA2; (-) strand; PAM type: NRG; PAM sequence: TAG
atttccatttttcttttgga

SEQ ID NO: 64478 - DNA, 20 bp, Artificial Sequence
  Description of Artificial Sequence: Synthetic oligonucleotide
  Target: LAMA2; (-) strand; PAM type: NRG; PAM sequence: TGG
tgaaatttccatttttcttt

SEQ ID NO: 64479 - DNA, 20 bp, Artificial Sequence
  Description of Artificial Sequence: Synthetic oligonucleotide
  Target: LAMA2; (-) strand; PAM type: NRG; PAM sequence: CAG
atattcctacttaaaagatg

SEQ ID NO: 64480 - DNA, 20 bp, Artificial Sequence
  Description of Artificial Sequence: Synthetic oligonucleotide
  Target: LAMA2; (-) strand; PAM type: NRG; PAM sequence: AAG
cccaaaatattcctacttaa

SEQ ID NO: 64481 - DNA, 20 bp, Artificial Sequence
  Description of Artificial Sequence: Synthetic oligonucleotide
  Target: LAMA2; (-) strand; PAM type: NRG; PAM sequence: TAG
gtgatgagtctggcatataa

SEQ ID NO: 64482 - DNA, 20 bp, Artificial Sequence
  Description of Artificial Sequence: Synthetic oligonucleotide
  Target: LAMA2; (-) strand; PAM type: NRG; PAM sequence: TGG
aatagcaccagtgatgagtc

SEQ ID NO: 64483 - DNA, 20 bp, Artificial Sequence
  Description of Artificial Sequence: Synthetic oligonucleotide
  Target: LAMA2; (-) strand; PAM type: NRG; PAM sequence: GAG
aattaaatagcaccagtgat

SEQ ID NO: 64484 - DNA, 20 bp, Artificial Sequence
  Description of Artificial Sequence: Synthetic oligonucleotide
  Target: LAMA2; (-) strand; PAM type: NRG; PAM sequence: CAG
gaggagaaattaaatagcac

SEQ ID NO: 64485 - DNA, 20 bp, Artificial Sequence
  Description of Artificial Sequence: Synthetic oligonucleotide
  Target: LAMA2; (-) strand; PAM type: NRG; PAM sequence: TAG
tgatgggaggagaaattaaa

SEQ ID NO: 64486 - DNA, 20 bp, Artificial Sequence
  Description of Artificial Sequence: Synthetic oligonucleotide
  Target: LAMA2; (-) strand; PAM type: NRG; PAM sequence: GAG
agagctctcattgatgggag

SEQ ID NO: 64487 - DNA, 20 bp, Artificial Sequence
  Description of Artificial Sequence: Synthetic oligonucleotide
  Target: LAMA2; (-) strand; PAM type: NRG; PAM sequence: AGG
ggagagctctcattgatggg

SEQ ID NO: 64488 - DNA, 20 bp, Artificial Sequence
  Description of Artificial Sequence: Synthetic oligonucleotide
  Target: LAMA2; (-) strand; PAM type: NRG; PAM sequence: GAG
gggagagctctcattgatgg

SEQ ID NO: 64489 - DNA, 20 bp, Artificial Sequence
  Description of Artificial Sequence: Synthetic oligonucleotide
  Target: LAMA2; (-) strand; PAM type: NRG; PAM sequence: GGG
cagggagagctctcattgat

SEQ ID NO: 64490 - DNA, 20 bp, Artificial Sequence
  Description of Artificial Sequence: Synthetic oligonucleotide
  Target: LAMA2; (-) strand; PAM type: NRG; PAM sequence: TGG
tcagggagagctctcattga

SEQ ID NO: 64491 - DNA, 20 bp, Artificial Sequence
  Description of Artificial Sequence: Synthetic oligonucleotide
  Target: LAMA2; (-) strand; PAM type: NRG; PAM sequence: GAG
ctcacaatgtgtctcaggga

SEQ ID NO: 64492 - DNA, 20 bp, Artificial Sequence
  Description of Artificial Sequence: Synthetic oligonucleotide
  Target: LAMA2; (-) strand; PAM type: NRG; PAM sequence: GAG
atctcacaatgtgtctcagg

SEQ ID NO: 64493 - DNA, 20 bp, Artificial Sequence
  Description of Artificial Sequence: Synthetic oligonucleotide
  Target: LAMA2; (-) strand; PAM type: NRG; PAM sequence: GGG
agatctcacaatgtgtctca

SEQ ID NO: 64494 - DNA, 20 bp, Artificial Sequence
  Description of Artificial Sequence: Synthetic oligonucleotide
  Target: LAMA2; (-) strand; PAM type: NRG; PAM sequence: AGG
aagatctcacaatgtgtctc

SEQ ID NO: 64495 - DNA, 20 bp, Artificial Sequence
  Description of Artificial Sequence: Synthetic oligonucleotide
  Target: LAMA2; (-) strand; PAM type: NRG; PAM sequence: CAG
aaagatctcacaatgtgtct

SEQ ID NO: 64496 - DNA, 20 bp, Artificial Sequence
  Description of Artificial Sequence: Synthetic oligonucleotide
  Target: LAMA2; (-) strand; PAM type: NRG; PAM sequence: AAG
taagtgatttcatcctcaga

SEQ ID NO: 64497 - DNA, 20 bp, Artificial Sequence
  Description of Artificial Sequence: Synthetic oligonucleotide
  Target: LAMA2; (-) strand; PAM type: NRG; PAM sequence: CAG
gggttaagtgatttcatcct

SEQ ID NO: 64498 - DNA, 20 bp, Artificial Sequence
  Description of Artificial Sequence: Synthetic oligonucleotide
  Target: LAMA2; (-) strand; PAM type: NRG; PAM sequence: AAG
tcagtggcgttgctggggtt

SEQ ID NO: 64499 - DNA, 20 bp, Artificial Sequence
  Description of Artificial Sequence: Synthetic oligonucleotide
  Target: LAMA2; (-) strand; PAM type: NRG; PAM sequence: GGG
aataatcagtggcgttgctg

SEQ ID NO: 64500 - DNA, 20 bp, Artificial Sequence
  Description of Artificial Sequence: Synthetic oligonucleotide
  Target: LAMA2; (-) strand; PAM type: NRG; PAM sequence: GGG
aaataatcagtggcgttgct

SEQ ID NO: 64501 - DNA, 20 bp, Artificial Sequence
  Description of Artificial Sequence: Synthetic oligonucleotide
  Target: LAMA2; (-) strand; PAM type: NRG; PAM sequence: TGG
aaaataatcagtggcgttgc

SEQ ID NO: 64502 - DNA, 20 bp, Artificial Sequence
  Description of Artificial Sequence: Synthetic oligonucleotide
  Target: LAMA2; (-) strand; PAM type: NRG; PAM sequence: TGG
ttgtagctgaaaataatcag

SEQ ID NO: 64503 - DNA, 20 bp, Artificial Sequence
  Description of Artificial Sequence: Synthetic oligonucleotide
  Target: LAMA2; (-) strand; PAM type: NRG; PAM sequence: CAG
ttgttgtagctgaaaataat

SEQ ID NO: 64504 - DNA, 20 bp, Artificial Sequence
  Description of Artificial Sequence: Synthetic oligonucleotide
  Target: LAMA2; (-) strand; PAM type: NRG; PAM sequence: TAG
gcatagaagtgtggttgttg

SEQ ID NO: 64505 - DNA, 20 bp, Artificial Sequence
  Description of Artificial Sequence: Synthetic oligonucleotide
  Target: LAMA2; (-) strand; PAM type: NRG; PAM sequence: TGG
gatgtgtgtgcatagaagtg

SEQ ID NO: 64506 - DNA, 20 bp, Artificial Sequence
  Description of Artificial Sequence: Synthetic oligonucleotide
  Target: LAMA2; (-) strand; PAM type: NRG; PAM sequence: AAG
tgattgatgtgtgtgcatag

SEQ ID NO: 64507 - DNA, 20 bp, Artificial Sequence
  Description of Artificial Sequence: Synthetic oligonucleotide
  Target: LAMA2; (-) strand; PAM type: NRG; PAM sequence: TAG
gcgtgattgatgtgtgtgca

SEQ ID NO: 64508 - DNA, 20 bp, Artificial Sequence
  Description of Artificial Sequence: Synthetic oligonucleotide
  Target: LAMA2; (-) strand; PAM type: NRG; PAM sequence: TGG
tttttagtcagaatgttttt

SEQ ID NO: 64509 - DNA, 20 bp, Artificial Sequence
  Description of Artificial Sequence: Synthetic oligonucleotide
  Target: LAMA2; (-) strand; PAM type: NRG; PAM sequence: CAG
tttcttttgagctttttagt

SEQ ID NO: 64510 - DNA, 20 bp, Artificial Sequence
  Description of Artificial Sequence: Synthetic oligonucleotide
  Target: LAMA2; (-) strand; PAM type: NRG; PAM sequence: TAG
ttattttcttttgagctttt

SEQ ID NO: 64511 - DNA, 20 bp, Artificial Sequence
  Description of Artificial Sequence: Synthetic oligonucleotide
  Target: LAMA2; (-) strand; PAM type: NRG; PAM sequence: GAG
atgcttaattattttctttt

SEQ ID NO: 64512 - DNA, 20 bp, Artificial Sequence
  Description of Artificial Sequence: Synthetic oligonucleotide
  Target: LAMA2; (-) strand; PAM type: NRG; PAM sequence: GAG
taatatcttcatatggaaaa

SEQ ID NO: 64513 - DNA, 20 bp, Artificial Sequence
  Description of Artificial Sequence: Synthetic oligonucleotide
  Target: LAMA2; (-) strand; PAM type: NRG; PAM sequence: AAG
agtaatatcttcatatggaa

SEQ ID NO: 64514 - DNA, 20 bp, Artificial Sequence
  Description of Artificial Sequence: Synthetic oligonucleotide
  Target: LAMA2; (-) strand; PAM type: NRG; PAM sequence: TGG
tggtcagtaatatcttcata

SEQ ID NO: 64515 - DNA, 20 bp, Artificial Sequence
  Description of Artificial Sequence: Synthetic oligonucleotide
  Target: LAMA2; (-) strand; PAM type: NRG; PAM sequence: CAG
tttttccactttctgctggt

SEQ ID NO: 64516 - DNA, 20 bp, Artificial Sequence
  Description of Artificial Sequence: Synthetic oligonucleotide
  Target: LAMA2; (-) strand; PAM type: NRG; PAM sequence: TGG
tacatttttccactttctgc

SEQ ID NO: 64517 - DNA, 20 bp, Artificial Sequence
  Description of Artificial Sequence: Synthetic oligonucleotide
  Target: LAMA2; (-) strand; PAM type: NRG; PAM sequence: CAG
ctgttcactcattgttaagt

SEQ ID NO: 64518 - DNA, 20 bp, Artificial Sequence
  Description of Artificial Sequence: Synthetic oligonucleotide
  Target: LAMA2; (-) strand; PAM type: NRG; PAM sequence: AAG
gcaactgttcactcattgtt

SEQ ID NO: 64519 - DNA, 20 bp, Artificial Sequence
  Description of Artificial Sequence: Synthetic oligonucleotide
  Target: LAMA2; (-) strand; PAM type: NRG; PAM sequence: GAG
acaacgctgctgaaatttgt

SEQ ID NO: 64520 - DNA, 20 bp, Artificial Sequence
  Description of Artificial Sequence: Synthetic oligonucleotide
  Target: LAMA2; (-) strand; PAM type: NRG; PAM sequence: AAG
aagcaccatgatccactgtc

SEQ ID NO: 64521 - DNA, 20 bp, Artificial Sequence
  Description of Artificial Sequence: Synthetic oligonucleotide
  Target: LAMA2; (-) strand; PAM type: NRG; PAM sequence: AAG
cgggttgcctagcaacacag

SEQ ID NO: 64522 - DNA, 20 bp, Artificial Sequence
  Description of Artificial Sequence: Synthetic oligonucleotide
  Target: LAMA2; (-) strand; PAM type: NRG; PAM sequence: CAG
cctcgggttgcctagcaaca

SEQ ID NO: 64523 - DNA, 20 bp, Artificial Sequence
  Description of Artificial Sequence: Synthetic oligonucleotide
  Target: LAMA2; (-) strand; PAM type: NRG; PAM sequence: TAG
ttccatcccctcgggttgcc

SEQ ID NO: 64524 - DNA, 20 bp, Artificial Sequence
  Description of Artificial Sequence: Synthetic oligonucleotide
  Target: LAMA2; (-) strand; PAM type: NRG; PAM sequence: GGG
tttaaattttccatcccctc

SEQ ID NO: 64525 - DNA, 20 bp, Artificial Sequence
  Description of Artificial Sequence: Synthetic oligonucleotide
  Target: LAMA2; (-) strand; PAM type: NRG; PAM sequence: CGG
gtttaaattttccatcccct

SEQ ID NO: 64526 - DNA, 20 bp, Artificial Sequence
  Description of Artificial Sequence: Synthetic oligonucleotide
  Target: LAMA2; (-) strand; PAM type: NRG; PAM sequence: GAG
taacatacataagtaaattt

SEQ ID NO: 64527 - DNA, 20 bp, Artificial Sequence
  Description of Artificial Sequence: Synthetic oligonucleotide
  Target: LAMA2; (-) strand; PAM type: NRG; PAM sequence: AAG
gtctaaaatctaacatacat

SEQ ID NO: 64528 - DNA, 20 bp, Artificial Sequence
  Description of Artificial Sequence: Synthetic oligonucleotide
  Target: LAMA2; (-) strand; PAM type: NRG; PAM sequence: TAG
acagaatagaaatgtacaac

SEQ ID NO: 64529 - DNA, 20 bp, Artificial Sequence
  Description of Artificial Sequence: Synthetic oligonucleotide
  Target: LAMA2; (-) strand; PAM type: NRG; PAM sequence: TAG
aactcacataaaagacagaa

SEQ ID NO: 64530 - DNA, 20 bp, Artificial Sequence
  Description of Artificial Sequence: Synthetic oligonucleotide
  Target: LAMA2; (-) strand; PAM type: NRG; PAM sequence: CAG
tgagaaactcacataaaaga

SEQ ID NO: 64531 - DNA, 20 bp, Artificial Sequence
  Description of Artificial Sequence: Synthetic oligonucleotide
  Target: LAMA2; (-) strand; PAM type: NRG; PAM sequence: AAG
atactgagaaactcacataa

SEQ ID NO: 64532 - DNA, 20 bp, Artificial Sequence
  Description of Artificial Sequence: Synthetic oligonucleotide
  Target: LAMA2; (-) strand; PAM type: NRG; PAM sequence: GAG
gtgtctttcatgtatatact

SEQ ID NO: 64533 - DNA, 20 bp, Artificial Sequence
  Description of Artificial Sequence: Synthetic oligonucleotide
  Target: LAMA2; (-) strand; PAM type: NRG; PAM sequence: GAG
gaggagcaaggatacaggca

SEQ ID NO: 64534 - DNA, 20 bp, Artificial Sequence
  Description of Artificial Sequence: Synthetic oligonucleotide
  Target: LAMA2; (-) strand; PAM type: NRG; PAM sequence: CAG
tagaggagcaaggatacagg

SEQ ID NO: 64535 - DNA, 20 bp, Artificial Sequence
  Description of Artificial Sequence: Synthetic oligonucleotide
  Target: LAMA2; (-) strand; PAM type: NRG; PAM sequence: AGG
aaatagaggagcaaggatac

SEQ ID NO: 64536 - DNA, 20 bp, Artificial Sequence
  Description of Artificial Sequence: Synthetic oligonucleotide
  Target: LAMA2; (-) strand; PAM type: NRG; PAM sequence: CAG
aaaatagaggagcaaggata

SEQ ID NO: 64537 - DNA, 20 bp, Artificial Sequence
  Description of Artificial Sequence: Synthetic oligonucleotide
  Target: LAMA2; (-) strand; PAM type: NRG; PAM sequence: AGG
ttttcaaaaatagaggagca

SEQ ID NO: 64538 - DNA, 20 bp, Artificial Sequence
  Description of Artificial Sequence: Synthetic oligonucleotide
  Target: LAMA2; (-) strand; PAM type: NRG; PAM sequence: AAG
attttcaaaaatagaggagc

SEQ ID NO: 64539 - DNA, 20 bp, Artificial Sequence
  Description of Artificial Sequence: Synthetic oligonucleotide
  Target: LAMA2; (-) strand; PAM type: NRG; PAM sequence: GAG
gttaattttcaaaaatagag

SEQ ID NO: 64540 - DNA, 20 bp, Artificial Sequence
  Description of Artificial Sequence: Synthetic oligonucleotide
  Target: LAMA2; (-) strand; PAM type: NRG; PAM sequence: AGG
atgttaattttcaaaaatag

SEQ ID NO: 64541 - DNA, 20 bp, Artificial Sequence
  Description of Artificial Sequence: Synthetic oligonucleotide
  Target: LAMA2; (-) strand; PAM type: NRG; PAM sequence: GAG
tatgttaattttcaaaaata

SEQ ID NO: 64542 - DNA, 20 bp, Artificial Sequence
  Description of Artificial Sequence: Synthetic oligonucleotide
  Target: LAMA2; (-) strand; PAM type: NRG; PAM sequence: TAG
actatgttaattttcaaaaa

SEQ ID NO: 64543 - DNA, 20 bp, Artificial Sequence
  Description of Artificial Sequence: Synthetic oligonucleotide
  Target: LAMA2; (-) strand; PAM type: NRG; PAM sequence: AGG
caaccataaaaatgcatatt

SEQ ID NO: 64544 - DNA, 20 bp, Artificial Sequence
  Description of Artificial Sequence: Synthetic oligonucleotide
  Target: LAMA2; (-) strand; PAM type: NRG; PAM sequence: TAG
tcaaccataaaaatgcatat

SEQ ID NO: 64545 - DNA, 20 bp, Artificial Sequence
  Description of Artificial Sequence: Synthetic oligonucleotide
  Target: LAMA2; (-) strand; PAM type: NRG; PAM sequence: AGG
aaacaatctttttacatcaa

SEQ ID NO: 64546 - DNA, 20 bp, Artificial Sequence
  Description of Artificial Sequence: Synthetic oligonucleotide
  Target: LAMA2; (-) strand; PAM type: NRG; PAM sequence: AAG
aaaacaatctttttacatca

SEQ ID NO: 64547 - DNA, 20 bp, Artificial Sequence
  Description of Artificial Sequence: Synthetic oligonucleotide
  Target: LAMA2; (-) strand; PAM type: NRG; PAM sequence: AAG
acacacaagcatatattgta

SEQ ID NO: 64548 - DNA, 20 bp, Artificial Sequence
  Description of Artificial Sequence: Synthetic oligonucleotide
  Target: LAMA2; (-) strand; PAM type: NRG; PAM sequence: AAG
cccctctgactgacacacac

SEQ ID NO: 64549 - DNA, 20 bp, Artificial Sequence
  Description of Artificial Sequence: Synthetic oligonucleotide
  Target: LAMA2; (-) strand; PAM type: NRG; PAM sequence: CAG
ctttcatagatctcttgttt

SEQ ID NO: 64550 - DNA, 20 bp, Artificial Sequence
  Description of Artificial Sequence: Synthetic oligonucleotide
  Target: LAMA2; (-) strand; PAM type: NRG; PAM sequence: TAG
cagactgttcccttctttca

SEQ ID NO: 64551 - DNA, 20 bp, Artificial Sequence
  Description of Artificial Sequence: Synthetic oligonucleotide
  Target: LAMA2; (-) strand; PAM type: NRG; PAM sequence: CAG
gaagaaccaggtggaactaa

SEQ ID NO: 64552 - DNA, 20 bp, Artificial Sequence
  Description of Artificial Sequence: Synthetic oligonucleotide
  Target: LAMA2; (-) strand; PAM type: NRG; PAM sequence: TGG
attaaatgagaagaaccagg

SEQ ID NO: 64553 - DNA, 20 bp, Artificial Sequence
  Description of Artificial Sequence: Synthetic oligonucleotide
  Target: LAMA2; (-) strand; PAM type: NRG; PAM sequence: AGG
gtaattaaatgagaagaacc

SEQ ID NO: 64554 - DNA, 20 bp, Artificial Sequence
  Description of Artificial Sequence: Synthetic oligonucleotide
  Target: LAMA2; (-) strand; PAM type: NRG; PAM sequence: CAG
agtaattaaatgagaagaac

SEQ ID NO: 64555 - DNA, 20 bp, Artificial Sequence
  Description of Artificial Sequence: Synthetic oligonucleotide
  Target: LAMA2; (-) strand; PAM type: NRG; PAM sequence: AAG
aattatagtaattaaatgag

SEQ ID NO: 64556 - DNA, 20 bp, Artificial Sequence
  Description of Artificial Sequence: Synthetic oligonucleotide
  Target: LAMA2; (-) strand; PAM type: NRG; PAM sequence: GAG
attaattatagtaattaaat

SEQ ID NO: 64557 - DNA, 20 bp, Artificial Sequence
  Description of Artificial Sequence: Synthetic oligonucleotide
  Target: LAMA2; (-) strand; PAM type: NRG; PAM sequence: TAG
tcttctgcatatattaatta

SEQ ID NO: 64558 - DNA, 20 bp, Artificial Sequence
  Description of Artificial Sequence: Synthetic oligonucleotide
  Target: LAMA2; (-) strand; PAM type: NRG; PAM sequence: AAG
tttaatatctccctggattt

SEQ ID NO: 64559 - DNA, 20 bp, Artificial Sequence
  Description of Artificial Sequence: Synthetic oligonucleotide
  Target: LAMA2; (-) strand; PAM type: NRG; PAM sequence: TGG
tttgacatttaatatctccc

SEQ ID NO: 64560 - DNA, 20 bp, Artificial Sequence
  Description of Artificial Sequence: Synthetic oligonucleotide
  Target: LAMA2; (-) strand; PAM type: NRG; PAM sequence: TAG
aatgtattgttcaagttgat

SEQ ID NO: 64561 - DNA, 20 bp, Artificial Sequence
  Description of Artificial Sequence: Synthetic oligonucleotide
  Target: LAMA2; (-) strand; PAM type: NRG; PAM sequence: AAG
aacattataatgtattgttc

SEQ ID NO: 64562 - DNA, 20 bp, Artificial Sequence
  Description of Artificial Sequence: Synthetic oligonucleotide
  Target: LAMA2; (-) strand; PAM type: NRG; PAM sequence: CAG
acttgaaattaatatgctac

SEQ ID NO: 64563 - DNA, 20 bp, Artificial Sequence
  Description of Artificial Sequence: Synthetic oligonucleotide
  Target: LAMA2; (-) strand; PAM type: NRG; PAM sequence: AAG
acaaaaccactgcagttatc

SEQ ID NO: 64564 - DNA, 20 bp, Artificial Sequence
  Description of Artificial Sequence: Synthetic oligonucleotide
  Target: LAMA2; (-) strand; PAM type: NRG; PAM sequence: CAG
ttggattcacaaaaccactg

SEQ ID NO: 64565 - DNA, 20 bp, Artificial Sequence
  Description of Artificial Sequence: Synthetic oligonucleotide
  Target: LAMA2; (-) strand; PAM type: NRG; PAM sequence: TGG
caacatttaactcttaaaat

SEQ ID NO: 64566 - DNA, 20 bp, Artificial Sequence
  Description of Artificial Sequence: Synthetic oligonucleotide
  Target: LAMA2; (-) strand; PAM type: NRG; PAM sequence: TGG
aatatctattctctgattca

SEQ ID NO: 64567 - DNA, 20 bp, Artificial Sequence
  Description of Artificial Sequence: Synthetic oligonucleotide
  Target: LAMA2; (-) strand; PAM type: NRG; PAM sequence: CAG
ctattatgcatcatttcata

SEQ ID NO: 64568 - DNA, 20 bp, Artificial Sequence
  Description of Artificial Sequence: Synthetic oligonucleotide
  Target: LAMA2; (-) strand; PAM type: NRG; PAM sequence: CAG
ccatcaattttcagcagctt

SEQ ID NO: 64569 - DNA, 20 bp, Artificial Sequence
  Description of Artificial Sequence: Synthetic oligonucleotide
  Target: LAMA2; (-) strand; PAM type: NRG; PAM sequence: CAG
tttagaccatcaattttcag

SEQ ID NO: 64570 - DNA, 20 bp, Artificial Sequence
  Description of Artificial Sequence: Synthetic oligonucleotide
  Target: LAMA2; (-) strand; PAM type: NRG; PAM sequence: CAG
tgatttagaccatcaatttt

SEQ ID NO: 64571 - DNA, 20 bp, Artificial Sequence
  Description of Artificial Sequence: Synthetic oligonucleotide
  Target: LAMA2; (-) strand; PAM type: NRG; PAM sequence: TAG
cctaatccatccttttgatt

SEQ ID NO: 64572 - DNA, 20 bp, Artificial Sequence
  Description of Artificial Sequence: Synthetic oligonucleotide
  Target: LAMA2; (-) strand; PAM type: NRG; PAM sequence: AAG
aggtctgtaataattccgca

SEQ ID NO: 64573 - DNA, 20 bp, Artificial Sequence
  Description of Artificial Sequence: Synthetic oligonucleotide
  Target: LAMA2; (-) strand; PAM type: NRG; PAM sequence: AGG
tgcttttctcacaaaactac

SEQ ID NO: 64574 - DNA, 20 bp, Artificial Sequence
  Description of Artificial Sequence: Synthetic oligonucleotide
  Target: LAMA2; (-) strand; PAM type: NRG; PAM sequence: CAG
ctgcttttctcacaaaacta

SEQ ID NO: 64575 - DNA, 20 bp, Artificial Sequence
  Description of Artificial Sequence: Synthetic oligonucleotide
  Target: LAMA2; (-) strand; PAM type: NRG; PAM sequence: AAG
tcaaatcctccttgaagtaa

SEQ ID NO: 64576 - DNA, 20 bp, Artificial Sequence
  Description of Artificial Sequence: Synthetic oligonucleotide
  Target: LAMA2; (-) strand; PAM type: NRG; PAM sequence: AAG
aatacttcaaatcctccttg

SEQ ID NO: 64577 - DNA, 20 bp, Artificial Sequence
  Description of Artificial Sequence: Synthetic oligonucleotide
  Target: LAMA2; (-) strand; PAM type: NRG; PAM sequence: AAG
tagctagctgtaaactgact

SEQ ID NO: 64578 - DNA, 20 bp, Artificial Sequence
  Description of Artificial Sequence: Synthetic oligonucleotide
  Target: LAMA2; (-) strand; PAM type: NRG; PAM sequence: TAG
acaagtttgcactgtctagc

SEQ ID NO: 64579 - DNA, 20 bp, Artificial Sequence
  Description of Artificial Sequence: Synthetic oligonucleotide
  Target: LAMA2; (-) strand; PAM type: NRG; PAM sequence: TAG
cttcacaagtttgcactgtc

SEQ ID NO: 64580 - DNA, 20 bp, Artificial Sequence
  Description of Artificial Sequence: Synthetic oligonucleotide
  Target: LAMA2; (-) strand; PAM type: NRG; PAM sequence: AAG
ctgaaaacatcctccttcac

SEQ ID NO: 64581 - DNA, 20 bp, Artificial Sequence
  Description of Artificial Sequence: Synthetic oligonucleotide
  Target: LAMA2; (-) strand; PAM type: NRG; PAM sequence: TAG
caggactggtgccatgatcc

SEQ ID NO: 64582 - DNA, 20 bp, Artificial Sequence
  Description of Artificial Sequence: Synthetic oligonucleotide
  Target: LAMA2; (-) strand; PAM type: NRG; PAM sequence: TGG
tccccctatttcttcaggac

SEQ ID NO: 64583 - DNA, 20 bp, Artificial Sequence
  Description of Artificial Sequence: Synthetic oligonucleotide
  Target: LAMA2; (-) strand; PAM type: NRG; PAM sequence: AGG
aaagttccccctatttcttc

SEQ ID NO: 64584 - DNA, 20 bp, Artificial Sequence
  Description of Artificial Sequence: Synthetic oligonucleotide
  Target: LAMA2; (-) strand; PAM type: NRG; PAM sequence: CAG
aaaagttccccctatttctt

SEQ ID NO: 64585 - DNA, 20 bp, Artificial Sequence
  Description of Artificial Sequence: Synthetic oligonucleotide
  Target: LAMA2; (-) strand; PAM type: NRG; PAM sequence: AAG
tatggtatgatggagatcaa

SEQ ID NO: 64586 - DNA, 20 bp, Artificial Sequence
  Description of Artificial Sequence: Synthetic oligonucleotide
  Target: LAMA2; (-) strand; PAM type: NRG; PAM sequence: GAG
ggtgtgtatatggtatgatg

SEQ ID NO: 64587 - DNA, 20 bp, Artificial Sequence
  Description of Artificial Sequence: Synthetic oligonucleotide
  Target: LAMA2; (-) strand; PAM type: NRG; PAM sequence: TGG
taggtgtgtatatggtatga

SEQ ID NO: 64588 - DNA, 20 bp, Artificial Sequence
  Description of Artificial Sequence: Synthetic oligonucleotide
  Target: LAMA2; (-) strand; PAM type: NRG; PAM sequence: TGG
cccacacataggtgtgtata

SEQ ID NO: 64589 - DNA, 20 bp, Artificial Sequence
  Description of Artificial Sequence: Synthetic oligonucleotide
  Target: LAMA2; (-) strand; PAM type: NRG; PAM sequence: AGG
ccattagcattcccacacat

SEQ ID NO: 64590 - DNA, 20 bp, Artificial Sequence
  Description of Artificial Sequence: Synthetic oligonucleotide
  Target: LAMA2; (-) strand; PAM type: NRG; PAM sequence: TAG
cccattagcattcccacaca

SEQ ID NO: 64591 - DNA, 20 bp, Artificial Sequence
  Description of Artificial Sequence: Synthetic oligonucleotide
  Target: LAMA2; (-) strand; PAM type: NRG; PAM sequence: TAG
tgtatcagattctatcccat

SEQ ID NO: 64592 - DNA, 20 bp, Artificial Sequence
  Description of Artificial Sequence: Synthetic oligonucleotide
  Target: LAMA2; (-) strand; PAM type: NRG; PAM sequence: CAG
gtttcagaccctaactgtat

SEQ ID NO: 64593 - DNA, 20 bp, Artificial Sequence
  Description of Artificial Sequence: Synthetic oligonucleotide
  Target: LAMA2; (-) strand; PAM type: NRG; PAM sequence: CAG
cataagaactcgtagtgttt

SEQ ID NO: 64594 - DNA, 20 bp, Artificial Sequence
  Description of Artificial Sequence: Synthetic oligonucleotide
  Target: LAMA2; (-) strand; PAM type: NRG; PAM sequence: TAG
caaagtaccataagaactcg

SEQ ID NO: 64595 - DNA, 20 bp, Artificial Sequence
  Description of Artificial Sequence: Synthetic oligonucleotide
  Target: LAMA2; (-) strand; PAM type: NRG; PAM sequence: AAG
atattgaatcaaagtaccat

SEQ ID NO: 64596 - DNA, 20 bp, Artificial Sequence
  Description of Artificial Sequence: Synthetic oligonucleotide
  Target: LAMA2; (-) strand; PAM type: NRG; PAM sequence: AAG
ctcaactaaatattgaatca

SEQ ID NO: 64597 - DNA, 20 bp, Artificial Sequence
  Description of Artificial Sequence: Synthetic oligonucleotide
  Target: LAMA2; (-) strand; PAM type: NRG; PAM sequence: AAG
gataatacaaataagtgaac

SEQ ID NO: 64598 - DNA, 20 bp, Artificial Sequence
  Description of Artificial Sequence: Synthetic oligonucleotide
  Target: LAMA2; (-) strand; PAM type: NRG; PAM sequence: AAG
ctaatgaggataatacaaat

SEQ ID NO: 64599 - DNA, 20 bp, Artificial Sequence
  Description of Artificial Sequence: Synthetic oligonucleotide
  Target: LAMA2; (-) strand; PAM type: NRG; PAM sequence: AGG
tatacaggttcaatctaatg

SEQ ID NO: 64600 - DNA, 20 bp, Artificial Sequence
  Description of Artificial Sequence: Synthetic oligonucleotide
  Target: LAMA2; (-) strand; PAM type: NRG; PAM sequence: GAG
ctatacaggttcaatctaat

SEQ ID NO: 64601 - DNA, 20 bp, Artificial Sequence
  Description of Artificial Sequence: Synthetic oligonucleotide
  Target: LAMA2; (-) strand; PAM type: NRG; PAM sequence: AGG
tttcaaagataaacctatac

SEQ ID NO: 64602 - DNA, 20 bp, Artificial Sequence
  Description of Artificial Sequence: Synthetic oligonucleotide
  Target: LAMA2; (-) strand; PAM type: NRG; PAM sequence: CAG
gtttcaaagataaacctata

SEQ ID NO: 64603 - DNA, 20 bp, Artificial Sequence
  Description of Artificial Sequence: Synthetic oligonucleotide
  Target: LAMA2; (-) strand; PAM type: NRG; PAM sequence: AAG
caatttaatctttagtttca

SEQ ID NO: 64604 - DNA, 20 bp, Artificial Sequence
  Description of Artificial Sequence: Synthetic oligonucleotide
  Target: LAMA2; (-) strand; PAM type: NRG; PAM sequence: TAG
cttaaattcaatttaatctt

SEQ ID NO: 64605 - DNA, 20 bp, Artificial Sequence
  Description of Artificial Sequence: Synthetic oligonucleotide
  Target: LAMA2; (-) strand; PAM type: NRG; PAM sequence: TAG
aatcttgataaaaaatacag

SEQ ID NO: 64606 - DNA, 20 bp, Artificial Sequence
  Description of Artificial Sequence: Synthetic oligonucleotide
  Target: LAMA2; (-) strand; PAM type: NRG; PAM sequence: CAG
aataatcttgataaaaaata

SEQ ID NO: 64607 - DNA, 20 bp, Artificial Sequence
  Description of Artificial Sequence: Synthetic oligonucleotide
  Target: LAMA2; (-) strand; PAM type: NRG; PAM sequence: AAG
actcaggattcctgtgatac

SEQ ID NO: 64608 - DNA, 20 bp, Artificial Sequence
  Description of Artificial Sequence: Synthetic oligonucleotide
  Target: LAMA2; (-) strand; PAM type: NRG; PAM sequence: AGG
atagtattaggtatgtactc

SEQ ID NO: 64609 - DNA, 20 bp, Artificial Sequence
  Description of Artificial Sequence: Synthetic oligonucleotide
  Target: LAMA2; (-) strand; PAM type: NRG; PAM sequence: CAG
gatagtattaggtatgtact

SEQ ID NO: 64610 - DNA, 20 bp, Artificial Sequence
  Description of Artificial Sequence: Synthetic oligonucleotide
  Target: LAMA2; (-) strand; PAM type: NRG; PAM sequence: AGG
atacagtagaggatagtatt

SEQ ID NO: 64611 - DNA, 20 bp, Artificial Sequence
  Description of Artificial Sequence: Synthetic oligonucleotide
  Target: LAMA2; (-) strand; PAM type: NRG; PAM sequence: TAG
tatacagtagaggatagtat

SEQ ID NO: 64612 - DNA, 20 bp, Artificial Sequence
  Description of Artificial Sequence: Synthetic oligonucleotide
  Target: LAMA2; (-) strand; PAM type: NRG; PAM sequence: TAG
aatttctatacagtagagga

SEQ ID NO: 64613 - DNA, 20 bp, Artificial Sequence
  Description of Artificial Sequence: Synthetic oligonucleotide
  Target: LAMA2; (-) strand; PAM type: NRG; PAM sequence: AGG
actaaatttctatacagtag

SEQ ID NO: 64614 - DNA, 20 bp, Artificial Sequence
  Description of Artificial Sequence: Synthetic oligonucleotide
  Target: LAMA2; (-) strand; PAM type: NRG; PAM sequence: GAG
tactaaatttctatacagta

SEQ ID NO: 64615 - DNA, 20 bp, Artificial Sequence
  Description of Artificial Sequence: Synthetic oligonucleotide
  Target: LAMA2; (-) strand; PAM type: NRG; PAM sequence: TAG
attactaaatttctatacag

SEQ ID NO: 64616 - DNA, 20 bp, Artificial Sequence
  Description of Artificial Sequence: Synthetic oligonucleotide
  Target: LAMA2; (-) strand; PAM type: NRG; PAM sequence: CAG
attattactaaatttctata

SEQ ID NO: 64617 - DNA, 20 bp, Artificial Sequence
  Description of Artificial Sequence: Synthetic oligonucleotide
  Target: LAMA2; (-) strand; PAM type: NRG; PAM sequence: GAG
gcccagaaaaccaaatccag

SEQ ID NO: 64618 - DNA, 20 bp, Artificial Sequence
  Description of Artificial Sequence: Synthetic oligonucleotide
  Target: LAMA2; (-) strand; PAM type: NRG; PAM sequence: AGG
ctgcccagaaaaccaaatcc

SEQ ID NO: 64619 - DNA, 20 bp, Artificial Sequence
  Description of Artificial Sequence: Synthetic oligonucleotide
  Target: LAMA2; (-) strand; PAM type: NRG; PAM sequence: CAG
tctgcccagaaaaccaaatc

SEQ ID NO: 64620 - DNA, 20 bp, Artificial Sequence
  Description of Artificial Sequence: Synthetic oligonucleotide
  Target: LAMA2; (-) strand; PAM type: NRG; PAM sequence: CAG
agtttttaattttctctgcc

SEQ ID NO: 64621 - DNA, 20 bp, Artificial Sequence
  Description of Artificial Sequence: Synthetic oligonucleotide
  Target: LAMA2; (-) strand; PAM type: NRG; PAM sequence: AAG
ttctacatgatacctgctta

SEQ ID NO: 64622 - DNA, 20 bp, Artificial Sequence
  Description of Artificial Sequence: Synthetic oligonucleotide
  Target: LAMA2; (-) strand; PAM type: NRG; PAM sequence: GAG
cccacaaaataatatctgtt

SEQ ID NO: 64623 - DNA, 20 bp, Artificial Sequence
  Description of Artificial Sequence: Synthetic oligonucleotide
  Target: LAMA2; (-) strand; PAM type: NRG; PAM sequence: TAG
ataatagaattaatgttaat

SEQ ID NO: 64624 - DNA, 20 bp, Artificial Sequence
  Description of Artificial Sequence: Synthetic oligonucleotide
  Target: LAMA2; (-) strand; PAM type: NRG; PAM sequence: TAG
gggtgttatgttaaatataa

SEQ ID NO: 64625 - DNA, 20 bp, Artificial Sequence
  Description of Artificial Sequence: Synthetic oligonucleotide
  Target: LAMA2; (-) strand; PAM type: NRG; PAM sequence: GGG
tttattcaccgaggtatata

SEQ ID NO: 64626 - DNA, 20 bp, Artificial Sequence
  Description of Artificial Sequence: Synthetic oligonucleotide
  Target: LAMA2; (-) strand; PAM type: NRG; PAM sequence: AGG
ctttattcaccgaggtatat

SEQ ID NO: 64627 - DNA, 20 bp, Artificial Sequence
  Description of Artificial Sequence: Synthetic oligonucleotide
  Target: LAMA2; (-) strand; PAM type: NRG; PAM sequence: TAG
tctttattcaccgaggtata

SEQ ID NO: 64628 - DNA, 20 bp, Artificial Sequence
  Description of Artificial Sequence: Synthetic oligonucleotide
  Target: LAMA2; (-) strand; PAM type: NRG; PAM sequence: AGG
gaaatcttctttattcaccg

SEQ ID NO: 64629 - DNA, 20 bp, Artificial Sequence
  Description of Artificial Sequence: Synthetic oligonucleotide
  Target: LAMA2; (-) strand; PAM type: NRG; PAM sequence: GAG
agaaatcttctttattcacc

SEQ ID NO: 64630 - DNA, 20 bp, Artificial Sequence
  Description of Artificial Sequence: Synthetic oligonucleotide
  Target: LAMA2; (-) strand; PAM type: NRG; PAM sequence: TAG
tacctcttaaactcatcctt

SEQ ID NO: 64631 - DNA, 20 bp, Artificial Sequence
  Description of Artificial Sequence: Synthetic oligonucleotide
  Target: LAMA2; (-) strand; PAM type: NRG; PAM sequence: TGG
ggatttctttactaaatatc

SEQ ID NO: 64632 - DNA, 20 bp, Artificial Sequence
  Description of Artificial Sequence: Synthetic oligonucleotide
  Target: LAMA2; (-) strand; PAM type: NRG; PAM sequence: GGG
tcacaaatctagggaatcat

SEQ ID NO: 64633 - DNA, 20 bp, Artificial Sequence
  Description of Artificial Sequence: Synthetic oligonucleotide
  Target: LAMA2; (-) strand; PAM type: NRG; PAM sequence: TGG
gtcacaaatctagggaatca

SEQ ID NO: 64634 - DNA, 20 bp, Artificial Sequence
  Description of Artificial Sequence: Synthetic oligonucleotide
  Target: LAMA2; (-) strand; PAM type: NRG; PAM sequence: GGG
actgaagagtcacaaatcta

SEQ ID NO: 64635 - DNA, 20 bp, Artificial Sequence
  Description of Artificial Sequence: Synthetic oligonucleotide
  Target: LAMA2; (-) strand; PAM type: NRG; PAM sequence: AGG
cactgaagagtcacaaatct

SEQ ID NO: 64636 - DNA, 20 bp, Artificial Sequence
  Description of Artificial Sequence: Synthetic oligonucleotide
  Target: LAMA2; (-) strand; PAM type: NRG; PAM sequence: TAG
tcactgaagagtcacaaatc

SEQ ID NO: 64637 - DNA, 20 bp, Artificial Sequence
  Description of Artificial Sequence: Synthetic oligonucleotide
  Target: LAMA2; (-) strand; PAM type: NRG; PAM sequence: GAG
taattaaatgtgtcactgaa

SEQ ID NO: 64638 - DNA, 20 bp, Artificial Sequence
  Description of Artificial Sequence: Synthetic oligonucleotide
  Target: LAMA2; (-) strand; PAM type: NRG; PAM sequence: AAG
actaattaaatgtgtcactg

SEQ ID NO: 64639 - DNA, 20 bp, Artificial Sequence
  Description of Artificial Sequence: Synthetic oligonucleotide
  Target: LAMA2; (-) strand; PAM type: NRG; PAM sequence: AAG
aaagaattctgggattcaca

SEQ ID NO: 64640 - DNA, 20 bp, Artificial Sequence
  Description of Artificial Sequence: Synthetic oligonucleotide
  Target: LAMA2; (-) strand; PAM type: NRG; PAM sequence: GGG
cagtatatacaaagaattct

SEQ ID NO: 64641 - DNA, 20 bp, Artificial Sequence
  Description of Artificial Sequence: Synthetic oligonucleotide
  Target: LAMA2; (-) strand; PAM type: NRG; PAM sequence: TGG
acagtatatacaaagaattc

SEQ ID NO: 64642 - DNA, 20 bp, Artificial Sequence
  Description of Artificial Sequence: Synthetic oligonucleotide
  Target: LAMA2; (-) strand; PAM type: NRG; PAM sequence: AAG
ggtatatcacagtatataca

SEQ ID NO: 64643 - DNA, 20 bp, Artificial Sequence
  Description of Artificial Sequence: Synthetic oligonucleotide
  Target: LAMA2; (-) strand; PAM type: NRG; PAM sequence: CAG
gacaaaaatatggtatatca

SEQ ID NO: 64644 - DNA, 20 bp, Artificial Sequence
  Description of Artificial Sequence: Synthetic oligonucleotide
  Target: LAMA2; (-) strand; PAM type: NRG; PAM sequence: TGG
ttgttactatgacaaaaata

SEQ ID NO: 64645 - DNA, 20 bp, Artificial Sequence
  Description of Artificial Sequence: Synthetic oligonucleotide
  Target: LAMA2; (-) strand; PAM type: NRG; PAM sequence: CAG
agattcatctataggagaat

SEQ ID NO: 64646 - DNA, 20 bp, Artificial Sequence
  Description of Artificial Sequence: Synthetic oligonucleotide
  Target: LAMA2; (-) strand; PAM type: NRG; PAM sequence: GAG
acgcagagattcatctatag

SEQ ID NO: 64647 - DNA, 20 bp, Artificial Sequence
  Description of Artificial Sequence: Synthetic oligonucleotide
  Target: LAMA2; (-) strand; PAM type: NRG; PAM sequence: AGG
gaacgcagagattcatctat

SEQ ID NO: 64648 - DNA, 20 bp, Artificial Sequence
  Description of Artificial Sequence: Synthetic oligonucleotide
  Target: LAMA2; (-) strand; PAM type: NRG; PAM sequence: TAG
agaacgcagagattcatcta

SEQ ID NO: 64649 - DNA, 20 bp, Artificial Sequence
  Description of Artificial Sequence: Synthetic oligonucleotide
  Target: LAMA2; (-) strand; PAM type: NRG; PAM sequence: GAG
agcatgaaagatagaacgca

SEQ ID NO: 64650 - DNA, 20 bp, Artificial Sequence
  Description of Artificial Sequence: Synthetic oligonucleotide
  Target: LAMA2; (-) strand; PAM type: NRG; PAM sequence: CAG
gtagcatgaaagatagaacg

SEQ ID NO: 64651 - DNA, 20 bp, Artificial Sequence
  Description of Artificial Sequence: Synthetic oligonucleotide
  Target: LAMA2; (-) strand; PAM type: NRG; PAM sequence: TAG
attcaaagtagcatgaaaga

SEQ ID NO: 64652 - DNA, 20 bp, Artificial Sequence
  Description of Artificial Sequence: Synthetic oligonucleotide
  Target: LAMA2; (-) strand; PAM type: NRG; PAM sequence: AAG
ccgaattcaaagtagcatga

SEQ ID NO: 64653 - DNA, 20 bp, Artificial Sequence
  Description of Artificial Sequence: Synthetic oligonucleotide
  Target: LAMA2; (-) strand; PAM type: NRG; PAM sequence: TAG
tttaaaaaccgaattcaaag

SEQ ID NO: 64654 - DNA, 20 bp, Artificial Sequence
  Description of Artificial Sequence: Synthetic oligonucleotide
  Target: LAMA2; (-) strand; PAM type: NRG; PAM sequence: AAG
agttttaaaaaccgaattca

SEQ ID NO: 64655 - DNA, 20 bp, Artificial Sequence
  Description of Artificial Sequence: Synthetic oligonucleotide
  Target: LAMA2; (-) strand; PAM type: NRG; PAM sequence: CAG
agtactgtgatatttaaatt

SEQ ID NO: 64656 - DNA, 20 bp, Artificial Sequence
  Description of Artificial Sequence: Synthetic oligonucleotide
  Target: LAMA2; (-) strand; PAM type: NRG; PAM sequence: AAG
gttgttgaatatcatatgat

SEQ ID NO: 64657 - DNA, 20 bp, Artificial Sequence
  Description of Artificial Sequence: Synthetic oligonucleotide
  Target: LAMA2; (-) strand; PAM type: NRG; PAM sequence: AGG
aaataaaatggaaaacagtc

SEQ ID NO: 64658 - DNA, 20 bp, Artificial Sequence
  Description of Artificial Sequence: Synthetic oligonucleotide
  Target: LAMA2; (-) strand; PAM type: NRG; PAM sequence: CAG
aaaataaaatggaaaacagt

SEQ ID NO: 64659 - DNA, 20 bp, Artificial Sequence
  Description of Artificial Sequence: Synthetic oligonucleotide
  Target: LAMA2; (-) strand; PAM type: NRG; PAM sequence: CAG
aaataaaataaaatggaaaa

SEQ ID NO: 64660 - DNA, 20 bp, Artificial Sequence
  Description of Artificial Sequence: Synthetic oligonucleotide
  Target: LAMA2; (-) strand; PAM type: NRG; PAM sequence: TGG
gttgataaaataaaataaaa

SEQ ID NO: 64661 - DNA, 20 bp, Artificial Sequence
  Description of Artificial Sequence: Synthetic oligonucleotide
  Target: LAMA2; (-) strand; PAM type: NRG; PAM sequence: AAG
actccctgattctaaaataa

SEQ ID NO: 64662 - DNA, 20 bp, Artificial Sequence
  Description of Artificial Sequence: Synthetic oligonucleotide
  Target: LAMA2; (-) strand; PAM type: NRG; PAM sequence: CAG
ttcatttgtactccaaacct

SEQ ID NO: 64663 - DNA, 20 bp, Artificial Sequence
  Description of Artificial Sequence: Synthetic oligonucleotide
  Target: LAMA2; (-) strand; PAM type: NRG; PAM sequence: CAG
tatacccactacctgaatga

SEQ ID NO: 64664 - DNA, 20 bp, Artificial Sequence
  Description of Artificial Sequence: Synthetic oligonucleotide
  Target: LAMA2; (-) strand; PAM type: NRG; PAM sequence: AGG
tcaaaacaaaactgcctatc

SEQ ID NO: 64665 - DNA, 20 bp, Artificial Sequence
  Description of Artificial Sequence: Synthetic oligonucleotide
  Target: LAMA2; (-) strand; PAM type: NRG; PAM sequence: CAG
ctcaaaacaaaactgcctat

SEQ ID NO: 64666 - DNA, 20 bp, Artificial Sequence
  Description of Artificial Sequence: Synthetic oligonucleotide
  Target: LAMA2; (-) strand; PAM type: NRG; PAM sequence: GAG
tccagcctgggttacagagt

SEQ ID NO: 64667 - DNA, 20 bp, Artificial Sequence
  Description of Artificial Sequence: Synthetic oligonucleotide
  Target: LAMA2; (-) strand; PAM type: NRG; PAM sequence: GAG
gcactccagcctgggttaca

SEQ ID NO: 64668 - DNA, 20 bp, Artificial Sequence
  Description of Artificial Sequence: Synthetic oligonucleotide
  Target: LAMA2; (-) strand; PAM type: NRG; PAM sequence: CAG
ctgcactccagcctgggtta

SEQ ID NO: 64669 - DNA, 20 bp, Artificial Sequence
  Description of Artificial Sequence: Synthetic oligonucleotide
  Target: LAMA2; (-) strand; PAM type: NRG; PAM sequence: GGG
gtgccactgcactccagcct

SEQ ID NO: 64670 - DNA, 20 bp, Artificial Sequence
  Description of Artificial Sequence: Synthetic oligonucleotide
  Target: LAMA2; (-) strand; PAM type: NRG; PAM sequence: TGG
cgtgccactgcactccagcc

SEQ ID NO: 64671 - DNA, 20 bp, Artificial Sequence
  Description of Artificial Sequence: Synthetic oligonucleotide
  Target: LAMA2; (-) strand; PAM type: NRG; PAM sequence: CAG
gagatcgtgccactgcactc

SEQ ID NO: 64672 - DNA, 20 bp, Artificial Sequence
  Description of Artificial Sequence: Synthetic oligonucleotide
  Target: LAMA2; (-) strand; PAM type: NRG; PAM sequence: GAG
ggtggaggttgcagtgagcc

SEQ ID NO: 64673 - DNA, 20 bp, Artificial Sequence
  Description of Artificial Sequence: Synthetic oligonucleotide
  Target: LAMA2; (-) strand; PAM type: NRG; PAM sequence: GAG
caggaggtggaggttgcagt

SEQ ID NO: 64674 - DNA, 20 bp, Artificial Sequence
  Description of Artificial Sequence: Synthetic oligonucleotide
  Target: LAMA2; (-) strand; PAM type: NRG; PAM sequence: CAG
aacccaggaggtggaggttg

SEQ ID NO: 64675 - DNA, 20 bp, Artificial Sequence
  Description of Artificial Sequence: Synthetic oligonucleotide
  Target: LAMA2; (-) strand; PAM type: NRG; PAM sequence: AGG
tgcttgaacccaggaggtgg

SEQ ID NO: 64676 - DNA, 20 bp, Artificial Sequence
  Description of Artificial Sequence: Synthetic oligonucleotide
  Target: LAMA2; (-) strand; PAM type: NRG; PAM sequence: GAG
gtgcttgaacccaggaggtg

SEQ ID NO: 64677 - DNA, 20 bp, Artificial Sequence
  Description of Artificial Sequence: Synthetic oligonucleotide
  Target: LAMA2; (-) strand; PAM type: NRG; PAM sequence: TGG
aagtgcttgaacccaggagg

SEQ ID NO: 64678 - DNA, 20 bp, Artificial Sequence
  Description of Artificial Sequence: Synthetic oligonucleotide
  Target: LAMA2; (-) strand; PAM type: NRG; PAM sequence: AGG
gagaagtgcttgaacccagg

SEQ ID NO: 64679 - DNA, 20 bp, Artificial Sequence
  Description of Artificial Sequence: Synthetic oligonucleotide
  Target: LAMA2; (-) strand; PAM type: NRG; PAM sequence: GAG
ggagaagtgcttgaacccag

SEQ ID NO: 64680 - DNA, 20 bp, Artificial Sequence
  Description of Artificial Sequence: Synthetic oligonucleotide
  Target: LAMA2; (-) strand; PAM type: NRG; PAM sequence: AGG
caggagaagtgcttgaaccc

SEQ ID NO: 64681 - DNA, 20 bp, Artificial Sequence
  Description of Artificial Sequence: Synthetic oligonucleotide
  Target: LAMA2; (-) strand; PAM type: NRG; PAM sequence: CAG
gcaggagaagtgcttgaacc

SEQ ID NO: 64682 - DNA, 20 bp, Artificial Sequence
  Description of Artificial Sequence: Synthetic oligonucleotide
  Target: LAMA2; (-) strand; PAM type: NRG; PAM sequence: AAG
tatggaggctgaagcaggag

SEQ ID NO: 64683 - DNA, 20 bp, Artificial Sequence
  Description of Artificial Sequence: Synthetic oligonucleotide
  Target: LAMA2; (-) strand; PAM type: NRG; PAM sequence: GAG
tactatggaggctgaagcag

SEQ ID NO: 64684 - DNA, 20 bp, Artificial Sequence
  Description of Artificial Sequence: Synthetic oligonucleotide
  Target: LAMA2; (-) strand; PAM type: NRG; PAM sequence: AGG
gctactatggaggctgaagc

SEQ ID NO: 64685 - DNA, 20 bp, Artificial Sequence
  Description of Artificial Sequence: Synthetic oligonucleotide
  Target: LAMA2; (-) strand; PAM type: NRG; PAM sequence: CAG
agctactatggaggctgaag

SEQ ID NO: 64686 - DNA, 20 bp, Artificial Sequence
  Description of Artificial Sequence: Synthetic oligonucleotide
  Target: LAMA2; (-) strand; PAM type: NRG; PAM sequence: AAG
cccagctactatggaggctg

SEQ ID NO: 64687 - DNA, 20 bp, Artificial Sequence
  Description of Artificial Sequence: Synthetic oligonucleotide
  Target: LAMA2; (-) strand; PAM type: NRG; PAM sequence: AGG
tgtaatcccagctactatgg

SEQ ID NO: 64688 - DNA, 20 bp, Artificial Sequence
  Description of Artificial Sequence: Synthetic oligonucleotide
  Target: LAMA2; (-) strand; PAM type: NRG; PAM sequence: GAG
ctgtaatcccagctactatg

SEQ ID NO: 64689 - DNA, 20 bp, Artificial Sequence
  Description of Artificial Sequence: Synthetic oligonucleotide
  Target: LAMA2; (-) strand; PAM type: NRG; PAM sequence: TGG
acctgtaatcccagctacta

SEQ ID NO: 64690 - DNA, 20 bp, Artificial Sequence
  Description of Artificial Sequence: Synthetic oligonucleotide
  Target: LAMA2; (-) strand; PAM type: NRG; PAM sequence: CAG
gtggcaggcacctgtaatcc

SEQ ID NO: 64691 - DNA, 20 bp, Artificial Sequence
  Description of Artificial Sequence: Synthetic oligonucleotide
  Target: LAMA2; (-) strand; PAM type: NRG; PAM sequence: AGG
agttatccaggcgtggtggc

SEQ ID NO: 64692 - DNA, 20 bp, Artificial Sequence
  Description of Artificial Sequence: Synthetic oligonucleotide
  Target: LAMA2; (-) strand; PAM type: NRG; PAM sequence: CAG
aagttatccaggcgtggtgg

SEQ ID NO: 64693 - DNA, 20 bp, Artificial Sequence
  Description of Artificial Sequence: Synthetic oligonucleotide
  Target: LAMA2; (-) strand; PAM type: NRG; PAM sequence: TGG
aaaaagttatccaggcgtgg

SEQ ID NO: 64694 - DNA, 20 bp, Artificial Sequence
  Description of Artificial Sequence: Synthetic oligonucleotide
  Target: LAMA2; (-) strand; PAM type: NRG; PAM sequence: TGG
acaaaaaagttatccaggcg

SEQ ID NO: 64695 - DNA, 20 bp, Artificial Sequence
  Description of Artificial Sequence: Synthetic oligonucleotide
  Target: LAMA2; (-) strand; PAM type: NRG; PAM sequence: AGG
aaaatacaaaaaagttatcc

SEQ ID NO: 64696 - DNA, 20 bp, Artificial Sequence
  Description of Artificial Sequence: Synthetic oligonucleotide
  Target: LAMA2; (-) strand; PAM type: NRG; PAM sequence: CAG
aaaaatacaaaaaagttatc

SEQ ID NO: 64697 - DNA, 20 bp, Artificial Sequence
  Description of Artificial Sequence: Synthetic oligonucleotide
  Target: LAMA2; (-) strand; PAM type: NRG; PAM sequence: AAG
tctctactaaaaatacaaaa

SEQ ID NO: 64698 - DNA, 20 bp, Artificial Sequence
  Description of Artificial Sequence: Synthetic oligonucleotide
  Target: LAMA2; (-) strand; PAM type: NRG; PAM sequence: CGG
caagaccagcccggccaaca

SEQ ID NO: 64699 - DNA, 20 bp, Artificial Sequence
  Description of Artificial Sequence: Synthetic oligonucleotide
  Target: LAMA2; (-) strand; PAM type: NRG; PAM sequence: CGG
tcaggagttcaagaccagcc

SEQ ID NO: 64700 - DNA, 20 bp, Artificial Sequence
  Description of Artificial Sequence: Synthetic oligonucleotide
  Target: LAMA2; (-) strand; PAM type: NRG; PAM sequence: CAG
tgaggtcaggagttcaagac

SEQ ID NO: 64701 - DNA, 20 bp, Artificial Sequence
  Description of Artificial Sequence: Synthetic oligonucleotide
  Target: LAMA2; (-) strand; PAM type: NRG; PAM sequence: AAG
tcacctgaggtcaggagttc

SEQ ID NO: 64702 - DNA, 20 bp, Artificial Sequence
  Description of Artificial Sequence: Synthetic oligonucleotide
  Target: LAMA2; (-) strand; PAM type: NRG; PAM sequence: GAG
ggcggatcacctgaggtcag

SEQ ID NO: 64703 - DNA, 20 bp, Artificial Sequence
  Description of Artificial Sequence: Synthetic oligonucleotide
  Target: LAMA2; (-) strand; PAM type: NRG; PAM sequence: AGG
caggcggatcacctgaggtc

SEQ ID NO: 64704 - DNA, 20 bp, Artificial Sequence
  Description of Artificial Sequence: Synthetic oligonucleotide
  Target: LAMA2; (-) strand; PAM type: NRG; PAM sequence: CAG
gcaggcggatcacctgaggt

SEQ ID NO: 64705 - DNA, 20 bp, Artificial Sequence
  Description of Artificial Sequence: Synthetic oligonucleotide
  Target: LAMA2; (-) strand; PAM type: NRG; PAM sequence: AGG
caaggcaggcggatcacctg

SEQ ID NO: 64706 - DNA, 20 bp, Artificial Sequence
  Description of Artificial Sequence: Synthetic oligonucleotide
  Target: LAMA2; (-) strand; PAM type: NRG; PAM sequence: GAG
ccaaggcaggcggatcacct

SEQ ID NO: 64707 - DNA, 20 bp, Artificial Sequence
  Description of Artificial Sequence: Synthetic oligonucleotide
  Target: LAMA2; (-) strand; PAM type: NRG; PAM sequence: CGG
ctttggaaggccaaggcagg

SEQ ID NO: 64708 - DNA, 20 bp, Artificial Sequence
  Description of Artificial Sequence: Synthetic oligonucleotide
  Target: LAMA2; (-) strand; PAM type: NRG; PAM sequence: AGG
gcactttggaaggccaaggc

SEQ ID NO: 64709 - DNA, 20 bp, Artificial Sequence
  Description of Artificial Sequence: Synthetic oligonucleotide
  Target: LAMA2; (-) strand; PAM type: NRG; PAM sequence: CAG
agcactttggaaggccaagg

SEQ ID NO: 64710 - DNA, 20 bp, Artificial Sequence
  Description of Artificial Sequence: Synthetic oligonucleotide
  Target: LAMA2; (-) strand; PAM type: NRG; PAM sequence: AGG
cccagcactttggaaggcca

SEQ ID NO: 64711 - DNA, 20 bp, Artificial Sequence
  Description of Artificial Sequence: Synthetic oligonucleotide
  Target: LAMA2; (-) strand; PAM type: NRG; PAM sequence: AAG
tcccagcactttggaaggcc

SEQ ID NO: 64712 - DNA, 20 bp, Artificial Sequence
  Description of Artificial Sequence: Synthetic oligonucleotide
  Target: LAMA2; (-) strand; PAM type: NRG; PAM sequence: AGG
tgtaatcccagcactttgga

SEQ ID NO: 64713 - DNA, 20 bp, Artificial Sequence
  Description of Artificial Sequence: Synthetic oligonucleotide
  Target: LAMA2; (-) strand; PAM type: NRG; PAM sequence: AAG
ctgtaatcccagcactttgg

SEQ ID NO: 64714 - DNA, 20 bp, Artificial Sequence
  Description of Artificial Sequence: Synthetic oligonucleotide
  Target: LAMA2; (-) strand; PAM type: NRG; PAM sequence: TGG
tgcctgtaatcccagcactt

SEQ ID NO: 64715 - DNA, 20 bp, Artificial Sequence
  Description of Artificial Sequence: Synthetic oligonucleotide
  Target: LAMA2; (-) strand; PAM type: NRG; PAM sequence: CAG
gtggttcatgcctgtaatcc

SEQ ID NO: 64716 - DNA, 20 bp, Artificial Sequence
  Description of Artificial Sequence: Synthetic oligonucleotide
  Target: LAMA2; (-) strand; PAM type: NRG; PAM sequence: TGG
cctactggggccaggtgcgg

SEQ ID NO: 64717 - DNA, 20 bp, Artificial Sequence
  Description of Artificial Sequence: Synthetic oligonucleotide
  Target: LAMA2; (-) strand; PAM type: NRG; PAM sequence: CGG
ccacctactggggccaggtg

SEQ ID NO: 64718 - DNA, 20 bp, Artificial Sequence
  Description of Artificial Sequence: Synthetic oligonucleotide
  Target: LAMA2; (-) strand; PAM type: NRG; PAM sequence: AGG
ttaaaccacctactggggcc

SEQ ID NO: 64719 - DNA, 20 bp, Artificial Sequence
  Description of Artificial Sequence: Synthetic oligonucleotide
  Target: LAMA2; (-) strand; PAM type: NRG; PAM sequence: CAG
tttaaaccacctactggggc

SEQ ID NO: 64720 - DNA, 20 bp, Artificial Sequence
  Description of Artificial Sequence: Synthetic oligonucleotide
  Target: LAMA2; (-) strand; PAM type: NRG; PAM sequence: GGG
agggtttaaaccacctactg

SEQ ID NO: 64721 - DNA, 20 bp, Artificial Sequence
  Description of Artificial Sequence: Synthetic oligonucleotide
  Target: LAMA2; (-) strand; PAM type: NRG; PAM sequence: GGG
aagggtttaaaccacctact

SEQ ID NO: 64722 - DNA, 20 bp, Artificial Sequence
  Description of Artificial Sequence: Synthetic oligonucleotide
  Target: LAMA2; (-) strand; PAM type: NRG; PAM sequence: TGG
aaagggtttaaaccacctac

SEQ ID NO: 64723 - DNA, 20 bp, Artificial Sequence
  Description of Artificial Sequence: Synthetic oligonucleotide
  Target: LAMA2; (-) strand; PAM type: NRG; PAM sequence: GGG
gggagagagagaaggagaaa

SEQ ID NO: 64724 - DNA, 20 bp, Artificial Sequence
  Description of Artificial Sequence: Synthetic oligonucleotide
  Target: LAMA2; (-) strand; PAM type: NRG; PAM sequence: AGG
ggggagagagagaaggagaa

SEQ ID NO: 64725 - DNA, 20 bp, Artificial Sequence
  Description of Artificial Sequence: Synthetic oligonucleotide
  Target: LAMA2; (-) strand; PAM type: NRG; PAM sequence: AAG
aggggagagagagaaggaga

SEQ ID NO: 64726 - DNA, 20 bp, Artificial Sequence
  Description of Artificial Sequence: Synthetic oligonucleotide
  Target: LAMA2; (-) strand; PAM type: NRG; PAM sequence: GAG
acagaggggagagagagaag

SEQ ID NO: 64727 - DNA, 20 bp, Artificial Sequence
  Description of Artificial Sequence: Synthetic oligonucleotide
  Target: LAMA2; (-) strand; PAM type: NRG; PAM sequence: AGG
caacagaggggagagagaga

SEQ ID NO: 64728 - DNA, 20 bp, Artificial Sequence
  Description of Artificial Sequence: Synthetic oligonucleotide
  Target: LAMA2; (-) strand; PAM type: NRG; PAM sequence: AAG
acaacagaggggagagagag

SEQ ID NO: 64729 - DNA, 20 bp, Artificial Sequence
  Description of Artificial Sequence: Synthetic oligonucleotide
  Target: LAMA2; (-) strand; PAM type: NRG; PAM sequence: GAG
aatacaacagaggggagaga

SEQ ID NO: 64730 - DNA, 20 bp, Artificial Sequence
  Description of Artificial Sequence: Synthetic oligonucleotide
  Target: LAMA2; (-) strand; PAM type: NRG; PAM sequence: GAG
gcaatacaacagaggggaga

SEQ ID NO: 64731 - DNA, 20 bp, Artificial Sequence
  Description of Artificial Sequence: Synthetic oligonucleotide
  Target: LAMA2; (-) strand; PAM type: NRG; PAM sequence: GAG
gggcaatacaacagagggga

SEQ ID NO: 64732 - DNA, 20 bp, Artificial Sequence
  Description of Artificial Sequence: Synthetic oligonucleotide
  Target: LAMA2; (-) strand; PAM type: NRG; PAM sequence: GAG
ctgggcaatacaacagaggg

SEQ ID NO: 64733 - DNA, 20 bp, Artificial Sequence
  Description of Artificial Sequence: Synthetic oligonucleotide
  Target: LAMA2; (-) strand; PAM type: NRG; PAM sequence: GGG
cactgggcaatacaacagag

SEQ ID NO: 64734 - DNA, 20 bp, Artificial Sequence
  Description of Artificial Sequence: Synthetic oligonucleotide
  Target: LAMA2; (-) strand; PAM type: NRG; PAM sequence: GGG
acactgggcaatacaacaga

SEQ ID NO: 64735 - DNA, 20 bp, Artificial Sequence
  Description of Artificial Sequence: Synthetic oligonucleotide
  Target: LAMA2; (-) strand; PAM type: NRG; PAM sequence: AGG
gacactgggcaatacaacag

SEQ ID NO: 64736 - DNA, 20 bp, Artificial Sequence
  Description of Artificial Sequence: Synthetic oligonucleotide
  Target: LAMA2; (-) strand; PAM type: NRG; PAM sequence: GAG
agacactgggcaatacaaca

SEQ ID NO: 64737 - DNA, 20 bp, Artificial Sequence
  Description of Artificial Sequence: Synthetic oligonucleotide
  Target: LAMA2; (-) strand; PAM type: NRG; PAM sequence: CAG
acagacactgggcaatacaa

SEQ ID NO: 64738 - DNA, 20 bp, Artificial Sequence
  Description of Artificial Sequence: Synthetic oligonucleotide
  Target: LAMA2; (-) strand; PAM type: NRG; PAM sequence: GGG
aagtgggaacaacagacact

SEQ ID NO: 64739 - DNA, 20 bp, Artificial Sequence
  Description of Artificial Sequence: Synthetic oligonucleotide
  Target: LAMA2; (-) strand; PAM type: NRG; PAM sequence: TGG
aaagtgggaacaacagacac

SEQ ID NO: 64740 - DNA, 20 bp, Artificial Sequence
  Description of Artificial Sequence: Synthetic oligonucleotide
  Target: LAMA2; (-) strand; PAM type: NRG; PAM sequence: CAG
ggtcataaaagtgggaacaa

SEQ ID NO: 64741 - DNA, 20 bp, Artificial Sequence
  Description of Artificial Sequence: Synthetic oligonucleotide
  Target: LAMA2; (-) strand; PAM type: NRG; PAM sequence: GGG
aaatataaggtcataaaagt

SEQ ID NO: 64742 - DNA, 20 bp, Artificial Sequence
  Description of Artificial Sequence: Synthetic oligonucleotide
  Target: LAMA2; (-) strand; PAM type: NRG; PAM sequence: TGG
aaaatataaggtcataaaag

SEQ ID NO: 64743 - DNA, 20 bp, Artificial Sequence
  Description of Artificial Sequence: Synthetic oligonucleotide
  Target: LAMA2; (-) strand; PAM type: NRG; PAM sequence: AAG
agaaaaatataaggtcataa

SEQ ID NO: 64744 - DNA, 20 bp, Artificial Sequence
  Description of Artificial Sequence: Synthetic oligonucleotide
  Target: LAMA2; (-) strand; PAM type: NRG; PAM sequence: AGG
atttaaagaagaaaaatata

SEQ ID NO: 64745 - DNA, 20 bp, Artificial Sequence
  Description of Artificial Sequence: Synthetic oligonucleotide
  Target: LAMA2; (-) strand; PAM type: NRG; PAM sequence: AAG
gatttaaagaagaaaaatat

SEQ ID NO: 64746 - DNA, 20 bp, Artificial Sequence
  Description of Artificial Sequence: Synthetic oligonucleotide
  Target: LAMA2; (-) strand; PAM type: NRG; PAM sequence: AAG
aaaaaattactgatttaaag

SEQ ID NO: 64747 - DNA, 20 bp, Artificial Sequence
  Description of Artificial Sequence: Synthetic oligonucleotide
  Target: LAMA2; (-) strand; PAM type: NRG; PAM sequence: AAG
cataaaaaattactgattta

SEQ ID NO: 64748 - DNA, 20 bp, Artificial Sequence
  Description of Artificial Sequence: Synthetic oligonucleotide
  Target: LAMA2; (-) strand; PAM type: NRG; PAM sequence: AGG
ttacttaagaatgagaaatt

SEQ ID NO: 64749 - DNA, 20 bp, Artificial Sequence
  Description of Artificial Sequence: Synthetic oligonucleotide
  Target: LAMA2; (-) strand; PAM type: NRG; PAM sequence: TAG
tttacttaagaatgagaaat

SEQ ID NO: 64750 - DNA, 20 bp, Artificial Sequence
  Description of Artificial Sequence: Synthetic oligonucleotide
  Target: LAMA2; (-) strand; PAM type: NRG; PAM sequence: GAG
attttgttttacttaagaat

SEQ ID NO: 64751 - DNA, 20 bp, Artificial Sequence
  Description of Artificial Sequence: Synthetic oligonucleotide
  Target: LAMA2; (-) strand; PAM type: NRG; PAM sequence: AAG
gtccttattttgttttactt

SEQ ID NO: 64752 - DNA, 20 bp, Artificial Sequence
  Description of Artificial Sequence: Synthetic oligonucleotide
  Target: LAMA2; (-) strand; PAM type: NRG; PAM sequence: AAG
ccaaaaaatcagtatatgtc

SEQ ID NO: 64753 - DNA, 20 bp, Artificial Sequence
  Description of Artificial Sequence: Synthetic oligonucleotide
  Target: LAMA2; (-) strand; PAM type: NRG; PAM sequence: CAG
agtgatctataccaaaaaat

SEQ ID NO: 64754 - DNA, 20 bp, Artificial Sequence
  Description of Artificial Sequence: Synthetic oligonucleotide
  Target: LAMA2; (-) strand; PAM type: NRG; PAM sequence: TAG
aaaaaagttcagtacttatt

SEQ ID NO: 64755 - DNA, 20 bp, Artificial Sequence
  Description of Artificial Sequence: Synthetic oligonucleotide
  Target: LAMA2; (-) strand; PAM type: NRG; PAM sequence: CAG
acgtcctaaagaaaaaagtt

SEQ ID NO: 64756 - DNA, 20 bp, Artificial Sequence
  Description of Artificial Sequence: Synthetic oligonucleotide
  Target: LAMA2; (-) strand; PAM type: NRG; PAM sequence: AAG
tctaaacgtcctaaagaaaa

SEQ ID NO: 64757 - DNA, 20 bp, Artificial Sequence
  Description of Artificial Sequence: Synthetic oligonucleotide
  Target: LAMA2; (-) strand; PAM type: NRG; PAM sequence: AAG
caaaaactctaaacgtccta

SEQ ID NO: 64758 - DNA, 20 bp, Artificial Sequence
  Description of Artificial Sequence: Synthetic oligonucleotide
  Target: LAMA2; (-) strand; PAM type: NRG; PAM sequence: GGG
aaaggaagtaaaagagagca

SEQ ID NO: 64759 - DNA, 20 bp, Artificial Sequence
  Description of Artificial Sequence: Synthetic oligonucleotide
  Target: LAMA2; (-) strand; PAM type: NRG; PAM sequence: AGG
aaaaggaagtaaaagagagc

SEQ ID NO: 64760 - DNA, 20 bp, Artificial Sequence
  Description of Artificial Sequence: Synthetic oligonucleotide
  Target: LAMA2; (-) strand; PAM type: NRG; PAM sequence: CAG
aaaaaggaagtaaaagagag

SEQ ID NO: 64761 - DNA, 20 bp, Artificial Sequence
  Description of Artificial Sequence: Synthetic oligonucleotide
  Target: LAMA2; (-) strand; PAM type: NRG; PAM sequence: GAG
aataaaaaggaagtaaaaga

SEQ ID NO: 64762 - DNA, 20 bp, Artificial Sequence
  Description of Artificial Sequence: Synthetic oligonucleotide
  Target: LAMA2; (-) strand; PAM type: NRG; PAM sequence: GAG
agaataaaaaggaagtaaaa

SEQ ID NO: 64763 - DNA, 20 bp, Artificial Sequence
  Description of Artificial Sequence: Synthetic oligonucleotide
  Target: LAMA2; (-) strand; PAM type: NRG; PAM sequence: AAG
agagaataaaaaggaagtaa

SEQ ID NO: 64764 - DNA, 20 bp, Artificial Sequence
  Description of Artificial Sequence: Synthetic oligonucleotide
  Target: LAMA2; (-) strand; PAM type: NRG; PAM sequence: AAG
catcagagagaataaaaagg

SEQ ID NO: 64765 - DNA, 20 bp, Artificial Sequence
  Description of Artificial Sequence: Synthetic oligonucleotide
  Target: LAMA2; (-) strand; PAM type: NRG; PAM sequence: AGG
aatcatcagagagaataaaa

SEQ ID NO: 64766 - DNA, 20 bp, Artificial Sequence
  Description of Artificial Sequence: Synthetic oligonucleotide
  Target: LAMA2; (-) strand; PAM type: NRG; PAM sequence: AAG
aaatcatcagagagaataaa

SEQ ID NO: 64767 - DNA, 20 bp, Artificial Sequence
  Description of Artificial Sequence: Synthetic oligonucleotide
  Target: LAMA2; (-) strand; PAM type: NRG; PAM sequence: GAG
ttcatatacaaatcatcaga

SEQ ID NO: 64768 - DNA, 20 bp, Artificial Sequence
  Description of Artificial Sequence: Synthetic oligonucleotide
  Target: LAMA2; (-) strand; PAM type: NRG; PAM sequence: GAG
aattcatatacaaatcatca

SEQ ID NO: 64769 - DNA, 20 bp, Artificial Sequence
  Description of Artificial Sequence: Synthetic oligonucleotide
  Target: LAMA2; (-) strand; PAM type: NRG; PAM sequence: CAG
tgaattcatatacaaatcat

SEQ ID NO: 64770 - DNA, 20 bp, Artificial Sequence
  Description of Artificial Sequence: Synthetic oligonucleotide
  Target: LAMA2; (-) strand; PAM type: NRG; PAM sequence: AAG
tcatgttgatactatcaata

SEQ ID NO: 64771 - DNA, 20 bp, Artificial Sequence
  Description of Artificial Sequence: Synthetic oligonucleotide
  Target: LAMA2; (-) strand; PAM type: NRG; PAM sequence: AGG
tataagatccattaggacaa

SEQ ID NO: 64772 - DNA, 20 bp, Artificial Sequence
  Description of Artificial Sequence: Synthetic oligonucleotide
  Target: LAMA2; (-) strand; PAM type: NRG; PAM sequence: AAG
ttataagatccattaggaca

SEQ ID NO: 64773 - DNA, 20 bp, Artificial Sequence
  Description of Artificial Sequence: Synthetic oligonucleotide
  Target: LAMA2; (-) strand; PAM type: NRG; PAM sequence: AGG
ttagatttataagatccatt

SEQ ID NO: 64774 - DNA, 20 bp, Artificial Sequence
  Description of Artificial Sequence: Synthetic oligonucleotide
  Target: LAMA2; (-) strand; PAM type: NRG; PAM sequence: TAG
attagatttataagatccat

SEQ ID NO: 64775 - DNA, 20 bp, Artificial Sequence
  Description of Artificial Sequence: Synthetic oligonucleotide
  Target: LAMA2; (-) strand; PAM type: NRG; PAM sequence: AAG
gcctcctgcattagatttat

SEQ ID NO: 64776 - DNA, 20 bp, Artificial Sequence
  Description of Artificial Sequence: Synthetic oligonucleotide
  Target: LAMA2; (-) strand; PAM type: NRG; PAM sequence: TAG
ttactgtctgcctcctgcat

SEQ ID NO: 64777 - DNA, 20 bp, Artificial Sequence
  Description of Artificial Sequence: Synthetic oligonucleotide
  Target: LAMA2; (-) strand; PAM type: NRG; PAM sequence: TAG
gcatatacaattatattgtt

SEQ ID NO: 64778 - DNA, 20 bp, Artificial Sequence
  Description of Artificial Sequence: Synthetic oligonucleotide
  Target: LAMA2; (-) strand; PAM type: NRG; PAM sequence: TAG
caccttgtttaattccttca

SEQ ID NO: 64779 - DNA, 20 bp, Artificial Sequence
  Description of Artificial Sequence: Synthetic oligonucleotide
  Target: LAMA2; (-) strand; PAM type: NRG; PAM sequence: CAG
caagatgtcacctccatgca

SEQ ID NO: 64780 - DNA, 20 bp, Artificial Sequence
  Description of Artificial Sequence: Synthetic oligonucleotide
  Target: LAMA2; (-) strand; PAM type: NRG; PAM sequence: AAG
ctcattctcctgtctctggc

SEQ ID NO: 64781 - DNA, 20 bp, Artificial Sequence
  Description of Artificial Sequence: Synthetic oligonucleotide
  Target: LAMA2; (-) strand; PAM type: NRG; PAM sequence: TGG
ctttctcattctcctgtctc

SEQ ID NO: 64782 - DNA, 20 bp, Artificial Sequence
  Description of Artificial Sequence: Synthetic oligonucleotide
  Target: LAMA2; (-) strand; PAM type: NRG; PAM sequence: TAG
gttgcctgttactctgatga

SEQ ID NO: 64783 - DNA, 20 bp, Artificial Sequence
  Description of Artificial Sequence: Synthetic oligonucleotide
  Target: LAMA2; (-) strand; PAM type: NRG; PAM sequence: AGG
aaaattttctcccattctgt

SEQ ID NO: 64784 - DNA, 20 bp, Artificial Sequence
  Description of Artificial Sequence: Synthetic oligonucleotide
  Target: LAMA2; (-) strand; PAM type: NRG; PAM sequence: TAG
aaaaattttctcccattctg

SEQ ID NO: 64785 - DNA, 20 bp, Artificial Sequence
  Description of Artificial Sequence: Synthetic oligonucleotide
  Target: LAMA2; (-) strand; PAM type: NRG; PAM sequence: TAG
ttagccctttgtcagatgga

SEQ ID NO: 64786 - DNA, 20 bp, Artificial Sequence
  Description of Artificial Sequence: Synthetic oligonucleotide
  Target: LAMA2; (-) strand; PAM type: NRG; PAM sequence: TGG
ggtattagccctttgtcaga

SEQ ID NO: 64787 - DNA, 20 bp, Artificial Sequence
  Description of Artificial Sequence: Synthetic oligonucleotide
  Target: LAMA2; (-) strand; PAM type: NRG; PAM sequence: CAG
tctgggtattagccctttgt

SEQ ID NO: 64788 - DNA, 20 bp, Artificial Sequence
  Description of Artificial Sequence: Synthetic oligonucleotide
  Target: LAMA2; (-) strand; PAM type: NRG; PAM sequence: TAG
tccttgtagattctgggtat

SEQ ID NO: 64789 - DNA, 20 bp, Artificial Sequence
  Description of Artificial Sequence: Synthetic oligonucleotide
  Target: LAMA2; (-) strand; PAM type: NRG; PAM sequence: GGG
ttatgttccttgtagattct

SEQ ID NO: 64790 - DNA, 20 bp, Artificial Sequence
  Description of Artificial Sequence: Synthetic oligonucleotide
  Target: LAMA2; (-) strand; PAM type: NRG; PAM sequence: TGG
tttatgttccttgtagattc

SEQ ID NO: 64791 - DNA, 20 bp, Artificial Sequence
  Description of Artificial Sequence: Synthetic oligonucleotide
  Target: LAMA2; (-) strand; PAM type: NRG; PAM sequence: TAG
gaatttgtttatgttccttg

SEQ ID NO: 64792 - DNA, 20 bp, Artificial Sequence
  Description of Artificial Sequence: Synthetic oligonucleotide
  Target: LAMA2; (-) strand; PAM type: NRG; PAM sequence: GGG
cctttgcccacttttcgatg

SEQ ID NO: 64793 - DNA, 20 bp, Artificial Sequence
  Description of Artificial Sequence: Synthetic oligonucleotide
  Target: LAMA2; (-) strand; PAM type: NRG; PAM sequence: GGG
tcctttgcccacttttcgat

SEQ ID NO: 64794 - DNA, 20 bp, Artificial Sequence
  Description of Artificial Sequence: Synthetic oligonucleotide
  Target: LAMA2; (-) strand; PAM type: NRG; PAM sequence: TGG
atcctttgcccacttttcga

SEQ ID NO: 64795 - DNA, 20 bp, Artificial Sequence
  Description of Artificial Sequence: Synthetic oligonucleotide
  Target: LAMA2; (-) strand; PAM type: NRG; PAM sequence: AAG
cataaatgtcttcttttgag

SEQ ID NO: 64796 - DNA, 20 bp, Artificial Sequence
  Description of Artificial Sequence: Synthetic oligonucleotide
  Target: LAMA2; (-) strand; PAM type: NRG; PAM sequence: GAG
ccacataaatgtcttctttt

SEQ ID NO: 64797 - DNA, 20 bp, Artificial Sequence
  Description of Artificial Sequence: Synthetic oligonucleotide
  Target: LAMA2; (-) strand; PAM type: NRG; PAM sequence: TGG
gctttttttcatatgtttgt

SEQ ID NO: 64798 - DNA, 20 bp, Artificial Sequence
  Description of Artificial Sequence: Synthetic oligonucleotide
  Target: LAMA2; (-) strand; PAM type: NRG; PAM sequence: GAG
ctctaattaccagtgatggt

SEQ ID NO: 64799 - DNA, 20 bp, Artificial Sequence
  Description of Artificial Sequence: Synthetic oligonucleotide
  Target: LAMA2; (-) strand; PAM type: NRG; PAM sequence: TGG
atttctctaattaccagtga

SEQ ID NO: 64800 - DNA, 20 bp, Artificial Sequence
  Description of Artificial Sequence: Synthetic oligonucleotide
  Target: LAMA2; (-) strand; PAM type: NRG; PAM sequence: CAG
atttgcatttctctaattac

SEQ ID NO: 64801 - DNA, 20 bp, Artificial Sequence
  Description of Artificial Sequence: Synthetic oligonucleotide
  Target: LAMA2; (-) strand; PAM type: NRG; PAM sequence: TGG
ccattctaactggcatgagt

SEQ ID NO: 64802 - DNA, 20 bp, Artificial Sequence
  Description of Artificial Sequence: Synthetic oligonucleotide
  Target: LAMA2; (-) strand; PAM type: NRG; PAM sequence: GAG
atcgccattctaactggcat

SEQ ID NO: 64803 - DNA, 20 bp, Artificial Sequence
  Description of Artificial Sequence: Synthetic oligonucleotide
  Target: LAMA2; (-) strand; PAM type: NRG; PAM sequence: TGG
ttaatgatcgccattctaac

SEQ ID NO: 64804 - DNA, 20 bp, Artificial Sequence
  Description of Artificial Sequence: Synthetic oligonucleotide
  Target: LAMA2; (-) strand; PAM type: NRG; PAM sequence: CAG
ctatttctccacatcctctc

SEQ ID NO: 64805 - DNA, 20 bp, Artificial Sequence
  Description of Artificial Sequence: Synthetic oligonucleotide
  Target: LAMA2; (-) strand; PAM type: NRG; PAM sequence: AAG
cattcacactaacagtgtaa

SEQ ID NO: 64806 - DNA, 20 bp, Artificial Sequence
  Description of Artificial Sequence: Synthetic oligonucleotide
  Target: LAMA2; (-) strand; PAM type: NRG; PAM sequence: CAG
ctaatttacattcacactaa

SEQ ID NO: 64807 - DNA, 20 bp, Artificial Sequence
  Description of Artificial Sequence: Synthetic oligonucleotide
  Target: LAMA2; (-) strand; PAM type: NRG; PAM sequence: CAG
ggaatcaccacactgtcttc

SEQ ID NO: 64808 - DNA, 20 bp, Artificial Sequence
  Description of Artificial Sequence: Synthetic oligonucleotide
  Target: LAMA2; (-) strand; PAM type: NRG; PAM sequence: AGG
tttccggttctagatccttg

SEQ ID NO: 64809 - DNA, 20 bp, Artificial Sequence
  Description of Artificial Sequence: Synthetic oligonucleotide
  Target: LAMA2; (-) strand; PAM type: NRG; PAM sequence: GAG
atttccggttctagatcctt

SEQ ID NO: 64810 - DNA, 20 bp, Artificial Sequence
  Description of Artificial Sequence: Synthetic oligonucleotide
  Target: LAMA2; (-) strand; PAM type: NRG; PAM sequence: TAG
tcaaatggtatttccggttc

SEQ ID NO: 64811 - DNA, 20 bp, Artificial Sequence
  Description of Artificial Sequence: Synthetic oligonucleotide
  Target: LAMA2; (-) strand; PAM type: NRG; PAM sequence: CGG
gctgggtcaaatggtatttc

SEQ ID NO: 64812 - DNA, 20 bp, Artificial Sequence
  Description of Artificial Sequence: Synthetic oligonucleotide
  Target: LAMA2; (-) strand; PAM type: NRG; PAM sequence: TGG
aatgggatggctgggtcaaa

SEQ ID NO: 64813 - DNA, 20 bp, Artificial Sequence
  Description of Artificial Sequence: Synthetic oligonucleotide
  Target: LAMA2; (-) strand; PAM type: NRG; PAM sequence: GGG
tacccagtaatgggatggct

SEQ ID NO: 64814 - DNA, 20 bp, Artificial Sequence
  Description of Artificial Sequence: Synthetic oligonucleotide
  Target: LAMA2; (-) strand; PAM type: NRG; PAM sequence: TGG
atacccagtaatgggatggc

SEQ ID NO: 64815 - DNA, 20 bp, Artificial Sequence
  Description of Artificial Sequence: Synthetic oligonucleotide
  Target: LAMA2; (-) strand; PAM type: NRG; PAM sequence: TGG
ataaatacccagtaatggga

SEQ ID NO: 64816 - DNA, 20 bp, Artificial Sequence
  Description of Artificial Sequence: Synthetic oligonucleotide
  Target: LAMA2; (-) strand; PAM type: NRG; PAM sequence: GGG
ttggataaatacccagtaat

SEQ ID NO: 64817 - DNA, 20 bp, Artificial Sequence
  Description of Artificial Sequence: Synthetic oligonucleotide
  Target: LAMA2; (-) strand; PAM type: NRG; PAM sequence: TGG
tttggataaatacccagtaa

SEQ ID NO: 64818 - DNA, 20 bp, Artificial Sequence
  Description of Artificial Sequence: Synthetic oligonucleotide
  Target: LAMA2; (-) strand; PAM type: NRG; PAM sequence: CAG
taatcctttggataaatacc

SEQ ID NO: 64819 - DNA, 20 bp, Artificial Sequence
  Description of Artificial Sequence: Synthetic oligonucleotide
  Target: LAMA2; (-) strand; PAM type: NRG; PAM sequence: TGG
tagaatgatttataatcctt

SEQ ID NO: 64820 - DNA, 20 bp, Artificial Sequence
  Description of Artificial Sequence: Synthetic oligonucleotide
  Target: LAMA2; (-) strand; PAM type: NRG; PAM sequence: TAG
gtgtgcatgtgtctttatag

SEQ ID NO: 64821 - DNA, 20 bp, Artificial Sequence
  Description of Artificial Sequence: Synthetic oligonucleotide
  Target: LAMA2; (-) strand; PAM type: NRG; PAM sequence: TAG
tacgtgtgcatgtgtcttta

SEQ ID NO: 64822 - DNA, 20 bp, Artificial Sequence
  Description of Artificial Sequence: Synthetic oligonucleotide
  Target: LAMA2; (-) strand; PAM type: NRG; PAM sequence: CAG
tgctattgtgaatagtgctg

SEQ ID NO: 64823 - DNA, 20 bp, Artificial Sequence
  Description of Artificial Sequence: Synthetic oligonucleotide
  Target: LAMA2; (-) strand; PAM type: NRG; PAM sequence: TAG
caagtctttgctattgtgaa

SEQ ID NO: 64824 - DNA, 20 bp, Artificial Sequence
  Description of Artificial Sequence: Synthetic oligonucleotide
  Target: LAMA2; (-) strand; PAM type: NRG; PAM sequence: AAG
taggcatttgggttggttcc

SEQ ID NO: 64825 - DNA, 20 bp, Artificial Sequence
  Description of Artificial Sequence: Synthetic oligonucleotide
  Target: LAMA2; (-) strand; PAM type: NRG; PAM sequence: TGG
tcattgataggcatttgggt

SEQ ID NO: 64826 - DNA, 20 bp, Artificial Sequence
  Description of Artificial Sequence: Synthetic oligonucleotide
  Target: LAMA2; (-) strand; PAM type: NRG; PAM sequence: GGG
tctatcattgataggcattt

SEQ ID NO: 64827 - DNA, 20 bp, Artificial Sequence
  Description of Artificial Sequence: Synthetic oligonucleotide
  Target: LAMA2; (-) strand; PAM type: NRG; PAM sequence: TGG
gtctatcattgataggcatt

SEQ ID NO: 64828 - DNA, 20 bp, Artificial Sequence
  Description of Artificial Sequence: Synthetic oligonucleotide
  Target: LAMA2; (-) strand; PAM type: NRG; PAM sequence: AGG
ttatccagtctatcattgat

SEQ ID NO: 64829 - DNA, 20 bp, Artificial Sequence
  Description of Artificial Sequence: Synthetic oligonucleotide
  Target: LAMA2; (-) strand; PAM type: NRG; PAM sequence: TAG
tttatccagtctatcattga

SEQ ID NO: 64830 - DNA, 20 bp, Artificial Sequence
  Description of Artificial Sequence: Synthetic oligonucleotide
  Target: LAMA2; (-) strand; PAM type: NRG; PAM sequence: CAG
tgtgccacattttctttatc

SEQ ID NO: 64831 - DNA, 20 bp, Artificial Sequence
  Description of Artificial Sequence: Synthetic oligonucleotide
  Target: LAMA2; (-) strand; PAM type: NRG; PAM sequence: TGG
cacggctgcctagtgttcca

SEQ ID NO: 64832 - DNA, 20 bp, Artificial Sequence
  Description of Artificial Sequence: Synthetic oligonucleotide
  Target: LAMA2; (-) strand; PAM type: NRG; PAM sequence: TAG
catcctttttcacggctgcc

SEQ ID NO: 64833 - DNA, 20 bp, Artificial Sequence
  Description of Artificial Sequence: Synthetic oligonucleotide
  Target: LAMA2; (-) strand; PAM type: NRG; PAM sequence: CGG
catgaactcatcctttttca

SEQ ID NO: 64834 - DNA, 20 bp, Artificial Sequence
  Description of Artificial Sequence: Synthetic oligonucleotide
  Target: LAMA2; (-) strand; PAM type: NRG; PAM sequence: AGG
cttcatccatgtccctgcaa

SEQ ID NO: 64835 - DNA, 20 bp, Artificial Sequence
  Description of Artificial Sequence: Synthetic oligonucleotide
  Target: LAMA2; (-) strand; PAM type: NRG; PAM sequence: AAG
gcttcatccatgtccctgca

SEQ ID NO: 64836 - DNA, 20 bp, Artificial Sequence
  Description of Artificial Sequence: Synthetic oligonucleotide
  Target: LAMA2; (-) strand; PAM type: NRG; PAM sequence: CAG
ttgctgagaatgatggtttc

SEQ ID NO: 64837 - DNA, 20 bp, Artificial Sequence
  Description of Artificial Sequence: Synthetic oligonucleotide
  Target: LAMA2; (-) strand; PAM type: NRG; PAM sequence: TGG
tgttagtttgctgagaatga

SEQ ID NO: 64838 - DNA, 20 bp, Artificial Sequence
  Description of Artificial Sequence: Synthetic oligonucleotide
  Target: LAMA2; (-) strand; PAM type: NRG; PAM sequence: GAG
tgttcctctgttagtttgct

SEQ ID NO: 64839 - DNA, 20 bp, Artificial Sequence
  Description of Artificial Sequence: Synthetic oligonucleotide
  Target: LAMA2; (-) strand; PAM type: NRG; PAM sequence: TAG
ttggttttctgttcctctgt

SEQ ID NO: 64840 - DNA, 20 bp, Artificial Sequence
  Description of Artificial Sequence: Synthetic oligonucleotide
  Target: LAMA2; (-) strand; PAM type: NRG; PAM sequence: TGG
gagtgagaacatgcagtgtt

SEQ ID NO: 64841 - DNA, 20 bp, Artificial Sequence
  Description of Artificial Sequence: Synthetic oligonucleotide
  Target: LAMA2; (-) strand; PAM type: NRG; PAM sequence: CAG
cacttatgagtgagaacatg

SEQ ID NO: 64842 - DNA, 20 bp, Artificial Sequence
  Description of Artificial Sequence: Synthetic oligonucleotide
  Target: LAMA2; (-) strand; PAM type: NRG; PAM sequence: GAG
ttcaacacccacttatgagt

SEQ ID NO: 64843 - DNA, 20 bp, Artificial Sequence
  Description of Artificial Sequence: Synthetic oligonucleotide
  Target: LAMA2; (-) strand; PAM type: NRG; PAM sequence: GAG
actgttcaacacccacttat

SEQ ID NO: 64844 - DNA, 20 bp, Artificial Sequence
  Description of Artificial Sequence: Synthetic oligonucleotide
  Target: LAMA2; (-) strand; PAM type: NRG; PAM sequence: CAG
acccctcccccaacaggccc

SEQ ID NO: 64845 - DNA, 20 bp, Artificial Sequence
  Description of Artificial Sequence: Synthetic oligonucleotide
  Target: LAMA2; (-) strand; PAM type: NRG; PAM sequence: AGG
cctcccacccctcccccaac

SEQ ID NO: 64846 - DNA, 20 bp, Artificial Sequence
  Description of Artificial Sequence: Synthetic oligonucleotide
  Target: LAMA2; (-) strand; PAM type: NRG; PAM sequence: CAG
gcctcccacccctcccccaa

SEQ ID NO: 64847 - DNA, 20 bp, Artificial Sequence
  Description of Artificial Sequence: Synthetic oligonucleotide
  Target: LAMA2; (-) strand; PAM type: NRG; PAM sequence: AGG
atcaacccatcatctacatt

SEQ ID NO: 64848 - DNA, 20 bp, Artificial Sequence
  Description of Artificial Sequence: Synthetic oligonucleotide
  Target: LAMA2; (-) strand; PAM type: NRG; PAM sequence: TAG
catcaacccatcatctacat

SEQ ID NO: 64849 - DNA, 20 bp, Artificial Sequence
  Description of Artificial Sequence: Synthetic oligonucleotide
  Target: LAMA2; (-) strand; PAM type: NRG; PAM sequence: CAG
tgtgccatggtggtttgctg

SEQ ID NO: 64850 - DNA, 20 bp, Artificial Sequence
  Description of Artificial Sequence: Synthetic oligonucleotide
  Target: LAMA2; (-) strand; PAM type: NRG; PAM sequence: TGG
taggaatacatgtgccatgg

SEQ ID NO: 64851 - DNA, 20 bp, Artificial Sequence
  Description of Artificial Sequence: Synthetic oligonucleotide
  Target: LAMA2; (-) strand; PAM type: NRG; PAM sequence: TGG
acataggaatacatgtgcca

SEQ ID NO: 64852 - DNA, 20 bp, Artificial Sequence
  Description of Artificial Sequence: Synthetic oligonucleotide
  Target: LAMA2; (-) strand; PAM type: NRG; PAM sequence: AGG
aatgtgcaggtttgttacat

SEQ ID NO: 64853 - DNA, 20 bp, Artificial Sequence
  Description of Artificial Sequence: Synthetic oligonucleotide
  Target: LAMA2; (-) strand; PAM type: NRG; PAM sequence: TAG
aaatgtgcaggtttgttaca

SEQ ID NO: 64854 - DNA, 20 bp, Artificial Sequence
  Description of Artificial Sequence: Synthetic oligonucleotide
  Target: LAMA2; (-) strand; PAM type: NRG; PAM sequence: AGG
gatacatgtgcaaaatgtgc

SEQ ID NO: 64855 - DNA, 20 bp, Artificial Sequence
  Description of Artificial Sequence: Synthetic oligonucleotide
  Target: LAMA2; (-) strand; PAM type: NRG; PAM sequence: CAG
ggatacatgtgcaaaatgtg

SEQ ID NO: 64856 - DNA, 20 bp, Artificial Sequence
  Description of Artificial Sequence: Synthetic oligonucleotide
  Target: LAMA2; (-) strand; PAM type: NRG; PAM sequence: GGG
ttctttctactttaagttct

SEQ ID NO: 64857 - DNA, 20 bp, Artificial Sequence
  Description of Artificial Sequence: Synthetic oligonucleotide
  Target: LAMA2; (-) strand; PAM type: NRG; PAM sequence: TGG
tttctttctactttaagttc

SEQ ID NO: 64858 - DNA, 20 bp, Artificial Sequence
  Description of Artificial Sequence: Synthetic oligonucleotide
  Target: LAMA2; (-) strand; PAM type: NRG; PAM sequence: AAG
tctttctttctttctacttt

SEQ ID NO: 64859 - DNA, 20 bp, Artificial Sequence
  Description of Artificial Sequence: Synthetic oligonucleotide
  Target: LAMA2; (-) strand; PAM type: NRG; PAM sequence: TGG
ttacttcactctagtcacat

SEQ ID NO: 64860 - DNA, 20 bp, Artificial Sequence
  Description of Artificial Sequence: Synthetic oligonucleotide
  Target: LAMA2; (-) strand; PAM type: NRG; PAM sequence: TAG
tcccctctcttacttcactc

SEQ ID NO: 64861 - DNA, 20 bp, Artificial Sequence
  Description of Artificial Sequence: Synthetic oligonucleotide
  Target: LAMA2; (-) strand; PAM type: NRG; PAM sequence: CAG
ggcataaagtcttgaatagc

SEQ ID NO: 64862 - DNA, 20 bp, Artificial Sequence
  Description of Artificial Sequence: Synthetic oligonucleotide
  Target: LAMA2; (-) strand; PAM type: NRG; PAM sequence: TAG
cacaggcataaagtcttgaa

SEQ ID NO: 64863 - DNA, 20 bp, Artificial Sequence
  Description of Artificial Sequence: Synthetic oligonucleotide
  Target: LAMA2; (-) strand; PAM type: NRG; PAM sequence: AAG
ctggccacatcacaggcata

SEQ ID NO: 64864 - DNA, 20 bp, Artificial Sequence
  Description of Artificial Sequence: Synthetic oligonucleotide
  Target: LAMA2; (-) strand; PAM type: NRG; PAM sequence: AGG
accatgcctggccacatcac

SEQ ID NO: 64865 - DNA, 20 bp, Artificial Sequence
  Description of Artificial Sequence: Synthetic oligonucleotide
  Target: LAMA2; (-) strand; PAM type: NRG; PAM sequence: CAG
caccatgcctggccacatca

SEQ ID NO: 64866 - DNA, 20 bp, Artificial Sequence
  Description of Artificial Sequence: Synthetic oligonucleotide
  Target: LAMA2; (-) strand; PAM type: NRG; PAM sequence: TGG
caggtgtgagccaccatgcc

SEQ ID NO: 64867 - DNA, 20 bp, Artificial Sequence
  Description of Artificial Sequence: Synthetic oligonucleotide
  Target: LAMA2; (-) strand; PAM type: NRG; PAM sequence: GAG
agtgctggaattacaggtgt

SEQ ID NO: 64868 - DNA, 20 bp, Artificial Sequence
  Description of Artificial Sequence: Synthetic oligonucleotide
  Target: LAMA2; (-) strand; PAM type: NRG; PAM sequence: AGG
tccgaaagtgctggaattac

SEQ ID NO: 64869 - DNA, 20 bp, Artificial Sequence
  Description of Artificial Sequence: Synthetic oligonucleotide
  Target: LAMA2; (-) strand; PAM type: NRG; PAM sequence: CAG
ctccgaaagtgctggaatta

SEQ ID NO: 64870 - DNA, 20 bp, Artificial Sequence
  Description of Artificial Sequence: Synthetic oligonucleotide
  Target: LAMA2; (-) strand; PAM type: NRG; PAM sequence: TGG
gcctcagcctccgaaagtgc

SEQ ID NO: 64871 - DNA, 20 bp, Artificial Sequence
  Description of Artificial Sequence: Synthetic oligonucleotide
  Target: LAMA2; (-) strand; PAM type: NRG; PAM sequence: AAG
ccacctgcctcagcctccga

SEQ ID NO: 64872 - DNA, 20 bp, Artificial Sequence
  Description of Artificial Sequence: Synthetic oligonucleotide
  Target: LAMA2; (-) strand; PAM type: NRG; PAM sequence: CAG
ctcaagtgatccacctgcct

SEQ ID NO: 64873 - DNA, 20 bp, Artificial Sequence
  Description of Artificial Sequence: Synthetic oligonucleotide
  Target: LAMA2; (-) strand; PAM type: NRG; PAM sequence: AAG
ggtctggaacccctgacctc

SEQ ID NO: 64874 - DNA, 20 bp, Artificial Sequence
  Description of Artificial Sequence: Synthetic oligonucleotide
  Target: LAMA2; (-) strand; PAM type: NRG; PAM sequence: TGG
ccatgtttgccaggctggtc

SEQ ID NO: 64875 - DNA, 20 bp, Artificial Sequence
  Description of Artificial Sequence: Synthetic oligonucleotide
  Target: LAMA2; (-) strand; PAM type: NRG; PAM sequence: TGG
tttcaccatgtttgccaggc

SEQ ID NO: 64876 - DNA, 20 bp, Artificial Sequence
  Description of Artificial Sequence: Synthetic oligonucleotide
  Target: LAMA2; (-) strand; PAM type: NRG; PAM sequence: AGG
agggtttcaccatgtttgcc

SEQ ID NO: 64877 - DNA, 20 bp, Artificial Sequence
  Description of Artificial Sequence: Synthetic oligonucleotide
  Target: LAMA2; (-) strand; PAM type: NRG; PAM sequence: CAG
cagggtttcaccatgtttgc

SEQ ID NO: 64878 - DNA, 20 bp, Artificial Sequence
  Description of Artificial Sequence: Synthetic oligonucleotide
  Target: LAMA2; (-) strand; PAM type: NRG; PAM sequence: GGG
ttgcatttttggtagagaca

SEQ ID NO: 64879 - DNA, 20 bp, Artificial Sequence
  Description of Artificial Sequence: Synthetic oligonucleotide
  Target: LAMA2; (-) strand; PAM type: NRG; PAM sequence: AGG
tttgcatttttggtagagac

SEQ ID NO: 64880 - DNA, 20 bp, Artificial Sequence
  Description of Artificial Sequence: Synthetic oligonucleotide
  Target: LAMA2; (-) strand; PAM type: NRG; PAM sequence: CAG
ttttgcatttttggtagaga

SEQ ID NO: 64881 - DNA, 20 bp, Artificial Sequence
  Description of Artificial Sequence: Synthetic oligonucleotide
  Target: LAMA2; (-) strand; PAM type: NRG; PAM sequence: GAG
caatttttgcatttttggta

SEQ ID NO: 64882 - DNA, 20 bp, Artificial Sequence
  Description of Artificial Sequence: Synthetic oligonucleotide
  Target: LAMA2; (-) strand; PAM type: NRG; PAM sequence: TAG
gccaatttttgcatttttgg

SEQ ID NO: 64883 - DNA, 20 bp, Artificial Sequence
  Description of Artificial Sequence: Synthetic oligonucleotide
  Target: LAMA2; (-) strand; PAM type: NRG; PAM sequence: TGG
ctggccaatttttgcatttt

SEQ ID NO: 64884 - DNA, 20 bp, Artificial Sequence
  Description of Artificial Sequence: Synthetic oligonucleotide
  Target: LAMA2; (-) strand; PAM type: NRG; PAM sequence: TGG
taggcatgtgccaccatgcc

SEQ ID NO: 64885 - DNA, 20 bp, Artificial Sequence
  Description of Artificial Sequence: Synthetic oligonucleotide
  Target: LAMA2; (-) strand; PAM type: NRG; PAM sequence: AGG
tcccgagtagctgggagtat

SEQ ID NO: 64886 - DNA, 20 bp, Artificial Sequence
  Description of Artificial Sequence: Synthetic oligonucleotide
  Target: LAMA2; (-) strand; PAM type: NRG; PAM sequence: TAG
ctcccgagtagctgggagta

SEQ ID NO: 64887 - DNA, 20 bp, Artificial Sequence
  Description of Artificial Sequence: Synthetic oligonucleotide
  Target: LAMA2; (-) strand; PAM type: NRG; PAM sequence: GAG
tcagcctcccgagtagctgg

SEQ ID NO: 64888 - DNA, 20 bp, Artificial Sequence
  Description of Artificial Sequence: Synthetic oligonucleotide
  Target: LAMA2; (-) strand; PAM type: NRG; PAM sequence: GGG
cctcagcctcccgagtagct

SEQ ID NO: 64889 - DNA, 20 bp, Artificial Sequence
  Description of Artificial Sequence: Synthetic oligonucleotide
  Target: LAMA2; (-) strand; PAM type: NRG; PAM sequence: TGG
acctcagcctcccgagtagc

SEQ ID NO: 64890 - DNA, 20 bp, Artificial Sequence
  Description of Artificial Sequence: Synthetic oligonucleotide
  Target: LAMA2; (-) strand; PAM type: NRG; PAM sequence: TAG
tcctacctcagcctcccgag

SEQ ID NO: 64891 - DNA, 20 bp, Artificial Sequence
  Description of Artificial Sequence: Synthetic oligonucleotide
  Target: LAMA2; (-) strand; PAM type: NRG; PAM sequence: GAG
ttctcctacctcagcctccc

SEQ ID NO: 64892 - DNA, 20 bp, Artificial Sequence
  Description of Artificial Sequence: Synthetic oligonucleotide
  Target: LAMA2; (-) strand; PAM type: NRG; PAM sequence: CAG
ttcaagtgattctcctacct

SEQ ID NO: 64893 - DNA, 20 bp, Artificial Sequence
  Description of Artificial Sequence: Synthetic oligonucleotide
  Target: LAMA2; (-) strand; PAM type: NRG; PAM sequence: AAG
agcctctgccttccaggttc

SEQ ID NO: 64894 - DNA, 20 bp, Artificial Sequence
  Description of Artificial Sequence: Synthetic oligonucleotide
  Target: LAMA2; (-) strand; PAM type: NRG; PAM sequence: AGG
cactgcagcctctgccttcc

SEQ ID NO: 64895 - DNA, 20 bp, Artificial Sequence
  Description of Artificial Sequence: Synthetic oligonucleotide
  Target: LAMA2; (-) strand; PAM type: NRG; PAM sequence: CAG
tcactgcagcctctgccttc

SEQ ID NO: 64896 - DNA, 20 bp, Artificial Sequence
  Description of Artificial Sequence: Synthetic oligonucleotide
  Target: LAMA2; (-) strand; PAM type: NRG; PAM sequence: CAG
ggtgcaatcttggctcactg

SEQ ID NO: 64897 - DNA, 20 bp, Artificial Sequence
  Description of Artificial Sequence: Synthetic oligonucleotide
  Target: LAMA2; (-) strand; PAM type: NRG; PAM sequence: TGG
ggagtgcaatggtgcaatct

SEQ ID NO: 64898 - DNA, 20 bp, Artificial Sequence
  Description of Artificial Sequence: Synthetic oligonucleotide
  Target: LAMA2; (-) strand; PAM type: NRG; PAM sequence: TGG
ttggccaggctggagtgcaa

SEQ ID NO: 64899 - DNA, 20 bp, Artificial Sequence
  Description of Artificial Sequence: Synthetic oligonucleotide
  Target: LAMA2; (-) strand; PAM type: NRG; PAM sequence: GAG
tcgctctgttggccaggctg

SEQ ID NO: 64900 - DNA, 20 bp, Artificial Sequence
  Description of Artificial Sequence: Synthetic oligonucleotide
  Target: LAMA2; (-) strand; PAM type: NRG; PAM sequence: TGG
tctcgctctgttggccaggc

SEQ ID NO: 64901 - DNA, 20 bp, Artificial Sequence
  Description of Artificial Sequence: Synthetic oligonucleotide
  Target: LAMA2; (-) strand; PAM type: NRG; PAM sequence: AGG
agagtctcgctctgttggcc

SEQ ID NO: 64902 - DNA, 20 bp, Artificial Sequence
  Description of Artificial Sequence: Synthetic oligonucleotide
  Target: LAMA2; (-) strand; PAM type: NRG; PAM sequence: CAG
cagagtctcgctctgttggc

SEQ ID NO: 64903 - DNA, 20 bp, Artificial Sequence
  Description of Artificial Sequence: Synthetic oligonucleotide
  Target: LAMA2; (-) strand; PAM type: NRG; PAM sequence: TGG
gagacagagtctcgctctgt

SEQ ID NO: 64904 - DNA, 20 bp, Artificial Sequence
  Description of Artificial Sequence: Synthetic oligonucleotide
  Target: LAMA2; (-) strand; PAM type: NRG; PAM sequence: GAG
tttttttttcttttgagaca

SEQ ID NO: 64905 - DNA, 20 bp, Artificial Sequence
  Description of Artificial Sequence: Synthetic oligonucleotide
  Target: LAMA2; (-) strand; PAM type: NRG; PAM sequence: CAG
actttttttttcttttgaga

SEQ ID NO: 64906 - DNA, 20 bp, Artificial Sequence
  Description of Artificial Sequence: Synthetic oligonucleotide
  Target: LAMA2; (-) strand; PAM type: NRG; PAM sequence: GAG
ataaactttttttttctttt

SEQ ID NO: 64907 - DNA, 20 bp, Artificial Sequence
  Description of Artificial Sequence: Synthetic oligonucleotide
  Target: LAMA2; (-) strand; PAM type: NRG; PAM sequence: AGG
tgaacttctcatctcattac

SEQ ID NO: 64908 - DNA, 20 bp, Artificial Sequence
  Description of Artificial Sequence: Synthetic oligonucleotide
  Target: LAMA2; (-) strand; PAM type: NRG; PAM sequence: CAG
ctgaacttctcatctcatta

SEQ ID NO: 64909 - DNA, 20 bp, Artificial Sequence
  Description of Artificial Sequence: Synthetic oligonucleotide
  Target: LAMA2; (-) strand; PAM type: NRG; PAM sequence: TGG
ttcatttatacaacacacac

SEQ ID NO: 64910 - DNA, 20 bp, Artificial Sequence
  Description of Artificial Sequence: Synthetic oligonucleotide
  Target: LAMA2; (-) strand; PAM type: NRG; PAM sequence: GGG
atcttctgtctgagaaaatt

SEQ ID NO: 64911 - DNA, 20 bp, Artificial Sequence
  Description of Artificial Sequence: Synthetic oligonucleotide
  Target: LAMA2; (-) strand; PAM type: NRG; PAM sequence: TGG
tatcttctgtctgagaaaat

SEQ ID NO: 64912 - DNA, 20 bp, Artificial Sequence
  Description of Artificial Sequence: Synthetic oligonucleotide
  Target: LAMA2; (-) strand; PAM type: NRG; PAM sequence: GAG
actccttttatcttctgtct

SEQ ID NO: 64913 - DNA, 20 bp, Artificial Sequence
  Description of Artificial Sequence: Synthetic oligonucleotide
  Target: LAMA2; (-) strand; PAM type: NRG; PAM sequence: TGG
tgatttcactctctccttcc

SEQ ID NO: 64914 - DNA, 20 bp, Artificial Sequence
  Description of Artificial Sequence: Synthetic oligonucleotide
  Target: LAMA2; (-) strand; PAM type: NRG; PAM sequence: GGG
gactctgttataataactca

SEQ ID NO: 64915 - DNA, 20 bp, Artificial Sequence
  Description of Artificial Sequence: Synthetic oligonucleotide
  Target: LAMA2; (-) strand; PAM type: NRG; PAM sequence: AGG
ggactctgttataataactc

SEQ ID NO: 64916 - DNA, 20 bp, Artificial Sequence
  Description of Artificial Sequence: Synthetic oligonucleotide
  Target: LAMA2; (-) strand; PAM type: NRG; PAM sequence: CAG
tggactctgttataataact

SEQ ID NO: 64917 - DNA, 20 bp, Artificial Sequence
  Description of Artificial Sequence: Synthetic oligonucleotide
  Target: LAMA2; (-) strand; PAM type: NRG; PAM sequence: TGG
ctgtgcagctctctgactct

SEQ ID NO: 64918 - DNA, 20 bp, Artificial Sequence
  Description of Artificial Sequence: Synthetic oligonucleotide
  Target: LAMA2; (-) strand; PAM type: NRG; PAM sequence: CAG
catatcccaccccatctgtg

SEQ ID NO: 64919 - DNA, 20 bp, Artificial Sequence
  Description of Artificial Sequence: Synthetic oligonucleotide
  Target: LAMA2; (-) strand; PAM type: NRG; PAM sequence: TGG
ccatggccctttccttgacc

SEQ ID NO: 64920 - DNA, 20 bp, Artificial Sequence
  Description of Artificial Sequence: Synthetic oligonucleotide
  Target: LAMA2; (-) strand; PAM type: NRG; PAM sequence: TGG
gcatcaggcacccactccca

SEQ ID NO: 64921 - DNA, 20 bp, Artificial Sequence
  Description of Artificial Sequence: Synthetic oligonucleotide
  Target: LAMA2; (-) strand; PAM type: NRG; PAM sequence: AGG
cttttcctcctctccgcatc

SEQ ID NO: 64922 - DNA, 20 bp, Artificial Sequence
  Description of Artificial Sequence: Synthetic oligonucleotide
  Target: LAMA2; (-) strand; PAM type: NRG; PAM sequence: CAG
tcttttcctcctctccgcat

SEQ ID NO: 64923 - DNA, 20 bp, Artificial Sequence
  Description of Artificial Sequence: Synthetic oligonucleotide
  Target: LAMA2; (-) strand; PAM type: NRG; PAM sequence: AGG
ctaccaacatgactgtgccc

SEQ ID NO: 64924 - DNA, 20 bp, Artificial Sequence
  Description of Artificial Sequence: Synthetic oligonucleotide
  Target: LAMA2; (-) strand; PAM type: NRG; PAM sequence: CAG
tctaccaacatgactgtgcc

SEQ ID NO: 64925 - DNA, 20 bp, Artificial Sequence
  Description of Artificial Sequence: Synthetic oligonucleotide
  Target: LAMA2; (-) strand; PAM type: NRG; PAM sequence: TGG
attattaatgacttactttc

SEQ ID NO: 64926 - DNA, 20 bp, Artificial Sequence
  Description of Artificial Sequence: Synthetic oligonucleotide
  Target: LAMA2; (-) strand; PAM type: NRG; PAM sequence: CAG
tccctcataaaaccaccttc

SEQ ID NO: 64927 - DNA, 20 bp, Artificial Sequence
  Description of Artificial Sequence: Synthetic oligonucleotide
  Target: LAMA2; (-) strand; PAM type: NRG; PAM sequence: CAG
ctttgatgctacttcttaat

SEQ ID NO: 64928 - DNA, 20 bp, Artificial Sequence
  Description of Artificial Sequence: Synthetic oligonucleotide
  Target: LAMA2; (-) strand; PAM type: NRG; PAM sequence: AGG
gaccttcaagatctagagat

SEQ ID NO: 64929 - DNA, 20 bp, Artificial Sequence
  Description of Artificial Sequence: Synthetic oligonucleotide
  Target: LAMA2; (-) strand; PAM type: NRG; PAM sequence: TAG
agaccttcaagatctagaga

SEQ ID NO: 64930 - DNA, 20 bp, Artificial Sequence
  Description of Artificial Sequence: Synthetic oligonucleotide
  Target: LAMA2; (-) strand; PAM type: NRG; PAM sequence: GAG
tataagaccttcaagatcta

SEQ ID NO: 64931 - DNA, 20 bp, Artificial Sequence
  Description of Artificial Sequence: Synthetic oligonucleotide
  Target: LAMA2; (-) strand; PAM type: NRG; PAM sequence: TAG
tctataagaccttcaagatc

SEQ ID NO: 64932 - DNA, 20 bp, Artificial Sequence
  Description of Artificial Sequence: Synthetic oligonucleotide
  Target: LAMA2; (-) strand; PAM type: NRG; PAM sequence: AAG
caatattctataagaccttc

SEQ ID NO: 64933 - DNA, 20 bp, Artificial Sequence
  Description of Artificial Sequence: Synthetic oligonucleotide
  Target: LAMA2; (-) strand; PAM type: NRG; PAM sequence: AAG
acttagaaacaatattctat

SEQ ID NO: 64934 - DNA, 20 bp, Artificial Sequence
  Description of Artificial Sequence: Synthetic oligonucleotide
  Target: LAMA2; (-) strand; PAM type: NRG; PAM sequence: TAG
ctgtcatcatacttctgact

SEQ ID NO: 64935 - DNA, 20 bp, Artificial Sequence
  Description of Artificial Sequence: Synthetic oligonucleotide
  Target: LAMA2; (-) strand; PAM type: NRG; PAM sequence: TGG
ctgttcctattcggccatct

SEQ ID NO: 64936 - DNA, 20 bp, Artificial Sequence
  Description of Artificial Sequence: Synthetic oligonucleotide
  Target: LAMA2; (-) strand; PAM type: NRG; PAM sequence: CGG
agagcggagctgttcctatt

SEQ ID NO: 64937 - DNA, 20 bp, Artificial Sequence
  Description of Artificial Sequence: Synthetic oligonucleotide
  Target: LAMA2; (-) strand; PAM type: NRG; PAM sequence: GAG
acactgggagctgtagagcg

SEQ ID NO: 64938 - DNA, 20 bp, Artificial Sequence
  Description of Artificial Sequence: Synthetic oligonucleotide
  Target: LAMA2; (-) strand; PAM type: NRG; PAM sequence: CGG
tcacactgggagctgtagag

SEQ ID NO: 64939 - DNA, 20 bp, Artificial Sequence
  Description of Artificial Sequence: Synthetic oligonucleotide
  Target: LAMA2; (-) strand; PAM type: NRG; PAM sequence: GAG
cgctcacactgggagctgta

SEQ ID NO: 64940 - DNA, 20 bp, Artificial Sequence
  Description of Artificial Sequence: Synthetic oligonucleotide
  Target: LAMA2; (-) strand; PAM type: NRG; PAM sequence: TAG
gtcgctcacactgggagctg

SEQ ID NO: 64941 - DNA, 20 bp, Artificial Sequence
  Description of Artificial Sequence: Synthetic oligonucleotide
  Target: LAMA2; (-) strand; PAM type: NRG; PAM sequence: GAG
ttctgcgtcgctcacactgg

SEQ ID NO: 64942 - DNA, 20 bp, Artificial Sequence
  Description of Artificial Sequence: Synthetic oligonucleotide
  Target: LAMA2; (-) strand; PAM type: NRG; PAM sequence: GGG
tcttctgcgtcgctcacact

SEQ ID NO: 64943 - DNA, 20 bp, Artificial Sequence
  Description of Artificial Sequence: Synthetic oligonucleotide
  Target: LAMA2; (-) strand; PAM type: NRG; PAM sequence: TGG
gtcttctgcgtcgctcacac

SEQ ID NO: 64944 - DNA, 20 bp, Artificial Sequence
  Description of Artificial Sequence: Synthetic oligonucleotide
  Target: LAMA2; (-) strand; PAM type: NRG; PAM sequence: CAG
cggtacctcagatggaaatg

SEQ ID NO: 64945 - DNA, 20 bp, Artificial Sequence
  Description of Artificial Sequence: Synthetic oligonucleotide
  Target: LAMA2; (-) strand; PAM type: NRG; PAM sequence: TGG
gatgaacccggtacctcaga

SEQ ID NO: 64946 - DNA, 20 bp, Artificial Sequence
  Description of Artificial Sequence: Synthetic oligonucleotide
  Target: LAMA2; (-) strand; PAM type: NRG; PAM sequence: CAG
gtgagatgaacccggtacct

SEQ ID NO: 64947 - DNA, 20 bp, Artificial Sequence
  Description of Artificial Sequence: Synthetic oligonucleotide
  Target: LAMA2; (-) strand; PAM type: NRG; PAM sequence: CGG
actccctagtgagatgaacc

SEQ ID NO: 64948 - DNA, 20 bp, Artificial Sequence
  Description of Artificial Sequence: Synthetic oligonucleotide
  Target: LAMA2; (-) strand; PAM type: NRG; PAM sequence: GAG
actgtctggcactccctagt

SEQ ID NO: 64949 - DNA, 20 bp, Artificial Sequence
  Description of Artificial Sequence: Synthetic oligonucleotide
  Target: LAMA2; (-) strand; PAM type: NRG; PAM sequence: TAG
gcccactgtctggcactccc

SEQ ID NO: 64950 - DNA, 20 bp, Artificial Sequence
  Description of Artificial Sequence: Synthetic oligonucleotide
  Target: LAMA2; (-) strand; PAM type: NRG; PAM sequence: TGG
actggcctgcgcccactgtc

SEQ ID NO: 64951 - DNA, 20 bp, Artificial Sequence
  Description of Artificial Sequence: Synthetic oligonucleotide
  Target: LAMA2; (-) strand; PAM type: NRG; PAM sequence: TGG
cgcacggtgcgcacacacac

SEQ ID NO: 64952 - DNA, 20 bp, Artificial Sequence
  Description of Artificial Sequence: Synthetic oligonucleotide
  Target: LAMA2; (-) strand; PAM type: NRG; PAM sequence: CGG
gccctgcttcggctcgcgca

SEQ ID NO: 64953 - DNA, 20 bp, Artificial Sequence
  Description of Artificial Sequence: Synthetic oligonucleotide
  Target: LAMA2; (-) strand; PAM type: NRG; PAM sequence: CGG
ggcaatgcctcgccctgctt

SEQ ID NO: 64954 - DNA, 20 bp, Artificial Sequence
  Description of Artificial Sequence: Synthetic oligonucleotide
  Target: LAMA2; (-) strand; PAM type: NRG; PAM sequence: AGG
ccccttgcgcttcccaggtg

SEQ ID NO: 64955 - DNA, 20 bp, Artificial Sequence
  Description of Artificial Sequence: Synthetic oligonucleotide
  Target: LAMA2; (-) strand; PAM type: NRG; PAM sequence: GAG
accccttgcgcttcccaggt

SEQ ID NO: 64956 - DNA, 20 bp, Artificial Sequence
  Description of Artificial Sequence: Synthetic oligonucleotide
  Target: LAMA2; (-) strand; PAM type: NRG; PAM sequence: AGG
cctgaccccttgcgcttccc

SEQ ID NO: 64957 - DNA, 20 bp, Artificial Sequence
  Description of Artificial Sequence: Synthetic oligonucleotide
  Target: LAMA2; (-) strand; PAM type: NRG; PAM sequence: CAG
ccctgaccccttgcgcttcc

SEQ ID NO: 64958 - DNA, 20 bp, Artificial Sequence
  Description of Artificial Sequence: Synthetic oligonucleotide
  Target: LAMA2; (-) strand; PAM type: NRG; PAM sequence: GGG
ccctttctttgactcggaaa

SEQ ID NO: 64959 - DNA, 20 bp, Artificial Sequence
  Description of Artificial Sequence: Synthetic oligonucleotide
  Target: LAMA2; (-) strand; PAM type: NRG; PAM sequence: AGG
cccctttctttgactcggaa

SEQ ID NO: 64960 - DNA, 20 bp, Artificial Sequence
  Description of Artificial Sequence: Synthetic oligonucleotide
  Target: LAMA2; (-) strand; PAM type: NRG; PAM sequence: AAG
acccctttctttgactcgga

SEQ ID NO: 64961 - DNA, 20 bp, Artificial Sequence
  Description of Artificial Sequence: Synthetic oligonucleotide
  Target: LAMA2; (-) strand; PAM type: NRG; PAM sequence: CGG
cgtcacccctttctttgact

SEQ ID NO: 64962 - DNA, 20 bp, Artificial Sequence
  Description of Artificial Sequence: Synthetic oligonucleotide
  Target: LAMA2; (-) strand; PAM type: NRG; PAM sequence: AGG
tgggagtgacccgattttcc

SEQ ID NO: 64963 - DNA, 20 bp, Artificial Sequence
  Description of Artificial Sequence: Synthetic oligonucleotide
  Target: LAMA2; (-) strand; PAM type: NRG; PAM sequence: CAG
gtgggagtgacccgattttc

SEQ ID NO: 64964 - DNA, 20 bp, Artificial Sequence
  Description of Artificial Sequence: Synthetic oligonucleotide
  Target: LAMA2; (-) strand; PAM type: NRG; PAM sequence: GAG
aaagcgcaatattcgggtgg

SEQ ID NO: 64965 - DNA, 20 bp, Artificial Sequence
  Description of Artificial Sequence: Synthetic oligonucleotide
  Target: LAMA2; (-) strand; PAM type: NRG; PAM sequence: GGG
gaaaagcgcaatattcgggt

SEQ ID NO: 64966 - DNA, 20 bp, Artificial Sequence
  Description of Artificial Sequence: Synthetic oligonucleotide
  Target: LAMA2; (-) strand; PAM type: NRG; PAM sequence: TGG
tgaaaagcgcaatattcggg

SEQ ID NO: 64967 - DNA, 20 bp, Artificial Sequence
  Description of Artificial Sequence: Synthetic oligonucleotide
  Target: LAMA2; (-) strand; PAM type: NRG; PAM sequence: GGG
gtctgaaaagcgcaatattc

SEQ ID NO: 64968 - DNA, 20 bp, Artificial Sequence
  Description of Artificial Sequence: Synthetic oligonucleotide
  Target: LAMA2; (-) strand; PAM type: NRG; PAM sequence: CGG
ggtctgaaaagcgcaatatt

SEQ ID NO: 64969 - DNA, 20 bp, Artificial Sequence
  Description of Artificial Sequence: Synthetic oligonucleotide
  Target: LAMA2; (-) strand; PAM type: NRG; PAM sequence: AAG
gtttcttaagccggtctgaa

SEQ ID NO: 64970 - DNA, 20 bp, Artificial Sequence
  Description of Artificial Sequence: Synthetic oligonucleotide
  Target: LAMA2; (-) strand; PAM type: NRG; PAM sequence: CGG
tggtgcgccgtttcttaagc

SEQ ID NO: 64971 - DNA, 20 bp, Artificial Sequence
  Description of Artificial Sequence: Synthetic oligonucleotide
  Target: LAMA2; (-) strand; PAM type: NRG; PAM sequence: AAG
ctcgtggtgcgccgtttctt

SEQ ID NO: 64972 - DNA, 20 bp, Artificial Sequence
  Description of Artificial Sequence: Synthetic oligonucleotide
  Target: LAMA2; (-) strand; PAM type: NRG; PAM sequence: TGG
aggtgtgggatatagtctcg

SEQ ID NO: 64973 - DNA, 20 bp, Artificial Sequence
  Description of Artificial Sequence: Synthetic oligonucleotide
  Target: LAMA2; (-) strand; PAM type: NRG; PAM sequence: TAG
tccgagccaggtgtgggata

SEQ ID NO: 64974 - DNA, 20 bp, Artificial Sequence
  Description of Artificial Sequence: Synthetic oligonucleotide
  Target: LAMA2; (-) strand; PAM type: NRG; PAM sequence: GGG
ggaccctccgagccaggtgt

SEQ ID NO: 64975 - DNA, 20 bp, Artificial Sequence
  Description of Artificial Sequence: Synthetic oligonucleotide
  Target: LAMA2; (-) strand; PAM type: NRG; PAM sequence: TGG
aggaccctccgagccaggtg

SEQ ID NO: 64976 - DNA, 20 bp, Artificial Sequence
  Description of Artificial Sequence: Synthetic oligonucleotide
  Target: LAMA2; (-) strand; PAM type: NRG; PAM sequence: AGG
ggcgtaggaccctccgagcc

SEQ ID NO: 64977 - DNA, 20 bp, Artificial Sequence
  Description of Artificial Sequence: Synthetic oligonucleotide
  Target: LAMA2; (-) strand; PAM type: NRG; PAM sequence: CAG
gggcgtaggaccctccgagc

SEQ ID NO: 64978 - DNA, 20 bp, Artificial Sequence
  Description of Artificial Sequence: Synthetic oligonucleotide
  Target: LAMA2; (-) strand; PAM type: NRG; PAM sequence: GAG
ccgtgggcgtaggaccctcc

SEQ ID NO: 64979 - DNA, 20 bp, Artificial Sequence
  Description of Artificial Sequence: Synthetic oligonucleotide
  Target: LAMA2; (-) strand; PAM type: NRG; PAM sequence: AGG
cagcgagattccgtgggcgt

SEQ ID NO: 64980 - DNA, 20 bp, Artificial Sequence
  Description of Artificial Sequence: Synthetic oligonucleotide
  Target: LAMA2; (-) strand; PAM type: NRG; PAM sequence: TAG
tcagcgagattccgtgggcg

SEQ ID NO: 64981 - DNA, 20 bp, Artificial Sequence
  Description of Artificial Sequence: Synthetic oligonucleotide
  Target: LAMA2; (-) strand; PAM type: NRG; PAM sequence: GGG
agcaatcagcgagattccgt

SEQ ID NO: 64982 - DNA, 20 bp, Artificial Sequence
  Description of Artificial Sequence: Synthetic oligonucleotide
  Target: LAMA2; (-) strand; PAM type: NRG; PAM sequence: TGG
tagcaatcagcgagattccg

SEQ ID NO: 64983 - DNA, 20 bp, Artificial Sequence
  Description of Artificial Sequence: Synthetic oligonucleotide
  Target: LAMA2; (-) strand; PAM type: NRG; PAM sequence: GAG
ctgctgtgctagcaatcagc

SEQ ID NO: 64984 - DNA, 20 bp, Artificial Sequence
  Description of Artificial Sequence: Synthetic oligonucleotide
  Target: LAMA2; (-) strand; PAM type: NRG; PAM sequence: CAG
cagactgctgtgctagcaat

SEQ ID NO: 64985 - DNA, 20 bp, Artificial Sequence
  Description of Artificial Sequence: Synthetic oligonucleotide
  Target: LAMA2; (-) strand; PAM type: NRG; PAM sequence: TAG
ttgatctcagactgctgtgc

SEQ ID NO: 64986 - DNA, 20 bp, Artificial Sequence
  Description of Artificial Sequence: Synthetic oligonucleotide
  Target: LAMA2; (-) strand; PAM type: NRG; PAM sequence: CAG
gccgccttgcagtttgatct

SEQ ID NO: 64987 - DNA, 20 bp, Artificial Sequence
  Description of Artificial Sequence: Synthetic oligonucleotide
  Target: LAMA2; (-) strand; PAM type: NRG; PAM sequence: CAG
ccagcctcgttgccgccttg

SEQ ID NO: 64988 - DNA, 20 bp, Artificial Sequence
  Description of Artificial Sequence: Synthetic oligonucleotide
  Target: LAMA2; (-) strand; PAM type: NRG; PAM sequence: CAG
aatggcgggcgcccctcccc

SEQ ID NO: 64989 - DNA, 20 bp, Artificial Sequence
  Description of Artificial Sequence: Synthetic oligonucleotide
  Target: LAMA2; (-) strand; PAM type: NRG; PAM sequence: GGG
aagcaagcctgggcaatggc

SEQ ID NO: 64990 - DNA, 20 bp, Artificial Sequence
  Description of Artificial Sequence: Synthetic oligonucleotide
  Target: LAMA2; (-) strand; PAM type: NRG; PAM sequence: CGG
taagcaagcctgggcaatgg

SEQ ID NO: 64991 - DNA, 20 bp, Artificial Sequence
  Description of Artificial Sequence: Synthetic oligonucleotide
  Target: LAMA2; (-) strand; PAM type: NRG; PAM sequence: TGG
acctaagcaagcctgggcaa

SEQ ID NO: 64992 - DNA, 20 bp, Artificial Sequence
  Description of Artificial Sequence: Synthetic oligonucleotide
  Target: LAMA2; (-) strand; PAM type: NRG; PAM sequence: GGG
ttgtttacctaagcaagcct

SEQ ID NO: 64993 - DNA, 20 bp, Artificial Sequence
  Description of Artificial Sequence: Synthetic oligonucleotide
  Target: LAMA2; (-) strand; PAM type: NRG; PAM sequence: TGG
tttgtttacctaagcaagcc

SEQ ID NO: 64994 - DNA, 20 bp, Artificial Sequence
  Description of Artificial Sequence: Synthetic oligonucleotide
  Target: LAMA2; (-) strand; PAM type: NRG; PAM sequence: AAG
gctgctttgtttacctaagc

SEQ ID NO: 64995 - DNA, 20 bp, Artificial Sequence
  Description of Artificial Sequence: Synthetic oligonucleotide
  Target: LAMA2; (-) strand; PAM type: NRG; PAM sequence: AAG
cccggctgctttgtttacct

SEQ ID NO: 64996 - DNA, 20 bp, Artificial Sequence
  Description of Artificial Sequence: Synthetic oligonucleotide
  Target: LAMA2; (-) strand; PAM type: NRG; PAM sequence: CGG
tccacccagttcgagcttcc

SEQ ID NO: 64997 - DNA, 20 bp, Artificial Sequence
  Description of Artificial Sequence: Synthetic oligonucleotide
  Target: LAMA2; (-) strand; PAM type: NRG; PAM sequence: GAG
tggtgggctccacccagttc

SEQ ID NO: 64998 - DNA, 20 bp, Artificial Sequence
  Description of Artificial Sequence: Synthetic oligonucleotide
  Target: LAMA2; (-) strand; PAM type: NRG; PAM sequence: CAG
gagctgtggtgggctccacc

SEQ ID NO: 64999 - DNA, 20 bp, Artificial Sequence
  Description of Artificial Sequence: Synthetic oligonucleotide
  Target: LAMA2; (-) strand; PAM type: NRG; PAM sequence: GGG
aggcctccttgagctgtggt

SEQ ID NO: 65000 - DNA, 20 bp, Artificial Sequence
  Description of Artificial Sequence: Synthetic oligonucleotide
  Target: LAMA2; (-) strand; PAM type: NRG; PAM sequence: TGG
caggcctccttgagctgtgg

SEQ ID NO: 65001 - DNA, 20 bp, Artificial Sequence
  Description of Artificial Sequence: Synthetic oligonucleotide
  Target: LAMA2; (-) strand; PAM type: NRG; PAM sequence: TGG
aggcaggcctccttgagctg

SEQ ID NO: 65002 - DNA, 20 bp, Artificial Sequence
  Description of Artificial Sequence: Synthetic oligonucleotide
  Target: LAMA2; (-) strand; PAM type: NRG; PAM sequence: GAG
agaggcaggcaggcctcctt

SEQ ID NO: 65003 - DNA, 20 bp, Artificial Sequence
  Description of Artificial Sequence: Synthetic oligonucleotide
  Target: LAMA2; (-) strand; PAM type: NRG; PAM sequence: AGG
tggagcctacagaggcaggc

SEQ ID NO: 65004 - DNA, 20 bp, Artificial Sequence
  Description of Artificial Sequence: Synthetic oligonucleotide
  Target: LAMA2; (-) strand; PAM type: NRG; PAM sequence: CAG
gtggagcctacagaggcagg

SEQ ID NO: 65005 - DNA, 20 bp, Artificial Sequence
  Description of Artificial Sequence: Synthetic oligonucleotide
  Target: LAMA2; (-) strand; PAM type: NRG; PAM sequence: AGG
gaggtggagcctacagaggc

SEQ ID NO: 65006 - DNA, 20 bp, Artificial Sequence
  Description of Artificial Sequence: Synthetic oligonucleotide
  Target: LAMA2; (-) strand; PAM type: NRG; PAM sequence: CAG
agaggtggagcctacagagg

SEQ ID NO: 65007 - DNA, 20 bp, Artificial Sequence
  Description of Artificial Sequence: Synthetic oligonucleotide
  Target: LAMA2; (-) strand; PAM type: NRG; PAM sequence: AGG
cccagaggtggagcctacag

SEQ ID NO: 65008 - DNA, 20 bp, Artificial Sequence
  Description of Artificial Sequence: Synthetic oligonucleotide
  Target: LAMA2; (-) strand; PAM type: NRG; PAM sequence: GAG
ccccagaggtggagcctaca

SEQ ID NO: 65009 - DNA, 20 bp, Artificial Sequence
  Description of Artificial Sequence: Synthetic oligonucleotide
  Target: LAMA2; (-) strand; PAM type: NRG; PAM sequence: CAG
gcccccagaggtggagccta

SEQ ID NO: 65010 - DNA, 20 bp, Artificial Sequence
  Description of Artificial Sequence: Synthetic oligonucleotide
  Target: LAMA2; (-) strand; PAM type: NRG; PAM sequence: GAG
gtgccctgcccccagaggtg

SEQ ID NO: 65011 - DNA, 20 bp, Artificial Sequence
  Description of Artificial Sequence: Synthetic oligonucleotide
  Target: LAMA2; (-) strand; PAM type: NRG; PAM sequence: TGG
ctgtgccctgcccccagagg

SEQ ID NO: 65012 - DNA, 20 bp, Artificial Sequence
  Description of Artificial Sequence: Synthetic oligonucleotide
  Target: LAMA2; (-) strand; PAM type: NRG; PAM sequence: AGG
tgtctgtgccctgcccccag

SEQ ID NO: 65013 - DNA, 20 bp, Artificial Sequence
  Description of Artificial Sequence: Synthetic oligonucleotide
  Target: LAMA2; (-) strand; PAM type: NRG; PAM sequence: GAG
ttgtctgtgccctgccccca

SEQ ID NO: 65014 - DNA, 20 bp, Artificial Sequence
  Description of Artificial Sequence: Synthetic oligonucleotide
  Target: LAMA2; (-) strand; PAM type: NRG; PAM sequence: CAG
gtttgtctgtgccctgcccc

SEQ ID NO: 65015 - DNA, 20 bp, Artificial Sequence
  Description of Artificial Sequence: Synthetic oligonucleotide
  Target: LAMA2; (-) strand; PAM type: NRG; PAM sequence: AGG
agggacacttaagtctgcag

SEQ ID NO: 65016 - DNA, 20 bp, Artificial Sequence
  Description of Artificial Sequence: Synthetic oligonucleotide
  Target: LAMA2; (-) strand; PAM type: NRG; PAM sequence: GAG
cagggacacttaagtctgca

SEQ ID NO: 65017 - DNA, 20 bp, Artificial Sequence
  Description of Artificial Sequence: Synthetic oligonucleotide
  Target: LAMA2; (-) strand; PAM type: NRG; PAM sequence: CAG
gacagggacacttaagtctg

SEQ ID NO: 65018 - DNA, 20 bp, Artificial Sequence
  Description of Artificial Sequence: Synthetic oligonucleotide
  Target: LAMA2; (-) strand; PAM type: NRG; PAM sequence: AAG
gctgtcagacagggacactt

SEQ ID NO: 65019 - DNA, 20 bp, Artificial Sequence
  Description of Artificial Sequence: Synthetic oligonucleotide
  Target: LAMA2; (-) strand; PAM type: NRG; PAM sequence: GGG
ctcttcaaagctgtcagaca

SEQ ID NO: 65020 - DNA, 20 bp, Artificial Sequence
  Description of Artificial Sequence: Synthetic oligonucleotide
  Target: LAMA2; (-) strand; PAM type: NRG; PAM sequence: AGG
tctcttcaaagctgtcagac

SEQ ID NO: 65021 - DNA, 20 bp, Artificial Sequence
  Description of Artificial Sequence: Synthetic oligonucleotide
  Target: LAMA2; (-) strand; PAM type: NRG; PAM sequence: CAG
ctctcttcaaagctgtcaga

SEQ ID NO: 65022 - DNA, 20 bp, Artificial Sequence
  Description of Artificial Sequence: Synthetic oligonucleotide
  Target: LAMA2; (-) strand; PAM type: NRG; PAM sequence: CAG
actgctctcttcaaagctgt

SEQ ID NO: 65023 - DNA, 20 bp, Artificial Sequence
  Description of Artificial Sequence: Synthetic oligonucleotide
  Target: LAMA2; (-) strand; PAM type: NRG; PAM sequence: AAG
gagaaccactgctctcttca

SEQ ID NO: 65024 - DNA, 20 bp, Artificial Sequence
  Description of Artificial Sequence: Synthetic oligonucleotide
  Target: LAMA2; (-) strand; PAM type: NRG; PAM sequence: GAG
gatctccagctgcgtactgg

SEQ ID NO: 65025 - DNA, 20 bp, Artificial Sequence
  Description of Artificial Sequence: Synthetic oligonucleotide
  Target: LAMA2; (-) strand; PAM type: NRG; PAM sequence: GGG
cagatctccagctgcgtact

SEQ ID NO: 65026 - DNA, 20 bp, Artificial Sequence
  Description of Artificial Sequence: Synthetic oligonucleotide
  Target: LAMA2; (-) strand; PAM type: NRG; PAM sequence: TGG
tcagatctccagctgcgtac

SEQ ID NO: 65027 - DNA, 20 bp, Artificial Sequence
  Description of Artificial Sequence: Synthetic oligonucleotide
  Target: LAMA2; (-) strand; PAM type: NRG; PAM sequence: CAG
tctgcccattctcagatctc

SEQ ID NO: 65028 - DNA, 20 bp, Artificial Sequence
  Description of Artificial Sequence: Synthetic oligonucleotide
  Target: LAMA2; (-) strand; PAM type: NRG; PAM sequence: CAG
ggaggcagtctgcccattct

SEQ ID NO: 65029 - DNA, 20 bp, Artificial Sequence
  Description of Artificial Sequence: Synthetic oligonucleotide
  Target: LAMA2; (-) strand; PAM type: NRG; PAM sequence: CAG
cagggacccacttgaggagg

SEQ ID NO: 65030 - DNA, 20 bp, Artificial Sequence
  Description of Artificial Sequence: Synthetic oligonucleotide
  Target: LAMA2; (-) strand; PAM type: NRG; PAM sequence: AGG
agtcagggacccacttgagg

SEQ ID NO: 65031 - DNA, 20 bp, Artificial Sequence
  Description of Artificial Sequence: Synthetic oligonucleotide
  Target: LAMA2; (-) strand; PAM type: NRG; PAM sequence: GAG
gagtcagggacccacttgag

SEQ ID NO: 65032 - DNA, 20 bp, Artificial Sequence
  Description of Artificial Sequence: Synthetic oligonucleotide
  Target: LAMA2; (-) strand; PAM type: NRG; PAM sequence: AGG
aggagtcagggacccacttg

SEQ ID NO: 65033 - DNA, 20 bp, Artificial Sequence
  Description of Artificial Sequence: Synthetic oligonucleotide
  Target: LAMA2; (-) strand; PAM type: NRG; PAM sequence: GAG
caggagtcagggacccactt

SEQ ID NO: 65034 - DNA, 20 bp, Artificial Sequence
  Description of Artificial Sequence: Synthetic oligonucleotide
  Target: LAMA2; (-) strand; PAM type: NRG; PAM sequence: GGG
tgctcgggggtcaggagtca

SEQ ID NO: 65035 - DNA, 20 bp, Artificial Sequence
  Description of Artificial Sequence: Synthetic oligonucleotide
  Target: LAMA2; (-) strand; PAM type: NRG; PAM sequence: AGG
ctgctcgggggtcaggagtc

SEQ ID NO: 65036 - DNA, 20 bp, Artificial Sequence
  Description of Artificial Sequence: Synthetic oligonucleotide
  Target: LAMA2; (-) strand; PAM type: NRG; PAM sequence: CAG
gctgctcgggggtcaggagt

SEQ ID NO: 65037 - DNA, 20 bp, Artificial Sequence
  Description of Artificial Sequence: Synthetic oligonucleotide
  Target: LAMA2; (-) strand; PAM type: NRG; PAM sequence: GAG
ttaggctgctcgggggtcag

SEQ ID NO: 65038 - DNA, 20 bp, Artificial Sequence
  Description of Artificial Sequence: Synthetic oligonucleotide
  Target: LAMA2; (-) strand; PAM type: NRG; PAM sequence: AGG
agttaggctgctcgggggtc

SEQ ID NO: 65039 - DNA, 20 bp, Artificial Sequence
  Description of Artificial Sequence: Synthetic oligonucleotide
  Target: LAMA2; (-) strand; PAM type: NRG; PAM sequence: CAG
cagttaggctgctcgggggt

SEQ ID NO: 65040 - DNA, 20 bp, Artificial Sequence
  Description of Artificial Sequence: Synthetic oligonucleotide
  Target: LAMA2; (-) strand; PAM type: NRG; PAM sequence: GGG
ctcccagttaggctgctcgg

SEQ ID NO: 65041 - DNA, 20 bp, Artificial Sequence
  Description of Artificial Sequence: Synthetic oligonucleotide
  Target: LAMA2; (-) strand; PAM type: NRG; PAM sequence: GGG
cctcccagttaggctgctcg

SEQ ID NO: 65042 - DNA, 20 bp, Artificial Sequence
  Description of Artificial Sequence: Synthetic oligonucleotide
  Target: LAMA2; (-) strand; PAM type: NRG; PAM sequence: GGG
gcctcccagttaggctgctc

SEQ ID NO: 65043 - DNA, 20 bp, Artificial Sequence
  Description of Artificial Sequence: Synthetic oligonucleotide
  Target: LAMA2; (-) strand; PAM type: NRG; PAM sequence: CGG
tgcctcccagttaggctgct

SEQ ID NO: 65044 - DNA, 20 bp, Artificial Sequence
  Description of Artificial Sequence: Synthetic oligonucleotide
  Target: LAMA2; (-) strand; PAM type: NRG; PAM sequence: AGG
ctggggggtgcctcccagtt

SEQ ID NO: 65045 - DNA, 20 bp, Artificial Sequence
  Description of Artificial Sequence: Synthetic oligonucleotide
  Target: LAMA2; (-) strand; PAM type: NRG; PAM sequence: TAG
gctggggggtgcctcccagt

SEQ ID NO: 65046 - DNA, 20 bp, Artificial Sequence
  Description of Artificial Sequence: Synthetic oligonucleotide
  Target: LAMA2; (-) strand; PAM type: NRG; PAM sequence: CAG
ccctgctggggggtgcctcc

SEQ ID NO: 65047 - DNA, 20 bp, Artificial Sequence
  Description of Artificial Sequence: Synthetic oligonucleotide
  Target: LAMA2; (-) strand; PAM type: NRG; PAM sequence: GGG
gtcagtgtgcccctgctggg

SEQ ID NO: 65048 - DNA, 20 bp, Artificial Sequence
  Description of Artificial Sequence: Synthetic oligonucleotide
  Target: LAMA2; (-) strand; PAM type: NRG; PAM sequence: GGG
tgtcagtgtgcccctgctgg

SEQ ID NO: 65049 - DNA, 20 bp, Artificial Sequence
  Description of Artificial Sequence: Synthetic oligonucleotide
  Target: LAMA2; (-) strand; PAM type: NRG; PAM sequence: GGG
gtgtcagtgtgcccctgctg

SEQ ID NO: 65050 - DNA, 20 bp, Artificial Sequence
  Description of Artificial Sequence: Synthetic oligonucleotide
  Target: LAMA2; (-) strand; PAM type: NRG; PAM sequence: GGG
ggtgtcagtgtgcccctgct

SEQ ID NO: 65051 - DNA, 20 bp, Artificial Sequence
  Description of Artificial Sequence: Synthetic oligonucleotide
  Target: LAMA2; (-) strand; PAM type: NRG; PAM sequence: TGG
aggtgtcagtgtgcccctgc

SEQ ID NO: 65052 - DNA, 20 bp, Artificial Sequence
  Description of Artificial Sequence: Synthetic oligonucleotide
  Target: LAMA2; (-) strand; PAM type: NRG; PAM sequence: CAG
taccctgccgtgtgaggtgt

SEQ ID NO: 65053 - DNA, 20 bp, Artificial Sequence
  Description of Artificial Sequence: Synthetic oligonucleotide
  Target: LAMA2; (-) strand; PAM type: NRG; PAM sequence: AGG
ttggaataccctgccgtgtg

SEQ ID NO: 65054 - DNA, 20 bp, Artificial Sequence
  Description of Artificial Sequence: Synthetic oligonucleotide
  Target: LAMA2; (-) strand; PAM type: NRG; PAM sequence: GAG
gttggaataccctgccgtgt

SEQ ID NO: 65055 - DNA, 20 bp, Artificial Sequence
  Description of Artificial Sequence: Synthetic oligonucleotide
  Target: LAMA2; (-) strand; PAM type: NRG; PAM sequence: TGG
accctcagctgcaggtctgt

SEQ ID NO: 65056 - DNA, 20 bp, Artificial Sequence
  Description of Artificial Sequence: Synthetic oligonucleotide
  Target: LAMA2; (-) strand; PAM type: NRG; PAM sequence: AGG
cagacaggaccctcagctgc

SEQ ID NO: 65057 - DNA, 20 bp, Artificial Sequence
  Description of Artificial Sequence: Synthetic oligonucleotide
  Target: LAMA2; (-) strand; PAM type: NRG; PAM sequence: CAG
acagacaggaccctcagctg

SEQ ID NO: 65058 - DNA, 20 bp, Artificial Sequence
  Description of Artificial Sequence: Synthetic oligonucleotide
  Target: LAMA2; (-) strand; PAM type: NRG; PAM sequence: CAG
cttctaacagacaggaccct

SEQ ID NO: 65059 - DNA, 20 bp, Artificial Sequence
  Description of Artificial Sequence: Synthetic oligonucleotide
  Target: LAMA2; (-) strand; PAM type: NRG; PAM sequence: AGG
tagttttccttctaacagac

SEQ ID NO: 65060 - DNA, 20 bp, Artificial Sequence
  Description of Artificial Sequence: Synthetic oligonucleotide
  Target: LAMA2; (-) strand; PAM type: NRG; PAM sequence: CAG
ttagttttccttctaacaga

SEQ ID NO: 65061 - DNA, 20 bp, Artificial Sequence
  Description of Artificial Sequence: Synthetic oligonucleotide
  Target: LAMA2; (-) strand; PAM type: NRG; PAM sequence: CAG
gttgttagttttccttctaa

SEQ ID NO: 65062 - DNA, 20 bp, Artificial Sequence
  Description of Artificial Sequence: Synthetic oligonucleotide
  Target: LAMA2; (-) strand; PAM type: NRG; PAM sequence: TAG
tagatgtcctttctggttgt

SEQ ID NO: 65063 - DNA, 20 bp, Artificial Sequence
  Description of Artificial Sequence: Synthetic oligonucleotide
  Target: LAMA2; (-) strand; PAM type: NRG; PAM sequence: TGG
ttcggtgtagatgtcctttc

SEQ ID NO: 65064 - DNA, 20 bp, Artificial Sequence
  Description of Artificial Sequence: Synthetic oligonucleotide
  Target: LAMA2; (-) strand; PAM type: NRG; PAM sequence: TAG
gtacagatgggttttcggtg

SEQ ID NO: 65065 - DNA, 20 bp, Artificial Sequence
  Description of Artificial Sequence: Synthetic oligonucleotide
  Target: LAMA2; (-) strand; PAM type: NRG; PAM sequence: CGG
gtgatgtacagatgggtttt

SEQ ID NO: 65066 - DNA, 20 bp, Artificial Sequence
  Description of Artificial Sequence: Synthetic oligonucleotide
  Target: LAMA2; (-) strand; PAM type: NRG; PAM sequence: GGG
gatgatggtgatgtacagat

SEQ ID NO: 65067 - DNA, 20 bp, Artificial Sequence
  Description of Artificial Sequence: Synthetic oligonucleotide
  Target: LAMA2; (-) strand; PAM type: NRG; PAM sequence: TGG
tgatgatggtgatgtacaga

SEQ ID NO: 65068 - DNA, 20 bp, Artificial Sequence
  Description of Artificial Sequence: Synthetic oligonucleotide
  Target: LAMA2; (-) strand; PAM type: NRG; PAM sequence: CAG
tctttgatgatggtgatgta

SEQ ID NO: 65069 - DNA, 20 bp, Artificial Sequence
  Description of Artificial Sequence: Synthetic oligonucleotide
  Target: LAMA2; (-) strand; PAM type: NRG; PAM sequence: TGG
ctacttttggtctttgatga

SEQ ID NO: 65070 - DNA, 20 bp, Artificial Sequence
  Description of Artificial Sequence: Synthetic oligonucleotide
  Target: LAMA2; (-) strand; PAM type: NRG; PAM sequence: TGG
tttgtggttttatctacttt

SEQ ID NO: 65071 - DNA, 20 bp, Artificial Sequence
  Description of Artificial Sequence: Synthetic oligonucleotide
  Target: LAMA2; (-) strand; PAM type: NRG; PAM sequence: TGG
ctgttttttccccatctttg

SEQ ID NO: 65072 - DNA, 20 bp, Artificial Sequence
  Description of Artificial Sequence: Synthetic oligonucleotide
  Target: LAMA2; (-) strand; PAM type: NRG; PAM sequence: CAG
gctctgcgttttagagtttc

SEQ ID NO: 65073 - DNA, 20 bp, Artificial Sequence
  Description of Artificial Sequence: Synthetic oligonucleotide
  Target: LAMA2; (-) strand; PAM type: NRG; PAM sequence: GAG
gagaggcgctctgcgtttta

SEQ ID NO: 65074 - DNA, 20 bp, Artificial Sequence
  Description of Artificial Sequence: Synthetic oligonucleotide
  Target: LAMA2; (-) strand; PAM type: NRG; PAM sequence: TAG
aggagaggcgctctgcgttt

SEQ ID NO: 65075 - DNA, 20 bp, Artificial Sequence
  Description of Artificial Sequence: Synthetic oligonucleotide
  Target: LAMA2; (-) strand; PAM type: NRG; PAM sequence: AGG
gcgttcctttggaggaggag

SEQ ID NO: 65076 - DNA, 20 bp, Artificial Sequence
  Description of Artificial Sequence: Synthetic oligonucleotide
  Target: LAMA2; (-) strand; PAM type: NRG; PAM sequence: GAG
tgcgttcctttggaggagga

SEQ ID NO: 65077 - DNA, 20 bp, Artificial Sequence
  Description of Artificial Sequence: Synthetic oligonucleotide
  Target: LAMA2; (-) strand; PAM type: NRG; PAM sequence: GAG
actgcgttcctttggaggag

SEQ ID NO: 65078 - DNA, 20 bp, Artificial Sequence
  Description of Artificial Sequence: Synthetic oligonucleotide
  Target: LAMA2; (-) strand; PAM type: NRG; PAM sequence: AGG
gaactgcgttcctttggagg

SEQ ID NO: 65079 - DNA, 20 bp, Artificial Sequence
  Description of Artificial Sequence: Synthetic oligonucleotide
  Target: LAMA2; (-) strand; PAM type: NRG; PAM sequence: GAG
ggaactgcgttcctttggag

SEQ ID NO: 65080 - DNA, 20 bp, Artificial Sequence
  Description of Artificial Sequence: Synthetic oligonucleotide
  Target: LAMA2; (-) strand; PAM type: NRG; PAM sequence: AGG
gaggaactgcgttcctttgg

SEQ ID NO: 65081 - DNA, 20 bp, Artificial Sequence
  Description of Artificial Sequence: Synthetic oligonucleotide
  Target: LAMA2; (-) strand; PAM type: NRG; PAM sequence: GAG
tgaggaactgcgttcctttg

SEQ ID NO: 65082 - DNA, 20 bp, Artificial Sequence
  Description of Artificial Sequence: Synthetic oligonucleotide
  Target: LAMA2; (-) strand; PAM type: NRG; PAM sequence: TGG
ggtgaggaactgcgttcctt

SEQ ID NO: 65083 - DNA, 20 bp, Artificial Sequence
  Description of Artificial Sequence: Synthetic oligonucleotide
  Target: LAMA2; (-) strand; PAM type: NRG; PAM sequence: AGG
gctttgttctgttgctggtg

SEQ ID NO: 65084 - DNA, 20 bp, Artificial Sequence
  Description of Artificial Sequence: Synthetic oligonucleotide
  Target: LAMA2; (-) strand; PAM type: NRG; PAM sequence: GAG
agctttgttctgttgctggt

SEQ ID NO: 65085 - DNA, 20 bp, Artificial Sequence
  Description of Artificial Sequence: Synthetic oligonucleotide
  Target: LAMA2; (-) strand; PAM type: NRG; PAM sequence: TGG
atccagctttgttctgttgc

SEQ ID NO: 65086 - DNA, 20 bp, Artificial Sequence
  Description of Artificial Sequence: Synthetic oligonucleotide
  Target: LAMA2; (-) strand; PAM type: NRG; PAM sequence: CAG
cgtcaaaatcattctccatc

SEQ ID NO: 65087 - DNA, 20 bp, Artificial Sequence
  Description of Artificial Sequence: Synthetic oligonucleotide
  Target: LAMA2; (-) strand; PAM type: NRG; PAM sequence: CAG
cgtctgaagccttcttctct

SEQ ID NO: 65088 - DNA, 20 bp, Artificial Sequence
  Description of Artificial Sequence: Synthetic oligonucleotide
  Target: LAMA2; (-) strand; PAM type: NRG; PAM sequence: AAG
cagagtaatttgatcgtctg

SEQ ID NO: 65089 - DNA, 20 bp, Artificial Sequence
  Description of Artificial Sequence: Synthetic oligonucleotide
  Target: LAMA2; (-) strand; PAM type: NRG; PAM sequence: GAG
gaatgtcctcccgtagctca

SEQ ID NO: 65090 - DNA, 20 bp, Artificial Sequence
  Description of Artificial Sequence: Synthetic oligonucleotide
  Target: LAMA2; (-) strand; PAM type: NRG; PAM sequence: CAG
ttgaatgtcctcccgtagct

SEQ ID NO: 65091 - DNA, 20 bp, Artificial Sequence
  Description of Artificial Sequence: Synthetic oligonucleotide
  Target: LAMA2; (-) strand; PAM type: NRG; PAM sequence: TAG
ttggtttgaatgtcctcccg

SEQ ID NO: 65092 - DNA, 20 bp, Artificial Sequence
  Description of Artificial Sequence: Synthetic oligonucleotide
  Target: LAMA2; (-) strand; PAM type: NRG; PAM sequence: TGG
gttttcaacttctttgcctt

SEQ ID NO: 65093 - DNA, 20 bp, Artificial Sequence
  Description of Artificial Sequence: Synthetic oligonucleotide
  Target: LAMA2; (-) strand; PAM type: NRG; PAM sequence: AAG
attcttctaaatttttttca

SEQ ID NO: 65094 - DNA, 20 bp, Artificial Sequence
  Description of Artificial Sequence: Synthetic oligonucleotide
  Target: LAMA2; (-) strand; PAM type: NRG; PAM sequence: TAG
cttctctgtattggttattc

SEQ ID NO: 65095 - DNA, 20 bp, Artificial Sequence
  Description of Artificial Sequence: Synthetic oligonucleotide
  Target: LAMA2; (-) strand; PAM type: NRG; PAM sequence: TGG
ctttaagcacttctctgtat

SEQ ID NO: 65096 - DNA, 20 bp, Artificial Sequence
  Description of Artificial Sequence: Synthetic oligonucleotide
  Target: LAMA2; (-) strand; PAM type: NRG; PAM sequence: AAG
tcagctccatcagctccttt

SEQ ID NO: 65097 - DNA, 20 bp, Artificial Sequence
  Description of Artificial Sequence: Synthetic oligonucleotide
  Target: LAMA2; (-) strand; PAM type: NRG; PAM sequence: CAG
gccttggttttcagctccat

SEQ ID NO: 65098 - DNA, 20 bp, Artificial Sequence
  Description of Artificial Sequence: Synthetic oligonucleotide
  Target: LAMA2; (-) strand; PAM type: NRG; PAM sequence: CAG
agttctcgagccttggtttt

SEQ ID NO: 65099 - DNA, 20 bp, Artificial Sequence
  Description of Artificial Sequence: Synthetic oligonucleotide
  Target: LAMA2; (-) strand; PAM type: NRG; PAM sequence: TGG
ttcacgtagttctcgagcct

SEQ ID NO: 65100 - DNA, 20 bp, Artificial Sequence
  Description of Artificial Sequence: Synthetic oligonucleotide
  Target: LAMA2; (-) strand; PAM type: NRG; PAM sequence: GAG
gcattcttcacgtagttctc

SEQ ID NO: 65101 - DNA, 20 bp, Artificial Sequence
  Description of Artificial Sequence: Synthetic oligonucleotide
  Target: LAMA2; (-) strand; PAM type: NRG; PAM sequence: TAG
aggcttctgcattcttcacg

SEQ ID NO: 65102 - DNA, 20 bp, Artificial Sequence
  Description of Artificial Sequence: Synthetic oligonucleotide
  Target: LAMA2; (-) strand; PAM type: NRG; PAM sequence: AGG
gttgatcgcatcggctcctg

SEQ ID NO: 65103 - DNA, 20 bp, Artificial Sequence
  Description of Artificial Sequence: Synthetic oligonucleotide
  Target: LAMA2; (-) strand; PAM type: NRG; PAM sequence: GAG
agttgatcgcatcggctcct

SEQ ID NO: 65104 - DNA, 20 bp, Artificial Sequence
  Description of Artificial Sequence: Synthetic oligonucleotide
  Target: LAMA2; (-) strand; PAM type: NRG; PAM sequence: CGG
tttcttccagttgatcgcat

SEQ ID NO: 65105 - DNA, 20 bp, Artificial Sequence
  Description of Artificial Sequence: Synthetic oligonucleotide
  Target: LAMA2; (-) strand; PAM type: NRG; PAM sequence: CAG
attgctgataccctttcttc

SEQ ID NO: 65106 - DNA, 20 bp, Artificial Sequence
  Description of Artificial Sequence: Synthetic oligonucleotide
  Target: LAMA2; (-) strand; PAM type: NRG; PAM sequence: AGG
catagtcccatatttcttgg

SEQ ID NO: 65107 - DNA, 20 bp, Artificial Sequence
  Description of Artificial Sequence: Synthetic oligonucleotide
  Target: LAMA2; (-) strand; PAM type: NRG; PAM sequence: GAG
acatagtcccatatttcttg

SEQ ID NO: 65108 - DNA, 20 bp, Artificial Sequence
  Description of Artificial Sequence: Synthetic oligonucleotide
  Target: LAMA2; (-) strand; PAM type: NRG; PAM sequence: TGG
tcacatagtcccatatttct

SEQ ID NO: 65109 - DNA, 20 bp, Artificial Sequence
  Description of Artificial Sequence: Synthetic oligonucleotide
  Target: LAMA2; (-) strand; PAM type: NRG; PAM sequence: TAG
gtagatttggtcttttcaca

SEQ ID NO: 65110 - DNA, 20 bp, Artificial Sequence
  Description of Artificial Sequence: Synthetic oligonucleotide
  Target: LAMA2; (-) strand; PAM type: NRG; PAM sequence: TGG
acaccaatcagacgtagatt

SEQ ID NO: 65111 - DNA, 20 bp, Artificial Sequence
  Description of Artificial Sequence: Synthetic oligonucleotide
  Target: LAMA2; (-) strand; PAM type: NRG; PAM sequence: TAG
tcaggtacaccaatcagacg

SEQ ID NO: 65112 - DNA, 20 bp, Artificial Sequence
  Description of Artificial Sequence: Synthetic oligonucleotide
  Target: LAMA2; (-) strand; PAM type: NRG; PAM sequence: CAG
tcactttcaggtacaccaat

SEQ ID NO: 65113 - DNA, 20 bp, Artificial Sequence
  Description of Artificial Sequence: Synthetic oligonucleotide
  Target: LAMA2; (-) strand; PAM type: NRG; PAM sequence: AGG
tcattctccacatcactttc

SEQ ID NO: 65114 - DNA, 20 bp, Artificial Sequence
  Description of Artificial Sequence: Synthetic oligonucleotide
  Target: LAMA2; (-) strand; PAM type: NRG; PAM sequence: CAG
ttcattctccacatcacttt

SEQ ID NO: 65115 - DNA, 20 bp, Artificial Sequence
  Description of Artificial Sequence: Synthetic oligonucleotide
  Target: LAMA2; (-) strand; PAM type: NRG; PAM sequence: TGG
ctgcagagtgttttccaact

SEQ ID NO: 65116 - DNA, 20 bp, Artificial Sequence
  Description of Artificial Sequence: Synthetic oligonucleotide
  Target: LAMA2; (-) strand; PAM type: NRG; PAM sequence: GAG
ctcctggataatatcctgca

SEQ ID NO: 65117 - DNA, 20 bp, Artificial Sequence
  Description of Artificial Sequence: Synthetic oligonucleotide
  Target: LAMA2; (-) strand; PAM type: NRG; PAM sequence: CAG
ttctcctggataatatcctg

SEQ ID NO: 65118 - DNA, 20 bp, Artificial Sequence
  Description of Artificial Sequence: Synthetic oligonucleotide
  Target: LAMA2; (-) strand; PAM type: NRG; PAM sequence: TGG
ctagattggggaagttctcc

SEQ ID NO: 65119 - DNA, 20 bp, Artificial Sequence
  Description of Artificial Sequence: Synthetic oligonucleotide
  Target: LAMA2; (-) strand; PAM type: NRG; PAM sequence: AAG
cctgccttgctagattgggg

SEQ ID NO: 65120 - DNA, 20 bp, Artificial Sequence
  Description of Artificial Sequence: Synthetic oligonucleotide
  Target: LAMA2; (-) strand; PAM type: NRG; PAM sequence: GGG
tggcctgccttgctagattg

SEQ ID NO: 65121 - DNA, 20 bp, Artificial Sequence
  Description of Artificial Sequence: Synthetic oligonucleotide
  Target: LAMA2; (-) strand; PAM type: NRG; PAM sequence: GGG
ttggcctgccttgctagatt

SEQ ID NO: 65122 - DNA, 20 bp, Artificial Sequence
  Description of Artificial Sequence: Synthetic oligonucleotide
  Target: LAMA2; (-) strand; PAM type: NRG; PAM sequence: TGG
gttggcctgccttgctagat

SEQ ID NO: 65123 - DNA, 20 bp, Artificial Sequence
  Description of Artificial Sequence: Synthetic oligonucleotide
  Target: LAMA2; (-) strand; PAM type: NRG; PAM sequence: TAG
tgaacgttggcctgccttgc

SEQ ID NO: 65124 - DNA, 20 bp, Artificial Sequence
  Description of Artificial Sequence: Synthetic oligonucleotide
  Target: LAMA2; (-) strand; PAM type: NRG; PAM sequence: TGG
tatttcctgaatctgaacgt

SEQ ID NO: 65125 - DNA, 20 bp, Artificial Sequence
  Description of Artificial Sequence: Synthetic oligonucleotide
  Target: LAMA2; (-) strand; PAM type: NRG; PAM sequence: TGG
cttctcgaggagtatctttg

SEQ ID NO: 65126 - DNA, 20 bp, Artificial Sequence
  Description of Artificial Sequence: Synthetic oligonucleotide
  Target: LAMA2; (-) strand; PAM type: NRG; PAM sequence: GAG
ttggagttgctcttctcgag

SEQ ID NO: 65127 - DNA, 20 bp, Artificial Sequence
  Description of Artificial Sequence: Synthetic oligonucleotide
  Target: LAMA2; (-) strand; PAM type: NRG; PAM sequence: AGG
tcttggagttgctcttctcg

SEQ ID NO: 65128 - DNA, 20 bp, Artificial Sequence
  Description of Artificial Sequence: Synthetic oligonucleotide
  Target: LAMA2; (-) strand; PAM type: NRG; PAM sequence: GAG
gtcttggagttgctcttctc

SEQ ID NO: 65129 - DNA, 20 bp, Artificial Sequence
  Description of Artificial Sequence: Synthetic oligonucleotide
  Target: LAMA2; (-) strand; PAM type: NRG; PAM sequence: GAG
tctgacaattatgtgtcttg

SEQ ID NO: 65130 - DNA, 20 bp, Artificial Sequence
  Description of Artificial Sequence: Synthetic oligonucleotide
  Target: LAMA2; (-) strand; PAM type: NRG; PAM sequence: TGG
aatctgacaattatgtgtct

SEQ ID NO: 65131 - DNA, 20 bp, Artificial Sequence
  Description of Artificial Sequence: Synthetic oligonucleotide
  Target: LAMA2; (-) strand; PAM type: NRG; PAM sequence: TGG
tttttccttcatttcaactt

SEQ ID NO: 65132 - DNA, 20 bp, Artificial Sequence
  Description of Artificial Sequence: Synthetic oligonucleotide
  Target: LAMA2; (-) strand; PAM type: NRG; PAM sequence: TGG
ggtaacccgacctttctctc

SEQ ID NO: 65133 - DNA, 20 bp, Artificial Sequence
  Description of Artificial Sequence: Synthetic oligonucleotide
  Target: LAMA2; (-) strand; PAM type: NRG; PAM sequence: GGG
tctgatgggctttcctttga

SEQ ID NO: 65134 - DNA, 20 bp, Artificial Sequence
  Description of Artificial Sequence: Synthetic oligonucleotide
  Target: LAMA2; (-) strand; PAM type: NRG; PAM sequence: AGG
gtctgatgggctttcctttg

SEQ ID NO: 65135 - DNA, 20 bp, Artificial Sequence
  Description of Artificial Sequence: Synthetic oligonucleotide
  Target: LAMA2; (-) strand; PAM type: NRG; PAM sequence: GAG
agtctgatgggctttccttt

SEQ ID NO: 65136 - DNA, 20 bp, Artificial Sequence
  Description of Artificial Sequence: Synthetic oligonucleotide
  Target: LAMA2; (-) strand; PAM type: NRG; PAM sequence: GGG
agatccgctgttagtctgat

SEQ ID NO: 65137 - DNA, 20 bp, Artificial Sequence
  Description of Artificial Sequence: Synthetic oligonucleotide
  Target: LAMA2; (-) strand; PAM type: NRG; PAM sequence: TGG
gagatccgctgttagtctga

SEQ ID NO: 65138 - DNA, 20 bp, Artificial Sequence
  Description of Artificial Sequence: Synthetic oligonucleotide
  Target: LAMA2; (-) strand; PAM type: NRG; PAM sequence: TAG
tctgccgagagatccgctgt

SEQ ID NO: 65139 - DNA, 20 bp, Artificial Sequence
  Description of Artificial Sequence: Synthetic oligonucleotide
  Target: LAMA2; (-) strand; PAM type: NRG; PAM sequence: GAG
gcttgtagggtttctgccga

SEQ ID NO: 65140 - DNA, 20 bp, Artificial Sequence
  Description of Artificial Sequence: Synthetic oligonucleotide
  Target: LAMA2; (-) strand; PAM type: NRG; PAM sequence: GAG
tggcttgtagggtttctgcc

SEQ ID NO: 65141 - DNA, 20 bp, Artificial Sequence
  Description of Artificial Sequence: Synthetic oligonucleotide
  Target: LAMA2; (-) strand; PAM type: NRG; PAM sequence: GGG
ccactctcttctggcttgta

SEQ ID NO: 65142 - DNA, 20 bp, Artificial Sequence
  Description of Artificial Sequence: Synthetic oligonucleotide
  Target: LAMA2; (-) strand; PAM type: NRG; PAM sequence: AGG
cccactctcttctggcttgt

SEQ ID NO: 65143 - DNA, 20 bp, Artificial Sequence
  Description of Artificial Sequence: Synthetic oligonucleotide
  Target: LAMA2; (-) strand; PAM type: NRG; PAM sequence: TAG
ccccactctcttctggcttg

SEQ ID NO: 65144 - DNA, 20 bp, Artificial Sequence
  Description of Artificial Sequence: Synthetic oligonucleotide
  Target: LAMA2; (-) strand; PAM type: NRG; PAM sequence: TGG
tattggcccccactctcttc

SEQ ID NO: 65145 - DNA, 20 bp, Artificial Sequence
  Description of Artificial Sequence: Synthetic oligonucleotide
  Target: LAMA2; (-) strand; PAM type: NRG; PAM sequence: TGG
tctttaagaatgttgaatat

SEQ ID NO: 65146 - DNA, 20 bp, Artificial Sequence
  Description of Artificial Sequence: Synthetic oligonucleotide
  Target: LAMA2; (-) strand; PAM type: NRG; PAM sequence: AAG
ggttgaaaattcttttcttt

SEQ ID NO: 65147 - DNA, 20 bp, Artificial Sequence
  Description of Artificial Sequence: Synthetic oligonucleotide
  Target: LAMA2; (-) strand; PAM type: NRG; PAM sequence: GGG
ttggctggatatgaaattct

SEQ ID NO: 65148 - DNA, 20 bp, Artificial Sequence
  Description of Artificial Sequence: Synthetic oligonucleotide
  Target: LAMA2; (-) strand; PAM type: NRG; PAM sequence: TGG
tttggctggatatgaaattc

SEQ ID NO: 65149 - DNA, 20 bp, Artificial Sequence
  Description of Artificial Sequence: Synthetic oligonucleotide
  Target: LAMA2; (-) strand; PAM type: NRG; PAM sequence: TGG
cttatgaagcttagtttggc

SEQ ID NO: 65150 - DNA, 20 bp, Artificial Sequence
  Description of Artificial Sequence: Synthetic oligonucleotide
  Target: LAMA2; (-) strand; PAM type: NRG; PAM sequence: TGG
ttcacttatgaagcttagtt

SEQ ID NO: 65151 - DNA, 20 bp, Artificial Sequence
  Description of Artificial Sequence: Synthetic oligonucleotide
  Target: LAMA2; (-) strand; PAM type: NRG; PAM sequence: TAG
tctccttcacttatgaagct

SEQ ID NO: 65152 - DNA, 20 bp, Artificial Sequence
  Description of Artificial Sequence: Synthetic oligonucleotide
  Target: LAMA2; (-) strand; PAM type: NRG; PAM sequence: AAG
ttatttctccttcacttatg

SEQ ID NO: 65153 - DNA, 20 bp, Artificial Sequence
  Description of Artificial Sequence: Synthetic oligonucleotide
  Target: LAMA2; (-) strand; PAM type: NRG; PAM sequence: AAG
tcaacatttgcttgtctata

SEQ ID NO: 65154 - DNA, 20 bp, Artificial Sequence
  Description of Artificial Sequence: Synthetic oligonucleotide
  Target: LAMA2; (-) strand; PAM type: NRG; PAM sequence: TGG
ctcttttagggcaggcctgg

SEQ ID NO: 65155 - DNA, 20 bp, Artificial Sequence
  Description of Artificial Sequence: Synthetic oligonucleotide
  Target: LAMA2; (-) strand; PAM type: NRG; PAM sequence: TGG
gagctcttttagggcaggcc

SEQ ID NO: 65156 - DNA, 20 bp, Artificial Sequence
  Description of Artificial Sequence: Synthetic oligonucleotide
  Target: LAMA2; (-) strand; PAM type: NRG; PAM sequence: AGG
ttcaggagctcttttagggc

SEQ ID NO: 65157 - DNA, 20 bp, Artificial Sequence
  Description of Artificial Sequence: Synthetic oligonucleotide
  Target: LAMA2; (-) strand; PAM type: NRG; PAM sequence: CAG
cttcaggagctcttttaggg

SEQ ID NO: 65158 - DNA, 20 bp, Artificial Sequence
  Description of Artificial Sequence: Synthetic oligonucleotide
  Target: LAMA2; (-) strand; PAM type: NRG; PAM sequence: GGG
ttccttcaggagctctttta

SEQ ID NO: 65159 - DNA, 20 bp, Artificial Sequence
  Description of Artificial Sequence: Synthetic oligonucleotide
  Target: LAMA2; (-) strand; PAM type: NRG; PAM sequence: AGG
cttccttcaggagctctttt

SEQ ID NO: 65160 - DNA, 20 bp, Artificial Sequence
  Description of Artificial Sequence: Synthetic oligonucleotide
  Target: LAMA2; (-) strand; PAM type: NRG; PAM sequence: TAG
gcttccttcaggagctcttt

SEQ ID NO: 65161 - DNA, 20 bp, Artificial Sequence
  Description of Artificial Sequence: Synthetic oligonucleotide
  Target: LAMA2; (-) strand; PAM type: NRG; PAM sequence: GAG
atgtttagcgcttccttcag

SEQ ID NO: 65162 - DNA, 20 bp, Artificial Sequence
  Description of Artificial Sequence: Synthetic oligonucleotide
  Target: LAMA2; (-) strand; PAM type: NRG; PAM sequence: AGG
ccatgtttagcgcttccttc

SEQ ID NO: 65163 - DNA, 20 bp, Artificial Sequence
  Description of Artificial Sequence: Synthetic oligonucleotide
  Target: LAMA2; (-) strand; PAM type: NRG; PAM sequence: CAG
tccatgtttagcgcttcctt

SEQ ID NO: 65164 - DNA, 20 bp, Artificial Sequence
  Description of Artificial Sequence: Synthetic oligonucleotide
  Target: LAMA2; (-) strand; PAM type: NRG; PAM sequence: TAG
cggttgttcctttccatgtt

SEQ ID NO: 65165 - DNA, 20 bp, Artificial Sequence
  Description of Artificial Sequence: Synthetic oligonucleotide
  Target: LAMA2; (-) strand; PAM type: NRG; PAM sequence: CGG
gattttgcagcggctggtac

SEQ ID NO: 65166 - DNA, 20 bp, Artificial Sequence
  Description of Artificial Sequence: Synthetic oligonucleotide
  Target: LAMA2; (-) strand; PAM type: NRG; PAM sequence: TGG
tggcatgattttgcagcggc

SEQ ID NO: 65167 - DNA, 20 bp, Artificial Sequence
  Description of Artificial Sequence: Synthetic oligonucleotide
  Target: LAMA2; (-) strand; PAM type: NRG; PAM sequence: CGG
attttggcatgattttgcag

SEQ ID NO: 65168 - DNA, 20 bp, Artificial Sequence
  Description of Artificial Sequence: Synthetic oligonucleotide
  Target: LAMA2; (-) strand; PAM type: NRG; PAM sequence: CAG
tacattttggcatgattttg

SEQ ID NO: 65169 - DNA, 20 bp, Artificial Sequence
  Description of Artificial Sequence: Synthetic oligonucleotide
  Target: LAMA2; (-) strand; PAM type: NRG; PAM sequence: TGG
tctcgatggtctttacattt

SEQ ID NO: 65170 - DNA, 20 bp, Artificial Sequence
  Description of Artificial Sequence: Synthetic oligonucleotide
  Target: LAMA2; (-) strand; PAM type: NRG; PAM sequence: TGG
cagtttcttcctagtctcga

SEQ ID NO: 65171 - DNA, 20 bp, Artificial Sequence
  Description of Artificial Sequence: Synthetic oligonucleotide
  Target: LAMA2; (-) strand; PAM type: NRG; PAM sequence: TAG
tagttgatgcagtttcttcc

SEQ ID NO: 65172 - DNA, 20 bp, Artificial Sequence
  Description of Artificial Sequence: Synthetic oligonucleotide
  Target: LAMA2; (-) strand; PAM type: NRG; PAM sequence: CAG
attttgctcattagttgatg

SEQ ID NO: 65173 - DNA, 20 bp, Artificial Sequence
  Description of Artificial Sequence: Synthetic oligonucleotide
  Target: LAMA2; (-) strand; PAM type: NRG; PAM sequence: TAG
tagctggtgattttgctcat

SEQ ID NO: 65174 - DNA, 20 bp, Artificial Sequence
  Description of Artificial Sequence: Synthetic oligonucleotide
  Target: LAMA2; (-) strand; PAM type: NRG; PAM sequence: TGG
cctgtcatgatgatgttagc

SEQ ID NO: 65175 - DNA, 20 bp, Artificial Sequence
  Description of Artificial Sequence: Synthetic oligonucleotide
  Target: LAMA2; (-) strand; PAM type: NRG; PAM sequence: TAG
tgatcctgtcatgatgatgt

SEQ ID NO: 65176 - DNA, 20 bp, Artificial Sequence
  Description of Artificial Sequence: Synthetic oligonucleotide
  Target: LAMA2; (-) strand; PAM type: NRG; PAM sequence: AAG
atttagtccatttatattta

SEQ ID NO: 65177 - DNA, 20 bp, Artificial Sequence
  Description of Artificial Sequence: Synthetic oligonucleotide
  Target: LAMA2; (-) strand; PAM type: NRG; PAM sequence: TAG
tgtcttttaattgcagaatt

SEQ ID NO: 65178 - DNA, 20 bp, Artificial Sequence
  Description of Artificial Sequence: Synthetic oligonucleotide
  Target: LAMA2; (-) strand; PAM type: NRG; PAM sequence: CAG
cagtttgtgtcttttaattg

SEQ ID NO: 65179 - DNA, 20 bp, Artificial Sequence
  Description of Artificial Sequence: Synthetic oligonucleotide
  Target: LAMA2; (-) strand; PAM type: NRG; PAM sequence: CAG
tgactctttatccaacttgc

SEQ ID NO: 65180 - DNA, 20 bp, Artificial Sequence
  Description of Artificial Sequence: Synthetic oligonucleotide
  Target: LAMA2; (-) strand; PAM type: NRG; PAM sequence: GGG
cctgaatacagcacactgat

SEQ ID NO: 65181 - DNA, 20 bp, Artificial Sequence
  Description of Artificial Sequence: Synthetic oligonucleotide
  Target: LAMA2; (-) strand; PAM type: NRG; PAM sequence: TGG
tcctgaatacagcacactga

SEQ ID NO: 65182 - DNA, 20 bp, Artificial Sequence
  Description of Artificial Sequence: Synthetic oligonucleotide
  Target: LAMA2; (-) strand; PAM type: NRG; PAM sequence: CAG
tgagatgggtttcctgaata

SEQ ID NO: 65183 - DNA, 20 bp, Artificial Sequence
  Description of Artificial Sequence: Synthetic oligonucleotide
  Target: LAMA2; (-) strand; PAM type: NRG; PAM sequence: GGG
tgtgtctctgcacgtgagat

SEQ ID NO: 65184 - DNA, 20 bp, Artificial Sequence
  Description of Artificial Sequence: Synthetic oligonucleotide
  Target: LAMA2; (-) strand; PAM type: NRG; PAM sequence: TGG
gtgtgtctctgcacgtgaga

SEQ ID NO: 65185 - DNA, 20 bp, Artificial Sequence
  Description of Artificial Sequence: Synthetic oligonucleotide
  Target: LAMA2; (-) strand; PAM type: NRG; PAM sequence: GAG
ctatgtgtgtctctgcacgt

SEQ ID NO: 65186 - DNA, 20 bp, Artificial Sequence
  Description of Artificial Sequence: Synthetic oligonucleotide
  Target: LAMA2; (-) strand; PAM type: NRG; PAM sequence: GAG
ttcctccatccttttatttt

SEQ ID NO: 65187 - DNA, 20 bp, Artificial Sequence
  Description of Artificial Sequence: Synthetic oligonucleotide
  Target: LAMA2; (-) strand; PAM type: NRG; PAM sequence: TAG
tttgttttccattggcttgg

SEQ ID NO: 65188 - DNA, 20 bp, Artificial Sequence
  Description of Artificial Sequence: Synthetic oligonucleotide
  Target: LAMA2; (-) strand; PAM type: NRG; PAM sequence: TGG
ttttttgttttccattggct

SEQ ID NO: 65189 - DNA, 20 bp, Artificial Sequence
  Description of Artificial Sequence: Synthetic oligonucleotide
  Target: LAMA2; (-) strand; PAM type: NRG; PAM sequence: TGG
tgcctttttttgttttccat

SEQ ID NO: 65190 - DNA, 20 bp, Artificial Sequence
  Description of Artificial Sequence: Synthetic oligonucleotide
  Target: LAMA2; (-) strand; PAM type: NRG; PAM sequence: AGG
agtctgttttgtcagagact

SEQ ID NO: 65191 - DNA, 20 bp, Artificial Sequence
  Description of Artificial Sequence: Synthetic oligonucleotide
  Target: LAMA2; (-) strand; PAM type: NRG; PAM sequence: TAG
aagtctgttttgtcagagac

SEQ ID NO: 65192 - DNA, 20 bp, Artificial Sequence
  Description of Artificial Sequence: Synthetic oligonucleotide
  Target: LAMA2; (-) strand; PAM type: NRG; PAM sequence: GAG
gtttaaagtctgttttgtca

SEQ ID NO: 65193 - DNA, 20 bp, Artificial Sequence
  Description of Artificial Sequence: Synthetic oligonucleotide
  Target: LAMA2; (-) strand; PAM type: NRG; PAM sequence: CAG
tggtttaaagtctgttttgt

SEQ ID NO: 65194 - DNA, 20 bp, Artificial Sequence
  Description of Artificial Sequence: Synthetic oligonucleotide
  Target: LAMA2; (-) strand; PAM type: NRG; PAM sequence: AAG
ttttgatctttgttggttta

SEQ ID NO: 65195 - DNA, 20 bp, Artificial Sequence
  Description of Artificial Sequence: Synthetic oligonucleotide
  Target: LAMA2; (-) strand; PAM type: NRG; PAM sequence: TGG
ttgtctcttttgatctttgt

SEQ ID NO: 65196 - DNA, 20 bp, Artificial Sequence
  Description of Artificial Sequence: Synthetic oligonucleotide
  Target: LAMA2; (-) strand; PAM type: NRG; PAM sequence: TGG
atccctttaccattatgtaa

SEQ ID NO: 65197 - DNA, 20 bp, Artificial Sequence
  Description of Artificial Sequence: Synthetic oligonucleotide
  Target: LAMA2; (-) strand; PAM type: NRG; PAM sequence: TAG
gcataaatatttaggatagt

SEQ ID NO: 65198 - DNA, 20 bp, Artificial Sequence
  Description of Artificial Sequence: Synthetic oligonucleotide
  Target: LAMA2; (-) strand; PAM type: NRG; PAM sequence: TAG
gggtgcataaatatttagga

SEQ ID NO: 65199 - DNA, 20 bp, Artificial Sequence
  Description of Artificial Sequence: Synthetic oligonucleotide
  Target: LAMA2; (-) strand; PAM type: NRG; PAM sequence: AGG
tattgggtgcataaatattt

SEQ ID NO: 65200 - DNA, 20 bp, Artificial Sequence
  Description of Artificial Sequence: Synthetic oligonucleotide
  Target: LAMA2; (-) strand; PAM type: NRG; PAM sequence: TAG
gtattgggtgcataaatatt

SEQ ID NO: 65201 - DNA, 20 bp, Artificial Sequence
  Description of Artificial Sequence: Synthetic oligonucleotide
  Target: LAMA2; (-) strand; PAM type: NRG; PAM sequence: GGG
aatctgggtgctcctgtatt

SEQ ID NO: 65202 - DNA, 20 bp, Artificial Sequence
  Description of Artificial Sequence: Synthetic oligonucleotide
  Target: LAMA2; (-) strand; PAM type: NRG; PAM sequence: TGG
gaatctgggtgctcctgtat

SEQ ID NO: 65203 - DNA, 20 bp, Artificial Sequence
  Description of Artificial Sequence: Synthetic oligonucleotide
  Target: LAMA2; (-) strand; PAM type: NRG; PAM sequence: GGG
aggacttgctttatgaatct

SEQ ID NO: 65204 - DNA, 20 bp, Artificial Sequence
  Description of Artificial Sequence: Synthetic oligonucleotide
  Target: LAMA2; (-) strand; PAM type: NRG; PAM sequence: TGG
gaggacttgctttatgaatc

SEQ ID NO: 65205 - DNA, 20 bp, Artificial Sequence
  Description of Artificial Sequence: Synthetic oligonucleotide
  Target: LAMA2; (-) strand; PAM type: NRG; PAM sequence: AGG
agtctctttgtaggtcactg

SEQ ID NO: 65206 - DNA, 20 bp, Artificial Sequence
  Description of Artificial Sequence: Synthetic oligonucleotide
  Target: LAMA2; (-) strand; PAM type: NRG; PAM sequence: GAG
aagtctctttgtaggtcact

SEQ ID NO: 65207 - DNA, 20 bp, Artificial Sequence
  Description of Artificial Sequence: Synthetic oligonucleotide
  Target: LAMA2; (-) strand; PAM type: NRG; PAM sequence: AGG
gggagtctaagtctctttgt

SEQ ID NO: 65208 - DNA, 20 bp, Artificial Sequence
  Description of Artificial Sequence: Synthetic oligonucleotide
  Target: LAMA2; (-) strand; PAM type: NRG; PAM sequence: TAG
tgggagtctaagtctctttg

SEQ ID NO: 65209 - DNA, 20 bp, Artificial Sequence
  Description of Artificial Sequence: Synthetic oligonucleotide
  Target: LAMA2; (-) strand; PAM type: NRG; PAM sequence: AAG
ttattaatgtgtgggagtct

SEQ ID NO: 65210 - DNA, 20 bp, Artificial Sequence
  Description of Artificial Sequence: Synthetic oligonucleotide
  Target: LAMA2; (-) strand; PAM type: NRG; PAM sequence: GAG
ctcccattattaatgtgtgg

SEQ ID NO: 65211 - DNA, 20 bp, Artificial Sequence
  Description of Artificial Sequence: Synthetic oligonucleotide
  Target: LAMA2; (-) strand; PAM type: NRG; PAM sequence: GGG
gtctcccattattaatgtgt

SEQ ID NO: 65212 - DNA, 20 bp, Artificial Sequence
  Description of Artificial Sequence: Synthetic oligonucleotide
  Target: LAMA2; (-) strand; PAM type: NRG; PAM sequence: TGG
agtctcccattattaatgtg

SEQ ID NO: 65213 - DNA, 20 bp, Artificial Sequence
  Description of Artificial Sequence: Synthetic oligonucleotide
  Target: LAMA2; (-) strand; PAM type: NRG; PAM sequence: AAG
atgttgacagtggggtgtta

SEQ ID NO: 65214 - DNA, 20 bp, Artificial Sequence
  Description of Artificial Sequence: Synthetic oligonucleotide
  Target: LAMA2; (-) strand; PAM type: NRG; PAM sequence: GGG
tctgtctaatgttgacagtg

SEQ ID NO: 65215 - DNA, 20 bp, Artificial Sequence
  Description of Artificial Sequence: Synthetic oligonucleotide
  Target: LAMA2; (-) strand; PAM type: NRG; PAM sequence: GGG
atctgtctaatgttgacagt

SEQ ID NO: 65216 - DNA, 20 bp, Artificial Sequence
  Description of Artificial Sequence: Synthetic oligonucleotide
  Target: LAMA2; (-) strand; PAM type: NRG; PAM sequence: TGG
gatctgtctaatgttgacag

SEQ ID NO: 65217 - DNA, 20 bp, Artificial Sequence
  Description of Artificial Sequence: Synthetic oligonucleotide
  Target: LAMA2; (-) strand; PAM type: NRG; PAM sequence: CAG
gttgatctgtctaatgttga

SEQ ID NO: 65218 - DNA, 20 bp, Artificial Sequence
  Description of Artificial Sequence: Synthetic oligonucleotide
  Target: LAMA2; (-) strand; PAM type: NRG; PAM sequence: GGG
cagagctgagttcaattcct

SEQ ID NO: 65219 - DNA, 20 bp, Artificial Sequence
  Description of Artificial Sequence: Synthetic oligonucleotide
  Target: LAMA2; (-) strand; PAM type: NRG; PAM sequence: TGG
gcagagctgagttcaattcc

SEQ ID NO: 65220 - DNA, 20 bp, Artificial Sequence
  Description of Artificial Sequence: Synthetic oligonucleotide
  Target: LAMA2; (-) strand; PAM type: NRG; PAM sequence: GAG
ggtctgcttggtgcagagct

SEQ ID NO: 65221 - DNA, 20 bp, Artificial Sequence
  Description of Artificial Sequence: Synthetic oligonucleotide
  Target: LAMA2; (-) strand; PAM type: NRG; PAM sequence: GAG
tattaggtctgcttggtgca

SEQ ID NO: 65222 - DNA, 20 bp, Artificial Sequence
  Description of Artificial Sequence: Synthetic oligonucleotide
  Target: LAMA2; (-) strand; PAM type: NRG; PAM sequence: CAG
tctattaggtctgcttggtg

SEQ ID NO: 65223 - DNA, 20 bp, Artificial Sequence
  Description of Artificial Sequence: Synthetic oligonucleotide
  Target: LAMA2; (-) strand; PAM type: NRG; PAM sequence: TGG
agatgtctattaggtctgct

SEQ ID NO: 65224 - DNA, 20 bp, Artificial Sequence
  Description of Artificial Sequence: Synthetic oligonucleotide
  Target: LAMA2; (-) strand; PAM type: NRG; PAM sequence: AGG
gagttctgtagatgtctatt

SEQ ID NO: 65225 - DNA, 20 bp, Artificial Sequence
  Description of Artificial Sequence: Synthetic oligonucleotide
  Target: LAMA2; (-) strand; PAM type: NRG; PAM sequence: TAG
agagttctgtagatgtctat

SEQ ID NO: 65226 - DNA, 20 bp, Artificial Sequence
  Description of Artificial Sequence: Synthetic oligonucleotide
  Target: LAMA2; (-) strand; PAM type: NRG; PAM sequence: TAG
atttggggtggagagttctg

SEQ ID NO: 65227 - DNA, 20 bp, Artificial Sequence
  Description of Artificial Sequence: Synthetic oligonucleotide
  Target: LAMA2; (-) strand; PAM type: NRG; PAM sequence: GAG
ttctgttgatttggggtgga

SEQ ID NO: 65228 - DNA, 20 bp, Artificial Sequence
  Description of Artificial Sequence: Synthetic oligonucleotide
  Target: LAMA2; (-) strand; PAM type: NRG; PAM sequence: GAG
tattctgttgatttggggtg

SEQ ID NO: 65229 - DNA, 20 bp, Artificial Sequence
  Description of Artificial Sequence: Synthetic oligonucleotide
  Target: LAMA2; (-) strand; PAM type: NRG; PAM sequence: TGG
tatattctgttgatttgggg

SEQ ID NO: 65230 - DNA, 20 bp, Artificial Sequence
  Description of Artificial Sequence: Synthetic oligonucleotide
  Target: LAMA2; (-) strand; PAM type: NRG; PAM sequence: GGG
atgtatattctgttgatttg

SEQ ID NO: 65231 - DNA, 20 bp, Artificial Sequence
  Description of Artificial Sequence: Synthetic oligonucleotide
  Target: LAMA2; (-) strand; PAM type: NRG; PAM sequence: GGG
aatgtatattctgttgattt

SEQ ID NO: 65232 - DNA, 20 bp, Artificial Sequence
  Description of Artificial Sequence: Synthetic oligonucleotide
  Target: LAMA2; (-) strand; PAM type: NRG; PAM sequence: TGG
aaatgtatattctgttgatt

SEQ ID NO: 65233 - DNA, 20 bp, Artificial Sequence
  Description of Artificial Sequence: Synthetic oligonucleotide
  Target: LAMA2; (-) strand; PAM type: NRG; PAM sequence: TGG
attttggaataggtgtggtg

SEQ ID NO: 65234 - DNA, 20 bp, Artificial Sequence
  Description of Artificial Sequence: Synthetic oligonucleotide
  Target: LAMA2; (-) strand; PAM type: NRG; PAM sequence: TGG
ggtcaattttggaataggtg

SEQ ID NO: 65235 - DNA, 20 bp, Artificial Sequence
  Description of Artificial Sequence: Synthetic oligonucleotide
  Target: LAMA2; (-) strand; PAM type: NRG; PAM sequence: AGG
tatgtggtcaattttggaat

SEQ ID NO: 65236 - DNA, 20 bp, Artificial Sequence
  Description of Artificial Sequence: Synthetic oligonucleotide
  Target: LAMA2; (-) strand; PAM type: NRG; PAM sequence: TAG
ctatgtggtcaattttggaa

SEQ ID NO: 65237 - DNA, 20 bp, Artificial Sequence
  Description of Artificial Sequence: Synthetic oligonucleotide
  Target: LAMA2; (-) strand; PAM type: NRG; PAM sequence: TGG
tccaactatgtggtcaattt

SEQ ID NO: 65238 - DNA, 20 bp, Artificial Sequence
  Description of Artificial Sequence: Synthetic oligonucleotide
  Target: LAMA2; (-) strand; PAM type: NRG; PAM sequence: TGG
gagctttacttccaactatg

SEQ ID NO: 65239 - DNA, 20 bp, Artificial Sequence
  Description of Artificial Sequence: Synthetic oligonucleotide
  Target: LAMA2; (-) strand; PAM type: NRG; PAM sequence: GAG
tcttttacatttgctgagga

SEQ ID NO: 65240 - DNA, 20 bp, Artificial Sequence
  Description of Artificial Sequence: Synthetic oligonucleotide
  Target: LAMA2; (-) strand; PAM type: NRG; PAM sequence: GAG
gttcttttacatttgctgag

SEQ ID NO: 65241 - DNA, 20 bp, Artificial Sequence
  Description of Artificial Sequence: Synthetic oligonucleotide
  Target: LAMA2; (-) strand; PAM type: NRG; PAM sequence: AGG
ctgttcttttacatttgctg

SEQ ID NO: 65242 - DNA, 20 bp, Artificial Sequence
  Description of Artificial Sequence: Synthetic oligonucleotide
  Target: LAMA2; (-) strand; PAM type: NRG; PAM sequence: GAG
tctgttcttttacatttgct

SEQ ID NO: 65243 - DNA, 20 bp, Artificial Sequence
  Description of Artificial Sequence: Synthetic oligonucleotide
  Target: LAMA2; (-) strand; PAM type: NRG; PAM sequence: TAG
ttgcactgtggtctgagaga

SEQ ID NO: 65244 - DNA, 20 bp, Artificial Sequence
  Description of Artificial Sequence: Synthetic oligonucleotide
  Target: LAMA2; (-) strand; PAM type: NRG; PAM sequence: GAG
ttgattgcactgtggtctga

SEQ ID NO: 65245 - DNA, 20 bp, Artificial Sequence
  Description of Artificial Sequence: Synthetic oligonucleotide
  Target: LAMA2; (-) strand; PAM type: NRG; PAM sequence: GAG
gtttgattgcactgtggtct

SEQ ID NO: 65246 - DNA, 20 bp, Artificial Sequence
  Description of Artificial Sequence: Synthetic oligonucleotide
  Target: LAMA2; (-) strand; PAM type: NRG; PAM sequence: TGG
gttctagtttgattgcactg

SEQ ID NO: 65247 - DNA, 20 bp, Artificial Sequence
  Description of Artificial Sequence: Synthetic oligonucleotide
  Target: LAMA2; (-) strand; PAM type: NRG; PAM sequence: TAG
agattcttaatcctgagttc

SEQ ID NO: 65248 - DNA, 20 bp, Artificial Sequence
  Description of Artificial Sequence: Synthetic oligonucleotide
  Target: LAMA2; (-) strand; PAM type: NRG; PAM sequence: GAG
tgagtgagattcttaatcct

SEQ ID NO: 65249 - DNA, 20 bp, Artificial Sequence
  Description of Artificial Sequence: Synthetic oligonucleotide
  Target: LAMA2; (-) strand; PAM type: NRG; PAM sequence: GAG
gtagttgagcggctttgagt

SEQ ID NO: 65250 - DNA, 20 bp, Artificial Sequence
  Description of Artificial Sequence: Synthetic oligonucleotide
  Target: LAMA2; (-) strand; PAM type: NRG; PAM sequence: GAG
ccatgtagttgagcggcttt

SEQ ID NO: 65251 - DNA, 20 bp, Artificial Sequence
  Description of Artificial Sequence: Synthetic oligonucleotide
  Target: LAMA2; (-) strand; PAM type: NRG; PAM sequence: CGG
tcagtttccatgtagttgag

SEQ ID NO: 65252 - DNA, 20 bp, Artificial Sequence
  Description of Artificial Sequence: Synthetic oligonucleotide
  Target: LAMA2; (-) strand; PAM type: NRG; PAM sequence: GAG
tgttcagtttccatgtagtt

SEQ ID NO: 65253 - DNA, 20 bp, Artificial Sequence
  Description of Artificial Sequence: Synthetic oligonucleotide
  Target: LAMA2; (-) strand; PAM type: NRG; PAM sequence: TAG
caggttgttcagtttccatg

SEQ ID NO: 65254 - DNA, 20 bp, Artificial Sequence
  Description of Artificial Sequence: Synthetic oligonucleotide
  Target: LAMA2; (-) strand; PAM type: NRG; PAM sequence: CAG
tcattcaggagcaggttgtt

SEQ ID NO: 65255 - DNA, 20 bp, Artificial Sequence
  Description of Artificial Sequence: Synthetic oligonucleotide
  Target: LAMA2; (-) strand; PAM type: NRG; PAM sequence: AGG
cccagtagtcattcaggagc

SEQ ID NO: 65256 - DNA, 20 bp, Artificial Sequence
  Description of Artificial Sequence: Synthetic oligonucleotide
  Target: LAMA2; (-) strand; PAM type: NRG; PAM sequence: CAG
acccagtagtcattcaggag

SEQ ID NO: 65257 - DNA, 20 bp, Artificial Sequence
  Description of Artificial Sequence: Synthetic oligonucleotide
  Target: LAMA2; (-) strand; PAM type: NRG; PAM sequence: GAG
tgtacccagtagtcattcag

SEQ ID NO: 65258 - DNA, 20 bp, Artificial Sequence
  Description of Artificial Sequence: Synthetic oligonucleotide
  Target: LAMA2; (-) strand; PAM type: NRG; PAM sequence: AGG
tatgtacccagtagtcattc

SEQ ID NO: 65259 - DNA, 20 bp, Artificial Sequence
  Description of Artificial Sequence: Synthetic oligonucleotide
  Target: LAMA2; (-) strand; PAM type: NRG; PAM sequence: CAG
ttatgtacccagtagtcatt

SEQ ID NO: 65260 - DNA, 20 bp, Artificial Sequence
  Description of Artificial Sequence: Synthetic oligonucleotide
  Target: LAMA2; (-) strand; PAM type: NRG; PAM sequence: TAG
tcatttcgttatgtacccag

SEQ ID NO: 65261 - DNA, 20 bp, Artificial Sequence
  Description of Artificial Sequence: Synthetic oligonucleotide
  Target: LAMA2; (-) strand; PAM type: NRG; PAM sequence: CAG
ccttcatttcgttatgtacc

SEQ ID NO: 65262 - DNA, 20 bp, Artificial Sequence
  Description of Artificial Sequence: Synthetic oligonucleotide
  Target: LAMA2; (-) strand; PAM type: NRG; PAM sequence: AAG
ctttgttctcgttggtttca

SEQ ID NO: 65263 - DNA, 20 bp, Artificial Sequence
  Description of Artificial Sequence: Synthetic oligonucleotide
  Target: LAMA2; (-) strand; PAM type: NRG; PAM sequence: TGG
tgtggtgtctttgttctcgt

SEQ ID NO: 65264 - DNA, 20 bp, Artificial Sequence
  Description of Artificial Sequence: Synthetic oligonucleotide
  Target: LAMA2; (-) strand; PAM type: NRG; PAM sequence: TGG
gtcccagagattctggtatg

SEQ ID NO: 65265 - DNA, 20 bp, Artificial Sequence
  Description of Artificial Sequence: Synthetic oligonucleotide
  Target: LAMA2; (-) strand; PAM type: NRG; PAM sequence: TGG
tgaatgcgtcccagagattc

SEQ ID NO: 65266 - DNA, 20 bp, Artificial Sequence
  Description of Artificial Sequence: Synthetic oligonucleotide
  Target: LAMA2; (-) strand; PAM type: NRG; PAM sequence: GAG
actgctttgaatgcgtccca

SEQ ID NO: 65267 - DNA, 20 bp, Artificial Sequence
  Description of Artificial Sequence: Synthetic oligonucleotide
  Target: LAMA2; (-) strand; PAM type: NRG; PAM sequence: CAG
acactgctttgaatgcgtcc

SEQ ID NO: 65268 - DNA, 20 bp, Artificial Sequence
  Description of Artificial Sequence: Synthetic oligonucleotide
  Target: LAMA2; (-) strand; PAM type: NRG; PAM sequence: TAG
tgctttctcttgtaggcatt

SEQ ID NO: 65269 - DNA, 20 bp, Artificial Sequence
  Description of Artificial Sequence: Synthetic oligonucleotide
  Target: LAMA2; (-) strand; PAM type: NRG; PAM sequence: AGG
tctttcctgctttctcttgt

SEQ ID NO: 65270 - DNA, 20 bp, Artificial Sequence
  Description of Artificial Sequence: Synthetic oligonucleotide
  Target: LAMA2; (-) strand; PAM type: NRG; PAM sequence: TAG
atctttcctgctttctcttg

SEQ ID NO: 65271 - DNA, 20 bp, Artificial Sequence
  Description of Artificial Sequence: Synthetic oligonucleotide
  Target: LAMA2; (-) strand; PAM type: NRG; PAM sequence: TGG
tgatgttagggtgtcaattt

SEQ ID NO: 65272 - DNA, 20 bp, Artificial Sequence
  Description of Artificial Sequence: Synthetic oligonucleotide
  Target: LAMA2; (-) strand; PAM type: NRG; PAM sequence: GGG
ttcttttaattgtgatgtta

SEQ ID NO: 65273 - DNA, 20 bp, Artificial Sequence
  Description of Artificial Sequence: Synthetic oligonucleotide
  Target: LAMA2; (-) strand; PAM type: NRG; PAM sequence: AGG
gttcttttaattgtgatgtt

SEQ ID NO: 65274 - DNA, 20 bp, Artificial Sequence
  Description of Artificial Sequence: Synthetic oligonucleotide
  Target: LAMA2; (-) strand; PAM type: NRG; PAM sequence: TAG
agttcttttaattgtgatgt

SEQ ID NO: 65275 - DNA, 20 bp, Artificial Sequence
  Description of Artificial Sequence: Synthetic oligonucleotide
  Target: LAMA2; (-) strand; PAM type: NRG; PAM sequence: TAG
tgtgtttgctcttgcttttc

SEQ ID NO: 65276 - DNA, 20 bp, Artificial Sequence
  Description of Artificial Sequence: Synthetic oligonucleotide
  Target: LAMA2; (-) strand; PAM type: NRG; PAM sequence: TAG
agttatttcttgccttctgc

SEQ ID NO: 65277 - DNA, 20 bp, Artificial Sequence
  Description of Artificial Sequence: Synthetic oligonucleotide
  Target: LAMA2; (-) strand; PAM type: NRG; PAM sequence: TAG
cttcagttctgctctgattt

SEQ ID NO: 65278 - DNA, 20 bp, Artificial Sequence
  Description of Artificial Sequence: Synthetic oligonucleotide
  Target: LAMA2; (-) strand; PAM type: NRG; PAM sequence: CAG
ttttgtgtctctatttcctt

SEQ ID NO: 65279 - DNA, 20 bp, Artificial Sequence
  Description of Artificial Sequence: Synthetic oligonucleotide
  Target: LAMA2; (-) strand; PAM type: NRG; PAM sequence: GGG
ggattcattgattttttgaa

SEQ ID NO: 65280 - DNA, 20 bp, Artificial Sequence
  Description of Artificial Sequence: Synthetic oligonucleotide
  Target: LAMA2; (-) strand; PAM type: NRG; PAM sequence: AGG
tggattcattgattttttga

SEQ ID NO: 65281 - DNA, 20 bp, Artificial Sequence
  Description of Artificial Sequence: Synthetic oligonucleotide
  Target: LAMA2; (-) strand; PAM type: NRG; PAM sequence: AAG
ctggattcattgattttttg

SEQ ID NO: 65282 - DNA, 20 bp, Artificial Sequence
  Description of Artificial Sequence: Synthetic oligonucleotide
  Target: LAMA2; (-) strand; PAM type: NRG; PAM sequence: TGG
cctttcaaaaaaccagctcc

SEQ ID NO: 65283 - DNA, 20 bp, Artificial Sequence
  Description of Artificial Sequence: Synthetic oligonucleotide
  Target: LAMA2; (-) strand; PAM type: NRG; PAM sequence: CAG
tgttgatcctttcaaaaaac

SEQ ID NO: 65284 - DNA, 20 bp, Artificial Sequence
  Description of Artificial Sequence: Synthetic oligonucleotide
  Target: LAMA2; (-) strand; PAM type: NRG; PAM sequence: CGG
ttctttattagtcttgctag

SEQ ID NO: 65285 - DNA, 20 bp, Artificial Sequence
  Description of Artificial Sequence: Synthetic oligonucleotide
  Target: LAMA2; (-) strand; PAM type: NRG; PAM sequence: TAG
tttttctttattagtcttgc

SEQ ID NO: 65286 - DNA, 20 bp, Artificial Sequence
  Description of Artificial Sequence: Synthetic oligonucleotide
  Target: LAMA2; (-) strand; PAM type: NRG; PAM sequence: TAG
ttctctctttttttctttat

SEQ ID NO: 65287 - DNA, 20 bp, Artificial Sequence
  Description of Artificial Sequence: Synthetic oligonucleotide
  Target: LAMA2; (-) strand; PAM type: NRG; PAM sequence: TGG
ttgtatttctgtgggatcgg

SEQ ID NO: 65288 - DNA, 20 bp, Artificial Sequence
  Description of Artificial Sequence: Synthetic oligonucleotide
  Target: LAMA2; (-) strand; PAM type: NRG; PAM sequence: CGG
agtttgtatttctgtgggat

SEQ ID NO: 65289 - DNA, 20 bp, Artificial Sequence
  Description of Artificial Sequence: Synthetic oligonucleotide
  Target: LAMA2; (-) strand; PAM type: NRG; PAM sequence: GGG
atggtagtttgtatttctgt

SEQ ID NO: 65290 - DNA, 20 bp, Artificial Sequence
  Description of Artificial Sequence: Synthetic oligonucleotide
  Target: LAMA2; (-) strand; PAM type: NRG; PAM sequence: TGG
gatggtagtttgtatttctg

SEQ ID NO: 65291 - DNA, 20 bp, Artificial Sequence
  Description of Artificial Sequence: Synthetic oligonucleotide
  Target: LAMA2; (-) strand; PAM type: NRG; PAM sequence: TAG
tttgtagtattctctgatgg

SEQ ID NO: 65292 - DNA, 20 bp, Artificial Sequence
  Description of Artificial Sequence: Synthetic oligonucleotide
  Target: LAMA2; (-) strand; PAM type: NRG; PAM sequence: TGG
gtgtttgtagtattctctga

SEQ ID NO: 65293 - DNA, 20 bp, Artificial Sequence
  Description of Artificial Sequence: Synthetic oligonucleotide
  Target: LAMA2; (-) strand; PAM type: NRG; PAM sequence: TAG
tatttgcgtagaggtgtttg

SEQ ID NO: 65294 - DNA, 20 bp, Artificial Sequence
  Description of Artificial Sequence: Synthetic oligonucleotide
  Target: LAMA2; (-) strand; PAM type: NRG; PAM sequence: AGG
tttctagtttatttgcgtag

SEQ ID NO: 65295 - DNA, 20 bp, Artificial Sequence
  Description of Artificial Sequence: Synthetic oligonucleotide
  Target: LAMA2; (-) strand; PAM type: NRG; PAM sequence: GAG
ttttctagtttatttgcgta

SEQ ID NO: 65296 - DNA, 20 bp, Artificial Sequence
  Description of Artificial Sequence: Synthetic oligonucleotide
  Target: LAMA2; (-) strand; PAM type: NRG; PAM sequence: TAG
gattttctagtttatttgcg

SEQ ID NO: 65297 - DNA, 20 bp, Artificial Sequence
  Description of Artificial Sequence: Synthetic oligonucleotide
  Target: LAMA2; (-) strand; PAM type: NRG; PAM sequence: TAG
tccatttcttctagattttc

SEQ ID NO: 65298 - DNA, 20 bp, Artificial Sequence
  Description of Artificial Sequence: Synthetic oligonucleotide
  Target: LAMA2; (-) strand; PAM type: NRG; PAM sequence: TAG
aggaatgtatccatttcttc

SEQ ID NO: 65299 - DNA, 20 bp, Artificial Sequence
  Description of Artificial Sequence: Synthetic oligonucleotide
  Target: LAMA2; (-) strand; PAM type: NRG; PAM sequence: AGG
ttgggagagtgtatgtgtcg

SEQ ID NO: 65300 - DNA, 20 bp, Artificial Sequence
  Description of Artificial Sequence: Synthetic oligonucleotide
  Target: LAMA2; (-) strand; PAM type: NRG; PAM sequence: GAG
cttgggagagtgtatgtgtc

SEQ ID NO: 65301 - DNA, 20 bp, Artificial Sequence
  Description of Artificial Sequence: Synthetic oligonucleotide
  Target: LAMA2; (-) strand; PAM type: NRG; PAM sequence: GAG
ttcctggtttagtcttggga

SEQ ID NO: 65302 - DNA, 20 bp, Artificial Sequence
  Description of Artificial Sequence: Synthetic oligonucleotide
  Target: LAMA2; (-) strand; PAM type: NRG; PAM sequence: GAG
tcttcctggtttagtcttgg

SEQ ID NO: 65303 - DNA, 20 bp, Artificial Sequence
  Description of Artificial Sequence: Synthetic oligonucleotide
  Target: LAMA2; (-) strand; PAM type: NRG; PAM sequence: GGG
cttcttcctggtttagtctt

SEQ ID NO: 65304 - DNA, 20 bp, Artificial Sequence
  Description of Artificial Sequence: Synthetic oligonucleotide
  Target: LAMA2; (-) strand; PAM type: NRG; PAM sequence: TGG
acttcttcctggtttagtct

SEQ ID NO: 65305 - DNA, 20 bp, Artificial Sequence
  Description of Artificial Sequence: Synthetic oligonucleotide
  Target: LAMA2; (-) strand; PAM type: NRG; PAM sequence: TAG
gattcaacttcttcctggtt

SEQ ID NO: 65306 - DNA, 20 bp, Artificial Sequence
  Description of Artificial Sequence: Synthetic oligonucleotide
  Target: LAMA2; (-) strand; PAM type: NRG; PAM sequence: TGG
tcagagattcaacttcttcc

SEQ ID NO: 65307 - DNA, 20 bp, Artificial Sequence
  Description of Artificial Sequence: Synthetic oligonucleotide
  Target: LAMA2; (-) strand; PAM type: NRG; PAM sequence: GAG
gcctgttattggtcgattca

SEQ ID NO: 65308 - DNA, 20 bp, Artificial Sequence
  Description of Artificial Sequence: Synthetic oligonucleotide
  Target: LAMA2; (-) strand; PAM type: NRG; PAM sequence: CAG
gagcctgttattggtcgatt

SEQ ID NO: 65309 - DNA, 20 bp, Artificial Sequence
  Description of Artificial Sequence: Synthetic oligonucleotide
  Target: LAMA2; (-) strand; PAM type: NRG; PAM sequence: TGG
acaatttcagagcctgttat

SEQ ID NO: 65310 - DNA, 20 bp, Artificial Sequence
  Description of Artificial Sequence: Synthetic oligonucleotide
  Target: LAMA2; (-) strand; PAM type: NRG; PAM sequence: GAG
tgattattgccacaatttca

SEQ ID NO: 65311 - DNA, 20 bp, Artificial Sequence
  Description of Artificial Sequence: Synthetic oligonucleotide
  Target: LAMA2; (-) strand; PAM type: NRG; PAM sequence: CAG
attgattattgccacaattt

SEQ ID NO: 65312 - DNA, 20 bp, Artificial Sequence
  Description of Artificial Sequence: Synthetic oligonucleotide
  Target: LAMA2; (-) strand; PAM type: NRG; PAM sequence: TGG
ggtcctggactctttttggt

SEQ ID NO: 65313 - DNA, 20 bp, Artificial Sequence
  Description of Artificial Sequence: Synthetic oligonucleotide
  Target: LAMA2; (-) strand; PAM type: NRG; PAM sequence: TGG
atctggtcctggactctttt

SEQ ID NO: 65314 - DNA, 20 bp, Artificial Sequence
  Description of Artificial Sequence: Synthetic oligonucleotide
  Target: LAMA2; (-) strand; PAM type: NRG; PAM sequence: TGG
gctgtgaatccatctggtcc

SEQ ID NO: 65315 - DNA, 20 bp, Artificial Sequence
  Description of Artificial Sequence: Synthetic oligonucleotide
  Target: LAMA2; (-) strand; PAM type: NRG; PAM sequence: TGG
aattcggctgtgaatccatc

SEQ ID NO: 65316 - DNA, 20 bp, Artificial Sequence
  Description of Artificial Sequence: Synthetic oligonucleotide
  Target: LAMA2; (-) strand; PAM type: NRG; PAM sequence: CGG
cttgtacctctggtagaatt

SEQ ID NO: 65317 - DNA, 20 bp, Artificial Sequence
  Description of Artificial Sequence: Synthetic oligonucleotide
  Target: LAMA2; (-) strand; PAM type: NRG; PAM sequence: TAG
gttcctccttgtacctctgg

SEQ ID NO: 65318 - DNA, 20 bp, Artificial Sequence
  Description of Artificial Sequence: Synthetic oligonucleotide
  Target: LAMA2; (-) strand; PAM type: NRG; PAM sequence: TGG
ccagttcctccttgtacctc

SEQ ID NO: 65319 - DNA, 20 bp, Artificial Sequence
  Description of Artificial Sequence: Synthetic oligonucleotide
  Target: LAMA2; (-) strand; PAM type: NRG; PAM sequence: CAG
agtttcagaaggaatggtac

SEQ ID NO: 65320 - DNA, 20 bp, Artificial Sequence
  Description of Artificial Sequence: Synthetic oligonucleotide
  Target: LAMA2; (-) strand; PAM type: NRG; PAM sequence: TGG
tggaatagtttcagaaggaa

SEQ ID NO: 65321 - DNA, 20 bp, Artificial Sequence
  Description of Artificial Sequence: Synthetic oligonucleotide
  Target: LAMA2; (-) strand; PAM type: NRG; PAM sequence: AGG
ttgattggaatagtttcaga

SEQ ID NO: 65322 - DNA, 20 bp, Artificial Sequence
  Description of Artificial Sequence: Synthetic oligonucleotide
  Target: LAMA2; (-) strand; PAM type: NRG; PAM sequence: AAG
attgattggaatagtttcag

SEQ ID NO: 65323 - DNA, 20 bp, Artificial Sequence
  Description of Artificial Sequence: Synthetic oligonucleotide
  Target: LAMA2; (-) strand; PAM type: NRG; PAM sequence: CAG
tctattgattggaatagttt

SEQ ID NO: 65324 - DNA, 20 bp, Artificial Sequence
  Description of Artificial Sequence: Synthetic oligonucleotide
  Target: LAMA2; (-) strand; PAM type: NRG; PAM sequence: TAG
tctttttctattgattggaa

SEQ ID NO: 65325 - DNA, 20 bp, Artificial Sequence
  Description of Artificial Sequence: Synthetic oligonucleotide
  Target: LAMA2; (-) strand; PAM type: NRG; PAM sequence: TGG
ttccctctttttctattgat

SEQ ID NO: 65326 - DNA, 20 bp, Artificial Sequence
  Description of Artificial Sequence: Synthetic oligonucleotide
  Target: LAMA2; (-) strand; PAM type: NRG; PAM sequence: AGG
cctcataaaatgagttaggg

SEQ ID NO: 65327 - DNA, 20 bp, Artificial Sequence
  Description of Artificial Sequence: Synthetic oligonucleotide
  Target: LAMA2; (-) strand; PAM type: NRG; PAM sequence: GAG
gcctcataaaatgagttagg

SEQ ID NO: 65328 - DNA, 20 bp, Artificial Sequence
  Description of Artificial Sequence: Synthetic oligonucleotide
  Target: LAMA2; (-) strand; PAM type: NRG; PAM sequence: GGG
tggcctcataaaatgagtta

SEQ ID NO: 65329 - DNA, 20 bp, Artificial Sequence
  Description of Artificial Sequence: Synthetic oligonucleotide
  Target: LAMA2; (-) strand; PAM type: NRG; PAM sequence: AGG
ctggcctcataaaatgagtt

SEQ ID NO: 65330 - DNA, 20 bp, Artificial Sequence
  Description of Artificial Sequence: Synthetic oligonucleotide
  Target: LAMA2; (-) strand; PAM type: NRG; PAM sequence: TAG
gctggcctcataaaatgagt

SEQ ID NO: 65331 - DNA, 20 bp, Artificial Sequence
  Description of Artificial Sequence: Synthetic oligonucleotide
  Target: LAMA2; (-) strand; PAM type: NRG; PAM sequence: GAG
tgatgctggcctcataaaat

SEQ ID NO: 65332 - DNA, 20 bp, Artificial Sequence
  Description of Artificial Sequence: Synthetic oligonucleotide
  Target: LAMA2; (-) strand; PAM type: NRG; PAM sequence: TGG
ctttggtatcagaatgatgc

SEQ ID NO: 65333 - DNA, 20 bp, Artificial Sequence
  Description of Artificial Sequence: Synthetic oligonucleotide
  Target: LAMA2; (-) strand; PAM type: NRG; PAM sequence: CAG
tctctgcccggctttggtat

SEQ ID NO: 65334 - DNA, 20 bp, Artificial Sequence
  Description of Artificial Sequence: Synthetic oligonucleotide
  Target: LAMA2; (-) strand; PAM type: NRG; PAM sequence: TGG
gttgtgtctctgcccggctt

SEQ ID NO: 65335 - DNA, 20 bp, Artificial Sequence
  Description of Artificial Sequence: Synthetic oligonucleotide
  Target: LAMA2; (-) strand; PAM type: NRG; PAM sequence: CGG
tttttggttgtgtctctgcc

SEQ ID NO: 65336 - DNA, 20 bp, Artificial Sequence
  Description of Artificial Sequence: Synthetic oligonucleotide
  Target: LAMA2; (-) strand; PAM type: NRG; PAM sequence: TGG
tggtctaaaattctcttttt

SEQ ID NO: 65337 - DNA, 20 bp, Artificial Sequence
  Description of Artificial Sequence: Synthetic oligonucleotide
  Target: LAMA2; (-) strand; PAM type: NRG; PAM sequence: TGG
tcaatgttcatcaaggatat

SEQ ID NO: 65338 - DNA, 20 bp, Artificial Sequence
  Description of Artificial Sequence: Synthetic oligonucleotide
  Target: LAMA2; (-) strand; PAM type: NRG; PAM sequence: AGG
ttttgcatcaatgttcatca

SEQ ID NO: 65339 - DNA, 20 bp, Artificial Sequence
  Description of Artificial Sequence: Synthetic oligonucleotide
  Target: LAMA2; (-) strand; PAM type: NRG; PAM sequence: AAG
tttttgcatcaatgttcatc

SEQ ID NO: 65340 - DNA, 20 bp, Artificial Sequence
  Description of Artificial Sequence: Synthetic oligonucleotide
  Target: LAMA2; (-) strand; PAM type: NRG; PAM sequence: AGG
ggtttgccagtattttattg

SEQ ID NO: 65341 - DNA, 20 bp, Artificial Sequence
  Description of Artificial Sequence: Synthetic oligonucleotide
  Target: LAMA2; (-) strand; PAM type: NRG; PAM sequence: GAG
cggtttgccagtattttatt

SEQ ID NO: 65342 - DNA, 20 bp, Artificial Sequence
  Description of Artificial Sequence: Synthetic oligonucleotide
  Target: LAMA2; (-) strand; PAM type: NRG; PAM sequence: CAG
tgctgctggattcggtttgc

SEQ ID NO: 65343 - DNA, 20 bp, Artificial Sequence
  Description of Artificial Sequence: Synthetic oligonucleotide
  Target: LAMA2; (-) strand; PAM type: NRG; PAM sequence: CGG
ttttgatgtgctgctggatt

SEQ ID NO: 65344 - DNA, 20 bp, Artificial Sequence
  Description of Artificial Sequence: Synthetic oligonucleotide
  Target: LAMA2; (-) strand; PAM type: NRG; PAM sequence: TGG
taagctttttgatgtgctgc

SEQ ID NO: 65345 - DNA, 20 bp, Artificial Sequence
  Description of Artificial Sequence: Synthetic oligonucleotide
  Target: LAMA2; (-) strand; PAM type: NRG; PAM sequence: AAG
cccacttgatcatggtggat

SEQ ID NO: 65346 - DNA, 20 bp, Artificial Sequence
  Description of Artificial Sequence: Synthetic oligonucleotide
  Target: LAMA2; (-) strand; PAM type: NRG; PAM sequence: TGG
tgaagcccacttgatcatgg

SEQ ID NO: 65347 - DNA, 20 bp, Artificial Sequence
  Description of Artificial Sequence: Synthetic oligonucleotide
  Target: LAMA2; (-) strand; PAM type: NRG; PAM sequence: TGG
ggatgaagcccacttgatca

SEQ ID NO: 65348 - DNA, 20 bp, Artificial Sequence
  Description of Artificial Sequence: Synthetic oligonucleotide
  Target: LAMA2; (-) strand; PAM type: NRG; PAM sequence: AAG
agccttgcatcccagggatg

SEQ ID NO: 65349 - DNA, 20 bp, Artificial Sequence
  Description of Artificial Sequence: Synthetic oligonucleotide
  Target: LAMA2; (-) strand; PAM type: NRG; PAM sequence: GGG
tgaaccagccttgcatccca

SEQ ID NO: 65350 - DNA, 20 bp, Artificial Sequence
  Description of Artificial Sequence: Synthetic oligonucleotide
  Target: LAMA2; (-) strand; PAM type: NRG; PAM sequence: AGG
ttgaaccagccttgcatccc

SEQ ID NO: 65351 - DNA, 20 bp, Artificial Sequence
  Description of Artificial Sequence: Synthetic oligonucleotide
  Target: LAMA2; (-) strand; PAM type: NRG; PAM sequence: CAG
attgaaccagccttgcatcc

SEQ ID NO: 65352 - DNA, 20 bp, Artificial Sequence
  Description of Artificial Sequence: Synthetic oligonucleotide
  Target: LAMA2; (-) strand; PAM type: NRG; PAM sequence: CAG
ttgatttgcgtatattgaac

SEQ ID NO: 65353 - DNA, 20 bp, Artificial Sequence
  Description of Artificial Sequence: Synthetic oligonucleotide
  Target: LAMA2; (-) strand; PAM type: NRG; PAM sequence: TGG
ctttggctctgtttatatgc

SEQ ID NO: 65354 - DNA, 20 bp, Artificial Sequence
  Description of Artificial Sequence: Synthetic oligonucleotide
  Target: LAMA2; (-) strand; PAM type: NRG; PAM sequence: TGG
aatcatgtggtttttgtctt

SEQ ID NO: 65355 - DNA, 20 bp, Artificial Sequence
  Description of Artificial Sequence: Synthetic oligonucleotide
  Target: LAMA2; (-) strand; PAM type: NRG; PAM sequence: TGG
catctattgagataatcatg

SEQ ID NO: 65356 - DNA, 20 bp, Artificial Sequence
  Description of Artificial Sequence: Synthetic oligonucleotide
  Target: LAMA2; (-) strand; PAM type: NRG; PAM sequence: GAG
aggctttttctgcatctatt

SEQ ID NO: 65357 - DNA, 20 bp, Artificial Sequence
  Description of Artificial Sequence: Synthetic oligonucleotide
  Target: LAMA2; (-) strand; PAM type: NRG; PAM sequence: AGG
gggttgttgaattttgtcaa

SEQ ID NO: 65358 - DNA, 20 bp, Artificial Sequence
  Description of Artificial Sequence: Synthetic oligonucleotide
  Target: LAMA2; (-) strand; PAM type: NRG; PAM sequence: AAG
agggttgttgaattttgtca

SEQ ID NO: 65359 - DNA, 20 bp, Artificial Sequence
  Description of Artificial Sequence: Synthetic oligonucleotide
  Target: LAMA2; (-) strand; PAM type: NRG; PAM sequence: GGG
ttgagagtttttagcatgaa

SEQ ID NO: 65360 - DNA, 20 bp, Artificial Sequence
  Description of Artificial Sequence: Synthetic oligonucleotide
  Target: LAMA2; (-) strand; PAM type: NRG; PAM sequence: AGG
attgagagtttttagcatga

SEQ ID NO: 65361 - DNA, 20 bp, Artificial Sequence
  Description of Artificial Sequence: Synthetic oligonucleotide
  Target: LAMA2; (-) strand; PAM type: NRG; PAM sequence: AAG
tattgagagtttttagcatg

SEQ ID NO: 65362 - DNA, 20 bp, Artificial Sequence
  Description of Artificial Sequence: Synthetic oligonucleotide
  Target: LAMA2; (-) strand; PAM type: NRG; PAM sequence: TAG
cctaatttattgagagtttt

SEQ ID NO: 65363 - DNA, 20 bp, Artificial Sequence
  Description of Artificial Sequence: Synthetic oligonucleotide
  Target: LAMA2; (-) strand; PAM type: NRG; PAM sequence: GAG
atcaatacctaatttattga

SEQ ID NO: 65364 - DNA, 20 bp, Artificial Sequence
  Description of Artificial Sequence: Synthetic oligonucleotide
  Target: LAMA2; (-) strand; PAM type: NRG; PAM sequence: GAG
ccatcaatacctaatttatt

SEQ ID NO: 65365 - DNA, 20 bp, Artificial Sequence
  Description of Artificial Sequence: Synthetic oligonucleotide
  Target: LAMA2; (-) strand; PAM type: NRG; PAM sequence: TAG
ggctgtgggtttgtcataga

SEQ ID NO: 65366 - DNA, 20 bp, Artificial Sequence
  Description of Artificial Sequence: Synthetic oligonucleotide
  Target: LAMA2; (-) strand; PAM type: NRG; PAM sequence: TAG
tattggctgtgggtttgtca

SEQ ID NO: 65367 - DNA, 20 bp, Artificial Sequence
  Description of Artificial Sequence: Synthetic oligonucleotide
  Target: LAMA2; (-) strand; PAM type: NRG; PAM sequence: GGG
ttcagtatgatattggctgt

SEQ ID NO: 65368 - DNA, 20 bp, Artificial Sequence
  Description of Artificial Sequence: Synthetic oligonucleotide
  Target: LAMA2; (-) strand; PAM type: NRG; PAM sequence: TGG
attcagtatgatattggctg

SEQ ID NO: 65369 - DNA, 20 bp, Artificial Sequence
  Description of Artificial Sequence: Synthetic oligonucleotide
  Target: LAMA2; (-) strand; PAM type: NRG; PAM sequence: TGG
ttgcccattcagtatgatat

SEQ ID NO: 65370 - DNA, 20 bp, Artificial Sequence
  Description of Artificial Sequence: Synthetic oligonucleotide
  Target: LAMA2; (-) strand; PAM type: NRG; PAM sequence: CAG
gcttccagtttttgcccatt

SEQ ID NO: 65371 - DNA, 20 bp, Artificial Sequence
  Description of Artificial Sequence: Synthetic oligonucleotide
  Target: LAMA2; (-) strand; PAM type: NRG; PAM sequence: CAG
gttttcaaagggaatgcttc

SEQ ID NO: 65372 - DNA, 20 bp, Artificial Sequence
  Description of Artificial Sequence: Synthetic oligonucleotide
  Target: LAMA2; (-) strand; PAM type: NRG; PAM sequence: GGG
gtcttgtgccagttttcaaa

SEQ ID NO: 65373 - DNA, 20 bp, Artificial Sequence
  Description of Artificial Sequence: Synthetic oligonucleotide
  Target: LAMA2; (-) strand; PAM type: NRG; PAM sequence: AGG
tgtcttgtgccagttttcaa

SEQ ID NO: 65374 - DNA, 20 bp, Artificial Sequence
  Description of Artificial Sequence: Synthetic oligonucleotide
  Target: LAMA2; (-) strand; PAM type: NRG; PAM sequence: AAG
ctgtcttgtgccagttttca

SEQ ID NO: 65375 - DNA, 20 bp, Artificial Sequence
  Description of Artificial Sequence: Synthetic oligonucleotide
  Target: LAMA2; (-) strand; PAM type: NRG; PAM sequence: CAG
agggcatccctgtcttgtgc

SEQ ID NO: 65376 - DNA, 20 bp, Artificial Sequence
  Description of Artificial Sequence: Synthetic oligonucleotide
  Target: LAMA2; (-) strand; PAM type: NRG; PAM sequence: GGG
tgaataggagcggtgagaga

SEQ ID NO: 65377 - DNA, 20 bp, Artificial Sequence
  Description of Artificial Sequence: Synthetic oligonucleotide
  Target: LAMA2; (-) strand; PAM type: NRG; PAM sequence: AGG
ttgaataggagcggtgagag

SEQ ID NO: 65378 - DNA, 20 bp, Artificial Sequence
  Description of Artificial Sequence: Synthetic oligonucleotide
  Target: LAMA2; (-) strand; PAM type: NRG; PAM sequence: GAG
gttgaataggagcggtgaga

SEQ ID NO: 65379 - DNA, 20 bp, Artificial Sequence
  Description of Artificial Sequence: Synthetic oligonucleotide
  Target: LAMA2; (-) strand; PAM type: NRG; PAM sequence: GAG
atgttgaataggagcggtga

SEQ ID NO: 65380 - DNA, 20 bp, Artificial Sequence
  Description of Artificial Sequence: Synthetic oligonucleotide
  Target: LAMA2; (-) strand; PAM type: NRG; PAM sequence: GAG
ctatgttgaataggagcggt

SEQ ID NO: 65381 - DNA, 20 bp, Artificial Sequence
  Description of Artificial Sequence: Synthetic oligonucleotide
  Target: LAMA2; (-) strand; PAM type: NRG; PAM sequence: CGG
aacactatgttgaataggag

SEQ ID NO: 65382 - DNA, 20 bp, Artificial Sequence
  Description of Artificial Sequence: Synthetic oligonucleotide
  Target: LAMA2; (-) strand; PAM type: NRG; PAM sequence: GAG
tccaacactatgttgaatag

SEQ ID NO: 65383 - DNA, 20 bp, Artificial Sequence
  Description of Artificial Sequence: Synthetic oligonucleotide
  Target: LAMA2; (-) strand; PAM type: NRG; PAM sequence: AGG
cttccaacactatgttgaat

SEQ ID NO: 65384 - DNA, 20 bp, Artificial Sequence
  Description of Artificial Sequence: Synthetic oligonucleotide
  Target: LAMA2; (-) strand; PAM type: NRG; PAM sequence: TAG
acttccaacactatgttgaa

SEQ ID NO: 65385 - DNA, 20 bp, Artificial Sequence
  Description of Artificial Sequence: Synthetic oligonucleotide
  Target: LAMA2; (-) strand; PAM type: NRG; PAM sequence: CAG
tcctgcctgattgccctggc

SEQ ID NO: 65386 - DNA, 20 bp, Artificial Sequence
  Description of Artificial Sequence: Synthetic oligonucleotide
  Target: LAMA2; (-) strand; PAM type: NRG; PAM sequence: TGG
cttctcctgcctgattgccc

SEQ ID NO: 65387 - DNA, 20 bp, Artificial Sequence
  Description of Artificial Sequence: Synthetic oligonucleotide
  Target: LAMA2; (-) strand; PAM type: NRG; PAM sequence: GGG
aatcatgtcgtctgcaaaca

SEQ ID NO: 65388 - DNA, 20 bp, Artificial Sequence
  Description of Artificial Sequence: Synthetic oligonucleotide
  Target: LAMA2; (-) strand; PAM type: NRG; PAM sequence: AGG
caatcatgtcgtctgcaaac

SEQ ID NO: 65389 - DNA, 20 bp, Artificial Sequence
  Description of Artificial Sequence: Synthetic oligonucleotide
  Target: LAMA2; (-) strand; PAM type: NRG; PAM sequence: CAG
acaatcatgtcgtctgcaaa

SEQ ID NO: 65390 - DNA, 20 bp, Artificial Sequence
  Description of Artificial Sequence: Synthetic oligonucleotide
  Target: LAMA2; (-) strand; PAM type: NRG; PAM sequence: TAG
gctgagacgatggggttttc

SEQ ID NO: 65391 - DNA, 20 bp, Artificial Sequence
  Description of Artificial Sequence: Synthetic oligonucleotide
  Target: LAMA2; (-) strand; PAM type: NRG; PAM sequence: GGG
gattttgggctgagacgatg

SEQ ID NO: 65392 - DNA, 20 bp, Artificial Sequence
  Description of Artificial Sequence: Synthetic oligonucleotide
  Target: LAMA2; (-) strand; PAM type: NRG; PAM sequence: GGG
agattttgggctgagacgat

SEQ ID NO: 65393 - DNA, 20 bp, Artificial Sequence
  Description of Artificial Sequence: Synthetic oligonucleotide
  Target: LAMA2; (-) strand; PAM type: NRG; PAM sequence: TGG
gagattttgggctgagacga

SEQ ID NO: 65394 - DNA, 20 bp, Artificial Sequence
  Description of Artificial Sequence: Synthetic oligonucleotide
  Target: LAMA2; (-) strand; PAM type: NRG; PAM sequence: GAG
gcttaaggagattttgggct

SEQ ID NO: 65395 - DNA, 20 bp, Artificial Sequence
  Description of Artificial Sequence: Synthetic oligonucleotide
  Target: LAMA2; (-) strand; PAM type: NRG; PAM sequence: GGG
tatcagcttaaggagatttt

SEQ ID NO: 65396 - DNA, 20 bp, Artificial Sequence
  Description of Artificial Sequence: Synthetic oligonucleotide
  Target: LAMA2; (-) strand; PAM type: NRG; PAM sequence: TGG
ttatcagcttaaggagattt

SEQ ID NO: 65397 - DNA, 20 bp, Artificial Sequence
  Description of Artificial Sequence: Synthetic oligonucleotide
  Target: LAMA2; (-) strand; PAM type: NRG; PAM sequence: GAG
aagttgcttatcagcttaag

SEQ ID NO: 65398 - DNA, 20 bp, Artificial Sequence
  Description of Artificial Sequence: Synthetic oligonucleotide
  Target: LAMA2; (-) strand; PAM type: NRG; PAM sequence: AGG
tgaagttgcttatcagctta

SEQ ID NO: 65399 - DNA, 20 bp, Artificial Sequence
  Description of Artificial Sequence: Synthetic oligonucleotide
  Target: LAMA2; (-) strand; PAM type: NRG; PAM sequence: AAG
ctgaagttgcttatcagctt

SEQ ID NO: 65400 - DNA, 20 bp, Artificial Sequence
  Description of Artificial Sequence: Synthetic oligonucleotide
  Target: LAMA2; (-) strand; PAM type: NRG; PAM sequence: CAG
actttgctgaagttgcttat

SEQ ID NO: 65401 - DNA, 20 bp, Artificial Sequence
  Description of Artificial Sequence: Synthetic oligonucleotide
  Target: LAMA2; (-) strand; PAM type: NRG; PAM sequence: AAG
tgtatcctgagactttgctg

SEQ ID NO: 65402 - DNA, 20 bp, Artificial Sequence
  Description of Artificial Sequence: Synthetic oligonucleotide
  Target: LAMA2; (-) strand; PAM type: NRG; PAM sequence: GAG
gtacattgattttgtatcct

SEQ ID NO: 65403 - DNA, 20 bp, Artificial Sequence
  Description of Artificial Sequence: Synthetic oligonucleotide
  Target: LAMA2; (-) strand; PAM type: NRG; PAM sequence: AAG
tttgtctgttgttggtgtat

SEQ ID NO: 65404 - DNA, 20 bp, Artificial Sequence
  Description of Artificial Sequence: Synthetic oligonucleotide
  Target: LAMA2; (-) strand; PAM type: NRG; PAM sequence: TGG
gctctctgtttgtctgttgt

SEQ ID NO: 65405 - DNA, 20 bp, Artificial Sequence
  Description of Artificial Sequence: Synthetic oligonucleotide
  Target: LAMA2; (-) strand; PAM type: NRG; PAM sequence: TGG
atgggagttcacccatgatt

SEQ ID NO: 65406 - DNA, 20 bp, Artificial Sequence
  Description of Artificial Sequence: Synthetic oligonucleotide
  Target: LAMA2; (-) strand; PAM type: NRG; PAM sequence: GAG
tttgaagcaattgtgaatgg

SEQ ID NO: 65407 - DNA, 20 bp, Artificial Sequence
  Description of Artificial Sequence: Synthetic oligonucleotide
  Target: LAMA2; (-) strand; PAM type: NRG; PAM sequence: GGG
tctttgaagcaattgtgaat

SEQ ID NO: 65408 - DNA, 20 bp, Artificial Sequence
  Description of Artificial Sequence: Synthetic oligonucleotide
  Target: LAMA2; (-) strand; PAM type: NRG; PAM sequence: TGG
ctctttgaagcaattgtgaa

SEQ ID NO: 65409 - DNA, 20 bp, Artificial Sequence
  Description of Artificial Sequence: Synthetic oligonucleotide
  Target: LAMA2; (-) strand; PAM type: NRG; PAM sequence: AAG
taggtattttattctctttg

SEQ ID NO: 65410 - DNA, 20 bp, Artificial Sequence
  Description of Artificial Sequence: Synthetic oligonucleotide
  Target: LAMA2; (-) strand; PAM type: NRG; PAM sequence: AGG
cccttgtaagttggattcct

SEQ ID NO: 65411 - DNA, 20 bp, Artificial Sequence
  Description of Artificial Sequence: Synthetic oligonucleotide
  Target: LAMA2; (-) strand; PAM type: NRG; PAM sequence: TAG
tcccttgtaagttggattcc

SEQ ID NO: 65412 - DNA, 20 bp, Artificial Sequence
  Description of Artificial Sequence: Synthetic oligonucleotide
  Target: LAMA2; (-) strand; PAM type: NRG; PAM sequence: TGG
ccttcacatcccttgtaagt

SEQ ID NO: 65413 - DNA, 20 bp, Artificial Sequence
  Description of Artificial Sequence: Synthetic oligonucleotide
  Target: LAMA2; (-) strand; PAM type: NRG; PAM sequence: AAG
aggtccttcacatcccttgt

SEQ ID NO: 65414 - DNA, 20 bp, Artificial Sequence
  Description of Artificial Sequence: Synthetic oligonucleotide
  Target: LAMA2; (-) strand; PAM type: NRG; PAM sequence: AGG
gtttgtagttctccttgaag

SEQ ID NO: 65415 - DNA, 20 bp, Artificial Sequence
  Description of Artificial Sequence: Synthetic oligonucleotide
  Target: LAMA2; (-) strand; PAM type: NRG; PAM sequence: GAG
ggtttgtagttctccttgaa

SEQ ID NO: 65416 - DNA, 20 bp, Artificial Sequence
  Description of Artificial Sequence: Synthetic oligonucleotide
  Target: LAMA2; (-) strand; PAM type: NRG; PAM sequence: AAG
gtggtttgtagttctccttg

SEQ ID NO: 65417 - DNA, 20 bp, Artificial Sequence
  Description of Artificial Sequence: Synthetic oligonucleotide
  Target: LAMA2; (-) strand; PAM type: NRG; PAM sequence: TAG
tttccttgagcagtggtttg

SEQ ID NO: 65418 - DNA, 20 bp, Artificial Sequence
  Description of Artificial Sequence: Synthetic oligonucleotide
  Target: LAMA2; (-) strand; PAM type: NRG; PAM sequence: TGG
tcttttatttccttgagcag

SEQ ID NO: 65419 - DNA, 20 bp, Artificial Sequence
  Description of Artificial Sequence: Synthetic oligonucleotide
  Target: LAMA2; (-) strand; PAM type: NRG; PAM sequence: CAG
tcctcttttatttccttgag

SEQ ID NO: 65420 - DNA, 20 bp, Artificial Sequence
  Description of Artificial Sequence: Synthetic oligonucleotide
  Target: LAMA2; (-) strand; PAM type: NRG; PAM sequence: GAG
gtctcctcttttatttcctt

SEQ ID NO: 65421 - DNA, 20 bp, Artificial Sequence
  Description of Artificial Sequence: Synthetic oligonucleotide
  Target: LAMA2; (-) strand; PAM type: NRG; PAM sequence: TGG
attcttcctacccatgagca

SEQ ID NO: 65422 - DNA, 20 bp, Artificial Sequence
  Description of Artificial Sequence: Synthetic oligonucleotide
  Target: LAMA2; (-) strand; PAM type: NRG; PAM sequence: GAG
tattgattcttcctacccat

SEQ ID NO: 65423 - DNA, 20 bp, Artificial Sequence
  Description of Artificial Sequence: Synthetic oligonucleotide
  Target: LAMA2; (-) strand; PAM type: NRG; PAM sequence: TGG
gtaaattaccttgggcagta

SEQ ID NO: 65424 - DNA, 20 bp, Artificial Sequence
  Description of Artificial Sequence: Synthetic oligonucleotide
  Target: LAMA2; (-) strand; PAM type: NRG; PAM sequence: CAG
aatctgtaaattaccttggg

SEQ ID NO: 65425 - DNA, 20 bp, Artificial Sequence
  Description of Artificial Sequence: Synthetic oligonucleotide
  Target: LAMA2; (-) strand; PAM type: NRG; PAM sequence: GGG
ttgaatctgtaaattacctt

SEQ ID NO: 65426 - DNA, 20 bp, Artificial Sequence
  Description of Artificial Sequence: Synthetic oligonucleotide
  Target: LAMA2; (-) strand; PAM type: NRG; PAM sequence: TGG
attgaatctgtaaattacct

SEQ ID NO: 65427 - DNA, 20 bp, Artificial Sequence
  Description of Artificial Sequence: Synthetic oligonucleotide
  Target: LAMA2; (-) strand; PAM type: NRG; PAM sequence: TGG
cattggtagcttgatgggga

SEQ ID NO: 65428 - DNA, 20 bp, Artificial Sequence
  Description of Artificial Sequence: Synthetic oligonucleotide
  Target: LAMA2; (-) strand; PAM type: NRG; PAM sequence: GGG
aagtcattggtagcttgatg

SEQ ID NO: 65429 - DNA, 20 bp, Artificial Sequence
  Description of Artificial Sequence: Synthetic oligonucleotide
  Target: LAMA2; (-) strand; PAM type: NRG; PAM sequence: GGG
aaagtcattggtagcttgat

SEQ ID NO: 65430 - DNA, 20 bp, Artificial Sequence
  Description of Artificial Sequence: Synthetic oligonucleotide
  Target: LAMA2; (-) strand; PAM type: NRG; PAM sequence: TGG
gaaagtcattggtagcttga

SEQ ID NO: 65431 - DNA, 20 bp, Artificial Sequence
  Description of Artificial Sequence: Synthetic oligonucleotide
  Target: LAMA2; (-) strand; PAM type: NRG; PAM sequence: TAG
tctgtgaagaaagtcattgg

SEQ ID NO: 65432 - DNA, 20 bp, Artificial Sequence
  Description of Artificial Sequence: Synthetic oligonucleotide
  Target: LAMA2; (-) strand; PAM type: NRG; PAM sequence: TGG
aattctgtgaagaaagtcat

SEQ ID NO: 65433 - DNA, 20 bp, Artificial Sequence
  Description of Artificial Sequence: Synthetic oligonucleotide
  Target: LAMA2; (-) strand; PAM type: NRG; PAM sequence: AAG
tttttccaattctgtgaaga

SEQ ID NO: 65434 - DNA, 20 bp, Artificial Sequence
  Description of Artificial Sequence: Synthetic oligonucleotide
  Target: LAMA2; (-) strand; PAM type: NRG; PAM sequence: AAG
tagttttttccaattctgtg

SEQ ID NO: 65435 - DNA, 20 bp, Artificial Sequence
  Description of Artificial Sequence: Synthetic oligonucleotide
  Target: LAMA2; (-) strand; PAM type: NRG; PAM sequence: TAG
gttccatatgaactttaaag

SEQ ID NO: 65436 - DNA, 20 bp, Artificial Sequence
  Description of Artificial Sequence: Synthetic oligonucleotide
  Target: LAMA2; (-) strand; PAM type: NRG; PAM sequence: AAG
ttggttccatatgaacttta

SEQ ID NO: 65437 - DNA, 20 bp, Artificial Sequence
  Description of Artificial Sequence: Synthetic oligonucleotide
  Target: LAMA2; (-) strand; PAM type: NRG; PAM sequence: TGG
tggcaatgcaggctcttttt

SEQ ID NO: 65438 - DNA, 20 bp, Artificial Sequence
  Description of Artificial Sequence: Synthetic oligonucleotide
  Target: LAMA2; (-) strand; PAM type: NRG; PAM sequence: AGG
taggattgacttggcaatgc

SEQ ID NO: 65439 - DNA, 20 bp, Artificial Sequence
  Description of Artificial Sequence: Synthetic oligonucleotide
  Target: LAMA2; (-) strand; PAM type: NRG; PAM sequence: CAG
ttaggattgacttggcaatg

SEQ ID NO: 65440 - DNA, 20 bp, Artificial Sequence
  Description of Artificial Sequence: Synthetic oligonucleotide
  Target: LAMA2; (-) strand; PAM type: NRG; PAM sequence: TGG
cttttggcttaggattgact

SEQ ID NO: 65441 - DNA, 20 bp, Artificial Sequence
  Description of Artificial Sequence: Synthetic oligonucleotide
  Target: LAMA2; (-) strand; PAM type: NRG; PAM sequence: AGG
cagctttgttcttttggctt

SEQ ID NO: 65442 - DNA, 20 bp, Artificial Sequence
  Description of Artificial Sequence: Synthetic oligonucleotide
  Target: LAMA2; (-) strand; PAM type: NRG; PAM sequence: TAG
ccagctttgttcttttggct

SEQ ID NO: 65443 - DNA, 20 bp, Artificial Sequence
  Description of Artificial Sequence: Synthetic oligonucleotide
  Target: LAMA2; (-) strand; PAM type: NRG; PAM sequence: TGG
tgcctccagctttgttcttt

SEQ ID NO: 65444 - DNA, 20 bp, Artificial Sequence
  Description of Artificial Sequence: Synthetic oligonucleotide
  Target: LAMA2; (-) strand; PAM type: NRG; PAM sequence: CAG
gtcaggtagtgtgatgcctc

SEQ ID NO: 65445 - DNA, 20 bp, Artificial Sequence
  Description of Artificial Sequence: Synthetic oligonucleotide
  Target: LAMA2; (-) strand; PAM type: NRG; PAM sequence: TAG
tagtatagtttgaagtcagg

SEQ ID NO: 65446 - DNA, 20 bp, Artificial Sequence
  Description of Artificial Sequence: Synthetic oligonucleotide
  Target: LAMA2; (-) strand; PAM type: NRG; PAM sequence: AGG
ttgtagtatagtttgaagtc

SEQ ID NO: 65447 - DNA, 20 bp, Artificial Sequence
  Description of Artificial Sequence: Synthetic oligonucleotide
  Target: LAMA2; (-) strand; PAM type: NRG; PAM sequence: CAG
cttgtagtatagtttgaagt

SEQ ID NO: 65448 - DNA, 20 bp, Artificial Sequence
  Description of Artificial Sequence: Synthetic oligonucleotide
  Target: LAMA2; (-) strand; PAM type: NRG; PAM sequence: AAG
tagccttgtagtatagtttg

SEQ ID NO: 65449 - DNA, 20 bp, Artificial Sequence
  Description of Artificial Sequence: Synthetic oligonucleotide
  Target: LAMA2; (-) strand; PAM type: NRG; PAM sequence: TAG
gttactgtagccttgtagta

SEQ ID NO: 65450 - DNA, 20 bp, Artificial Sequence
  Description of Artificial Sequence: Synthetic oligonucleotide
  Target: LAMA2; (-) strand; PAM type: NRG; PAM sequence: TAG
ttttggttactgtagccttg

SEQ ID NO: 65451 - DNA, 20 bp, Artificial Sequence
  Description of Artificial Sequence: Synthetic oligonucleotide
  Target: LAMA2; (-) strand; PAM type: NRG; PAM sequence: TAG
ccatgctgttttggttactg

SEQ ID NO: 65452 - DNA, 20 bp, Artificial Sequence
  Description of Artificial Sequence: Synthetic oligonucleotide
  Target: LAMA2; (-) strand; PAM type: NRG; PAM sequence: TGG
gtaccagtaccatgctgttt

SEQ ID NO: 65453 - DNA, 20 bp, Artificial Sequence
  Description of Artificial Sequence: Synthetic oligonucleotide
  Target: LAMA2; (-) strand; PAM type: NRG; PAM sequence: CAG
ctatatctctgtttttgtac

SEQ ID NO: 65454 - DNA, 20 bp, Artificial Sequence
  Description of Artificial Sequence: Synthetic oligonucleotide
  Target: LAMA2; (-) strand; PAM type: NRG; PAM sequence: GGG
atatgcggcattatttctga

SEQ ID NO: 65455 - DNA, 20 bp, Artificial Sequence
  Description of Artificial Sequence: Synthetic oligonucleotide
  Target: LAMA2; (-) strand; PAM type: NRG; PAM sequence: AGG
gatatgcggcattatttctg

SEQ ID NO: 65456 - DNA, 20 bp, Artificial Sequence
  Description of Artificial Sequence: Synthetic oligonucleotide
  Target: LAMA2; (-) strand; PAM type: NRG; PAM sequence: GAG
agatatgcggcattatttct

SEQ ID NO: 65457 - DNA, 20 bp, Artificial Sequence
  Description of Artificial Sequence: Synthetic oligonucleotide
  Target: LAMA2; (-) strand; PAM type: NRG; PAM sequence: CGG
atcagatagttgtagatatg

SEQ ID NO: 65458 - DNA, 20 bp, Artificial Sequence
  Description of Artificial Sequence: Synthetic oligonucleotide
  Target: LAMA2; (-) strand; PAM type: NRG; PAM sequence: TAG
tgtcaaagatcagatagttg

SEQ ID NO: 65459 - DNA, 20 bp, Artificial Sequence
  Description of Artificial Sequence: Synthetic oligonucleotide
  Target: LAMA2; (-) strand; PAM type: NRG; PAM sequence: TAG
caggtttgtcaaagatcaga

SEQ ID NO: 65460 - DNA, 20 bp, Artificial Sequence
  Description of Artificial Sequence: Synthetic oligonucleotide
  Target: LAMA2; (-) strand; PAM type: NRG; PAM sequence: CAG
ttctcaggtttgtcaaagat

SEQ ID NO: 65461 - DNA, 20 bp, Artificial Sequence
  Description of Artificial Sequence: Synthetic oligonucleotide
  Target: LAMA2; (-) strand; PAM type: NRG; PAM sequence: AAG
tgtttttctcaggtttgtca

SEQ ID NO: 65462 - DNA, 20 bp, Artificial Sequence
  Description of Artificial Sequence: Synthetic oligonucleotide
  Target: LAMA2; (-) strand; PAM type: NRG; PAM sequence: AGG
ccccattgcttgtttttctc

SEQ ID NO: 65463 - DNA, 20 bp, Artificial Sequence
  Description of Artificial Sequence: Synthetic oligonucleotide
  Target: LAMA2; (-) strand; PAM type: NRG; PAM sequence: CAG
tccccattgcttgtttttct

SEQ ID NO: 65464 - DNA, 20 bp, Artificial Sequence
  Description of Artificial Sequence: Synthetic oligonucleotide
  Target: LAMA2; (-) strand; PAM type: NRG; PAM sequence: GGG
ccagcaccatttattaaata

SEQ ID NO: 65465 - DNA, 20 bp, Artificial Sequence
  Description of Artificial Sequence: Synthetic oligonucleotide
  Target: LAMA2; (-) strand; PAM type: NRG; PAM sequence: AGG
cccagcaccatttattaaat

SEQ ID NO: 65466 - DNA, 20 bp, Artificial Sequence
  Description of Artificial Sequence: Synthetic oligonucleotide
  Target: LAMA2; (-) strand; PAM type: NRG; PAM sequence: TAG
tcccagcaccatttattaaa

SEQ ID NO: 65467 - DNA, 20 bp, Artificial Sequence
  Description of Artificial Sequence: Synthetic oligonucleotide
  Target: LAMA2; (-) strand; PAM type: NRG; PAM sequence: CAG
atatggctagccagttttcc

SEQ ID NO: 65468 - DNA, 20 bp, Artificial Sequence
  Description of Artificial Sequence: Synthetic oligonucleotide
  Target: LAMA2; (-) strand; PAM type: NRG; PAM sequence: CAG
gctttctacatatggctagc

SEQ ID NO: 65469 - DNA, 20 bp, Artificial Sequence
  Description of Artificial Sequence: Synthetic oligonucleotide
  Target: LAMA2; (-) strand; PAM type: NRG; PAM sequence: TAG
ttcagctttctacatatggc

SEQ ID NO: 65470 - DNA, 20 bp, Artificial Sequence
  Description of Artificial Sequence: Synthetic oligonucleotide
  Target: LAMA2; (-) strand; PAM type: NRG; PAM sequence: TGG
cagtttcagctttctacata

SEQ ID NO: 65471 - DNA, 20 bp, Artificial Sequence
  Description of Artificial Sequence: Synthetic oligonucleotide
  Target: LAMA2; (-) strand; PAM type: NRG; PAM sequence: CAG
gtaaggaagggatccagttt

SEQ ID NO: 65472 - DNA, 20 bp, Artificial Sequence
  Description of Artificial Sequence: Synthetic oligonucleotide
  Target: LAMA2; (-) strand; PAM type: NRG; PAM sequence: CAG
taaggtgtaaggaagggatc

SEQ ID NO: 65473 - DNA, 20 bp, Artificial Sequence
  Description of Artificial Sequence: Synthetic oligonucleotide
  Target: LAMA2; (-) strand; PAM type: NRG; PAM sequence: GGG
tttgtataaggtgtaaggaa

SEQ ID NO: 65474 - DNA, 20 bp, Artificial Sequence
  Description of Artificial Sequence: Synthetic oligonucleotide
  Target: LAMA2; (-) strand; PAM type: NRG; PAM sequence: AGG
ttttgtataaggtgtaagga

SEQ ID NO: 65475 - DNA, 20 bp, Artificial Sequence
  Description of Artificial Sequence: Synthetic oligonucleotide
  Target: LAMA2; (-) strand; PAM type: NRG; PAM sequence: AAG
tttttgtataaggtgtaagg

SEQ ID NO: 65476 - DNA, 20 bp, Artificial Sequence
  Description of Artificial Sequence: Synthetic oligonucleotide
  Target: LAMA2; (-) strand; PAM type: NRG; PAM sequence: AGG
tgatttttgtataaggtgta

SEQ ID NO: 65477 - DNA, 20 bp, Artificial Sequence
  Description of Artificial Sequence: Synthetic oligonucleotide
  Target: LAMA2; (-) strand; PAM type: NRG; PAM sequence: AAG
ttgatttttgtataaggtgt

SEQ ID NO: 65478 - DNA, 20 bp, Artificial Sequence
  Description of Artificial Sequence: Synthetic oligonucleotide
  Target: LAMA2; (-) strand; PAM type: NRG; PAM sequence: AGG
cttgaattgatttttgtata

SEQ ID NO: 65479 - DNA, 20 bp, Artificial Sequence
  Description of Artificial Sequence: Synthetic oligonucleotide
  Target: LAMA2; (-) strand; PAM type: NRG; PAM sequence: AAG
tcttgaattgatttttgtat

SEQ ID NO: 65480 - DNA, 20 bp, Artificial Sequence
  Description of Artificial Sequence: Synthetic oligonucleotide
  Target: LAMA2; (-) strand; PAM type: NRG; PAM sequence: AGG
tctagggtttttatggtttt

SEQ ID NO: 65481 - DNA, 20 bp, Artificial Sequence
  Description of Artificial Sequence: Synthetic oligonucleotide
  Target: LAMA2; (-) strand; PAM type: NRG; PAM sequence: TAG
ttctagggtttttatggttt

SEQ ID NO: 65482 - DNA, 20 bp, Artificial Sequence
  Description of Artificial Sequence: Synthetic oligonucleotide
  Target: LAMA2; (-) strand; PAM type: NRG; PAM sequence: TGG
gttttcttctagggttttta

SEQ ID NO: 65483 - DNA, 20 bp, Artificial Sequence
  Description of Artificial Sequence: Synthetic oligonucleotide
  Target: LAMA2; (-) strand; PAM type: NRG; PAM sequence: GGG
aatgcctaggttttcttcta

SEQ ID NO: 65484 - DNA, 20 bp, Artificial Sequence
  Description of Artificial Sequence: Synthetic oligonucleotide
  Target: LAMA2; (-) strand; PAM type: NRG; PAM sequence: AGG
taatgcctaggttttcttct

SEQ ID NO: 65485 - DNA, 20 bp, Artificial Sequence
  Description of Artificial Sequence: Synthetic oligonucleotide
  Target: LAMA2; (-) strand; PAM type: NRG; PAM sequence: TAG
gtaatgcctaggttttcttc

SEQ ID NO: 65486 - DNA, 20 bp, Artificial Sequence
  Description of Artificial Sequence: Synthetic oligonucleotide
  Target: LAMA2; (-) strand; PAM type: NRG; PAM sequence: AGG
tgtcctgaatggtaatgcct

SEQ ID NO: 65487 - DNA, 20 bp, Artificial Sequence
  Description of Artificial Sequence: Synthetic oligonucleotide
  Target: LAMA2; (-) strand; PAM type: NRG; PAM sequence: TAG
atgtcctgaatggtaatgcc

SEQ ID NO: 65488 - DNA, 20 bp, Artificial Sequence
  Description of Artificial Sequence: Synthetic oligonucleotide
  Target: LAMA2; (-) strand; PAM type: NRG; PAM sequence: TGG
gcccacgcctatgtcctgaa

SEQ ID NO: 65489 - DNA, 20 bp, Artificial Sequence
  Description of Artificial Sequence: Synthetic oligonucleotide
  Target: LAMA2; (-) strand; PAM type: NRG; PAM sequence: AAG
cttttggtgttttggacatg

SEQ ID NO: 65490 - DNA, 20 bp, Artificial Sequence
  Description of Artificial Sequence: Synthetic oligonucleotide
  Target: LAMA2; (-) strand; PAM type: NRG; PAM sequence: TGG
tgccattgcttttggtgttt

SEQ ID NO: 65491 - DNA, 20 bp, Artificial Sequence
  Description of Artificial Sequence: Synthetic oligonucleotide
  Target: LAMA2; (-) strand; PAM type: NRG; PAM sequence: TGG
tcttttgttgccattgcttt

SEQ ID NO: 65492 - DNA, 20 bp, Artificial Sequence
  Description of Artificial Sequence: Synthetic oligonucleotide
  Target: LAMA2; (-) strand; PAM type: NRG; PAM sequence: TAG
cagaagctctttagtttaat

SEQ ID NO: 65493 - DNA, 20 bp, Artificial Sequence
  Description of Artificial Sequence: Synthetic oligonucleotide
  Target: LAMA2; (-) strand; PAM type: NRG; PAM sequence: TAG
tttgctgtgcagaagctctt

SEQ ID NO: 65494 - DNA, 20 bp, Artificial Sequence
  Description of Artificial Sequence: Synthetic oligonucleotide
  Target: LAMA2; (-) strand; PAM type: NRG; PAM sequence: AAG
tagtttcttttgctgtgcag

SEQ ID NO: 65495 - DNA, 20 bp, Artificial Sequence
  Description of Artificial Sequence: Synthetic oligonucleotide
  Target: LAMA2; (-) strand; PAM type: NRG; PAM sequence: CAG
tggtagtttcttttgctgtg

SEQ ID NO: 65496 - DNA, 20 bp, Artificial Sequence
  Description of Artificial Sequence: Synthetic oligonucleotide
  Target: LAMA2; (-) strand; PAM type: NRG; PAM sequence: TAG
ttgcctgttcactctgatgg

SEQ ID NO: 65497 - DNA, 20 bp, Artificial Sequence
  Description of Artificial Sequence: Synthetic oligonucleotide
  Target: LAMA2; (-) strand; PAM type: NRG; PAM sequence: TGG
aggttgcctgttcactctga

SEQ ID NO: 65498 - DNA, 20 bp, Artificial Sequence
  Description of Artificial Sequence: Synthetic oligonucleotide
  Target: LAMA2; (-) strand; PAM type: NRG; PAM sequence: AGG
aaaattttctcccatgttgt

SEQ ID NO: 65499 - DNA, 20 bp, Artificial Sequence
  Description of Artificial Sequence: Synthetic oligonucleotide
  Target: LAMA2; (-) strand; PAM type: NRG; PAM sequence: TAG
aaaaattttctcccatgttg

SEQ ID NO: 65500 - DNA, 20 bp, Artificial Sequence
  Description of Artificial Sequence: Synthetic oligonucleotide
  Target: LAMA2; (-) strand; PAM type: NRG; PAM sequence: AGG
tagccctttgtcagatgagt

SEQ ID NO: 65501 - DNA, 20 bp, Artificial Sequence
  Description of Artificial Sequence: Synthetic oligonucleotide
  Target: LAMA2; (-) strand; PAM type: NRG; PAM sequence: TAG
ttagccctttgtcagatgag

SEQ ID NO: 65502 - DNA, 20 bp, Artificial Sequence
  Description of Artificial Sequence: Synthetic oligonucleotide
  Target: LAMA2; (-) strand; PAM type: NRG; PAM sequence: GAG
atattagccctttgtcagat

SEQ ID NO: 65503 - DNA, 20 bp, Artificial Sequence
  Description of Artificial Sequence: Synthetic oligonucleotide
  Target: LAMA2; (-) strand; PAM type: NRG; PAM sequence: CAG
tctggatattagccctttgt

SEQ ID NO: 65504 - DNA, 20 bp, Artificial Sequence
  Description of Artificial Sequence: Synthetic oligonucleotide
  Target: LAMA2; (-) strand; PAM type: NRG; PAM sequence: TAG
tcattgtagattctggatat

SEQ ID NO: 65505 - DNA, 20 bp, Artificial Sequence
  Description of Artificial Sequence: Synthetic oligonucleotide
  Target: LAMA2; (-) strand; PAM type: NRG; PAM sequence: TGG
tttgagttcattgtagattc

SEQ ID NO: 65506 - DNA, 20 bp, Artificial Sequence
  Description of Artificial Sequence: Synthetic oligonucleotide
  Target: LAMA2; (-) strand; PAM type: NRG; PAM sequence: TAG
aaatttgtttgagttcattg

SEQ ID NO: 65507 - DNA, 20 bp, Artificial Sequence
  Description of Artificial Sequence: Synthetic oligonucleotide
  Target: LAMA2; (-) strand; PAM type: NRG; PAM sequence: GAG
tttttcttgtaaatttgttt

SEQ ID NO: 65508 - DNA, 20 bp, Artificial Sequence
  Description of Artificial Sequence: Synthetic oligonucleotide
  Target: LAMA2; (-) strand; PAM type: NRG; PAM sequence: GGG
ccttcgcccactttttgatg

SEQ ID NO: 65509 - DNA, 20 bp, Artificial Sequence
  Description of Artificial Sequence: Synthetic oligonucleotide
  Target: LAMA2; (-) strand; PAM type: NRG; PAM sequence: GGG
tccttcgcccactttttgat

SEQ ID NO: 65510 - DNA, 20 bp, Artificial Sequence
  Description of Artificial Sequence: Synthetic oligonucleotide
  Target: LAMA2; (-) strand; PAM type: NRG; PAM sequence: TGG
gtccttcgcccactttttga

SEQ ID NO: 65511 - DNA, 20 bp, Artificial Sequence
  Description of Artificial Sequence: Synthetic oligonucleotide
  Target: LAMA2; (-) strand; PAM type: NRG; PAM sequence: AAG
cataaatgtcttcttttgag

SEQ ID NO: 65512 - DNA, 20 bp, Artificial Sequence
  Description of Artificial Sequence: Synthetic oligonucleotide
  Target: LAMA2; (-) strand; PAM type: NRG; PAM sequence: GAG
ctgcataaatgtcttctttt

SEQ ID NO: 65513 - DNA, 20 bp, Artificial Sequence
  Description of Artificial Sequence: Synthetic oligonucleotide
  Target: LAMA2; (-) strand; PAM type: NRG; PAM sequence: TGG
gcatttcttcatgtgttttt

SEQ ID NO: 65514 - DNA, 20 bp, Artificial Sequence
  Description of Artificial Sequence: Synthetic oligonucleotide
  Target: LAMA2; (-) strand; PAM type: NRG; PAM sequence: GAG
ctctgatggccagtgatgat

SEQ ID NO: 65515 - DNA, 20 bp, Artificial Sequence
  Description of Artificial Sequence: Synthetic oligonucleotide
  Target: LAMA2; (-) strand; PAM type: NRG; PAM sequence: CAG
atttgcatttctctgatggc

SEQ ID NO: 65516 - DNA, 20 bp, Artificial Sequence
  Description of Artificial Sequence: Synthetic oligonucleotide
  Target: LAMA2; (-) strand; PAM type: NRG; PAM sequence: TGG
tttgatttgcatttctctga

SEQ ID NO: 65517 - DNA, 20 bp, Artificial Sequence
  Description of Artificial Sequence: Synthetic oligonucleotide
  Target: LAMA2; (-) strand; PAM type: NRG; PAM sequence: TGG
tgtgagatgatatctcatag

SEQ ID NO: 65518 - DNA, 20 bp, Artificial Sequence
  Description of Artificial Sequence: Synthetic oligonucleotide
  Target: LAMA2; (-) strand; PAM type: NRG; PAM sequence: TAG
tggtgtgagatgatatctca

SEQ ID NO: 65519 - DNA, 20 bp, Artificial Sequence
  Description of Artificial Sequence: Synthetic oligonucleotide
  Target: LAMA2; (-) strand; PAM type: NRG; PAM sequence: GAG
attgccattctaactggtgt

SEQ ID NO: 65520 - DNA, 20 bp, Artificial Sequence
  Description of Artificial Sequence: Synthetic oligonucleotide
  Target: LAMA2; (-) strand; PAM type: NRG; PAM sequence: TGG
ttaatgattgccattctaac

SEQ ID NO: 65521 - DNA, 20 bp, Artificial Sequence
  Description of Artificial Sequence: Synthetic oligonucleotide
  Target: LAMA2; (-) strand; PAM type: NRG; PAM sequence: CAG
ctatttctccacatcctctc

SEQ ID NO: 65522 - DNA, 20 bp, Artificial Sequence
  Description of Artificial Sequence: Synthetic oligonucleotide
  Target: LAMA2; (-) strand; PAM type: NRG; PAM sequence: AAG
cagtcccaccaacagtgtaa

SEQ ID NO: 65523 - DNA, 20 bp, Artificial Sequence
  Description of Artificial Sequence: Synthetic oligonucleotide
  Target: LAMA2; (-) strand; PAM type: NRG; PAM sequence: CAG
ctagtttacagtcccaccaa

SEQ ID NO: 65524 - DNA, 20 bp, Artificial Sequence
  Description of Artificial Sequence: Synthetic oligonucleotide
  Target: LAMA2; (-) strand; PAM type: NRG; PAM sequence: CAG
acaatggttgaactagttta

SEQ ID NO: 65525 - DNA, 20 bp, Artificial Sequence
  Description of Artificial Sequence: Synthetic oligonucleotide
  Target: LAMA2; (-) strand; PAM type: NRG; PAM sequence: TAG
gacttccacaatggttgaac

SEQ ID NO: 65526 - DNA, 20 bp, Artificial Sequence
  Description of Artificial Sequence: Synthetic oligonucleotide
  Target: LAMA2; (-) strand; PAM type: NRG; PAM sequence: TGG
cgccacactgacttccacaa

SEQ ID NO: 65527 - DNA, 20 bp, Artificial Sequence
  Description of Artificial Sequence: Synthetic oligonucleotide
  Target: LAMA2; (-) strand; PAM type: NRG; PAM sequence: AGG
tttctagttctagatccctg

SEQ ID NO: 65528 - DNA, 20 bp, Artificial Sequence
  Description of Artificial Sequence: Synthetic oligonucleotide
  Target: LAMA2; (-) strand; PAM type: NRG; PAM sequence: GAG
atttctagttctagatccct

SEQ ID NO: 65529 - DNA, 20 bp, Artificial Sequence
  Description of Artificial Sequence: Synthetic oligonucleotide
  Target: LAMA2; (-) strand; PAM type: NRG; PAM sequence: TAG
tcaaatggtatttctagttc

SEQ ID NO: 65530 - DNA, 20 bp, Artificial Sequence
  Description of Artificial Sequence: Synthetic oligonucleotide
  Target: LAMA2; (-) strand; PAM type: NRG; PAM sequence: TAG
gctgggtcaaatggtatttc

SEQ ID NO: 65531 - DNA, 20 bp, Artificial Sequence
  Description of Artificial Sequence: Synthetic oligonucleotide
  Target: LAMA2; (-) strand; PAM type: NRG; PAM sequence: TGG
aatgggatggctgggtcaaa

SEQ ID NO: 65532 - DNA, 20 bp, Artificial Sequence
  Description of Artificial Sequence: Synthetic oligonucleotide
  Target: LAMA2; (-) strand; PAM type: NRG; PAM sequence: GGG
tacccagtaatgggatggct

SEQ ID NO: 65533 - DNA, 20 bp, Artificial Sequence
  Description of Artificial Sequence: Synthetic oligonucleotide
  Target: LAMA2; (-) strand; PAM type: NRG; PAM sequence: TGG
atacccagtaatgggatggc

SEQ ID NO: 65534 - DNA, 20 bp, Artificial Sequence
  Description of Artificial Sequence: Synthetic oligonucleotide
  Target: LAMA2; (-) strand; PAM type: NRG; PAM sequence: TGG
gtatatacccagtaatggga

SEQ ID NO: 65535 - DNA, 20 bp, Artificial Sequence
  Description of Artificial Sequence: Synthetic oligonucleotide
  Target: LAMA2; (-) strand; PAM type: NRG; PAM sequence: GGG
ttgggtatatacccagtaat

SEQ ID NO: 65536 - DNA, 20 bp, Artificial Sequence
  Description of Artificial Sequence: Synthetic oligonucleotide
  Target: LAMA2; (-) strand; PAM type: NRG; PAM sequence: TGG
tttgggtatatacccagtaa

SEQ ID NO: 65537 - DNA, 20 bp, Artificial Sequence
  Description of Artificial Sequence: Synthetic oligonucleotide
  Target: LAMA2; (-) strand; PAM type: NRG; PAM sequence: CAG
tactcatttgggtatatacc

SEQ ID NO: 65538 - DNA, 20 bp, Artificial Sequence
  Description of Artificial Sequence: Synthetic oligonucleotide
  Target: LAMA2; (-) strand; PAM type: NRG; PAM sequence: GGG
agcatgatttatactcattt

SEQ ID NO: 65539 - DNA, 20 bp, Artificial Sequence
  Description of Artificial Sequence: Synthetic oligonucleotide
  Target: LAMA2; (-) strand; PAM type: NRG; PAM sequence: TGG
cagcatgatttatactcatt

SEQ ID NO: 65540 - DNA, 20 bp, Artificial Sequence
  Description of Artificial Sequence: Synthetic oligonucleotide
  Target: LAMA2; (-) strand; PAM type: NRG; PAM sequence: CAG
gtgtgcatgtgtctttatag

SEQ ID NO: 65541 - DNA, 20 bp, Artificial Sequence
  Description of Artificial Sequence: Synthetic oligonucleotide
  Target: LAMA2; (-) strand; PAM type: NRG; PAM sequence: TAG
tacgtgtgcatgtgtcttta

SEQ ID NO: 65542 - DNA, 20 bp, Artificial Sequence
  Description of Artificial Sequence: Synthetic oligonucleotide
  Target: LAMA2; (-) strand; PAM type: NRG; PAM sequence: TAG
caagtctttgctattgtgaa

SEQ ID NO: 65543 - DNA, 20 bp, Artificial Sequence
  Description of Artificial Sequence: Synthetic oligonucleotide
  Target: LAMA2; (-) strand; PAM type: NRG; PAM sequence: AAG
tggacatttgggttggttcc

SEQ ID NO: 65544 - DNA, 20 bp, Artificial Sequence
  Description of Artificial Sequence: Synthetic oligonucleotide
  Target: LAMA2; (-) strand; PAM type: NRG; PAM sequence: TGG
tcattgttggacatttgggt

SEQ ID NO: 65545 - DNA, 20 bp, Artificial Sequence
  Description of Artificial Sequence: Synthetic oligonucleotide
  Target: LAMA2; (-) strand; PAM type: NRG; PAM sequence: GGG
tctatcattgttggacattt

SEQ ID NO: 65546 - DNA, 20 bp, Artificial Sequence
  Description of Artificial Sequence: Synthetic oligonucleotide
  Target: LAMA2; (-) strand; PAM type: NRG; PAM sequence: TGG
gtctatcattgttggacatt

SEQ ID NO: 65547 - DNA, 20 bp, Artificial Sequence
  Description of Artificial Sequence: Synthetic oligonucleotide
  Target: LAMA2; (-) strand; PAM type: NRG; PAM sequence: TGG
ttaatccagtctatcattgt

SEQ ID NO: 65548 - DNA, 20 bp, Artificial Sequence
  Description of Artificial Sequence: Synthetic oligonucleotide
  Target: LAMA2; (-) strand; PAM type: NRG; PAM sequence: CAG
tgtgccacattttcttaatc

SEQ ID NO: 65549 - DNA, 20 bp, Artificial Sequence
  Description of Artificial Sequence: Synthetic oligonucleotide
  Target: LAMA2; (-) strand; PAM type: NRG; PAM sequence: TGG
tatggctgcatagtattcca

SEQ ID NO: 65550 - DNA, 20 bp, Artificial Sequence
  Description of Artificial Sequence: Synthetic oligonucleotide
  Target: LAMA2; (-) strand; PAM type: NRG; PAM sequence: TAG
catcattttttatggctgca

SEQ ID NO: 65551 - DNA, 20 bp, Artificial Sequence
  Description of Artificial Sequence: Synthetic oligonucleotide
  Target: LAMA2; (-) strand; PAM type: NRG; PAM sequence: TGG
tatgaactcatcatttttta

SEQ ID NO: 65552 - DNA, 20 bp, Artificial Sequence
  Description of Artificial Sequence: Synthetic oligonucleotide
  Target: LAMA2; (-) strand; PAM type: NRG; PAM sequence: AGG
tttcatccatgtccctacaa

SEQ ID NO: 65553 - DNA, 20 bp, Artificial Sequence
  Description of Artificial Sequence: Synthetic oligonucleotide
  Target: LAMA2; (-) strand; PAM type: NRG; PAM sequence: AAG
atttcatccatgtccctaca

SEQ ID NO: 65554 - DNA, 20 bp, Artificial Sequence
  Description of Artificial Sequence: Synthetic oligonucleotide
  Target: LAMA2; (-) strand; PAM type: NRG; PAM sequence: TGG
cgatagtttactgagaatga

SEQ ID NO: 65555 - DNA, 20 bp, Artificial Sequence
  Description of Artificial Sequence: Synthetic oligonucleotide
  Target: LAMA2; (-) strand; PAM type: NRG; PAM sequence: GAG
tgttcttgcgatagtttact

SEQ ID NO: 65556 - DNA, 20 bp, Artificial Sequence
  Description of Artificial Sequence: Synthetic oligonucleotide
  Target: LAMA2; (-) strand; PAM type: NRG; PAM sequence: TAG
ttggttttttgttcttgcga

SEQ ID NO: 65557 - DNA, 20 bp, Artificial Sequence
  Description of Artificial Sequence: Synthetic oligonucleotide
  Target: LAMA2; (-) strand; PAM type: NRG; PAM sequence: TGG
gagtgagaatatgcggtgtt

SEQ ID NO: 65558 - DNA, 20 bp, Artificial Sequence
  Description of Artificial Sequence: Synthetic oligonucleotide
  Target: LAMA2; (-) strand; PAM type: NRG; PAM sequence: CGG
cacctatgagtgagaatatg

SEQ ID NO: 65559 - DNA, 20 bp, Artificial Sequence
  Description of Artificial Sequence: Synthetic oligonucleotide
  Target: LAMA2; (-) strand; PAM type: NRG; PAM sequence: GAG
ttcaattcccacctatgagt

SEQ ID NO: 65560 - DNA, 20 bp, Artificial Sequence
  Description of Artificial Sequence: Synthetic oligonucleotide
  Target: LAMA2; (-) strand; PAM type: NRG; PAM sequence: GAG
attgttcaattcccacctat

SEQ ID NO: 65561 - DNA, 20 bp, Artificial Sequence
  Description of Artificial Sequence: Synthetic oligonucleotide
  Target: LAMA2; (-) strand; PAM type: NRG; PAM sequence: GAG
cgaccccaccacagtcccca

SEQ ID NO: 65562 - DNA, 20 bp, Artificial Sequence
  Description of Artificial Sequence: Synthetic oligonucleotide
  Target: LAMA2; (-) strand; PAM type: NRG; PAM sequence: CAG
cccgaccccaccacagtccc

SEQ ID NO: 65563 - DNA, 20 bp, Artificial Sequence
  Description of Artificial Sequence: Synthetic oligonucleotide
  Target: LAMA2; (-) strand; PAM type: NRG; PAM sequence: CAG
cccctcccccgaccccacca

SEQ ID NO: 65564 - DNA, 20 bp, Artificial Sequence
  Description of Artificial Sequence: Synthetic oligonucleotide
  Target: LAMA2; (-) strand; PAM type: NRG; PAM sequence: AGG
ctaatgtgtcatctagcatt

SEQ ID NO: 65565 - DNA, 20 bp, Artificial Sequence
  Description of Artificial Sequence: Synthetic oligonucleotide
  Target: LAMA2; (-) strand; PAM type: NRG; PAM sequence: TAG
actaatgtgtcatctagcat

SEQ ID NO: 65566 - DNA, 20 bp, Artificial Sequence
  Description of Artificial Sequence: Synthetic oligonucleotide
  Target: LAMA2; (-) strand; PAM type: NRG; PAM sequence: TAG
gcacccactaatgtgtcatc

SEQ ID NO: 65567 - DNA, 20 bp, Artificial Sequence
  Description of Artificial Sequence: Synthetic oligonucleotide
  Target: LAMA2; (-) strand; PAM type: NRG; PAM sequence: TGG
tatgtatacatgtgccatgc

SEQ ID NO: 65568 - DNA, 20 bp, Artificial Sequence
  Description of Artificial Sequence: Synthetic oligonucleotide
  Target: LAMA2; (-) strand; PAM type: NRG; PAM sequence: TAG
catgtgcacattgtgcaggt

SEQ ID NO: 65569 - DNA, 20 bp, Artificial Sequence
  Description of Artificial Sequence: Synthetic oligonucleotide
  Target: LAMA2; (-) strand; PAM type: NRG; PAM sequence: AGG
ggtacatgtgcacattgtgc

SEQ ID NO: 65570 - DNA, 20 bp, Artificial Sequence
  Description of Artificial Sequence: Synthetic oligonucleotide
  Target: LAMA2; (-) strand; PAM type: NRG; PAM sequence: CAG
gggtacatgtgcacattgtg

SEQ ID NO: 65571 - DNA, 20 bp, Artificial Sequence
  Description of Artificial Sequence: Synthetic oligonucleotide
  Target: LAMA2; (-) strand; PAM type: NRG; PAM sequence: GGG
ttattatactctaagtttta

SEQ ID NO: 65572 - DNA, 20 bp, Artificial Sequence
  Description of Artificial Sequence: Synthetic oligonucleotide
  Target: LAMA2; (-) strand; PAM type: NRG; PAM sequence: AGG
attattatactctaagtttt

SEQ ID NO: 65573 - DNA, 20 bp, Artificial Sequence
  Description of Artificial Sequence: Synthetic oligonucleotide
  Target: LAMA2; (-) strand; PAM type: NRG; PAM sequence: TAG
tattattatactctaagttt

SEQ ID NO: 65574 - DNA, 20 bp, Artificial Sequence
  Description of Artificial Sequence: Synthetic oligonucleotide
  Target: LAMA2; (-) strand; PAM type: NRG; PAM sequence: AAG
tttttttattattatactct

SEQ ID NO: 65575 - DNA, 20 bp, Artificial Sequence
  Description of Artificial Sequence: Synthetic oligonucleotide
  Target: LAMA2; (-) strand; PAM type: NRG; PAM sequence: AGG
tgatatatgattttatttta

SEQ ID NO: 65576 - DNA, 20 bp, Artificial Sequence
  Description of Artificial Sequence: Synthetic oligonucleotide
  Target: LAMA2; (-) strand; PAM type: NRG; PAM sequence: AAG
gtgatatatgattttatttt

SEQ ID NO: 65577 - DNA, 20 bp, Artificial Sequence
  Description of Artificial Sequence: Synthetic oligonucleotide
  Target: LAMA2; (-) strand; PAM type: NRG; PAM sequence: TAG
tataggtgcaagtcagtaag

SEQ ID NO: 65578 - DNA, 20 bp, Artificial Sequence
  Description of Artificial Sequence: Synthetic oligonucleotide
  Target: LAMA2; (-) strand; PAM type: NRG; PAM sequence: AAG
acatataggtgcaagtcagt

SEQ ID NO: 65579 - DNA, 20 bp, Artificial Sequence
  Description of Artificial Sequence: Synthetic oligonucleotide
  Target: LAMA2; (-) strand; PAM type: NRG; PAM sequence: CAG
aagtacatataggtgcaagt

SEQ ID NO: 65580 - DNA, 20 bp, Artificial Sequence
  Description of Artificial Sequence: Synthetic oligonucleotide
  Target: LAMA2; (-) strand; PAM type: NRG; PAM sequence: AAG
ccagaagtacatataggtgc

SEQ ID NO: 65581 - DNA, 20 bp, Artificial Sequence
  Description of Artificial Sequence: Synthetic oligonucleotide
  Target: LAMA2; (-) strand; PAM type: NRG; PAM sequence: AGG
aatttcccagaagtacatat

SEQ ID NO: 65582 - DNA, 20 bp, Artificial Sequence
  Description of Artificial Sequence: Synthetic oligonucleotide
  Target: LAMA2; (-) strand; PAM type: NRG; PAM sequence: TAG
aaatttcccagaagtacata

SEQ ID NO: 65583 - DNA, 20 bp, Artificial Sequence
  Description of Artificial Sequence: Synthetic oligonucleotide
  Target: LAMA2; (-) strand; PAM type: NRG; PAM sequence: AAG
atgctggctaaatttcccag

SEQ ID NO: 65584 - DNA, 20 bp, Artificial Sequence
  Description of Artificial Sequence: Synthetic oligonucleotide
  Target: LAMA2; (-) strand; PAM type: NRG; PAM sequence: CAG
tacatgctggctaaatttcc

SEQ ID NO: 65585 - DNA, 20 bp, Artificial Sequence
  Description of Artificial Sequence: Synthetic oligonucleotide
  Target: LAMA2; (-) strand; PAM type: NRG; PAM sequence: TGG
tgtattgtggaaatacatgc

SEQ ID NO: 65586 - DNA, 20 bp, Artificial Sequence
  Description of Artificial Sequence: Synthetic oligonucleotide
  Target: LAMA2; (-) strand; PAM type: NRG; PAM sequence: TGG
caaaaactatccctgtattg

SEQ ID NO: 65587 - DNA, 20 bp, Artificial Sequence
  Description of Artificial Sequence: Synthetic oligonucleotide
  Target: LAMA2; (-) strand; PAM type: NRG; PAM sequence: CAG
tgtgatcatttagcagtcca

SEQ ID NO: 65588 - DNA, 20 bp, Artificial Sequence
  Description of Artificial Sequence: Synthetic oligonucleotide
  Target: LAMA2; (-) strand; PAM type: NRG; PAM sequence: CAG
attaggctgtgatcatttag

SEQ ID NO: 65589 - DNA, 20 bp, Artificial Sequence
  Description of Artificial Sequence: Synthetic oligonucleotide
  Target: LAMA2; (-) strand; PAM type: NRG; PAM sequence: TAG
tacattaggctgtgatcatt

SEQ ID NO: 65590 - DNA, 20 bp, Artificial Sequence
  Description of Artificial Sequence: Synthetic oligonucleotide
  Target: LAMA2; (-) strand; PAM type: NRG; PAM sequence: AGG
tactgagaaggcaatacatt

SEQ ID NO: 65591 - DNA, 20 bp, Artificial Sequence
  Description of Artificial Sequence: Synthetic oligonucleotide
  Target: LAMA2; (-) strand; PAM type: NRG; PAM sequence: TAG
ttactgagaaggcaatacat

SEQ ID NO: 65592 - DNA, 20 bp, Artificial Sequence
  Description of Artificial Sequence: Synthetic oligonucleotide
  Target: LAMA2; (-) strand; PAM type: NRG; PAM sequence: AGG
tcaacgtgtgtttactgaga

SEQ ID NO: 65593 - DNA, 20 bp, Artificial Sequence
  Description of Artificial Sequence: Synthetic oligonucleotide
  Target: LAMA2; (-) strand; PAM type: NRG; PAM sequence: AAG
gtcaacgtgtgtttactgag

SEQ ID NO: 65594 - DNA, 20 bp, Artificial Sequence
  Description of Artificial Sequence: Synthetic oligonucleotide
  Target: LAMA2; (-) strand; PAM type: NRG; PAM sequence: GAG
taagtcaacgtgtgtttact

SEQ ID NO: 65595 - DNA, 20 bp, Artificial Sequence
  Description of Artificial Sequence: Synthetic oligonucleotide
  Target: LAMA2; (-) strand; PAM type: NRG; PAM sequence: AAG
acaatttacccaactgattt

SEQ ID NO: 65596 - DNA, 20 bp, Artificial Sequence
  Description of Artificial Sequence: Synthetic oligonucleotide
  Target: LAMA2; (-) strand; PAM type: NRG; PAM sequence: GAG
taaagtcaaagtaaggaatt

SEQ ID NO: 65597 - DNA, 20 bp, Artificial Sequence
  Description of Artificial Sequence: Synthetic oligonucleotide
  Target: LAMA2; (-) strand; PAM type: NRG; PAM sequence: AGG
tgcaaactaaagtcaaagta

SEQ ID NO: 65598 - DNA, 20 bp, Artificial Sequence
  Description of Artificial Sequence: Synthetic oligonucleotide
  Target: LAMA2; (-) strand; PAM type: NRG; PAM sequence: AAG
ttgcaaactaaagtcaaagt

SEQ ID NO: 65599 - DNA, 20 bp, Artificial Sequence
  Description of Artificial Sequence: Synthetic oligonucleotide
  Target: LAMA2; (-) strand; PAM type: NRG; PAM sequence: AAG
taatttgcaaactaaagtca

SEQ ID NO: 65600 - DNA, 20 bp, Artificial Sequence
  Description of Artificial Sequence: Synthetic oligonucleotide
  Target: LAMA2; (-) strand; PAM type: NRG; PAM sequence: AAG
tattcttaatttgcaaacta

SEQ ID NO: 65601 - DNA, 20 bp, Artificial Sequence
  Description of Artificial Sequence: Synthetic oligonucleotide
  Target: LAMA2; (-) strand; PAM type: NRG; PAM sequence: AAG
ataaggcctgaaaataagaa

SEQ ID NO: 65602 - DNA, 20 bp, Artificial Sequence
  Description of Artificial Sequence: Synthetic oligonucleotide
  Target: LAMA2; (-) strand; PAM type: NRG; PAM sequence: AAG
tataaataaggcctgaaaat

SEQ ID NO: 65603 - DNA, 20 bp, Artificial Sequence
  Description of Artificial Sequence: Synthetic oligonucleotide
  Target: LAMA2; (-) strand; PAM type: NRG; PAM sequence: AGG
agcattaggaattataaata

SEQ ID NO: 65604 - DNA, 20 bp, Artificial Sequence
  Description of Artificial Sequence: Synthetic oligonucleotide
  Target: LAMA2; (-) strand; PAM type: NRG; PAM sequence: AAG
tagcattaggaattataaat

SEQ ID NO: 65605 - DNA, 20 bp, Artificial Sequence
  Description of Artificial Sequence: Synthetic oligonucleotide
  Target: LAMA2; (-) strand; PAM type: NRG; PAM sequence: AGG
acataatagtgtatagcatt

SEQ ID NO: 65606 - DNA, 20 bp, Artificial Sequence
  Description of Artificial Sequence: Synthetic oligonucleotide
  Target: LAMA2; (-) strand; PAM type: NRG; PAM sequence: TAG
aacataatagtgtatagcat

SEQ ID NO: 65607 - DNA, 20 bp, Artificial Sequence
  Description of Artificial Sequence: Synthetic oligonucleotide
  Target: LAMA2; (-) strand; PAM type: NRG; PAM sequence: TAG
agctgtaacataatagtgta

SEQ ID NO: 65608 - DNA, 20 bp, Artificial Sequence
  Description of Artificial Sequence: Synthetic oligonucleotide
  Target: LAMA2; (-) strand; PAM type: NRG; PAM sequence: TAG
aagtgcaagctgtaacataa

SEQ ID NO: 65609 - DNA, 20 bp, Artificial Sequence
  Description of Artificial Sequence: Synthetic oligonucleotide
  Target: LAMA2; (-) strand; PAM type: NRG; PAM sequence: AAG
aagtgtcaaaatacaagtgc

SEQ ID NO: 65610 - DNA, 20 bp, Artificial Sequence
  Description of Artificial Sequence: Synthetic oligonucleotide
  Target: LAMA2; (-) strand; PAM type: NRG; PAM sequence: AAG
attagaaagtgtcaaaatac

SEQ ID NO: 65611 - DNA, 20 bp, Artificial Sequence
  Description of Artificial Sequence: Synthetic oligonucleotide
  Target: LAMA2; (-) strand; PAM type: NRG; PAM sequence: AAG
ataatttgacaataattaga

SEQ ID NO: 65612 - DNA, 20 bp, Artificial Sequence
  Description of Artificial Sequence: Synthetic oligonucleotide
  Target: LAMA2; (-) strand; PAM type: NRG; PAM sequence: TAG
atttataatttgacaataat

SEQ ID NO: 65613 - DNA, 20 bp, Artificial Sequence
  Description of Artificial Sequence: Synthetic oligonucleotide
  Target: LAMA2; (-) strand; PAM type: NRG; PAM sequence: TAG
atcaaggatatattaattag

SEQ ID NO: 65614 - DNA, 20 bp, Artificial Sequence
  Description of Artificial Sequence: Synthetic oligonucleotide
  Target: LAMA2; (-) strand; PAM type: NRG; PAM sequence: TAG
agaatcaaggatatattaat

SEQ ID NO: 65615 - DNA, 20 bp, Artificial Sequence
  Description of Artificial Sequence: Synthetic oligonucleotide
  Target: LAMA2; (-) strand; PAM type: NRG; PAM sequence: AGG
tagaatattatgaagaatca

SEQ ID NO: 65616 - DNA, 20 bp, Artificial Sequence
  Description of Artificial Sequence: Synthetic oligonucleotide
  Target: LAMA2; (-) strand; PAM type: NRG; PAM sequence: AAG
atagaatattatgaagaatc

SEQ ID NO: 65617 - DNA, 20 bp, Artificial Sequence
  Description of Artificial Sequence: Synthetic oligonucleotide
  Target: LAMA2; (-) strand; PAM type: NRG; PAM sequence: AAG
ctggttaatagaatattatg

SEQ ID NO: 65618 - DNA, 20 bp, Artificial Sequence
  Description of Artificial Sequence: Synthetic oligonucleotide
  Target: LAMA2; (-) strand; PAM type: NRG; PAM sequence: TAG
aggtgttaagtgctggttaa

SEQ ID NO: 65619 - DNA, 20 bp, Artificial Sequence
  Description of Artificial Sequence: Synthetic oligonucleotide
  Target: LAMA2; (-) strand; PAM type: NRG; PAM sequence: TGG
atgaaaaaggtgttaagtgc

SEQ ID NO: 65620 - DNA, 20 bp, Artificial Sequence
  Description of Artificial Sequence: Synthetic oligonucleotide
  Target: LAMA2; (-) strand; PAM type: NRG; PAM sequence: AAG
tgttttatgaaaaaggtgtt

SEQ ID NO: 65621 - DNA, 20 bp, Artificial Sequence
  Description of Artificial Sequence: Synthetic oligonucleotide
  Target: LAMA2; (-) strand; PAM type: NRG; PAM sequence: AGG
tgaaaagtgttttatgaaaa

SEQ ID NO: 65622 - DNA, 20 bp, Artificial Sequence
  Description of Artificial Sequence: Synthetic oligonucleotide
  Target: LAMA2; (-) strand; PAM type: NRG; PAM sequence: AAG
ctgaaaagtgttttatgaaa

SEQ ID NO: 65623 - DNA, 20 bp, Artificial Sequence
  Description of Artificial Sequence: Synthetic oligonucleotide
  Target: LAMA2; (-) strand; PAM type: NRG; PAM sequence: AAG
aactatatatatatcctgaa

SEQ ID NO: 65624 - DNA, 20 bp, Artificial Sequence
  Description of Artificial Sequence: Synthetic oligonucleotide
  Target: LAMA2; (-) strand; PAM type: NRG; PAM sequence: AAG
caagatgaaatagtgtcaac

SEQ ID NO: 65625 - DNA, 20 bp, Artificial Sequence
  Description of Artificial Sequence: Synthetic oligonucleotide
  Target: LAMA2; (-) strand; PAM type: NRG; PAM sequence: TAG
aaattgaaatcaagatgaaa

SEQ ID NO: 65626 - DNA, 20 bp, Artificial Sequence
  Description of Artificial Sequence: Synthetic oligonucleotide
  Target: LAMA2; (-) strand; PAM type: NRG; PAM sequence: AAG
ggattgcataaattgaaatc

SEQ ID NO: 65627 - DNA, 20 bp, Artificial Sequence
  Description of Artificial Sequence: Synthetic oligonucleotide
  Target: LAMA2; (-) strand; PAM type: NRG; PAM sequence: CGG
tgaggttttacttgaaaatt

SEQ ID NO: 65628 - DNA, 20 bp, Artificial Sequence
  Description of Artificial Sequence: Synthetic oligonucleotide
  Target: LAMA2; (-) strand; PAM type: NRG; PAM sequence: AGG
atgaatctgataattccatg

SEQ ID NO: 65629 - DNA, 20 bp, Artificial Sequence
  Description of Artificial Sequence: Synthetic oligonucleotide
  Target: LAMA2; (-) strand; PAM type: NRG; PAM sequence: GAG
gatgaatctgataattccat

SEQ ID NO: 65630 - DNA, 20 bp, Artificial Sequence
  Description of Artificial Sequence: Synthetic oligonucleotide
  Target: LAMA2; (-) strand; PAM type: NRG; PAM sequence: TAG
gttataaaagttttgaaagt

SEQ ID NO: 65631 - DNA, 20 bp, Artificial Sequence
  Description of Artificial Sequence: Synthetic oligonucleotide
  Target: LAMA2; (-) strand; PAM type: NRG; PAM sequence: AAG
atgtgttataaaagttttga

SEQ ID NO: 65632 - DNA, 20 bp, Artificial Sequence
  Description of Artificial Sequence: Synthetic oligonucleotide
  Target: LAMA2; (-) strand; PAM type: NRG; PAM sequence: AAG
actcagcagatgtgttataa

SEQ ID NO: 65633 - DNA, 20 bp, Artificial Sequence
  Description of Artificial Sequence: Synthetic oligonucleotide
  Target: LAMA2; (-) strand; PAM type: NRG; PAM sequence: CAG
atgaatgtctgaaaactcag

SEQ ID NO: 65634 - DNA, 20 bp, Artificial Sequence
  Description of Artificial Sequence: Synthetic oligonucleotide
  Target: LAMA2; (-) strand; PAM type: NRG; PAM sequence: CAG
agaatgaatgtctgaaaact

SEQ ID NO: 65635 - DNA, 20 bp, Artificial Sequence
  Description of Artificial Sequence: Synthetic oligonucleotide
  Target: LAMA2; (-) strand; PAM type: NRG; PAM sequence: CAG
tccagcatgttttttctttc

SEQ ID NO: 65636 - DNA, 20 bp, Artificial Sequence
  Description of Artificial Sequence: Synthetic oligonucleotide
  Target: LAMA2; (-) strand; PAM type: NRG; PAM sequence: CAG
gtaagtaaaatttttctttc

SEQ ID NO: 65637 - DNA, 20 bp, Artificial Sequence
  Description of Artificial Sequence: Synthetic oligonucleotide
  Target: LAMA2; (-) strand; PAM type: NRG; PAM sequence: AAG
aaaataaaacacattagagt

SEQ ID NO: 65638 - DNA, 20 bp, Artificial Sequence
  Description of Artificial Sequence: Synthetic oligonucleotide
  Target: LAMA2; (-) strand; PAM type: NRG; PAM sequence: GAG
atttaaaataaaacacatta

SEQ ID NO: 65639 - DNA, 20 bp, Artificial Sequence
  Description of Artificial Sequence: Synthetic oligonucleotide
  Target: LAMA2; (-) strand; PAM type: NRG; PAM sequence: TAG
ttatttaaaataaaacacat

SEQ ID NO: 65640 - DNA, 20 bp, Artificial Sequence
  Description of Artificial Sequence: Synthetic oligonucleotide
  Target: LAMA2; (-) strand; PAM type: NRG; PAM sequence: AGG
acagtaaaatcataacctat

SEQ ID NO: 65641 - DNA, 20 bp, Artificial Sequence
  Description of Artificial Sequence: Synthetic oligonucleotide
  Target: LAMA2; (-) strand; PAM type: NRG; PAM sequence: TAG
gacagtaaaatcataaccta

SEQ ID NO: 65642 - DNA, 20 bp, Artificial Sequence
  Description of Artificial Sequence: Synthetic oligonucleotide
  Target: LAMA2; (-) strand; PAM type: NRG; PAM sequence: CAG
tttcagaaaaaaaaagagga

SEQ ID NO: 65643 - DNA, 20 bp, Artificial Sequence
  Description of Artificial Sequence: Synthetic oligonucleotide
  Target: LAMA2; (-) strand; PAM type: NRG; PAM sequence: AGG
tgtttttcagaaaaaaaaag

SEQ ID NO: 65644 - DNA, 20 bp, Artificial Sequence
  Description of Artificial Sequence: Synthetic oligonucleotide
  Target: LAMA2; (-) strand; PAM type: NRG; PAM sequence: GAG
atgtttttcagaaaaaaaaa

SEQ ID NO: 65645 - DNA, 20 bp, Artificial Sequence
  Description of Artificial Sequence: Synthetic oligonucleotide
  Target: LAMA2; (-) strand; PAM type: NRG; PAM sequence: AAG
taatgtttttcagaaaaaaa

SEQ ID NO: 65646 - DNA, 20 bp, Artificial Sequence
  Description of Artificial Sequence: Synthetic oligonucleotide
  Target: LAMA2; (-) strand; PAM type: NRG; PAM sequence: CAG
aaagaaaccttaatgttttt

SEQ ID NO: 65647 - DNA, 20 bp, Artificial Sequence
  Description of Artificial Sequence: Synthetic oligonucleotide
  Target: LAMA2; (-) strand; PAM type: NRG; PAM sequence: AAG
ttaactaataagctttggga

SEQ ID NO: 65648 - DNA, 20 bp, Artificial Sequence
  Description of Artificial Sequence: Synthetic oligonucleotide
  Target: LAMA2; (-) strand; PAM type: NRG; PAM sequence: GGG
acaattaactaataagcttt

SEQ ID NO: 65649 - DNA, 20 bp, Artificial Sequence
  Description of Artificial Sequence: Synthetic oligonucleotide
  Target: LAMA2; (-) strand; PAM type: NRG; PAM sequence: TGG
gacaattaactaataagctt

SEQ ID NO: 65650 - DNA, 20 bp, Artificial Sequence
  Description of Artificial Sequence: Synthetic oligonucleotide
  Target: LAMA2; (-) strand; PAM type: NRG; PAM sequence: AAG
aaaactgacaattaactaat

SEQ ID NO: 65651 - DNA, 20 bp, Artificial Sequence
  Description of Artificial Sequence: Synthetic oligonucleotide
  Target: LAMA2; (-) strand; PAM type: NRG; PAM sequence: GGG
ttatataggtctaacctcat

SEQ ID NO: 65652 - DNA, 20 bp, Artificial Sequence
  Description of Artificial Sequence: Synthetic oligonucleotide
  Target: LAMA2; (-) strand; PAM type: NRG; PAM sequence: TGG
cttatataggtctaacctca

SEQ ID NO: 65653 - DNA, 20 bp, Artificial Sequence
  Description of Artificial Sequence: Synthetic oligonucleotide
  Target: LAMA2; (-) strand; PAM type: NRG; PAM sequence: AGG
taaaaattactgccttatat

SEQ ID NO: 65654 - DNA, 20 bp, Artificial Sequence
  Description of Artificial Sequence: Synthetic oligonucleotide
  Target: LAMA2; (-) strand; PAM type: NRG; PAM sequence: TAG
ttaaaaattactgccttata

SEQ ID NO: 65655 - DNA, 20 bp, Artificial Sequence
  Description of Artificial Sequence: Synthetic oligonucleotide
  Target: LAMA2; (-) strand; PAM type: NRG; PAM sequence: GAG
aggaagggtgggaagagagg

SEQ ID NO: 65656 - DNA, 20 bp, Artificial Sequence
  Description of Artificial Sequence: Synthetic oligonucleotide
  Target: LAMA2; (-) strand; PAM type: NRG; PAM sequence: GGG
aaaggaagggtgggaagaga

SEQ ID NO: 65657 - DNA, 20 bp, Artificial Sequence
  Description of Artificial Sequence: Synthetic oligonucleotide
  Target: LAMA2; (-) strand; PAM type: NRG; PAM sequence: AGG
aaaaggaagggtgggaagag

SEQ ID NO: 65658 - DNA, 20 bp, Artificial Sequence
  Description of Artificial Sequence: Synthetic oligonucleotide
  Target: LAMA2; (-) strand; PAM type: NRG; PAM sequence: GAG
gaaaaggaagggtgggaaga

SEQ ID NO: 65659 - DNA, 20 bp, Artificial Sequence
  Description of Artificial Sequence: Synthetic oligonucleotide
  Target: LAMA2; (-) strand; PAM type: NRG; PAM sequence: GAG
aagaaaaggaagggtgggaa

SEQ ID NO: 65660 - DNA, 20 bp, Artificial Sequence
  Description of Artificial Sequence: Synthetic oligonucleotide
  Target: LAMA2; (-) strand; PAM type: NRG; PAM sequence: AAG
ggaagaaaaggaagggtggg

SEQ ID NO: 65661 - DNA, 20 bp, Artificial Sequence
  Description of Artificial Sequence: Synthetic oligonucleotide
  Target: LAMA2; (-) strand; PAM type: NRG; PAM sequence: GGG
tagggaagaaaaggaagggt

SEQ ID NO: 65662 - DNA, 20 bp, Artificial Sequence
  Description of Artificial Sequence: Synthetic oligonucleotide
  Target: LAMA2; (-) strand; PAM type: NRG; PAM sequence: TGG
atagggaagaaaaggaaggg

SEQ ID NO: 65663 - DNA, 20 bp, Artificial Sequence
  Description of Artificial Sequence: Synthetic oligonucleotide
  Target: LAMA2; (-) strand; PAM type: NRG; PAM sequence: GGG
gagatagggaagaaaaggaa

SEQ ID NO: 65664 - DNA, 20 bp, Artificial Sequence
  Description of Artificial Sequence: Synthetic oligonucleotide
  Target: LAMA2; (-) strand; PAM type: NRG; PAM sequence: AGG
ggagatagggaagaaaagga

SEQ ID NO: 65665 - DNA, 20 bp, Artificial Sequence
  Description of Artificial Sequence: Synthetic oligonucleotide
  Target: LAMA2; (-) strand; PAM type: NRG; PAM sequence: AAG
aggagatagggaagaaaagg

SEQ ID NO: 65666 - DNA, 20 bp, Artificial Sequence
  Description of Artificial Sequence: Synthetic oligonucleotide
  Target: LAMA2; (-) strand; PAM type: NRG; PAM sequence: AGG
taaaggagatagggaagaaa

SEQ ID NO: 65667 - DNA, 20 bp, Artificial Sequence
  Description of Artificial Sequence: Synthetic oligonucleotide
  Target: LAMA2; (-) strand; PAM type: NRG; PAM sequence: AAG
ataaaggagatagggaagaa

SEQ ID NO: 65668 - DNA, 20 bp, Artificial Sequence
  Description of Artificial Sequence: Synthetic oligonucleotide
  Target: LAMA2; (-) strand; PAM type: NRG; PAM sequence: AAG
agaaaataaaggagataggg

SEQ ID NO: 65669 - DNA, 20 bp, Artificial Sequence
  Description of Artificial Sequence: Synthetic oligonucleotide
  Target: LAMA2; (-) strand; PAM type: NRG; PAM sequence: GGG
ggaagaaaataaaggagata

SEQ ID NO: 65670 - DNA, 20 bp, Artificial Sequence
  Description of Artificial Sequence: Synthetic oligonucleotide
  Target: LAMA2; (-) strand; PAM type: NRG; PAM sequence: AGG
aggaagaaaataaaggagat

SEQ ID NO: 65671 - DNA, 20 bp, Artificial Sequence
  Description of Artificial Sequence: Synthetic oligonucleotide
  Target: LAMA2; (-) strand; PAM type: NRG; PAM sequence: TAG
aaggaagaaaataaaggaga

SEQ ID NO: 65672 - DNA, 20 bp, Artificial Sequence
  Description of Artificial Sequence: Synthetic oligonucleotide
  Target: LAMA2; (-) strand; PAM type: NRG; PAM sequence: GAG
gaagaaggaagaaaataaag

SEQ ID NO: 65673 - DNA, 20 bp, Artificial Sequence
  Description of Artificial Sequence: Synthetic oligonucleotide
  Target: LAMA2; (-) strand; PAM type: NRG; PAM sequence: AGG
aagaagaaggaagaaaataa

SEQ ID NO: 65674 - DNA, 20 bp, Artificial Sequence
  Description of Artificial Sequence: Synthetic oligonucleotide
  Target: LAMA2; (-) strand; PAM type: NRG; PAM sequence: AAG
aaagaagaaggaagaaaata

SEQ ID NO: 65675 - DNA, 20 bp, Artificial Sequence
  Description of Artificial Sequence: Synthetic oligonucleotide
  Target: LAMA2; (-) strand; PAM type: NRG; PAM sequence: AAG
aaaactaataaagaagaagg

SEQ ID NO: 65676 - DNA, 20 bp, Artificial Sequence
  Description of Artificial Sequence: Synthetic oligonucleotide
  Target: LAMA2; (-) strand; PAM type: NRG; PAM sequence: AGG
ttaaaaactaataaagaaga

SEQ ID NO: 65677 - DNA, 20 bp, Artificial Sequence
  Description of Artificial Sequence: Synthetic oligonucleotide
  Target: LAMA2; (-) strand; PAM type: NRG; PAM sequence: AAG
tttaaaaactaataaagaag

SEQ ID NO: 65678 - DNA, 20 bp, Artificial Sequence
  Description of Artificial Sequence: Synthetic oligonucleotide
  Target: LAMA2; (-) strand; PAM type: NRG; PAM sequence: AAG
atatttaaaaactaataaag

SEQ ID NO: 65679 - DNA, 20 bp, Artificial Sequence
  Description of Artificial Sequence: Synthetic oligonucleotide
  Target: LAMA2; (-) strand; PAM type: NRG; PAM sequence: AAG
tgcatatttaaaaactaata

SEQ ID NO: 65680 - DNA, 20 bp, Artificial Sequence
  Description of Artificial Sequence: Synthetic oligonucleotide
  Target: LAMA2; (-) strand; PAM type: NRG; PAM sequence: GAG
catcctttctcctataaaaa

SEQ ID NO: 65681 - DNA, 20 bp, Artificial Sequence
  Description of Artificial Sequence: Synthetic oligonucleotide
  Target: LAMA2; (-) strand; PAM type: NRG; PAM sequence: AAG
tccatcctttctcctataaa

SEQ ID NO: 65682 - DNA, 20 bp, Artificial Sequence
  Description of Artificial Sequence: Synthetic oligonucleotide
  Target: LAMA2; (-) strand; PAM type: NRG; PAM sequence: GAG
gtgagatattagagtggtca

SEQ ID NO: 65683 - DNA, 20 bp, Artificial Sequence
  Description of Artificial Sequence: Synthetic oligonucleotide
  Target: LAMA2; (-) strand; PAM type: NRG; PAM sequence: CAG
gggtgagatattagagtggt

SEQ ID NO: 65684 - DNA, 20 bp, Artificial Sequence
  Description of Artificial Sequence: Synthetic oligonucleotide
  Target: LAMA2; (-) strand; PAM type: NRG; PAM sequence: TGG
tctagggtgagatattagag

SEQ ID NO: 65685 - DNA, 20 bp, Artificial Sequence
  Description of Artificial Sequence: Synthetic oligonucleotide
  Target: LAMA2; (-) strand; PAM type: NRG; PAM sequence: GAG
atttctagggtgagatatta

SEQ ID NO: 65686 - DNA, 20 bp, Artificial Sequence
  Description of Artificial Sequence: Synthetic oligonucleotide
  Target: LAMA2; (-) strand; PAM type: NRG; PAM sequence: TAG
aaatttctagggtgagatat

SEQ ID NO: 65687 - DNA, 20 bp, Artificial Sequence
  Description of Artificial Sequence: Synthetic oligonucleotide
  Target: LAMA2; (-) strand; PAM type: NRG; PAM sequence: GAG
tttattaaaatttctagggt

SEQ ID NO: 65688 - DNA, 20 bp, Artificial Sequence
  Description of Artificial Sequence: Synthetic oligonucleotide
  Target: LAMA2; (-) strand; PAM type: NRG; PAM sequence: GGG
atcatttattaaaatttcta

SEQ ID NO: 65689 - DNA, 20 bp, Artificial Sequence
  Description of Artificial Sequence: Synthetic oligonucleotide
  Target: LAMA2; (-) strand; PAM type: NRG; PAM sequence: AGG
aatcatttattaaaatttct

SEQ ID NO: 65690 - DNA, 20 bp, Artificial Sequence
  Description of Artificial Sequence: Synthetic oligonucleotide
  Target: LAMA2; (-) strand; PAM type: NRG; PAM sequence: TAG
aaatcatttattaaaatttc

SEQ ID NO: 65691 - DNA, 20 bp, Artificial Sequence
  Description of Artificial Sequence: Synthetic oligonucleotide
  Target: LAMA2; (-) strand; PAM type: NRG; PAM sequence: TAG
aaaaagcctgatgagaatgt

SEQ ID NO: 65692 - DNA, 20 bp, Artificial Sequence
  Description of Artificial Sequence: Synthetic oligonucleotide
  Target: LAMA2; (-) strand; PAM type: NRG; PAM sequence: GAG
tttataataaaaagcctgat

SEQ ID NO: 65693 - DNA, 20 bp, Artificial Sequence
  Description of Artificial Sequence: Synthetic oligonucleotide
  Target: LAMA2; (-) strand; PAM type: NRG; PAM sequence: AAG
tgatattattttataataaa

SEQ ID NO: 65694 - DNA, 20 bp, Artificial Sequence
  Description of Artificial Sequence: Synthetic oligonucleotide
  Target: LAMA2; (-) strand; PAM type: NRG; PAM sequence: AGG
aagatatttttttaaaaagc

SEQ ID NO: 65695 - DNA, 20 bp, Artificial Sequence
  Description of Artificial Sequence: Synthetic oligonucleotide
  Target: LAMA2; (-) strand; PAM type: NRG; PAM sequence: CAG
caagatatttttttaaaaag

SEQ ID NO: 65696 - DNA, 20 bp, Artificial Sequence
  Description of Artificial Sequence: Synthetic oligonucleotide
  Target: LAMA2; (-) strand; PAM type: NRG; PAM sequence: AAG
tatcaagatatttttttaaa

SEQ ID NO: 65697 - DNA, 20 bp, Artificial Sequence
  Description of Artificial Sequence: Synthetic oligonucleotide
  Target: LAMA2; (-) strand; PAM type: NRG; PAM sequence: AAG
tttggtaaaatacaagtatc

SEQ ID NO: 65698 - DNA, 20 bp, Artificial Sequence
  Description of Artificial Sequence: Synthetic oligonucleotide
  Target: LAMA2; (-) strand; PAM type: NRG; PAM sequence: AAG
ccatgaatttggtaaaatac

SEQ ID NO: 65699 - DNA, 20 bp, Artificial Sequence
  Description of Artificial Sequence: Synthetic oligonucleotide
  Target: LAMA2; (-) strand; PAM type: NRG; PAM sequence: TGG
gttatctatacccatgaatt

SEQ ID NO: 65700 - DNA, 20 bp, Artificial Sequence
  Description of Artificial Sequence: Synthetic oligonucleotide
  Target: LAMA2; (-) strand; PAM type: NRG; PAM sequence: AAG
gaaagtaatgagaaatcaaa

SEQ ID NO: 65701 - DNA, 20 bp, Artificial Sequence
  Description of Artificial Sequence: Synthetic oligonucleotide
  Target: LAMA2; (-) strand; PAM type: NRG; PAM sequence: GAG
agaagatacttgaaagtaat

SEQ ID NO: 65702 - DNA, 20 bp, Artificial Sequence
  Description of Artificial Sequence: Synthetic oligonucleotide
  Target: LAMA2; (-) strand; PAM type: NRG; PAM sequence: AAG
tacatgaagaagatacttga

SEQ ID NO: 65703 - DNA, 20 bp, Artificial Sequence
  Description of Artificial Sequence: Synthetic oligonucleotide
  Target: LAMA2; (-) strand; PAM type: NRG; PAM sequence: AAG
gattaaaattttacatgaag

SEQ ID NO: 65704 - DNA, 20 bp, Artificial Sequence
  Description of Artificial Sequence: Synthetic oligonucleotide
  Target: LAMA2; (-) strand; PAM type: NRG; PAM sequence: AAG
tttgattaaaattttacatg

SEQ ID NO: 65705 - DNA, 20 bp, Artificial Sequence
  Description of Artificial Sequence: Synthetic oligonucleotide
  Target: LAMA2; (-) strand; PAM type: NRG; PAM sequence: GGG
aatttttatgtgttaagcat

SEQ ID NO: 65706 - DNA, 20 bp, Artificial Sequence
  Description of Artificial Sequence: Synthetic oligonucleotide
  Target: LAMA2; (-) strand; PAM type: NRG; PAM sequence: TGG
taatttttatgtgttaagca

SEQ ID NO: 65707 - DNA, 20 bp, Artificial Sequence
  Description of Artificial Sequence: Synthetic oligonucleotide
  Target: LAMA2; (-) strand; PAM type: NRG; PAM sequence: AAG
tttattaatttttatgtgtt

SEQ ID NO: 65708 - DNA, 20 bp, Artificial Sequence
  Description of Artificial Sequence: Synthetic oligonucleotide
  Target: LAMA2; (-) strand; PAM type: NRG; PAM sequence: TAG
ttcagtataaaataatgtga

SEQ ID NO: 65709 - DNA, 20 bp, Artificial Sequence
  Description of Artificial Sequence: Synthetic oligonucleotide
  Target: LAMA2; (-) strand; PAM type: NRG; PAM sequence: CAG
agaataattgaacaactttt

SEQ ID NO: 65710 - DNA, 20 bp, Artificial Sequence
  Description of Artificial Sequence: Synthetic oligonucleotide
  Target: LAMA2; (-) strand; PAM type: NRG; PAM sequence: TAG
tggattaatatatagaactt

SEQ ID NO: 65711 - DNA, 20 bp, Artificial Sequence
  Description of Artificial Sequence: Synthetic oligonucleotide
  Target: LAMA2; (-) strand; PAM type: NRG; PAM sequence: TAG
gacggctttggattaatata

SEQ ID NO: 65712 - DNA, 20 bp, Artificial Sequence
  Description of Artificial Sequence: Synthetic oligonucleotide
  Target: LAMA2; (-) strand; PAM type: NRG; PAM sequence: TGG
cccccaagtagagacggctt

SEQ ID NO: 65713 - DNA, 20 bp, Artificial Sequence
  Description of Artificial Sequence: Synthetic oligonucleotide
  Target: LAMA2; (-) strand; PAM type: NRG; PAM sequence: CGG
atttttcccccaagtagaga

SEQ ID NO: 65714 - DNA, 20 bp, Artificial Sequence
  Description of Artificial Sequence: Synthetic oligonucleotide
  Target: LAMA2; (-) strand; PAM type: NRG; PAM sequence: GAG
acacatttttcccccaagta

SEQ ID NO: 65715 - DNA, 20 bp, Artificial Sequence
  Description of Artificial Sequence: Synthetic oligonucleotide
  Target: LAMA2; (-) strand; PAM type: NRG; PAM sequence: TAG
acacacatttttcccccaag

SEQ ID NO: 65716 - DNA, 20 bp, Artificial Sequence
  Description of Artificial Sequence: Synthetic oligonucleotide
  Target: LAMA2; (-) strand; PAM type: NRG; PAM sequence: AAG
cacacacacatttttccccc

SEQ ID NO: 65717 - DNA, 20 bp, Artificial Sequence
  Description of Artificial Sequence: Synthetic oligonucleotide
  Target: LAMA2; (-) strand; PAM type: NRG; PAM sequence: TAG
cagtcatcctcatagataga

SEQ ID NO: 65718 - DNA, 20 bp, Artificial Sequence
  Description of Artificial Sequence: Synthetic oligonucleotide
  Target: LAMA2; (-) strand; PAM type: NRG; PAM sequence: TAG
aaggcagtcatcctcataga
